United States Patent Application Publication US 2025/0084491 A1 - sequence listing, part 10

SEQ ID NO: 175849 - DNA, 75 bp, synthetic construct
  source 1..75: mol_type = other DNA
atgcgcaatgaaatagccattaatcaccagatgcttcgtgctgcacagaacaaagcagtaatagccagatttatt

SEQ ID NO: 175850 - DNA, 75 bp, synthetic construct
  source 1..75: mol_type = other DNA
caagcccaacaggctatctgcacgttggcggcgcgcgtactgctctttactcctggctttttgcacgtaatcacg

SEQ ID NO: 175851 - DNA, 72 bp, synthetic construct
  source 1..72: mol_type = other DNA
atgagtatatttatctcatggcttgttctgattatttcggtggtctgcgccattgggattatgcgaattatt

SEQ ID NO: 175852 - DNA, 75 bp, synthetic construct
  source 1..75: mol_type = other DNA
ataaagcaccagcttgaagaggataaaaatgggagagcagttatcgattccctatccgggcagcccgtttacggg

SEQ ID NO: 175853 - DNA, 75 bp, synthetic construct
  source 1..75: mol_type = other DNA
gatcatatccatatgcttgtggagatcccgcccaaaatgagcgtatcaggctttatgggatatctgaaagggaaa

SEQ ID NO: 175854 - DNA, 75 bp, synthetic construct
  source 1..75: mol_type = other DNA
ggctttttcaaatgggtcagtgccagcgtggcttcaggaagctccagtgccggagtcactactgattcggacacg

SEQ ID NO: 175855 - DNA, 75 bp, synthetic construct
  source 1..75: mol_type = other DNA
tgctgccagtggtcgcatttgacacgcaggaagaggctatctcaatggctaatgacagtgattacggcctgacct

SEQ ID NO: 175856 - DNA, 75 bp, synthetic construct
  source 1..75: mol_type = other DNA
gcacgcaatggcagaaagaggatacgatcattctgtcgattttcctcgcctaaagagtgggagcagattgcaggc

SEQ ID NO: 175857 - DNA, 75 bp, synthetic construct
  source 1..75: mol_type = other DNA
agctgtacggggtcggaccggtatgcagtgaactcatattgccccgtcaacgtattaccactgtcagcaacagcg

SEQ ID NO: 175858 - DNA, 75 bp, synthetic construct
  source 1..75: mol_type = other DNA
caaagcagtaatagccagatttattggtgattccaaaatgtggcttgaagcaaataaagcgatgaaatcagcgat

SEQ ID NO: 175859 - DNA, 75 bp, synthetic construct
  source 1..75: mol_type = other DNA
ctgtctgggcatggttctgctggtctacctcttcttaagtgcggagatgaatttttatcaccgtcagatattgtc

SEQ ID NO: 175860 - DNA, 75 bp, synthetic construct
  source 1..75: mol_type = other DNA
aatcagcgttaccggcattggtcagtatgagctgctcggcgagtccattgatgatgccgctggtgaagcgtttga

SEQ ID NO: 175861 - DNA, 75 bp, synthetic construct
  source 1..75: mol_type = other DNA
ggtgcctgaactggcctcccgcgatcacgtgcgtaaaaccgtaccgttgatccaggcggcgctgaaagagtctgg

SEQ ID NO: 175862 - DNA, 75 bp, synthetic construct
  source 1..75: mol_type = other DNA
agccatctacaatcaagtaatagcgatgttgttgctgatgcagctataagtattgcagcgacagagatgaaaacc

SEQ ID NO: 175863 - DNA, 75 bp, synthetic construct
  source 1..75: mol_type = other DNA
ggcacaggaaagtgtaaataaaagcaagaaacttttttcaggggacacaacgtcagttgcactgcaagcaagtga

SEQ ID NO: 175864 - DNA, 75 bp, synthetic construct
  source 1..75: mol_type = other DNA
gtcttttggtatcctgttttactcaggcacaggaaagtgtaaataaaagcaagaaacttttttcaggggacacaa

SEQ ID NO: 175865 - DNA, 75 bp, synthetic construct
  source 1..75: mol_type = other DNA
cactgctgaactatctggtgcgtctgggctgggcccacggcgatcaggaaatcttcactcgtgaagagatgatta

SEQ ID NO: 175866 - DNA, 75 bp, synthetic construct
  source 1..75: mol_type = other DNA
cacatcgagcaggaaaatatcgatacccgcaacggcccgcagctggcggatctggttaaactgctgggtgaacgc

SEQ ID NO: 175867 - DNA, 75 bp, synthetic construct
  source 1..75: mol_type = other DNA
ggatgaacctgaatgggcatcacgtgccgcaaaggttgccgcgcgtatgcaggatctcacctcttttattgttaa

SEQ ID NO: 175868 - DNA, 75 bp, synthetic construct
  source 1..75: mol_type = other DNA
aattgcacgctgactacggcggcgtcgtgcctgaactggcctcccgcgatcacgtgcgcaaaaccgtaccgttga

SEQ ID NO: 175869 - DNA, 75 bp, synthetic construct
  source 1..75: mol_type = other DNA
gccaaccaattgtatagtcaggtgaaattgcacgctgactacggcggcgtcgtgcctgaactggcctcccgcgat

SEQ ID NO: 175870 - DNA, 75 bp, synthetic construct
  source 1..75: mol_type = other DNA
tatgagctgctcggtgagtccattgatgatgctgccggggaagcgtttgataaaaccgcgaagctgctggggctg

SEQ ID NO: 175871 - DNA, 75 bp, synthetic construct
  source 1..75: mol_type = other DNA
tggtctgaaggcgcagggacgttataacggtgaaccgctcacgggcaaaggtaaaatcggcggtatgctggcact

SEQ ID NO: 175872 - DNA, 75 bp, synthetic construct
  source 1..75: mol_type = other DNA
cggtaactcggtggcggcgcttttaggcaacagtaacggcaacctgaaactgttgatgaatgacgggctggtgag

SEQ ID NO: 175873 - DNA, 75 bp, synthetic construct
  source 1..75: mol_type = other DNA
ttgctggcactgatctcaccttccgaaggggaggctaatcagtgccggacaattttgtcgcagatgaagaagtga

SEQ ID NO: 175874 - DNA, 75 bp, synthetic construct
  source 1..75: mol_type = other DNA
tgcgattggcgacaatacctggactccatttagcgtcagtagccagccacaactaaaagcagtgccagtcaaaca

SEQ ID NO: 175875 - DNA, 75 bp, synthetic construct
  source 1..75: mol_type = other DNA
gtagattttcagactgtgaatatcaacgatatcaatggtagtaattatcgtaaagatgcaggatatacgttgtca

SEQ ID NO: 175876 - DNA, 75 bp, synthetic construct
  source 1..75: mol_type = other DNA
cgcgtagagtttgggaacgtggtgattaatgagattgatggtaacaactatcgtcgcaatgcagattacacgctg

SEQ ID NO: 175877 - DNA, 75 bp, synthetic construct
  source 1..75: mol_type = other DNA
ttcttggcaatccaccggatattcccgaagtcacgatggtgcatttgccacgcgtagaggcaacgctggccccgc

SEQ ID NO: 175878 - DNA, 75 bp, synthetic construct
  source 1..75: mol_type = other DNA
gattttggggatgtgctcatcaggcgtatagatggcagccagtatttgcagccagtaacttacaagctggactgc

SEQ ID NO: 175879 - DNA, 75 bp, synthetic construct
  source 1..75: mol_type = other DNA
ggcggcaaaatcgtcaatctgacgttgcgcgtgctggtggatggaccgccgccctgttcggtaaagggaagcgcg

SEQ ID NO: 175880 - DNA, 75 bp, synthetic construct
  source 1..75: mol_type = other DNA
aacggcgaaccactcatggggacgggtaaaattggcggtatgctagcgctgcgtggtgaagggacaccgtttccg

SEQ ID NO: 175881 - DNA, 75 bp, synthetic construct
  source 1..75: mol_type = other DNA
tggagatttttgttgatccgttaggcaagccgctgccgttcagcgaagttactggatcgaaagggaacgcggaca

SEQ ID NO: 175882 - DNA, 75 bp, synthetic construct
  source 1..75: mol_type = other DNA
ggcgtggcgcgcccgcagatttttgctttcgatactgagaacgcgttgattaatgttaccggcacggcaagtttt

SEQ ID NO: 175883 - DNA, 75 bp, synthetic construct
  source 1..75: mol_type = other DNA
ttagcaaaatcaatggcacgaattaccgcaccacgcagccgctttataccctgaactgtagtagcagggcttcag

SEQ ID NO: 175884 - DNA, 75 bp, synthetic construct
  source 1..75: mol_type = other DNA
atgcgattatgaaccgcctacagcaggttggtgacaagcctcgtccgaaaacgctgtttgaaccgggtgaaatgg

SEQ ID NO: 175885 - DNA, 75 bp, synthetic construct
  source 1..75: mol_type = other DNA
cgaacctaacccactggctgggaaatcctacgtaactgcgccacccaattcatctcctgccaggacagcgttgcc

SEQ ID NO: 175886 - DNA, 75 bp, synthetic construct
  source 1..75: mol_type = other DNA
gcgcagcaactcggacagaatgcggtgatttacatgccgaaaggttctgctcaggaacgcgttgacgccattctg

SEQ ID NO: 175887 - DNA, 75 bp, synthetic construct
  source 1..75: mol_type = other DNA
tctaccattaacaattctcctgatgcgaatacaagtcaatctttgccagaaagtaatttgtccgccgatgcactc

SEQ ID NO: 175888 - DNA, 75 bp, synthetic construct
  source 1..75: mol_type = other DNA
tcaaacaagaatgcatgcaacaaggcttgattgagacctttaatgagtcaactgattttaaacataaattatata

SEQ ID NO: 175889 - DNA, 75 bp, synthetic construct
  source 1..75: mol_type = other DNA
ctgaaagtctctgtttctatcttcggtcgtgcgaccccggtagagctggacttcagccaggttgaaaaagcctaa

SEQ ID NO: 175890 - DNA, 75 bp, synthetic construct
  source 1..75: mol_type = other DNA
ctgccgcgctactgctggccagtggctcgatcgtttcaccggtaatggcgggcggcaaaatcgtcaatttgacgt

SEQ ID NO: 175891 - DNA, 75 bp, synthetic construct
  source 1..75: mol_type = other DNA
caccacaattaatggtgaaacggtactgagtaccgggatcgatggcttcggcattcgcattcagaatgccgccga

SEQ ID NO: 175892 - DNA, 75 bp, synthetic construct
  source 1..75: mol_type = other DNA
agcgctgtgaaatttggcaatgtgataatcaacaggatcgatggtaccaattaccaacaggatgcgaaatacacc

SEQ ID NO: 175893 - DNA, 75 bp, synthetic construct
  source 1..75: mol_type = other DNA
gacgatctcgcaaacctttttggtgtgaagaaaattctcgtcaaagacgaatcaaaacgattcggtctgaacgcc

SEQ ID NO: 175894 - DNA, 75 bp, synthetic construct
  source 1..75: mol_type = other DNA
gtgtgctgggttatctggtcgacgtctacagcccgcaaaatctgcacagcattattgttgaacctgacaaagctg

SEQ ID NO: 175895 - DNA, 75 bp, synthetic construct
  source 1..75: mol_type = other DNA
gcggtgatttacatgccgaaaggttctgctcaggaacgcgttgacgccattctgaacctcggtgccgagtgcatc

SEQ ID NO: 175896 - DNA, 75 bp, synthetic construct
  source 1..75: mol_type = other DNA
gaatacaatcgagagttttatatttaaagataaatataccgcagaaaaaacaaaaaaagcctttttaagtaaagt

SEQ ID NO: 175897 - DNA, 75 bp, synthetic construct
  source 1..75: mol_type = other DNA
gataccccaccagagattcctcgtctccaattgttttctatagataataaatttagagttcaatgctcactgcag

SEQ ID NO: 175898 - DNA, 75 bp, synthetic construct
  source 1..75: mol_type = other DNA
taagttagttaatcgggttattgctttagcatccatcgtaattatgttctatctgcatttatctctcattgagaa

SEQ ID NO: 175899 - DNA, 75 bp, synthetic construct
  source 1..75: mol_type = other DNA
actaccctgaagacatgccttatggtgacggcattcagtatttccgtagtgaagacgggcaggatttttatgaat

SEQ ID NO: 175900 - DNA, 75 bp, synthetic construct
  source 1..75: mol_type = other DNA
aaaaaatatacacaaatatttcaggttgaaaaatatccttgctatatcaatactcttttggggtttaatatttag

SEQ ID NO: 175901 - DNA, 75 bp, synthetic construct
  source 1..75: mol_type = other DNA
ttaaaaaataagaaaaagatactgttcattatcttgtgtgtagcctgtgtttatttattcataggaacaagattg

SEQ ID NO: 175902 - DNA, 75 bp, synthetic construct
  source 1..75: mol_type = other DNA
ccaggtcgagtcttcaccgctgaatccggcgcaggcccgggcagtcgttaatggcgagcattctctgttagtgct

SEQ ID NO: 175903 - DNA, 75 bp, synthetic construct
  source 1..75: mol_type = other DNA
ggccgaagttgcaaattgactttatgaccattcacgccagcaaagggcaacaggcggattacgtcatcattgttg

SEQ ID NO: 175904 - DNA, 75 bp, synthetic construct
  source 1..75: mol_type = other DNA
gcgttaccatcacatgaggcctgccagcctggaaaaagcggcaacacgctggccgaagttgcaaatcgactttat

SEQ ID NO: 175905 - DNA, 75 bp, synthetic construct
  source 1..75: mol_type = other DNA
aggagagaatatcaatcatcggaacgcggaagagaacggtgtaacgcagccaaaaagcggttcattcagagcaac

SEQ ID NO: 175906 - DNA, 75 bp, synthetic construct
  source 1..75: mol_type = other DNA
acaaacataacaaacctatctccccagacgaggaaccagtaactctcccattccctcgtcacgctattcacgcaa

SEQ ID NO: 175907 - DNA, 75 bp, synthetic construct
  source 1..75: mol_type = other DNA
ggcgattgctctccttgagaaaggtcgctttatcagcccgtggaaacatattctggttgatgagtttcaggatat

SEQ ID NO: 175908 - DNA, 75 bp, synthetic construct
  source 1..75: mol_type = other DNA
cactgggtaaattcacgaagaaatacaaattgtgcattcatcctgaaaccggtgtgatttattccatggcggaag

SEQ ID NO: 175909 - DNA, 75 bp, synthetic construct
  source 1..75: mol_type = other DNA
gcgttggtgataaagcggctcagaagcgttttgactcattttccgaagcactggagtatctccgtagcatggaga

SEQ ID NO: 175910 - DNA, 75 bp, synthetic construct
  source 1..75: mol_type = other DNA
aacgagtaaaagagttgcgcattgccaccggaatgagccaagaagcctttgccgatcggtgtggttttgctcgta

SEQ ID NO: 175911 - DNA, 75 bp, synthetic construct
  source 1..75: mol_type = other DNA
tccggcgaaagtttacggcgcagctgccgtggacgataccgtcgacgccgcgcagcaaccggacgcaaatgtaga

SEQ ID NO: 175912 - DNA, 75 bp, synthetic construct
  source 1..75: mol_type = other DNA
tccggctaaaatttacggcgcaggtgccgctgatgatactgccaacatcacgcaacaaccggacgcaaacgtaga

SEQ ID NO: 175913 - DNA, 75 bp, synthetic construct
  source 1..75: mol_type = other DNA
tccggctaaaatttacggcgcagccgccgctgatgataccgtcaacatcacgcaacaaccggacgcaaatgtaga

SEQ ID NO: 175914 - DNA, 75 bp, synthetic construct
  source 1..75: mol_type = other DNA
cgttgccaccggaatgagccaggaagcgtttgcggatcggtgtgggtttgcacgtagctatatgagccgcattga

SEQ ID NO: 175915 - DNA, 75 bp, synthetic construct
  source 1..75: mol_type = other DNA
acgtatcccggctttatccggcaggtttcaccattgtggaagtggatgaactaccggatggcttttgtatagaag

SEQ ID NO: 175916 - DNA, 75 bp, synthetic construct
  source 1..75: mol_type = other DNA
gcgatggatttcagccagattaccgataaatcatcgtatgccacaattgtatggccggaattaccgcaggatatt

SEQ ID NO: 175917 - DNA, 75 bp, synthetic construct
  source 1..75: mol_type = other DNA
aggcagcaggcagagtcggagcgtgcacgtcttactgcgattgccgaacgggaaatatccgataagaagacggat

SEQ ID NO: 175918 - DNA, 75 bp, synthetic construct
  source 1..75: mol_type = other DNA
ctgcccaggataacggcgatgtcgattttggccagaatttaattgcccgtaatagcggcgtaattcgcgttggcg

SEQ ID NO: 175919 - DNA, 75 bp, synthetic construct
  source 1..75: mol_type = other DNA
gcgctggatttaagtcaggtcagtgatgaatcatcttataatgccattgagtggccagtacctccacagaacatc

SEQ ID NO: 175920 - DNA, 75 bp, synthetic construct
  source 1..75: mol_type = other DNA
tcgcaactggcagaaaagcaacgccagcgtcttctggctgaagccagggacatcacctccgactggcgaaccgag

SEQ ID NO: 175921 - DNA, 75 bp, synthetic construct
  source 1..75: mol_type = other DNA
cactcctgccgtttgtcggctttgcacagcccattaatactctgaacaaccctaaccagccggggtatcagatcc

SEQ ID NO: 175922 - DNA, 75 bp, synthetic construct
  source 1..75: mol_type = other DNA
agcgaatactacccgctgagctccgcgccgggccgctcgttgcaggatggcgacaagctgatcatcagcactgac

SEQ ID NO: 175923 - DNA, 75 bp, synthetic construct
  source 1..75: mol_type = other DNA
atatcgaagttacccgtggcatttcgaccattctttaccagcttgccgttgccgccaaagtggtgctgacgctgt

SEQ ID NO: 175924 - DNA, 75 bp, synthetic construct
  source 1..75: mol_type = other DNA
cgcacgttcggcggtaacgctgtacggcagcgccaattttctgggggcgcacaaagtcagactttatctatattt

SEQ ID NO: 175925 - DNA, 75 bp, synthetic construct
  source 1..75: mol_type = other DNA
cggattatctgattgactatgtgccaggagccagctcccaagcgacccataatctgataatctcctcgcgctcga

SEQ ID NO: 175926 - DNA, 75 bp, synthetic construct
  source 1..75: mol_type = other DNA
ttgggcgctatacgctccaacaaccgagaataattctcgtggcctgatggcggagatctgttcggcacttggctt

SEQ ID NO: 175927 - DNA, 75 bp, synthetic construct
  source 1..75: mol_type = other DNA
ttaaaagaggaaaatttccttttattagacacgggcgcttctggacgtaaatcctctcacactatccttaacgga

SEQ ID NO: 175928 - DNA, 75 bp, synthetic construct
  source 1..75: mol_type = other DNA
ctttattatcggtgaagaattcatcggcaacgatgattgtgccctggtactgggtgacaatatattctatggaca

SEQ ID NO: 175929 - DNA, 75 bp, synthetic construct
  source 1..75: mol_type = other DNA
accgtaaagggtttattgatgctgagcaggtgaaagtattagctgaaccgctgaaaaaaaatgcttatggtcagt

SEQ ID NO: 175930 - DNA, 75 bp, synthetic construct
  source 1..75: mol_type = other DNA
ctagcccggatggccttgcgcaggcatttatcatcggtgaagagtttattggctgcgatgattgtgctttggttt

SEQ ID NO: 175931 - DNA, 75 bp, synthetic construct
  source 1..75: mol_type = other DNA
gcgcgttcagcggtgactctgtacggcagcgccaattatcttggggcgcacaaagtcagactttatatttatttg

SEQ ID NO: 175932 - DNA, 75 bp, synthetic construct
  source 1..75: mol_type = other DNA
cttgactggcaagttactccccacgaacttcgccctgacatttatcccaacccaacagatggactaccttgtgaa

SEQ ID NO: 175933 - DNA, 75 bp, synthetic construct
  source 1..75: mol_type = other DNA
ccgtatttgcttatcatgttaatgatccagaacgttatggtgtggtagagttcgataaaaatggcacggctatca

SEQ ID NO: 175934 - DNA, 75 bp, synthetic construct
  source 1..75: mol_type = other DNA
gataacctctgcatggccaatttcggtctgcgtgatatgccagtggaacgcgataccgcgttgaaagctttgcat

SEQ ID NO: 175935 - DNA, 75 bp, synthetic construct
  source 1..75: mol_type = other DNA
cactgctcaactttgagcagcgagcttaacgggtccaaatttgggctcgttggcgaggaagtatacaaggacgcg

SEQ ID NO: 175936 - DNA, 75 bp, synthetic construct
  source 1..75: mol_type = other DNA
attttgcgtaccgctgatggcgtcaatattttaagtaacgaactggcgcatacctatctcaatatgcttacgcat

SEQ ID NO: 175937 - DNA, 75 bp, synthetic construct
  source 1..75: mol_type = other DNA
gcgtcgcctcgtcgcatgaactgcctgtgctactggcgcgtatctatcggatagaaattgaaaatgatgatcctg

SEQ ID NO: 175938 - DNA, 75 bp, synthetic construct
  source 1..75: mol_type = other DNA
tgtatccaagtattgaaaatccttctctgggtgtctttgtaaagaataccgaagaaatgttagtcaatgccaata

SEQ ID NO: 175939 - DNA, 75 bp, synthetic construct
  source 1..75: mol_type = other DNA
tgattcttggtgctggcggtcagatagcccgccatgtgattaatcaactggcagataaacaaaccattaaacaaa

SEQ ID NO: 175940 - DNA, 75 bp, synthetic construct
  source 1..75: mol_type = other DNA
gggttgaaggcgcacactccggtgaacatgccatggtattgccttatggttccactatgcgtgcggttctgggaa

SEQ ID NO: 175941 - DNA, 75 bp, synthetic construct
  source 1..75: mol_type = other DNA
cacggatgtacgagcgacgtattttcattccggcggaaagcgacgccctgcgactggaagaacatgagcagttca

SEQ ID NO: 175942 - DNA, 75 bp, synthetic construct
  source 1..75: mol_type = other DNA
agcggtcagcgataatgacgatatgatgattctggtcgtggatgatcatccgattaaccggcgtttgctggcaga

SEQ ID NO: 175943 - DNA, 75 bp, synthetic construct
  source 1..75: mol_type = other DNA
tcagcgagaatcagagattcgtcaggaatttaacctgagttccgatcaggctcagcggtttattcagcgcacttc

SEQ ID NO: 175944 - DNA, 75 bp, synthetic construct
  source 1..75: mol_type = other DNA
gaccagcaacaatactaatctgcaaatcagctttgttcattctcgctatcgtaatgaaaacgtggcgatttgcgt

SEQ ID NO: 175945 - DNA, 75 bp, synthetic construct
  source 1..75: mol_type = other DNA
tcggcatattggcattccactagagaaggcgcctggggaatgggtacacagtgtggcggctgcgcatgagttacc

SEQ ID NO: 175946 - DNA, 75 bp, synthetic construct
  source 1..75: mol_type = other DNA
cgacaccgccctgaaagctctgcatgagcgcatcaataagtatcgtaatgctccgcaggatgacagcggcagcaa

SEQ ID NO: 175947 - DNA, 75 bp, synthetic construct
  source 1..75: mol_type = other DNA
accaactttggaattttcccgtcacaatcgaaaaaagaggatttaggacagggttacaatgcctatttgaaggat

SEQ ID NO: 175948 - DNA, 75 bp, synthetic construct
  source 1..75: mol_type = other DNA
cccgtcagatagcagaagagtgtacacaagaaaattataatcgggtcattgaacgccttatcaaacttaaagcgg

SEQ ID NO: 175949 - DNA, 75 bp, synthetic construct
  source 1..75: mol_type = other DNA
gcgctgggtgatgatatcgaccctattgagctgaatatgtcactttggcatctctatgcgtatgaaattcaggat

SEQ ID NO: 175950 - DNA, 75 bp, synthetic construct
  source 1..75: mol_type = other DNA
ttcaatggctattttgaagatcttaacgaagctggaaaagattcaacataccgaacgccggagaactggacgacg

SEQ ID NO: 175951 - DNA, 75 bp, synthetic construct
  source 1..75: mol_type = other DNA
ggcgatgaaagccgctggcgtaagacgcctgatttttgtcctttctctcggtatttatgatgaagtcccgggaaa

SEQ ID NO: 175952 - DNA, 75 bp, synthetic construct
  source 1..75: mol_type = other DNA
catgttggcgtgccatttaagttagttgaaaaccgggctgcgtcagctcagacggcagacgtgacttttctgtct

SEQ ID NO: 175953 - DNA, 75 bp, synthetic construct
  source 1..75: mol_type = other DNA
gcatgacgcttgaggtataccagcgtttgtcgaccgccgttgaattgggcaaatggcctgatggcgttgcgttga

SEQ ID NO: 175954 - DNA, 75 bp, synthetic construct
  source 1..75: mol_type = other DNA
gcaactgggagatatctggaggcggatcacggaaggggagggttattttcatctgtgccgggctaaagacaaata

SEQ ID NO: 175955 - DNA, 75 bp, synthetic construct
  source 1..75: mol_type = other DNA
ttacgttacgccctcagctacctggctaaacaggatcagaaagaacccagtattattctggggcatagcaggctt

SEQ ID NO: 175956 - DNA, 75 bp, synthetic construct
  source 1..75: mol_type = other DNA
ccaatcgatgttggcgggatattactgggtaatggaatatacacaaaacaagggacttcatattcattttatcgg

SEQ ID NO: 175957 - DNA, 75 bp, synthetic construct
  source 1..75: mol_type = other DNA
aagggcttcatattcattttgtcggctacctggatgggcaacgtcacaagaactcttatcagatatccaggcaac

SEQ ID NO: 175958 - DNA, 75 bp, synthetic construct
  source 1..75: mol_type = other DNA
ctatctggatgggcaacgtcacaagaactcttatcagatatccaggcaactgggggatatctggaggcggatcac

SEQ ID NO: 175959 - DNA, 75 bp, synthetic construct
  source 1..75: mol_type = other DNA
tttataatcaaaatggcacaatgacagataaaattgtgccattcgaaaattataataccaattatccgggggaca

SEQ ID NO: 175960 - DNA, 75 bp, synthetic construct
  source 1..75: mol_type = other DNA
tacactgatgttggcgggtattcgcgatattctgattatcagtacgccacaggatactcctcgttttcaacaact

SEQ ID NO: 175961 - DNA, 75 bp, synthetic construct
  source 1..75: mol_type = other DNA
aattgaagagcgtcaggggctgaaagtttcctgcccggaagaaattgcttaccgtaaagggtttattgatgctga

SEQ ID NO: 175962 - DNA, 75 bp, synthetic construct
  source 1..75: mol_type = other DNA
gatggggcgtggttatgcatggctggatacggggacacatcaaagtcttattgaagcaagcaacttcattgcaac

SEQ ID NO: 175963 - DNA, 75 bp, synthetic construct
  source 1..75: mol_type = other DNA
aattcgagtaataattgattttttgatgcttttatatatgagttatcgttgtaataatcttatgaaaaaagggta

SEQ ID NO: 175964 - DNA, 75 bp, synthetic construct
  source 1..75: mol_type = other DNA
gcaggtgaaagtattagctgaaccgctgaaaaaaaatgcttatggtcagtatctgctgaaaatgattaatacttt

SEQ ID NO: 175965 - DNA, 75 bp, synthetic construct
  source 1..75: mol_type = other DNA
gctgggtgacgggagccagtgggggctaaatcttcagtacaaagtgcaaccgagtccagatggtcttgcgcaggc

SEQ ID NO: 175966 - DNA, 75 bp, synthetic construct
  source 1..75: mol_type = other DNA
gccgcagccaaacctgcgggcgccaccgtctttgcctatcatgtacacgatcctgagcgttatggcgtggtggag

SEQ ID NO: 175967 - DNA, 75 bp, synthetic construct
  source 1..75: mol_type = other DNA
ttacaatattaataatggatatttgacggtaagtctgaatagagtgaataagatacatcagtgtgtatccctatt

SEQ ID NO: 175968 - DNA, 75 bp, synthetic construct
  source 1..75: mol_type = other DNA
gctgggtgacgggagccagtggggcctgaatcttcagtacaaagtgcaaccgagtcccgatggtcttgcgcaggc

SEQ ID NO: 175969 - DNA, 75 bp, synthetic construct
  source 1..75: mol_type = other DNA
gctgagtttccgcattgccgatcccgtttctgatgcagaacgtttcacccgctggatgaatgatccgcgcgttga

SEQ ID NO: 175970 - DNA, 75 bp, synthetic construct
  source 1..75: mol_type = other DNA
gcagcgaactgcatattcgccccgtcaacgtattaccattgtcagcaacagcgacatcatccggataaacgcagt

SEQ ID NO: 175971 - DNA, 75 bp, synthetic construct
  source 1..75: mol_type = other DNA
ggagctgacggtgtatacgctgaataatgagctggaaaatctgctgaccaacgtggtgaatcaggcgcaacaggc

SEQ ID NO: 175972 - DNA, 75 bp, synthetic construct
  source 1..75: mol_type = other DNA
atggcgaaaacaactaaatcgttcctcgcgctgctgcgcggcggtaatctcggcgtaccgctggtcatactgtgt

SEQ ID NO: 175973 - DNA, 75 bp, synthetic construct
  source 1..75: mol_type = other DNA
tgccgcctgcgctgctggatattctgttcaccttcaacattgtgctggcggtgatggtgctgctggtggccgtgt

SEQ ID NO: 175974 - DNA, 75 bp, synthetic construct
  source 1..75: mol_type = other DNA
atggtttgtcagcaggtaagaaattatcattttaaacaaagtgtaagttgtatttctttactgagtgttattgtt

SEQ ID NO: 175975 - DNA, 75 bp, synthetic construct
  source 1..75: mol_type = other DNA
gaagcgattatcatgcttgagcttaaaggtgttgtggaggttcgacaaggtgcgggtatttttttcattgatagc

SEQ ID NO: 175976 - DNA, 75 bp, synthetic construct
  source 1..75: mol_type = other DNA
gctattatgatgtcgggcttcagattgaagagttgctctattctggtgtgtttaaagcgggagagcggcttcctt

SEQ ID NO: 175977 - DNA, 75 bp, synthetic construct
  source 1..75: mol_type = other DNA
gggcttccccgaggatatcgagtatgacgaacttccgggaaaaaatgacggaatgaaagcgtctgctggcggtgg

SEQ ID NO: 175978 - DNA, 75 bp, synthetic construct
  source 1..75: mol_type = other DNA
gatttgtttaactatgatgacatcacgcagttgcataaccgtttgtcgtcgatggcaccgcgcttggcggaggat

SEQ ID NO: 175979 - DNA, 75 bp, synthetic construct
  source 1..75: mol_type = other DNA
gtccctgatttgtttaattatgatgatattacgcagctacataaccgcctgtcgtcgatggcaccacggctggcg

SEQ ID NO: 175980 - DNA, 75 bp, synthetic construct
  source 1..75: mol_type = other DNA
ctatgatccttccctcaaaatacaaattgccagcgccgatacgcttattcgtcgcgtgtttcctgacaatatcga

SEQ ID NO: 175981 - DNA, 75 bp, synthetic construct
  source 1..75: mol_type = other DNA
agtcgtggcatgcgtgtaatgttttgcgcgccttaccagatcctcataacccaaacagcaaaccgttttgtggag

SEQ ID NO: 175982 - DNA, 75 bp, synthetic construct
  source 1..75: mol_type = other DNA
agcgatgttcgctgcatcatctacgccaggccaactaagagcgaaattcgctggctgcaggcgctcgggcgtggc

SEQ ID NO: 175983 - DNA, 75 bp, synthetic construct
  source 1..75: mol_type = other DNA
gatcacctcacaaaaccgtattccactgctgcaaaacggcactttcgattttgaatgtggttctaccaccaataa

SEQ ID NO: 175984 - DNA, 75 bp, synthetic construct
  source 1..75: mol_type = other DNA
tctgcaactattaaccaggcatggcaaacgttacgtcatccgttgatgcgggcggaatatctgctttcgctgcac

SEQ ID NO: 175985 - DNA, 75 bp, synthetic construct
  source 1..75: mol_type = other DNA
gttagcttcggcagcttcggtctgaaagctgttggccgttgtcgtctgactgcacgtcaggtcgaagcagcacgt

SEQ ID NO: 175986 - DNA, 75 bp, synthetic construct
  source 1..75: mol_type = other DNA
ttaacctgctcgacaccccggggcacgaagacttctcggaagatacctatcgtaccctgactgcggtggactgct

SEQ ID NO: 175987 - DNA, 75 bp, synthetic construct
  source 1..75: mol_type = other DNA
tttcctgaaaccatagccgtgggcggtgatgattacaccggggcggcaatccatttaattgacaccgtggagatc

SEQ ID NO: 175988 - DNA, 75 bp, synthetic construct
  source 1..75: mol_type = other DNA
tgatcgccgatgtgaagccgtgcagccgtcatatgctgggaatgtctcttcacctgcaaacaaccggcgatctgt

SEQ ID NO: 175989 - DNA, 75 bp, synthetic construct
  source 1..75: mol_type = other DNA
ggcatgatgcagatacactggaaaaaatcgggcttgtcagactgtatctgaagacgtcttttattcttacagtgg

SEQ ID NO: 175990 - DNA, 75 bp, synthetic construct
  source 1..75: mol_type = other DNA
acatgccatggtactgccttatggttccactatgcgtgcggttctggaaaaagtccgcccgaacagcatgtcgca

SEQ ID NO: 175991 - DNA, 75 bp, synthetic construct
  source 1..75: mol_type = other DNA
cgccaggccgtatgttgcagaacggcgataccttaatcgtcagcactgaccgctatgccggcaccattcaggttc

SEQ ID NO: 175992 - DNA, 75 bp, synthetic construct
  source 1..75: mol_type = other DNA
tatgtttggtgctcaacttttcaacggcaccagcgcggatagcggtgcgacggtaggattcaaccctgactatat

SEQ ID NO: 175993 - DNA, 75 bp, synthetic construct
  source 1..75: mol_type = other DNA
cggtggactgctgcctgatggttatcgacgccgcaaaaggtgttgaagatcgtacccgtaagctgatggaagtta

SEQ ID NO: 175994 - DNA, 75 bp, synthetic construct
  source 1..75: mol_type = other DNA
ctatcagagcggtaaaggtcacaccattcaggaagtccgcattgttaaagggctgaataacccggatctcgatgc

SEQ ID NO: 175995 - DNA, 75 bp, synthetic construct
  source 1..75: mol_type = other DNA
gtaattgagagcaatattaccggttttgctgccagccagatcagctttaacgagttacaagagttaaagaaaatc

SEQ ID NO: 175996 - DNA, 75 bp, synthetic construct
  source 1..75: mol_type = other DNA
gacgcagcgcagcaactgttacgtgtgaaccccgtactgattgatttcaaagggccagaagccaaacgagacaga

SEQ ID NO: 175997 - DNA, 75 bp, synthetic construct
  source 1..75: mol_type = other DNA
agtacccagaacttctgacacttgtcgtatctgtgcgcgaaggcaactccgacgcagcgcagcaactgttacgtg

SEQ ID NO: 175998 - DNA, 75 bp, synthetic construct
  source 1..75: mol_type = other DNA
gttgaaaaatcatgggtttcgatattacagccacactttaaaaatgtaatcgatattagtaaatttgattacttt

SEQ ID NO: 175999 - DNA, 75 bp, synthetic construct
  source 1..75: mol_type = other DNA
acaaactccagctcgccacgccgttgctgccgcaggaggtacagcagcaggggatcagtgttgaaaagtccagta

SEQ ID NO: 176000 - DNA, 75 bp, synthetic construct
  source 1..75: mol_type = other DNA
aaaagctggatgagaaaatccgcagcgagctgttcattccagaagaattcgacaccatgttgcttgatgccgcaa

SEQ ID NO: 176001 - DNA, 75 bp, synthetic construct
  source 1..75: mol_type = other DNA
gtggcgcacttcgccatgggcggatattgaagaaaaagaccatcctcagcattgggataaccggattccagtgat

SEQ ID NO: 176002 - DNA, 75 bp, synthetic construct
  source 1..75: mol_type = other DNA
aagctgatgaccatgaagggattcacctggcacaagacgaataagcacaaaggtaacagcgcgatcggcatgggc

SEQ ID NO: 176003 - DNA, 75 bp, synthetic construct
  source 1..75: mol_type = other DNA
aaagtttaggtttggttcctttagaagctcttgcatgtggtacggatgttcttttatcgccaattgatgcatttt

SEQ ID NO: 176004 - DNA, 75 bp, synthetic construct
  source 1..75: mol_type = other DNA
aaagtatttggctattttattttttatttaaaagtcatctataaaattttattttgtaaatgtgatattgtttat

SEQ ID NO: 176005 - DNA, 75 bp, synthetic construct
  source 1..75: mol_type = other DNA
ggtttgataagaaaactgaagaatttaaaggggaagagtattctaaagactttggtgatgatggttctgtcattg

SEQ ID NO: 176006 - DNA, 75 bp, synthetic construct
  source 1..75: mol_type = other DNA
aagtctgcacaactccagatcctgaaagaaatttatggcgaagataccgggaatcccctggcgaagaaaattgca

SEQ ID NO: 176007 - DNA, 75 bp, synthetic construct
  source 1..75: mol_type = other DNA
tcttgcttgttagcgatgtggtgggtgccgacacagccagccgaagcgctaaaggtaattgaggcgtggggattc

SEQ ID NO: 176008 - DNA, 75 bp, synthetic construct
  source 1..75: mol_type = other DNA
attcagggggaagctgcgccaggaaccagttccggtgatgcgatggcgctgatggaaaatcttgcgtcaaaatta

SEQ ID NO: 176009 - DNA, 75 bp, synthetic construct
  source 1..75: mol_type = other DNA
gctgacccgcaccatcaccgaaaccagcgagcaacaggtcagttgggaaaccattccgctgatcgagcccatcag

SEQ ID NO: 176010 - DNA, 75 bp, synthetic construct
  source 1..75: mol_type = other DNA
ctctgatatcaacgacacgatttccacggccttaggtggaacctacgttaacgactttattgaccgtggacgcgt

SEQ ID NO: 176011 - DNA, 75 bp, synthetic construct
  source 1..75: mol_type = other DNA
ctccttggcatggcagcgcaacatcctgacagcttagtcagtgtgcgacctaatggtctggaagataccgcgcag

SEQ ID NO: 176012 - DNA, 75 bp, synthetic construct
  source 1..75: mol_type = other DNA
gaaagagcagatgaaagcggcggggaaagacccggtgctgctggtgccaccgcagctgcgccctttgctggcgcg

SEQ ID NO: 176013 - DNA, 75 bp, synthetic construct
  source 1..75: mol_type = other DNA
gctggtggacaaagcacagggtaacccgctcacccagcggattcgcggcgtgcggcaggtgatttctgacggcaa

SEQ ID NO: 176014 - DNA, 75 bp, synthetic construct
  source 1..75: mol_type = other DNA
tacgctgaataatgagctggaaaatctgctgaccaacgtggtgaatcaggcgcaacagggcgggaaagtgatgct

SEQ ID NO: 176015 - DNA, 75 bp, synthetic construct
  source 1..75: mol_type = other DNA
ccggcaggcattggttatgactggacaggtatgtcgtatcaggaacgcttatcgggtaaccaggctcctgctttg

SEQ ID NO: 176016 - DNA, 75 bp, synthetic construct
  source 1..75: mol_type = other DNA
ttctgacatcaatcagaccatttctacggcgttgggcgggacttacgttaacgacttcatcgatcgtggtcgcgt

SEQ ID NO: 176017 - DNA, 75 bp, synthetic construct
  source 1..75: mol_type = other DNA
tgcaaaacgatcagattgctgccggacagttgggcggaacgcctgctttaccagggcaacagttgaacgcctcga

SEQ ID NO: 176018 - DNA, 75 bp, synthetic construct
  source 1..75: mol_type = other DNA
caactgcctgcgggtgcgacacaagagcgcacgcaaaaagtgctggatcaagtaacggattattatctgcacaat

SEQ ID NO: 176019 - DNA, 75 bp, synthetic construct
  source 1..75: mol_type = other DNA
ccctaccatcgcggtacccgttgtgttactgggtacgtttgccatactcgccgcttttggttattccattaatac

SEQ ID NO: 176020 - DNA, 75 bp, synthetic construct
  source 1..75: mol_type = other DNA
atgttggtagtgccgttagggattgtcggcgtgctgctggcggcgacactctttaatcaaaaaatgacgtctact

SEQ ID NO: 176021 - DNA, 75 bp, synthetic construct
  source 1..75: mol_type = other DNA
accggatgatggatgttagtcaggatatcttgatcattcatggtgatggcatcaataaaattgttaaccggacaa

SEQ ID NO: 176022 - DNA, 75 bp, synthetic construct
  source 1..75: mol_type = other DNA
cggtatggacagctgcctgtcgaagccggtaacgctggatgtgataaaacagacactgacggtatatgccgagag

SEQ ID NO: 176023 - DNA, 75 bp, synthetic construct
  source 1..75: mol_type = other DNA
atgaactggcattatgaaaaaaatggtgtacgttatgataacgtaacagaggaagatattatcgaacgtatccgg

SEQ ID NO: 176024 - DNA, 75 bp, synthetic construct
  source 1..75: mol_type = other DNA
cctctactggatcagcgaaggtccgcgccctggcgtcgggtatttttacgccttgacgccagtttatctggcgaa

SEQ ID NO: 176025 - DNA, 75 bp, synthetic construct
  source 1..75: mol_type = other DNA
ttgagtaacgccataaaattcaccgataccggctgtatagttctgcatgttcgcgctgatggcgattatctctct

SEQ ID NO: 176026 - DNA, 75 bp, synthetic construct
  source 1..75: mol_type = other DNA
tggaagagtcgttgcaggagatggcacaagcagcggaacaggcgagccagtcaaaatcgatgttccttgccaccg

SEQ ID NO: 176027 - DNA, 75 bp, synthetic construct
  source 1..75: mol_type = other DNA
cagcaacagattcgaccagaagctattccagtcagtacaccctgagttattcgaaaaattcaaaacaacaacgac

SEQ ID NO: 176028 - DNA, 75 bp, synthetic construct
  source 1..75: mol_type = other DNA
tcaccatttgcttttacaattactcttgagaaatgccccggagctaaggaggaaacacaagaaatgctatgggca

SEQ ID NO: 176029 - DNA, 75 bp, synthetic construct
  source 1..75: mol_type = other DNA
cactggtggggcgctgcttactatttgggccagacctgttcgtaactggctttgggggtatactccttttgattc

SEQ ID NO: 176030 - DNA, 75 bp, synthetic construct
  source 1..75: mol_type = other DNA
gagtggacaccatcacgttcggcaaactggcgtggctggtaccgttctatctgtggcgacgggcgaaaaccctcg

SEQ ID NO: 176031 - DNA, 75 bp, synthetic construct
  source 1..75: mol_type = other DNA
gttcgaagaactgatggatgcctatcggcgagaggcaatggcaattatcgcccgctgggatctggcggatcagct

SEQ ID NO: 176032 - DNA, 75 bp, synthetic construct
  source 1..75: mol_type = other DNA
agctgagatcgatgcagaagcagcgtcaggcgagaacattgagatcaaaacagttagtccgttcaaagccaaaga

SEQ ID NO: 176033 - DNA, 75 bp, synthetic construct
  source 1..75: mol_type = other DNA
gcgctttctcaagccgttaaagggattgacttgtctgtagcctatgcattgtggggcggatttggtattgccgcc

SEQ ID NO: 176034 - DNA, 75 bp, synthetic construct
  source 1..75: mol_type = other DNA
agcgttttacattcacaaatttacgataaaatcaaggggaaactctatttccagaaaaatgagtttcccctttct

SEQ ID NO: 176035 - DNA, 75 bp, synthetic construct
  source 1..75: mol_type = other DNA
cgtcatatggggaccgcgacattaatcagcgtgaccgttttgctgattgccagcctgtttattcgccatgcctag

SEQ ID NO: 176036 - DNA, 75 bp, synthetic construct
  source 1..75: mol_type = other DNA
aacattaactttttcgctgcaaaaacctgcggcaaataaaaaggcctttgcgttgtctggctggttaatgacgct

SEQ ID NO: 176037 - DNA, 75 bp, synthetic construct
  source 1..75: mol_type = other DNA
tctataatatatgtgcgccagctcaccctgcgcgcaatgttttctacccacagatggctcgtttactggggctgg

SEQ ID NO: 176038 - DNA, 75 bp, synthetic construct
  source 1..75: mol_type = other DNA
gaaccaccatagcgcaaatgaaactgatgatctgctagtaacagcgggtgataacaggaagctttttaacctgac

SEQ ID NO: 176039 - DNA, 75 bp, synthetic construct
  source 1..75: mol_type = other DNA
gcgtgcgtcacgacaatgtgaccgaagccgacataaccgaacgtattcagcgcggggagctgaatgcctcaacgc

SEQ ID NO: 176040 - DNA, 75 bp, synthetic construct
  source 1..75: mol_type = other DNA
ttggtcaacgtttaaatcgcaaaggctgggttggcctgatcttgctattggccggaatgatcatggtgaaactcg

SEQ ID NO: 176041 - DNA, 75 bp, synthetic construct
  source 1..75: mol_type = other DNA
ccgcctggttggcactggcaactgtgctggaaatcatggctaacgtctttttgaaattttctgacggctttcgcc

SEQ ID NO: 176042 - DNA, 75 bp, synthetic construct
  source 1..75: mol_type = other DNA
tcgacttgtctgtcgcttatgcattgtggggcgggtttggtattgccgccacgttagccgcaggttggatcttgt

SEQ ID NO: 176043 - DNA, 75 bp, synthetic construct
  source 1..75: mol_type = other DNA
cggcaaattaccgtggaatgactggcgcaatgccacgacctggcgtaaagcgacgcaattattactgttggcaat

SEQ ID NO: 176044 - DNA, 75 bp, synthetic construct
  source 1..75: mol_type = other DNA
gcagcaacgtcaattgcatgcctggaacgctacgcacaagattcagactgaatcatggagtccattggcccaggg

SEQ ID NO: 176045 - DNA, 75 bp, synthetic construct
  source 1..75: mol_type = other DNA
tcactctcccaggcagtaaagggcatagatttgtcggtggcgtatgcgttgtggggcgggtttggtattgctgcc

SEQ ID NO: 176046 - DNA, 75 bp, synthetic construct
  source 1..75: mol_type = other DNA
tcagggtggaccgattcggtctatccgcagaacaaaaagccggatgctgaaaaacaacagggggcgaagaataag

SEQ ID NO: 176047 - DNA, 75 bp, synthetic construct
  source 1..75: mol_type = other DNA
cgctcgtagagagcgattttctggcccaggctcgtgaaatgatgaaagatcgcgagcaggctttcaacttgtacg

SEQ ID NO: 176048 - DNA, 75 bp, synthetic construct
  source 1..75: mol_type = other DNA
cagcttttaggtgagttgatcaatgaggtgtttgccttgaatgttcaactacatggtcgagaaaataatcaatca

SEQ ID NO: 176049 - DNA, 75 bp, synthetic construct
  source 1..75: mol_type = other DNA
cctatgccattgtccatatgttgccaaccgatttgttgctgaatatggggtcaacccacggcctggcgatggtct

SEQ ID NO: 176050 - DNA, 75 bp, synthetic construct
  source 1..75: mol_type = other DNA
ttgttattacttgctctggcatttgtgttgttctacgaagcaatcaatggttttcatgacacggcgaatgcggtg

SEQ ID NO: 176051 - DNA, 75 bp, synthetic construct
  source 1..75: mol_type = other DNA
atgtatatacggggcttttgttattacttgctctggcgtttgtgttgttctatgaagcaattaatggttttcatg

SEQ ID NO: 176052 - DNA, 75 bp, synthetic construct
  source 1..75: mol_type = other DNA
atggcgacatatgacaaaacgccagcgcaaaaaccgtaagcgtattaatcgtcttgtggaacactggcctgagtt

SEQ ID NO: 176053 - DNA, 75 bp, synthetic construct
  source 1..75: mol_type = other DNA
cgtataaatcgtcttgtggaactctggcctgagttattcaaccgggaaaaccaaaaccgcttaaagtggggataa

SEQ ID NO: 176054 - DNA, 75 bp, synthetic construct
  source 1..75: mol_type = other DNA
ggtgaagggttactctcagtttagttctgtacaagaatcggtgagtgcttacgtcactaacctgaatacgcatcc

SEQ ID NO: 176055 - DNA, 75 bp, synthetic construct
  source 1..75: mol_type = other DNA
ctgtggcgacgggcgaaaaccctcggtcagaaaccggcttacttctgggtatggctggcaatgctggttctgacc

SEQ ID NO: 176056 - DNA, 75 bp, synthetic construct
  source 1..75: mol_type = other DNA
tcagggaattattaccaggctacaaaaaacacccggtgagcatatcgaaaataatggaatcatttcgatatcctg

SEQ ID NO: 176057 - DNA, 75 bp, synthetic construct
  source 1..75: mol_type = other DNA
cgcataacgatttaggcattattcgttacatggtcgccatgggaacggcacattatgtcgtcatgatcgaccccg

SEQ ID NO: 176058 - DNA, 75 bp, synthetic construct
  source 1..75: mol_type = other DNA
atggaaagctacgagccgttaaacgtaagtcaacgcagtcagttgcggcgcattatgctttgcatctctgatact

SEQ ID NO: 176059 - DNA, 75 bp, synthetic construct
  source 1..75: mol_type = other DNA
acctaaagcaattgaggaagctatagcagcaggaaagaaactggacgattttttgattcctgatgatgaaaaata

SEQ ID NO: 176060 - DNA, 75 bp, synthetic construct
  source 1..75: mol_type = other DNA
cacgtaaacgcgaactccttgaaatgatcgccagtgagggattttcagttgaggaactaacaggcgcttctgata

SEQ ID NO: 176061 - DNA, 75 bp, synthetic construct
  source 1..75: mol_type = other DNA
caaggcgacccctatcggccgtatgctcgatatgagcgatattatgcgaatgctctactccaccattgacgttgt

SEQ ID NO: 176062 - DNA, 75 bp, synthetic construct
  source 1..75: mol_type = other DNA
tggcaagcccacttgggatgacggtgatggcgaagacctgtatctcaaggaggtaacccactggatgccgctgcc

SEQ ID NO: 176063 - DNA, 75 bp, synthetic construct
  source 1..75: mol_type = other DNA
gtgtttaaaccgctggatacagaagaagtctgctacgataattccattcattataccgacagtttgttgggacag

SEQ ID NO: 176064 - DNA, 75 bp, synthetic construct
  source 1..75: mol_type = other DNA
atattactggatttgtcccccatgcaatgcatgggttggatgccataaaaactcagggagaccattaggtactcc

SEQ ID NO: 176065 - DNA, 75 bp, synthetic construct
  source 1..75: mol_type = other DNA
atcgacaaagtggtgaaattgcctggcgtaaatgctgacgatcagcgtctgttgaagaaactgaagtccgatatg

SEQ ID NO: 176066 - DNA, 75 bp, synthetic construct
  source 1..75: mol_type = other DNA
ggtgtttgctggcggtctgattttcttgctgcgtcgctactggagcggcaccaagaaacgcgcccgtatccacct

SEQ ID NO: 176067 - DNA, 75 bp, synthetic construct
  source 1..75: mol_type = other DNA
ttacagcgtaaaacggtaaccagcatcctgatggcgtgggtgtttactttaccggcggcgatttttctgtctggt

SEQ ID NO: 176068 - DNA, 75 bp, synthetic construct
  source 1..75: mol_type = other DNA
atgtgggtcagcatcgttaaagattatgtcgtgccgatcctgtcggcaacggccacggccggggggatttttatg

SEQ ID NO: 176069 - DNA, 75 bp, synthetic construct
  source 1..75: mol_type = other DNA
acgacaagctgtcgcttgatcaacgtagccagatgcgccgcattatgctgtgcgtttctgacactatcgacaaag

SEQ ID NO: 176070 - DNA, 75 bp, synthetic construct
  source 1..75: mol_type = other DNA
tcggcctggcgagttataccgggatgccggtttccaccactcacgtactctcctcttccgtagcggggacgatgg

SEQ ID NO: 176071 - DNA, 75 bp, synthetic construct
  source 1..75: mol_type = other DNA
atgacctggccaattgtgaccgtaaaccaggtaaatcagctgctgggtgaaaccaatgaggtggaacgcacactg

SEQ ID NO: 176072 - DNA, 75 bp, synthetic construct
  source 1..75: mol_type = other DNA
caaaattgccgatcgttcactgaacagcacaccgggcagcattgccgcgcatgaaacctatttcggcaagccgct

SEQ ID NO: 176073 - DNA, 75 bp, synthetic construct
  source 1..75: mol_type = other DNA
ttgaaggcgtggtgatcaccgaaccggtcagcacgaaggatgacatcaacgccatacaggcgttacgtcagacca

SEQ ID NO: 176074 - DNA, 75 bp, synthetic construct
  source 1..75: mol_type = other DNA
tggtaccggggaagtgctggcgcttgccacgcttcagacactggaggcacagcgtttcagcgtgccgatgtggta

SEQ ID NO: 176075 - DNA, 75 bp, synthetic construct
  source 1..75: mol_type = other DNA
gggtgtggttcattctggctgttcaggggatgcaggaggaggaagcccaggcggattatctggtgcgcctgtcca

SEQ ID NO: 176076 - DNA, 75 bp, synthetic construct
  source 1..75: mol_type = other DNA
ctgggcgagggtgacagcccgttaaaaagtgatgttctggccgcactggcgaacgccggccagaactggtgggga

SEQ ID NO: 176077 - DNA, 75 bp, synthetic construct
  source 1..75: mol_type = other DNA
aaagtgacgattagtattggcgctgttgtgactcaggaaaatgcgttaaacccaaatgagatctatcgactggct

SEQ ID NO: 176078 - DNA, 75 bp, synthetic construct
  source 1..75: mol_type = other DNA
gcggcgaagagtttggcgtcttgctgacggacatcgatactgaacgtgcgaaagctttagcggaaaggattcggg

SEQ ID NO: 176079 - DNA, 75 bp, synthetic construct
  source 1..75: mol_type = other DNA
gtgccatatattcagtgcgctacgagtaacaaaggacattgcacatcgcgatcccttaaccaatatattcaacag

SEQ ID NO: 176080 - DNA, 75 bp, synthetic construct
  source 1..75: mol_type = other DNA
gcaactggtgatgctgtggcaagcccgccataataccgaagcacagcatatgacaattgacacaaatggtcagat

SEQ ID NO: 176081 - DNA, 75 bp, synthetic construct
  source 1..75: mol_type = other DNA
gcgaggttaaaccgccacaggacggggatatcaccatcgtctggaccagcagtacacacgtgcagatttacattg

SEQ ID NO: 176082 - DNA, 75 bp, synthetic construct
  source 1..75: mol_type = other DNA
aaccaatgaagtggaacgcacgctgctgtttatcggtacgggtaccaaaaatgtggggaaaacgctggcggtgaa

SEQ ID NO: 176083 - DNA, 75 bp, synthetic construct
  source 1..75: mol_type = other DNA
aaccaatgaggtggaacgcacactgctgtttatcggtacgggtaccaaaaatgtggggaaaacgctggcggtgaa

SEQ ID NO: 176084 - DNA, 75 bp, synthetic construct
  source 1..75: mol_type = other DNA
ttgtgggctatctgaacggtcagagccacaggagttcgtatctggtatccagattgatgggagatatctggaggc

SEQ ID NO: 176085 - DNA, 75 bp, synthetic construct
  source 1..75: mol_type = other DNA
taacagtatcctgctatctgatgcaatggcaatgattaacctgataggtaatcgtcttgatcaggagagtaagga

SEQ ID NO: 176086 - DNA, 75 bp, synthetic construct
  source 1..75: mol_type = other DNA
tgaatgtgaaaatggatagcgtaccggtgctgacttacgtcaacgactttggcgcacggatgccgctgttcttcc

SEQ ID NO: 176087 - DNA, 75 bp, synthetic construct
  source 1..75: mol_type = other DNA
ttgatatcgccagccctggagccagaattaatgaaccagaaaaactcttccgcagattctggcgaggtgataatt

SEQ ID NO: 176088 - DNA, 75 bp, synthetic construct
  source 1..75: mol_type = other DNA
cgaatgttatcgaatcttattgttaacgccattcgatattcaccagaaaaatcgcgtattcatataaccagtttt

SEQ ID NO: 176089 - DNA, 75 bp, synthetic construct
  source 1..75: mol_type = other DNA
gagtgggtaacgcaggggctttccgaagcgggttatgtcattgatgccgtttctgatggcagagatgggctttat

SEQ ID NO: 176090 - DNA, 75 bp, synthetic construct
  source 1..75: mol_type = other DNA
aacaatcgttatataaatattatctgcataatacgtcagtgagtcggttgaatcgacaaggaaataaaaatctta

SEQ ID NO: 176091 - DNA, 75 bp, synthetic construct
  source 1..75: mol_type = other DNA
agggcggcgattatcagtcgattgaaaccctgcgcgttgcggataaagctgcccgccgtgttcgtctgctggcta

SEQ ID NO: 176092 - DNA, 75 bp, synthetic construct
  source 1..75: mol_type = other DNA
cccttcaggatggcattgcagaaaaggcagtgcagctggttccccgcctgtggggaaatgaaccgggcgtgctgg

SEQ ID NO: 176093 - DNA, 75 bp, synthetic construct
  source 1..75: mol_type = other DNA
atgacgaatctattttctgccaaaacggtcgcaaccacgctggcgtttctgataactgccaccagcttgcaagcc

SEQ ID NO: 176094 - DNA, 75 bp, synthetic construct
  source 1..75: mol_type = other DNA
attgagccgaaaaccacagttccgctgaatgtgaaaatggatagcgtaccggtactgacttacgtcaacgacttt

SEQ ID NO: 176095 - DNA, 75 bp, synthetic construct
  source 1..75: mol_type = other DNA
ttgccggattacatcatcaggatattgtctggacaacagaatttatgtttaacgcgctgcgtgcgcgatataccg

SEQ ID NO: 176096 - DNA, 75 bp, synthetic construct
  source 1..75: mol_type = other DNA
ggcgcaggtgtctggggcggcgaaaccctactgcctggtatgtcaccactggcgcaggtttacagtggtcatcag

SEQ ID NO: 176097 - DNA, 75 bp, synthetic construct
  source 1..75: mol_type = other DNA
gtgaggcaatgcatcacctgggcattccgacgacgcgcgcattgagcattgttaccagtgatacgccggtctacc

SEQ ID NO: 176098 - DNA, 75 bp, synthetic construct
  source 1..75: mol_type = other DNA
agacggtcggctttgctcatggggtgatgaataccgacaacatgtcgctgctggggctgacgcttgattacgggc

SEQ ID NO: 176099 - DNA, 75 bp, synthetic construct
  source 1..75: mol_type = other DNA
caaaaggggatgataagtttatcaccaccgactatttgcaacagtgcccaaatggtggtcaccatcctgtcggct

SEQ ID NO: 176100 - DNA, 75 bp, synthetic construct
  source 1..75: mol_type = other DNA
cgtaatcctttcagcgatcgtgatgacgattatgtctgtcgtccaccggattggggcaaacaactggaagtcagt

SEQ ID NO: 176101 - DNA, 75 bp, synthetic construct
  source 1..75: mol_type = other DNA
gagtctgaccgggcagcacagcgcggcatcaccactgcgtgatgaatttattgatcgtgcggcgtttgataactg

SEQ ID NO: 176102 - DNA, 75 bp, synthetic construct
  source 1..75: mol_type = other DNA
atggtgataattcagtcgagacgaggggcatattcagcgggacttttaagtcagattaatgattctgggactgtg

SEQ ID NO: 176103 - DNA, 75 bp, synthetic construct
  source 1..75: mol_type = other DNA
atgccggcctttgaatgggttcatgtgcagctccatcagcaaaaggggatgataagtttatcaccaccgactatt

SEQ ID NO: 176104 - DNA, 75 bp, synthetic construct
  source 1..75: mol_type = other DNA
aggattgagcgggatgtcatttgacgaggcatatgaggccgtctcgggtgggcagtactggttcatcacgctgct

SEQ ID NO: 176105 - DNA, 75 bp, synthetic construct
  source 1..75: mol_type = other DNA
ctggcctgacgccttattcgcgaatgggtgatggacgggcggttttacgttcgacgatacgagaaagtctcgcca

SEQ ID NO: 176106 - DNA, 75 bp, synthetic construct
  source 1..75: mol_type = other DNA
caacaagacgaggttagcgatagtgagcgtcagcaactgatgcaaagcgttaacccagctctggtgttgcgcaac

SEQ ID NO: 176107 - DNA, 75 bp, synthetic construct
  source 1..75: mol_type = other DNA
aaaggggatgataagtttatcaccaccgactatttgcaacagtgccgccgatatgatccaactgataaaggaatt

SEQ ID NO: 176108 - DNA, 75 bp, synthetic construct
  source 1..75: mol_type = other DNA
caccgactatttgcaacagtgcccaaatggtggtcaccatcctgtcggctgtggcacaggctgaacgccggagga

SEQ ID NO: 176109 - DNA, 75 bp, synthetic construct
  source 1..75: mol_type = other DNA
caccgtcaataacccgacgccgtactacgtgatcatcagcaacgccagcgctaaaaaaggcggcaacccgccggc

SEQ ID NO: 176110 - DNA, 75 bp, synthetic construct
  source 1..75: mol_type = other DNA
actgttgaccaccaccaacctggcggcgcacgcatcagtcactccggatcgcacccgtctggtgtttaacgaaag

SEQ ID NO: 176111 - DNA, 75 bp, synthetic construct
  source 1..75: mol_type = other DNA
ggttttttaccgctttacttgacaatcacatcaatcaaatgatggcacgttattcctgcctgcgggccttacgga

SEQ ID NO: 176112 - DNA, 75 bp, synthetic construct
  source 1..75: mol_type = other DNA
tgacaaaggtaacaagatcagctcgccgttaactgtgctgccgccggtgcagcgcatcgatgcgatgatgaacgg

SEQ ID NO: 176113 - DNA, 75 bp, synthetic construct
  source 1..75: mol_type = other DNA
aattgggtgctacgacgctggcgctactgcttagcgctgccagtttgtctgccctggcgtctgtaacgccagatc

SEQ ID NO: 176114 - DNA, 75 bp, synthetic construct
  source 1..75: mol_type = other DNA
aaactgttatccctgcgctggcgctgctggccagtatttccagccacgcttcagtgacgtccgacaggacgcggc

SEQ ID NO: 176115 - DNA, 75 bp, synthetic construct
  source 1..75: mol_type = other DNA
gtctgatttacttcattaaaacagtcattatcattcagcaacctattgagggggggctaactaacagcattattc

SEQ ID NO: 176116 - DNA, 75 bp, synthetic construct
  source 1..75: mol_type = other DNA
aaaaaccttattgcgtcatgattatggatattgaccacttcaaaaaagtcaatgacacctgggggcatccggttg

SEQ ID NO: 176117 - DNA, 75 bp, synthetic construct
  source 1..75: mol_type = other DNA
ttgcaacagtgccgccgatatgatccaactgataaaggaatttgacgctcagggcgtggcagtccggttcattga

SEQ ID NO: 176118 - DNA, 75 bp, synthetic construct
  source 1..75: mol_type = other DNA
tcacatcaatcaaatgatggcacgctattcctgcctgcgggccttacggatggatttcttctacaggaaagatac

SEQ ID NO: 176119 - DNA, 75 bp, synthetic construct
  source 1..75: mol_type = other DNA
ggcgcgcgattgtcgctgaactttaaatgcactggcaataattgccaggtggatgcagagcaaagccgcaaaggc

SEQ ID NO: 176120 - DNA, 75 bp, synthetic construct
  source 1..75: mol_type = other DNA
gattatcaagcgtgattatccgggctgcgaggtgtttattacggccactttgcaggaagtggatgagctgatgac

SEQ ID NO: 176121 - DNA, 75 bp, synthetic construct
  source 1..75: mol_type = other DNA
gtgctgcacggcgcaggcaaacgaccataaaatcctcggcgtcattgcgatgccgcgtaacgaaaccaacgatct

SEQ ID NO: 176122 - DNA, 75 bp, synthetic construct
  source 1..75: mol_type = other DNA
atgaaatccgtttttacgctttccgccagcctggcaattagcctgttgctttgctgcacagcgcaggcaaacgac

SEQ ID NO: 176123 - DNA, 75 bp, synthetic construct
  source 1..75: mol_type = other DNA
cataaaatcctcggcgtcattgcaatgccacgtaacgaaaccaacgatctggcgctgaaacttcctgtttgtcgc

SEQ ID NO: 176124 - DNA, 75 bp, synthetic construct
  source 1..75: mol_type = other DNA
cataccgatgcgatggcctacaaaaacaatatctacaacaactggaacctttcgggtgaccgcgcgctttcggct

SEQ ID NO: 176125 - DNA, 75 bp, synthetic construct
  source 1..75: mol_type = other DNA
atgcgcatatggaagcgaatctggagatggagattgttccccagggattacgcgtgctgattaaagacgaccaga

SEQ ID NO: 176126 - DNA, 75 bp, synthetic construct
  source 1..75: mol_type = other DNA
agcgtggggcaaaaaccaccatcgtccggcggcagatcaaaaagaatcatgccgggcatcacggcggggcgtgga

SEQ ID NO: 176127 - DNA, 75 bp, synthetic construct
  source 1..75: mol_type = other DNA
ctgcgcgctggatttaggttctgcggaagcaaaagcgtggattggcgttgaaaacccgcatcgcgcagacgtatt

SEQ ID NO: 176128 - DNA, 75 bp, synthetic construct
  source 1..75: mol_type = other DNA
gcaccaaccttcacggaaaccgactcaggtatcattgatttaaaaagaattgataaaagggccgttattatcgcg

SEQ ID NO: 176129 - DNA, 75 bp, synthetic construct
  source 1..75: mol_type = other DNA
tgacggtttttcttataacgggtgaatcacagaatgttattaccggaatttatgccagtaaagaatcctgcctcc

SEQ ID NO: 176130 - DNA, 75 bp, synthetic construct
  source 1..75: mol_type = other DNA
gcagggcttgctggaagtccgctccgaaatcagcgacaaaaatctctacctgactcgcccggatatgggccgccg

SEQ ID NO: 176131 - DNA, 75 bp, synthetic construct
  source 1..75: mol_type = other DNA
aacggtggcgggctgtcgccgttaaataaaatcagcccgtctcatccgtcaaaacctgccaccgtggcagtgccg

SEQ ID NO: 176132 - DNA, 75 bp, synthetic construct
  source 1..75: mol_type = other DNA
attattaccgggcataccgatgcgatggcctacaaaaacaatatctacaacaactggaacctttcgggcgatcgc

SEQ ID NO: 176133 - DNA, 75 bp, synthetic construct
  source 1..75: mol_type = other DNA
agtgatgcaggtgagcgcaatggcggaccagatgctgctggacgcgaaaaatccgcaaagtgcgggtaaccggcg

SEQ ID NO: 176134 - DNA, 75 bp, synthetic construct
  source 1..75: mol_type = other DNA
atggggaatttaacaaaatttaaacacaatcccccactttttgacctgtatacatcccaaaaagtggggagcaaa

SEQ ID NO: 176135 - DNA, 75 bp, synthetic construct
  source 1..75: mol_type = other DNA
tcccgaactgataagcgcattcatgaccacggcggcggcaaactttgccacgctgacagaacgggagattgccga

SEQ ID NO: 176136 - DNA, 75 bp, synthetic construct
  source 1..75: mol_type = other DNA
gtgacaacgaagcacgccaaaaaaccacaatctcacgcccttgatttgacagaacactggctgagggtggcgata

SEQ ID NO: 176137 - DNA, 75 bp, synthetic construct
  source 1..75: mol_type = other DNA
atttaacaattataagccttcgttatcagtcaaataatactgttaaggtgacacatgaaacactgagaagctata

SEQ ID NO: 176138 - DNA, 75 bp, synthetic construct
  source 1..75: mol_type = other DNA
acagcctcagtatcatttaccggaatggaaagactgactggactaagccgccccatgatagtgaagggagtagcc

SEQ ID NO: 176139 - DNA, 75 bp, synthetic construct
  source 1..75: mol_type = other DNA
aacatataaagccacattaccgcgcccttgatatggctgaacactggctaaggggggcgattaaggcaatagacc

SEQ ID NO: 176140 - DNA, 75 bp, synthetic construct
  source 1..75: mol_type = other DNA
aatcactcaaaaaacgcaaagacagaacagcaccaagatataaagcgctggagatgacagagcacgccttaaagg

SEQ ID NO: 176141 - DNA, 75 bp, synthetic construct
  source 1..75: mol_type = other DNA
cggctcaggccttgcgtcacgcgctgatgcgcatgcacggcggcttcagtcatgaacaaaagccgtcgacgctat

SEQ ID NO: 176142 - DNA, 75 bp, synthetic construct
  source 1..75: mol_type = other DNA
aaaccggacggggagttctgccggtgggatggttcatcatgggttaaggatgaagcagcagaacaggcttaccgg

SEQ ID NO: 176143 - DNA, 75 bp, synthetic construct
  source 1..75: mol_type = other DNA
cgctgacagagcgggagattgccgaagcggaacaggtgacaaccatcaacgttaaaaccggagagcagacagcat

SEQ ID NO: 176144 - DNA, 75 bp, synthetic construct
  source 1..75: mol_type = other DNA
atggaagccttgcaaacgggatgtgttcatataaaagctgcaacctaccgtcaatgtcagaacaatggaagcctt

SEQ ID NO: 176145 - DNA, 75 bp, synthetic construct
  source 1..75: mol_type = other DNA
cacgctgacagaacgggagattgccgaagcagaagaggtaacaaccatcaacgttaaaaacgtagaggtggaatc

SEQ ID NO: 176146 - DNA, 75 bp, synthetic construct
  source 1..75: mol_type = other DNA
gtctgaactgctggattcagcacttaaagacattcaggcagaaatgacacctatcggcattcaggtaatgagcct

SEQ ID NO: 176147 - DNA, 75 bp, synthetic construct
  source 1..75: mol_type = other DNA
ttaaacgtcttagcgatcgcctggacgccatccgtcaccaacaggccgacctgtcgctggttgaagccgcagaca

SEQ ID NO: 176148 - DNA, 75 bp, synthetic construct
  source 1..75: mol_type = other DNA
ctgtcgccttctgggcgggggcgcacgtagcgtggctgatgctggtgatgattggctttaacctctttttctcac

SEQ ID NO: 176149 - DNA, 75 bp, synthetic construct
  source 1..75: mol_type = other DNA
gggacgaacaaaaaatccccggtgaatgcctcccgttaaaaaaagtatcgctgtacctgaataacgaaacaccgg

SEQ ID NO: 176150 - DNA, 75 bp, synthetic construct
  source 1..75: mol_type = other DNA
gtcgtggtgcgaaaacgcgtccgcttgaggcatttattcaactgctggatgcgcctgactcggcaaaacagggtt

SEQ ID NO: 176151 - DNA, 75 bp, synthetic construct
  source 1..75: mol_type = other DNA
tacccgccaaccgttatcgacagcattaacgccaaagtcacggcaaaccagaaaaccctgcagcgcgaacaggaa

SEQ ID NO: 176152 - DNA, 75 bp, synthetic construct
  source 1..75: mol_type = other DNA
ttcgtttacgcggtgaagctctgcgccagaaccccggtgttatggagctggaagccatcaataaatggaacggca

SEQ ID NO: 176153 - DNA, 75 bp, synthetic construct
  source 1..75: mol_type = other DNA
tcgcggtcagtctggctgtcttcggacttgtaggttgcgatcgcgttgaaccaggtaatgtgggtatcaaagtca

SEQ ID NO: 176154 - DNA, 75 bp, synthetic construct
  source 1..75: mol_type = other DNA
gtctctacgactggacaggcgcgataattgcgctttgcggtatgttgattattgttgctggctggggacgtgcct

SEQ ID NO: 176155 - DNA, 75 bp, synthetic construct
  source 1..75: mol_type = other DNA
cctgttattgggggcgggtctggttgcccgtttcctcgggagtttgctcatcgcgccccgcgtcagcgatccttc

SEQ ID NO: 176156 - DNA, 75 bp, synthetic construct
  source 1..75: mol_type = other DNA
atgaaaaaaattattttttctttagccattgttctgccgaccattggccttgtcggctgcgatcgcgttgaaccc

SEQ ID NO: 176157 - DNA, 75 bp, synthetic construct
  source 1..75: mol_type = other DNA
ctatcaacgccaaagtaacggctaaccagcgtactctgcaacgtcagcaggaagttgaacaacgtaaagctgagg

SEQ ID NO: 176158 - DNA, 75 bp, synthetic construct
  source 1..75: mol_type = other DNA
gcattggtgatgcgtttaaatcccggatggcacaaaaaagcgtgctgttactggagcaattgggttgtaatgtcc

SEQ ID NO: 176159 - DNA, 75 bp, synthetic construct
  source 1..75: mol_type = other DNA
cgcaggcgcaggtttcccgcgttgccggggccgatctctgggaagagctgatggcgcgcgcaggcaaagaaggga

SEQ ID NO: 176160 - DNA, 75 bp, synthetic construct
  source 1..75: mol_type = other DNA
gcaaaccactgactggatcaacattaacagcgataacgacaataaacgctgcgtctcaaaaatcaccttttctgg

SEQ ID NO: 176161 - DNA, 75 bp, synthetic construct
  source 1..75: mol_type = other DNA
cgtttatcaccgcgatggttaatcagttgcttaatattcatgccggagcacgtttgccgctgttaagtgcggtgc

SEQ ID NO: 176162 - DNA, 75 bp, synthetic construct
  source 1..75: mol_type = other DNA
aaatgctgacaacactcacgatattgatggtatttctctgtgtcggcagttatctgttaagcccaaaatggcagg

SEQ ID NO: 176163 - DNA, 75 bp, synthetic construct
  source 1..75: mol_type = other DNA
gcgcgatccgttacatcagtttgccagccagcaaacaccggagacacagcttcaggcattgcaggataaaattcg

SEQ ID NO: 176164 - DNA, 75 bp, synthetic construct
  source 1..75: mol_type = other DNA
gcgcgatccgctacatcagtttgccagccagcaaaccccggaagcgcagcttcaggcattgcaggataaaatccg

SEQ ID NO: 176165 - DNA, 75 bp, synthetic construct
  source 1..75: mol_type = other DNA
tttgccgggagatatggcgggagcgccagcgctgcagtttttcccatggccggatgttgatgcctggggcgagtc

SEQ ID NO: 176166 - DNA, 75 bp, synthetic construct
  source 1..75: mol_type = other DNA
gaaggtctggacccattagcgcctgccgacgaaaaccgactggcggatattgccaccgcgtggaccgattatctc

SEQ ID NO: 176167 - DNA, 75 bp, synthetic construct
  source 1..75: mol_type = other DNA
aggtaagggacgaacaaaaaatccccggtgaatgcctcccgttaaaaaaagtgtcgctgaacctgaataacgaaa

SEQ ID NO: 176168 - DNA, 75 bp, synthetic construct
  source 1..75: mol_type = other DNA
ggtcaggcgttctgggataagcaaggcttccagtttgaggcatttcgtccgcaggtgatggatgtcgacaaacca

SEQ ID NO: 176169 - DNA, 75 bp, synthetic construct
  source 1..75: mol_type = other DNA
cgcacgtttgcccagtcaggcgttctgggataaacaaggcttccagtttgaagcgtttcgcccgcaggtgatgga

SEQ ID NO: 176170 - DNA, 75 bp, synthetic construct
  source 1..75: mol_type = other DNA
tcccgcctggccgacgccaacgcgtggtgtcagcgaaatccgcctggcattgcgttataaatcgaacgattcgct

SEQ ID NO: 176171 - DNA, 75 bp, synthetic construct
  source 1..75: mol_type = other DNA
gggcaagccgccagcaggagagcaccggttggtcagcgtggttggcgctggttcgccagaactggcgctttctgg

SEQ ID NO: 176172 - DNA, 75 bp, synthetic construct
  source 1..75: mol_type = other DNA
attggctttaacctctttttctcaccgctggtaccgttgaccgatgcactggcgaatacgtggcaaaagcagttc

SEQ ID NO: 176173 - DNA, 75 bp, synthetic construct
  source 1..75: mol_type = other DNA
atggttactaagaacacagcaaataatgctaataatgctaataatgcactgaacattcttcctgaagcagcaaac

SEQ ID NO: 176174 - DNA, 75 bp, synthetic construct
  source 1..75: mol_type = other DNA
gggtaagccgccagcaggagagcacgggatggccggcctggctggcgctggttcgccagaactggcgctttctgg

SEQ ID NO: 176175 - DNA, 75 bp, synthetic construct
  source 1..75: mol_type = other DNA
gccatatactggcaggcggcgggttactcggcttcggcggtgggctatttatggtcgcttggtgtggtggcggaa

SEQ ID NO: 176176 - DNA, 75 bp, synthetic construct
  source 1..75: mol_type = other DNA
tcctcgcgctgttgacgttgggcgtggcatccatgctgctcggctttctcatccgtccgacgattcagccacaag

SEQ ID NO: 176177 - DNA, 75 bp, synthetic construct
  source 1..75: mol_type = other DNA
tcttattgaagacctttctcatcttgaaaaaagctcatctgaaatgtctttctcaagaaagctggctaaaatttc

SEQ ID NO: 176178 - DNA, 75 bp, synthetic construct
  source 1..75: mol_type = other DNA
tgattttataaaaaatgcaatagccataccgcctaactctcaggattattatgatttaaataataaatttactga

SEQ ID NO: 176179 - DNA, 75 bp, synthetic construct
  source 1..75: mol_type = other DNA
cactcaggccatcgctatccctcctaactcacaagattattataaccctttaaataaattcacagatgtgaaagg

SEQ ID NO: 176180 - DNA, 75 bp, synthetic construct
  source 1..75: mol_type = other DNA
acacacaactctggcaggcgttatcgaaatattttgcctcacaggagaatgtgaacaccgccattggtgctctgg

SEQ ID NO: 176181 - DNA, 75 bp, synthetic construct
  source 1..75: mol_type = other DNA
gaccttgctctcctggaaaatgattttttaataaaaaaccagaaaactctcgaagttacaatgcaattccaccaa

SEQ ID NO: 176182 - DNA, 75 bp, synthetic construct
  source 1..75: mol_type = other DNA
tttaaaagaaaaattgaagaggatatgatagaaaatgatgatttgaccatacctcttttatcaaattttgatgat

SEQ ID NO: 176183 - DNA, 75 bp, synthetic construct
  source 1..75: mol_type = other DNA
caatatctggggcacggcgtgttctgggtgatggcattggtggcgcttccggcaatgtttctgcgcccaaaagtg

SEQ ID NO: 176184 - DNA, 75 bp, synthetic construct
  source 1..75: mol_type = other DNA
cgaattagcggaaacagagcaatcacagcagcgcatagcgtgaatatgtctaagcttcgtgactttaatcctatg

SEQ ID NO: 176185 - DNA, 75 bp, synthetic construct
  source 1..75: mol_type = other DNA
aaagctcgtcaaaaaatctacgatcgcctgcgttacgttgaaaatgagcatatcgttttcgacccggttacaggt

SEQ ID NO: 176186 - DNA, 75 bp, synthetic construct
  source 1..75: mol_type = other DNA
ctataaaagtattaagctacatgctcccctgtacggcaattatcatggctgtcatatggataatatttttcatcg

SEQ ID NO: 176187 - DNA, 75 bp, synthetic construct
  source 1..75: mol_type = other DNA
gaaagagccaaatctacgaaggtctttaagttcaaaactcaggttgaagaaactgttaaagcagcaagacagcca

SEQ ID NO: 176188 - DNA, 75 bp, synthetic construct
  source 1..75: mol_type = other DNA
gcattaaataatctgaaaggtcgagtggaaacattcacacaagatttaaaggttatcaagccgtcagtaaatatt

SEQ ID NO: 176189 - DNA, 75 bp, synthetic construct
  source 1..75: mol_type = other DNA
tggtattgtcgctgtaaggtctggtattggtgctgtaggtggtatctggaacttaattagggctatttccacgct

SEQ ID NO: 176190 - DNA, 75 bp, synthetic construct
  source 1..75: mol_type = other DNA
gaagagacggagaaaaaagcgcgagacgtcaacgagaaaacagcgctgctgaagaagaaatccgccaccgagctt

SEQ ID NO: 176191 - DNA, 75 bp, synthetic construct
  source 1..75: mol_type = other DNA
aaaaaagtgcgcgatgtgaacgagaaaacggcgctgcttaagaagaaatccgccaccgagcttggcgaactggcg

SEQ ID NO: 176192 - DNA, 75 bp, synthetic construct
  source 1..75: mol_type = other DNA
cgacccacccgccgaaacccgctaccgtggcggtgccggaagagacggagaaaaaagtgcgcgatgtgaacgaga

SEQ ID NO: 176193 - DNA, 75 bp, synthetic construct
  source 1..75: mol_type = other DNA
gaaaccagctttatgacctttagcagtaatatctacgaccaatatgcagaagctacgctattaagttcatcattc

SEQ ID NO: 176194 - DNA, 75 bp, synthetic construct
  source 1..75: mol_type = other DNA
cttgtatcaagccttgtatcagcagcaggaagagttgctgtagctatacaggcagtatgctacctgtgcctctgt

SEQ ID NO: 176195 - DNA, 75 bp, synthetic construct
  source 1..75: mol_type = other DNA
atgcgaagaagtcgcggcagtgatcgagcgcgaagggcatcatacttcagcagaagatttgcgtgattacgtgat

SEQ ID NO: 176196 - DNA, 75 bp, synthetic construct
  source 1..75: mol_type = other DNA
gagtatcacatcaacagtctgccagaagaaacacgcagggccattaaaggagcctcactttctgataaaccagtg

SEQ ID NO: 176197 - DNA, 75 bp, synthetic construct
  source 1..75: mol_type = other DNA
cctccggcggtggtgtcactattgggggcggtgagatgagcttgcaaactgattttgccgttgccctgttcagtg

SEQ ID NO: 176198 - DNA, 75 bp, synthetic construct
  source 1..75: mol_type = other DNA
cgattgttgaagacccgtcatacagcgtggaagagctggacaaactggaggcgtttttcgcccagttcgattttg

SEQ ID NO: 176199 - DNA, 75 bp, synthetic construct
  source 1..75: mol_type = other DNA
cgaaatgccgtgcggcgattgcagaacgggccaaagaagaacaggccaatgatacagcggcagaagaggtgaaat

SEQ ID NO: 176200 - DNA, 75 bp, synthetic construct
  source 1..75: mol_type = other DNA
gcaggtcggtgatgttgttttcactttgtcaggtgatatggttgttcctggagttattgcatcttccgcgtattt

SEQ ID NO: 176201 - DNA, 75 bp, synthetic construct
  source 1..75: mol_type = other DNA
tttcttaacgcctgatgagcaagctgcggctattgagatcattcgtgtggcaggaattaaaggtcttatgccgac

SEQ ID NO: 176202 - DNA, 75 bp, synthetic construct
  source 1..75: mol_type = other DNA
tttgttggcgatatcagcaagtctatccaaagtaatctcgataagctctcagcccaatacaatgataagcaaagt

SEQ ID NO: 176203 - DNA, 75 bp, synthetic construct
  source 1..75: mol_type = other DNA
atgaacaacaggctagttttatcagaactcttcatcagcaaaatgacatgtttgttggcgatatcagcaagtcta

SEQ ID NO: 176204 - DNA, 75 bp, synthetic construct
  source 1..75: mol_type = other DNA
caacgtgccggtggcgaaggcatcctgacgacaatctacggtattctggtgtttttaccatggtgggcagttcag

SEQ ID NO: 176205 - DNA, 75 bp, synthetic construct
  source 1..75: mol_type = other DNA
gacgaattttcaatatccagaaatattcgatctacgacggtgacggtatccgcacactgattttttttaaaggct

SEQ ID NO: 176206 - DNA, 75 bp, synthetic construct
  source 1..75: mol_type = other DNA
aattgacgctgatattcatgtccatttcagtacagctgagttgcagatgcaccgggagtttgaacgtcttaaatt

SEQ ID NO: 176207 - DNA, 75 bp, synthetic construct
  source 1..75: mol_type = other DNA
ctcgaactcaaaaaaaacactgaaaaagaagggctggatgtttacagcgaactggaaaagggagagcagattatc

SEQ ID NO: 176208 - DNA, 75 bp, synthetic construct
  source 1..75: mol_type = other DNA
cagcgggcagaaaaaactggttcagttgttcgactccggtgaagtctgcgcgtttcgtatcaaatatcccaacgg

SEQ ID NO: 176209 - DNA, 75 bp, synthetic construct
  source 1..75: mol_type = other DNA
gacggcatttttcgtttgactgctgaaagtcaggccacacgtggagcggaacttcaggcagacccgacgttacgg

SEQ ID NO: 176210 - DNA, 75 bp, synthetic construct
  source 1..75: mol_type = other DNA
atgccagcaatggcagggattcgctcaaccttaattaagaagaaaaacatgattaccagttatgaagccactgtt

SEQ ID NO: 176211 - DNA, 75 bp, synthetic construct
  source 1..75: mol_type = other DNA
gttaaaaaaatgtgtctggtgcatatcattaagaatctgcctgcagaaaaaaagacatgtatctggcctcactga

SEQ ID NO: 176212 - DNA, 75 bp, synthetic construct
  source 1..75: mol_type = other DNA
aaatgatgtatctgatatcaatagaagagatttaaaagtggatttgcccctatatttccagacacctgttatcac

SEQ ID NO: 176213 - DNA, 75 bp, synthetic construct
  source 1..75: mol_type = other DNA
tgctaacatcttacaaggatactgtgatgagatatatgctatttatgaaaaacatcctgaaacagcaatcgatat

SEQ ID NO: 176214 - DNA, 75 bp, synthetic construct
  source 1..75: mol_type = other DNA
ccgattgctgtaccggaaggggcagaaattacgattgccgccgatggcacgatttcggcgcggaatcccggcgat

SEQ ID NO: 176215 - DNA, 75 bp, synthetic construct
  source 1..75: mol_type = other DNA
tgggaacgtggttctttggtttaccggcctccagttcgcacactttgattggtgcgattatcggcatcggtttaa

SEQ ID NO: 176216 - DNA, 75 bp, synthetic construct
  source 1..75: mol_type = other DNA
gacgcgtattgccctcattgtttccgctgcgggcgtggcgttttcgcacggcgcgaacgacgggcagaaaggaat

SEQ ID NO: 176217 - DNA, 75 bp, synthetic construct
  source 1..75: mol_type = other DNA
aagacgtgatgacccgtaccgtgaaaatcagcggcgtgggacgtccgtacctggcggaagaaagtacggagacgg

SEQ ID NO: 176218 - DNA, 75 bp, synthetic construct
  source 1..75: mol_type = other DNA
caaaaatgtgcctggttcacatcggaaagaatctgcccgcagaaaaaaaagctggatttctggcaactctgatcg

SEQ ID NO: 176219 - DNA, 75 bp, synthetic construct
  source 1..75: mol_type = other DNA
tgttcgcccgactaaccgcgggaaaattccgaagaagacaccaccgaaacgccgatgtatgtcaatcgcggtggt

SEQ ID NO: 176220 - DNA, 75 bp, synthetic construct
  source 1..75: mol_type = other DNA
ggtgatggatgcgttaaacctgcgcgaagtcaccaagattttctcttcactcattgtctcccccatcgtggggct

SEQ ID NO: 176221 - DNA, 75 bp, synthetic construct
  source 1..75: mol_type = other DNA
ctctcatttgttggtaactggtcgcccatgctgtctgcggcgataggcgtggtggttatcgcttttttagttggc

SEQ ID NO: 176222 - DNA, 75 bp, synthetic construct
  source 1..75: mol_type = other DNA
ggagtcaggagctggtatcatcggtaaaacaattccgttccagcctgaacaatctgtttgatctggctgacgacc

SEQ ID NO: 176223 - DNA, 75 bp, synthetic construct
  source 1..75: mol_type = other DNA
acgggcacgatcaacaacatctttctaaagttagtttcccagtagaaaatagaatttttgttttacaatgcggat

SEQ ID NO: 176224 - DNA, 75 bp, synthetic construct
  source 1..75: mol_type = other DNA
gcatcatctacagggcgaggagtacccgtgcgggcattcagaaaaaatgctaacaaagcagatattatcaaaaat

SEQ ID NO: 176225 - DNA, 75 bp, synthetic construct
  source 1..75: mol_type = other DNA
ttaatcaataacagtctgccacgcctgaatgaaggtattcgcttatggcgcgaaaatccgggatcaaaactgatc

SEQ ID NO: 176226 - DNA, 75 bp, synthetic construct
  source 1..75: mol_type = other DNA
ttggcggtatgctgctgccacttccgctgatgttgctgattattggtgctggcctggtgctgctgtggtttagtc

SEQ ID NO: 176227 - DNA, 75 bp, synthetic construct
  source 1..75: mol_type = other DNA
atgcgtgattttcagaatgcctttgatgctgcccttgccggggtggacagcacgattattgaagtgatggggctc

SEQ ID NO: 176228 - DNA, 75 bp, synthetic construct
  source 1..75: mol_type = other DNA
tgtttctccggatgacgggggcagctgttatctctggctgaaccgtgggcaaccacccgcagttaaccggcgacg

SEQ ID NO: 176229 - DNA, 75 bp, synthetic construct
  source 1..75: mol_type = other DNA
atgaagcgacttaaaaatgaacttaatgcgctggtgaatcggggtgtcgacagacatctgcgcctcgccgtaacc

SEQ ID NO: 176230 - DNA, 75 bp, synthetic construct
  source 1..75: mol_type = other DNA
ccgacgaaaaccggctggcagacattgccgccgcctggaccgagtatctccaccactgcaaacagcaggggttgc

SEQ ID NO: 176231 - DNA, 75 bp, synthetic construct
  source 1..75: mol_type = other DNA
aaaatgttgagcgtttaactggcgataatcctgaaggtaatgactccaacttattgatagtgttttatgttcaga

SEQ ID NO: 176232 - DNA, 75 bp, synthetic construct
  source 1..75: mol_type = other DNA
gcgatggtcagacgctgaatttacgcgttatcggcgggcgttatcattacacggcggcagggcagttggctcagc

SEQ ID NO: 176233 - DNA, 75 bp, synthetic construct
  source 1..75: mol_type = other DNA
agtgtggcagcgaagttcagggggtttttgacgatccggagtcgctggggtttgccggtagcggggtccgtattg

SEQ ID NO: 176234 - DNA, 75 bp, synthetic construct
  source 1..75: mol_type = other DNA
tgccagagttgcgcaatcgctgggcgtgccgcacgagcaaattatcaccctggatttgccaaaagataccgaaga

SEQ ID NO: 176235 - DNA, 75 bp, synthetic construct
  source 1..75: mol_type = other DNA
atgtcaaagcgcaaattgagtttaaccccgcgtgggtaacggaataccgtcagattggttatgaaaagcgccaac

SEQ ID NO: 176236 - DNA, 75 bp, synthetic construct
  source 1..75: mol_type = other DNA
gtcagttagttgaattcccgctggggccaacaataaacgcgccctctgaagatatgcgttttcgcgcagcagtag

SEQ ID NO: 176237 - DNA, 75 bp, synthetic construct
  source 1..75: mol_type = other DNA
ggccaatacttggctgttagacaggatggtgttgtcaggtcaaaaaatgtcacaatagaagtagaagataatggc

SEQ ID NO: 176238 - DNA, 75 bp, synthetic construct
  source 1..75: mol_type = other DNA
tgttacggactcgtgagaaactggctctgcttgaacaaagaatcagcgaactggaaaatcgcagtactgagatca

SEQ ID NO: 176239 - DNA, 75 bp, synthetic construct
  source 1..75: mol_type = other DNA
agctcattacctgatgccactcaggcagaattaggaggggcgcagttattagataacgataagtcagcttataag

SEQ ID NO: 176240 - DNA, 75 bp, synthetic construct
  source 1..75: mol_type = other DNA
atccaaaatcgattgaatcaatggtcaaaaaacagcgtgagtccggtgttactctgtcgacgcttggcgtggggg

SEQ ID NO: 176241 - DNA, 75 bp, synthetic construct
  source 1..75: mol_type = other DNA
atatgaatatatgtcctgttttgttcgtgatgtggctgcattcagaagtaattttgaaagcgaagagcttttaaa

SEQ ID NO: 176242 - DNA, 75 bp, synthetic construct
  source 1..75: mol_type = other DNA
atgcccccctcagtggcaaaagacatggtcagcacggaacggctgaatatgcgtgattttcagaatgcctttgat

SEQ ID NO: 176243 - DNA, 75 bp, synthetic construct
  source 1..75: mol_type = other DNA
aatcccttctccggtctggttgatgcatagcgatcgtgttggctatgaaacgcttggccgcatctggcagtggct

SEQ ID NO: 176244 - DNA, 75 bp, synthetic construct
  source 1..75: mol_type = other DNA
gattcaataaaagaatcagtggtgaagttcagattagtgctgatatccgtgtcagtgatttaatgacagaaggtg

SEQ ID NO: 176245 - DNA, 75 bp, synthetic construct
  source 1..75: mol_type = other DNA
tcagaacaacgactttcgattcatttcagccttattactatgttgagcgtttatattctggtgcaaaagaaatag

SEQ ID NO: 176246 - DNA, 75 bp, synthetic construct
  source 1..75: mol_type = other DNA
attttgaaagcgaagagcttttaaaacctctgtttaaccatgataaaggtgatactgttgagtttgttatcagcg

SEQ ID NO: 176247 - DNA, 75 bp, synthetic construct
  source 1..75: mol_type = other DNA
cactggatgacatataccttgaggatattccccacatcatacatccggccacggcggtacatgacctcgaagata

SEQ ID NO: 176248 - DNA, 75 bp, synthetic construct
  source 1..75: mol_type = other DNA
ccgaccaccggactcacaccgtacgcacgtaccggcaactggccgctgtgggtgctgacggcactgtttggtttt

SEQ ID NO: 176249 - DNA, 75 bp, synthetic construct
  source 1..75: mol_type = other DNA
gttacatccagtggtttaccccgcaaccggagaaaaccattcaggtttcaatggttcagggtgatattccacaat

SEQ ID NO: 176250 - DNA, 75 bp, synthetic construct
  source 1..75: mol_type = other DNA
ccgcgatgtggtaaaagtcccgaaaggctatcatccggtggccactatcgcaggttacgataactattatctgaa

SEQ ID NO: 176251 - DNA, 75 bp, synthetic construct
  source 1..75: mol_type = other DNA
cacccgcgccagcatagggaatgtgaaactgcgtctggcgccggacgatcagccctgggaaatgggctttgccgc

SEQ ID NO: 176252 - DNA, 75 bp, synthetic construct
  source 1..75: mol_type = other DNA
cgaagtaagttcaacctgagcggccccattcaggatggcctgctgtacggcagcgtcaccctgttacgccaggtt

SEQ ID NO: 176253 - DNA, 75 bp, synthetic construct
  source 1..75: mol_type = other DNA
ttccccgaaaccatttcagttggcggtgcggagtatgtggggagcgcaattcatttgatcgataccgtggagatc

SEQ ID NO: 176254 - DNA, 75 bp, synthetic construct
  source 1..75: mol_type = other DNA
gctcaacgcgccttgagcgtgtcgccgcccgtgtttgcgcctctctgggggaagtgcgggtaccgctgcgtcagc

SEQ ID NO: 176255 - DNA, 75 bp, synthetic construct
  source 1..75: mol_type = other DNA
atggagcgcgtcgccgcgcgcgtctgtgcgtcgttgggtgaagtgcccgtgccattgcgccagttgtggaacccg

SEQ ID NO: 176256 - DNA, 75 bp, synthetic construct
  source 1..75: mol_type = other DNA
ttggcttttgctggggatttggcctctttggcagcggtattaactgggtctatgtcagcatcgcgacctttggcg

SEQ ID NO: 176257 - DNA, 75 bp, synthetic construct
  source 1..75: mol_type = other DNA
ggcctgcggcgattgtttcgctgatggggcttcaggctctgacctttaaccgccgcccacttcagtctgccgcta

SEQ ID NO: 176258 - DNA, 75 bp, synthetic construct
  source 1..75: mol_type = other DNA
gcgttttccgttgaccgctgggatcgcaactggccggaagagacaaaacgacaggtgattcgtgatgcatggctg

SEQ ID NO: 176259 - DNA, 75 bp, synthetic construct
  source 1..75: mol_type = other DNA
gcttctctggaaacaaactggaatagaattacagctgccaccatgccagaaatcagtgttccggtgttgtgttgg

SEQ ID NO: 176260 - DNA, 75 bp, synthetic construct
  source 1..75: mol_type = other DNA
attctgctttatagcgcctcggatattgagatgttgacgccgggacaattgactacgcatccgttcttacaacgg

SEQ ID NO: 176261 - DNA, 75 bp, synthetic construct
  source 1..75: mol_type = other DNA
tcaacacgtcacccatgtggaaacgcgcggaaaagcgttgctgacccatttttccggcgggttaacgctttatag

SEQ ID NO: 176262 - DNA, 75 bp, synthetic construct
  source 1..75: mol_type = other DNA
atcataaagcgaaagatctcagtgcggcgcaactggatgcactcgcacacgcgttactggatattcctcgacttt

SEQ ID NO: 176263 - DNA, 75 bp, synthetic construct
  source 1..75: mol_type = other DNA
tgctggtggattgcctgcaacctctcaacagtgggccacaggcatttaatgatatgcgtctggcgctgacgcagc

SEQ ID NO: 176264 - DNA, 75 bp, synthetic construct
  source 1..75: mol_type = other DNA
gccgatgctggcgcaggactatttaagctggtcgcgccagatgacgggcttacttaatggtcagcgcggcgaatg

SEQ ID NO: 176265 - DNA, 75 bp, synthetic construct
  source 1..75: mol_type = other DNA
gctgagtttccgcattgccgatcccgtttctgatgcagaacgtttcactcgctggatgaacgatccgcgcgttga

SEQ ID NO: 176266 - DNA, 75 bp, synthetic construct
  source 1..75: mol_type = other DNA
cctatcggtaattataaatatagtggtagtaattcactcgacatgtgtttctatgatggatatagtacaaacagt

SEQ ID NO: 176267 - DNA, 75 bp, synthetic construct
  source 1..75: mol_type = other DNA
aaacaaactggaatcgagtaaccgcagttgctatgccggaagttaatgttccagtattatgctggccagcaagat

SEQ ID NO: 176268 - DNA, 75 bp, synthetic construct
  source 1..75: mol_type = other DNA
aaatatcactgttaaattaactgataagggaaatattcagatatggttacctcagttcaaaagtgacgctcgcgt

SEQ ID NO: 176269 - DNA, 75 bp, synthetic construct
  source 1..75: mol_type = other DNA
atcataaagcgaaagaacttaacgcgacacaactggatgcgctgtcgcacgcgctactggatatcccgcgcctct

SEQ ID NO: 176270 - DNA, 75 bp, synthetic construct
  source 1..75: mol_type = other DNA
ggacagcagcctgggctggcaggcgactgaacggatgaacatttccgtctatgtcgataacctgttcgaccgtcg

SEQ ID NO: 176271 - DNA, 75 bp, synthetic construct
  source 1..75: mol_type = other DNA
ccctgagtgggaaatacaccaccgatgactgggttttcaacctgatcagcgcctggcagcagcagcattattcgc

SEQ ID NO: 176272 - DNA, 75 bp, synthetic construct
  source 1..75: mol_type = other DNA
cgacaatctgctccaggctggcggtacgcgggttgctgcgcagacaaatatcttccagcgcggcctgcgcccatg

SEQ ID NO: 176273 - DNA, 75 bp, synthetic construct
  source 1..75: mol_type = other DNA
ggagcaggtacttgcagtatatggtcctgtacatgcgcgactgcttcgtcagtcactggaactgatcactgatgc

SEQ ID NO: 176274 - DNA, 75 bp, synthetic construct
  source 1..75: mol_type = other DNA
gatgttctgtgtgataccggactgcaacccgtattttcagaggatgatcgtgaacaggtgattgccgtgtatggc

SEQ ID NO: 176275 - DNA, 75 bp, synthetic construct
  source 1..75: mol_type = other DNA
acggtttacgtcgagatcagttaatcgaagttctgtctatttctgaattcccagttgtcctggtcgagaatccct

SEQ ID NO: 176276 - DNA, 75 bp, synthetic construct
  source 1..75: mol_type = other DNA
tgacttcctccgtgattctggtattggccatatccagtgcgagcctggcggagcatcaatacgacgtacagttac

SEQ ID NO: 176277 - DNA, 75 bp, synthetic construct
  source 1..75: mol_type = other DNA
gtatcggcgctgttgacatatcactttataaccagtcgatattaacgtctgaacataatggcaatgttgcaacca

SEQ ID NO: 176278 - DNA, 75 bp, synthetic construct
  source 1..75: mol_type = other DNA
cgtgatgtggagctgaccgctgctggagcgtggtttctcaaagaagggcgctctgttgtcaaaaaaatgcagatc

SEQ ID NO: 176279 - DNA, 75 bp, synthetic construct
  source 1..75: mol_type = other DNA
cgacgtcaccgtgatgtggaactgaccgctgccggggcgtggtttctcaaagaagggcgctctgttgtcaaaaaa

SEQ ID NO: 176280 - DNA, 75 bp, synthetic construct
  source 1..75: mol_type = other DNA
gtgataatcagggcgagagccgctcgaatatgaccggaactcgcgccgataaccagaaccacggttatgccgttg

SEQ ID NO: 176281 - DNA, 75 bp, synthetic construct
  source 1..75: mol_type = other DNA
tgatgagtgaagcagaaccacggggtactcgctggtatcacccgaagatggggctgttccaggcgctgggctggc

SEQ ID NO: 176282 - DNA, 75 bp, synthetic construct
  source 1..75: mol_type = other DNA
ctggtggcgatggtcagacgctgaatttacgcgttatcggcgggcgttatcattacacggcggtagggcagttgg

SEQ ID NO: 176283 - DNA, 75 bp, synthetic construct
  source 1..75: mol_type = other DNA
tatcgatgaccagtgtcgatatcgccctgctggtgggatgccgtcatgacaatgtgaagaggacggttgacactc

SEQ ID NO: 176284 - DNA, 75 bp, synthetic construct
  source 1..75: mol_type = other DNA
tgaagaacctgagtgggcggcacgagctgaaaaagtggctgaacgcctgcatgatttgacgtcatttatagtaaa

SEQ ID NO: 176285 - DNA, 75 bp, synthetic construct
  source 1..75: mol_type = other DNA
ggttcgggaaacactgactggaccggtggaaataaaaatggcatgtactctgatgtgataattaaagatattcat

SEQ ID NO: 176286 - DNA, 75 bp, synthetic construct
  source 1..75: mol_type = other DNA
tacttatgagtggaatgaaacaaaaaaaagaattgatgccgttaaacgattttggttttcttcaataagatatgg

SEQ ID NO: 176287 - DNA, 75 bp, synthetic construct
  source 1..75: mol_type = other DNA
agaagagcgcggtgaagatctaccgattgcgatcacgctcggtaacgatccgatcatcacgctgatgggggctac

SEQ ID NO: 176288 - DNA, 75 bp, synthetic construct
  source 1..75: mol_type = other DNA
ggtggttatcgctttttttagttggcggataatgtttctgttgggtggtattggcatactgttagcctggtttct

SEQ ID NO: 176289 - DNA, 75 bp, synthetic construct
  source 1..75: mol_type = other DNA
ggcgtggtggttatcgctttttttagttggcgaataatgtttctgctgggtggtattggcatactgttagcctag

SEQ ID NO: 176290 - DNA, 75 bp, synthetic construct
  source 1..75: mol_type = other DNA
gctttgcccgcgcggtgggcctgcgtgcgatgaccacgccgcacggtctgggctacgtaaagatggtgattatgg

SEQ ID NO: 176291 - DNA, 75 bp, synthetic construct
  source 1..75: mol_type = other DNA
cgatttacagcctgatgaaaggggcggcaagacgcggaaaagaggcgttgcttcagctttatccaggactggaag

SEQ ID NO: 176292 - DNA, 75 bp, synthetic construct
  source 1..75: mol_type = other DNA
atcgacgaatggcaaacggcgacgcctctattagctcctgactggatacagcaggtcgaggggtgggcgacaggc

SEQ ID NO: 176293 - DNA, 75 bp, synthetic construct
  source 1..75: mol_type = other DNA
gaagttttcctaaagggtgggcaagcatggggttcggtaccatcgtgtttgccaaaaaaccaaaacaaggctttc

SEQ ID NO: 176294 - DNA, 75 bp, synthetic construct
  source 1..75: mol_type = other DNA
ttttacaggcgctcgacgaccaggggcaattgctgaaaatcagcgaagaggtgaatgccgagccggatctggctg

SEQ ID NO: 176295 - DNA, 75 bp, synthetic construct
  source 1..75: mol_type = other DNA
cggttaaaaaacagattgatgagtttatccgccgctgggataacttccccattgccccggagcgccgcgccaatc

SEQ ID NO: 176296 - DNA, 75 bp, synthetic construct
  source 1..75: mol_type = other DNA
aacgagttttcgctatgttgcaaacagtgatggatctttaccatcaacggccagtcttacatacgctggtcagtc

SEQ ID NO: 176297 - DNA, 75 bp, synthetic construct
  source 1..75: mol_type = other DNA
cgtagcggatcgctttcaaactttcacgaggcaaaacgcgttggcctgaatggtttttcaaaactggataaagta

SEQ ID NO: 176298 - DNA, 75 bp, synthetic construct
  source 1..75: mol_type = other DNA
aagcaaagcgcgttggtctgaatggtttttcaaagctggataaagtaccggaaggtgcggaatataaatacatca

SEQ ID NO: 176299 - DNA, 75 bp, synthetic construct
  source 1..75: mol_type = other DNA
ccttacgccatgatgagccttttcgatatggcacaggcatcattaacccatcgcggcataagcacaggcagctac

SEQ ID NO: 176300 - DNA, 75 bp, synthetic construct
  source 1..75: mol_type = other DNA
gtttctggggagttaccgcgaagcagtttgtcagcgaactgaatgcactgggtgatatcacccacattaatctcc

SEQ ID NO: 176301 - DNA, 75 bp, synthetic construct
  source 1..75: mol_type = other DNA
aggggatggacacgatagaggtcgcttatcttgatggtattgatacgccatatcttgaggagcaggagggcttta

SEQ ID NO: 176302 - DNA, 75 bp, synthetic construct
  source 1..75: mol_type = other DNA
aactacaatccccatggcgatggggcgtgcagccgccagaacagtaggtaatctggtgtatctcctgttaaccgg

SEQ ID NO: 176303 - DNA, 75 bp, synthetic construct
  source 1..75: mol_type = other DNA
ttgacgatgtcccggtgacctgtatcgatatggcgatgccagtcgtcattattcctgctgaatatctgggaaaaa

SEQ ID NO: 176304 - DNA, 75 bp, synthetic construct
  source 1..75: mol_type = other DNA
tcgctatatagagatattattattccggtgacggatgaatcatgccggaacgcagcagcagacgggcaaactttg

SEQ ID NO: 176305 - DNA, 75 bp, synthetic construct
  source 1..75: mol_type = other DNA
tccgtttgtgcagcttgcgaccctgaaacaacggatcgaaaaggcagccagaacggcaggaagaatgccagccgg

SEQ ID NO: 176306 - DNA, 75 bp, synthetic construct
  source 1..75: mol_type = other DNA
gaaccgcatcaacgagattaaggatctgtttgccatgttcggcggcaagcatgattctctcaagatgcagtgtct

SEQ ID NO: 176307 - DNA, 75 bp, synthetic construct
  source 1..75: mol_type = other DNA
aggctaaacgtgtcggtctgaatggtttttcagaactggataaagtcccggaaggtgctgaatacaaatatgtca

SEQ ID NO: 176308 - DNA, 75 bp, synthetic construct
  source 1..75: mol_type = other DNA
atatctggatggaatggacgtgccgtatctggaacagcaggagggcttcactgtggacggtattgcatggaaggt

SEQ ID NO: 176309 - DNA, 75 bp, synthetic construct
  source 1..75: mol_type = other DNA
gccctgaaaaatcagggggcgaccattaccgtgtatgtggatggcgttgccgcctcgatggcatctgtgattgcg

SEQ ID NO: 176310 - DNA, 75 bp, synthetic construct
  source 1..75: mol_type = other DNA
aggcctttttgcatcagcattcgaaattcgcgtctgcaagttcagtgaaaagcacgctctactcccgtctctata

SEQ ID NO: 176311 - DNA, 75 bp, synthetic construct
  source 1..75: mol_type = other DNA
accgataccgggcgcgcctggcttggaaaagcgttgccggcacgaaaaagcgatccacgtaaagagctgctggaa

SEQ ID NO: 176312 - DNA, 75 bp, synthetic construct
  source 1..75: mol_type = other DNA
ttctctgacactattttcgtggtcggtacgcgcctgttgaccaaaaagggtggcgatatcaaagattttgccaac

SEQ ID NO: 176313 - DNA, 75 bp, synthetic construct
  source 1..75: mol_type = other DNA
cacgatcccaattcggcggaaattgaagaagatgacagcaatatcagcgacgatacggcgaagcagcgtggtgaa

SEQ ID NO: 176314 - DNA, 75 bp, synthetic construct
  source 1..75: mol_type = other DNA
attcgtaagggacgctatattgaattatctccggctgggagttacttcatcgaacatagcaaaactattctgggc

SEQ ID NO: 176315 - DNA, 75 bp, synthetic construct
  source 1..75: mol_type = other DNA
agcgcgtacgtcggcagtttatcctgaccagcgcattgtgtggtctggtggtggttagtctgattgcgttgatga

SEQ ID NO: 176316 - DNA, 75 bp, synthetic construct
  source 1..75: mol_type = other DNA
gcgatggtgggattcttctttaccggcagcgctgtcattgggattctggtaagtcagtttctcgccgggcgctct

SEQ ID NO: 176317 - DNA, 75 bp, synthetic construct
  source 1..75: mol_type = other DNA
gaattcgacgttcagacgcaggttctgttacggacccgtgagaaactggcgttactggaacagcgcatcagtgaa

SEQ ID NO: 176318 - DNA, 75 bp, synthetic construct
  source 1..75: mol_type = other DNA
atcagtgatcttaatgcactgggcgatatcacccacattaatctccatattaattcaccgggtggcgatgtcttt

SEQ ID NO: 176319 - DNA, 75 bp, synthetic construct
  source 1..75: mol_type = other DNA
caatcctggccctggcgctttccgcaggtctggcacaggcagaagacactgccccgactgcaggcagtacgctgg

SEQ ID NO: 176320 - DNA, 75 bp, synthetic construct
  source 1..75: mol_type = other DNA
ctaaggaccacggcgattctttccgcactctggaaagcggtcgtgccgttgcctttatgatggatgatgccttgt

SEQ ID NO: 176321 - DNA, 75 bp, synthetic construct
  source 1..75: mol_type = other DNA
gcgaaaatacccttccggaacatcaaggaaaaaggcgtttctccggaccgtaatgccttacattaccagccaaaa

SEQ ID NO: 176322 - DNA, 75 bp, synthetic construct
  source 1..75: mol_type = other DNA
cctggaagggaaagagcgagtgcttggcctacgtgttgaggtactctctcgtgaaaacgagattgtcctgggtga

SEQ ID NO: 176323 - DNA, 75 bp, synthetic construct
  source 1..75: mol_type = other DNA
agtccgatattatatctactataatattcgctatcttaatgttaggcattggcggcgcgatcggggcgtatggag

SEQ ID NO: 176324 - DNA, 75 bp, synthetic construct
  source 1..75: mol_type = other DNA
gaatacctgcgctgtcactgcgccggttactgcggaggcttcagcagacatccgtcctgctgacccggtggtgac

SEQ ID NO: 176325 - DNA, 75 bp, synthetic construct
  source 1..75: mol_type = other DNA
aatacgataaatccaccattaaaaacctgaccgctatcatcagactggtggaaaacctcggtaattacctgacgg

SEQ ID NO: 176326 - DNA, 75 bp, synthetic construct
  source 1..75: mol_type = other DNA
ggatatagccggcgagggagatcagagaaaactcaggctacgacacatagattttgacgggtacgtcagcggcgg

SEQ ID NO: 176327 - DNA, 75 bp, synthetic construct
  source 1..75: mol_type = other DNA
tcccgatctatacaccggaagtgctgacgctatgcccgaaatgtggtcatgaccagttccagagacgcccgttcg

SEQ ID NO: 176328 - DNA, 75 bp, synthetic construct
  source 1..75: mol_type = other DNA
ttggacgaggacagtcagagacattacataatgattggggatagtaaaactgaggcagggatccggcaggttcct

SEQ ID NO: 176329 - DNA, 75 bp, synthetic construct
  source 1..75: mol_type = other DNA
agcagaaatgcgaaaattggtatgtcacttcgcgactttggatggttggaaaaaatgggtttttttgctactggc

SEQ ID NO: 176330 - DNA, 75 bp, synthetic construct
  source 1..75: mol_type = other DNA
tactcggttataccgaacaaaaagttaaattccgtgcgctgtttctggagctgtttttccgccgcacggtgaatt

SEQ ID NO: 176331 - DNA, 75 bp, synthetic construct
  source 1..75: mol_type = other DNA
tcggtttgtgtactggatatcaaagccgaaaactatatttttactgctggctatcgtaaagaaatggggcaggag

SEQ ID NO: 176332 - DNA, 75 bp, synthetic construct
  source 1..75: mol_type = other DNA
tgaataataaagagcctacgccgatagagtttagagaggggtttaacttactttttcagcaacattatcagaatg

SEQ ID NO: 176333 - DNA, 75 bp, synthetic construct
  source 1..75: mol_type = other DNA
tcaaaagtgcgtagcaccttgcgagcgtcaggttcgttggttgatgaaaaacgtaatgcgtctgatttcgggcaa

SEQ ID NO: 176334 - DNA, 75 bp, synthetic construct
  source 1..75: mol_type = other DNA
agatccttcaggagcaaatcctgattgaaaccgaaggcgaacgcatcgggcaaattaacgccctttcggtcattg

SEQ ID NO: 176335 - DNA, 75 bp, synthetic construct
  source 1..75: mol_type = other DNA
atgagtgcaatcgatactttaagggagtatgccgaagtatggcggctatttggtagtatgccagatgatgcaacc

SEQ ID NO: 176336 - DNA, 75 bp, synthetic construct
  source 1..75: mol_type = other DNA
aggcacatgcgaaaatatgaatggtttaattaggcaatatttacctaaggaaggtgcgaacaagttcctgatatg

SEQ ID NO: 176337 - DNA, 75 bp, synthetic construct
  source 1..75: mol_type = other DNA
aagatcgtactgcattaatgcttgagtcaagaaaagaaggcttttcagccagaaaatttgctgaactcattaaaa

SEQ ID NO: 176338 - DNA, 75 bp, synthetic construct
  source 1..75: mol_type = other DNA
acactaaataatattgttttggcatcgggtgctgaacaggaaaggtatattttgaatgatattatagttgataag

SEQ ID NO: 176339 - DNA, 75 bp, synthetic construct
  source 1..75: mol_type = other DNA
tgttggggttatgacaggattggtagatgcttgtgtggctgagcaggagaggcatgtattgtatgaggaattttt

SEQ ID NO: 176340 - DNA, 75 bp, synthetic construct
  source 1..75: mol_type = other DNA
ggctcgttatcgccagactggtaatggccctgcttatatccaataccaggcagaagacagcaaagcaaggaatca

SEQ ID NO: 176341 - DNA, 75 bp, synthetic construct
  source 1..75: mol_type = other DNA
ttaccgatattgagcggaaagcagagctcggcggcaatattcacgctaaagggatgatgatcatgcaggcattcc

SEQ ID NO: 176342 - DNA, 75 bp, synthetic construct
  source 1..75: mol_type = other DNA
aagctgaaagtcattctggtaggcgaacgtgattcattggctgatttccaggagatggagccagagttgtctgaa

SEQ ID NO: 176343 - DNA, 75 bp, synthetic construct
  source 1..75: mol_type = other DNA
attatccccacagctaacgttcgccatttaagtcttcacagtgaactggtgaaagcggtagaagaaggcaaattc

SEQ ID NO: 176344 - DNA, 75 bp, synthetic construct
  source 1..75: mol_type = other DNA
gctggcctgctggggcgcgaggcggatatgtcggggagtgcagcggatatcgcacagcgtgtggcagagtgggaa

SEQ ID NO: 176345 - DNA, 75 bp, synthetic construct
  source 1..75: mol_type = other DNA
atggcaacaaaagaagaaaatcagaaacgtcttcgtgaactggctggtctgctggggcgcgaggcggatatgtcg

SEQ ID NO: 176346 - DNA, 75 bp, synthetic construct
  source 1..75: mol_type = other DNA
gtatcgccattacaggttcagtggatcagttcggtcgcgctcagccagtgggtggtctgaatgagaaaatcgaag

SEQ ID NO: 176347 - DNA, 75 bp, synthetic construct
  source 1..75: mol_type = other DNA
gaacgttttatccgccagttaggcattcgcaccccttcctccgaacagccaatagagttcctctctggtggcaat

SEQ ID NO: 176348 - DNA, 75 bp, synthetic construct
  source 1..75: mol_type = other DNA
atggaatacttttcgatttctctttcgttccggcttataatcccggcctttgattatttttttatcatttctgga

SEQ ID NO: 176349 - DNA, 75 bp, synthetic construct
  source 1..75: mol_type = other DNA
catctccgcacaccccggtacgcgtgatgaagatatggtgaacctggcgctgtggctgaaaaaacaccgcttccg

SEQ ID NO: 176350 - DNA, 75 bp, synthetic construct
  source 1..75: mol_type = other DNA
ccatcctttacgcagataaaccagatgaatgacgccgttgatggcgttgtttcacgtacctttatcatgggctgg

SEQ ID NO: 176351 - DNA, 75 bp, synthetic construct
  source 1..75: mol_type = other DNA
cccgttccacaattttatgcgtggcaagcctgacaataacccgtgggggccagcgctgaccatgttccgcacgat

SEQ ID NO: 176352 - DNA, 75 bp, synthetic construct
  source 1..75: mol_type = other DNA
tgtggcgtggttggtgggactctcagcctggcctctgaggctgcatattatgcgagactgcctggcaaccagaaa

SEQ ID NO: 176353 - DNA, 75 bp, synthetic construct
  source 1..75: mol_type = other DNA
cgcgtcgggatcatcgctcagccggactggagcagcaaagacgactttatgcgtctggggaaaccgaatctgttt

SEQ ID NO: 176354 - DNA, 75 bp, synthetic construct
  source 1..75: mol_type = other DNA
gtgcgtaatactgcgattatcgtaaaagaggcgttgctaggctggagcggcgtggattctactcgtcttgatact

SEQ ID NO: 176355 - DNA, 75 bp, synthetic construct
  source 1..75: mol_type = other DNA
ggcaccgaaaaaacaggaagccaaagccgttaccgtgcagccgccgcgcccgaaaccgtgggaaaaaacctacgt

SEQ ID NO: 176356 - DNA, 75 bp, synthetic construct
  source 1..75: mol_type = other DNA
acaagcagcgtcgtttgcataaagcgttgttgcgttaccacgatccggcaaactggccgttaatccgccaggcgc

SEQ ID NO: 176357 - DNA, 75 bp, synthetic construct
  source 1..75: mol_type = other DNA
atgcttcgcgtattctgcaccacgaaaccaacccaggctgcgctcgtgcgctgatgcaaaaacatggcgaccgct

SEQ ID NO: 176358 - DNA, 75 bp, synthetic construct
  source 1..75: mol_type = other DNA
gcatggaaagatgtaccggtgatcctcggtggtatcgaggccagcctgcgtcgtaccgcgcattatgattactgg

SEQ ID NO: 176359 - DNA, 75 bp, synthetic construct
  source 1..75: mol_type = other DNA
caacctgcagttctccgcacctttagacgagaacgaagtcatgggaattgctaaaagtgtggctaagtggacaag

SEQ ID NO: 176360 - DNA, 75 bp, synthetic construct
  source 1..75: mol_type = other DNA
ttcctggaaatggttatttttaatcaacgtgccgttgggtattatcgctctgcttctggcgatacgttttctgcc

SEQ ID NO: 176361 - DNA, 75 bp, synthetic construct
  source 1..75: mol_type = other DNA
ccattattacctccgctcctcgcgaacgtagcggtggagccagtggcatgttaggaacggctcgtctactgggtc

SEQ ID NO: 176362 - DNA, 75 bp, synthetic construct
  source 1..75: mol_type = other DNA
actgcacttatccgcctgatctacccgcagcgttttctgggtagggggatgggaattaactcgtttattgttgcc

SEQ ID NO: 176363 - DNA, 75 bp, synthetic construct
  source 1..75: mol_type = other DNA
aagccgaaacacgaatttaattaccagcaggcggttgagcgtcttcccggtgaagatccggctcaactgaacgac

SEQ ID NO: 176364 - DNA, 75 bp, synthetic construct
  source 1..75: mol_type = other DNA
gctgcggctattctggcagtgattgctgcctgtatcagtgggttacgtatcactcagccaagatccagggcataa

SEQ ID NO: 176365 - DNA, 75 bp, synthetic construct
  source 1..75: mol_type = other DNA
cgtgtcatacaaggtttcggcggtgcagcgttgatgagcgttaataccgcacttatccgcctgatctatccacaa

SEQ ID NO: 176366 - DNA, 75 bp, synthetic construct
  source 1..75: mol_type = other DNA
gcttgctgggatcgttttttgtcttcgccagtatcagcggatatcagaatgtgggagcggcgacaactattgcag

SEQ ID NO: 176367 - DNA, 75 bp, synthetic construct
  source 1..75: mol_type = other DNA
atgaagaagcgtttttccgacgaacagatcatcagtattctccgcgaagccgaagccgaagctggggtacccgcc

SEQ ID NO: 176368 - DNA, 75 bp, synthetic construct
  source 1..75: mol_type = other DNA
gcttcgagcagatgctcaaagagatgggcaccgggctggtggtgacggaattgatgggccagggcgtgagtgcaa

SEQ ID NO: 176369 - DNA, 75 bp, synthetic construct
  source 1..75: mol_type = other DNA
acatacggataaaaatgccatggaaatcgtggatggttttcaccgccatgaaattggtaaaggctcatcatcatt

SEQ ID NO: 176370 - DNA, 75 bp, synthetic construct
  source 1..75: mol_type = other DNA
gaagtgaagcggctcaagttgcttgaagaggagaacgcccgcctcaagaagctgctcgccgaagccatgctggat

SEQ ID NO: 176371 - DNA, 75 bp, synthetic construct
  source 1..75: mol_type = other DNA
ttttgatcgccgccgggattggcctggtggtgcaaaacacattgatggtgcgcatcactcagacctcctccacca

SEQ ID NO: 176372 - DNA, 75 bp, synthetic construct
  source 1..75: mol_type = other DNA
gtctaccaatggcatgccagcctcatctgttctggtaaccctatgccgattgtgctcgtcgattggtcagacatc

SEQ ID NO: 176373 - DNA, 75 bp, synthetic construct
  source 1..75: mol_type = other DNA
ctggtggcatatattttctggcagctggcgacgcttggcagcattgattcaacaacctttatgggattgctggct

SEQ ID NO: 176374 - DNA, 75 bp, synthetic construct
  source 1..75: mol_type = other DNA
ccacgtcatttctcggcgttgcgttaggcttatttgattatctggctgatttatttcagcgttcaaataccgttg

SEQ ID NO: 176375 - DNA, 75 bp, synthetic construct
  source 1..75: mol_type = other DNA
gtttacatatcctggagcaaataaaagccatctacaatcaagtaatagcgatgttgttgctgctgcagctataag

SEQ ID NO: 176376 - DNA, 75 bp, synthetic construct
  source 1..75: mol_type = other DNA
ggaagtaatggaggcgataccagaagctgtgggatcgtttactcattatggtgaagagttgcaaggtccgaccgt

SEQ ID NO: 176377 - DNA, 75 bp, synthetic construct
  source 1..75: mol_type = other DNA
ccgctctattaccctgtatgagaagtcctatcccctatcagaacaatgctctaaggcctcccacaacggtttttt

SEQ ID NO: 176378 - DNA, 75 bp, synthetic construct
  source 1..75: mol_type = other DNA
ctgcgcccggtatttcgctttattgcggcttcaggtgtgcgggaagtattcaccgccgcgacgttactgctggtg

SEQ ID NO: 176379 - DNA, 75 bp, synthetic construct
  source 1..75: mol_type = other DNA
gtagataaatggctatcccgccagtttaacggaccggaagaagaagacgaaaaaccgtgggtcaacgatgataaa

SEQ ID NO: 176380 - DNA, 75 bp, synthetic construct
  source 1..75: mol_type = other DNA
taaggtcaataaaaacgtcctggaatatttaaaaaaacattatccggatgaagaccagaaaggtatgaataaagg

SEQ ID NO: 176381 - DNA, 75 bp, synthetic construct
  source 1..75: mol_type = other DNA
tattcacaaagtgaatcttttaaccctgccgttgcaacaggggctggctctgtctgcaatcccggtgatttttac

SEQ ID NO: 176382 - DNA, 75 bp, synthetic construct
  source 1..75: mol_type = other DNA
tctcgcgccagggaagcccgacgcgaactggaagagattttccagcgtgaaatgcaacaagaacgacgccagctg

SEQ ID NO: 176383 - DNA, 75 bp, synthetic construct
  source 1..75: mol_type = other DNA
ctgcgggtgcagaagccgcagaatccatcgtcattacctgcaatgaaccggaagacaccatgaaactggtggaaa

SEQ ID NO: 176384 - DNA, 75 bp, synthetic construct
  source 1..75: mol_type = other DNA
atggaaaagcgatcttttaaagaaaaactggaaataatcagaaacataataagagagtcgttactgggaaatgcg

SEQ ID NO: 176385 - DNA, 75 bp, synthetic construct
  source 1..75: mol_type = other DNA
gtcttttggtatcctgttttactcaggcacaggaaagtgcaaataaaagcgagaaacttttttcaggggacacaa

SEQ ID NO: 176386 - DNA, 75 bp, synthetic construct
  source 1..75: mol_type = other DNA
gaaagcggtagaagaaggcaaattcaccatctgggcagtagacgatgtgactgacgcactgccgttattattaaa

SEQ ID NO: 176387 - DNA, 75 bp, synthetic construct
  source 1..75: mol_type = other DNA
gcgcaagcatcgcaacaggaaggacgtcaccgttttccatggccattacgttggctgaactggtttattccgaac

SEQ ID NO: 176388 - DNA, 75 bp, synthetic construct
  source 1..75: mol_type = other DNA
tccgaactgtgtctctgtgtgcccggtctctgcactgaaaaaagatccgaaaaccggcattgtccattacgacaa

SEQ ID NO: 176389 - DNA, 75 bp, synthetic construct
  source 1..75: mol_type = other DNA
aagataactccgttacacatctggttgtgtatcccgaagtgttgtcgttggtatttgatgcagctaacacataca

SEQ ID NO: 176390 - DNA, 75 bp, synthetic construct
  source 1..75: mol_type = other DNA
aaaagatagcgccacggacaacgttcgcctgttattaaaaaaagctcgcaccacggcaaacaggaagaatgccga

SEQ ID NO: 176391 - DNA, 75 bp, synthetic construct
  source 1..75: mol_type = other DNA
aacgactgctggaagcggaaatcgctctgcacaaattattaacgggtaaatcgaccgtgtcgctgtctcacggcg

SEQ ID NO: 176392 - DNA, 75 bp, synthetic construct
  source 1..75: mol_type = other DNA
ggatatgaatcattttcgtggctacatggctcttaatagtttgcaatatgcaggcgtgagagaaaccgatcttct

SEQ ID NO: 176393 - DNA, 75 bp, synthetic construct
  source 1..75: mol_type = other DNA
tgtcgtcacgactgaaagttattaattattaccccacctctgcagaacgtttgagccttgaaatgggcgaaagac

SEQ ID NO: 176394 - DNA, 75 bp, synthetic construct
  source 1..75: mol_type = other DNA
ctaagaataatgtagagctaagagaaggctttacatcgatcgagaagatgaatgttatacttgccacaagtgatt

SEQ ID NO: 176395 - DNA, 75 bp, synthetic construct
  source 1..75: mol_type = other DNA
aggataagaagactggttgagatatataaagcagaagatgacaaagagtctttaagcgaattttatgaagcaatc

SEQ ID NO: 176396 - DNA, 75 bp, synthetic construct
  source 1..75: mol_type = other DNA
ctgtatggatgatgaaacaagtcagttgttgtacagtttggtccatgagaatagcagaaactggggacgaggatt

SEQ ID NO: 176397 - DNA, 75 bp, synthetic construct
  source 1..75: mol_type = other DNA
tgagataggagcagaaattgaatcctacaagttgcatgtggggcagccagtccaaacagtcttccgcgtggccta

SEQ ID NO: 176398 - DNA, 75 bp, synthetic construct
  source 1..75: mol_type = other DNA
gctggtcttggggatagcgaaacgtggtattactgggttcgtgcgtcaaacaagcgcggtatgttgagtcctccg

SEQ ID NO: 176399 - DNA, 75 bp, synthetic construct
  source 1..75: mol_type = other DNA
atccccggtctgctgatgcttgccggagcgctgctggtctggcaggtcagggacacgctgcgtcccgccctgttt

SEQ ID NO: 176400 - DNA, 75 bp, synthetic construct
  source 1..75: mol_type = other DNA
ctgtatggatgatgagacaagtcagttgttgtgcagtttggtccacgagaatagcataaactgggaacgaggatt

SEQ ID NO: 176401 - DNA, 75 bp, synthetic construct
  source 1..75: mol_type = other DNA
gtgcctgaacaaatcatcgttgaatttactgaaagtgaagtcatatctcggtttgatgagtttgccgaagcgatt

SEQ ID NO: 176402 - DNA, 75 bp, synthetic construct
  source 1..75: mol_type = other DNA
cgtcaacaagtggtgggcaaaaatatgtcgcaggtattgcgcttggaattgacaccacggggctttcccagtttt

SEQ ID NO: 176403 - DNA, 75 bp, synthetic construct
  source 1..75: mol_type = other DNA
ttgggcgtgcgatgagcgatctgcaaacgccagagtgggttggggccgactgtgctcgccgtactttatcgcgcc

SEQ ID NO: 176404 - DNA, 75 bp, synthetic construct
  source 1..75: mol_type = other DNA
acctacaacaacaaggaggacggttataagcaaaacatcgagtatgttgaagatcaggacgcaatgcgccgttat

SEQ ID NO: 176405 - DNA, 75 bp, synthetic construct
  source 1..75: mol_type = other DNA
tgttacggtaaaagtgaccagttcatcacagacacatatttattcgcccgtgatgctaatcagccgtggaagtgg

SEQ ID NO: 176406 - DNA, 75 bp, synthetic construct
  source 1..75: mol_type = other DNA
ggcccaccgagttggtttatggcttttgtatacagccagaatggagtcggatgtaattacatttactgccggctt

SEQ ID NO: 176407 - DNA, 75 bp, synthetic construct
  source 1..75: mol_type = other DNA
atggcgatttggtaaaaatggaacgcttgagatcaacagcaatagtggcggcaatgggagattggttataaatgg

SEQ ID NO: 176408 - DNA, 75 bp, synthetic construct
  source 1..75: mol_type = other DNA
gatgatgctttctggcgtgattctgacgctggcggtactgttctgtgtccacgggctgataccggcttccggacg

SEQ ID NO: 176409 - DNA, 75 bp, synthetic construct
  source 1..75: mol_type = other DNA
tgcacttgttggcttaaaggtcaattcagagcagtttggtagcacaatgccttcccgttcgtatttggtgcgcgg

SEQ ID NO: 176410 - DNA, 75 bp, synthetic construct
  source 1..75: mol_type = other DNA
aattcaacgagcgtagcgatgctttggagaacgcacaaaccgagcttaaaggtgaggtttcggcaacgatcgaca

SEQ ID NO: 176411 - DNA, 75 bp, synthetic construct
  source 1..75: mol_type = other DNA
actggtgcttctgccgaaacgctggagaacagtgtgactcaggttatcgagcaacaactcactgggcttgataat

SEQ ID NO: 176412 - DNA, 75 bp, synthetic construct
  source 1..75: mol_type = other DNA
caaggtcaataaaaacgtcctggaatatctaaaaaacattatccggatgaagaccaaaaaagtatgggtaaaggc

SEQ ID NO: 176413 - DNA, 75 bp, synthetic construct
  source 1..75: mol_type = other DNA
aaaggtagcgcatcatccaccgatttaagcccgcaggccattgcccgcaccgtacaggcggcgctggatattgcc

SEQ ID NO: 176414 - DNA, 75 bp, synthetic construct
  source 1..75: mol_type = other DNA
agcgttgatatcacgctaacggcaaagaaaaccggcgtgtattaccgtagctatgagctgaaactgcctaagcct

SEQ ID NO: 176415 - DNA, 75 bp, synthetic construct
  source 1..75: mol_type = other DNA
gacagatttggtttggtcaactctgttaacgggaagatcaccacgccatttgttatcgaaaacagtatcgcctat

SEQ ID NO: 176416 - DNA, 75 bp, synthetic construct
  source 1..75: mol_type = other DNA
atggtgttttgggctggtggcatggttaacatcatgcaggatagcccatcagatccggtaatgatgtttaccaac

SEQ ID NO: 176417 - DNA, 75 bp, synthetic construct
  source 1..75: mol_type = other DNA
gaagtgttgcagtcaacggtagaggaaagttccgcagccgttgaagaaatgaaaaagacggttgcagaggtcgat

SEQ ID NO: 176418 - DNA, 75 bp, synthetic construct
  source 1..75: mol_type = other DNA
ctctgttttggttggattgaaggtaaactctgagcaattcggcagcaccatgccatctcgctcttatctggtgcg

SEQ ID NO: 176419 - DNA, 75 bp, synthetic construct
  source 1..75: mol_type = other DNA
cgctgccatcactcaggagcaggaggccagagcaagtgctgaccaggcgctctcacgagaaattaacagcctgcg

SEQ ID NO: 176420 - DNA, 75 bp, synthetic construct
  source 1..75: mol_type = other DNA
cggatcgcgacctgttctcctggccgcagtacttggccgcctgttttggaccggcaccgtttttgccgatgtctc

SEQ ID NO: 176421 - DNA, 75 bp, synthetic construct
  source 1..75: mol_type = other DNA
tgaaattaaagcaccgttgacggggatggtgcgtggcttgttgaacgacggcctggcagtggtcggtggttttaa

SEQ ID NO: 176422 - DNA, 75 bp, synthetic construct
  source 1..75: mol_type = other DNA
cacaaatgttagtgcgcgccgatggttctatcgtcggtacaattggtggcggaatggttgagcggaaggtgattg

SEQ ID NO: 176423 - DNA, 75 bp, synthetic construct
  source 1..75: mol_type = other DNA
attgaaacgaatcgcgggcactggctcggtcaggtgatttactccggttgtgcacaggagaataccggtgttccc

SEQ ID NO: 176424 - DNA, 75 bp, synthetic construct
  source 1..75: mol_type = other DNA
ggaatggttgagcgtaaggtgattgaagagtcgctacaggcattgcaggaacgtaagccgcgattatttcatgga

SEQ ID NO: 176425 - DNA, 75 bp, synthetic construct
  source 1..75: mol_type = other DNA
tggcttgttgaacgacggcctggcagtggtcggtggttttaaaattggtgatatcgatcctcgtggtgaaacggc

SEQ ID NO: 176426 - DNA, 75 bp, synthetic construct
  source 1..75: mol_type = other DNA
ggtgccattcaggatgcacaggcgttgtccgaaggtgtggtggcctcttcccgttatccgaaacactggctgacc

SEQ ID NO: 176427 - DNA, 75 bp, synthetic construct
  source 1..75: mol_type = other DNA
ctattagcgccagcgtatcagttccagcaaaacaatctcaacccatcccaacaactctagcagggagaacaatcg

SEQ ID NO: 176428 - DNA, 75 bp, synthetic construct
  source 1..75: mol_type = other DNA
ggaaggagaccagttcgagaaaattgaagtcgattttggccgatcgacgaagaataacatcatacagggtagcgg

SEQ ID NO: 176429 - DNA, 75 bp, synthetic construct
  source 1..75: mol_type = other DNA
cggcgtacttgaggcgttaatgatgttgatgcatcagggcgttaaagcgacaaaagaagtgctggaagtggctta

SEQ ID NO: 176430 - DNA, 75 bp, synthetic construct
  source 1..75: mol_type = other DNA
atggctttaagcttttccgcgaaaaactggatacccgtcgcggctcaaattcacaactcgaaacggcagtgaaag

SEQ ID NO: 176431 - DNA, 75 bp, synthetic construct
  source 1..75: mol_type = other DNA
caatgatttctctcctgaagaaatagaaaaatcaacaaaaaccaacagcggctggttggctagtgcattatttgg

SEQ ID NO: 176432 - DNA, 75 bp, synthetic construct
  source 1..75: mol_type = other DNA
actggatatccgccgtggttcaaaatcggaactggaaaccgcgctgaaagacctgggctccgtggtctcttttaa

SEQ ID NO: 176433 - DNA, 75 bp, synthetic construct
  source 1..75: mol_type = other DNA
taaaatcaccggaaaaacaccggttgcggcatatgtgtctccggttgtgtcaggtaaggtactgcgcagtcgtgg

SEQ ID NO: 176434 - DNA, 75 bp, synthetic construct
  source 1..75: mol_type = other DNA
gttgttacggagccattcaggatgcgcaggcgttttccgaaggtgtggtggcttcttcccgttatccgaaacact

SEQ ID NO: 176435 - DNA, 75 bp, synthetic construct
  source 1..75: mol_type = other DNA
ctgcctgcagcccgcatgccgtatcgggccttgggttctaacctgttgcgtagatttatgcagcggactgccttt

SEQ ID NO: 176436 - DNA, 75 bp, synthetic construct
  source 1..75: mol_type = other DNA
atggtgcgtggcttgttgaacgacggactggcggtggtcggtggttttaaaattggtgatatcgatcctcgtggt

SEQ ID NO: 176437 - DNA, 75 bp, synthetic construct
  source 1..75: mol_type = other DNA
agaacatattgcccgtttacatgcgccggttggttacaacattggtgcggaaacgccgcaggagatcgccatcag

SEQ ID NO: 176438 - DNA, 75 bp, synthetic construct
  source 1..75: mol_type = other DNA
cggcccgtgaatttaccatgacgcagtccgcaccgctgatggtgctgccggatccggatgagtttgtggtggtgc

SEQ ID NO: 176439 - DNA, 75 bp, synthetic construct
  source 1..75: mol_type = other DNA
cttcccggtgaagatccggctcagctgaacgacccggcctaccgtcgtctgcgtatcatcactgataacctcaaa

SEQ ID NO: 176440 - DNA, 75 bp, synthetic construct
  source 1..75: mol_type = other DNA
gtggaagaaatgcaggcggtcagtgccgttctgcagggtaaatacaccatgagcggcgagcagtttgagacagtg

SEQ ID NO: 176441 - DNA, 75 bp, synthetic construct
  source 1..75: mol_type = other DNA
gttgctatggtgccattcaggatgcgcaggcgttgtccgaaggtgtggtggcctcttcccgttacccgaaacact

SEQ ID NO: 176442 - DNA, 75 bp, synthetic construct
  source 1..75: mol_type = other DNA
atgacattcgttcatacaatgctgctttatttctgcgcagtggtcagtgcgttatatctggtgagcggcggttat

SEQ ID NO: 176443 - DNA, 75 bp, synthetic construct
  source 1..75: mol_type = other DNA
ggtaggggatcccgcccgtgaatttaccatgacgcagtccgcgccgctgatggtgttgccggacccggatgagtt

SEQ ID NO: 176444 - DNA, 75 bp, synthetic construct
  source 1..75: mol_type = other DNA
ctgttctgcagggtaagtacaccatgagcggtgaacagtttgagacggtggaagtggattttggacgttctgccg

SEQ ID NO: 176445 - DNA, 75 bp, synthetic construct
  source 1..75: mol_type = other DNA
attcaccatgacgcagtccgcgccgctgatggtgctgccggatccggatgagtttgtggtggtacaggtgaaata

SEQ ID NO: 176446 - DNA, 75 bp, synthetic construct
  source 1..75: mol_type = other DNA
atggctttaagctgttccgcgaaaaactggatacccgtcgcggctcaaattctcaactcgaaacggcagtgaaag

SEQ ID NO: 176447 - DNA, 75 bp, synthetic construct
  source 1..75: mol_type = other DNA
caggtggattacgccattgaagccaacatcactatctatcgtgaccaggatgctaactctataaaggacaacgcc

SEQ ID NO: 176448 - DNA, 75 bp, synthetic construct
  source 1..75: mol_type = other DNA
gtgctttccccggttcccggcactgtagaactgtatccgctgctcagcaccggcttgccggacgacagcatcctt

SEQ ID NO: 176449 - DNA, 75 bp, synthetic construct
  source 1..75: mol_type = other DNA
atagaactgctcgcgcaaatcgaacaggaggttagcaaggagaaaaaacgtccgctgaccgacaaagtgagtgcg

SEQ ID NO: 176450 - DNA, 75 bp, synthetic construct
  source 1..75: mol_type = other DNA
aaggtcatcagaaattatattcgccgtaaaattgatgatgcggcagctgaaaaactcagtaaaacagcacaggca

SEQ ID NO: 176451 - DNA, 75 bp, synthetic construct
  source 1..75: mol_type = other DNA
agcgtgctgtccgttgccggggtctaccaggtcgaactggtgacaccggtgctgaaggtggtggcagaaaacgaa

SEQ ID NO: 176452 - DNA, 75 bp, synthetic construct
  source 1..75: mol_type = other DNA
gtcagttactcgatgagattgataacgtcgacatgctggtgagcaatctgacggccagttccggcggttcagaac

SEQ ID NO: 176453 - DNA, 75 bp, synthetic construct
  source 1..75: mol_type = other DNA
ctggtcagggtggcggcgcaggaagcggccaaacagaatctggtcgcctttgcccgtgagccgatgattgattac

SEQ ID NO: 176454 - DNA, 75 bp, synthetic construct
  source 1..75: mol_type = other DNA
tttggtctggcgtttaaaccgaatattgatgacctgcgcgaaagcccggcgatggaaatcgctgaactgatcgcc

SEQ ID NO: 176455 - DNA, 75 bp, synthetic construct
  source 1..75: mol_type = other DNA
atgagttttgcgaccatttctgtcattggactgggttacattgggctgccgacggcggcagcgtttgcctcccgg

SEQ ID NO: 176456 - DNA, 75 bp, synthetic construct
  source 1..75: mol_type = other DNA
tcttccgggggaagatccggcccgtcttaatgacccggcctaccgtcgcctgcgtattctgacggacaacctgaa

SEQ ID NO: 176457 - DNA, 75 bp, synthetic construct
  source 1..75: mol_type = other DNA
aatacggcggcagaggggattcgttgctatggtgccattaaggatgcacaggcgttgtctgaaggagtggtggct

SEQ ID NO: 176458 - DNA, 75 bp, synthetic construct
  source 1..75: mol_type = other DNA
acaactctagcagggagaacaatcgaaaaagcgcaagataaagaaggattacttgtttttttaggaatgaaatcc

SEQ ID NO: 176459 - DNA, 75 bp, synthetic construct
  source 1..75: mol_type = other DNA
ctggtgatccttgaatccacttcgcccgtggggtcgaccgagaagatggcagaatggttagcagagatgcgtcca

SEQ ID NO: 176460 - DNA, 75 bp, synthetic construct
  source 1..75: mol_type = other DNA
tccgtcctgtgaattcaccatgacgcagtccgcgccgctgatggtgctgccggatccggatgagtttgtggtggt

SEQ ID NO: 176461 - DNA, 75 bp, synthetic construct
  source 1..75: mol_type = other DNA
ccatcctgccagatgatttaacaccaggaaaatacaacaaaatttatctgtctgggcatggttctgctggtctac

SEQ ID NO: 176462 - DNA, 75 bp, synthetic construct
  source 1..75: mol_type = other DNA
accaggttgaactggtgacaccggcactgcgggtggttgcagaaaacgaatgggcaaactgtacggcgatcactc

SEQ ID NO: 176463 - DNA, 75 bp, synthetic construct
  source 1..75: mol_type = other DNA
cactgttcgtgcattgaagaaacgcttcccggatgcgcgaattaccgttgatcccaacggtgcatggctgcttga

SEQ ID NO: 176464 - DNA, 75 bp, synthetic construct
  source 1..75: mol_type = other DNA
agggtattacggcgatctggccattgtggtggcgaaaacgtcttatgtggcagaggacggtaccgaaaaacgcta

SEQ ID NO: 176465 - DNA, 75 bp, synthetic construct
  source 1..75: mol_type = other DNA
acccgtcgcggttcaaattcacaactcgaaacggcagtgaaagatctgggcgcagtggtgtccttcaaggggtat

SEQ ID NO: 176466 - DNA, 75 bp, synthetic construct
  source 1..75: mol_type = other DNA
ggaaagaacatcgcaccaaagaatcggagacgaaggcccgaaaggatttcgcggatttgttgggagaattattga

SEQ ID NO: 176467 - DNA, 75 bp, synthetic construct
  source 1..75: mol_type = other DNA
ttaatgtcctgaagcaacctttatccattcttcctgaacatatctccgatttggtgctggagcatatacgccaga

SEQ ID NO: 176468 - DNA, 75 bp, synthetic construct
  source 1..75: mol_type = other DNA
ctgaacgaaaagcttgtccatgagctgatggggacgacgaaggggcgccattatatccgtggagaccgcgatcct

SEQ ID NO: 176469 - DNA, 75 bp, synthetic construct
  source 1..75: mol_type = other DNA
ctggcggagaaacagcagcaaaccggcgtgaaactgctgtggggcaccgccaactgctttacccacccgcgctac

SEQ ID NO: 176470 - DNA, 75 bp, synthetic construct
  source 1..75: mol_type = other DNA
cggcattgttcccgtattacgccgtgtaaaacctgacctggcgattggtattgatatctgtagtggcacagtaaa

SEQ ID NO: 176471 - DNA, 75 bp, synthetic construct
  source 1..75: mol_type = other DNA
ttgcatccgcctattgaccgctctggcaggtatgtcagcagcacatttccccgttgagcctgattcaggcactac

SEQ ID NO: 176472 - DNA, 75 bp, synthetic construct
  source 1..75: mol_type = other DNA
gatagcggtaaaaccgtcaccatcaacagtggtcgggatacggtactgaacggtgctcaggtcaacggcaacagg

SEQ ID NO: 176473 - DNA, 75 bp, synthetic construct
  source 1..75: mol_type = other DNA
agtggcgagaaagtcactgcagatgtcggcaacaacctgaccatttcgagccttcaggacagtgaccgttacgac

SEQ ID NO: 176474 - DNA, 75 bp, synthetic construct
  source 1..75: mol_type = other DNA
ggaaaaatcatcgctgacacgctgaacgtcagggcgaccacgctggatggtgacggcctgttgcagggcgccggt

SEQ ID NO: 176475 - DNA, 75 bp, synthetic construct
  source 1..75: mol_type = other DNA
gaagaaaaaccatcacggcgaatgctagggaagaacttaaaaaagaacctgctctcaaaacaaaggcagaaaaaa

SEQ ID NO: 176476 - DNA, 75 bp, synthetic construct
  source 1..75: mol_type = other DNA
acgctaatgacagtatcagcccgatatttgacaaggagaaggagcagaggcgtctgcagacagtggggcttatca

SEQ ID NO: 176477 - DNA, 75 bp, synthetic construct
  source 1..75: mol_type = other DNA
ctgaacaaaccggaatgtttgccggtgatggtggcttcgacattacagtgggcagacatacccaactggagggtg

SEQ ID NO: 176478 - DNA, 75 bp, synthetic construct
  source 1..75: mol_type = other DNA
cccggtacgctgagcagcataatctgaatccgcagcatcacagcgggcgtcaggaattactcgaaaatctcgtca

SEQ ID NO: 176479 - DNA, 75 bp, synthetic construct
  source 1..75: mol_type = other DNA
tggcaccgcgtaaactctccactatgaaagcgccggtaatttttgccaatgaagttgccacgggtctgtttggtc

SEQ ID NO: 176480 - DNA, 75 bp, synthetic construct
  source 1..75: mol_type = other DNA
tgacagggtaagcagcagtcgtcatgcaaacagtgaatctcaccagcgcagtgcagaacttacgaccattactgc

SEQ ID NO: 176481 - DNA, 75 bp, synthetic construct
  source 1..75: mol_type = other DNA
ctggtggagactgtaaatctgttgttcagaaatatctggatatcagcaacaaaaacagtaaggaactggctgaag

SEQ ID NO: 176482 - DNA, 75 bp, synthetic construct
  source 1..75: mol_type = other DNA
gcggctgctggggctggtgtcgggaagaacattgctgagaataacctggttggtggcacagagtccgagcagagc

SEQ ID NO: 176483 - DNA, 75 bp, synthetic construct
  source 1..75: mol_type = other DNA
aatccgggaaaaatcatcgctgacacgctgagcgtcagggcgaccacgctggatggtgacggcctgttgcagggc

SEQ ID NO: 176484 - DNA, 75 bp, synthetic construct
  source 1..75: mol_type = other DNA
ataaccgggaagcaaacctgatggctcacgcagtctggggagcacttgccgcacaactgggcggaaacaatgcgg

SEQ ID NO: 176485 - DNA, 75 bp, synthetic construct
  source 1..75: mol_type = other DNA
gcgccgccggatatgcccgccctgcaccgctacctgccagctaacattcacgtcgccggagcactacgcattacc

SEQ ID NO: 176486 - DNA, 75 bp, synthetic construct
  source 1..75: mol_type = other DNA
cgccgtctgcccggttccgggctgctggtctatgggcgcggcgtcagttgtgaactgaccgtggatgaagagggg

SEQ ID NO: 176487 - DNA, 75 bp, synthetic construct
  source 1..75: mol_type = other DNA
taaatccagcagcgaaatcaaattttatgctggtgggcagcgggtttatcgcgctaaatcggacgacgacatgat

SEQ ID NO: 176488 - DNA, 75 bp, synthetic construct
  source 1..75: mol_type = other DNA
tcaaaatggacgtagcttcccctctgcggctctcagccgcactacagcattcgtgccagcggcttgatgacagaa

SEQ ID NO: 176489 - DNA, 75 bp, synthetic construct
  source 1..75: mol_type = other DNA
atctggatcaccgcaccggcggccaggcgttgcgcgatctgctgagcctgtttattccggcgcatgacagtccgc

SEQ ID NO: 176490 - DNA, 75 bp, synthetic construct
  source 1..75: mol_type = other DNA
ctgtttccccgcgtcaccgcccggatcgatatcactcacagcacgacggagcagcacctggtggtggacagaacc

SEQ ID NO: 176491 - DNA, 75 bp, synthetic construct
  source 1..75: mol_type = other DNA
cgttatttgcgttgccttttatggcaagcgcaactgcttctgaattatccattggtgctggtgcggcttataatg

SEQ ID NO: 176492 - DNA, 75 bp, synthetic construct
  source 1..75: mol_type = other DNA
ttctacagataatacaagagatattgtagaaagattatcgaatcaattagctgatgtttgctctatacaacttta

SEQ ID NO: 176493 - DNA, 75 bp, synthetic construct
  source 1..75: mol_type = other DNA
cttaggaccggcggcagagaaatacacagtaaaaatgagcggctgccactcttgcccgatccgttgtatgacccg

SEQ ID NO: 176494 - DNA, 75 bp, synthetic construct
  source 1..75: mol_type = other DNA
cgcgattgcttgagaaggaagatgtaaccaaagaacagattgattcatggattgattctttagaagtgtattccg

SEQ ID NO: 176495 - DNA, 75 bp, synthetic construct
  source 1..75: mol_type = other DNA
tgaaacaggtcgaagaaaaaaccggtctgaaacgctcgcaaatctatctgtatatgaaagggggctcttttcctc

SEQ ID NO: 176496 - DNA, 75 bp, synthetic construct
  source 1..75: mol_type = other DNA
gatttaacaaaggaaccaaaggcgaatctggaaaatatatcccgtaacgtgcgagatgtttttgtcgggctgtat

SEQ ID NO: 176497 - DNA, 75 bp, synthetic construct
  source 1..75: mol_type = other DNA
actggatacccgtcgcggttcaaattcacaactcgaaacggcagtgaaagatctgggcgcagtggtatccttcaa

SEQ ID NO: 176498 - DNA, 75 bp, synthetic construct
  source 1..75: mol_type = other DNA
tactcggttataccgaacaaaaagttaaatttcgtgcgctgtttctggaactgtttttccgccgtacggtgaatt

SEQ ID NO: 176499 - DNA, 75 bp, synthetic construct
  source 1..75: mol_type = other DNA
gaggttgattttggacgctctgaaggaaataacattgagcaggccgacggtaaaaaatggtctgagcaggaccgt

SEQ ID NO: 176500 - DNA, 75 bp, synthetic construct
  source 1..75: mol_type = other DNA
ccgaaacactggctgaccgtgggcgatccggcccgtgaatttaccatgacgcagtccgcaccgctgatggtgctg

SEQ ID NO: 176501 - DNA, 75 bp, synthetic construct
  source 1..75: mol_type = other DNA
tgaatttaccatgacgcagtccgcgccgctgatggtgttgccggatccggatgagtttgtggtggtacaggtgaa

SEQ ID NO: 176502 - DNA, 75 bp, synthetic construct
  source 1..75: mol_type = other DNA
ctgaatgatccggcttaccgccgtctgcgtatcattaccgataacctcaaacaggaagagcacgccattgtccag

SEQ ID NO: 176503 - DNA, 75 bp, synthetic construct
  source 1..75: mol_type = other DNA
ttctcatcgccatgttgctgaactcactggtggggattgtgctctttgtttctattttatggtttaaacaaggca

SEQ ID NO: 176504 - DNA, 75 bp, synthetic construct
  source 1..75: mol_type = other DNA
aacatcagcaatatcacccggcgtcagcaatggaatgcgggcagtgacagccaatatggtggtgtgcatctcagc

SEQ ID NO: 176505 - DNA, 75 bp, synthetic construct
  source 1..75: mol_type = other DNA
catccttaccctgaacgccagtgaaaagctcacccacagcgggaaaagcagcgccccgtcgctcagcctcagtgc

SEQ ID NO: 176506 - DNA, 75 bp, synthetic construct
  source 1..75: mol_type = other DNA
acaacggtgggacactggttgccgggcgcgatgccacggtgaaaaccgggacattcagtaataccggtaccgtcc

SEQ ID NO: 176507 - DNA, 75 bp, synthetic construct
  source 1..75: mol_type = other DNA
caacgcgtcattcactctccagctgtgtgattgccgaagaaaatggcgatatggaacgtgattacgcctacacca

SEQ ID NO: 176508 - DNA, 75 bp, synthetic construct
  source 1..75: mol_type = other DNA
ataaaatcagtgtattaggccaaggtatcgttaaagaaagcgtatctaaaaaccctaactcttcaagtgcaatta

SEQ ID NO: 176509 - DNA, 75 bp, synthetic construct
  source 1..75: mol_type = other DNA
tatgaaaccggaaactacaataaccaagtcagcgatatgtatccggatgcttacgggcagatagtaaacctgctg

SEQ ID NO: 176510 - DNA, 75 bp, synthetic construct
  source 1..75: mol_type = other DNA
atgttcgggatgtcaattactcaatcagatggaagtttgtggatgagtccagaatttactccgcaaaatctgatt

SEQ ID NO: 176511 - DNA, 75 bp, synthetic construct
  source 1..75: mol_type = other DNA
gatttcaaccgattagaattggatggagttgacccaaactatctcgagagttctcttgcagagtttgaaggcagt

SEQ ID NO: 176512 - DNA, 75 bp, synthetic construct
  source 1..75: mol_type = other DNA
tggcggggtttggcgaactggtgtccagcgtgcgctggtggacacttatacctggcttgctgggatcgttttttg

SEQ ID NO: 176513 - DNA, 75 bp, synthetic construct
  source 1..75: mol_type = other DNA
gcttcgagcagatgctcaaagagatgggcaccgggctggtggtgacagaattgatgggccagggtgtgagcgcaa

SEQ ID NO: 176514 - DNA, 75 bp, synthetic construct
  source 1..75: mol_type = other DNA
aataagggaactattccggcgactgagaaggctttttttaaaacgtcaattccgtcaggaaaaagttgttttttc

SEQ ID NO: 176515 - DNA, 75 bp, synthetic construct
  source 1..75: mol_type = other DNA
agaatttactccgcaaaatctgattaataaagggacaatgtctacatctaaaggttctgtttttcaaacatcaat

SEQ ID NO: 176516 - DNA, 75 bp, synthetic construct
  source 1..75: mol_type = other DNA
cttctgtatagaagggatatcataaataaggcaaaatgctcatttgataagccatcatacgatatagatcacaaa

SEQ ID NO: 176517 - DNA, 75 bp, synthetic construct
  source 1..75: mol_type = other DNA
caattagggaatcaatgggtcgatgtacaggtaaatgcacctggttatgtcagggatacagaagatcaaaattac

SEQ ID NO: 176518 - DNA, 75 bp, synthetic construct
  source 1..75: mol_type = other DNA
atggcgccgttcgtctccccgctggtggaaggtaagctggtcgagtcccgtaaataccagaccaatacgttcaaa

SEQ ID NO: 176519 - DNA, 75 bp, synthetic construct
  source 1..75: mol_type = other DNA
tgcggcatcgactgatggcgcgcaagtgacggagtttcactgtcatccggcaaatacctttgatgcgattgcgcg

SEQ ID NO: 176520 - DNA, 75 bp, synthetic construct
  source 1..75: mol_type = other DNA
ggcgctcggcattggcaccatgattggctggcgtcgtgtagcgatgaccatcggtgagaagattggtaagcgcgg

SEQ ID NO: 176521 - DNA, 75 bp, synthetic construct
  source 1..75: mol_type = other DNA
atgacgaaagtaaaaagtgttccgttcagccaggtaaagcaaaaactgcttaatactccagaagctgttaaaggg

SEQ ID NO: 176522 - DNA, 75 bp, synthetic construct
  source 1..75: mol_type = other DNA
cgctctcttacattccgattgcgcatatggtctggggcggcggtttgctggcttctcacggtgcgctggatttcg

SEQ ID NO: 176523 - DNA, 75 bp, synthetic construct
  source 1..75: mol_type = other DNA
gcgtatctgataggcaaacgcgtgggcttcggtaaagaggcgtttaaaccgcacaacctgccgatggtcttcacc

SEQ ID NO: 176524 - DNA, 75 bp, synthetic construct
  source 1..75: mol_type = other DNA
gcgatgtcttcggtgtgcacggcgtttgtggcattgtcggctgtatcatgaccgggatttttgccgccagttcgc

SEQ ID NO: 176525 - DNA, 75 bp, synthetic construct
  source 1..75: mol_type = other DNA
ggtgaaagaagatccggcccagcgtcttatcctgatgcaatcctccccgctggttattccgagccgggtaaacgc

SEQ ID NO: 176526 - DNA, 75 bp, synthetic construct
  source 1..75: mol_type = other DNA
gatactgatagctatggattggctcttaaatccaagtttgaagaattgagtaattctttaagttctctgtatgga

SEQ ID NO: 176527 - DNA, 75 bp, synthetic construct
  source 1..75: mol_type = other DNA
attggtgttggcggcgcgttgattatcggcgtggtagctggtctggcgggcttgtggggcgttaccatgctcaaa

SEQ ID NO: 176528 - DNA, 75 bp, synthetic construct
  source 1..75: mol_type = other DNA
ccctgacgctctcgcctgagctggcgcacccaactctcaagcgtggtagaaccgacattcatcgcttcactggct

SEQ ID NO: 176529 - DNA, 75 bp, synthetic construct
  source 1..75: mol_type = other DNA
ctggatcacgcgctccagccggacagggcaagccagtttgctgaggcgctggagaaatactccacgggtctggca

SEQ ID NO: 176530 - DNA, 75 bp, synthetic construct
  source 1..75: mol_type = other DNA
cgatgcttttaccaatccagactatattcgctacgcggtaaaaacgctgctcgcctgtttgatctgttacacctt

SEQ ID NO: 176531 - DNA, 75 bp, synthetic construct
  source 1..75: mol_type = other DNA
ccgacttgatgaagcggtaagccacatgacagaaagcctcacgccactacctgaaacgcggattgaaagagaggc

SEQ ID NO: 176532 - DNA, 75 bp, synthetic construct
  source 1..75: mol_type = other DNA
ctggtctttttcgccgtcgccattgtcgctatttacgggcaaaccttccccgccatgctcgactatccggaagtg

SEQ ID NO: 176533 - DNA, 75 bp, synthetic construct
  source 1..75: mol_type = other DNA
cgcatcggtttacatgcggcgttcaatgcctgcgaagaaatgtgtgaccgcgtagcactggaacgtcagttggat

SEQ ID NO: 176534 - DNA, 75 bp, synthetic construct
  source 1..75: mol_type = other DNA
tctgttacaccttctacagcggcgtggactgggaaggcattcacacctgtatgctgacctgcgtgatcgtcgcta

SEQ ID NO: 176535 - DNA, 75 bp, synthetic construct
  source 1..75: mol_type = other DNA
ctctgcgcacttatctgcaaattcgcataggtctgcatgcggcgtttaatgcctgtgaagagatgttgtcaacga

SEQ ID NO: 176536 - DNA, 75 bp, synthetic construct
  source 1..75: mol_type = other DNA
ctgacggacagcctcgcaccgctacccgaaacgcggattgaaagagaggcgctggcgctgcaaaaactgaatgtc

SEQ ID NO: 176537 - DNA, 75 bp, synthetic construct
  source 1..75: mol_type = other DNA
caaatacctttgatgcaattgcgcgcgttaaaacgatgctgccgggaaatatggaaagctacgaaccgttaaacg

SEQ ID NO: 176538 - DNA, 75 bp, synthetic construct
  source 1..75: mol_type = other DNA
atcaatcgtcaactttcacgtctgctgttgtgcagcattctcggcagcacgacgctgatttccggctgtgccctg

SEQ ID NO: 176539 - DNA, 75 bp, synthetic construct
  source 1..75: mol_type = other DNA
tctacaaatggtcatacggcgaaccgttgatccgattgatcatcgccgggccgatcctgatgggctgtatgtttt

SEQ ID NO: 176540 - DNA, 75 bp, synthetic construct
  source 1..75: mol_type = other DNA
cgaagaacgcgccttactgattgaacgttcgcaaacggttattcgtcagggccgcgatattcttcacgcctggga

SEQ ID NO: 176541 - DNA, 75 bp, synthetic construct
  source 1..75: mol_type = other DNA
gtaatgatatttgctatttggttgcgtatgaatctgaaagagagcccagtctttgagaaggtgaatgatagtcaa

SEQ ID NO: 176542 - DNA, 75 bp, synthetic construct
  source 1..75: mol_type = other DNA
cttctggctggcaacagggctgcgttttggtcaggcgggtaactccgggttaattcagactttccttgcaggcta

SEQ ID NO: 176543 - DNA, 75 bp, synthetic construct
  source 1..75: mol_type = other DNA
ctttgagaaggttaatgacagcaaccaaccgacagcaaaacctgcacctgctggtagcatgttccagagcaaatc

SEQ ID NO: 176544 - DNA, 75 bp, synthetic construct
  source 1..75: mol_type = other DNA
ccgcacctggggcgcgccatacgatccacacgccttcctgagttcaatgcgcgtaccgtcgcacgctgacttcca

SEQ ID NO: 176545 - DNA, 75 bp, synthetic construct
  source 1..75: mol_type = other DNA
aaatcaatggcagaaatcattcaggccgatatgcaccagattggcgctgatatcacattaattggagaagaagag

SEQ ID NO: 176546 - DNA, 75 bp, synthetic construct
  source 1..75: mol_type = other DNA
gtccgtaacgaaaactactggggcgaaaagccggcgattaagaagatcacttttaacgtcatcccggacccgact

SEQ ID NO: 176547 - DNA, 75 bp, synthetic construct
  source 1..75: mol_type = other DNA
gcggttgaccagactgcatctaattccaccgtcaacgtaactcaggttggctttggtaacaacgcgaccgctcat

SEQ ID NO: 176548 - DNA, 75 bp, synthetic construct
  source 1..75: mol_type = other DNA
ggtaacggtgcagatgttggtcagggctctgatgacagttccatcgaactgacccaacgtggctttggtaacagc

SEQ ID NO: 176549 - DNA, 75 bp, synthetic construct
  source 1..75: mol_type = other DNA
atgagagcgattttcaaatgttattctctaattgttttatttgttgtatcaggctgttcaatggcgaaaaatagc

SEQ ID NO: 176550 - DNA, 75 bp, synthetic construct
  source 1..75: mol_type = other DNA
ccattatggttgcactgattgtgattcataactgtgcggtgctgggattatttgctctggaaaacattaccatgg

SEQ ID NO: 176551 - DNA, 75 bp, synthetic construct
  source 1..75: mol_type = other DNA
gatatttatgagcctgacgggccgacgaaccttctggcgtgggaaaggcttaagaacaaagagttgccgccttca

SEQ ID NO: 176552 - DNA, 75 bp, synthetic construct
  source 1..75: mol_type = other DNA
gctctgatgacagctcaatcgatctgacccaacgtggcttcggtaacagtgccactcttgatcagtggaacggta

SEQ ID NO: 176553 - DNA, 75 bp, synthetic construct
  source 1..75: mol_type = other DNA
tcattgcgctgctaacttgtgccacctttttcgcacatgctgccgcgccagatgaaatcaccaccgcctggccgg

SEQ ID NO: 176554 - DNA, 75 bp, synthetic construct
  source 1..75: mol_type = other DNA
tgttgttgtatctggagtaaaacctgatcctgagcttgcggcttcaattaaaactgaaattgacagcttagatgc

SEQ ID NO: 176555 - DNA, 75 bp, synthetic construct
  source 1..75: mol_type = other DNA
cgggatagtggcaacgattacgcatggcgtcgcgttggctatgtcgctggggtgcgagtcattgagctgaacagt

SEQ ID NO: 176556 - DNA, 75 bp, synthetic construct
  source 1..75: mol_type = other DNA
ctcgtcccaacctactcaggcgggataattactgtccgaatggaccttgatcaaagtcagttgcaggaagggaaa

SEQ ID NO: 176557 - DNA, 75 bp, synthetic construct
  source 1..75: mol_type = other DNA
tctatcattgtagataaaagctatgccccgagcaccattatggttgcactgattgtgattcataactgtgcggtg

SEQ ID NO: 176558 - DNA, 75 bp, synthetic construct
  source 1..75: mol_type = other DNA
cttccagaagtctgtaaacccttaatcccttctcttaccggagaggggatttttattcatataacaaaacatata

SEQ ID NO: 176559 - DNA, 75 bp, synthetic construct
  source 1..75: mol_type = other DNA
catgatggggatctgtaccaccttaattggtgtgttaccgacctatgcacagattggtgtttttgcacccatctt

SEQ ID NO: 176560 - DNA, 75 bp, synthetic construct
  source 1..75: mol_type = other DNA
gatgttgatttatggctctaacacgctgttcttctttatctacacctggcctttctttctggcgctgatgcccgt

SEQ ID NO: 176561 - DNA, 75 bp, synthetic construct
  source 1..75: mol_type = other DNA
cgtgaaattctctaacggcgaaccgtttgatgcagaggcggcggcagaaaacttccgcgcagtgctcgataaccg

SEQ ID NO: 176562 - DNA, 75 bp, synthetic construct
  source 1..75: mol_type = other DNA
tcgtcagcgcgacggtcgttttggcatgattttccaccgcacctggggcgcgccatacgatccacacgccttcct

SEQ ID NO: 176563 - DNA, 75 bp, synthetic construct
  source 1..75: mol_type = other DNA
ttctggataacgagaataagccaatcgccattatttgtgtccaggaagactcgctgtatgtgggcaaaacatata

SEQ ID NO: 176564 - DNA, 75 bp, synthetic construct
  source 1..75: mol_type = other DNA
tgtcgcctgtgcctggctgaccgtgtgcgaacgtcagcaccgctacccgcatctcacccttgagtcactggaagc

SEQ ID NO: 176565 - DNA, 75 bp, synthetic construct
  source 1..75: mol_type = other DNA
cattcattgatggccggaaaattacgctacagtattgttttcaccctggcgaccgtcggcattatgttcggcgca

SEQ ID NO: 176566 - DNA, 75 bp, synthetic construct
  source 1..75: mol_type = other DNA
atgtctgttcatgatgttgttcgccaggagatgctcgctatctacagggaaaatgattaccgtatcgcggtaggc

SEQ ID NO: 176567 - DNA, 75 bp, synthetic construct
  source 1..75: mol_type = other DNA
ccaagagttacggcgttaatggtactccagcaacctttgttgtagacaaccagacaggcaagagtcagctactcg

SEQ ID NO: 176568 - DNA, 75 bp, synthetic construct
  source 1..75: mol_type = other DNA
accagccacttttgtagtggacaaccataccggcaagagccagcttctcggcggcgctcaaccggcgcaagccat

SEQ ID NO: 176569 - DNA, 75 bp, synthetic construct
  source 1..75: mol_type = other DNA
ttcgaagacaatacttttcaacatatatcatttattaaaggtaaacgtcaggatattatatccaggctttttttt

SEQ ID NO: 176570 - DNA, 75 bp, synthetic construct
  source 1..75: mol_type = other DNA
attttttttcgataatctatctaatagtgaaatgtcatatttattatctgcttgtgatgttttttattctcctat

SEQ ID NO: 176571 - DNA, 75 bp, synthetic construct
  source 1..75: mol_type = other DNA
tgagcatatcacctctgttcaggtggccaaattcagtgtgccactacagtattgtggcggggaacaaaacgctgg

SEQ ID NO: 176572 - DNA, 75 bp, synthetic construct
  source 1..75: mol_type = other DNA
taaagtcgcttacctttatcctcgttgtgcctacgcttacagttcaaagacctgctataccaacctcccctcggc

SEQ ID NO: 176573 - DNA, 75 bp, synthetic construct
  source 1..75: mol_type = other DNA
ataacgttagaatcacaaaaaaaagaggtggggagacggtgggtaatttcaaaaagtggggagcaaaagtgggga

SEQ ID NO: 176574 - DNA, 75 bp, synthetic construct
  source 1..75: mol_type = other DNA
aatggttgatgctaatcaggcaatgttatcgctggggacgtcgggggtctattttgctgtcagcgaagggttctt

SEQ ID NO: 176575 - DNA, 75 bp, synthetic construct
  source 1..75: mol_type = other DNA
ggtaagcaaagcaactggctttccgggcaacacggtgaagagggcggttctatgcgcggcgcagcaaacgatctg

SEQ ID NO: 176576 - DNA, 75 bp, synthetic construct
  source 1..75: mol_type = other DNA
ggtaagcaaagtaactggctttccggacaacacggcgaagaaggcggttctatgcgtggtgcggcaaacgatctg

SEQ ID NO: 176577 - DNA, 75 bp, synthetic construct
  source 1..75: mol_type = other DNA
tgccccgacattactcccgacgataatttattactacggtggctgttttgttagcggcgggttcgcaactcacga

SEQ ID NO: 176578 - DNA, 75 bp, synthetic construct
  source 1..75: mol_type = other DNA
atcaataaacagctaataatgtcttatcagcaaaaatattattcacattatcggtttaatggccatgaacttgac

SEQ ID NO: 176579 - DNA, 75 bp, synthetic construct
  source 1..75: mol_type = other DNA
aaacatcctgttattatatgtatcatattgataataaaaataattatgaagaatgctctcttccggaagaaagag

SEQ ID NO: 176580 - DNA, 75 bp, synthetic construct
  source 1..75: mol_type = other DNA
tattgataataaggttaattatggggatctctcacttcctgaagaaagagaggttgatttctggtatgtactgcc

SEQ ID NO: 176581 - DNA, 75 bp, synthetic construct
  source 1..75: mol_type = other DNA
tacattctatgaatcaaagaaagcattactcactgaactttattataacatttgttattcaattttatgtggagt

SEQ ID NO: 176582 - DNA, 75 bp, synthetic construct
  source 1..75: mol_type = other DNA
cagagctattaaaaagggtgatgttttttcatgatttatatgtcaaggatatgttgataagaaatatagagtcgg

SEQ ID NO: 176583 - DNA, 75 bp, synthetic construct
  source 1..75: mol_type = other DNA
acgccggaacggattcaggaggcgaccggactttccggtgaagaactgaaaaagctgtttcctgatgagcagtag

SEQ ID NO: 176584 - DNA, 75 bp, synthetic construct
  source 1..75: mol_type = other DNA
gtgattggttacgcaatgtatgcgggagtatggcaaagcccggtaccggaggaattgtaccgacgcttaattcca

SEQ ID NO: 176585 - DNA, 75 bp, synthetic construct
  source 1..75: mol_type = other DNA
ctttgcggataaaattttactgcaacgaatgttatcgaatcttattgttaatgccattagatattcaccagaaaa

SEQ ID NO: 176586 - DNA, 75 bp, synthetic construct
  source 1..75: mol_type = other DNA
gtactttaaccggatgatggatgttagtcaggatatcttgatcattcatggtgatggcatcaataaaattgttaa

SEQ ID NO: 176587 - DNA, 75 bp, synthetic construct
  source 1..75: mol_type = other DNA
cataacatgcttgaacagtataaaattaatagcattataatttgcattgtcgccattatattgtgctcagtatta

SEQ ID NO: 176588 - DNA, 75 bp, synthetic construct
  source 1..75: mol_type = other DNA
gataatttcaagcaagtatttaaggatggcctggatgaggttgaaagctatttactgagtgagaacatagtatga

SEQ ID NO: 176589 - DNA, 75 bp, synthetic construct
  source 1..75: mol_type = other DNA
gttccgaggatggttggacccgccaattgtcgttacgactcccccttcatgaaccatccagatggattagtctaa

SEQ ID NO: 176590 - DNA, 75 bp, synthetic construct
  source 1..75: mol_type = other DNA
gcatcagcaatgtggctactgtgtgccttgcatgattagacgagcctccctattaagagggggagtaaaagaatc

SEQ ID NO: 176591 - DNA, 75 bp, synthetic construct
  source 1..75: mol_type = other DNA
actgggatatggaaatcacccacgttatccgtggcgaagaccatatcaacaacacgccacgccagatcaacattc

SEQ ID NO: 176592 - DNA, 75 bp, synthetic construct
  source 1..75: mol_type = other DNA
ttttgctgagttcgatgccgatgcagcgaaaaaacatctgcgcccggtagcacgtcagccgctggaagtagttcg

SEQ ID NO: 176593 - DNA, 75 bp, synthetic construct
  source 1..75: mol_type = other DNA
gtggaagcacacctgacatccaagcttttattaatgaagatggtaagcttgttgttgagaggagtggtcctttta

SEQ ID NO: 176594 - DNA, 75 bp, synthetic construct
  source 1..75: mol_type = other DNA
cacctggcatccgttcttgaatatcgatcatcagaaggtcatccggtcattgtttctaacagtgacacatccctg

SEQ ID NO: 176595 - DNA, 75 bp, synthetic construct
  source 1..75: mol_type = other DNA
gaaataaaaccgcaattatgtccgaactgaaaaaacaccttcctgctggcccgcgactggttgaacctttcgcgg

SEQ ID NO: 176596 - DNA, 75 bp, synthetic construct
  source 1..75: mol_type = other DNA
cacctggcatccgttcttgaacatcggtcatcagaaggacatccggtcattatttctaacagtgacacatccctg

SEQ ID NO: 176597 - DNA, 75 bp, synthetic construct
  source 1..75: mol_type = other DNA
gtcgcgagattgcgcgtaattttactgaacttaattatcgaattacccctctgcactggcagacactgtgcatgg

SEQ ID NO: 176598 - DNA, 75 bp, synthetic construct
  source 1..75: mol_type = other DNA
ggcgcgagaaattgggttcgatattgcccaccatgcaaaaaacattcatcacaaaaacggtaccgtcaccttcct

SEQ ID NO: 176599 - DNA, 75 bp, synthetic construct
  source 1..75: mol_type = other DNA
gcaggccatcctgcccaccttattaaaacaggagcaacacgtctgtcagctcatcgcccgcttgccagactggac

SEQ ID NO: 176600 - DNA, 75 bp, synthetic construct
  source 1..75: mol_type = other DNA
cacctcctcagacaggtcggtgtaatattcattgcggcattactgttcagagtggtggcgctttatatcagttag

SEQ ID NO: 176601 - DNA, 75 bp, synthetic construct
  source 1..75: mol_type = other DNA
caaaaccattgagcaacgtccgctggtggtgttgcaggaaatcccggaaggtaacttcttcggtaaaatcattga

SEQ ID NO: 176602 - DNA, 75 bp, synthetic construct
  source 1..75: mol_type = other DNA
ccgctgcaaaaaaatcaggtcgttggcaccatcaatttccagcttgacggtaaaactatcgaacaacgtcccctg

SEQ ID NO: 176603 - DNA, 75 bp, synthetic construct
  source 1..75: mol_type = other DNA
tgaaaaagaaattcgcgcatttgcagagaaagccaagcgggcaacgtttatctgcgcgagctttgatgaaacgct

SEQ ID NO: 176604 - DNA, 75 bp, synthetic construct
  source 1..75: mol_type = other DNA
aatctgctgcgtaacccttatttttgccgggtaatttgcgttaacgacggatccacggacaataccgaagcggtc

SEQ ID NO: 176605 - DNA, 75 bp, synthetic construct
  source 1..75: mol_type = other DNA
gttgttcaagatgaaacgtcaacgttacgcctgggtggcgctggtaccaacggcctggctgctgatttgtaccct

SEQ ID NO: 176606 - DNA, 75 bp, synthetic construct
  source 1..75: mol_type = other DNA
acagtcgtatctttcccatctaaatgggcaatggatttttgcaaggactattacagattggattctgataaatta

SEQ ID NO: 176607 - DNA, 75 bp, synthetic construct
  source 1..75: mol_type = other DNA
ggatgacgggagaattcgccagtgatatgtctgatgcagccggcaccatgtggctggatgtcgcaaagcgtgact

SEQ ID NO: 176608 - DNA, 75 bp, synthetic construct
  source 1..75: mol_type = other DNA
accagatgcccgcattatacgaaggcagcgaaattactggtgctttgttacctgaagttgcgaaagcgtggggta

SEQ ID NO: 176609 - DNA, 75 bp, synthetic construct
  source 1..75: mol_type = other DNA
atgaaagtgccgagccagtttggtttctgccttatctttccggcgagcgtacaccacacaataatccccaggcga

SEQ ID NO: 176610 - DNA, 75 bp, synthetic construct
  source 1..75: mol_type = other DNA
gcacgttttccggttatcacactgacggcttcactgaagatgaccattatcacctggcatccgttcttgaacatc

SEQ ID NO: 176611 - DNA, 75 bp, synthetic construct
  source 1..75: mol_type = other DNA
tccgccagcacgccgccgtgccattccgggtgcagctttgcattacctgtcaggaaatcgcagagctgaaaggca

SEQ ID NO: 176612 - DNA, 75 bp, synthetic construct
  source 1..75: mol_type = other DNA
atgagcaccatcctgaaatgggcgggaaataaaaccgcaattatgtccgaactgaaaaaacaccttcctgctggc

SEQ ID NO: 176613 - DNA, 75 bp, synthetic construct
  source 1..75: mol_type = other DNA
cctccaatgttgcagctaaagctagtgagaacgtaggcgggtggattgatgatttcagacgtacagaaggcagtt

SEQ ID NO: 176614 - DNA, 75 bp, synthetic construct
  source 1..75: mol_type = other DNA
cccgtaacggcccgcagctggctgatctggtgaaactgctgggcgaacgctgcaagacgctgaaagagatggcac

SEQ ID NO: 176615 - DNA, 75 bp, synthetic construct
  source 1..75: mol_type = other DNA
cgaggcgtttatatctcgtgccagagctttatttgaggaagcaaacagggatgtggcttattacaacataaggca

SEQ ID NO: 176616 - DNA, 75 bp, synthetic construct
  source 1..75: mol_type = other DNA
cggaatacggtgctgagcgttgtggcatgaccgttcattttctgccatgcaatcagataaaagtgacaacagtct

SEQ ID NO: 176617 - DNA, 75 bp, synthetic construct
  source 1..75: mol_type = other DNA
atgaatgaaatacgtagtaaccctgtaaaatttctggaagagcatttaattcttaatacacagcgctatgcccat

SEQ ID NO: 176618 - DNA, 75 bp, synthetic construct
  source 1..75: mol_type = other DNA
atcgtaccttcgatggtgaatcattagttcctgtccttgagaacaaaacgctaaaacgtgagaagccgctaatct

SEQ ID NO: 176619 - DNA, 75 bp, synthetic construct
  source 1..75: mol_type = other DNA
cgttatggcatggtccacccgactggctggctgcgtaacgggcaacccactccgcgagccgataaaatgagcgga

SEQ ID NO: 176620 - DNA, 75 bp, synthetic construct
  source 1..75: mol_type = other DNA
atggaaacggatgataatggaatgaacgttattaataaggaagagctggatgatgtactggccagttcggttgtg

SEQ ID NO: 176621 - DNA, 75 bp, synthetic construct
  source 1..75: mol_type = other DNA
gatatttctcaaactatccagcaaagttcatcgttatggctaaccaatcagcaaagcggctgtagtgttcttatt

SEQ ID NO: 176622 - DNA, 75 bp, synthetic construct
  source 1..75: mol_type = other DNA
acccgcgcggtggcgtttgaaactggcgatatcgacctgctgtacggaaacgaagggttattaccgctcgatacc

SEQ ID NO: 176623 - DNA, 75 bp, synthetic construct
  source 1..75: mol_type = other DNA
tggtgtccggcggtcatacgcagttaatcagcgtgactggcattggtcagtacgagctgctcggcgagtctatcg

SEQ ID NO: 176624 - DNA, 75 bp, synthetic construct
  source 1..75: mol_type = other DNA
gctgttaaaaaaattgcgttaggcgtggcttatgcgttgtgggaaggcatcggtattttatttattaccattttt

SEQ ID NO: 176625 - DNA, 75 bp, synthetic construct
  source 1..75: mol_type = other DNA
atgggatctgaaatcagtaaaaaagatatcacccgtctgggctttcgttcgtcactgctgcaagcgagctttaac

SEQ ID NO: 176626 - DNA, 75 bp, synthetic construct
  source 1..75: mol_type = other DNA
catcagatcgttaaaacgcccaatatagacaggcttgcccgggaaggcgtcaaatttaccgactactatgcacct

SEQ ID NO: 176627 - DNA, 75 bp, synthetic construct
  source 1..75: mol_type = other DNA
gtactcacaatatatgagcgcgtatcagaagcagcatcctgatttattttatggcgactgggcggataaaccctg

SEQ ID NO: 176628 - DNA, 75 bp, synthetic construct
  source 1..75: mol_type = other DNA
tgatcggccttgcagtttgcacagggaatgcttttagtcctgccttagccgcagaggttaaacaacctaatttag

SEQ ID NO: 176629 - DNA, 75 bp, synthetic construct
  source 1..75: mol_type = other DNA
gccggagtttccggggctgctgcgggttttgctgtgtatagcggagtgatggcatttgctgcggcttccacaggt

SEQ ID NO: 176630 - DNA, 75 bp, synthetic construct
  source 1..75: mol_type = other DNA
tgttggggtcatgcagcaggattcagcttctatccgggaaaaaatcttggcgctttaggtgatgctggtgcgata

SEQ ID NO: 176631 - DNA, 75 bp, synthetic construct
  source 1..75: mol_type = other DNA
tatcttgattctcatgggatccaaaccttggttcattatccaattccaccacataaacaaattgcctataaagat

SEQ ID NO: 176632 - DNA, 75 bp, synthetic construct
  source 1..75: mol_type = other DNA
aaattaatggaagatataaaaaagagttaatagcagcctgtgctaaggtcattgattcaggctggtatatacaag

SEQ ID NO: 176633 - DNA, 75 bp, synthetic construct
  source 1..75: mol_type = other DNA
aaatactgtcttggggttgcaaatggtcttgatgctctaactttagttttaagagcttggaaggaaatggggaaa

SEQ ID NO: 176634 - DNA, 75 bp, synthetic construct
  source 1..75: mol_type = other DNA
agcgtccatacttgcaataacagagaataaccttgtccctgttttaattgaaccaagtgttgatacatataatat

SEQ ID NO: 176635 - DNA, 75 bp, synthetic construct
  source 1..75: mol_type = other DNA
gctggcagggatgagtctgggatttttgattgtcatgctgctgtgtgcgggaatttcattttcattggctgttat

SEQ ID NO: 176636 - DNA, 75 bp, synthetic construct
  source 1..75: mol_type = other DNA
ttattatccagcggacccgtattcttaacgcagcggcgcgtgaagccgaagcgtttgaagataaattctggtctg

SEQ ID NO: 176637 - DNA, 75 bp, synthetic construct
  source 1..75: mol_type = other DNA
ttgcaaatcgatatttaaatgaaataaaaaatgagttaatcgtacttcctactatttccagtgaagagaatcatg

SEQ ID NO: 176638 - DNA, 75 bp, synthetic construct
  source 1..75: mol_type = other DNA
agctcctggcgcgtctggaaaaagagggcaataaagacctgaaactgagtgtcccgcaacataacatcaataaga

SEQ ID NO: 176639 - DNA, 75 bp, synthetic construct
  source 1..75: mol_type = other DNA
ggtttttcaatcgcatcctgggccattattatccagcggacccgtattcttaacgctgcagcacgcgaagctgag

SEQ ID NO: 176640 - DNA, 75 bp, synthetic construct
  source 1..75: mol_type = other DNA
caaccgtcttaaccaacgcgtaaacaaactggaactgaattacgataactttatggaagagtttactgcgattct

SEQ ID NO: 176641 - DNA, 75 bp, synthetic construct
  source 1..75: mol_type = other DNA
cacgcgtttatcgcccttggtgcggtgaagcaggcaacattgcaaatggttgcccctggtatcgcagaagcgttg

SEQ ID NO: 176642 - DNA, 75 bp, synthetic construct
  source 1..75: mol_type = other DNA
tccgtttcgcccaggattaatagcggcactgcgtgatgtaacaggttcatctgagcttatttattatgtaaaaaa

SEQ ID NO: 176643 - DNA, 75 bp, synthetic construct
  source 1..75: mol_type = other DNA
taaaaccgcgaagctgctggggctggattatcctggcggaccgttactgtcgaaaatggcggcgcagggtactgc

SEQ ID NO: 176644 - DNA, 75 bp, synthetic construct
  source 1..75: mol_type = other DNA
caaggacttctctcctggtgaaatagataaatcagcaaatatcaggaatggctggttggctaaggcattatttgg

SEQ ID NO: 176645 - DNA, 75 bp, synthetic construct
  source 1..75: mol_type = other DNA
cttaattaactgttttctttctgaagaagaaattgtctggtggcaatcaggtggcgttttcgcggatccctggcc

SEQ ID NO: 176646 - DNA, 75 bp, synthetic construct
  source 1..75: mol_type = other DNA
gaaaaacctgctcacacaggcaaacaggaatcacttagctgtatctgtcattgtcaatgatatgagcgatctgga

SEQ ID NO: 176647 - DNA, 75 bp, synthetic construct
  source 1..75: mol_type = other DNA
gactggcgatataatcatccaactgatttgcgtgaaggtggcacacttaccgtaagagaactggggataactcct

SEQ ID NO: 176648 - DNA, 75 bp, synthetic construct
  source 1..75: mol_type = other DNA
tgtgcgccgggcgattacgttgaatcaaccaaatccgcaggatggcgttgatgttctggcaaaagtggggggatt

SEQ ID NO: 176649 - DNA, 75 bp, synthetic construct
  source 1..75: mol_type = other DNA
gcaatattgcttcagctccggcaatgagtcgccgtcaggctgaaaagttgcttttggacgtcatatgttatacgc

SEQ ID NO: 176650 - DNA, 75 bp, synthetic construct
  source 1..75: mol_type = other DNA
attgacgggttactaaaacccgtcggtagtctgggaagactggagtcgcttgccatacaactggcgggaatgccg

SEQ ID NO: 176651 - DNA, 75 bp, synthetic construct
  source 1..75: mol_type = other DNA
cgatggatttcattaaatagatttaatgagcaatactatagagatgcctttacacaaaataatatagagacgaat

SEQ ID NO: 176652 - DNA, 75 bp, synthetic construct
  source 1..75: mol_type = other DNA
atgaaaattgcgttgaattcagatggattttacgagtggggcggtggaattgattttattaaatatattctgtca

SEQ ID NO: 176653 - DNA, 75 bp, synthetic construct
  source 1..75: mol_type = other DNA
cgatatacaacaacatgggcgaacttgctgccagtaatattattctaccggggaatacaacttcagaattgaaca

SEQ ID NO: 176654 - DNA, 75 bp, synthetic construct
  source 1..75: mol_type = other DNA
actatgtcctgtggggtggtcgtgaaggttacgaaacgctgttaaataccgacttgcgtcaggagcgtgaacaac

SEQ ID NO: 176655 - DNA, 75 bp, synthetic construct
  source 1..75: mol_type = other DNA
ccagtacacatctaacaaaagaaatacaatgttgatttccgctaaaacaacgctgagggagcgatggcaagaagt

SEQ ID NO: 176656 - DNA, 75 bp, synthetic construct
  source 1..75: mol_type = other DNA
tctattcttgagctattaatgatgggggcaggaattcctgttgatgtgcagggggctattgggaagtcatttttt

SEQ ID NO: 176657 - DNA, 75 bp, synthetic construct
  source 1..75: mol_type = other DNA
ggccagcggctttccgttttatccagacttaacagcaccagtggccggatggcacggcaggcatatgactggctg

SEQ ID NO: 176658 - DNA, 75 bp, synthetic construct
  source 1..75: mol_type = other DNA
ccaatcgccgggattggcgatgcgattttctggtttactttgttgccgattatggcggggatttgctcatcgttt

SEQ ID NO: 176659 - DNA, 75 bp, synthetic construct
  source 1..75: mol_type = other DNA
gaaaaagatctataaggacgacaaaccgggcttaagcgcggcgatgaaagataatctggaatttattaacaccca

SEQ ID NO: 176660 - DNA, 75 bp, synthetic construct
  source 1..75: mol_type = other DNA
tggtattcggcattggcctgatgctggtactgacaatgaccgcaggttcagacacattccctacattagcaatgc

SEQ ID NO: 176661 - DNA, 75 bp, synthetic construct
  source 1..75: mol_type = other DNA
caaaatatgctcaggaacataatctggctccggtgcatcagagtggacgccaggagcagttggaaaacctggtaa

SEQ ID NO: 176662 - DNA, 75 bp, synthetic construct
  source 1..75: mol_type = other DNA
acttcgatgccaaagtacgtcgtcaaagtactgataaatatgatctgttttacggtcatatcggcgcgatggata

SEQ ID NO: 176663 - DNA, 75 bp, synthetic construct
  source 1..75: mol_type = other DNA
tgaagctaaccacgcgacgctggcaggtcactctttccatcatgaaatagccaccgccattgcgcttggcctgtt

SEQ ID NO: 176664 - DNA, 75 bp, synthetic construct
  source 1..75: mol_type = other DNA
gaagcccacggtcgccatcggggcgcaggccgccgccgtgcatggtatcagtgagcaggctctctgcggcgcacc

SEQ ID NO: 176665 - DNA, 75 bp, synthetic construct
  source 1..75: mol_type = other DNA
gacgtgcgcaggcgattgctgaagacagatgtttctcgaaaggacgtctgcgcgatgaattcagaatgaagcctg

SEQ ID NO: 176666 - DNA, 75 bp, synthetic construct
  source 1..75: mol_type = other DNA
gccgaccagtaattatctttaatgcccggttcgacatccgcattctgaaacagactgctgccgcacatagcgatc

SEQ ID NO: 176667 - DNA, 75 bp, synthetic construct
  source 1..75: mol_type = other DNA
gcaatcaccaaaggacaatcacaaagttatatttctgggaaatacggtttatcacgtagtcagtactacaagatt

SEQ ID NO: 176668 - DNA, 75 bp, synthetic construct
  source 1..75: mol_type = other DNA
gagaccatctggtaagatttgacggtaaagtctggaaagacgtaacacaaaccaataagcccaagtttacccacc

SEQ ID NO: 176669 - DNA, 75 bp, synthetic construct
  source 1..75: mol_type = other DNA
agtggcttgtcctggctctctgttggcatgacgatgatgtgtattgccggttatgcgatgagcgccgcgccagtg

SEQ ID NO: 176670 - DNA, 75 bp, synthetic construct
  source 1..75: mol_type = other DNA
atgttaacgttaaatcaggtaacttatcgctggcctgacgcagcaacgtattgtctttgcaacatttctctacaa

SEQ ID NO: 176671 - DNA, 75 bp, synthetic construct
  source 1..75: mol_type = other DNA
agcgctatccgctgtgcgttgagtgtcagaagctgggcctctacgttcctgcaaagattgtcgatcacatcatcc

SEQ ID NO: 176672 - DNA, 75 bp, synthetic construct
  source 1..75: mol_type = other DNA
gaccttatagaaaaaaatattaccgttccactcaatgatattggcacagatgattttgatgttaacaatgtgtca

SEQ ID NO: 176673 - DNA, 75 bp, synthetic construct
  source 1..75: mol_type = other DNA
aaccggagagacaattgtagtgcgctgtcagacggtcgatcacctggtgcaagttatcgtcgaaaaccattgcgc

SEQ ID NO: 176674 - DNA, 75 bp, synthetic construct
  source 1..75: mol_type = other DNA
atgaaacgcgcgtctctgattacactgacccttatcggcgcgtttagcgccatacacgctgcctgggcggtagat

SEQ ID NO: 176675 - DNA, 75 bp, synthetic construct
  source 1..75: mol_type = other DNA
tgactcttatcggtgcttttagcgccatccacgcggcctgggcggtagattatccgcttccaccaaccggaagcc

SEQ ID NO: 176676 - DNA, 75 bp, synthetic construct
  source 1..75: mol_type = other DNA
acttgaccgtgatatccgcgacccgatggaactgctcgatgaagttgagaacgagctgaaaatcggctgcgcacc

SEQ ID NO: 176677 - DNA, 75 bp, synthetic construct
  source 1..75: mol_type = other DNA
tacgatttatccattttatctccctgatgctggtctttggcttcgcgatgtatggagcatggctggcaccagtaa

SEQ ID NO: 176678 - DNA, 75 bp, synthetic construct
  source 1..75: mol_type = other DNA
ggcatgcgacgttaaatgaaggactaattgcgaaagttcatcagactaatcatgctgtacatttgatctgcgcgg

SEQ ID NO: 176679 - DNA, 75 bp, synthetic construct
  source 1..75: mol_type = other DNA
gaagctctcgccccgccgctgttattacttgacgaaccgagccgggattttgatgcccaatggctggcagtattt

SEQ ID NO: 176680 - DNA, 75 bp, synthetic construct
  source 1..75: mol_type = other DNA
gttcaacatcctgaatgccgattatgaataccagcgccgccacaattacagaatggccagttatgacatgaccaa

SEQ ID NO: 176681 - DNA, 75 bp, synthetic construct
  source 1..75: mol_type = other DNA
gcaatagagaaaagccagaatactacagaagtagtatgggtgaaattattgcctgatggttcacataaaatatca

SEQ ID NO: 176682 - DNA, 75 bp, synthetic construct
  source 1..75: mol_type = other DNA
aagtgcatccccgcgaagtagttaaatcagccctgaaacataacgctgctgcggtcattttggcgcataaccacc

SEQ ID NO: 176683 - DNA, 75 bp, synthetic construct
  source 1..75: mol_type = other DNA
tctttcgcttattcaaaggataatgctgaaatacttcttattaacaaggaatatggcaaacttctcgatattctt

SEQ ID NO: 176684 - DNA, 75 bp, synthetic construct
  source 1..75: mol_type = other DNA
taccattgattatgataagtctggggttaaactaacctcccacaataatattttgacgactgattatgacgagta

SEQ ID NO: 176685 - DNA, 75 bp, synthetic construct
  source 1..75: mol_type = other DNA
ctgctggcttcgtcgtcaatatgaacgcgtccggctatgaaattacccgtactcgcgatgccgtctccaacttcg

SEQ ID NO: 176686 - DNA, 75 bp, synthetic construct
  source 1..75: mol_type = other DNA
gtgaaaaaactcatcacagcgaatgatattcgtgaagcacacgcgcgcggcgaacaggcaatgtccgtggttctg

SEQ ID NO: 176687 - DNA, 75 bp, synthetic construct
  source 1..75: mol_type = other DNA
cagcaccgttgctgacgagatcgcatttggtttgaaactgcaaaaatgcccggcggatgaaatcactcaacgtac

SEQ ID NO: 176688 - DNA, 75 bp, synthetic construct
  source 1..75: mol_type = other DNA
cagtcatgacgccgcatttacccggcgtcatttttctcgcgtcatgcgactggaaggtggtgtagtgagggaggt

SEQ ID NO: 176689 - DNA, 75 bp, synthetic construct
  source 1..75: mol_type = other DNA
ttgtaatgtatctcgacaatcagcattgcctgctagagcgggaaacactgtttaccggcacgctcagccataccg

SEQ ID NO: 176690 - DNA, 75 bp, synthetic construct
  source 1..75: mol_type = other DNA
cgtcggattaacggatctggtcaccggagacgacggcagcagcatggccgctggttttatgcagtgggagaacgc

SEQ ID NO: 176691 - DNA, 75 bp, synthetic construct
  source 1..75: mol_type = other DNA
atattcgtgaagcacatgcgcgtggcgaacaggcaatgtccgttgttttgcgcgccagcattattaccccggaag

SEQ ID NO: 176692 - DNA, 75 bp, synthetic construct
  source 1..75: mol_type = other DNA
tccgcgcagaagtggcggcgctggccaacagcatgtgcgacctgcgcgtcaccctgaaagtgctggaagaccgtt

SEQ ID NO: 176693 - DNA, 75 bp, synthetic construct
  source 1..75: mol_type = other DNA
gaactcattataagtctcctcatagattgcacatcgatagcgacataccaacaccttcatcagagcctattaatc

SEQ ID NO: 176694 - DNA, 75 bp, synthetic construct
  source 1..75: mol_type = other DNA
tcagaacgcccatcaccaatctggtgacgcagactgaaatcgcactgagtcaggatcgaacacagagggaacttg

SEQ ID NO: 176695 - DNA, 75 bp, synthetic construct
  source 1..75: mol_type = other DNA
atggtcagtaagccgtttcagcgcccgttttcgctggcaacccgcctgaccttttttattagcctggccaccatc

SEQ ID NO: 176696 - DNA, 75 bp, synthetic construct
  source 1..75: mol_type = other DNA
atggccagtaagccgtttcagcgcccgttttcgctggcaacccgcctgaccttttttatcagccttgccaccatt

SEQ ID NO: 176697 - DNA, 75 bp, synthetic construct
  source 1..75: mol_type = other DNA
agcgcgttcttaatcatcccgaagagacacaagcccgacgcttaatgacgctggaagatatcgtcagtggttatt

SEQ ID NO: 176698 - DNA, 75 bp, synthetic construct
  source 1..75: mol_type = other DNA
tccaattcctatacataagcagttagcgtataataatctgaatacatattcttatccgataactgagaaattaca

SEQ ID NO: 176699 - DNA, 75 bp, synthetic construct
  source 1..75: mol_type = other DNA
gtatggtaagtttttaaaatataaaactgatattgataatgattctctaatgaaagccagaggtgataaatccag

SEQ ID NO: 176700 - DNA, 75 bp, synthetic construct
  source 1..75: mol_type = other DNA
ggagcttggggagatgctgctgctttcagtttttatcccgggaaaaacctaggggccttaggagatgctggggct

SEQ ID NO: 176701 - DNA, 75 bp, synthetic construct
  source 1..75: mol_type = other DNA
ttctctgccgatatcgcgcatgagatcagaacgcccatcaccaatctggtgacgcagactgaaatcgcactgagt

SEQ ID NO: 176702 - DNA, 75 bp, synthetic construct
  source 1..75: mol_type = other DNA
agcatactggattatattgaacaggaacagttaactgccgaaaaacgtaaccattgcatgaaactgtccaaaaaa

SEQ ID NO: 176703 - DNA, 75 bp, synthetic construct
  source 1..75: mol_type = other DNA
acaccttcatcagagcctattaatcaatttgcgcgccagctcatcaccctacttgatacctctgacttaagttcg

SEQ ID NO: 176704 - DNA, 75 bp, synthetic construct
  source 1..75: mol_type = other DNA
gcggtgagcaacggagcgacgcccgcagccagcaatgcgtccgcagttgagtcagcgcagaatggcgagcctgag

SEQ ID NO: 176705 - DNA, 75 bp, synthetic construct
  source 1..75: mol_type = other DNA
taaagcgttgttctccagcgtgagaacgggaacgccggttaaagtgatcaatgagccggtgaaatactccgtaga

SEQ ID NO: 176706 - DNA, 75 bp, synthetic construct
  source 1..75: mol_type = other DNA
ctgcgtcgggcgctaagcaacctgctttcgaatgccctgcgttatacgccaaccggagagacaattgtagtgcgc

SEQ ID NO: 176707 - DNA, 75 bp, synthetic construct
  source 1..75: mol_type = other DNA
atgaaacgcgcgtctctgcttacactgactcttatcggcgcttttagcgccatacacgctgcctgggcggtagat

SEQ ID NO: 176708 - DNA, 75 bp, synthetic construct
  source 1..75: mol_type = other DNA
gtacaaactgcctgttggctttacgcaattcaaagataatcaggctgttgataagaagctggtggataaagcttt

SEQ ID NO: 176709 - DNA, 75 bp, synthetic construct
  source 1..75: mol_type = other DNA
gtcgataaagcgttgtatcgtcgggcagggtatccggtttcggtgagcagtggagcaactcccgcagccagcaat

SEQ ID NO: 176710 - DNA, 75 bp, synthetic construct
  source 1..75: mol_type = other DNA
ctattcagacgacggcggacgagctggaagtggggatgggcaaagtcggtatgccgctgcgtgtcgctgtcactg

SEQ ID NO: 176711 - DNA, 75 bp, synthetic construct
  source 1..75: mol_type = other DNA
tatgctgtttctcgcccaggccgataacaaccagttaatccccgaaaagaaaatgctcaacctggcagatgaagt

SEQ ID NO: 176712 - DNA, 75 bp, synthetic construct
  source 1..75: mol_type = other DNA
ttttgccgagcaggatattaatgatttaaaagagattagcgccacccttgaacgggtacttaatcaccctgacga

SEQ ID NO: 176713 - DNA, 75 bp, synthetic construct
  source 1..75: mol_type = other DNA
gcgttagcggaagatcgcggcgtggagttgcggtttgttggcgacaaatgtcaggttgcgggcgatccgctgatg

SEQ ID NO: 176714 - DNA, 75 bp, synthetic construct
  source 1..75: mol_type = other DNA
cggaaatcgccctcagccagtctcgcagccagaaggagctggaagatgtgctctactctaatctcgaagagctga

SEQ ID NO: 176715 - DNA, 75 bp, synthetic construct
  source 1..75: mol_type = other DNA
tttgttaaaggccgtcatgctgtggaggaagacgttgccacgcactggttcactcgtgcgcacgcggaagtatcc

SEQ ID NO: 176716 - DNA, 75 bp, synthetic construct
  source 1..75: mol_type = other DNA
cctgggcacggcagctcaacggcgaagggatgcgcgaactgctgcaacagcctggctatattcaggctggttata

SEQ ID NO: 176717 - DNA, 75 bp, synthetic construct
  source 1..75: mol_type = other DNA
tgttgctgattgaaaagatgcgcgaaagcggcgacatccacagccatcacggctggctgcatctgccagatcaca

SEQ ID NO: 176718 - DNA, 75 bp, synthetic construct
  source 1..75: mol_type = other DNA
ctgtttggcgacgagccgtggtgggtacgcgacctggcaaaagagacgggaaccgacgagcaggcaatgcgcctg

SEQ ID NO: 176719 - DNA, 75 bp, synthetic construct
  source 1..75: mol_type = other DNA
attaaaaattatcgctactatggcgatctccttctggcaaaaagcccgactgagaaagcccttcttatgcatcag

SEQ ID NO: 176720 - DNA, 75 bp, synthetic construct
  source 1..75: mol_type = other DNA
accgcgtcgtggtaaacgtaagccggagtatctgcaatggctggcttcgcttgcgcaggcgcagagcgatgcaga

SEQ ID NO: 176721 - DNA, 75 bp, synthetic construct
  source 1..75: mol_type = other DNA
ctggcggataacgatcgcctggtgctgcgcgatatctcggcccgcaacacgctggcgggggcgcgtgtggtgatg

SEQ ID NO: 176722 - DNA, 75 bp, synthetic construct
  source 1..75: mol_type = other DNA
tgcagaaattgaaaaaatactatctgaaaaagaagagctaaacaaatcactagcacatcagcataaagaaaaaaa

SEQ ID NO: 176723 - DNA, 75 bp, synthetic construct
  source 1..75: mol_type = other DNA
atggagggtgctagtcattgcacttcgagtgttatcaacattagatctgaattgactaaagtcctacaaggtttg

SEQ ID NO: 176724 - DNA, 75 bp, synthetic construct
  source 1..75: mol_type = other DNA
ccaagaattctgtgacagcgttggctcccctcactttatccaacttgatcatcctgttcaaatatccatacttga

SEQ ID NO: 176725 - DNA, 75 bp, synthetic construct
  source 1..75: mol_type = other DNA
tgaccgcattggctttacgcgtcgtcgtggaaatgatcatttattgcgcgacgcattattatttccggaaaaata

SEQ ID NO: 176726 - DNA, 75 bp, synthetic construct
  source 1..75: mol_type = other DNA
tttttaaggatacatttcatccaagaaagtctgataacataattcagttatgtacagttaatagtgcgacatttt

SEQ ID NO: 176727 - DNA, 75 bp, synthetic construct
  source 1..75: mol_type = other DNA
ttctgaaactcgtaaccacgtctgcggtagttctgaatcagccattcggcctgttcttcagtgcaggggtcatgc

SEQ ID NO: 176728 - DNA, 75 bp, synthetic construct
  source 1..75: mol_type = other DNA
gagggaatcttcaacgcgctgagtctgtgccaggcagggttacctgcagttgccacactgagcagtaacaactat

SEQ ID NO: 176729 - DNA, 75 bp, synthetic construct
  source 1..75: mol_type = other DNA
tcaccagatagccgattggcagcaaaacggctggagctttaccccgttgagcaggtatcaggttttatccatcgg

SEQ ID NO: 176730 - DNA, 75 bp, synthetic construct
  source 1..75: mol_type = other DNA
tgaagcgcgcaaaattgcactcaaggaatccggcgctgtaaaagaaatcgcaaactgtaacccagtgccgcttta

SEQ ID NO: 176731 - DNA, 75 bp, synthetic construct
  source 1..75: mol_type = other DNA
ctggttcaaactggatattgagcgccatatgaaggctgttgaacgcgtcataaatgagcgaaatgttgacgaaga

SEQ ID NO: 176732 - DNA, 75 bp, synthetic construct
  source 1..75: mol_type = other DNA
actgtcactgatagctgacagtacccctaatgaggccacccgtggagcgctgactgaagccctgcagtcaccatc

SEQ ID NO: 176733 - DNA, 75 bp, synthetic construct
  source 1..75: mol_type = other DNA
tgtaaacacgtatattactttacgtgaaggttataattatccgtctcttcagtatgattatgagactgtacagct

SEQ ID NO: 176734 - DNA, 75 bp, synthetic construct
  source 1..75: mol_type = other DNA
acgctaggatcgtgggaaagcaacgaggaaatgatgcttaagaacattaataagcacattaaatcgcgcatgaga

SEQ ID NO: 176735 - DNA, 75 bp, synthetic construct
  source 1..75: mol_type = other DNA
caaactgtaacccagtgccgctttattacattcgaaacaatgacacggatgaagcatggtattacttccgcgtta

SEQ ID NO: 176736 - DNA, 75 bp, synthetic construct
  source 1..75: mol_type = other DNA
gtgagcgccataatcgtggtaaaggggatatgcaacggatgccggaaacattccgctgctggatatttggccggg

SEQ ID NO: 176737 - DNA, 75 bp, synthetic construct
  source 1..75: mol_type = other DNA
ttgccaactgctggctgacgccgctttatttccagcggtctgaacctacagacgagtcctggtattacgtgaagg

SEQ ID NO: 176738 - DNA, 75 bp, synthetic construct
  source 1..75: mol_type = other DNA
tccgcaactggcacaggctgccgccattcaccgcgtggagatccgaaccgatcgcgaaatgattgagttgctcgg

SEQ ID NO: 176739 - DNA, 75 bp, synthetic construct
  source 1..75: mol_type = other DNA
gatcgctatatcagtacgaaagatgaaccatacgcagcggcggcagcttatctcctggaggcacgcaatattgct

SEQ ID NO: 176740 - DNA, 75 bp, synthetic construct
  source 1..75: mol_type = other DNA
cagaatgcgcgggtaaacgcctctccggcaattattgagcgcctgatacgcatatacaccgataaaaaacgccat

SEQ ID NO: 176741 - DNA, 75 bp, synthetic construct
  source 1..75: mol_type = other DNA
atcggcataggccttgcgggaagtacctacgataataattatccggaaaacctggcagtgaaaaactttgtcgtg

SEQ ID NO: 176742 - DNA, 75 bp, synthetic construct
  source 1..75: mol_type = other DNA
cgcaacctgaccatcgataacctgaccattagccacgctaattacgccatcttacgccagggatttcataaccag

SEQ ID NO: 176743 - DNA, 75 bp, synthetic construct
  source 1..75: mol_type = other DNA
cgttaatttcattaaagatttttactaccgtctggcgcatcgtgtgggtgagctgagtcacctggctgatggttc

SEQ ID NO: 176744 - DNA, 75 bp, synthetic construct
  source 1..75: mol_type = other DNA
tgccaacatcaccaactgtaagttcagcgacttacagggcgacgccattgaatggaacgtggcaattaacgacag

SEQ ID NO: 176745 - DNA, 75 bp, synthetic construct
  source 1..75: mol_type = other DNA
caggccttcagcgaagggcaaacggtcgtcgtgcctgccggatttgtttgtgacaacattaataccggtatcttc

SEQ ID NO: 176746 - DNA, 75 bp, synthetic construct
  source 1..75: mol_type = other DNA
cgcggaatccaaatttcagcagggaatgccgtctcattcgtggcgttgaccaacattgaaatgacgcgtgcttcg

SEQ ID NO: 176747 - DNA, 75 bp, synthetic construct
  source 1..75: mol_type = other DNA
atgcaggccgaaatccttctcacccttaagcttcaacaaaagctctttgccgacccacgccgcatttcgctacta

SEQ ID NO: 176748 - DNA, 75 bp, synthetic construct
  source 1..75: mol_type = other DNA
taaagaaacctacaccggcgtggcgaagttcctcgacttcctcgcaaagccagaaaacgctgccgagtggcatca

SEQ ID NO: 176749 - DNA, 75 bp, synthetic construct
  source 1..75: mol_type = other DNA
atggcaaatgcgcaggcagtgacgactattccgttctggcattctatggaaggggaactgggtaaagaggtggac

SEQ ID NO: 176750 - DNA, 75 bp, synthetic construct
  source 1..75: mol_type = other DNA
gtaaatatcacctcactttctacttttaccaaaggaaatttagttgtcgatgcccatatgggtggcttttttgca

SEQ ID NO: 176751 - DNA, 75 bp, synthetic construct
  source 1..75: mol_type = other DNA
ttcgtacctataaatccgtttttgacttaggtccggcggcagagaaatacacagtaaaaatgagtggctgccact

SEQ ID NO: 176752 - DNA, 75 bp, synthetic construct
  source 1..75: mol_type = other DNA
tcagccagggggcgaaagatgccggtatcagctataaaagcgcctgggatgccattaacgagatgaatcagttaa

SEQ ID NO: 176753 - DNA, 75 bp, synthetic construct
  source 1..75: mol_type = other DNA
ctttgcaatcgctattctactgactcttatatttgacaaacctacaggtggatgggtaattccacctttattaat

SEQ ID NO: 176754 - DNA, 75 bp, synthetic construct
  source 1..75: mol_type = other DNA
tcctctattttattgagtattgcaaggggcaaacaaatacagatgaattcgacaaccgagacagtttaatcgtta

SEQ ID NO: 176755 - DNA, 75 bp, synthetic construct
  source 1..75: mol_type = other DNA
aacaaattatcaaaaaattaaagaccgcaatcatgatgcagaaacaagttgtactgaatcaatatggttaaatac

SEQ ID NO: 176756 - DNA, 75 bp, synthetic construct
  source 1..75: mol_type = other DNA
aggtaaaaccgataaaaatgataccgatagcagggatatttttattgttattgacgatccaatatctagtctatc

SEQ ID NO: 176757 - DNA, 75 bp, synthetic construct
  source 1..75: mol_type = other DNA
tcccctaactttatccaacttgatcatcctgttcaaatatccatacttaagcgagccctttttaaactgcgacaa

SEQ ID NO: 176758 - DNA, 75 bp, synthetic construct
  source 1..75: mol_type = other DNA
agatatttagacttatgggagatatttcacattttaataaaatgtatgaagagaaaaagaatatagaagacacta

SEQ ID NO: 176759 - DNA, 75 bp, synthetic construct
  source 1..75: mol_type = other DNA
ccaaccataaaaaatagtttcgttatagttcgctcagataatacaccaagtaaaaatgtatatagatctcttagc

SEQ ID NO: 176760 - DNA, 75 bp, synthetic construct
  source 1..75: mol_type = other DNA
ggcaattaccttgattctggcggtgctgctgggcggcatggttggcgcggggattgtgttggggcgtaatgctct

SEQ ID NO: 176761 - DNA, 75 bp, synthetic construct
  source 1..75: mol_type = other DNA
ggcagggatattattttttaaatacaaacatgagcccccattgtgaaatggtttccaattctttatcttttgatt

SEQ ID NO: 176762 - DNA, 75 bp, synthetic construct
  source 1..75: mol_type = other DNA
taaaaaattctttatcgaaaataatattatatgctcagtaaatgttgatgatggattgtgtacatttatttacga

SEQ ID NO: 176763 - DNA, 75 bp, synthetic construct
  source 1..75: mol_type = other DNA
ttgacaattacaaacctcttgtttacaacactaaatttattgaagataatttctacaatgcacaggaacaaaaag

SEQ ID NO: 176764 - DNA, 75 bp, synthetic construct
  source 1..75: mol_type = other DNA
agctatttgtcagaaacaattaaacaacttcaaaaccttgactgggtgaaaaaagggaaggaattatatttaaat

SEQ ID NO: 176765 - DNA, 75 bp, synthetic construct
  source 1..75: mol_type = other DNA
attcaagcgtgattattatcttggacgagtaacaaaaaatgaatatagcataattacagaaatagagaaaaagag

SEQ ID NO: 176766 - DNA, 75 bp, synthetic construct
  source 1..75: mol_type = other DNA
gaatatcaacggtggtgcgcctcaacgtattacctgggaaggttcacaaaaccaggatgcggatgtcagcagcga

SEQ ID NO: 176767 - DNA, 75 bp, synthetic construct
  source 1..75: mol_type = other DNA
ctggttatccagacgctggcgaatggtgcagtacgtcaggtcgcttctttcccgcgtcacaacggtgcgcctgca

SEQ ID NO: 176768 - DNA, 75 bp, synthetic construct
  source 1..75: mol_type = other DNA
tatcagattacgacggctacaaccagtttgtggttcaccgttctccacagccgctgatgtctccggcatggtcac

SEQ ID NO: 176769 - DNA, 75 bp, synthetic construct
  source 1..75: mol_type = other DNA
taccgaaggtccggtgaaatatgttcgcccggatgtcagccattttgaggcgaagaaactgcgccgcggcgatta

SEQ ID NO: 176770 - DNA, 75 bp, synthetic construct
  source 1..75: mol_type = other DNA
tattgggtaacgcgcccagtaaaacaattgacggcgaatgtcagcaggattgaacaggacagtatgagcgcgatc

SEQ ID NO: 176771 - DNA, 75 bp, synthetic construct
  source 1..75: mol_type = other DNA
ccgctgatgtctccggcatggtcaccggatggttctaaactggcctatgtgactttcgagagcggtcgttcagcg

SEQ ID NO: 176772 - DNA, 75 bp, synthetic construct
  source 1..75: mol_type = other DNA
gccatatggcgtttccattcagcgtacaagaagtgatccagatggggcgacatccttatcgtaccggtaatcagg

SEQ ID NO: 176773 - DNA, 75 bp, synthetic construct
  source 1..75: mol_type = other DNA
cctgactcaggctgctgaagtattgcatatagcacagcctgcgctcagtcagcaggttgccacgctggaaggtga

SEQ ID NO: 176774 - DNA, 75 bp, synthetic construct
  source 1..75: mol_type = other DNA
gaacaggcccaactggcggtgcataacgttggtcaggcattatcggggcaagtctcgattggctttgcaccagga

SEQ ID NO: 176775 - DNA, 75 bp, synthetic construct
  source 1..75: mol_type = other DNA
ccagtgggcggggcctggtgcggcacctgaagatattggcggcatcgttgctgctgacttgcgtaacagcggtaa

SEQ ID NO: 176776 - DNA, 75 bp, synthetic construct
  source 1..75: mol_type = other DNA
tcgtttaacaccttgcaacttggcgagcgcgggaacattgtgcagatgcgtggagaggtgctattagctggcgtg

SEQ ID NO: 176777 - DNA, 75 bp, synthetic construct
  source 1..75: mol_type = other DNA
cagaaatttgcggagcaacggtggaaggcgcggagctggggtcgcagcatctggtctttcggcccggcgccgtgc

SEQ ID NO: 176778 - DNA, 75 bp, synthetic construct
  source 1..75: mol_type = other DNA
ttcaccggagcttttcctcgatttacatggtttgacgcaaatgcaggccaagcaggagctgggcgcgttgattgc

SEQ ID NO: 176779 - DNA, 75 bp, synthetic construct
  source 1..75: mol_type = other DNA
atttccggccatctggaactggtgttccccggcgaccataacccgtataagccgatgagcgaaaacaccgtcaac

SEQ ID NO: 176780 - DNA, 75 bp, synthetic construct
  source 1..75: mol_type = other DNA
gatgcagtggtggtcggattatctggacgtgagccgcgaggggtacgttgcgccgtatatttatgcgcggcggca

SEQ ID NO: 176781 - DNA, 75 bp, synthetic construct
  source 1..75: mol_type = other DNA
ttcccggcgaccataacccatataagccgatgagcgaaaacaccgtcaaccgggcactacgtcttatgggctatg

SEQ ID NO: 176782 - DNA, 75 bp, synthetic construct
  source 1..75: mol_type = other DNA
gcaatagtattttatctgcatataaggagaaaacagggctttctgaggataaattaattgaactaatggatcagg

SEQ ID NO: 176783 - DNA, 75 bp, synthetic construct
  source 1..75: mol_type = other DNA
cgggcactgcggttaatgggctataacacaaaaaccgatgtgtgtggtcatggctttcgggcaatggcctgtagc

SEQ ID NO: 176784 - DNA, 75 bp, synthetic construct
  source 1..75: mol_type = other DNA
cgggcgctgcgtctgatgggctatgataccaaaaccgatgtctgcgggcatggcttccgggcaatggcctgtagc

SEQ ID NO: 176785 - DNA, 75 bp, synthetic construct
  source 1..75: mol_type = other DNA
tgatggcatttcaccaggcaccaaaagagtacggtggtgatgcggcattgctggtgttgattgaagtggatgagt

SEQ ID NO: 176786 - DNA, 75 bp, synthetic construct
  source 1..75: mol_type = other DNA
aggaggatcaggcgctgttccgccagttgatggcggggactcgccagcttaaacaggacacgattgtccatcgac

SEQ ID NO: 176787 - DNA, 75 bp, synthetic construct
  source 1..75: mol_type = other DNA
catgtcatggcgtttcaccaggcaccaaaagagtatggtggtgatgcggcgttgctggtgttgattgaagtggaa

SEQ ID NO: 176788 - DNA, 75 bp, synthetic construct
  source 1..75: mol_type = other DNA
ctgccgacgccataaaacagctgacgattcgattacttggtcaggggcttgaccatctgccggacgtatttcacg

SEQ ID NO: 176789 - DNA, 75 bp, synthetic construct
  source 1..75: mol_type = other DNA
tatgaagtgtatttcggatatgaccgtacgttcaggaagtacggcagattccgtcaaaaattacctgtaaagaca

SEQ ID NO: 176790 - DNA, 75 bp, synthetic construct
  source 1..75: mol_type = other DNA
ccgatgagtttcaaccgttattaaataccgaaggcccggtgaaatatgtccgcccggatgtcagtcattttgagg

SEQ ID NO: 176791 - DNA, 75 bp, synthetic construct
  source 1..75: mol_type = other DNA
gcaaagctgccgtcgaagcggctattgcacgcgccaaagcgcgcaagctggaacagcaacaacaggctaatgcgg

SEQ ID NO: 176792 - DNA, 75 bp, synthetic construct
  source 1..75: mol_type = other DNA
ggtcgatccgcgcaaagccgccgtcgaagccgctattgcccgagccaaagcgcgcaaacgggaacagcaaccggc

SEQ ID NO: 176793 - DNA, 75 bp, synthetic construct
  source 1..75: mol_type = other DNA
atgagcatgaaagagcagcggttgcccacgaattcatgaataacggtcagtccggcccacatcaggccatggccg

SEQ ID NO: 176794 - DNA, 75 bp, synthetic construct
  source 1..75: mol_type = other DNA
tcgaaacagagttagatctcattggcaaaattggcctgcaaaattacctgcaatcacaaattaaagttaaagatt

SEQ ID NO: 176795 - DNA, 75 bp, synthetic construct
  source 1..75: mol_type = other DNA
ctggctagaaactgaacttgatctcattgataaaataggcctacagaattacctgcaatcacaaattaaagttaa

SEQ ID NO: 176796 - DNA, 75 bp, synthetic construct
  source 1..75: mol_type = other DNA
ttgatccgcgcaaagctgccgtcgaagcggctattgcacgcgccaaagcgcgcaagctggaacagcaacaggcta

SEQ ID NO: 176797 - DNA, 75 bp, synthetic construct
  source 1..75: mol_type = other DNA
gaagtttattttgcgcgtcgcgcgctgcgtggagatgtcgcctctcgccgccggatgatcgagagtaacttgcgt

SEQ ID NO: 176798 - DNA, 75 bp, synthetic construct
  source 1..75: mol_type = other DNA
cgggtaccgctatcaatcagaactctgaaaagctggcaagtgtcattgcccagaacggacaggcgacacgtcagc

SEQ ID NO: 176799 - DNA, 75 bp, synthetic construct
  source 1..75: mol_type = other DNA
gtgaaggagcgtttcaccacgccgccggcctccgaagccacggatgcctatacaggtgcagctgttcatgcgtcg

SEQ ID NO: 176800 - DNA, 75 bp, synthetic construct
  source 1..75: mol_type = other DNA
cttgatgcatcagaacactctgttttatccgggataacacaggttgcaacaggcagcgttctggatttccggttg

SEQ ID NO: 176801 - DNA, 75 bp, synthetic construct
  source 1..75: mol_type = other DNA
ttcagacagccggtaaaagttcacgcggaatttaccttgcaaatggcaacatgattgtttccggtactgaaataa

SEQ ID NO: 176802 - DNA, 75 bp, synthetic construct
  source 1..75: mol_type = other DNA
cgtcgcggcatccataatgatgctgtcctgctcacgttccatggtgatggaacgaatatgcggcagagtcgtacg

SEQ ID NO: 176803 - DNA, 75 bp, synthetic construct
  source 1..75: mol_type = other DNA
tgattttatccgcccgaacagcggcagcctacttaagcagattgaggcaaaaaccgccgccagattaaagcaatg

SEQ ID NO: 176804 - DNA, 75 bp, synthetic construct
  source 1..75: mol_type = other DNA
tggatagaattaaaagcctagtttttgcctatctgatgttccagggtatcgctgatatggaagtggaattgcttg

SEQ ID NO: 176805 - DNA, 75 bp, synthetic construct
  source 1..75: mol_type = other DNA
tttaatgcagaccatcttgaagacctgaatagaattaaaagccttatttttgcttatctggcgttccctggaatg

SEQ ID NO: 176806 - DNA, 75 bp, synthetic construct
  source 1..75: mol_type = other DNA
aatagttattttaacaagaatggaataaaacaaaaagatacaaataaatataacacatatttcttcaattacttt

SEQ ID NO: 176807 - DNA, 75 bp, synthetic construct
  source 1..75: mol_type = other DNA
tttgacgtgaaacaccttgacgatgcaaatcacgttaaacattttgttttcgcatctgtggtgctcaatccttgc

SEQ ID NO: 176808 - DNA, 75 bp, synthetic construct
  source 1..75: mol_type = other DNA
ttttccgtggcactatttcagaagataaaaaacatggacaattcgccggacaacctggcgcatgtttccgtgtag

SEQ ID NO: 176809 - DNA, 75 bp, synthetic construct
  source 1..75: mol_type = other DNA
cgtatggaactccaggccgactgttttgccggtgtctggggcatagtatgcagcagcaaggtgttctggaaaccg

SEQ ID NO: 176810 - DNA, 75 bp, synthetic construct
  source 1..75: mol_type = other DNA
ggcgatctggaagaggctctgaatgcggcgcaagctattggcgatgaccgcttacaacagcaaagtcaggggcag

SEQ ID NO: 176811 - DNA, 75 bp, synthetic construct
  source 1..75: mol_type = other DNA
aatctcacctccggctcgatgatggtttgtacagtgacggcgattttctgcaattgctggcacaggcggtacaga

SEQ ID NO: 176812 - DNA, 75 bp, synthetic construct
  source 1..75: mol_type = other DNA
aaaatgaattggatatagatgatatacatgtatttaagaatccgattgatcttacaaatgttgatctaagtgata

SEQ ID NO: 176813 - DNA, 75 bp, synthetic construct
  source 1..75: mol_type = other DNA
ggtgttgatttaaccgggctgttgaccggacagccgatctccctgcaacaatcgacacactcgatcagccctaac

SEQ ID NO: 176814 - DNA, 75 bp, synthetic construct
  source 1..75: mol_type = other DNA
gtgacaatgttgaagacaggcgaaacagttctggaggcccgtcaatgggcggtcctggttttcgcctgccgacag

SEQ ID NO: 176815 - DNA, 75 bp, synthetic construct
  source 1..75: mol_type = other DNA
attaaaccggtatatgacgtgtttaaagaggcggggattcaattcgatgagtcgcagtttgtgccgacggtttca

SEQ ID NO: 176816 - DNA, 75 bp, synthetic construct
  source 1..75: mol_type = other DNA
cggtaaggactggaaagtgacggcacgtgctggtcttggctatcagtttgacctgctggcgaacggagaaacggt

SEQ ID NO: 176817 - DNA, 75 bp, synthetic construct
  source 1..75: mol_type = other DNA
tacccgtgcgcaaggcggcgtaatgtgtcatgtcaaaccgcacggcatgttatacaaccaggcggcgaaagaggc

SEQ ID NO: 176818 - DNA, 75 bp, synthetic construct
  source 1..75: mol_type = other DNA
gtatcgcaggctctggcagacgttctatcgcttctgcattaatcgcttttattcttgatgcgcttgatgacggac

SEQ ID NO: 176819 - DNA, 75 bp, synthetic construct
  source 1..75: mol_type = other DNA
aatctaaaatcgacctgctttggaacaaattttggagcggtggcatcagcaatccgcttactgccatagagcaaa

SEQ ID NO: 176820 - DNA, 75 bp, synthetic construct
  source 1..75: mol_type = other DNA
gagcgagttcaagaaattgcagcccgaagagatgctgcaacatgtgcgagacaaagtttttccttttctgaaaga

SEQ ID NO: 176821 - DNA, 75 bp, synthetic construct
  source 1..75: mol_type = other DNA
acaaacacaattacagaaagaacaggagaatgaattaaaaaaaagaaatgtagctcaaaaaaaacttgagaaaga

SEQ ID NO: 176822 - DNA, 75 bp, synthetic construct
  source 1..75: mol_type = other DNA
tttcagtcgggtgactccaaccctgcatgttgacaccagtggtggcaatacgaagtggatactggacggttttaa

SEQ ID NO: 176823 - DNA, 75 bp, synthetic construct
  source 1..75: mol_type = other DNA
gaaagactgggaaaaccgccagttcacaatgaaaacactgtcgctgaaagatgctgacttccatctttcacgtaa

SEQ ID NO: 176824 - DNA, 75 bp, synthetic construct
  source 1..75: mol_type = other DNA
gtgaataaagtttattctcttaaatattgccctgtcaccggggggcttattgctgtctcggaacttgccagcagg

SEQ ID NO: 176825 - DNA, 75 bp, synthetic construct
  source 1..75: mol_type = other DNA
tccaacataaggccctaatgatatcggttaataggagttcaaaggatattgacctctatgatgctgtacgtttta

SEQ ID NO: 176826 - DNA, 75 bp, synthetic construct
  source 1..75: mol_type = other DNA
ttcaccactgttaacggccgaagaagaagtttattttgcgcgtcgagcactgcgtggagatgtcgcttctcgccg

SEQ ID NO: 176827 - DNA, 75 bp, synthetic construct
  source 1..75: mol_type = other DNA
ttctcagggagtttagtctccaggatttccggggcggttcaatgtgtgccttgtccttactctactactacggtc

SEQ ID NO: 176828 - DNA, 75 bp, synthetic construct
  source 1..75: mol_type = other DNA
cctcgccaatctcgccgacaacggccagcgctgccagcagttagcgctccaggtgcgtggcttgcagaactatat

SEQ ID NO: 176829 - DNA, 75 bp, synthetic construct
  source 1..75: mol_type = other DNA
caacctgaacaacaccactaccaacctgtctgaagcgcagtcccgtattcaggacgccgactatgcgaccgaagt

SEQ ID NO: 176830 - DNA, 75 bp, synthetic construct
  source 1..75: mol_type = other DNA
ttccatgaaaattcaggttggtgcgaacgacggccagactatcactattgatctgaaaaaaattgactctgatac

SEQ ID NO: 176831 - DNA, 75 bp, synthetic construct
  source 1..75: mol_type = other DNA
acaactcctgctgtcggtactgacggcgtgaccaaatataccgtagacgcagggcttaacaaagccacagcagca

SEQ ID NO: 176832 - DNA, 75 bp, synthetic construct
  source 1..75: mol_type = other DNA
gccggtttacagctatgttgaacatacgcgtatgaaagaaacggtgacggttgagccgaagaaagtcatcattct

SEQ ID NO: 176833 - DNA, 75 bp, synthetic construct
  source 1..75: mol_type = other DNA
tcgtgaactttctgttcaggcaactaacggtactaactctgacagcgatctttcttctatccaggctgaaattac

SEQ ID NO: 176834 - DNA, 75 bp, synthetic construct
  source 1..75: mol_type = other DNA
ggttgtcgctacgttactggcgggcgctggcgcggcggtgataatcggtttatgtaacggcgtattgattgctgg

SEQ ID NO: 176835 - DNA, 75 bp, synthetic construct
  source 1..75: mol_type = other DNA
cgaaagcgcagattatccagcaggccggtaactccgtgctggcaaaagccaaccaggtaccgcagcaggttctgt

SEQ ID NO: 176836 - DNA, 75 bp, synthetic construct
  source 1..75: mol_type = other DNA
gcgtgaacgtgctggcaaaagacggttccatgaaaattcaggtaggtgctaacgacggccagactatcactattg

SEQ ID NO: 176837 - DNA, 75 bp, synthetic construct
  source 1..75: mol_type = other DNA
cgctattaccgcgttttcattattcctgaaaatgatgtgcggtttggcgagcataaatttagcacccagttaaac

SEQ ID NO: 176838 - DNA, 75 bp, synthetic construct
  source 1..75: mol_type = other DNA
tgagtctcttcaatcggcaactaagtccacaggattcacagttgatgttggagctactggtaccagcgcaggcga

SEQ ID NO: 176839 - DNA, 75 bp, synthetic construct
  source 1..75: mol_type = other DNA
ccgtgagctgacggttcaggcttctaccggaactaactctgattcggatctggactccattcaggacgaaatcaa

SEQ ID NO: 176840 - DNA, 75 bp, synthetic construct
  source 1..75: mol_type = other DNA
gctggtggtgatacacaagctactttggctaaacttgctactgctactgctactgctactgctactgctactgct

SEQ ID NO: 176841 - DNA, 75 bp, synthetic construct
  source 1..75: mol_type = other DNA
ggaccattcaaagatgacaaattgacacctcgtctggctgatacatcgcgcacactttggataacatattcgtta

SEQ ID NO: 176842 - DNA, 75 bp, synthetic construct
  source 1..75: mol_type = other DNA
agcgcccctgtatccctgacccagaaagactgggaaaaccgcgagttcaccctgaaaactctgtctctgaaaaat

SEQ ID NO: 176843 - DNA, 75 bp, synthetic construct
  source 1..75: mol_type = other DNA
acaccgtatcagctgaatccggaaaaacatggacaggtgccggtattattacagacaaggggactgatgttacct

SEQ ID NO: 176844 - DNA, 75 bp, synthetic construct
  source 1..75: mol_type = other DNA
cgaccagttgctggtaacacgcatcgacaataaagccagcgcactttcaccaaaactgcccgacgctaaagataa

SEQ ID NO: 176845 - DNA, 75 bp, synthetic construct
  source 1..75: mol_type = other DNA
gtgtggtttttcaacggcctggcgaacatgatcttccgtatctttaaattgccaatggtacgtaaagatgacatc

SEQ ID NO: 176846 - DNA, 75 bp, synthetic construct
  source 1..75: mol_type = other DNA
ccgtggtgcaaattggtctgaacgcggtggcaatactcggcggtatcgtcggtgatgcggcgttctctccggctt

SEQ ID NO: 176847 - DNA, 75 bp, synthetic construct
  source 1..75: mol_type = other DNA
accctgactataaacgggatcggagtaaacccggggggacttaaaacgggtgacggtaccgttgtacttaaccag

SEQ ID NO: 176848 - DNA, 75 bp, synthetic construct
  source 1..75: mol_type = other DNA
actgtccggtcactcaggggcttattgctgtatctgaacttgccagcagggtgactaaaaaggcttgtcgaaaat

SEQ ID NO: 176849 - DNA, 75 bp, synthetic construct
  source 1..75: mol_type = other DNA
gttctggtgcagagggtactacgtcgatacggtgggtaagaacacggcgaagaaacaggattacataaagcacca

SEQ ID NO: 176850 - DNA, 75 bp, synthetic construct
  source 1..75: mol_type = other DNA
aaggcggacagtttcatgaatgccggctacaaaaactttatgacggaagttaacaacctgaacaaacgtatgggt

SEQ ID NO: 176851 - DNA, 75 bp, synthetic construct
  source 1..75: mol_type = other DNA
atcagggcaatattacactgcaaaaaggctccacgctggacatcaacaaccggttcactggcgggattgaagctc

SEQ ID NO: 176852 - DNA, 75 bp, synthetic construct
  source 1..75: mol_type = other DNA
caacagattacggggctgttattacaaataatgcacagcaaaaatcccagcttttactggatctgaaggctcttg

SEQ ID NO: 176853 - DNA, 75 bp, synthetic construct
  source 1..75: mol_type = other DNA
cgaccagctactggttacgcgaatcgacagtaaagccaccgccctttcgccaaaactgcctgacgccaaagataa

SEQ ID NO: 176854 - DNA, 75 bp, synthetic construct
  source 1..75: mol_type = other DNA
acactttcgttatctcctctgaaagcagaagaaataaatgtggttgttaataatataaatataatgggggggaca

SEQ ID NO: 176855 - DNA, 75 bp, synthetic construct
  source 1..75: mol_type = other DNA
cttacgctgggaatttgatcgttccagaggtacaggtactctcagtcagggagagaagattttttccatgactgg

SEQ ID NO: 176856 - DNA, 75 bp, synthetic construct
  source 1..75: mol_type = other DNA
taatgagtacaccgcaacctttgccggactcggaacccgtaattacagtacgcattcatggtatgccggtgctga

SEQ ID NO: 176857 - DNA, 75 bp, synthetic construct
  source 1..75: mol_type = other DNA
gttgtcctgtcaccgtaggtcttattgctgtctccgaacttgccagtagtgtaacgaaaaacgcaggccgaaaat

SEQ ID NO: 176858 - DNA, 75 bp, synthetic construct
  source 1..75: mol_type = other DNA
gacagccggatgctgtttaatgttggtatgaatgcgcagataaaggacaatatgcgctttggtctggagtttgag

SEQ ID NO: 176859 - DNA, 75 bp, synthetic construct
  source 1..75: mol_type = other DNA
gcaccggcgggaacttcagcagagatgtttaaggccggcacccgggggacagggttcagtcgggtgaccccaacc

SEQ ID NO: 176860 - DNA, 75 bp, synthetic construct
  source 1..75: mol_type = other DNA
acgcagcattcaatggtgccataaccggtggcagggctgatgtcagtatgcataatgcactgtggactctgggtg

SEQ ID NO: 176861 - DNA, 75 bp, synthetic construct
  source 1..75: mol_type = other DNA
agaacagattgtagcgcgtgatgagaactcatggctaatcgatggcggtacgccgattgacgacgtgatgcgcgt

SEQ ID NO: 176862 - DNA, 75 bp, synthetic construct
  source 1..75: mol_type = other DNA
agctttattctctctttctcgttagtgactggcatgtttatcctgtttgcggatttaactccgaaacgcatcggt

SEQ ID NO: 176863 - DNA, 75 bp, synthetic construct
  source 1..75: mol_type = other DNA
aaaagcgtacggattcttgaagctgaatgctgtgcagatcatatccatatgcttgtggagatcccgcccaaaatg

SEQ ID NO: 176864 - DNA, 75 bp, synthetic construct
  source 1..75: mol_type = other DNA
aaatcacagctcgagccgggctgggttatcagttcgacctgctggcgaacggagaaacggttctgcaggatgctt

SEQ ID NO: 176865 - DNA, 75 bp, synthetic construct
  source 1..75: mol_type = other DNA
aagcataacggaggatatcggagtgtgagctttggtaatgggaaaaatacatattcccttgttgaccgtaataac

SEQ ID NO: 176866 - DNA, 75 bp, synthetic construct
  source 1..75: mol_type = other DNA
ttccagatcccttgcctgattaaaaacaccggaaacccacaagcgcccggtacgcttattggcgccagccgtgac

SEQ ID NO: 176867 - DNA, 75 bp, synthetic construct
  source 1..75: mol_type = other DNA
cctgcgacccgcgtcaggtgcccgatgcgaggttgttgaagtcgatgtcctatcaggaagcgatggagctttcct

SEQ ID NO: 176868 - DNA, 75 bp, synthetic construct
  source 1..75: mol_type = other DNA
gattcccgctggcgcagctgaaaactttcgtcgaccaggaatttgcccaaattaaacatgtcctgcatggtatta

SEQ ID NO: 176869 - DNA, 75 bp, synthetic construct
  source 1..75: mol_type = other DNA
ctgggcgaagaagtggtgattcaggcattggcggatactcaacgcatgtttgaacagattgaggcctcagaaaaa

SEQ ID NO: 176870 - DNA, 75 bp, synthetic construct
  source 1..75: mol_type = other DNA
gacggaacggctggccattatctcggtggtgggcgatggtatgcgcacgctgcgtgggatctcggcgaaattctt

SEQ ID NO: 176871 - DNA, 75 bp, synthetic construct
  source 1..75: mol_type = other DNA
gttcagcgtttccggtccaggaatgaaggggatggttggcatggcggcgcgtgtgtttgctgcaatgtcacgtgc

SEQ ID NO: 176872 - DNA, 75 bp, synthetic construct
  source 1..75: mol_type = other DNA
caccaaagcagctggatattgccgaagaatccgtaatgtccgtatatcaacagtttattaatgagataaagagtt

SEQ ID NO: 176873 - DNA, 75 bp, synthetic construct
  source 1..75: mol_type = other DNA
aataaaaaaaatctctccgacttctttggaaaatctcgagttaccttcaataaaattctcgctgatctcgaagaa

SEQ ID NO: 176874 - DNA, 75 bp, synthetic construct
  source 1..75: mol_type = other DNA
gacggtattgatgccgccgccgctgcgggcgtgacctgcgtaatccagcctggcggttctatccgtgatgacgaa

SEQ ID NO: 176875 - DNA, 75 bp, synthetic construct
  source 1..75: mol_type = other DNA
gacggaacggctggccattatctcggtggtaggtgatggtatgcgcaccttgcgtgggatctcggcgaaattctt

SEQ ID NO: 176876 - DNA, 75 bp, synthetic construct
  source 1..75: mol_type = other DNA
tggccggcgtgttagaagcgcgtggtcacaacgttaccgttatcgatccggtcgaaaaactgctggcagtggggc

SEQ ID NO: 176877 - DNA, 75 bp, synthetic construct
  source 1..75: mol_type = other DNA
gacactgatttatgactatgagcagaaccctgattccggcaacaacgtggtggcgctggcagcaaaagcaggata

SEQ ID NO: 176878 - DNA, 75 bp, synthetic construct
  source 1..75: mol_type = other DNA
tcgaaccgctggagcttcgggatttgtacaaactggtgcgagacactgacaaagttttccccgcccccgtaaatt

SEQ ID NO: 176879 - DNA, 75 bp, synthetic construct
  source 1..75: mol_type = other DNA
acccgcgattcagtgaaccagaaccagcaagaaacggaacagaacgaccagaaagcggaacaaaacagcccaaat

SEQ ID NO: 176880 - DNA, 75 bp, synthetic construct
  source 1..75: mol_type = other DNA
ggtagaggtagatcctgttaatcaggtaaaagttaccgctgacgaagtaaacaaaattatgcaggcagccaatac

SEQ ID NO: 176881 - DNA, 75 bp, synthetic construct
  source 1..75: mol_type = other DNA
actatggcgtaggcatgatgccttacgacgccgatgcgaaagatgcgccacaaaacgccattatcggcggagcca

SEQ ID NO: 176882 - DNA, 75 bp, synthetic construct
  source 1..75: mol_type = other DNA
ttattatgttcaatgcccactcaattggagacaagaggataaggatcgtgcctttaatcattttaacaatctcaa

SEQ ID NO: 176883 - DNA, 75 bp, synthetic construct
  source 1..75: mol_type = other DNA
cttgtttcatctggtgaaaaatgtccattttgtggagatattgggcaaactaaaaaccttgatcactttttacct

SEQ ID NO: 176884 - DNA, 75 bp, synthetic construct
  source 1..75: mol_type = other DNA
aatgggtggatgtcacgcattaccactccttcaatgagtctctctttgtccttaaatttacccgccagagcaaac

SEQ ID NO: 176885 - DNA, 75 bp, synthetic construct
  source 1..75: mol_type = other DNA
cgcgcgttcgttatgtggcgcagtaaatgggtggatgtcacgcattaccactccttcaatgagtctctctttgtc

SEQ ID NO: 176886 - DNA, 75 bp, synthetic construct
  source 1..75: mol_type = other DNA
aggcgcggagctggggtcgcagcgtctggtcttccggcccggtaccgtgcgtggcggcgattaccgctttgctat

SEQ ID NO: 176887 - DNA, 75 bp, synthetic construct
  source 1..75: mol_type = other DNA
gtgcagatgcgtggagaagttctattagctggtgtgccgcgccatgttgctgagcgtgaaatcgctacactggcg

SEQ ID NO: 176888 - DNA, 75 bp, synthetic construct
  source 1..75: mol_type = other DNA
attgaaacccgcgattcggtgaaccataaccagcaagaaacggaacagaaaggccataaagcggaacaacacagt

SEQ ID NO: 176889 - DNA, 75 bp, synthetic construct
  source 1..75: mol_type = other DNA
tccaccagcagaatgtgggatcacctgatgattgaccttgaaacgatgggcaaaaatcctgacgcaccaatagcc

SEQ ID NO: 176890 - DNA, 75 bp, synthetic construct
  source 1..75: mol_type = other DNA
agcggctcgctgcttattctcgcgctgtttttatttgatctactggtcgttgaacacggctggtgcgggcacatt

SEQ ID NO: 176891 - DNA, 75 bp, synthetic construct
  source 1..75: mol_type = other DNA
tttcatggtgacgcctatgcttgatagcatagatatcgatgaaccagaagaatttgaattggcgcagattctatt

SEQ ID NO: 176892 - DNA, 75 bp, synthetic construct
  source 1..75: mol_type = other DNA
tgctggcaggaactgttggcagaacggcaacatttttttttgtcgttgacctcaccatgtcgatcactgtgcctg

SEQ ID NO: 176893 - DNA, 75 bp, synthetic construct
  source 1..75: mol_type = other DNA
gaaacggtttacgcccagacgttgtatcagattggcgcgctggcggcgattgcccgtggtgaaggtggtgtgatg

SEQ ID NO: 176894 - DNA, 75 bp, synthetic construct
  source 1..75: mol_type = other DNA
atgaaaattgacctgaacgccgatctgggcgaaggctgtgccagtgacgctgaactgttaacgctggtttcctca

SEQ ID NO: 176895 - DNA, 75 bp, synthetic construct
  source 1..75: mol_type = other DNA
ttaaccggcacgctcatctgggaatggatcaaccccgtttccctgatggggcgcagtctggtaatgggattcggc

SEQ ID NO: 176896 - DNA, 75 bp, synthetic construct
  source 1..75: mol_type = other DNA
ctggcttgcgtattaacagcgcgaaggatgacgccgcgggtcaggcgattgctaaccgttttacttctaacatta

SEQ ID NO: 176897 - DNA, 75 bp, synthetic construct
  source 1..75: mol_type = other DNA
gctaaccgtttcacctctaacattaaaggcctgactcaggcggcacgtaacgccaacgacggtatttctgttgca

SEQ ID NO: 176898 - DNA, 75 bp, synthetic construct
  source 1..75: mol_type = other DNA
ggatatctgcctgatgcgccgcatcaagcgcgatgttaacgagcgcgggcgttcgatggattcggtgatggcgca

SEQ ID NO: 176899 - DNA, 75 bp, synthetic construct
  source 1..75: mol_type = other DNA
aatactataactacaacaaataatgcgctgactgcatcaaaggcgcttgatcaactgaaagatggtgacactgtt

SEQ ID NO: 176900 - DNA, 75 bp, synthetic construct
  source 1..75: mol_type = other DNA
tctggctagtgatggcaaaatcacagcaaaagacgggtctaaactttatattgacaccactgggaatttaaccca

SEQ ID NO: 176901 - DNA, 75 bp, synthetic construct
  source 1..75: mol_type = other DNA
ccgtgaactgacggttcaggcttctaccgggactaactctgattcggatctggactccattcaggacgaaatcaa

SEQ ID NO: 176902 - DNA, 75 bp, synthetic construct
  source 1..75: mol_type = other DNA
gcatggcgacggcgagcacgcactggcgttcgcccgccgactacgcgctacatttaccaaaaaggggattgttgt

SEQ ID NO: 176903 - DNA, 75 bp, synthetic construct
  source 1..75: mol_type = other DNA
gcgctctgctcagtgtttctgacaaagcaggtatcgtcgaattcgcccaggcactttccgcacgcggtgtggagc

SEQ ID NO: 176904 - DNA, 75 bp, synthetic construct
  source 1..75: mol_type = other DNA
cctgaacttcataaagaagcaggatatgcgttacggcgagaacagccaccagcaggctgccttctatatagaaga

SEQ ID NO: 176905 - DNA, 75 bp, synthetic construct
  source 1..75: mol_type = other DNA
ggccttgatttcaaacgcgtgaacggcggtctgctggttcaggatcgtgacctggggatggttggtgcagaagaa

SEQ ID NO: 176906 - DNA, 75 bp, synthetic construct
  source 1..75: mol_type = other DNA
ctcgctggaagatgcggttgagaacatcgatatcggcggcccgaccatggtgcgctccgccgccaagaaccataa

SEQ ID NO: 176907 - DNA, 75 bp, synthetic construct
  source 1..75: mol_type = other DNA
gaatgtgaaagaagcctccgttgccaccgcaatccaggttcagggtaaagccctttcctataacaacatcgctga

SEQ ID NO: 176908 - DNA, 75 bp, synthetic construct
  source 1..75: mol_type = other DNA
ctacttcggcagcatggttccggcttaccacggtgaaagcaaagaagccgcaggccgcttcccgcgcacgctgaa

SEQ ID NO: 176909 - DNA, 75 bp, synthetic construct
  source 1..75: mol_type = other DNA
ctggatgcggaaaccgcacaggccatcatttctcgtcagtttgtcgaagtgattattgcgccgtccgccagcgaa

SEQ ID NO: 176910 - DNA, 75 bp, synthetic construct
  source 1..75: mol_type = other DNA
agaagccgccggtcgcttcccacgcacgctgaacctgaacttcattaagaagctggatatgcgttacggcgagaa

SEQ ID NO: 176911 - DNA, 75 bp, synthetic construct
  source 1..75: mol_type = other DNA
gtaccgccagaaaaaggatggttcagtgggtaaccggttcgttaaaaaatcccgctccaactttgagcagtggaa

SEQ ID NO: 176912 - DNA, 75 bp, synthetic construct
  source 1..75: mol_type = other DNA
gaatgtgaaagaagcctccgttgctactgcaacccaggttcagggtaaagccctctcttataacaacatcgccga

SEQ ID NO: 176913 - DNA, 75 bp, synthetic construct
  source 1..75: mol_type = other DNA
agcgactacgacgccattattaatgagatggatgccaacgaaggatcgctgacgcttgcaacccgtttcgacctc

SEQ ID NO: 176914 - DNA, 75 bp, synthetic construct
  source 1..75: mol_type = other DNA
ggcctcgatttcaaacgcgtgaacggcggtctgctggttcaggatcgtgacctggggatggtcggtgcggaagaa

SEQ ID NO: 176915 - DNA, 75 bp, synthetic construct
  source 1..75: mol_type = other DNA
ggtggttctatcacttatgacatcggtgaaggcttcagcttcggtggtgcaatctccagctccaaacgtaccgca

SEQ ID NO: 176916 - DNA, 75 bp, synthetic construct
  source 1..75: mol_type = other DNA
cagtgggaatatcagatccagggcaacagcgctgaaaacgaaaacaactcctggacccgtgtggcattcgcaggt

SEQ ID NO: 176917 - DNA, 75 bp, synthetic construct
  source 1..75: mol_type = other DNA
ctccaaacgtactgatgatcagaacaacgctacttacatcggtactggcgaccgtgctgaaacctacactggtgg

SEQ ID NO: 176918 - DNA, 75 bp, synthetic construct
  source 1..75: mol_type = other DNA
ggtctgaaattccaggacgttggttctttcgactacggtcgtaactacggcgttgtttacgacgtaacttcctgg

SEQ ID NO: 176919 - DNA, 75 bp, synthetic construct
  source 1..75: mol_type = other DNA
acaatggtcgtggtgctctgcgtcagaacggcgacggcgttggcggttctatcacttatgattacgaaggcttcg

SEQ ID NO: 176920 - DNA, 75 bp, synthetic construct
  source 1..75: mol_type = other DNA
atcacttatgattacgaaggcttcggtatcggtgctgcagtgtccagctccaaacgtactgacgctcagaatggt

SEQ ID NO: 176921 - DNA, 75 bp, synthetic construct
  source 1..75: mol_type = other DNA
ctacaactctacccggatgcggagctgcgggaaagtcataccatagatgtactgatgggacgtctgcgcaaaaaa

SEQ ID NO: 176922 - DNA, 75 bp, synthetic construct
  source 1..75: mol_type = other DNA
tggggtatgttcatgcgatggcgcatcaactgggtggtttctacaacttgcctcatggtgtatgtaatgctgttc

SEQ ID NO: 176923 - DNA, 75 bp, synthetic construct
  source 1..75: mol_type = other DNA
tgaaagaaaataattgcgatagcgtgatttccttaggtggtggttctccgcacgattgtgcgaaaggcattgcgt

SEQ ID NO: 176924 - DNA, 75 bp, synthetic construct
  source 1..75: mol_type = other DNA
tcgccgtggcactgtgcttgtggattgtaccgcagttaaaaggttctcagcctgctgtatcgctgctttccgtgt

SEQ ID NO: 176925 - DNA, 75 bp, synthetic construct
  source 1..75: mol_type = other DNA
aatattatacctggtgattttctggtgtcatttattcaagattttgaacggcaattcacatcaacaacactgacg

SEQ ID NO: 176926 - DNA, 75 bp, synthetic construct
  source 1..75: mol_type = other DNA
ggcaggacaaagtcgaagtcttaagtgccggtgctgatgattacgtgaccaaaccgtttcatattgaagaggtga

SEQ ID NO: 176927 - DNA, 75 bp, synthetic construct
  source 1..75: mol_type = other DNA
atctcacgtgaagttcagcgtaatcggggcagacgctattacaaagctgttgatgctaataaccgagccaacaga

SEQ ID NO: 176928 - DNA, 75 bp, synthetic construct
  source 1..75: mol_type = other DNA
atgaccgctttgataccgaggtgggcggaacacagcttatcgtcactcagtcactcaacgaaaaaggtgagattg

SEQ ID NO: 176929 - DNA, 75 bp, synthetic construct
  source 1..75: mol_type = other DNA
ggcacccgccctgctgttgtgatcccgaccaacgaagagctggttatcgcgcaagacgcctgccgcctgaccgcc

SEQ ID NO: 176930 - DNA, 75 bp, synthetic construct
  source 1..75: mol_type = other DNA
atttgccatcatcgatgcagtaaatggtgaagagtacctttctggtttagccgaatgtttccacctgcccgaagc

SEQ ID NO: 176931 - DNA, 75 bp, synthetic construct
  source 1..75: mol_type = other DNA
tcaagggatatatttgcatgcagaccgcattcccctctccgccatgaatgggaatattggtcagatgggggcagc

SEQ ID NO: 176932 - DNA, 75 bp, synthetic construct
  source 1..75: mol_type = other DNA
aaacgaatatttattttattcaggaagttgtgtatagtaaaagtggtttactatctctttggaatacaataggac

SEQ ID NO: 176933 - DNA, 75 bp, synthetic construct
  source 1..75: mol_type = other DNA
gacctggaagcattaaagcgcaacacagtgctgattcacgatggtattgagcgtgaactgacaattgcggtgaac

SEQ ID NO: 176934 - DNA, 75 bp, synthetic construct
  source 1..75: mol_type = other DNA
aatacaacattgctcatcgtgctgatgacgcaatgattgatgctttggctcgtgacggcattgcctacgtgccgt

SEQ ID NO: 176935 - DNA, 75 bp, synthetic construct
  source 1..75: mol_type = other DNA
caacaacaaggcctggtaaaacatattggcctgagcaacgtcacaccgacgcaggttgcagaggcgcgtaagatt

SEQ ID NO: 176936 - DNA, 75 bp, synthetic construct
  source 1..75: mol_type = other DNA
gttgacggttgggcgatgcgcttgttgccagcgatttctgttctggcgctggtggtgagtggtgtaatgtccgta

SEQ ID NO: 176937 - DNA, 75 bp, synthetic construct
  source 1..75: mol_type = other DNA
acagagtgcatgtccatgttgaggaaggctcgcccaaagaccgcattctggaattggcgaagaagatccccgctc

SEQ ID NO: 176938 - DNA, 75 bp, synthetic construct
  source 1..75: mol_type = other DNA
tgatgcaatgattgatgctttggcccgcgatggcattgcctacgtgccgttcttcccgctcgggggctttacacc

SEQ ID NO: 176939 - DNA, 75 bp, synthetic construct
  source 1..75: mol_type = other DNA
ccggcagagctgcaaaaagcggtgcacgataatctacgtaatctcggcctggacgtactggatgtggttaacctg

SEQ ID NO: 176940 - DNA, 75 bp, synthetic construct
  source 1..75: mol_type = other DNA
tattaatgacgaagtgatcaaactgaccgcgttcgaatacaccattatggaaacgttgatacgcaataatggcaa

SEQ ID NO: 176941 - DNA, 75 bp, synthetic construct
  source 1..75: mol_type = other DNA
cacatcttgcgctggcgaaactgcaagatgctctcggcgatcgctttttgctggtgacgcagaatatcgacaacc

SEQ ID NO: 176942 - DNA, 75 bp, synthetic construct
  source 1..75: mol_type = other DNA
cagccagaaattcagcctaacgccgcgcatcttgcgctggctaaactgcaagatgctctcggcgatcgctttttg

SEQ ID NO: 176943 - DNA, 75 bp, synthetic construct
  source 1..75: mol_type = other DNA
gatttgttacggcgcatccagccataacctgtgcttcctggtgcccggcgaagatgccgagcaggtggtgcagaa

SEQ ID NO: 176944 - DNA, 75 bp, synthetic construct
  source 1..75: mol_type = other DNA
gatttgctacggcgcttccagcaataacctgtgcttcctggtgccgggtgctgatgcggaacaggtggtgcagac

SEQ ID NO: 176945 - DNA, 75 bp, synthetic construct
  source 1..75: mol_type = other DNA
acgacggcttgctgcgcgatctggatgttacagccaccaaccgcgaaaccctggagcaacgttatcgccacggga

SEQ ID NO: 176946 - DNA, 75 bp, synthetic construct
  source 1..75: mol_type = other DNA
ggtatggcgttcaacaatgcttctctgggttatgttcatgcgatggcgcaccagctgggcggtttctacaacctg

SEQ ID NO: 176947 - DNA, 75 bp, synthetic construct
  source 1..75: mol_type = other DNA
gacacagtcattttttcgatactgtcttcattgattgactccgccatttctaaatttcaacaccaaaacccggtt

SEQ ID NO: 176948 - DNA, 75 bp, synthetic construct
  source 1..75: mol_type = other DNA
ggcatatctgagcagatgtctggcatcattacacccgacactcgccaaaaacatttatgaaacggaaaatctcag

SEQ ID NO: 176949 - DNA, 75 bp, synthetic construct
  source 1..75: mol_type = other DNA
cgcacaccgtggaactgaatctcgaaccaagtcaggtcggtaatgaatttgccgagaaatattacggcccggcaa

SEQ ID NO: 176950 - DNA, 75 bp, synthetic construct
  source 1..75: mol_type = other DNA
cagccagaaattcagcctaacgccgcgcatcttgcgctggctaaactgcaagacgccctcggcgatcgctttttg

SEQ ID NO: 176951 - DNA, 75 bp, synthetic construct
  source 1..75: mol_type = other DNA
tgcatgaacgcgcaggcaataccaatgtgattcatatgcatggagaattgctgaaagtacgttgttcgcaaagcg

SEQ ID NO: 176952 - DNA, 75 bp, synthetic construct
  source 1..75: mol_type = other DNA
aagttcaggcgcagtggtttgatgtgcgtaaagtgatgcgtaccaacgatcgttttggtcgtgcggagccagatg

SEQ ID NO: 176953 - DNA, 75 bp, synthetic construct
  source 1..75: mol_type = other DNA
gctgtgggacgtcaaccgtattgatggccgccgcgcagcagggaaggggggaccgcgggccggtccgcggggggg

SEQ ID NO: 176954 - DNA, 75 bp, synthetic construct
  source 1..75: mol_type = other DNA
ttggtgccaggaccgctattgctgtgttatgccgtcaggaaatggttgtgcttaaacagagaatgcttggtagca

SEQ ID NO: 176955 - DNA, 75 bp, synthetic construct
  source 1..75: mol_type = other DNA
ggtgattcatcaagcccttatctttatgatcctaatggaagctataatccttataaaaaattagaaaatggaaat

SEQ ID NO: 176956 - DNA, 75 bp, synthetic construct
  source 1..75: mol_type = other DNA
ccagctgggcggtttctacaacctgccacacggtgtatgtaacgccgttctgctgccgcatgttcaggtattcaa

SEQ ID NO: 176957 - DNA, 75 bp, synthetic construct
  source 1..75: mol_type = other DNA
cacgactgcgcaaaaggtattgcgctggtggcagccaatggcggcgatattcgcgattacgaaggcgttgaccgc

SEQ ID NO: 176958 - DNA, 75 bp, synthetic construct
  source 1..75: mol_type = other DNA
tcaacgcgtgattagccacgttgaggcagaggcaaagattgatgatgcagaggttcatttcctgacggtaatacc

SEQ ID NO: 176959 - DNA, 75 bp, synthetic construct
  source 1..75: mol_type = other DNA
acgcatgatgtcgccaaatgctgactgggcacctgtgctgccaattcgtcagagcgccgcgaccctgtggtatca

SEQ ID NO: 176960 - DNA, 75 bp, synthetic construct
  source 1..75: mol_type = other DNA
catacgcatcctgtagatgttgtttttagttataaagatccatatttaaacaaggtcatttatttaaatactgat

SEQ ID NO: 176961 - DNA, 75 bp, synthetic construct
  source 1..75: mol_type = other DNA
gatctcggattgcctgacgaggatggtctgtcactgattcgccgctggcgtagcaatgatgtttcactgccgatt

SEQ ID NO: 176962 - DNA, 75 bp, synthetic construct
  source 1..75: mol_type = other DNA
attctgtgcctgtataccgtgtttgcttcatttcttggacacgcattctggacgatgccagctgaacttgcacat

SEQ ID NO: 176963 - DNA, 75 bp, synthetic construct
  source 1..75: mol_type = other DNA
atatgagcaacggcgatgaagtgtcgatcacctgtggcgaagcggcgagcattgttgatcgtattcgtggcttct

SEQ ID NO: 176964 - DNA, 75 bp, synthetic construct
  source 1..75: mol_type = other DNA
acggtgcgatgccattcccggaagacagaggctggaaagacaccgtatgggttgatgggcaagtggaactgcttg

SEQ ID NO: 176965 - DNA, 75 bp, synthetic construct
  source 1..75: mol_type = other DNA
aagactcaatgatgcactgaccaaaatttctgggttggagcaagagctcgctaaagctggtaagggagggaaaaa

SEQ ID NO: 176966 - DNA, 75 bp, synthetic construct
  source 1..75: mol_type = other DNA
gggggtatgtgtgttgacgggttcggtgagtatgtgggtcactcgctgcctgatggaacgcaccagctttacacc

SEQ ID NO: 176967 - DNA, 75 bp, synthetic construct
  source 1..75: mol_type = other DNA
cttgcccggatggcgtaacacggtatatggatgtgaaatacagggataagacagaggttaataaacttcgcacgg

SEQ ID NO: 176968 - DNA, 75 bp, synthetic construct
  source 1..75: mol_type = other DNA
tactggcattactcgacatgctgtataataccctgggcaacaaaaccacatgcaaggtttgtcataaatatttta

SEQ ID NO: 176969 - DNA, 75 bp, synthetic construct
  source 1..75: mol_type = other DNA
tactggcattacttgatatgctgtataatactttgggtaataaaaccacatgtaatgtttgtcataaatatttta

SEQ ID NO: 176970 - DNA, 75 bp, synthetic construct
  source 1..75: mol_type = other DNA
gtgaccggtgaaaccggtgaagctattgacgatttgcgtaacattgcacaactgggctacgacgaagacgaagat

SEQ ID NO: 176971 - DNA, 75 bp, synthetic construct
  source 1..75: mol_type = other DNA
ttaattattgaaggttgtcttgctcgtctaaagcaaaaaaggccggacgaacattcgcttcttgttgcccattac

SEQ ID NO: 176972 - DNA, 75 bp, synthetic construct
  source 1..75: mol_type = other DNA
aaaccggcctcaataaccgactctttttcgataatcagttagcaacgttactggaagatcaggagaaagtaggta

SEQ ID NO: 176973 - DNA, 75 bp, synthetic construct
  source 1..75: mol_type = other DNA
acgcttatcgagcaaatgctcagtcgcggcggcccgcgcctttatcaaaaaccggcggttactcgcgaaggtcag

SEQ ID NO: 176974 - DNA, 75 bp, synthetic construct
  source 1..75: mol_type = other DNA
atgatccttttggtgcgttaatgcaaagaacgctgctaactgagggagtcgatatcacgtatctgaagcaagatg

SEQ ID NO: 176975 - DNA, 75 bp, synthetic construct
  source 1..75: mol_type = other DNA
agcgctggggtggctgggctgccgctagcaacaccacagtgagctgggctccaatagcggcgggatttaaagggc

SEQ ID NO: 176976 - DNA, 75 bp, synthetic construct
  source 1..75: mol_type = other DNA
caccagcttgaagaggataaaatgggagagcagttatcgattccctatccgggcagcccgtttacgggccgtaag

SEQ ID NO: 176977 - DNA, 75 bp, synthetic construct
  source 1..75: mol_type = other DNA
gatgttgatgtggataatgatgcggcatatcctgctcacttcaataagattaaaactctgctgggtttcgttgtg

SEQ ID NO: 176978 - DNA, 75 bp, synthetic construct
  source 1..75: mol_type = other DNA
caggatattcttttatgagcacagtgaaaaagtgatcggacaacgggcgaaagagatccgccgtgttgctcaaaa

SEQ ID NO: 176979 - DNA, 75 bp, synthetic construct
  source 1..75: mol_type = other DNA
taatgacggtctggcagcgtatcattatgttttgtccgctgcagtcagttcctcccgttatgcacaccagaaaag

SEQ ID NO: 176980 - DNA, 75 bp, synthetic construct
  source 1..75: mol_type = other DNA
ggcgttgtccggttactggaagacagggaagacacccggcaggagctgaacatcaaaacctcacgttcgaatcga

SEQ ID NO: 176981 - DNA, 75 bp, synthetic construct
  source 1..75: mol_type = other DNA
ggagttccggggtgtgattggtgcggccgtttccggcaacggaccactgtcccgggaggtgtatctgtcgctggg

SEQ ID NO: 176982 - DNA, 75 bp, synthetic construct
  source 1..75: mol_type = other DNA
ctattgatcgggaaagtcaccatttcgtcagaagctgtggtcagacggaaggcgttgtccggttactggaagaca

SEQ ID NO: 176983 - DNA, 75 bp, synthetic construct
  source 1..75: mol_type = other DNA
ggcaagacagcgctggtactggaaaaaatgaagcaggctgctggtgatatactgtacctcagcctgtcctcattt

SEQ ID NO: 176984 - DNA, 75 bp, synthetic construct
  source 1..75: mol_type = other DNA
atgttcaggtcactgtttctggcggccgccctgatggcttttaccccacttgcggcaaacgcaggtgaaattacc

SEQ ID NO: 176985 - DNA, 75 bp, synthetic construct
  source 1..75: mol_type = other DNA
cgtggctatcgtgaaggctggcgcgatcgtgacgatcatcgcggaaaaggccgcggacatgggcaccgccattaa

SEQ ID NO: 176986 - DNA, 75 bp, synthetic construct
  source 1..75: mol_type = other DNA
cactgaattaatactgtttattgaagacgtcaatgcggataatgatatggaatatcccgcacacttgaataaaat

SEQ ID NO: 176987 - DNA, 75 bp, synthetic construct
  source 1..75: mol_type = other DNA
tggcaaaaagctttttctgagactgaaccacggacagtatattcttaacctggggcttaagatcaggcagggcga

SEQ ID NO: 176988 - DNA, 75 bp, synthetic construct
  source 1..75: mol_type = other DNA
cggctgatcttgagggcgaggcccgttattcccgtccgcgggacaggcaggatcgttcagcggaaatctataaat

SEQ ID NO: 176989 - DNA, 75 bp, synthetic construct
  source 1..75: mol_type = other DNA
cgaattaccgtaacgggcaccacgtcactgcactggctaaccggttgctgagactcaaacaggtccgctttagtg

SEQ ID NO: 176990 - DNA, 75 bp, synthetic construct
  source 1..75: mol_type = other DNA
gggtaacctttttcttgccgattttaatggccattgggatggggactgttttctttatctcgacaaagatgctac

SEQ ID NO: 176991 - DNA, 75 bp, synthetic construct
  source 1..75: mol_type = other DNA
atcacggattggcatcgaagtccgatcagcgattcgcatccattcgatcaaccgggaacttaactttttctaccg

SEQ ID NO: 176992 - DNA, 75 bp, synthetic construct
  source 1..75: mol_type = other DNA
cagcaatatcaaaaactattggttttgattatccttgcgtagtgggataccagggaaatcagcgaattatttctg

SEQ ID NO: 176993 - DNA, 75 bp, synthetic construct
  source 1..75: mol_type = other DNA
cccccgagcgggaaaaattcgatcaactgttgctggaagcgcgggcggggattgttaactggaacaaaccgctta

SEQ ID NO: 176994 - DNA, 75 bp, synthetic construct
  source 1..75: mol_type = other DNA
atggggaacgaaaagagcttagcacacacccgatggaactgtaaatatcacatagtttttgcgccaaaataccga

SEQ ID NO: 176995 - DNA, 75 bp, synthetic construct
  source 1..75: mol_type = other DNA
tatttatggcagcaaaaggactgcgttatcaggccttgatgaccagtctcaacggcgtaagatttagttttaatt

SEQ ID NO: 176996 - DNA, 75 bp, synthetic construct
  source 1..75: mol_type = other DNA
gacacacctcaatggctgtcgacatttaaagagaatgttgcagaaacatggcaacagccacaacattatgacttg

SEQ ID NO: 176997 - DNA, 75 bp, synthetic construct
  source 1..75: mol_type = other DNA
acaaagaaaaaaccgatcgctataacgagcgaccgtggggtggcggttttggtcagtcgcgttgggatgaaaaag

SEQ ID NO: 176998 - DNA, 75 bp, synthetic construct
  source 1..75: mol_type = other DNA
gaaataacagttgtaattttatttttttattatatttaatcggtttgttgtttgtgccaattgatctaaatatta

SEQ ID NO: 176999 - DNA, 75 bp, synthetic construct
  source 1..75: mol_type = other DNA
ttttgaaacaggggttggcggacaggtaatagtaacattgaaagaaattagggtcccagctaaagggctgtatag

SEQ ID NO: 177000 - DNA, 75 bp, synthetic construct
  source 1..75: mol_type = other DNA
cacgccaccctgatatggggagatggctaacggctaatttggacctgagtgcagttgatggttttgtactgccca

SEQ ID NO: 177001 - DNA, 75 bp, synthetic construct
  source 1..75: mol_type = other DNA
atgaacgtgagtaaatatgtctctatattttcctttgtttttattcagttaatcagcgttggtaaagttttagct

SEQ ID NO: 177002 - DNA, 75 bp, synthetic construct
  source 1..75: mol_type = other DNA
ggcgcggcgagcctgcgccatcgtccacacggcgtgctggcggtgttcggaccgtataatttccctggtcatttg

SEQ ID NO: 177003 - DNA, 75 bp, synthetic construct
  source 1..75: mol_type = other DNA
acgcggattctctccgttgcggcttaccctgcacattatgaccgcttacgcaaagagggtattactctggcgcta

SEQ ID NO: 177004 - DNA, 75 bp, synthetic construct
  source 1..75: mol_type = other DNA
cggaaagtgaataccggtggtgccggtcatgaccgggtgcagatcgtggccgccctgatggcaatcgacgcggga

SEQ ID NO: 177005 - DNA, 75 bp, synthetic construct
  source 1..75: mol_type = other DNA
cctgggtgagccggttgcccgttccgggaggctgccgacactggcaccgccgttactgcgtcagctggcagccat

SEQ ID NO: 177006 - DNA, 75 bp, synthetic construct
  source 1..75: mol_type = other DNA
acgctcattgagcaaatgcttagccgcggcggcccgcgtctttatcagaaaccggcggttacccgtgaggggcag

SEQ ID NO: 177007 - DNA, 75 bp, synthetic construct
  source 1..75: mol_type = other DNA
gttcatcatcgcgaactgatgtgtcgtatctttgatggtaacgaagaggtcagttcggcggaatatatgccgatg

SEQ ID NO: 177008 - DNA, 75 bp, synthetic construct
  source 1..75: mol_type = other DNA
atggttgcaccagtcgcgccgaaagctgttgctgaaaataaaccccagccagcagtgacaaacacagaacaaaca

SEQ ID NO: 177009 - DNA, 75 bp, synthetic construct
  source 1..75: mol_type = other DNA
cagattattgtgcctggccgatggcgagcctggagtcggactcgttaacgttacccgccacgcttaaccccgggc

SEQ ID NO: 177010 - DNA, 75 bp, synthetic construct
  source 1..75: mol_type = other DNA
aagtcttgaatcatcttcattaacgctgcccactacgcttaatcccgggcttgatttttccgatgaggtggtgcc

SEQ ID NO: 177011 - DNA, 75 bp, synthetic construct
  source 1..75: mol_type = other DNA
cagctctccggtcagccggagaaaattctcgcccttgagatgggcggtaataatccgctaattatcgatgaggtg

SEQ ID NO: 177012 - DNA, 75 bp, synthetic construct
  source 1..75: mol_type = other DNA
atgataccggtgaaacgcgaaaggatgctcacgatacgggtcacggatgaggaacatgcgcggctgctggcacgt

SEQ ID NO: 177013 - DNA, 75 bp, synthetic construct
  source 1..75: mol_type = other DNA
tttgttgcatctgatgtgtgtatggcggcgggtattgattctacggccatcagaaagttggatgaggacgaaaag

SEQ ID NO: 177014 - DNA, 75 bp, synthetic construct
  source 1..75: mol_type = other DNA
ggataacgggccagggcgcatcgcgtgtgaagcgtaatccggtatcgggcgaggtgttatggcagggcaatgatg

SEQ ID NO: 177015 - DNA, 75 bp, synthetic construct
  source 1..75: mol_type = other DNA
tatccgcgaagcgctttatccatactctgacgacctgacaattgtcactaaaattggtgcgcggcgtggagagga

SEQ ID NO: 177016 - DNA, 75 bp, synthetic construct
  source 1..75: mol_type = other DNA
atgcgctttgtacagttcgacgagtactggaatgctttgactcgacaactgagctactctggccatccggagtcg

SEQ ID NO: 177017 - DNA, 75 bp, synthetic construct
  source 1..75: mol_type = other DNA
tgaacaattgggtgactcggtggaaaaagtattactcctcaaggctatttttgatagcgacaatccaacgaatga

SEQ ID NO: 177018 - DNA, 75 bp, synthetic construct
  source 1..75: mol_type = other DNA
cagacgggatcatcaacaacaggatatgtgatacctgagcgaaattactggatgtcgctgaactatcagttctga

SEQ ID NO: 177019 - DNA, 75 bp, synthetic construct
  source 1..75: mol_type = other DNA
tgctgaccaatatcgcggtggtggagcgtttcttgccagtgcggtttggtttgatagaaacagatggcgtaacgc

SEQ ID NO: 177020 - DNA, 75 bp, synthetic construct
  source 1..75: mol_type = other DNA
tcgactaactgcaaaaatcttcggagaccagacattggttccaggagtctaccggacaacctttgaattaactac

SEQ ID NO: 177021 - DNA, 75 bp, synthetic construct
  source 1..75: mol_type = other DNA
ggaacaaggtacaaacagtacacaaatcgcaaacgctgcctttgttcaggccgctataaccgcccttattgatgg

SEQ ID NO: 177022 - DNA, 75 bp, synthetic construct
  source 1..75: mol_type = other DNA
ttttaatcgttatatttttgaaccgctgacctttttgctttgctattattgtacagtaagtagaaaacttgccga

SEQ ID NO: 177023 - DNA, 75 bp, synthetic construct
  source 1..75: mol_type = other DNA
cagaccccggcattgacgatgccgtcgccattgcagccgcgatttttgctcccgaactcgacctgcaactgatga

SEQ ID NO: 177024 - DNA, 75 bp, synthetic construct
  source 1..75: mol_type = other DNA
ctcatgccccgtttttgagtgctattgctccggggatgctgtccatgaattcatttagcgaattaccctacccgc

SEQ ID NO: 177025 - DNA, 75 bp, synthetic construct
  source 1..75: mol_type = other DNA
gtcgtcggtgaaaagcgcgtcagtgccgaagtggtagccgcgcagttagtgaaagaggtgaaacgctacctggca

SEQ ID NO: 177026 - DNA, 75 bp, synthetic construct
  source 1..75: mol_type = other DNA
gaatagaagcacagtgcaccagaaatataaactataatggttatcagtgttcttttaactcattgccagaaaacg

SEQ ID NO: 177027 - DNA, 75 bp, synthetic construct
  source 1..75: mol_type = other DNA
cagctattgtttggttacttttctattttgttgatgtctactggtatcatcctttattactcggtgcagtaaaaa

SEQ ID NO: 177028 - DNA, 75 bp, synthetic construct
  source 1..75: mol_type = other DNA
cgggtgatgctctatcttgcccgacgcaacgagcatccttactttcagtacctcgatcaaagcggtatagaaaca

SEQ ID NO: 177029 - DNA, 75 bp, synthetic construct
  source 1..75: mol_type = other DNA
ccgagcgagaagtacgtgtactggttgaacgcaccctgcaacatacaaatttggcaggacatttctgggtacttg

SEQ ID NO: 177030 - DNA, 75 bp, synthetic construct
  source 1..75: mol_type = other DNA
aggcaccttaaccaggctacctacccaatagctgagagagtcggaacaatatggcgggaaataacgcaacgagaa

SEQ ID NO: 177031 - DNA, 75 bp, synthetic construct
  source 1..75: mol_type = other DNA
gttctatcagaaaggtacagagcgctttaaacgtcattcatggaacgaaacagagcgagaggtacgcatgctggt

SEQ ID NO: 177032 - DNA, 75 bp, synthetic construct
  source 1..75: mol_type = other DNA
gcgtctttagttcaactggtactggtggcggtcaggaacaaaccattacttcaacctggacaacccttgcccacc

SEQ ID NO: 177033 - DNA, 75 bp, synthetic construct
  source 1..75: mol_type = other DNA
cggtcacatcaatgctgaccccgggtatcggacgcatgttcatgtccacgggctttataaccgtcacagataatc

SEQ ID NO: 177034 - DNA, 75 bp, synthetic construct
  source 1..75: mol_type = other DNA
atcagtttgattttggtctgcgtccgtcccttgcctttctgcagtccaaagggaaaaaactgggaagcatcaatg

SEQ ID NO: 177035 - DNA, 75 bp, synthetic construct
  source 1..75: mol_type = other DNA
gcggcggcgattaccgctttgctatcggtagcgccggaagcagcacgctggtgctgcaaacggtgctgcccgcgc

SEQ ID NO: 177036 - DNA, 75 bp, synthetic construct
  source 1..75: mol_type = other DNA
gtctatctggccgcacagtatacccagacatacaatgccacacttgccggcaacctgggctgggcaaacaaagcc

SEQ ID NO: 177037 - DNA, 75 bp, synthetic construct
  source 1..75: mol_type = other DNA
ttgcctgcggcgttccttcgttgatctcgttcgaacatgccgatgcgttgtttcagggattgaatcttctcagcc

SEQ ID NO: 177038 - DNA, 75 bp, synthetic construct
  source 1..75: mol_type = other DNA
ccagatacacgatgaactggtttctactgtctctactcaatgaccacctgaatcagctactgaaccgatattccc

SEQ ID NO: 177039 - DNA, 75 bp, synthetic construct
  source 1..75: mol_type = other DNA
tgcccatatcgtgatgtatcttgatggtcaccataaccaggccacctttccggtggctgaacaggcgggggctgc

SEQ ID NO: 177040 - DNA, 75 bp, synthetic construct
  source 1..75: mol_type = other DNA
caacctgattgatgaaagtgaatttaccaaagcatctgaggttgcaaccgacaacatcgttgctgttggtatgac

SEQ ID NO: 177041 - DNA, 75 bp, synthetic construct
  source 1..75: mol_type = other DNA
gtcaactgcaacaaaacgcgacgcaggcggaagtgaaccgcttatctgtgcgtatggaacgactgttttgccggt

SEQ ID NO: 177042 - DNA, 75 bp, synthetic construct
  source 1..75: mol_type = other DNA
tttacaacagcaaagtcaggggcgagtagtaccagacagtttcactcatggcacttctcagcaacgctacagctg

SEQ ID NO: 177043 - DNA, 75 bp, synthetic construct
  source 1..75: mol_type = other DNA
cacttaccagggctgcgctgacgctggtttctgctatccgccagaaaccaaaaccgtaccgttaagcgaagtgct

SEQ ID NO: 177044 - DNA, 75 bp, synthetic construct
  source 1..75: mol_type = other DNA
ttttatatctgctgaccccggtaacccttcacgtttagaaatgtggctacctattaaaacgtgtattgagattgc

SEQ ID NO: 177045 - DNA, 75 bp, synthetic construct
  source 1..75: mol_type = other DNA
gatcccacaactatcactggttatcacacattaacgggatattcagttaccattcctcctgattgccgggaatat

SEQ ID NO: 177046 - DNA, 75 bp, synthetic construct
  source 1..75: mol_type = other DNA
acctgattaatccgcattttaagtgtgatcatgatattgctaagaaggtttattccgctgctgatggggctactg

SEQ ID NO: 177047 - DNA, 75 bp, synthetic construct
  source 1..75: mol_type = other DNA
atgctgacgaaatatgcccttgtggcagtcatagtgctgtgtttcacggttctgggatttacgcttctggtcggt

SEQ ID NO: 177048 - DNA, 75 bp, synthetic construct
  source 1..75: mol_type = other DNA
atgctgacgaaatatgcccttgtggcagtcatagtgctgtgtttcacggtactgggatttacgcttctggtcggg

SEQ ID NO: 177049 - DNA, 75 bp, synthetic construct
  source 1..75: mol_type = other DNA
atgctgacgaaatatgcccttgtggcagtcatagtgctgtgtttaacggtcctgggatttacgcttctggtcggc

SEQ ID NO: 177050 - DNA, 75 bp, synthetic construct
  source 1..75: mol_type = other DNA
aagagttcgagaagtacaccttcagcgacccgcaagtgcaaaaagcgttgggaggcacagtcttacttcaggcta

SEQ ID NO: 177051 - DNA, 75 bp, synthetic construct
  source 1..75: mol_type = other DNA
caacacctggtgcaacattaacggttacttaccagggctgcgctgacgcgggtttctgttatccgcctgagacca

SEQ ID NO: 177052 - DNA, 75 bp, synthetic construct
  source 1..75: mol_type = other DNA
atgctgacgaaatatgcccttgtggcagtcatagtgctgtgtttcacggtgctgggatttacgcttctggtcgga

SEQ ID NO: 177053 - DNA, 75 bp, synthetic construct
  source 1..75: mol_type = other DNA
ctcagcagcataatcggaaactttttgattgtgggaatcacgaattaaatcagtttttacaacagcaagcccggc

SEQ ID NO: 177054 - DNA, 75 bp, synthetic construct
  source 1..75: mol_type = other DNA
tggcattgattttataaattattttaatgccggagtaatgcttattaataccaatgcatggaaagaagaaaatat

SEQ ID NO: 177055 - DNA, 75 bp, synthetic construct
  source 1..75: mol_type = other DNA
cttgatagtgatattatatgtaacggctctttatatgatctcgttgattacgatttaaatgattatattgcatgc

SEQ ID NO: 177056 - DNA, 75 bp, synthetic construct
  source 1..75: mol_type = other DNA
ttgttgaaatatagaaatttcgttgctaagaggcaagatttattccaaaacgaactgtcatatgttaaacattta

SEQ ID NO: 177057 - DNA, 75 bp, synthetic construct
  source 1..75: mol_type = other DNA
ttatgaaagcgagtatggaacgttcgggggaacaccgtattctgcttttgttggtgatttctattttgataatac

SEQ ID NO: 177058 - DNA, 75 bp, synthetic construct
  source 1..75: mol_type = other DNA
tgattgtcttgaagagattataaataataccagagctgtgagacaggattctgaaaagaccaggtttaaactaca

SEQ ID NO: 177059 - DNA, 75 bp, synthetic construct
  source 1..75: mol_type = other DNA
aaactttggcactatagccacagtaccgatctcctcggtgattgtgatggcctgatggaggcgattcggggaaaa

SEQ ID NO: 177060 - DNA, 75 bp, synthetic construct
  source 1..75: mol_type = other DNA
tattttacgccttttatccggtgcacctttatctgatactggccctgagagcctatctgtcaaatcagggctatc

SEQ ID NO: 177061 - DNA, 75 bp, synthetic construct
  source 1..75: mol_type = other DNA
aaccacctctttcatgcagtttggtatctggtacgaatatggcggcggacgtttcgccacggcttttgatagccg

SEQ ID NO: 177062 - DNA, 75 bp, synthetic construct
  source 1..75: mol_type = other DNA
accctgctccggaacttcacggaaaagaatataaggttcagcctgacgccatctatgtggatccgagcaaaaaga

SEQ ID NO: 177063 - DNA, 75 bp, synthetic construct
  source 1..75: mol_type = other DNA
gttttttaattccagaagttgtcgatgataaaataacaaatatactttatcttgattgtgatattatatgtaatg

SEQ ID NO: 177064 - DNA, 75 bp, synthetic construct
  source 1..75: mol_type = other DNA
ttgttgaaatatagaaacttcgttgctaagaagaaaaatttataccaaaacgaagtgtcgtatgttaaaaattta

SEQ ID NO: 177065 - DNA, 75 bp, synthetic construct
  source 1..75: mol_type = other DNA
gtggccgcttaatattctttttaccctgcaggccgttactatcatctgttacctcatcgaattgggcgagcgcag

SEQ ID NO: 177066 - DNA, 75 bp, synthetic construct
  source 1..75: mol_type = other DNA
agcgccataaatattccaactttaaggacttctgggagcagctgaagccgggctacgactactttgagcaaaccc

SEQ ID NO: 177067 - DNA, 75 bp, synthetic construct
  source 1..75: mol_type = other DNA
agcgtcagggcgatttcaaaagcccggaagggttttatagcgtccagcgtaatcaattaaaaccagacagccgtt

SEQ ID NO: 177068 - DNA, 75 bp, synthetic construct
  source 1..75: mol_type = other DNA
agcgccacaagtattccaattttagggatttctgggagcagcttaagccgggttacgactactttgaacaaactc

SEQ ID NO: 177069 - DNA, 75 bp, synthetic construct
  source 1..75: mol_type = other DNA
cccgctggaagcgccggatttgatctggctgctgcaacagacgggagatgaagtgctggattaccgccaggcggt

SEQ ID NO: 177070 - DNA, 75 bp, synthetic construct
  source 1..75: mol_type = other DNA
gtttcaacagctcgccgcgctctgcaaaagcgagcttgttaaaaaactggctggcggaacatcaccctgacgttg

SEQ ID NO: 177071 - DNA, 75 bp, synthetic construct
  source 1..75: mol_type = other DNA
gtcagcaagccgttgagccacgaagtggtgcaaccacaactggcatcaaactacacgctccccgaggcaaaataa

SEQ ID NO: 177072 - DNA, 75 bp, synthetic construct
  source 1..75: mol_type = other DNA
aaaaaaagcattgaatttcaataacattcatgaatacaaaggagttttaaatggcgaatttaatttatttaacac

SEQ ID NO: 177073 - DNA, 75 bp, synthetic construct
  source 1..75: mol_type = other DNA
gatttatgccccggaaacacaggcatcttccacaccagaagcggtagtgcctcccctgcccggcctgcctgagat

SEQ ID NO: 177074 - DNA, 75 bp, synthetic construct
  source 1..75: mol_type = other DNA
gatgcttcacctgttcagccgctgaatacgggcttacagatggcgcgtaccgccgacagccgctggccggagagt

SEQ ID NO: 177075 - DNA, 75 bp, synthetic construct
  source 1..75: mol_type = other DNA
gccaggtcctgtgttgaagtagcccgattaccgaaggacgtgctgatagaaattgaagccattgcggttatcaaa

SEQ ID NO: 177076 - DNA, 75 bp, synthetic construct
  source 1..75: mol_type = other DNA
aatataggaaatagctcttactcttaccaattcaatagcaatagagcatggacaaccaagaatttaaacgtggaa

SEQ ID NO: 177077 - DNA, 75 bp, synthetic construct
  source 1..75: mol_type = other DNA
ggcgtattaagtcgctggctgctgctgaagaataacgtgatgcaggaggaaacaaccgggaccacgtcaggaaaa

SEQ ID NO: 177078 - DNA, 75 bp, synthetic construct
  source 1..75: mol_type = other DNA
ttattatcacaaaccatcaaaaaggatgactgcagaggagttgattgagctttatgaaaatagtatcgctgaaca

SEQ ID NO: 177079 - DNA, 75 bp, synthetic construct
  source 1..75: mol_type = other DNA
ctcaggtagagtttaccgacccggaaattgttgctgagtacatcacgtatccttcgccaaatggtcacggcgagg

SEQ ID NO: 177080 - DNA, 75 bp, synthetic construct
  source 1..75: mol_type = other DNA
aacccgtcggcaccgcctgcggattttatccgccgggtgctggagccgctgctggcgaaaatgggcattcatcag

SEQ ID NO: 177081 - DNA, 75 bp, synthetic construct
  source 1..75: mol_type = other DNA
tttccggagcagatgcaacccgcgccctgctgcctggacacacgccaacgctaccagaagcgctggtgcaaaacc

SEQ ID NO: 177082 - DNA, 75 bp, synthetic construct
  source 1..75: mol_type = other DNA
tcggtaacgtgctcatggggttgggtctggtggtcatggtggtcggcgtggggtattcaatcctcaaccagttac

SEQ ID NO: 177083 - DNA, 75 bp, synthetic construct
  source 1..75: mol_type = other DNA
gctggtggaagaggatcccgggttttttgagaaactggcacaagcgcaaaaaccgcgctttctatggattggatg

SEQ ID NO: 177084 - DNA, 75 bp, synthetic construct
  source 1..75: mol_type = other DNA
ctatccgggggttaatcacgattccataatgattccacgccccgttatgacaaatctgccgccgatcttgcctgg

SEQ ID NO: 177085 - DNA, 75 bp, synthetic construct
  source 1..75: mol_type = other DNA
ctggcccgatgaaatctatggtagtaccgaaacaggtattctcgcatggcgttaccgtcaacaggataatatccc

SEQ ID NO: 177086 - DNA, 75 bp, synthetic construct
  source 1..75: mol_type = other DNA
gttaccgcgaacaagagcaacgccgctggctacccttcccaggtgtgcagttccaggccgaaggtgaagcatttc

SEQ ID NO: 177087 - DNA, 75 bp, synthetic construct
  source 1..75: mol_type = other DNA
atgagtttagttgaaaacattgcaaggagaagaccacgttctaatgagttattacaggtgattaaagacatgaaa

SEQ ID NO: 177088 - DNA, 75 bp, synthetic construct
  source 1..75: mol_type = other DNA
atgagcagcgacacatttactctcgggacaaaatccgttaaccgtcttggttatggtgcgatgcagctggcaggg

SEQ ID NO: 177089 - DNA, 75 bp, synthetic construct
  source 1..75: mol_type = other DNA
aactacgacctgtatctgccatttctcagctggcacaaccgctttatgtacgataaagagaaaaccgataactac

SEQ ID NO: 177090 - DNA, 75 bp, synthetic construct
  source 1..75: mol_type = other DNA
gtaaataaaatttcaggcatcgataatattacagaagaaaggaaaaaatatcttttcagcagagataacgagata

SEQ ID NO: 177091 - DNA, 75 bp, synthetic construct
  source 1..75: mol_type = other DNA
caatctatttccgcccgacccgtaacgcttacggtattcttggtggtatcccacagagtgaattccagcacgcta

SEQ ID NO: 177092 - DNA, 75 bp, synthetic construct
  source 1..75: mol_type = other DNA
ccgtgaagaccgagtcacgctcaaattccaacccagacaagtggagtatgagtatgaaaccggccatgtctttgt

SEQ ID NO: 177093 - DNA, 75 bp, synthetic construct
  source 1..75: mol_type = other DNA
caatgtacggcagctatcatcatattagtgcgctggcggcagatggtcgttcttttgaacatgcgccaacggtgg

SEQ ID NO: 177094 - DNA, 75 bp, synthetic construct
  source 1..75: mol_type = other DNA
ctggaacaggtgtgtggtgctatggtgcgtcaggtcatcgaattcggtcaggatttacaggctatttctgcgggc

SEQ ID NO: 177095 - DNA, 75 bp, synthetic construct
  source 1..75: mol_type = other DNA
atggaaaaagacgaagcgttaaccacgattgttaaagttgaaaatccgtcgccagcattattgccatgcccgaag

SEQ ID NO: 177096 - DNA, 75 bp, synthetic construct
  source 1..75: mol_type = other DNA
cattaaatattaaacacatgaaaagaatcaaagatactttaaacaagtcactcatggaatatcgtcgaacaatgg

SEQ ID NO: 177097 - DNA, 75 bp, synthetic construct
  source 1..75: mol_type = other DNA
aagagagtttggtgaggaaaaaggcaagaagcattaccatgtggcattgatgctgaataaagatgtctactgtaa

SEQ ID NO: 177098 - DNA, 75 bp, synthetic construct
  source 1..75: mol_type = other DNA
attcttatcgctgccttattggttgttgttctgtacgctggaatgtcactttggaacattccagcgtacttgttt

SEQ ID NO: 177099 - DNA, 75 bp, synthetic construct
  source 1..75: mol_type = other DNA
gctgagcttatgggcaacgtgacgccgggcaatgtgtcttttatccgggttgctatcgagccgctactttcacct

SEQ ID NO: 177100 - DNA, 75 bp, synthetic construct
  source 1..75: mol_type = other DNA
catcttcattagcgggctgttcttctatgcaccaaaagacgcagccagcagccttgatgagctgaaagcgagtct

SEQ ID NO: 177101 - DNA, 75 bp, synthetic construct
  source 1..75: mol_type = other DNA
aagacggtttgctgaagaaaaacgtatcgggtgtgaagagttccaagcacagttgcttcgtttatggcgatacct

SEQ ID NO: 177102 - DNA, 75 bp, synthetic construct
  source 1..75: mol_type = other DNA
tggaactcttcaaataagtaatccatatatacaactgtgccgcatatttaccttatgtgtgaattgcggcttttt

SEQ ID NO: 177103 - DNA, 75 bp, synthetic construct
  source 1..75: mol_type = other DNA
cgatcaaaaaggggcgcacggttgtagccctgcactttcgcttcaaggaagacaaacagatcaagatgacgatct

SEQ ID NO: 177104 - DNA, 75 bp, synthetic construct
  source 1..75: mol_type = other DNA
gtgtggatcactattgcaccgttcgtgacagttgatgatgttggtcgtgaagccgcaagggaaatcgcaagccga

SEQ ID NO: 177105 - DNA, 75 bp, synthetic construct
  source 1..75: mol_type = other DNA
tctggcgtaacaaggctcgcgagagagcgttacagagagttcagagtggtgaaaagatgtcagagaaggacgaac

SEQ ID NO: 177106 - DNA, 75 bp, synthetic construct
  source 1..75: mol_type = other DNA
gtggaactgaagcgccagccgcgcgtggaaaacctgctttattttgttcagaacacgcgtaaacgacttgagccg

SEQ ID NO: 177107 - DNA, 75 bp, synthetic construct
  source 1..75: mol_type = other DNA
aaaatatatcaagattatcaaggagctacagtattcggatctacgaaattctccagcaattccgtagcacaggag

SEQ ID NO: 177108 - DNA, 75 bp, synthetic construct
  source 1..75: mol_type = other DNA
cagttacaagctaactttacaagaacagcgtttcttattgctctgcataagccgacttaactccggtactgacgt

SEQ ID NO: 177109 - DNA, 75 bp, synthetic construct
  source 1..75: mol_type = other DNA
agacgacgatcaccatttcgaggcgaagaaaaaaacattctccaggccgacgaagaagggcgtgaaaaaagcgag

SEQ ID NO: 177110 - DNA, 75 bp, synthetic construct
  source 1..75: mol_type = other DNA
tacgctgatccgctcttatgccgcccaggacatgaaaaccggcctcaataaccgactctttttcgataatcagtt

SEQ ID NO: 177111 - DNA, 75 bp, synthetic construct
  source 1..75: mol_type = other DNA
tcgcgacgatatgatccacattggtatctgtgcctggcgtagtggtcaggataccgagcaggtaatggaacatgc

SEQ ID NO: 177112 - DNA, 75 bp, synthetic construct
  source 1..75: mol_type = other DNA
tgaagccgcaagggaaatcgcaagccgactcggtgaacatcgttgccgtcttgttactctgccgtacaaagacat

SEQ ID NO: 177113 - DNA, 75 bp, synthetic construct
  source 1..75: mol_type = other DNA
ctgtgttgacgaactgaacaaaaaaagcgacctggctgtaacggttgagacgatcaaaaaggggcgcacggttgt

SEQ ID NO: 177114 - DNA, 75 bp, synthetic construct
  source 1..75: mol_type = other DNA
ccaaacggcaaaaagataattatggctgaggcggattgcgagccatgtctctttggttggcaggccctggacaaa

SEQ ID NO: 177115 - DNA, 75 bp, synthetic construct
  source 1..75: mol_type = other DNA
ttcatgcaaccagttcatccacaattcgtattggctctgaaaacccgggctcagtttcctcttctgtctcccctg

SEQ ID NO: 177116 - DNA, 75 bp, synthetic construct
  source 1..75: mol_type = other DNA
acgtacctttatgtcgttcagcggtgtggaaaatcagtggaatagccagtggctgacgcgattaaccgttgcacc

SEQ ID NO: 177117 - DNA, 75 bp, synthetic construct
  source 1..75: mol_type = other DNA
gtctggaatatgttttttgataaggtagcgattctttgcaaagatggagataagtattggcatgtggataaaata

SEQ ID NO: 177118 - DNA, 75 bp, synthetic construct
  source 1..75: mol_type = other DNA
tattaacgcttgcgatgattcacacagaaagaattatcttgagcaccttgcttttagttatcaggttttcagagg

SEQ ID NO: 177119 - DNA, 75 bp, synthetic construct
  source 1..75: mol_type = other DNA
atgcgtggagaattttatcagcagttaaccaacgatctggaaaccgcacgggcggaagggttgtttaaagaagag

SEQ ID NO: 177120 - DNA, 75 bp, synthetic construct
  source 1..75: mol_type = other DNA
atcggagacggactattttcatgggaaatggaatgcgaaaaccgtaaatcgaagaataatgatagtagtgcaaaa

SEQ ID NO: 177121 - DNA, 75 bp, synthetic construct
  source 1..75: mol_type = other DNA
agaagccttaaaagaagtcaattgcagtgagtatttaattaaaaaaacaattgctaccattgatgggtttaccat

SEQ ID NO: 177122 - DNA, 75 bp, synthetic construct
  source 1..75: mol_type = other DNA
aaagtctcgaaacgctgacccgcaccatcaccgaaaccagcgagcaacaggtcagttgggaaaccattccgctga

SEQ ID NO: 177123 - DNA, 75 bp, synthetic construct
  source 1..75: mol_type = other DNA
cctgttcccgaccattttgctgatcaccaccttaatgcgcctgacgctcaacgtcgcctctacgcgcgtggtgct

SEQ ID NO: 177124 - DNA, 75 bp, synthetic construct
  source 1..75: mol_type = other DNA
gttgcataaccgcctgtcgtcgatggcaccgcgactggcggaagatttgagcgcggcgctcaattacagccagtt

SEQ ID NO: 177125 - DNA, 75 bp, synthetic construct
  source 1..75: mol_type = other DNA
tgacacaaaattgtcggataacaaagctgatcttatagaaatgattgagaaaagcaaaaaggcttatccaggatt

SEQ ID NO: 177126 - DNA, 75 bp, synthetic construct
  source 1..75: mol_type = other DNA
tattcatttatttttaacggtgttgatcaagatgtcccggttacagatacccgacttggcgactcggttattaat

SEQ ID NO: 177127 - DNA, 75 bp, synthetic construct
  source 1..75: mol_type = other DNA
ggagttcagtaaaatagaggagttttcggcttattcacgtaaggttctggtaaaacagggaggtgcatctgtcgt

SEQ ID NO: 177128 - DNA, 75 bp, synthetic construct
  source 1..75: mol_type = other DNA
tagacgactcccacgcggtcggttttgtcggtgaaaatggtcgtggttcccatgaatactgcgatgtgatgggcc

SEQ ID NO: 177129 - DNA, 75 bp, synthetic construct
  source 1..75: mol_type = other DNA
ggtgctggcgctggcgttagggattgcctttggtgcggtagagctgtttgatgtctcctttgcactcggtgcgtt

SEQ ID NO: 177130 - DNA, 75 bp, synthetic construct
  source 1..75: mol_type = other DNA
ggcgagcgtgaaattgcccgtaccatgctggaactgctggaaacaccaccggcgggtgaggtggtgacggggtaa

SEQ ID NO: 177131 - DNA, 75 bp, synthetic construct
  source 1..75: mol_type = other DNA
gttagccgcatttttcctggtgcgactgtttggtcactcccaacgtacggcattaaccatcgccgccagcctggc

SEQ ID NO: 177132 - DNA, 75 bp, synthetic construct
  source 1..75: mol_type = other DNA
gcgcgcttgaagaacggcaattgatagacagtcagcgcgggcaaatcgccattggctggctgattgtggaagatt

SEQ ID NO: 177133 - DNA, 75 bp, synthetic construct
  source 1..75: mol_type = other DNA
ggtgagcgtgaaattgcccgtactatgctggaactgctggaaacgccaccggcgggtgaagtggtgacggggtaa

SEQ ID NO: 177134 - DNA, 75 bp, synthetic construct
  source 1..75: mol_type = other DNA
ggtcgtgtgggcagcctgctgggggagaaattgctcgcctctgatattcctttagtggtgattgagacgtcacgt

SEQ ID NO: 177135 - DNA, 75 bp, synthetic construct
  source 1..75: mol_type = other DNA
tgtgcgtctgtgcaaagccaaacgttatcgctatgccaacaacaatatgcaggagctggaagcgcgtttaaaaga

SEQ ID NO: 177136 - DNA, 75 bp, synthetic construct
  source 1..75: mol_type = other DNA
tccgtgagcaaatgtcggcggcgggctttaccctggcgggtgccgatcacgccattattccggtcatgcttggcg

SEQ ID NO: 177137 - DNA, 75 bp, synthetic construct
  source 1..75: mol_type = other DNA
aagtggttgagtggctgcgccagcgttctcgtccgtacctgttctccaactcgctggcaccggccattgttgccg

SEQ ID NO: 177138 - DNA, 75 bp, synthetic construct
  source 1..75: mol_type = other DNA
ccattgcgcgacgcgtttgcggtgctgttttttgtctccgtcgggatgttgtttgatccgttaattctgattcag

SEQ ID NO: 177139 - DNA, 75 bp, synthetic construct
  source 1..75: mol_type = other DNA
atcggttggttgattgtggaagacctggtaatggttctgacgctggtgttgctgcccgcagtggcaggaatgatg

SEQ ID NO: 177140 - DNA, 75 bp, synthetic construct
  source 1..75: mol_type = other DNA
cttttctgccagtgcagccccggcaggaatggagaggtgtgtggggccggagaatatgccgatctggagagaagc

SEQ ID NO: 177141 - DNA, 75 bp, synthetic construct
  source 1..75: mol_type = other DNA
ggatattctcgttgagctgggcaaacgccggatggttggcggccaggaggatatgatcgtcgacgtggcgctgga

SEQ ID NO: 177142 - DNA, 75 bp, synthetic construct
  source 1..75: mol_type = other DNA
cgttatggcttaagcgcggtggatattctcgttgagctgggcaaacgccggatggttggcggccaggaggatatg

SEQ ID NO: 177143 - DNA, 75 bp, synthetic construct
  source 1..75: mol_type = other DNA
taactatggtttcggcgcacatagcgaccttgaatggattgaagcagcggcggatgtggtgaagcacgccaaaat

SEQ ID NO: 177144 - DNA, 75 bp, synthetic construct
  source 1..75: mol_type = other DNA
aagccttcggaattgacggcatggaaccaggggatccagctcgcgcaatcagcagagggggtgtagtaatccttg

SEQ ID NO: 177145 - DNA, 75 bp, synthetic construct
  source 1..75: mol_type = other DNA
aacggctggtgtctggcgctggttgagccggatggcgaacgcacttttatgtcattcagcggtgtggaaaatcag

SEQ ID NO: 177146 - DNA, 75 bp, synthetic construct
  source 1..75: mol_type = other DNA
ttctcgttgagttgggcaaacgccggatggttggcggtcaggaggatatgatcgtcgatgtggcgctggatctgc

SEQ ID NO: 177147 - DNA, 75 bp, synthetic construct
  source 1..75: mol_type = other DNA
gagttagtaggcttgatggtgaatacagccgcgttattgaagatgttaaccgtgggcgtttttatgaactggcat

SEQ ID NO: 177148 - DNA, 75 bp, synthetic construct
  source 1..75: mol_type = other DNA
gtgttagtcgtaccgatggcacgtacagccgcgtgattgaagatgtaaatcgtgggcgtttttatgaactggcat

SEQ ID NO: 177149 - DNA, 75 bp, synthetic construct
  source 1..75: mol_type = other DNA
ggatgctgatgatattgctcacagagaaaggttgagattacaagttgaaataatggatgcagatcaaaaaatagc

SEQ ID NO: 177150 - DNA, 75 bp, synthetic construct
  source 1..75: mol_type = other DNA
caagggatttttttgcccattgcttgccgatattgttctcattgtcgggctgattttcttcttcttttaaatcag

SEQ ID NO: 177151 - DNA, 75 bp, synthetic construct
  source 1..75: mol_type = other DNA
gtgaatatcgacaccacgataacgattgatacggccctaaataccggtctggcacttctcggttggctttacatc

SEQ ID NO: 177152 - DNA, 75 bp, synthetic construct
  source 1..75: mol_type = other DNA
aatagtcggttttatgaactggaatacagcgaaaaaagggagaatgaatatttgagcgaatcgacccctatgtgg

SEQ ID NO: 177153 - DNA, 75 bp, synthetic construct
  source 1..75: mol_type = other DNA
tagatatagccatgaatgcaggcatcgctcttctcggttggtgttacatcatgctccgcgccgggatgtggctgt

SEQ ID NO: 177154 - DNA, 75 bp, synthetic construct
  source 1..75: mol_type = other DNA
atcgccgggatgatgattctggcgatcaacctgatcggcggcgtctgtatcggcatcttcaaatacaacctgagc

SEQ ID NO: 177155 - DNA, 75 bp, synthetic construct
  source 1..75: mol_type = other DNA
gttcgttcgcaagcaggagctgacggtgtatacgctgaataatgagctggaaaatctgctgactaacgtagtgaa

SEQ ID NO: 177156 - DNA, 75 bp, synthetic construct
  source 1..75: mol_type = other DNA
gctgcacgggcatctcggcgcgggcgcggcgggtaaggtgattgagtcgtttggtcaggtggtgattggcggcaa

SEQ ID NO: 177157 - DNA, 75 bp, synthetic construct
  source 1..75: mol_type = other DNA
ggcgattgacgccgaccttaacgccgggttgatcaaccaggcgcaggcgcaaacccggcgtaaagatgtcgccag

SEQ ID NO: 177158 - DNA, 75 bp, synthetic construct
  source 1..75: mol_type = other DNA
ccggggctgcatgtgctgtcgtataacgaagtgccggatgagctggagttgaagataatgggggcgttgatgtag

SEQ ID NO: 177159 - DNA, 75 bp, synthetic construct
  source 1..75: mol_type = other DNA
aatgagctggaaaatctgctgaccaacgtggtgaatcaggcgcaacaggccggcaaagtgatgctcgacagcgtg

SEQ ID NO: 177160 - DNA, 75 bp, synthetic construct
  source 1..75: mol_type = other DNA
gtttacgtcgttcgcccgccgcgttcggcgggttgataattatcctgttattgatactaattgcgctcttcgcgc

SEQ ID NO: 177161 - DNA, 75 bp, synthetic construct
  source 1..75: mol_type = other DNA
aagtatgctcttgtcagtggtccgaacagagaatacctatggattctggcaaggaccccaactatgatcctaccc

SEQ ID NO: 177162 - DNA, 75 bp, synthetic construct
  source 1..75: mol_type = other DNA
gtgcagtgggtagacccgcaaatcatcgtactcggtggcgcgatgccgaaaccgattatcagtcgtctggtgcag

SEQ ID NO: 177163 - DNA, 75 bp, synthetic construct
  source 1..75: mol_type = other DNA
ccgcctcaagcccagccagtacgccattttcatcaacggcattaaggccgatgaagcggatattccggcggataa

SEQ ID NO: 177164 - DNA, 75 bp, synthetic construct
  source 1..75: mol_type = other DNA
cagctatattcctgatttgtttaactatgatgacatcacgcagttgcataaccgtttgtcgtcgatggcaccgcg

SEQ ID NO: 177165 - DNA, 75 bp, synthetic construct
  source 1..75: mol_type = other DNA
cgtcaccaaaggggccgagcgtatttccgaggtttctgcccgctttaccctggacgcgatgcccggtaagcagat

SEQ ID NO: 177166 - DNA, 75 bp, synthetic construct
  source 1..75: mol_type = other DNA
cgcctccgggcgcacgctctccggtcagacaaccgaggcattttacaactccctgcggcatgccgaagcgctgac

SEQ ID NO: 177167 - DNA, 75 bp, synthetic construct
  source 1..75: mol_type = other DNA
gcggatatcatcgaaaccaacaccttcaactccacgactattgcgatggcggattaccagatggaatccgtgtcg

SEQ ID NO: 177168 - DNA, 75 bp, synthetic construct
  source 1..75: mol_type = other DNA
tattgcggcgatgagccgtgcagtagaaggattagcgccgcgcaaattgccggagatccccgtagcctgccgttt

SEQ ID NO: 177169 - DNA, 75 bp, synthetic construct
  source 1..75: mol_type = other DNA
cgagaacctcagcaacgaagaactgatccgcgaaaactaccagggcatccgtccggcaccgggctacccggcctg

SEQ ID NO: 177170 - DNA, 75 bp, synthetic construct
  source 1..75: mol_type = other DNA
ctcgttccgtggcaacgacccggtgcgcgaagctattcacgcggtgttcctctactacgccatccgtaacggtat

SEQ ID NO: 177171 - DNA, 75 bp, synthetic construct
  source 1..75: mol_type = other DNA
ttgccgagaaatatcgcggcagcaaaaccgacgacaccgctaacgcccagcaggcggagtggcgctcgtgggaag

SEQ ID NO: 177172 - DNA, 75 bp, synthetic construct
  source 1..75: mol_type = other DNA
tgcctgggcaaaccagccaatgtacaggtggcattggatctgaatgtaaaaggcttccagcagtgggtggctgag

SEQ ID NO: 177173 - DNA, 75 bp, synthetic construct
  source 1..75: mol_type = other DNA
atgcgcttgccgatttttttggataccgatccaggtatcgacgatgccgcagcgattgctgccgcgatctttgcc

SEQ ID NO: 177174 - DNA, 75 bp, synthetic construct
  source 1..75: mol_type = other DNA
tcatgtgtggtctggatgtcaccaatcaggcgatattaaccccagactatctcgccacgttgccggagttgaatc

SEQ ID NO: 177175 - DNA, 75 bp, synthetic construct
  source 1..75: mol_type = other DNA
ggattaccagatggaatccctgtcagcggaaatcaactttgcggcggcgaaactggcgcgcgcctgtgccgatga

SEQ ID NO: 177176 - DNA, 75 bp, synthetic construct
  source 1..75: mol_type = other DNA
gaagccgctattgcccgtgccaaagcacgcaagctggaacagcaacaggctaatgcggaaccagaacaacaggtc

SEQ ID NO: 177177 - DNA, 75 bp, synthetic construct
  source 1..75: mol_type = other DNA
ctggaacagcaacaggctaatgcggtaccagaagaacaggttgatccgcgcaaagtcgccgtcgaagcggctatt

SEQ ID NO: 177178 - DNA, 75 bp, synthetic construct
  source 1..75: mol_type = other DNA
ttcaccattccgctactgattggcggcgcgactacctcaaaagcgcatacagcggtgaaaatcgagcaaaactac

SEQ ID NO: 177179 - DNA, 75 bp, synthetic construct
  source 1..75: mol_type = other DNA
ctgttcccggcaaaccgtgtgggcgatgacattgaaatctaccgtgacgaaacgcgtacccatgtgatcaacgtc

SEQ ID NO: 177180 - DNA, 75 bp, synthetic construct
  source 1..75: mol_type = other DNA
gaacaggacaccgaagaagcccgccaacaggctacgcgccctatcgaagtgattgaaggtccgctgatggatggc

SEQ ID NO: 177181 - DNA, 75 bp, synthetic construct
  source 1..75: mol_type = other DNA
tgcctgcggaaaaaattctccgtaccgctaaagaagtgaatgctgatctgattggcctttcggggcttatcacgc

SEQ ID NO: 177182 - DNA, 75 bp, synthetic construct
  source 1..75: mol_type = other DNA
tggtggcggcctatcgcgaatccaccaaagcgctggtggaaggtggtgcggatctgatcctgattgaaaccgttt

SEQ ID NO: 177183 - DNA, 75 bp, synthetic construct
  source 1..75: mol_type = other DNA
gttgctgcggcaccacgccgcaacatattgcagcgatgagccgtgcagtagaaggattagcgccgcgcaaactgc

SEQ ID NO: 177184 - DNA, 75 bp, synthetic construct
  source 1..75: mol_type = other DNA
ctcgtttcgtggcaacgatccggtgcgcgaagccattcacgcggtgttcctctactacgctattcgcaatggcat

SEQ ID NO: 177185 - DNA, 75 bp, synthetic construct
  source 1..75: mol_type = other DNA
ggcaataacgatctgctggtgctaagcaaaccggaagtgatcgccgctatccacaacgcctactttgaagcgggc

SEQ ID NO: 177186 - DNA, 75 bp, synthetic construct
  source 1..75: mol_type = other DNA
cccggaacatacggaaaaagccaccatctgggagctgctggaagtggaaaaacataccggtatgaaactcacgga

SEQ ID NO: 177187 - DNA, 75 bp, synthetic construct
  source 1..75: mol_type = other DNA
attggcctttcaggattgatcacgccgtcgctggacgagatggttaacgtggcgaaagaaatggagcgtcagggc

SEQ ID NO: 177188 - DNA, 75 bp, synthetic construct
  source 1..75: mol_type = other DNA
aagccgattttcgtggtgaacgctttgccgactggccatgcgacctcaaaggcaacaacgacctgctggtgctca

SEQ ID NO: 177189 - DNA, 75 bp, synthetic construct
  source 1..75: mol_type = other DNA
gtccggcaccgggctaccctgcctgcccggaacatacggaaaaagccaccatctgggagctgctggaagtggaaa

SEQ ID NO: 177190 - DNA, 75 bp, synthetic construct
  source 1..75: mol_type = other DNA
aaaggcattgttaactctatctcgatgaaagagggcgtcgacgcctttatccatcacgcgaaattgttgcgtcgc

SEQ ID NO: 177191 - DNA, 75 bp, synthetic construct
  source 1..75: mol_type = other DNA
ggtggcgaagaaggcgcttatgcgatggggcatgaggatgggaaggacaaaacggtaattgcagtgatgaaagcc

SEQ ID NO: 177192 - DNA, 75 bp, synthetic construct
  source 1..75: mol_type = other DNA
cccttgctctttgccgttggtctcggcgtctttggggctagttttggttctgcggaagtggcgataaacgttgaa

SEQ ID NO: 177193 - DNA, 75 bp, synthetic construct
  source 1..75: mol_type = other DNA
gaacacggcgaagatacaggattacataaagcaccagcttgaagaggatgaaatgggagagcagttatcgattcc

SEQ ID NO: 177194 - DNA, 75 bp, synthetic construct
  source 1..75: mol_type = other DNA
agccggaagaggaaatcgacaagtaccacaatccgctcaacaaaatcatctgcgaagaaaccattcgcctcggcg

SEQ ID NO: 177195 - DNA, 75 bp, synthetic construct
  source 1..75: mol_type = other DNA
aaccggcttcaacatcctgcgtgaaatcatggtggaagggtatcgtccgtcgatcgctcgtttgtatgacgctga

SEQ ID NO: 177196 - DNA, 75 bp, synthetic construct
  source 1..75: mol_type = other DNA
ccggcagcggtcgtaaaactcggttccacagagcaagtgtcccgtgtgctgaattttatgaatgcacacaaaatt

SEQ ID NO: 177197 - DNA, 75 bp, synthetic construct
  source 1..75: mol_type = other DNA
gaccttgatgtgatcgctttcctgtgtaattcagccggaaaggtgaccgatctcggcaatgtggaaaatggtaaa

SEQ ID NO: 177198 - DNA, 75 bp, synthetic construct
  source 1..75: mol_type = other DNA
tcgcgctgctggagaaatatctggcgaagaccgaaacgctggaagagcagacgctggaagaagctatcgaagagg

SEQ ID NO: 177199 - DNA, 75 bp, synthetic construct
  source 1..75: mol_type = other DNA
gagcgctgcaaccggttcgcgtgaattgtttaccttatcggtgctggcgctggcattaggcattgcttttggtgc

SEQ ID NO: 177200 - DNA, 75 bp, synthetic construct
  source 1..75: mol_type = other DNA
tgttcgcccaactaaccgcgggaaaatttccgaagaagacaccaccgaaacgccgatgtatgtcaatcgcggtgg

SEQ ID NO: 177201 - DNA, 75 bp, synthetic construct
  source 1..75: mol_type = other DNA
ccttggcaatgttgaaaatggaaagccgacactggttaacggcgatatcgtcttcttcaacagtcttcgccataa

SEQ ID NO: 177202 - DNA, 75 bp, synthetic construct
  source 1..75: mol_type = other DNA
catcgtcggtaaagatgagagcgtggaagtgccgagcgtaggtgggcgaccaccgcgtagtctgcaacgtcagac

SEQ ID NO: 177203 - DNA, 75 bp, synthetic construct
  source 1..75: mol_type = other DNA
aatgcggagccagaacaacaggtcgatccgcgcaaagccgccgtcgaagccgctatcgcccgcgccaaagcacgc

SEQ ID NO: 177204 - DNA, 75 bp, synthetic construct
  source 1..75: mol_type = other DNA
gccgtcgaagccgctattgcccgtgccaaagcgcgcaaactggaacagcaacaggctaatgcggagccagaagaa

SEQ ID NO: 177205 - DNA, 75 bp, synthetic construct
  source 1..75: mol_type = other DNA
gccaaagcacgcaagctggaacagcaacaacaggctaatgcggaaccagaagaacaggttgatccacgcaaagcc

SEQ ID NO: 177206 - DNA, 75 bp, synthetic construct
  source 1..75: mol_type = other DNA
tcatgtgcggtctggatgtcaccaatcaggcaatattaacccctgactatctcgctactttgccggagttgaatc

SEQ ID NO: 177207 - DNA, 75 bp, synthetic construct
  source 1..75: mol_type = other DNA
gagccagaagaacagattgatccgcgcaaagctgccgtcgaagcggctattgcccgtgccaaagcacgcaagctg

SEQ ID NO: 177208 - DNA, 75 bp, synthetic construct
  source 1..75: mol_type = other DNA
tggctggatctacgccggtgacatctggcatcccttgttaatggatttatcgctgtttgcgatttgcgtttgcct

SEQ ID NO: 177209 - DNA, 75 bp, synthetic construct
  source 1..75: mol_type = other DNA
tcgatggtcaggtcgtggcggaagcggtgaataaatacaaccttcaggacggcaacagaggcacgggaggaactt

SEQ ID NO: 177210 - DNA, 75 bp, synthetic construct
  source 1..75: mol_type = other DNA
ccagcagtatcttgacgaactgaaaaaaaccggggttatcgccggtgattctctgccaacaccagaacaagtccg

SEQ ID NO: 177211 - DNA, 75 bp, synthetic construct
  source 1..75: mol_type = other DNA
cgtctgggcaaagtgagcatcgcgaaagataccgcctcggtattccgtaacggtcaaacggcagagtatcagatg

SEQ ID NO: 177212 - DNA, 75 bp, synthetic construct
  source 1..75: mol_type = other DNA
tatctggcgtggatagacgtaagcgcggatgagagtagcgcaacgcagctaacccaacatttcgcacggcaggca

SEQ ID NO: 177213 - DNA, 75 bp, synthetic construct
  source 1..75: mol_type = other DNA
ttataaccgtctggcccgcgccggttttgaatctgcgcaggagcaggagcgcgccatgcaggccacccgggaaaa

SEQ ID NO: 177214 - DNA, 75 bp, synthetic construct
  source 1..75: mol_type = other DNA
tgctcgatggtcaggtcatagcggaggcagtgaacaaatacaaccttcaggacggcaacagaggcacgggaggaa

SEQ ID NO: 177215 - DNA, 75 bp, synthetic construct
  source 1..75: mol_type = other DNA
ggagtaaagattaaatatataaatggtgtttttcttagaaaatttgcttattattgtaaaataaagattaattca

SEQ ID NO: 177216 - DNA, 75 bp, synthetic construct
  source 1..75: mol_type = other DNA
ggatccggagatgatcaacgaagtgctggacgtgatggtcgaactggcgaacgaaggaatgaccatgatggtggt

SEQ ID NO: 177217 - DNA, 75 bp, synthetic construct
  source 1..75: mol_type = other DNA
gaaccagtgcagcaaggtgaaatcaccgtcgatggtatcgtggttaatgacaagaaaaccgatctggcaaagctg

SEQ ID NO: 177218 - DNA, 75 bp, synthetic construct
  source 1..75: mol_type = other DNA
gcaaacgccagaattgccaacagcggcgacaatgtacacatcattgccagcggtgaaaattcaacagtagtgagc

SEQ ID NO: 177219 - DNA, 75 bp, synthetic construct
  source 1..75: mol_type = other DNA
aatttgaagattccacagcactgatcaacaacctgccgaaactggatgcgcacgtgttgattaccgatctctcca

SEQ ID NO: 177220 - DNA, 75 bp, synthetic construct
  source 1..75: mol_type = other DNA
cgctggtggttacggtgacaaacgtctctcaccaaaagagagtgaagttctgcgcctgtttgctgaaggcttcct

SEQ ID NO: 177221 - DNA, 75 bp, synthetic construct
  source 1..75: mol_type = other DNA
cggttatgcttactgataaaatactggcatacaatcctgaagataatcagggtgcccgctggttgttgggttcag

SEQ ID NO: 177222 - DNA, 75 bp, synthetic construct
  source 1..75: mol_type = other DNA
ccagggcctgttcgcgccgaaaggtgttcggcctgagacgttgctccgacaggttaacaccgtctcgttgccgga

SEQ ID NO: 177223 - DNA, 75 bp, synthetic construct
  source 1..75: mol_type = other DNA
agggcgctaacggggcgatacgggagctggaaaaattccgccagcagggtttttcacctgagcaggtgattcgac

SEQ ID NO: 177224 - DNA, 75 bp, synthetic construct
  source 1..75: mol_type = other DNA
ggatggttcgacaatggcagcaactgtttttcaggaacgatacagcgaaaccacccttactgataaccccgattt

SEQ ID NO: 177225 - DNA, 75 bp, synthetic construct
  source 1..75: mol_type = other DNA
agtatgggttatagcgtgcggattggaagtgtcggctttaacagtcacattggcagctccggtgaacgcgcacgg

SEQ ID NO: 177226 - DNA, 75 bp, synthetic construct
  source 1..75: mol_type = other DNA
agaggtagaatattccccttatatgtctgtgaatgcaacctttgttcattttatattattgcagttgttaactat

SEQ ID NO: 177227 - DNA, 75 bp, synthetic construct
  source 1..75: mol_type = other DNA
ggttgtacatccatcctgctttacccggatgaaaaatgtttatggactggtcagttttggtgaatatcctgctga

SEQ ID NO: 177228 - DNA, 75 bp, synthetic construct
  source 1..75: mol_type = other DNA
gttgggtgtcgagaacgatatcgccctgctgaactatctctcttctgtgaccttaagcccggcagataaagagta

SEQ ID NO: 177229 - DNA, 75 bp, synthetic construct
  source 1..75: mol_type = other DNA
cgacatggaccagggagttgattgaacgtaacggtaaatttggcatcgttatcccgggcgttgcggcgactaact

SEQ ID NO: 177230 - DNA, 75 bp, synthetic construct
  source 1..75: mol_type = other DNA
attagtgcttggtatctttacctggttctaccttgatgataatccgacgaaagcgcgatttcttacccaggaaga

SEQ ID NO: 177231 - DNA, 75 bp, synthetic construct
  source 1..75: mol_type = other DNA
gcccggtgcttggtgacaatggcgctctgtggcccgtccaccttcggtttgctctgcacccgtggacgccaggtc

SEQ ID NO: 177232 - DNA, 75 bp, synthetic construct
  source 1..75: mol_type = other DNA
caaagcacaggtgcttgccctgcttgaaaaacatcaactgcgttatacggtggattggtggctttccgggcagcc

SEQ ID NO: 177233 - DNA, 75 bp, synthetic construct
  source 1..75: mol_type = other DNA
aatgaatgcgtcaatgctgccgacctgcagctacttgcccgtatgtatcaacgtatcatggaacagctcgtcgcc

SEQ ID NO: 177234 - DNA, 75 bp, synthetic construct
  source 1..75: mol_type = other DNA
ccgcgcaagaaaaatacgatacgctatttggcgaagtggtatcagcagcggcagacgcacgggtatttgtcgaag

SEQ ID NO: 177235 - DNA, 75 bp, synthetic construct
  source 1..75: mol_type = other DNA
gtgccaatggtggcgggaatgctggatctcccggtggcaaaatttattacgccgaatattatcggctgcctgctg

SEQ ID NO: 177236 - DNA, 75 bp, synthetic construct
  source 1..75: mol_type = other DNA
ttgcgcttgttgcccttggcgttatgaaccgtaaatgtatcattgaagacggtgaatttgctgtcgcagttgttt

SEQ ID NO: 177237 - DNA, 75 bp, synthetic construct
  source 1..75: mol_type = other DNA
cgccagtggttacggcgacaagcgtctctcacctaaagagagtgaagtactgcgcctgtttgcagaaggtttcct

SEQ ID NO: 177238 - DNA, 75 bp, synthetic construct
  source 1..75: mol_type = other DNA
cggcttaccagtctgcgtccggtatcgttaacctgatcactcccacctctgccgttgtgatgggcggactggcta

SEQ ID NO: 177239 - DNA, 75 bp, synthetic construct
  source 1..75: mol_type = other DNA
gcacacgtagaggccaatccgcagggactgatttcagtgctgatggccccaattgccgggttgtatgatccagac

SEQ ID NO: 177240 - DNA, 75 bp, synthetic construct
  source 1..75: mol_type = other DNA
gggaagaaatttaccccggaaagcgtttctcgcctgttagaaaaaatcagtgctggcggttatggtgacaagcgt

SEQ ID NO: 177241 - DNA, 75 bp, synthetic construct
  source 1..75: mol_type = other DNA
tatgtcattccgattatgttatatgcgcttgcagctggttttcttgctgcggcttctctgtcgccgttgtgcgaa

SEQ ID NO: 177242 - DNA, 75 bp, synthetic construct
  source 1..75: mol_type = other DNA
ttgtttttcttgttgccggaattgttttatgggcagttatgcacgttattttcgatgtctgtattgattcgtgga

SEQ ID NO: 177243 - DNA, 75 bp, synthetic construct
  source 1..75: mol_type = other DNA
atcgaaccgtttgatgagagccgtgtgaaaatcaaacataaactctcatatgtccgcccgactaaccgcgggaaa

SEQ ID NO: 177244 - DNA, 75 bp, synthetic construct
  source 1..75: mol_type = other DNA
cactggcggatgccgtattgctgggcaatgcagtggcgtcgtgggttgtcgggcatcgcggcggtgattgcgcgc

SEQ ID NO: 177245 - DNA, 75 bp, synthetic construct
  source 1..75: mol_type = other DNA
tgttcgcccgactaaccgcggaaaaatttccgaagaagacaccaccgaaacgccgatgtatgtcaatcgcggtgg

SEQ ID NO: 177246 - DNA, 75 bp, synthetic construct
  source 1..75: mol_type = other DNA
atcgaaccgtttgatgagaaccgtgtgaaaataaaacacaaactctcatatgttcgcccgactaaccgcgggaaa

SEQ ID NO: 177247 - DNA, 75 bp, synthetic construct
  source 1..75: mol_type = other DNA
ttcccttcagccctgagcgacgcgccgcgatggaggccatcgcggaggttgaacgccggcggtcgcgcggcgcgg

SEQ ID NO: 177248 - DNA, 75 bp, synthetic construct
  source 1..75: mol_type = other DNA
ctgttggttatctctgtcggtgtcggacggctggcgactgtttccggaaacgaagtttctgacgtcagaacgtcg

SEQ ID NO: 177249 - DNA, 75 bp, synthetic construct
  source 1..75: mol_type = other DNA
cactcgtgcgcacgcggaagtatccgttggcaaagccacagacgcgcgtaacgaggtaaaaaaatgccaaagaat

SEQ ID NO: 177250 - DNA, 75 bp, synthetic construct
  source 1..75: mol_type = other DNA
gaaaggttatattctcaatctcaccattcgcggtcagggcatagtgaaaaaccagggacgagaatttgtctgccg

SEQ ID NO: 177251 - DNA, 75 bp, synthetic construct
  source 1..75: mol_type = other DNA
gtcatccggaggctcacgaatggtatcaccagtgggtttactttcgtccgcgcgcctactggcatgaatggctta

SEQ ID NO: 177252 - DNA, 75 bp, synthetic construct
  source 1..75: mol_type = other DNA
atgcaccggggccagcccgagcgagttccgtgccggttgtgaagaaaaagtgaatgatgtagccgccaagttgtc

SEQ ID NO: 177253 - DNA, 75 bp, synthetic construct
  source 1..75: mol_type = other DNA
caaactcttttacccggtgcctgtgtcgcacaaatagctcgagagaatggaattaacgataacctgctctttaac

SEQ ID NO: 177254 - DNA, 75 bp, synthetic construct
  source 1..75: mol_type = other DNA
cattacaaggtgatttaaatgctctgttaccagcattacagcagccgttaaatatcaatgactggcagcaacact

SEQ ID NO: 177255 - DNA, 75 bp, synthetic construct
  source 1..75: mol_type = other DNA
gcaattatgccggtttacgatgcattgtatgacggcggcgtggagcacttgctgtgccgacatgagcagggtgcg

SEQ ID NO: 177256 - DNA, 75 bp, synthetic construct
  source 1..75: mol_type = other DNA
ctgtccgcaggtatgtcggagcgggaacttgatgcccgtctttacgggagtgcctccacagtacctgtcgtactt

SEQ ID NO: 177257 - DNA, 75 bp, synthetic construct
  source 1..75: mol_type = other DNA
cctgccacctgcacgctgaaaggacttggcgcagttgatgcggattatccgtactatctgggcatgctggggatg

SEQ ID NO: 177258 - DNA, 75 bp, synthetic construct
  source 1..75: mol_type = other DNA
gttgcctgcgttacagcaatcgttaaatatcgatgaatggcagcaatactgcgcacaaatgcgtagtgaacatgc

SEQ ID NO: 177259 - DNA, 75 bp, synthetic construct
  source 1..75: mol_type = other DNA
ctgtacgttggcggtggcgtgggcatggcgcaggcagttccggctttgcgtgaatttctcgctgctacaaaaatg

SEQ ID NO: 177260 - DNA, 75 bp, synthetic construct
  source 1..75: mol_type = other DNA
tggcggtaaaaccctcgataccgctaaagcgctggcacactacatgagtgtaccggttgcaatcgcgccgaccat

SEQ ID NO: 177261 - DNA, 75 bp, synthetic construct
  source 1..75: mol_type = other DNA
ttgaagcgaacacctatttgagcggcgttggttttgaaagcggcggctggcggcggctcacgcggtgcataacgg

SEQ ID NO: 177262 - DNA, 75 bp, synthetic construct
  source 1..75: mol_type = other DNA
gggcgatatccttcaaccccgacagtgactcagcctgtgaaagcagagaaaacccgccggaaccgattttcaccg

SEQ ID NO: 177263 - DNA, 75 bp, synthetic construct
  source 1..75: mol_type = other DNA
tctcaggctgaaaggtgaactgacaccggcgttattacagacaattatccgcgaaatgaaagggagcagccactg

SEQ ID NO: 177264 - DNA, 75 bp, synthetic construct
  source 1..75: mol_type = other DNA
atctctggcgtaacggcggcctgcagccgaccggcgaacatgaaacatcgctacttcccgtgacgttaactccgg

SEQ ID NO: 177265 - DNA, 75 bp, synthetic construct
  source 1..75: mol_type = other DNA
gggtatcggcgatgcgctggcaacctggtttgaagcgcgtgcctgctctcgtagcggcgcgaccaccatggcggg

SEQ ID NO: 177266 - DNA, 75 bp, synthetic construct
  source 1..75: mol_type = other DNA
agagataacaacacttggcgagcaatggcaggagaaatttgccgcgccgttgatcgttcgtctcgataaagaagg

SEQ ID NO: 177267 - DNA, 75 bp, synthetic construct
  source 1..75: mol_type = other DNA
ggcacttgacagtgtggctgccagtacagagcagaatgagacagcacaaccacccacgcgggaaaatctcaccat

SEQ ID NO: 177268 - DNA, 75 bp, synthetic construct
  source 1..75: mol_type = other DNA
gcctgttgagcatgttgatgctggcagagtaattctgatgcccccctcagtggcaaaagacatggtcaagagtgg

SEQ ID NO: 177269 - DNA, 75 bp, synthetic construct
  source 1..75: mol_type = other DNA
cctgatgttatatttctgtggttactgtgcttgttactgttgttgttcttcctgttcttcctgttcttcctgttc

SEQ ID NO: 177270 - DNA, 75 bp, synthetic construct
  source 1..75: mol_type = other DNA
gtgatacaggggcaggcggtggaggccgcctgtcagcccgcgcgaaaacccctggcaggctggcgcctgccggaa

SEQ ID NO: 177271 - DNA, 75 bp, synthetic construct
  source 1..75: mol_type = other DNA
atgacgtggaaagacaggcttcaggatgcgtcatttcgcggcgtaccgtttaaggttgaagaagaaagtgcggga

SEQ ID NO: 177272 - DNA, 75 bp, synthetic construct
  source 1..75: mol_type = other DNA
ctgacgttcagggggatgcgtgttctggtgccatcaacactggcgacagccatgatacagcacggaacggctgag

SEQ ID NO: 177273 - DNA, 75 bp, synthetic construct
  source 1..75: mol_type = other DNA
ggattctggcgggcgcggcgatcgatattcctgccggaatgcagagcggtgagtttaaatggttgctgctggcga

SEQ ID NO: 177274 - DNA, 75 bp, synthetic construct
  source 1..75: mol_type = other DNA
gttgtggctgacgccgttgatttctgccatcggcgtgggggcgctgggggggttaattcgccacccgttgatgcc

SEQ ID NO: 177275 - DNA, 75 bp, synthetic construct
  source 1..75: mol_type = other DNA
tgggttgtcggacatcgcggcggtgattgcgcgccaacgcgcgaggaactactcctcgcacacaaaaacgtatag

SEQ ID NO: 177276 - DNA, 75 bp, synthetic construct
  source 1..75: mol_type = other DNA
cgcattgctgtgcggtctggccggtaacgtacaggccgcaccggtggcacagaaacctgtacaggttccggtttc

SEQ ID NO: 177277 - DNA, 75 bp, synthetic construct
  source 1..75: mol_type = other DNA
atgaccccgtgtcttttttcacagggggctgatatggcaacaaaagaagaaaatcagaaacgtcttcgtcaactg

SEQ ID NO: 177278 - DNA, 75 bp, synthetic construct
  source 1..75: mol_type = other DNA
cgccgggatgtaaggcgcaacgccgtttcgcaaaccgcgcttcacgtcgttgcggcgggtccctgctcattgcct

SEQ ID NO: 177279 - DNA, 75 bp, synthetic construct
  source 1..75: mol_type = other DNA
tgaagagctggaaaacggtgcctgggctgttcgtctttactacaaaccgtttgttcgctggatctgggcgggcgg

SEQ ID NO: 177280 - DNA, 75 bp, synthetic construct
  source 1..75: mol_type = other DNA
cggtggcgatttttagtcagcgtattccgctggatattgtggcccgcgtactggcgataatggggatggtcagtg

SEQ ID NO: 177281 - DNA, 75 bp, synthetic construct
  source 1..75: mol_type = other DNA
ctgctctatatggggtacgtcggtttctcggtggcgtttgcttttgccattgcatctttgttgagtgggcgtctg

SEQ ID NO: 177282 - DNA, 75 bp, synthetic construct
  source 1..75: mol_type = other DNA
tgctgtgcctggcattagggattgcgctgctgctgtccgtctatcctttgtggggcgtggcgcgtggagatgcgc

SEQ ID NO: 177283 - DNA, 75 bp, synthetic construct
  source 1..75: mol_type = other DNA
tgcggaagcggcgctacgtatttctcgcggcacaaaaacgaccttcagttactggggaatggttgcggcgcattt

SEQ ID NO: 177284 - DNA, 75 bp, synthetic construct
  source 1..75: mol_type = other DNA
tgctgtgtctggcgctagggattgcgctactactgtctgtttatccgttatggggcgtggcgcgcggggatgcgc

SEQ ID NO: 177285 - DNA, 75 bp, synthetic construct
  source 1..75: mol_type = other DNA
ggtgcagaaacggcacaggcaaccgtaagagtctggatccgttttcgtgtggatgttacggcatccagccggata

SEQ ID NO: 177286 - DNA, 75 bp, synthetic construct
  source 1..75: mol_type = other DNA
gcagcactctcaatattatcgggcctcctattcctgattcggaaggtactcggctggaaattctctgcaagacag

SEQ ID NO: 177287 - DNA, 75 bp, synthetic construct
  source 1..75: mol_type = other DNA
tggaaaaagatatcaggattatagaatcccagaaagatgaaattaaaatggcgatagagatagatattgcccgca

SEQ ID NO: 177288 - DNA, 75 bp, synthetic construct
  source 1..75: mol_type = other DNA
gcccgtggacgctggcggcgtggatcttcctgacgctcggcattgtgctcggttccgcatgggcctattacgaac

SEQ ID NO: 177289 - DNA, 75 bp, synthetic construct
  source 1..75: mol_type = other DNA
gctgatgatggcgttgggcggactgctgtgtctgtttgatcctcgctatcgtaagcgcgtgagtccgcaaaaaac

SEQ ID NO: 177290 - DNA, 75 bp, synthetic construct
  source 1..75: mol_type = other DNA
aaattacgcaagaagatattgaactgattgagtattatgctaaaaaatatgaaaactattttgataatttaaaaa

SEQ ID NO: 177291 - DNA, 75 bp, synthetic construct
  source 1..75: mol_type = other DNA
ctaggacgttacgcactgcgcctcgcgcatggtaatggcgaatacctcattcatggcaccagtgcgccggacagc

SEQ ID NO: 177292 - DNA, 75 bp, synthetic construct
  source 1..75: mol_type = other DNA
ctggtgcagtacctgataggtcacaacgaaaaactgttcccctatgtcatcggcatgcagtgggatgacggtcct

SEQ ID NO: 177293 - DNA, 75 bp, synthetic construct
  source 1..75: mol_type = other DNA
gagtttttacaggaagatattgattatggcattcgtatgattgttagctatgctattatcgaatgtatagtgctg

SEQ ID NO: 177294 - DNA, 75 bp, synthetic construct
  source 1..75: mol_type = other DNA
ttcgcgtctctgtaccgacgatggacgctgcagaagcgttcaaacttatcaagcagcaggttaatgtgccgctgg

SEQ ID NO: 177295 - DNA, 75 bp, synthetic construct
  source 1..75: mol_type = other DNA
aaacagcaggttaacgtaccgctggtggccgacatccactttgactatcgcattgcgctaaaagtcgcagagtac

SEQ ID NO: 177296 - DNA, 75 bp, synthetic construct
  source 1..75: mol_type = other DNA
tccgtgtctccgtaccgacgatggacgcggcagaagcgttcaaactcatcaaacagcaggttaacgtgccgctgg

SEQ ID NO: 177297 - DNA, 75 bp, synthetic construct
  source 1..75: mol_type = other DNA
attcgggcgcggtgcggcagatatgaaaggctcgctggcggcgatggtggtagctgcagaacgttttgtcgcaca

SEQ ID NO: 177298 - DNA, 75 bp, synthetic construct
  source 1..75: mol_type = other DNA
ggtcgtcgcggatcgttaacctgcaaccttaccattcatggcgttcaggggcatgttgcctacccgcatctggct

SEQ ID NO: 177299 - DNA, 75 bp, synthetic construct
  source 1..75: mol_type = other DNA
ggtcgtcgcggatcgttaacctgcaaccttaccattcatggcgtgcaggggcatgtagcctacccgcatctggct

SEQ ID NO: 177300 - DNA, 75 bp, synthetic construct
  source 1..75: mol_type = other DNA
atcaatggcattcaggtagctctcgtaggtgatctggtttcctgcccaaagcacggcgtgaatcccatacaagaa

SEQ ID NO: 177301 - DNA, 75 bp, synthetic construct
  source 1..75: mol_type = other DNA
gttgttaatcattgccaatgtgcatgtggctgtagggttatcagttctcaaccagaaaatagtatcgagtcataa

SEQ ID NO: 177302 - DNA, 75 bp, synthetic construct
  source 1..75: mol_type = other DNA
gagataaaacaacgcatggtggcaaagttaattcggcctcctccaatattactgttgatggaaaaaaggttgctt

SEQ ID NO: 177303 - DNA, 75 bp, synthetic construct
  source 1..75: mol_type = other DNA
cgcgataaaaacattccgatccgtattggcgttaacgccggatcgttggaaaaagatctgcaagaaaagtatggc

SEQ ID NO: 177304 - DNA, 75 bp, synthetic construct
  source 1..75: mol_type = other DNA
aggaacaacaaaattccttcaagtggctggtggcattactggaagataaatatgctgttaaaattaaaattccgg

SEQ ID NO: 177305 - DNA, 75 bp, synthetic construct
  source 1..75: mol_type = other DNA
ttgcttaacgtgagttttcgttccactgagcgtcagacccctattcgtggtctgctggcaatgggagaaaaccgt

SEQ ID NO: 177306 - DNA, 75 bp, synthetic construct
  source 1..75: mol_type = other DNA
gttattccgacattcagtctctgccggatctgacctgttatgtcaccctgcccggaccgtatccggcagtaaaac

SEQ ID NO: 177307 - DNA, 75 bp, synthetic construct
  source 1..75: mol_type = other DNA
ttttgttggcccgacgcgtccgctggtgccaatggtggcgggaatgctggatctgccggtggcaaaattcattac

SEQ ID NO: 177308 - DNA, 75 bp, synthetic construct
  source 1..75: mol_type = other DNA
atcccgggcgttgcagcaactaactggacgtgggcagtgggaagtgtgtcggggcgtgaagaagataaatttaat

SEQ ID NO: 177309 - DNA, 75 bp, synthetic construct
  source 1..75: mol_type = other DNA
cgggtggcaattgtggtggataaatccacctggtcacgggagttgatagaacgtagcggcatgtttggcattgtg

SEQ ID NO: 177310 - DNA, 75 bp, synthetic construct
  source 1..75: mol_type = other DNA
tcgacgacttaaaagcgtactcacaagggaagggatacgcccttgaataccaccgttataagcgagtatttaccc

SEQ ID NO: 177311 - DNA, 75 bp, synthetic construct
  source 1..75: mol_type = other DNA
tagaagatattgaatctgatgttcgctacgtaggagacggccttgttgaactcgctcaacgcttagccgttatca

SEQ ID NO: 177312 - DNA, 75 bp, synthetic construct
  source 1..75: mol_type = other DNA
ggttttgatattttgaaatcgctgcggatccgttcgcgcgggatcaacttcattgcctgtccgacctgttctcgt

SEQ ID NO: 177313 - DNA, 75 bp, synthetic construct
  source 1..75: mol_type = other DNA
agtattcctacggtgctgatccggtacgtgacggggtatcgaccggtaaggatatggagcgccagacgctggtca

SEQ ID NO: 177314 - DNA, 75 bp, synthetic construct
  source 1..75: mol_type = other DNA
tagaagatattgaatctgatgttcgctatgtgggagacggacttgttgaactagctcaacgcttaggcgctatca

SEQ ID NO: 177315 - DNA, 75 bp, synthetic construct
  source 1..75: mol_type = other DNA
ttgatgatttatcctatgaaggatggatgattgctatcgacaaggcggttatggaaattaacgagcctgataaaa

SEQ ID NO: 177316 - DNA, 75 bp, synthetic construct
  source 1..75: mol_type = other DNA
cagggatatgggaagcaactgattgatgctgccctgcatgaaggggcaagcctttccacatccccagtttgccag

SEQ ID NO: 177317 - DNA, 75 bp, synthetic construct
  source 1..75: mol_type = other DNA
gactgataacatgtccatttacgggtattcgcgcccaaccacaccagagcttcagaaacagaaatcacgactgaa

SEQ ID NO: 177318 - DNA, 75 bp, synthetic construct
  source 1..75: mol_type = other DNA
ccatacctcactacgatctggtgattatggataacaacactgacgtatttgttctggtgattggtgaatctgcaa

SEQ ID NO: 177319 - DNA, 75 bp, synthetic construct
  source 1..75: mol_type = other DNA
gggcaaaaatgctgccgatggcacccagcatggcgaaaaaggcgtacctttttatcgcgatatccagttgctgtt

SEQ ID NO: 177320 - DNA, 75 bp, synthetic construct
  source 1..75: mol_type = other DNA
gaaaaaaattctgctctccgctacgccgcttcaaaatagtatccttgagctttatggtctggtttccgttattga

SEQ ID NO: 177321 - DNA, 75 bp, synthetic construct
  source 1..75: mol_type = other DNA
gcgtaagcagtggagtcaggaacttgaagagaaattttcattaccttcgcgcattatcgaagcaaagagcttcaa

SEQ ID NO: 177322 - DNA, 75 bp, synthetic construct
  source 1..75: mol_type = other DNA
cgctggtcatttttgtacccgtatttgcctttctcggcgtcaatggcgtaccgcaggccgacggttcggtgatgt

SEQ ID NO: 177323 - DNA, 75 bp, synthetic construct
  source 1..75: mol_type = other DNA
aaaagcgtgtcacctggcgctaataacttgcctaccttcgcatgacaccaatattgcgattgccagcgcttgcgc

SEQ ID NO: 177324 - DNA, 75 bp, synthetic construct
  source 1..75: mol_type = other DNA
atgaagggacttgagaatgccatccgcaatctgaacagcctcgatacccgcatggtgccacaggccagcgcatgg

SEQ ID NO: 177325 - DNA, 75 bp, synthetic construct
  source 1..75: mol_type = other DNA
tcaaataaatgaagttgatccttacatagtcgcttcccggtttgccacatatacccctttctttaatctgaacta

SEQ ID NO: 177326 - DNA, 75 bp, synthetic construct
  source 1..75: mol_type = other DNA
cgtgttatcagtggttgtctttaccctttctaatctccttgtatcctcaggagcgcatctgatttaccggatatt

SEQ ID NO: 177327 - DNA, 75 bp, synthetic construct
  source 1..75: mol_type = other DNA
gggctgtttctgaccgcgggtctgggaagtggttctactttccagatgatcgccgtcatctttcgccagataacc

SEQ ID NO: 177328 - DNA, 75 bp, synthetic construct
  source 1..75: mol_type = other DNA
tattccgcaggcgtttggcatgtcgctcaatatgaccggctctccggtgggcgcgatgaaagtgtttttaatctt

SEQ ID NO: 177329 - DNA, 75 bp, synthetic construct
  source 1..75: mol_type = other DNA
tttgtcgttcagatcgcgctgttccggcgaacgaacgtgcgaagattgcattgttctgtaatgttccggaaaaag

SEQ ID NO: 177330 - DNA, 75 bp, synthetic construct
  source 1..75: mol_type = other DNA
tgcgcgtgagaacaatattccgtatctgggcatttgcctgggtatgcaggtggcgttaattgattacgctcgcca

SEQ ID NO: 177331 - DNA, 75 bp, synthetic construct
  source 1..75: mol_type = other DNA
agacaggtgttctacagagagaagcgtagagcaataggcagtattttgagaaagctgtgtgagtggaaaagtgta

SEQ ID NO: 177332 - DNA, 75 bp, synthetic construct
  source 1..75: mol_type = other DNA
gcgtgatgacgccagtcgcgaagaaacagcgcataaagtggcctgggctgctgtgaagcatgaatatgccaaagg

SEQ ID NO: 177333 - DNA, 75 bp, synthetic construct
  source 1..75: mol_type = other DNA
atcgctggcagtggagtacgcgcagtcggggattcgcgttaacgcaatctgccctggatacgttcgcacgccaat

SEQ ID NO: 177334 - DNA, 75 bp, synthetic construct
  source 1..75: mol_type = other DNA
ggcggaaagcattgcccgccagtcgaacccggaagatccagagtcggtgctgactgaaatggcgaaagcaatccc

SEQ ID NO: 177335 - DNA, 75 bp, synthetic construct
  source 1..75: mol_type = other DNA
cggcattcaggtatcacaacagatgctacgggaactcaatctgggtgatgctgtttcaggtaatatttctgataa

SEQ ID NO: 177336 - DNA, 75 bp, synthetic construct
  source 1..75: mol_type = other DNA
cataaaaacgggcatgtgattgatatgccttttaaaggtcatgtttcttttaaagggaagaacggcatcaaaggt

SEQ ID NO: 177337 - DNA, 75 bp, synthetic construct
  source 1..75: mol_type = other DNA
tatgcaggaaaatatgagttccgacagaaatgcagtaaaaaaggagtctcgctctcccctccagaaaactccagg

SEQ ID NO: 177338 - DNA, 75 bp, synthetic construct
  source 1..75: mol_type = other DNA
tgctagtggtcaatatgttcctgacgggatttgatagcccagctctcaatacgctttacgttgataaaaatctgc

SEQ ID NO: 177339 - DNA, 75 bp, synthetic construct
  source 1..75: mol_type = other DNA
gagaagaaaagccacgggaatatcgtctgcttccgcaatctcaagaaagctaccgatgatgctattgccttgttc

SEQ ID NO: 177340 - DNA, 75 bp, synthetic construct
  source 1..75: mol_type = other DNA
agtgacccgtcccccatgcagttccgtctgaccggcctggtcagaatgcccaacgacaaaacttatgacctgacc

SEQ ID NO: 177341 - DNA, 75 bp, synthetic construct
  source 1..75: mol_type = other DNA
tggtgctttatcgacaaccaaagcacgacactatccagctttaccctctaaccgtttccctgagtttcttgcacg

SEQ ID NO: 177342 - DNA, 75 bp, synthetic construct
  source 1..75: mol_type = other DNA
ctacaaaatggccgatggcggcggtttgtatctcgaggtttcggccaaggggtctaaatactggcgcatgaaata

SEQ ID NO: 177343 - DNA, 75 bp, synthetic construct
  source 1..75: mol_type = other DNA
tggggctgcatgtttgccagctgatgggctacgggcagattaacgatggcctgaatttaatcacccaccacagtg

SEQ ID NO: 177344 - DNA, 75 bp, synthetic construct
  source 1..75: mol_type = other DNA
caactgtgacgcttgctcaggcaagagcaaagcgcgacgaagctaaaaagctgttaatgcagggcattgacccaa

SEQ ID NO: 177345 - DNA, 75 bp, synthetic construct
  source 1..75: mol_type = other DNA
taaggttatgagtgaaaacacaataaacagcgcattgcgtgcgatgggatatgacacaaaaaccgaggtctgcgg

SEQ ID NO: 177346 - DNA, 75 bp, synthetic construct
  source 1..75: mol_type = other DNA
ccagtaacaagcgatggagtgaagaccatcgatcgcgcgttctgcgctatcttgagctttatattttccctcata

SEQ ID NO: 177347 - DNA, 75 bp, synthetic construct
  source 1..75: mol_type = other DNA
ttacggcaccactaaagggcagcttcgacaagctattctgtggcaggatctggatcgcgtgttggtagaaatggg

SEQ ID NO: 177348 - DNA, 75 bp, synthetic construct
  source 1..75: mol_type = other DNA
aaaaaacggacgctttcgccagattatccacgcgacccggcgcaggtttatctgtggctggaagaagctggttgg

SEQ ID NO: 177349 - DNA, 75 bp, synthetic construct
  source 1..75: mol_type = other DNA
tgctcattttcattcgttcaagtgaactcaggtttgctcgttggtcagagatagatttcgacaatgccatgtgga

SEQ ID NO: 177350 - DNA, 75 bp, synthetic construct
  source 1..75: mol_type = other DNA
gtgtcgaataacgctttacaaacaattattaacgcccggttacccggcaaagaggggctgtggcagattcatctg

SEQ ID NO: 177351 - DNA, 75 bp, synthetic construct
  source 1..75: mol_type = other DNA
gcaagtcgctatttttggcattggcgcttcgggtatcctggcggactataccgcacgactattcaaccgcatagg

SEQ ID NO: 177352 - DNA, 75 bp, synthetic construct
  source 1..75: mol_type = other DNA
ttaatgagcatcgtgaagtggtactcgagcaaacggcgatggaaattgcggccacgttgaacacttccgatgcca

SEQ ID NO: 177353 - DNA, 75 bp, synthetic construct
  source 1..75: mol_type = other DNA
ccatcaggaacgtaacggtgtacgtgctgcttacattcataaagcagaacatctggaagaacggcgactgatgct

SEQ ID NO: 177354 - DNA, 75 bp, synthetic construct
  source 1..75: mol_type = other DNA
gtcgttatcttttgcgcgactggaaaccagaaaatccggccttctgggaaaataaaggaaaacatattgctcgaa

SEQ ID NO: 177355 - DNA, 75 bp, synthetic construct
  source 1..75: mol_type = other DNA
aaccacgtcaaagggatccccctgaaaacggtgcgtcagcgcgtccgggtattgaaggccagcccgtcaggaaaa

SEQ ID NO: 177356 - DNA, 75 bp, synthetic construct
  source 1..75: mol_type = other DNA
tgatgctttacgagcagtttggggatttgaaattcaaatacagaaacagggagttctggtgccgagggtactatg

SEQ ID NO: 177357 - DNA, 75 bp, synthetic construct
  source 1..75: mol_type = other DNA
ggggacagcccgggtcagactgacccggcgtggtggaaaactgcagtaccgtggcagtgtgctgaaggtgggtaa

SEQ ID NO: 177358 - DNA, 75 bp, synthetic construct
  source 1..75: mol_type = other DNA
tgagcctgctgtatctggcaaccttcggctcctttatcggcttctccgcgggctttgcgatgctgtcaaaaacgc

SEQ ID NO: 177359 - DNA, 75 bp, synthetic construct
  source 1..75: mol_type = other DNA
agagcaataggcagtattttgagaaagctgtgtgagtggaaaagtgtacggattctggaagctgaatgctgtgca

SEQ ID NO: 177360 - DNA, 75 bp, synthetic construct
  source 1..75: mol_type = other DNA
actcaaatcccgccagcgatatggccggtgcgctatcgacaaccaaagcgcgacattaccctgctttaccttcta

SEQ ID NO: 177361 - DNA, 75 bp, synthetic construct
  source 1..75: mol_type = other DNA
atatcgttccgcttagtcgacaggcgatgattttgttagaccagttaaagcagattagtggtgataaagagctgc

SEQ ID NO: 177362 - DNA, 75 bp, synthetic construct
  source 1..75: mol_type = other DNA
tatgccgtacagaacgattacatcgactcaaatccggccagtgatatggccggtgcgctatcgacaaccaaagcg

SEQ ID NO: 177363 - DNA, 75 bp, synthetic construct
  source 1..75: mol_type = other DNA
ctattcagaacctgaacagcctcagccggttaatcgttcctgaggcaaccgcaaaagcacttaacagggtggcca

SEQ ID NO: 177364 - DNA, 75 bp, synthetic construct
  source 1..75: mol_type = other DNA
aagccgaacagaaagaagctcaggctgagaattcgggggcatacactttcgaaacaattgctcgtgaatggcatg

SEQ ID NO: 177365 - DNA, 75 bp, synthetic construct
  source 1..75: mol_type = other DNA
atgacacggatcgcggttgagctttccttactaacttttgtgcgttccagtgagttacgtttcgcgcgttgggat

SEQ ID NO: 177366 - DNA, 75 bp, synthetic construct
  source 1..75: mol_type = other DNA
ctgcatttctaatgcctcaggaaaacgtgatggccgttaagatggtggtcccgacgtttgataaaattgtgcaat

SEQ ID NO: 177367 - DNA, 75 bp, synthetic construct
  source 1..75: mol_type = other DNA
gactgctctggctggagacggcatttatctggctcagttgagtgatgagcttaacgtacctctcgatgaattgag

SEQ ID NO: 177368 - DNA, 75 bp, synthetic construct
  source 1..75: mol_type = other DNA
gaaccgggttatctagtcgtatcgtaattgaatacgaaaaagattattgtctttatgcacccacggcagagacgg

SEQ ID NO: 177369 - DNA, 75 bp, synthetic construct
  source 1..75: mol_type = other DNA
ttcgctgcgtacggtagatgataacggctgggttggcgaagtcagcgcttcaggagaaattcatgttcaggcgac

SEQ ID NO: 177370 - DNA, 75 bp, synthetic construct
  source 1..75: mol_type = other DNA
gcacggcatgttgtcagacgcgttttaccagtatctgcaacaaatgcccgtcggcagcagctttacaatgaccat

SEQ ID NO: 177371 - DNA, 75 bp, synthetic construct
  source 1..75: mol_type = other DNA
tgcaaccgcgctcagagctgcagtgagcaaaacaacctgggcggatgcaccggcacgcgagtttgtgtttgtcga

SEQ ID NO: 177372 - DNA, 75 bp, synthetic construct
  source 1..75: mol_type = other DNA
gcaccttcctgacggcaagctccgcgcttgccttccttcatacgcctttcgcccgtgcacttcctgcccgacaaa

SEQ ID NO: 177373 - DNA, 75 bp, synthetic construct
  source 1..75: mol_type = other DNA
ctggcgcttcacaataaaccgcaacatctttttatgcgaaatatcaatgtgatgcaggaatccactgttggaccc

SEQ ID NO: 177374 - DNA, 75 bp, synthetic construct
  source 1..75: mol_type = other DNA
gatgcaggaatcctctgttggacccgcattgagcatgaactttgacatgcgcaaagacgttcgcggcgtctttat

SEQ ID NO: 177375 - DNA, 75 bp, synthetic construct
  source 1..75: mol_type = other DNA
atgagtaacactgttgatgatgtcaaacgtctttttaatccgtctcgactaaagctagcgcggatcagacgcaaa

SEQ ID NO: 177376 - DNA, 75 bp, synthetic construct
  source 1..75: mol_type = other DNA
acaacacagtcgtgatcgtcctgaatcttggccagcgcgtggtcggcatagtggttgacggcgtatcggacgttc

SEQ ID NO: 177377 - DNA, 75 bp, synthetic construct
  source 1..75: mol_type = other DNA
gattctggtgaacatcgaaaaactgctgaacagcgaagagatggcgctgttagatagcgcggcgtcagaagtggc

SEQ ID NO: 177378 - DNA, 75 bp, synthetic construct
  source 1..75: mol_type = other DNA
atcacttatttaagtgatattggttgtctggagattcagggggccagtctacagaccatcggcagcctttcagga

SEQ ID NO: 177379 - DNA, 75 bp, synthetic construct
  source 1..75: mol_type = other DNA
accgcattaccctccgtttctggcgcattattacgtgtcccctactcctttatggtgcctatattcggtggacgt

SEQ ID NO: 177380 - DNA, 75 bp, synthetic construct
  source 1..75: mol_type = other DNA
gggtttcgctgtacaaaataccaatacgccttttggcgtatttattgttattgccttactgtgtggttttgccgg

SEQ ID NO: 177381 - DNA, 75 bp, synthetic construct
  source 1..75: mol_type = other DNA
ccacatgatctactgggccgggtttatcgtgaccaaggccaaatctctcaagaacccgtttgtccggaggtattt

SEQ ID NO: 177382 - DNA, 75 bp, synthetic construct
  source 1..75: mol_type = other DNA
cgtgttcgccagattcaggttgaaggcctgcgccgtttgcgcgaaatcctgcaaacgcaggggctgaatatcgaa

SEQ ID NO: 177383 - DNA, 75 bp, synthetic construct
  source 1..75: mol_type = other DNA
gaacgttactccccttcttcaggttgcggagcatcgtgaagctggtcgcttcacttccatcgagcaagaatatcc

SEQ ID NO: 177384 - DNA, 75 bp, synthetic construct
  source 1..75: mol_type = other DNA
atggcactgcaaaatgagaaaaataatcgttatctcttgcgcgactggaagccagaaaccccggctttctgggaa

SEQ ID NO: 177385 - DNA, 75 bp, synthetic construct
  source 1..75: mol_type = other DNA
atggctaatatatatgatataaaaagaacttttgttaagaatatttatcataaacaattatcacttgcagtttgc

SEQ ID NO: 177386 - DNA, 75 bp, synthetic construct
  source 1..75: mol_type = other DNA
aagcatttgtctggcttggatggggtaaaagtttatgatagcttagatgaacttttccaattgcctaacattaga

SEQ ID NO: 177387 - DNA, 75 bp, synthetic construct
  source 1..75: mol_type = other DNA
cttcaacgagatgaagagcgcagactcgatctatgttttcttctcgagcaacttctttaagcagatggtgaacct

SEQ ID NO: 177388 - DNA, 75 bp, synthetic construct
  source 1..75: mol_type = other DNA
ttcagaagaatatcaaaatgttgttcacttttaaacgtcctcatttttaacattgagatcgcaactgaatgtgag

SEQ ID NO: 177389 - DNA, 75 bp, synthetic construct
  source 1..75: mol_type = other DNA
ctgtggttgtggggccagttgctataaatgataatgtttttcttggtgctaactgcgttgttgtcaatagcattg

SEQ ID NO: 177390 - DNA, 75 bp, synthetic construct
  source 1..75: mol_type = other DNA
atgaaaaaagaacgtggtttttcgttggtagagattgcacttttctctgttttgataggagtggtaatagctaat

SEQ ID NO: 177391 - DNA, 75 bp, synthetic construct
  source 1..75: mol_type = other DNA
tgctggggattgtgggcatgttctggctggcgctaaaacgctatggaatgaatgtgagcggcgatgaagcgttct

SEQ ID NO: 177392 - DNA, 75 bp, synthetic construct
  source 1..75: mol_type = other DNA
ccgcgccgtccgctgtttaccatgaaccgcgtggagaccaatctcacgtgggtgatcctgatgggcatcgcgctg

SEQ ID NO: 177393 - DNA, 75 bp, synthetic construct
  source 1..75: mol_type = other DNA
cgccaggatagcaaagcgtggctgtttttcctcgtcagcacggtcgcctttggcttgctgacttatatgattgtc

SEQ ID NO: 177394 - DNA, 75 bp, synthetic construct
  source 1..75: mol_type = other DNA
ggtgatcctgatgggcatcgctctggtgagcgtcggcatcttcttcatgcacaacggctttttgctgttccggct

SEQ ID NO: 177395 - DNA, 75 bp, synthetic construct
  source 1..75: mol_type = other DNA
caactatttcacctgggaagtgctgaacaatcactccgggttggcaatctcgcctacgcttattggttcactggt

SEQ ID NO: 177396 - DNA, 75 bp, synthetic construct
  source 1..75: mol_type = other DNA
gctggcgctaaaacgctatggaatgaatgtgagcggcgatgaagcgttctatacgtttctctatctcactcgcga

SEQ ID NO: 177397 - DNA, 75 bp, synthetic construct
  source 1..75: mol_type = other DNA
ccgctggacatgcagagctacaaagatgccatgctgcgcggcctgcgtcagcaactgcctgactatatggtgccg

SEQ ID NO: 177398 - DNA, 75 bp, synthetic construct
  source 1..75: mol_type = other DNA
aattgtcgccacatcatcgctatgtccattgcaccgtggggggcgcgatagggcaagaggcggcaagtgctgcag

SEQ ID NO: 177399 - DNA, 75 bp, synthetic construct
  source 1..75: mol_type = other DNA
accgcgcataaagtggcctgggctgctgtgaagcatgaatatgccaaaggggatgataaatggcataaaaaatcg

SEQ ID NO: 177400 - DNA, 75 bp, synthetic construct
  source 1..75: mol_type = other DNA
gcatttcctggggatgtgcaatgtggtttatgtactgggggccgtcaggaatggtggcaggtgaggccattatta

SEQ ID NO: 177401 - DNA, 75 bp, synthetic construct
  source 1..75: mol_type = other DNA
ttagcgcaggctgaggtttcgcaggtcagcgctgcgcgcgagaatctggcgttgcggcgtaaacgtgcccaacag

SEQ ID NO: 177402 - DNA, 75 bp, synthetic construct
  source 1..75: mol_type = other DNA
tgagccacgtgtcggccgaagacgatttcttctcgctggggggcagttctatagaattggtgcgtattcagcagg

SEQ ID NO: 177403 - DNA, 75 bp, synthetic construct
  source 1..75: mol_type = other DNA
aatcgctataaggcagcgattttgcacagtttctgctttggggcgatcttcaatatgatcgtgctggcgcgcgaa

SEQ ID NO: 177404 - DNA, 75 bp, synthetic construct
  source 1..75: mol_type = other DNA
atgactattgcagaacgtcttatacagaaaggtttcgacgaaggttttaaagaaggctttaaagaaggggcgctt

SEQ ID NO: 177405 - DNA, 75 bp, synthetic construct
  source 1..75: mol_type = other DNA
atgacgattgcagaacgtcttatacagaaaggtttcgacgagggttttaaagaaggttttaaagaaggttttaaa

SEQ ID NO: 177406 - DNA, 75 bp, synthetic construct
  source 1..75: mol_type = other DNA
ccatcagatgctggaagagcagtatccactgcaagagaacggacagatactgctggcatttccgcgtctgtttat

SEQ ID NO: 177407 - DNA, 75 bp, synthetic construct
  source 1..75: mol_type = other DNA
caagccttcagcgaagggcaaacggtcgtcgtgcccgccggattggtttgtgacaatatcaacaccggcatcttc

SEQ ID NO: 177408 - DNA, 75 bp, synthetic construct
  source 1..75: mol_type = other DNA
taacacccatcttgcttataaattgcgcggcatccaaatctccgccgggaatgctgtttcctttgtggcactgac

SEQ ID NO: 177409 - DNA, 75 bp, synthetic construct
  source 1..75: mol_type = other DNA
cagctcaagcgcggctggcagccgctgaatatcgccaccaccagcgtgctgctgacgctggccgataacgacacg

SEQ ID NO: 177410 - DNA, 75 bp, synthetic construct
  source 1..75: mol_type = other DNA
ggctggagccgacccatgtgctcatgcgcgaagttgcctgggaacaaaactacccggatcgcgggcgtgagccgt

SEQ ID NO: 177411 - DNA, 75 bp, synthetic construct
  source 1..75: mol_type = other DNA
caacgttggcctgcggccaggataacaggcatcgactcgtctccggcgatgattgctgaagcgcgcagtgctttg

SEQ ID NO: 177412 - DNA, 75 bp, synthetic construct
  source 1..75: mol_type = other DNA
acgctgttgatggggagcttatggggcatttcctggggatgtgcaatgtggtttatctactgggggccgtcagga

SEQ ID NO: 177413 - DNA, 75 bp, synthetic construct
  source 1..75: mol_type = other DNA
gcgtccggcggtggagctgcttgccagagtgccgctggagaatatcgaatatgttgccgatcttggctgtggccc

SEQ ID NO: 177414 - DNA, 75 bp, synthetic construct
  source 1..75: mol_type = other DNA
acgttgccgatcttggctgtggcccaggtaacagcaccgccctgctgcatcaacgttggcctgctgccaggataa

SEQ ID NO: 177415 - DNA, 75 bp, synthetic construct
  source 1..75: mol_type = other DNA
ggctggagccgactcatgtattaatgcgtgaggtagcctgggagcaaaactatccagatcgaggacgtgaaccac

SEQ ID NO: 177416 - DNA, 75 bp, synthetic construct
  source 1..75: mol_type = other DNA
gtaaaaggaaatggtctgattcccacagcgagagagttctaaaaagcatggaagatggtctctttactgctattg

SEQ ID NO: 177417 - DNA, 75 bp, synthetic construct
  source 1..75: mol_type = other DNA
tcgataatggtcagagccgcgaagagtggaaagggcaggcggaaactaacaagatcctcaacacatcttccgtga

SEQ ID NO: 177418 - DNA, 75 bp, synthetic construct
  source 1..75: mol_type = other DNA
gggaaatcactatgcgtgagctaaccccagctgccgttaccggcacgctgaccacgccggtaggccgcctgcgta

SEQ ID NO: 177419 - DNA, 75 bp, synthetic construct
  source 1..75: mol_type = other DNA
caggagaacgaggatattgcgcttacggttgggaagctgcgcgttgagcttgaagcagcaaaatcaaaactcaac

SEQ ID NO: 177420 - DNA, 75 bp, synthetic construct
  source 1..75: mol_type = other DNA
atggcccgcacgaaaaaggcaaaggctgaagacaaaaagccagcagccaaaaagacgggccgtccgcatggctat

SEQ ID NO: 177421 - DNA, 75 bp, synthetic construct
  source 1..75: mol_type = other DNA
gaaagaatgcattgacgtaattcgtgaagaagtaaagcgatggaatgattcccgcaccgctggcattcgcatcaa

SEQ ID NO: 177422 - DNA, 75 bp, synthetic construct
  source 1..75: mol_type = other DNA
ccagcaatatatcaaacgccgcgaccaggagaacgaggatattgcgctaacggttggggggctgctaatcgaaaa

SEQ ID NO: 177423 - DNA, 75 bp, synthetic construct
  source 1..75: mol_type = other DNA
acgggaaatatcgctcccagaacgtagcagcatgcttcatcgaacagattttcacgaggattaccaaacggtaat

SEQ ID NO: 177424 - DNA, 75 bp, synthetic construct
  source 1..75: mol_type = other DNA
taacgagcgtgaccatgctgagtctgctttagctgatatgtattttgcagcaaccggggataggcctgagtggag

SEQ ID NO: 177425 - DNA, 75 bp, synthetic construct
  source 1..75: mol_type = other DNA
gtcgaaaccggagcatggaaagacgctgttgactgggtgctcaaagaggcttgccaggctgtaaacactggcatc

SEQ ID NO: 177426 - DNA, 75 bp, synthetic construct
  source 1..75: mol_type = other DNA
tgtcagctgaactgccacctgcaaatgaaagtgttttgttattcgatgctaacggagaaggctggctgattggct

SEQ ID NO: 177427 - DNA, 75 bp, synthetic construct
  source 1..75: mol_type = other DNA
gtagtacctgaaggactgattaaagcggtgcgtttctatgaacaggtaaagcgtgagaatccgccagtcgaaacc

SEQ ID NO: 177428 - DNA, 75 bp, synthetic construct
  source 1..75: mol_type = other DNA
ttcacgaggattaccaaacggtaatggcatacaaagtttctgaggtcatcgctgcaatccgcgccgctggcattc

SEQ ID NO: 177429 - DNA, 75 bp, synthetic construct
  source 1..75: mol_type = other DNA
ggtagaagtaaatcagactactgtccttgagataatcgataacctgaataaggagtacaatactcatggagactg

SEQ ID NO: 177430 - DNA, 75 bp, synthetic construct
  source 1..75: mol_type = other DNA
tgatgatgattttgcgcaggcggtgctggatctgcatactcagtgggcaaagggatctactgtaaacaaagcccg

SEQ ID NO: 177431 - DNA, 75 bp, synthetic construct
  source 1..75: mol_type = other DNA
tgtgcattcgctaaagtacttaacgtaccagaatgctatttctatactgttgatgatgattttgcgcaggcggtg

SEQ ID NO: 177432 - DNA, 75 bp, synthetic construct
  source 1..75: mol_type = other DNA
atgtcgatacctttcgtggcacccgtgaaggcgtgccacgtctgctggaaaccttaagtaagtataatattcagg

SEQ ID NO: 177433 - DNA, 75 bp, synthetic construct
  source 1..75: mol_type = other DNA
ctatggcggcgtttatttgcttcacggtacgaacgccgatttcggcattggcatgcgggtaagttctggctgtat

SEQ ID NO: 177434 - DNA, 75 bp, synthetic construct
  source 1..75: mol_type = other DNA
tttgaaatgatgtgtgcgttcgcaaaggtattggacgtaccggagtgttatttttatacggttaatgatgatttt

SEQ ID NO: 177435 - DNA, 75 bp, synthetic construct
  source 1..75: mol_type = other DNA
ttattcattatgtatatagtttctcattcttcggccgaaatgatcgcaccgcttatgttactcttcatgcttgta

SEQ ID NO: 177436 - DNA, 75 bp, synthetic construct
  source 1..75: mol_type = other DNA
tcttaaccgtatccagagggataaaggtacgccggtttacactattcatgcagaagtcgaaggctgtgcctggca

SEQ ID NO: 177437 - DNA, 75 bp, synthetic construct
  source 1..75: mol_type = other DNA
gcaacagggaagaagcgcccgtacaggtagaagtcacaaaagaagagatcgcccgcatcgttcaggaagtagaag

SEQ ID NO: 177438 - DNA, 75 bp, synthetic construct
  source 1..75: mol_type = other DNA
ttgaaacccgtaaatggctattggcaaaactgcaaccgcgcaaatatggtgaacgcgttacacaggagattgtag

SEQ ID NO: 177439 - DNA, 75 bp, synthetic construct
  source 1..75: mol_type = other DNA
agggacgttgccgctcggacaagttgttcgcggaaatattgccggacgtgaaggctggctgggttgccaacaaat

SEQ ID NO: 177440 - DNA, 75 bp, synthetic construct
  source 1..75: mol_type = other DNA
atcaccacgcctggcaagcccatagcggcaactgggatcggcaaacgatggtcgacgatattgcacgaggccttc

SEQ ID NO: 177441 - DNA, 75 bp, synthetic construct
  source 1..75: mol_type = other DNA
ggcacgccggtttataccattcatgcagaagttgaaggctgcgcttatcagcataattttgtggatctcctgaaa

SEQ ID NO: 177442 - DNA, 75 bp, synthetic construct
  source 1..75: mol_type = other DNA
gcccggacaggctctgaatgatttgcttctctccggtggttcctccggacagttcgatacgctgtacgaaaagta

SEQ ID NO: 177443 - DNA, 75 bp, synthetic construct
  source 1..75: mol_type = other DNA
ctctggcgacgtgacggaccggtaatgatttcttttgataatctgtggagtgcgataacgcatggcggacagtga

SEQ ID NO: 177444 - DNA, 75 bp, synthetic construct
  source 1..75: mol_type = other DNA
aggaacagagagttctggtgcagagggtactacgtcgatacggtgggtaagaacacggcgaagatacaggattac

SEQ ID NO: 177445 - DNA, 75 bp, synthetic construct
  source 1..75: mol_type = other DNA
ctgtaccaggcaagctaatcagcagcgcgctgaatcttccgtttggcgcaaaattgcagtcaatatcaggcaagg

SEQ ID NO: 177446 - DNA, 75 bp, synthetic construct
  source 1..75: mol_type = other DNA
aagaccaactggcgacggccactggtgttcgtgatattgctgattttgtagatcaggccaaaggcctgaaagctg

SEQ ID NO: 177447 - DNA, 75 bp, synthetic construct
  source 1..75: mol_type = other DNA
tatgcagacagcaggtcatcaacaaggctatccagtttgaacataccaacgaggttcagaacctggtaagccaga

SEQ ID NO: 177448 - DNA, 75 bp, synthetic construct
  source 1..75: mol_type = other DNA
gtcagatccgtatgctatttatactttagactactgggcatcacttgatgaaaacctaactttcattctggttta

SEQ ID NO: 177449 - DNA, 75 bp, synthetic construct
  source 1..75: mol_type = other DNA
aatgttcccaagatcagtgaagttaccaatatatctggattctctcctttaaatgtctccggtgtctggcatggt

SEQ ID NO: 177450 - DNA, 75 bp, synthetic construct
  source 1..75: mol_type = other DNA
cgcctccggccgcacgctctccgggcaaaccaccgaagcgttttacaactctctgcgccatgccgaagccctgac

SEQ ID NO: 177451 - DNA, 75 bp, synthetic construct
  source 1..75: mol_type = other DNA
atggaactgtggctgacggtgaacggtaaacgcacctgtgccagcgcaccgctggagccgctgacccgcgctgtg

SEQ ID NO: 177452 - DNA, 75 bp, synthetic construct
  source 1..75: mol_type = other DNA
atactgcggcaaagcagtatggtctaattggaaatgcttctgtatcagcaggtaatatttcttttagtggttgca

SEQ ID NO: 177453 - DNA, 75 bp, synthetic construct
  source 1..75: mol_type = other DNA
tgacgggcgtgaaatggcagaaacagaagtcattcctattgacatgcctgactctaacggcgagatgacttggca

SEQ ID NO: 177454 - DNA, 75 bp, synthetic construct
  source 1..75: mol_type = other DNA
atgaaaagatttcgcccccttattctggcggttcttattgccagcccgatagtaaacgctgctggtatacccgtg

SEQ ID NO: 177455 - DNA, 75 bp, synthetic construct
  source 1..75: mol_type = other DNA
cgggttgacggcaggtaaagtgtggttcaacaccccaaccgatgattataacggtctgcaacttgcagcccacct

SEQ ID NO: 177456 - DNA, 75 bp, synthetic construct
  source 1..75: mol_type = other DNA
gctaatgaattgatcaataaggacgtacaagttaaagaggtaatggaaaaaacgggtatatcacgggcgacgtat

SEQ ID NO: 177457 - DNA, 75 bp, synthetic construct
  source 1..75: mol_type = other DNA
gtcagcgatgacagcgcggtgtgccgcgtgacggtctcgcccagtggcgtactggcaccgtttctcgacccggac

SEQ ID NO: 177458 - DNA, 75 bp, synthetic construct
  source 1..75: mol_type = other DNA
cgatgagcgtgaccatgctgagtctgctttagctgatatgtactttgcagcaaccggggataggccggagtggag

SEQ ID NO: 177459 - DNA, 75 bp, synthetic construct
  source 1..75: mol_type = other DNA
atgacggctgaatctgttgtatgtgccctgttctggtattgttttgtcggttggtgtactgctgaactgcaccgc

SEQ ID NO: 177460 - DNA, 75 bp, synthetic construct
  source 1..75: mol_type = other DNA
ggttttaatgaagaagattttgcccgttcacatccagccggtgcgctgggcgctcgcttgctgaacaaagtgcat

SEQ ID NO: 177461 - DNA, 75 bp, synthetic construct
  source 1..75: mol_type = other DNA
gtgacgcatccggtgacgatgccgctggtggacaatcaactggatctcgccactttctggcagcagtggctgagc

SEQ ID NO: 177462 - DNA, 75 bp, synthetic construct
  source 1..75: mol_type = other DNA
gcgggccattgagcgtggaatcaatgcgccgctggcgtcatcgtgcgggcgtttgtttgatgctgtagcggcggc

SEQ ID NO: 177463 - DNA, 75 bp, synthetic construct
  source 1..75: mol_type = other DNA
gggggcgatttggctgcgaagcagccgtggcgaaacctgctggcgcagtgcctgcgctttgtgccggagtggcag

SEQ ID NO: 177464 - DNA, 75 bp, synthetic construct
  source 1..75: mol_type = other DNA
gcgacgggccgcattaacaccttccagccgaccgcggaagaacttaccaccctgtttcaacaaggagcgtcctga

SEQ ID NO: 177465 - DNA, 75 bp, synthetic construct
  source 1..75: mol_type = other DNA
tcctgctgtccgccgagcagatgcaggccatacgcaacattcaggaacgtgaacgccagcgctccaatctcggcg

SEQ ID NO: 177466 - DNA, 75 bp, synthetic construct
  source 1..75: mol_type = other DNA
tctggcgtttttattgttgtgatcgcaaccgtccaaacgatttatggattcggacaaaagtcaggtaatgccatg

SEQ ID NO: 177467 - DNA, 75 bp, synthetic construct
  source 1..75: mol_type = other DNA
aagccatgcaggagcatcttctggaaaaaagcgccaggagctggagaaaaaacgaaagtcatccagagcctgagg

SEQ ID NO: 177468 - DNA, 75 bp, synthetic construct
  source 1..75: mol_type = other DNA
tatgcagtacagaacgattacatcgactcaaatccagccagtgatatggctggtgctctatcgacaaccaaagcg

SEQ ID NO: 177469 - DNA, 75 bp, synthetic construct
  source 1..75: mol_type = other DNA
tatgccgttcagaacgattacatcgactctaatccggccagtgatatggccggtgcgctatcgacaaccaaagcg

SEQ ID NO: 177470 - DNA, 75 bp, synthetic construct
  source 1..75: mol_type = other DNA
atttatgcgatacccttgtcaaagggaatactacatttatttttttggattcatattttaaaaataacaagaaat

SEQ ID NO: 177471 - DNA, 75 bp, synthetic construct
  source 1..75: mol_type = other DNA
ccgccccgccgcttgtttgaccgctatattctgcgggagttttcttggaggcacgggatgaaatccgcagcatgg

SEQ ID NO: 177472 - DNA, 75 bp, synthetic construct
  source 1..75: mol_type = other DNA
aattaaaggtgtccgttactcgtaccgtgggatgaagatgaaagaggagcatatcgttccgcttagtcggcaggc

SEQ ID NO: 177473 - DNA, 75 bp, synthetic construct
  source 1..75: mol_type = other DNA
agaatagaaatgaatcaaaatactatattaactgatgaaaaaataattaatctcccaagaaaaatacagtctaca

SEQ ID NO: 177474 - DNA, 75 bp, synthetic construct
  source 1..75: mol_type = other DNA
agccaacattttacaggcatcgtaaagaattactgtcttttggtatagatattaatttttattgtgaagcccctg

SEQ ID NO: 177475 - DNA, 75 bp, synthetic construct
  source 1..75: mol_type = other DNA
ctatgccaggattttatccttattgaatattcctcatgatttagcgtcttataaaaccgttatggcaggtcagta

SEQ ID NO: 177476 - DNA, 75 bp, synthetic construct
  source 1..75: mol_type = other DNA
gcttccggtgtgatgaacacgaaaaccaaaggtaaggtctcgctcaacctggaaatcgaaccgtttgatgagaac

SEQ ID NO: 177477 - DNA, 75 bp, synthetic construct
  source 1..75: mol_type = other DNA
gtaggcgcttatggcagggaaataaaagggggtattcctgaagaatgccaggaaattaaacattctgaatatgtg

SEQ ID NO: 177478 - DNA, 75 bp, synthetic construct
  source 1..75: mol_type = other DNA
atggcatatttttatttcaaattagaccgtgtgcagacaaataaatatttcaccaaatatcaacagactgtttta

SEQ ID NO: 177479 - DNA, 75 bp, synthetic construct
  source 1..75: mol_type = other DNA
actcaaatccagccagtgatatggccggtgcgctatctacaaccaaagcgcgacattaccccgctttaccctcta

SEQ ID NO: 177480 - DNA, 75 bp, synthetic construct
  source 1..75: mol_type = other DNA
aataatgccttacgcgttatgggatatgatacaaagacggaagtttgtgggcatgggtttagaacaatggctcgc

SEQ ID NO: 177481 - DNA, 75 bp, synthetic construct
  source 1..75: mol_type = other DNA
atattgtaccattaagccgtcaagctatgtccattttggaacagttaaagagaattagtggggataaggtattgt

SEQ ID NO: 177482 - DNA, 75 bp, synthetic construct
  source 1..75: mol_type = other DNA
cggcactacccagcacttccgtcacatcgtttccctgagtttttggcacgccttgcagcatatcgtggtcgtatg

SEQ ID NO: 177483 - DNA, 75 bp, synthetic construct
  source 1..75: mol_type = other DNA
attatcacgctataaagggcgactaatgacacggcttgccgttgaattaacgctactcacatttattcgttcaag

SEQ ID NO: 177484 - DNA, 75 bp, synthetic construct
  source 1..75: mol_type = other DNA
aatgctgcaatggtgggctgattacattgatgctaacaagaatggaactatcacaccatatgattttgcgcgtgt

SEQ ID NO: 177485 - DNA, 75 bp, synthetic construct
  source 1..75: mol_type = other DNA
gatggtgcagtggtgggctgattaccttgatgctaatatcgagaggtatataactccttatgaatttgctaaagc

SEQ ID NO: 177486 - DNA, 75 bp, synthetic construct
  source 1..75: mol_type = other DNA
aagcaccagcttgaagaggataaaatgggggagcagttatcgattccatatccgggcagcccgtttacgggccgt

SEQ ID NO: 177487 - DNA, 75 bp, synthetic construct
  source 1..75: mol_type = other DNA
attaagccattcagaacgtaataatgtgcgtgcagcctatattcacacttcagagcatttagatgaacgtagatt

SEQ ID NO: 177488 - DNA, 75 bp, synthetic construct
  source 1..75: mol_type = other DNA
tgtttcccggtgatcatgatcccaataaagttatgagcgaaggtaatgactccaacttattgatagtgttttatg

SEQ ID NO: 177489 - DNA, 75 bp, synthetic construct
  source 1..75: mol_type = other DNA
atatcgttcctcttagtcgacaggcgatggttttgttagagcaactcaagcagattagtggcgataaagagttac

SEQ ID NO: 177490 - DNA, 75 bp, synthetic construct
  source 1..75: mol_type = other DNA
ggcgtatacctgcaaagcgagaagaaattaaaggcgtgcgttactcgtatcgtggcatgaagatgaaagaggagc

SEQ ID NO: 177491 - DNA, 75 bp, synthetic construct
  source 1..75: mol_type = other DNA
acatggatttagaactatggctcgcggtgcgttaggtgagtcagggttatggagcgacgacgcgatagaacggca

SEQ ID NO: 177492 - DNA, 75 bp, synthetic construct
  source 1..75: mol_type = other DNA
agcactggcaaagtcccttgagcgtgatgctgaatacacgatgcgaaaaggtctgctgatatacaaaatctggaa

SEQ ID NO: 177493 - DNA, 75 bp, synthetic construct
  source 1..75: mol_type = other DNA
atggcaacaagatagaaccgtgtacggcactggcaaaatcccttgagcatgatgctgaatacacgacgcgaaaag

SEQ ID NO: 177494 - DNA, 75 bp, synthetic construct
  source 1..75: mol_type = other DNA
gtctgctgatatacaaaatctggaatgagagtttaactcgcggtcctgattttgtgatgttgcgttccggtgaat

SEQ ID NO: 177495 - DNA, 75 bp, synthetic construct
  source 1..75: mol_type = other DNA
atggcaatcagatagaaccgtgtacggcactggctaaatcccttgagcatgatgctgaatacacgacgcgaaaag

SEQ ID NO: 177496 - DNA, 75 bp, synthetic construct
  source 1..75: mol_type = other DNA
cacttcgtatacttgaagcactattttttaataaaaaattaattactaataatacaaatatactgggttcagaaa

SEQ ID NO: 177497 - DNA, 75 bp, synthetic construct
  source 1..75: mol_type = other DNA
tttctaaatcacctattcgagtctcattttgcccgttctgtggtgaaagtctgaaaacatggaaaaaggagacaa

SEQ ID NO: 177498 - DNA, 75 bp, synthetic construct
  source 1..75: mol_type = other DNA
tgctcttttgcccgtgtactgaacgttcctgaaagctatttctatacgctggaagatagttttgccgaagcggtt

SEQ ID NO: 177499 - DNA, 75 bp, synthetic construct
  source 1..75: mol_type = other DNA
ccgataaaagtctctgccgaaccaaacggtgcgcgtctggttgaagtacatcagccgctgtcagagaagattgat

SEQ ID NO: 177500 - DNA, 75 bp, synthetic construct
  source 1..75: mol_type = other DNA
acgctgaatagcgcaatgcaatcatttaaagatgcagcacaaactgacgctgaagtgatgcaacatgtgatggat

SEQ ID NO: 177501 - DNA, 75 bp, synthetic construct
  source 1..75: mol_type = other DNA
gtgagcgaatcaaaatgtcaggttaatggcaatcagatagaaccgtgtacggcactggcaaaatcccttgagcat

SEQ ID NO: 177502 - DNA, 75 bp, synthetic construct
  source 1..75: mol_type = other DNA
cgttctgttgtcaggttatacctctcaacgtgcgggggttttctctttccagcaaccaatgccaccagggataaa

SEQ ID NO: 177503 - DNA, 75 bp, synthetic construct
  source 1..75: mol_type = other DNA
ggaagatagttttgccgaagcggttttaaggctgtatgacggtgagactgtgcaatggaatttgaaaacagggat

SEQ ID NO: 177504 - DNA, 75 bp, synthetic construct
  source 1..75: mol_type = other DNA
caggaacgaaagcggaactgattgcgctactgaccaacggcaaaaacgacatttcagagccaacgctgcgtcgtt

SEQ ID NO: 177505 - DNA, 75 bp, synthetic construct
  source 1..75: mol_type = other DNA
tgatgacctgtcagttatagtcgaaatggattacttccctgaaaccaaaaaatcaatgatgtatcgtaatggtcg

SEQ ID NO: 177506 - DNA, 75 bp, synthetic construct
  source 1..75: mol_type = other DNA
agactggcgttttacggagagaagcgtagggcgataggcagtattttgagaaagctgtgtgagtggaaaagcgta

SEQ ID NO: 177507 - DNA, 75 bp, synthetic construct
  source 1..75: mol_type = other DNA
cggggatcaaagaaaccgaccgggaagtccatatcaccccgggtattatttatgacgatttgcgcaagggcgagg

SEQ ID NO: 177508 - DNA, 75 bp, synthetic construct
  source 1..75: mol_type = other DNA
tctgactatgtagggagaatagaaatgaatcaaaatactatattaactgatgaaaaaataattaatctcccaaga

SEQ ID NO: 177509 - DNA, 75 bp, synthetic construct
  source 1..75: mol_type = other DNA
tgccttgcacacaccgaccgttaccggccggtagcgtcgtcagcgttgatgctgatggtgcggtggagtgggaaa

SEQ ID NO: 177510 - DNA, 75 bp, synthetic construct
  source 1..75: mol_type = other DNA
gcgtgttctctccaggctggaaagcgaccagactgcgttcaagggcgttaatcatggcctatgaggcggtgaaac

SEQ ID NO: 177511 - DNA, 75 bp, synthetic construct
  source 1..75: mol_type = other DNA
tcgtgtacatggtttcaggattaagcggtcaatattcaactgtaagagctggtatttgcacgtcattaacgatga

SEQ ID NO: 177512 - DNA, 75 bp, synthetic construct
  source 1..75: mol_type = other DNA
caacgttggcctgcggccaggataacgggcatcgactcatctccggcgatgattgctgaagcgcgcagtgctttg

SEQ ID NO: 177513 - DNA, 75 bp, synthetic construct
  source 1..75: mol_type = other DNA
atgcagctatcaagcatggttatacgcgcggtcaatgcggcatagacaacatgcggatagcgaaagcggcaaagg

SEQ ID NO: 177514 - DNA, 75 bp, synthetic construct
  source 1..75: mol_type = other DNA
atatgtgtgattcaaaatatacgttgatttctggtgagggtggtttaggtgctgattgtgccgattatttattat

SEQ ID NO: 177515 - DNA, 75 bp, synthetic construct
  source 1..75: mol_type = other DNA
tgttacgcaatattatgacggactctttattattttgctcggtaggttttgtgtttatgaatatgtgtgattcaa

SEQ ID NO: 177516 - DNA, 75 bp, synthetic construct
  source 1..75: mol_type = other DNA
atgaatatgtgtgattcaaaatatacgttgatttctggtgagggtggtttacgtgctgattgtgccgattattta

SEQ ID NO: 177517 - DNA, 75 bp, synthetic construct
  source 1..75: mol_type = other DNA
atcgctgaactgcaatcacagtttgctggtttcggtgcttcagctaaagagtctatgggtattcaaggttctgaa

SEQ ID NO: 177518 - DNA, 75 bp, synthetic construct
  source 1..75: mol_type = other DNA
acaggggcagggaactggacaacggcacaattgattgaatggctggattctcaaggggcattcaatcacccatac

SEQ ID NO: 177519 - DNA, 75 bp, synthetic construct
  source 1..75: mol_type = other DNA
gatgtatgaggcatacaacaatggctacccttccccctatggcaatgtgcttcaccttaaaggtgccaccgctgc

SEQ ID NO: 177520 - DNA, 75 bp, synthetic construct
  source 1..75: mol_type = other DNA
gccataaacattaatggcgtcaggttcgatggttctggtgacattaatatcaatactctggtatcgcgcggtcgc

SEQ ID NO: 177521 - DNA, 75 bp, synthetic construct
  source 1..75: mol_type = other DNA
gcaagaactattggtggtgtttcatttaatggcaccgcaaacatcgacctgccgggcgtgaataaaacaggtaat

SEQ ID NO: 177522 - DNA, 75 bp, synthetic construct
  source 1..75: mol_type = other DNA
ctgccattacccaggagatgattgatacatccgagcgtattaaccgcacgatcggcattgatatttcagactctg

SEQ ID NO: 177523 - DNA, 75 bp, synthetic construct
  source 1..75: mol_type = other DNA
tgggcgcaggtctatacgtcaaaagattcaattcccggcgtcaatgccaaaggggatcaggacacctctggtaat

SEQ ID NO: 177524 - DNA, 75 bp, synthetic construct
  source 1..75: mol_type = other DNA
tggtcggagatagtaaaactttttcattatcaagttcaaacacgtccactaagaacgtaacttttaatctatggg

SEQ ID NO: 177525 - DNA, 75 bp, synthetic construct
  source 1..75: mol_type = other DNA
cactggacaacatgattgcccagggtaacccgatgccggtgccttacggggaaatgctggttggctcccgccgta

SEQ ID NO: 177526 - DNA, 75 bp, synthetic construct
  source 1..75: mol_type = other DNA
tggctgtggaactattcatcttgcaggttgcgttattgaggttatgggtaataaaggtgccatgaccatacgcgt

SEQ ID NO: 177527 - DNA, 75 bp, synthetic construct
  source 1..75: mol_type = other DNA
gcggctacagcgaccaagttgcagacagcatgtactatcaacggtgtctcgtttgatggttctaaaaatattgag

SEQ ID NO: 177528 - DNA, 75 bp, synthetic construct
  source 1..75: mol_type = other DNA
gtttgatggttctactgatatcactttaaccgctgcgcatgttgctgcttttgccagaagagcaacggatacgta

SEQ ID NO: 177529 - DNA, 75 bp, synthetic construct
  source 1..75: mol_type = other DNA
aaacctgccagtggtcgtgccgtattgtctcaggaacaggacggcattaaatcgcacacccacagcgccagcgca

SEQ ID NO: 177530 - DNA, 75 bp, synthetic construct
  source 1..75: mol_type = other DNA
tgaacgcctgaaccgtctggatgaacagcggggaaaatacatgacggtcagtgaactgaaaacggaggtgtttgg

SEQ ID NO: 177531 - DNA, 75 bp, synthetic construct
  source 1..75: mol_type = other DNA
agagcccacatcctcccttcagaaatccccgcccacgtttctgaaaccgtttgtggctggtgtctgtgcggcatt

SEQ ID NO: 177532 - DNA, 75 bp, synthetic construct
  source 1..75: mol_type = other DNA
cagggggaagtatcgtctccggtaacgcttccggcgcaggtactcaggcttgaagctctggatgtgcaggaacat

SEQ ID NO: 177533 - DNA, 75 bp, synthetic construct
  source 1..75: mol_type = other DNA
caactgaggggacttttccccgacaatccccgtgttcaggaaatggtggataactggcagaagagcgtaaggagc

SEQ ID NO: 177534 - DNA, 75 bp, synthetic construct
  source 1..75: mol_type = other DNA
agaacccacaccctcccttcagaaatccccgcccacgtttctgaaaccgtttgtggcgggtgtctgtgcggcatt

SEQ ID NO: 177535 - DNA, 75 bp, synthetic construct
  source 1..75: mol_type = other DNA
tgaaccgctactggtttctgagacatggagatgcaggtaagaagacgataaataataaacaggataaccagatta

SEQ ID NO: 177536 - DNA, 75 bp, synthetic construct
  source 1..75: mol_type = other DNA
cagctgaaaatgtatctgcttttgctctacgcgctactggaacttatgccgatactagtggtgcggtcccgtgga

SEQ ID NO: 177537 - DNA, 75 bp, synthetic construct
  source 1..75: mol_type = other DNA
tggcgtcaccgggcatggcacgcatctgcctttacggggatttgcaacgatttggccgccgcatcgaccttcgcg

SEQ ID NO: 177538 - DNA, 75 bp, synthetic construct
  source 1..75: mol_type = other DNA
agaaccattggtggcgtttcatttaatggtaccgcaaacatcgacctgccaggtgtgaataaaacaggtaatcag

SEQ ID NO: 177539 - DNA, 75 bp, synthetic construct
  source 1..75: mol_type = other DNA
atccccgtgttcaggaaatggtggataactggcagaagagcgtaaggagccgagcgcttccggaagaggcgatga

SEQ ID NO: 177540 - DNA, 75 bp, synthetic construct
  source 1..75: mol_type = other DNA
gaaaatacatgacggtcagtgaactgaaaacggaggtgtctggcatcatgcaggcttttaaccggcatatcccgg

SEQ ID NO: 177541 - DNA, 75 bp, synthetic construct
  source 1..75: mol_type = other DNA
aatgagaacatcgcaacatatgatgagagcatcgcaacatatgcattccgtgctgcctgcactgtgagtcgctgt

SEQ ID NO: 177542 - DNA, 75 bp, synthetic construct
  source 1..75: mol_type = other DNA
taacggacccgccatatctcgtcggtttgcgtgaccgttccgggcgcaccatcgccggcgataaaaccgatgaat

SEQ ID NO: 177543 - DNA, 75 bp, synthetic construct
  source 1..75: mol_type = other DNA
gaagaatttggcggtgaactgatcgacggcggcccgtggctgaaagttaaaaacccgaataccggcaaagagatc

SEQ ID NO: 177544 - DNA, 75 bp, synthetic construct
  source 1..75: mol_type = other DNA
tttatgcgggtatcgaatggaaagcagactctgccgacgctgagaaagtgattaaattcctgcgtgaagagatgg

SEQ ID NO: 177545 - DNA, 75 bp, synthetic construct
  source 1..75: mol_type = other DNA
gttgctgattatggattccctcacccgctatgcaatggcccagcgtgagattgcgctggcgattggcgaaccacc

SEQ ID NO: 177546 - DNA, 75 bp, synthetic construct
  source 1..75: mol_type = other DNA
gcgatcgtggtcagcatgtgttgctgattatggactccctcacccgctacgcgatggcccagcgtgaaattgcgc

SEQ ID NO: 177547 - DNA, 75 bp, synthetic construct
  source 1..75: mol_type = other DNA
acctgcgtcattgagcgccagaacggcactgaaacgcgcgaagtagaaagcgaagtagttggttttaacggtcaa

SEQ ID NO: 177548 - DNA, 75 bp, synthetic construct
  source 1..75: mol_type = other DNA
cgcgataccgaacgcaaaggtatcgccatcattcatcaggaattggccctgggtgatgctgccaacttactgatt

SEQ ID NO: 177549 - DNA, 75 bp, synthetic construct
  source 1..75: mol_type = other DNA
gttgaaattgccaaggcacttaataaacaggtgcgcttgttaattctcgatgaaccgacagcctcattaactgag

SEQ ID NO: 177550 - DNA, 75 bp, synthetic construct
  source 1..75: mol_type = other DNA
gggctggactgaagccgcagacctgattgttaaaggtatggaaggcgcaatcaatgcgaagaccgtaacctatga

SEQ ID NO: 177551 - DNA, 75 bp, synthetic construct
  source 1..75: mol_type = other DNA
cttcgaacgtctgatggatggcgctaaactgctgaaatgttcagagtttggtgacgcgatcatcgaaaacatgta

SEQ ID NO: 177552 - DNA, 75 bp, synthetic construct
  source 1..75: mol_type = other DNA
attgttaaaggtatggaaggcgcaatcaacgccaagactgtaacctatgacttcgagcgtctgatggatggcgct

SEQ ID NO: 177553 - DNA, 75 bp, synthetic construct
  source 1..75: mol_type = other DNA
tgatggtgttcggaattattaccggcccggctcatgcgtcgtcgaaattggaaatcacggatcccagggctgcaa

SEQ ID NO: 177554 - DNA, 75 bp, synthetic construct
  source 1..75: mol_type = other DNA
gcagttgctgtcgagttttcagcgtaaccgcgatctggtcaacgtcggtgcttatgccaaaggcagtgatccgat

SEQ ID NO: 177555 - DNA, 75 bp, synthetic construct
  source 1..75: mol_type = other DNA
gacggttatggttttgaggaagactgggcagaagtttatacctcgaaaaatcttccaccagaaagctacccagtc

SEQ ID NO: 177556 - DNA, 75 bp, synthetic construct
  source 1..75: mol_type = other DNA
acaaataacacaggtggtcataatcacggtgttggtgaaaatgtttctgtcagtgccggcagtggcaaaacagta

SEQ ID NO: 177557 - DNA, 75 bp, synthetic construct
  source 1..75: mol_type = other DNA
tccacaagaaagctacccggtcggcgcaccaatcccgtggccatcagataccgttccgtctggttatgccctgat

SEQ ID NO: 177558 - DNA, 75 bp, synthetic construct
  source 1..75: mol_type = other DNA
gtacatgtacgttcgcgacgagatactgatacagccagttggtcagagtgggcgcaggtctacacatcgaaggat

SEQ ID NO: 177559 - DNA, 75 bp, synthetic construct
  source 1..75: mol_type = other DNA
gtaattcagctgacaatatcggtggtatttattatcgaccggttcaatattgtatcaatggaacatggtacacag

SEQ ID NO: 177560 - DNA, 75 bp, synthetic construct
  source 1..75: mol_type = other DNA
ggcgcaccaatcccgtggccatcagataccgttccgtctggctatgccctgatgcaggggcaggcttttgacaaa

SEQ ID NO: 177561 - DNA, 75 bp, synthetic construct
  source 1..75: mol_type = other DNA
gttgctgattatggactccctcacccgctacgcgatggcccagcgtgagattgcgctggcgattggcgaaccgcc

SEQ ID NO: 177562 - DNA, 75 bp, synthetic construct
  source 1..75: mol_type = other DNA
taacccgttgcaacgtacaccgattgaacatgtgctggacaccggcgtgcgcccaatcaatgccctgcttaccgt

SEQ ID NO: 177563 - DNA, 75 bp, synthetic construct
  source 1..75: mol_type = other DNA
taacctcgctggatagctttgaagccaaaattgcgcaacttcctgcggtacgccgctacgggcgattaacccgcg

SEQ ID NO: 177564 - DNA, 75 bp, synthetic construct
  source 1..75: mol_type = other DNA
ggctaaaacaagcacacaagccgttatccaataccttggtttaagagaactcggtaccagcggtgaaaagatccc

SEQ ID NO: 177565 - DNA, 75 bp, synthetic construct
  source 1..75: mol_type = other DNA
caaaagtaattaccgcgcatgtgccattacttatggctgataaagtcgaccagatggccgccaggctggaacgct

SEQ ID NO: 177566 - DNA, 75 bp, synthetic construct
  source 1..75: mol_type = other DNA
cagatggccgccagactggaacgctcccggggctgggttatcaaacaggcgctttctgcatggcttgcccaggag

SEQ ID NO: 177567 - DNA, 75 bp, synthetic construct
  source 1..75: mol_type = other DNA
atttgcgaaattacatcaacaaggagtattgttcgcactggatgattttggcacgggttatgcgactcacagcta

SEQ ID NO: 177568 - DNA, 75 bp, synthetic construct
  source 1..75: mol_type = other DNA
ggacgacagcggtatacaaaaagaaagtcattcaaaaaaatatccgttctccctgatttatatcatcccggtgaa

SEQ ID NO: 177569 - DNA, 75 bp, synthetic construct
  source 1..75: mol_type = other DNA
cgggcatatagtagaaaatgttattgagctggctggccggttaggtattgatatcattgccgaaggtattgaaac

SEQ ID NO: 177570 - DNA, 75 bp, synthetic construct
  source 1..75: mol_type = other DNA
caaaatggcaataaaattaactttgatctctctgaagatcagttaactctatatttgctttcgtatattgaaaat

SEQ ID NO: 177571 - DNA, 75 bp, synthetic construct
  source 1..75: mol_type = other DNA
cgaaaccagctatccgtcacagcagaatcaaaagcgttatttggtaagcgtcaacggaacaccgtattgacgctt

SEQ ID NO: 177572 - DNA, 75 bp, synthetic construct
  source 1..75: mol_type = other DNA
tgcactaagcctggcaagacaagaggctgtattttgcagcacccaccccggtttgcctgtcggtccagttgctga

SEQ ID NO: 177573 - DNA, 75 bp, synthetic construct
  source 1..75: mol_type = other DNA
agcgttttgtattgcaaccggcgatggggttaccaagcggatattcagcgggctacagctacgaatattttggcg

SEQ ID NO: 177574 - DNA, 75 bp, synthetic construct
  source 1..75: mol_type = other DNA
tatcggtggcctggatgcggtgccagaaaccgtgctcaatctgccggatatccctggcggtaaaaaactcattta

SEQ ID NO: 177575 - DNA, 75 bp, synthetic construct
  source 1..75: mol_type = other DNA
gctggcgcggctggttgaggaaacgcacggcatctggaatgaacaggccgagaaatatctgctggcgcaatttgg

SEQ ID NO: 177576 - DNA, 75 bp, synthetic construct
  source 1..75: mol_type = other DNA
tccgccccgatcgatatgctggaaaatgcacttactcacgaagaattcaaaccttattttcaacctgtcatttcc

SEQ ID NO: 177577 - DNA, 75 bp, synthetic construct
  source 1..75: mol_type = other DNA
gatgctgcgggcgctgacaggagatgccgggttcgatgacatttttgtttatgcggcggtgcctgctgtcgttga

SEQ ID NO: 177578 - DNA, 75 bp, synthetic construct
  source 1..75: mol_type = other DNA
atgacatttttgtttatgcggggtgcctgctgtcgttgagatggctgatgaattactggcggaagatggctgtct

SEQ ID NO: 177579 - DNA, 75 bp, synthetic construct
  source 1..75: mol_type = other DNA
tgccctaagcctgacaagacaagaggctgtattttgcagcactcaccccggcttgcctgtcggtccaattgctga

SEQ ID NO: 177580 - DNA, 75 bp, synthetic construct
  source 1..75: mol_type = other DNA
tggtcgtattcgttatgacctgttaggtaaagcggttcaggcggcaggtgttgatggtgggatgagcagaaacac

SEQ ID NO: 177581 - DNA, 75 bp, synthetic construct
  source 1..75: mol_type = other DNA
tcagccgcgaaaacctttcctactggctggggtgggaataatggaacaggtattaaaacctttgatgtttatgct

SEQ ID NO: 177582 - DNA, 75 bp, synthetic construct
  source 1..75: mol_type = other DNA
tgcctctgcttatcgtttccccgaagctgttgcttcttgcgctggttcagaaaaagttgtaggtggaggcggtca

SEQ ID NO: 177583 - DNA, 75 bp, synthetic construct
  source 1..75: mol_type = other DNA
ccgctgagatgatgctgcgccatatgggttggacggaagcggctgacctgattgttaaaggtatggaaggcgcaa

SEQ ID NO: 177584 - DNA, 75 bp, synthetic construct
  source 1..75: mol_type = other DNA
ggttttttatctggaacacttattgcggaatatgatgaacgtcgttgtagtggtagtaagaacgagcactgttat

SEQ ID NO: 177585 - DNA, 75 bp, synthetic construct
  source 1..75: mol_type = other DNA
cccttattgcagaatataatgaggagcgttgtagtggtggtaggaatacacattgttatagtaatttcagaaggt

SEQ ID NO: 177586 - DNA, 75 bp, synthetic construct
  source 1..75: mol_type = other DNA
tcagccggtaattgggtgtgggctaaaaatggctatggtgacgttattggaatgggtggcgatgcttatggtgga

SEQ ID NO: 177587 - DNA, 75 bp, synthetic construct
  source 1..75: mol_type = other DNA
aaacttcttctaattttaataatattactatggctggacaattaacttatagggtaggatataatagtgctttat

SEQ ID NO: 177588 - DNA, 75 bp, synthetic construct
  source 1..75: mol_type = other DNA
atgctgttggcacattctgtgcctgagtccgggtcagcctttaacctgatggttccgcggtctcattgtccctgc

SEQ ID NO: 177589 - DNA, 75 bp, synthetic construct
  source 1..75: mol_type = other DNA
ataggggttgcagctgatagcaataaaaagatggctgctgctttgaatgcggatggcacagtatacgcaaaaaaa

SEQ ID NO: 177590 - DNA, 75 bp, synthetic construct
  source 1..75: mol_type = other DNA
cagacctaatggtgataacagttggtatgcaggatgtgatacaactaaaaatattacagctactataactgttta

SEQ ID NO: 177591 - DNA, 75 bp, synthetic construct
  source 1..75: mol_type = other DNA
cgctggttcagaaaaagttgtaggtggaggcggtcaatgtaatacagcagaaggatatgtttggttaacggtctc

SEQ ID NO: 177592 - DNA, 75 bp, synthetic construct
  source 1..75: mol_type = other DNA
ctgatatttatcgggatcacggtcatgggtaaaatccgcgccccggctaaagctgaagcggataaagacgagggg

SEQ ID NO: 177593 - DNA, 75 bp, synthetic construct
  source 1..75: mol_type = other DNA
tctacgatcagcagggtgatgcggtgagcatttttgttgcccgcgacctcgatttcagcggcgtttatacgctcg

SEQ ID NO: 177594 - DNA, 75 bp, synthetic construct
  source 1..75: mol_type = other DNA
tatgcagcgtcgtctgggcggcgagctggcccagactaatcaggcggctacaagcaatagtcccggagtgcagcc

SEQ ID NO: 177595 - DNA, 75 bp, synthetic construct
  source 1..75: mol_type = other DNA
atggaagataaggacaacaaaggatgggttaaaggttgggttgtggtaagaagctcgccctggcatcttgttggg

SEQ ID NO: 177596 - DNA, 75 bp, synthetic construct
  source 1..75: mol_type = other DNA
cctgcccgcctgaaaggcagcagagcgggcgtaatgcaaaatatgagcatgaccattgctaaagggacgatgata

SEQ ID NO: 177597 - DNA, 75 bp, synthetic construct
  source 1..75: mol_type = other DNA
cacgattaacatcccgccaacactctacgaccagcagggcgacgcaatcagtatctacgtcgttcgtgacctcga

SEQ ID NO: 177598 - DNA, 75 bp, synthetic construct
  source 1..75: mol_type = other DNA
acacagccatcaccggcggagcagcaactcagggcgctgctggcaccactaccggatgtgctttcagcagaccag

SEQ ID NO: 177599 - DNA, 75 bp, synthetic construct
  source 1..75: mol_type = other DNA
tggataacactttccggtcagcagataacgcgactgacacaattaccccctgcatacaacctgcaacgcagtgcg

SEQ ID NO: 177600 - DNA, 75 bp, synthetic construct
  source 1..75: mol_type = other DNA
tcatgcgtcagagtggataaccctttccggtcaacagataacgcgactgacagaattacccctggcatacaacct

SEQ ID NO: 177601 - DNA, 75 bp, synthetic construct
  source 1..75: mol_type = other DNA
tgatgctccggacgtacaggaacatcagcccctgccgcactcccgtctggtgtatgttgtttctgaaacaaaagc

SEQ ID NO: 177602 - DNA, 75 bp, synthetic construct
  source 1..75: mol_type = other DNA
aactcagggcgctgctgacaccctcaccggatgtgctttcagcagaccagatgatgcagctcagcagaacactgt

SEQ ID NO: 177603 - DNA, 75 bp, synthetic construct
  source 1..75: mol_type = other DNA
tggcagtgaacagcagcaaaaacaggctgaaatggcactgaatcagctgattaatcgttatcagatggaacacac

SEQ ID NO: 177604 - DNA, 75 bp, synthetic construct
  source 1..75: mol_type = other DNA
tggtcaccgccgtacttacatcggttctatgccgggtaaactgatccagaaaatggcgaaagtgggcgtgaaaaa

SEQ ID NO: 177605 - DNA, 75 bp, synthetic construct
  source 1..75: mol_type = other DNA
ttctcgccgcccggtaacaattatgaacgcttgcagggtaatctcgctggatggtcaagcattcgggtgagcatt

SEQ ID NO: 177606 - DNA, 75 bp, synthetic construct
  source 1..75: mol_type = other DNA
agaacggtgagcttgcaacgttctacgtgcatgggacacggagcgcacagataccggccatcattgaaaagccgc

SEQ ID NO: 177607 - DNA, 75 bp, synthetic construct
  source 1..75: mol_type = other DNA
agaatggggatcttgccctgttctatttcaacggaacgcgtagcgcacagataccggccatcattgaaaaaccgc

SEQ ID NO: 177608 - DNA, 75 bp, synthetic construct
  source 1..75: mol_type = other DNA
ggcaatattgcgctgctggcgtgtgcaggtccgatgggcattggcgctatcgattacgccattaacggcggcata

SEQ ID NO: 177609 - DNA, 75 bp, synthetic construct
  source 1..75: mol_type = other DNA
tgaacttctttgccgggccgacggataaaaacttcaaagtgccgtttaatttctacaacgtccattacaacagca

SEQ ID NO: 177610 - DNA, 75 bp, synthetic construct
  source 1..75: mol_type = other DNA
tatcggtgggctggatgcggtgccagataccgtgctcaatctgccggatatccccggcggtaaaaaactcattta

SEQ ID NO: 177611 - DNA, 75 bp, synthetic construct
  source 1..75: mol_type = other DNA
gggtaggtaaaacgtctctgggacagtccattgcgaaagcgaccggacgtaaatatgtccgtatggcgttgggcg

SEQ ID NO: 177612 - DNA, 75 bp, synthetic construct
  source 1..75: mol_type = other DNA
atcctctgcctggtagggccgccgggggtaggtaaaacctctcttggtcagtccatcgccaaagctaccggacgt

SEQ ID NO: 177613 - DNA, 75 bp, synthetic construct
  source 1..75: mol_type = other DNA
acgcggcgaaaatgccgaaagaggcaaaagagaaagcggaagcagagttgcagaagctgaaaatgatgtctccga

SEQ ID NO: 177614 - DNA, 75 bp, synthetic construct
  source 1..75: mol_type = other DNA
ttcgtcccaccgggtaataattatgaacgtttgcgggggaatctgaatgggtggtccagcattcgggttagtctg

SEQ ID NO: 177615 - DNA, 75 bp, synthetic construct
  source 1..75: mol_type = other DNA
gaccggtaacccggttcgtgccgatgtggcgatgactggcgagattactctgcgtggtcaggtgttgccaatcgg

SEQ ID NO: 177616 - DNA, 75 bp, synthetic construct
  source 1..75: mol_type = other DNA
agaaatccttgataccgaccattatggtctggagcgcgtgaaagatcgcatccttgagtatcttgcggttcaaag

SEQ ID NO: 177617 - DNA, 75 bp, synthetic construct
  source 1..75: mol_type = other DNA
tgttcggaagaaggcaccaaacgtctggttcgtgcagcgatcgaatacgcaattgctaacgatcgtgactctgtg

SEQ ID NO: 177618 - DNA, 75 bp, synthetic construct
  source 1..75: mol_type = other DNA
tatctggtctttgccaacggctatcttgagaagcgcatgagcgtcaccggccagctattaaaactggaaacctcc

SEQ ID NO: 177619 - DNA, 75 bp, synthetic construct
  source 1..75: mol_type = other DNA
cggtaaacccgacggcatcaagatcgtgcctttgagtgaggtcgcgacgaaagatgatttctttaacattaaaaa

SEQ ID NO: 177620 - DNA, 75 bp, synthetic construct
  source 1..75: mol_type = other DNA
ggacggccagatcgaaccggaagaacaaaaggtgctggaagaggtcgggcgccgtctggggctgcgtgttgagga

SEQ ID NO: 177621 - DNA, 75 bp, synthetic construct
  source 1..75: mol_type = other DNA
aagtggcaacgaaggacgattttttaatatcaaaaaagccagtgccgcagacctgctggatgcgcaccgcatccc

SEQ ID NO: 177622 - DNA, 75 bp, synthetic construct
  source 1..75: mol_type = other DNA
tgtacgtcactgatgccgtgcaggatcgcaacgatatcgaaatgcttcgcgaaaacatggttaagtcgaaaggcc

SEQ ID NO: 177623 - DNA, 75 bp, synthetic construct
  source 1..75: mol_type = other DNA
gggcaatgctgtcgatttcatcctcaccgacccgccatatctcgtcggtttccgtgaccgtcaggggcgtaccat

SEQ ID NO: 177624 - DNA, 75 bp, synthetic construct
  source 1..75: mol_type = other DNA
cccctgcaccgccatacccgcttcagacgtcaggagctggcacaggatgagattaacccggacgtcctggcgatg

SEQ ID NO: 177625 - DNA, 75 bp, synthetic construct
  source 1..75: mol_type = other DNA
tgaagagtgcctgcgggagaataaacccctgcaccgtcatacccgcttcagacgtcaggagctggcacaggatga

SEQ ID NO: 177626 - DNA, 75 bp, synthetic construct
  source 1..75: mol_type = other DNA
gtgagcagaagcgggtacgtacccccgccatgaaagtcagcgaatggggccacctgctccgcgcgcttgaaattg

SEQ ID NO: 177627 - DNA, 75 bp, synthetic construct
  source 1..75: mol_type = other DNA
tcctgctggctaccacgtaccaagcaagcgccgaaccttgcatggtgatctttgaacatggtcagttaattacgt

SEQ ID NO: 177628 - DNA, 75 bp, synthetic construct
  source 1..75: mol_type = other DNA
aggctggacggcactgagcgagattatcgcgcgccgggacccgcactgccgcggcgtggtgatcctcggtctgga

SEQ ID NO: 177629 - DNA, 75 bp, synthetic construct
  source 1..75: mol_type = other DNA
cattgattaccgcccggtgctgtgggggctgacctccttaggcgacggcgaaactcgctttatcgtggccgatca

SEQ ID NO: 177630 - DNA, 75 bp, synthetic construct
  source 1..75: mol_type = other DNA
gatggtcagcttctacggctggaaccgtgtcgatcgctttgtggccgcctggaaaaatgcgggattcagcgtggt

SEQ ID NO: 177631 - DNA, 75 bp, synthetic construct
  source 1..75: mol_type = other DNA
tggccagttaatcaagctgctggcctcaccggccaaatacacccggcgcggggtcgacgattctatattctggtt

SEQ ID NO: 177632 - DNA, 75 bp, synthetic construct
  source 1..75: mol_type = other DNA
attatctggtgttcggtaacgcctttcttgagcagcgccacagcgtcaccggccagttaatcaaactgctggcct

SEQ ID NO: 177633 - DNA, 75 bp, synthetic construct
  source 1..75: mol_type = other DNA
tttcattatgaaggagggagtgaaaatatatttcaaataagaacaaatcaagaaaatataaacattaatggagat

SEQ ID NO: 177634 - DNA, 75 bp, synthetic construct
  source 1..75: mol_type = other DNA
tgacagacccgccatatctcgtcggtttccgtgaccgttccgggcgcaccatcgccggcgataaaaccgatgaat

SEQ ID NO: 177635 - DNA, 75 bp, synthetic construct
  source 1..75: mol_type = other DNA
tgaccgacccgccatatctcgtcggtttacgtgaccgttccgggcgcaccatcgccggcgataaaaccgatgaat

SEQ ID NO: 177636 - DNA, 75 bp, synthetic construct
  source 1..75: mol_type = other DNA
aaggcagcatctttcatctgatggaacccgatatcaaccaggagatctacggcctgcccggctatctttctgcca

SEQ ID NO: 177637 - DNA, 75 bp, synthetic construct
  source 1..75: mol_type = other DNA
tgctcgccaccgcaggctgcaactacatcatggggatgccgctgggtgatgacatcatgctcaactaccagacca

SEQ ID NO: 177638 - DNA, 75 bp, synthetic construct
  source 1..75: mol_type = other DNA
gcggtagcgaagatttgctccaacgcggacctgatctacggcgcgaagaaaatgccggtaatcaaaaaggccaat

SEQ ID NO: 177639 - DNA, 75 bp, synthetic construct
  source 1..75: mol_type = other DNA
tggcgatgctcgatgaagcacgcgcagtgggcgcggagttcaaccgtatcgccggggaaaactgcctctacttcg

SEQ ID NO: 177640 - DNA, 75 bp, synthetic construct
  source 1..75: mol_type = other DNA
aacgaaaacctgatgatcctgaaccgccccggttttcctggagagtgttttatctgtgaactcaggctgccagat

SEQ ID NO: 177641 - DNA, 75 bp, synthetic construct
  source 1..75: mol_type = other DNA
cgtcgcggcgcgcctggcggactgattttccagagtatctgtggcagcgaaaaagggctgaaagagtttggcgtg

SEQ ID NO: 177642 - DNA, 75 bp, synthetic construct
  source 1..75: mol_type = other DNA
taacccggtgactgacgacgtggaaaacttaagccgcgtgttggacaccatctatggcgtgatcgacaaattcaa

SEQ ID NO: 177643 - DNA, 75 bp, synthetic construct
  source 1..75: mol_type = other DNA
agagcatcgcgaaagccatggataagctgattgcgccgctggtctcggccctgagcaaggggcaaagccctgatg

SEQ ID NO: 177644 - DNA, 75 bp, synthetic construct
  source 1..75: mol_type = other DNA
attctcggcggcacgctgacgtcacaggcggacggcaagtcctcaacaaatgcccttggtaatgtgcataacgaa

SEQ ID NO: 177645 - DNA, 75 bp, synthetic construct
  source 1..75: mol_type = other DNA
gctgattgcgccgctggtctcggctctgagcaaggggcaaagccctgatgaggcactggatatcattgctgcgag

SEQ ID NO: 177646 - DNA, 75 bp, synthetic construct
  source 1..75: mol_type = other DNA
tgcaggtgcagatatatttgaacgggtgaagcctgaatgtcgctacaatccggaacttgctgccagcgatgaagt

SEQ ID NO: 177647 - DNA, 75 bp, synthetic construct
  source 1..75: mol_type = other DNA
gtgattacgaatggtatcgtatgcggatggggacaggtccacagggagcaataaagcgcgaactgttttctgata

SEQ ID NO: 177648 - DNA, 75 bp, synthetic construct
  source 1..75: mol_type = other DNA
cgggatgatgtgcaggatgatgaactcaaaccagacccggaaatgaaaggtgaggtcccgcaccgtaaccgcttc

SEQ ID NO: 177649 - DNA, 75 bp, synthetic construct
  source 1..75: mol_type = other DNA
ctggcagtctctgctggcacatctggacaccttaccccgcccggtccgcgaacgtccgcagctttctgaaccgct

SEQ ID NO: 177650 - DNA, 75 bp, synthetic construct
  source 1..75: mol_type = other DNA
cagcaggccgtgcatcataagcctgcccgactgcggcttggctgggatgaggaggacgggattgtactggaattt

SEQ ID NO: 177651 - DNA, 75 bp, synthetic construct
  source 1..75: mol_type = other DNA
tcatgctgcctgccgtcgtcgcaaggcacatatccgcgtgcagttccgggacccgcaagtgcgtaaactgcatta

SEQ ID NO: 177652 - DNA, 75 bp, synthetic construct
  source 1..75: mol_type = other DNA
actgatggcgcgttttcagacggtgatttaccgcccgctgggacaggaagcgatgcgcaccattgtggaaatgaa

SEQ ID NO: 177653 - DNA, 75 bp, synthetic construct
  source 1..75: mol_type = other DNA
cagcaggccgtgcaccataagccaacccaactacagctcggctgggatgaggaagacgggattgtactggagttc

SEQ ID NO: 177654 - DNA, 75 bp, synthetic construct
  source 1..75: mol_type = other DNA
gacgagccggatgatgacaccgcctgcctgatgctcagggggctgaaagcccgctatgcgcagcaccacggcgta

SEQ ID NO: 177655 - DNA, 75 bp, synthetic construct
  source 1..75: mol_type = other DNA
caacagaaaagcatatccggagggcatggcgcatcttatgctccagttcaggataatgagtggacgccaccatca

SEQ ID NO: 177656 - DNA, 75 bp, synthetic construct
  source 1..75: mol_type = other DNA
cgtatccccgccatgaaagtcagcgaatgggggcacctgctccgcgcgcttgaaattgaacgggtctgccactga

SEQ ID NO: 177657 - DNA, 75 bp, synthetic construct
  source 1..75: mol_type = other DNA
ctgcttgaacagtatcaccgtgccggacagcaacgactggccgccgtgcaacgggccatgcagcagggggccgcg

SEQ ID NO: 177658 - DNA, 75 bp, synthetic construct
  source 1..75: mol_type = other DNA
cgtgatcgccagaacgcgtggacacgcggaaaaaaacaaacttttcgcgagtatgtcgcgcagacagcggtcgct

SEQ ID NO: 177659 - DNA, 75 bp, synthetic construct
  source 1..75: mol_type = other DNA
gtgagcagaagcgggtacgtatccccgctatgaaagtcagcgaatggggccacctgctccgcgcgcttgaaattg

SEQ ID NO: 177660 - DNA, 75 bp, synthetic construct
  source 1..75: mol_type = other DNA
gatggatttgataaacaacagacaccagtacgtgcagacagtgtgtggccattaatgacgctggattatatgcag

SEQ ID NO: 177661 - DNA, 75 bp, synthetic construct
  source 1..75: mol_type = other DNA
ttctaccatcacacggaccgaaatgaactggcagagaagcttaatttaattgcgccagttctgttcagccgcaac

SEQ ID NO: 177662 - DNA, 75 bp, synthetic construct
  source 1..75: mol_type = other DNA
gtccggcatgttcagcagcctgatacagatgatggccagcctcaacggctggcaggatatcccgccacgccgtct

SEQ ID NO: 177663 - DNA, 75 bp, synthetic construct
  source 1..75: mol_type = other DNA
caatgtggggatgaaggatatcccggcgtcgtgggtgcgcaaaaaaaccggtatccccaccccgaaagacggcga

SEQ ID NO: 177664 - DNA, 75 bp, synthetic construct
  source 1..75: mol_type = other DNA
gaacactggcgtaaacccgatttacgttacggcgaacggttgcgggaaattcatgctgcctgccgtcgtcgcaag

SEQ ID NO: 177665 - DNA, 75 bp, synthetic construct
  source 1..75: mol_type = other DNA
aacgacaaacaatttaaccaggtctttgctgaaatggttgcctggcataatgtgacaggccgtactggtcacgaa

SEQ ID NO: 177666 - DNA, 75 bp, synthetic construct
  source 1..75: mol_type = other DNA
atcaaacgcgaactgttttctgacaaagaaagtctgtggggatacagcatcagccattgtagccctcagattgaa

SEQ ID NO: 177667 - DNA, 75 bp, synthetic construct
  source 1..75: mol_type = other DNA
ccggcggaccggaggcgttcatgtcgatggtggaatgggcggagcgtaccacctcaaaagtgattctgggcagta

SEQ ID NO: 177668 - DNA, 75 bp, synthetic construct
  source 1..75: mol_type = other DNA
cgcggggaacactctaaacataacctattattaattaatgattttttaagccagtcacaatctaccaactttata

SEQ ID NO: 177669 - DNA, 75 bp, synthetic construct
  source 1..75: mol_type = other DNA
gctggcgcggggaacacaattaccgggtgtctcgtgctcatatgcagtccggtttatccccgctggcgcggggaa

SEQ ID NO: 177670 - DNA, 75 bp, synthetic construct
  source 1..75: mol_type = other DNA
cgcggggaacaccagattatcttctttttcaatccagccaccgacggtttatccccgctggcgcggggaacacga

SEQ ID NO: 177671 - DNA, 75 bp, synthetic construct
  source 1..75: mol_type = other DNA
cggggaacacaacgtcaggttgtcgccgctctgcgtggtcgccggtttatccccgctggcgcggggaacactgca

SEQ ID NO: 177672 - DNA, 75 bp, synthetic construct
  source 1..75: mol_type = other DNA
accgtacagactgccggatattatttttttgcggtttatccccgctggtgcggggaacacaacgtcaggttgtcg

SEQ ID NO: 177673 - DNA, 75 bp, synthetic construct
  source 1..75: mol_type = other DNA
gggaactcgacagaacggcctcagtagtctcgtcaggctccggtttatccccgctggcgcggggaacacctgttt

SEQ ID NO: 177674 - DNA, 75 bp, synthetic construct
  source 1..75: mol_type = other DNA
gcggcggtttatccccgctggcgcggggaacacatagccacggcgatcggcgtcgaaccgtggatcggtttatcc

SEQ ID NO: 177675 - DNA, 75 bp, synthetic construct
  source 1..75: mol_type = other DNA
gcggcgtgtaatttacgcgccaacggtttgaaccattatctgaccgataaaccgacggtgatggcagcgatgaag

SEQ ID NO: 177676 - DNA, 75 bp, synthetic construct
  source 1..75: mol_type = other DNA
gctgcgtgtaatctgcgtgccaacgggttgaatcattatctggccgataaatcggcggtgatgacggcgatgaaa

SEQ ID NO: 177677 - DNA, 75 bp, synthetic construct
  source 1..75: mol_type = other DNA
cggggaacacaaagtgacgcgatagacgcgctgattgacgctcggtttatccccgctggcgcggggaacactgaa

SEQ ID NO: 177678 - DNA, 75 bp, synthetic construct
  source 1..75: mol_type = other DNA
cctgatcgagttttgagaattttgtcgcggtttatccccgctggcgcggggaacacactaagcatacatatctgt

SEQ ID NO: 177679 - DNA, 75 bp, synthetic construct
  source 1..75: mol_type = other DNA
gttctaccgcaggggcgggggaactccaagtgatatccatcatcgcatccagtgcgcccggtttatccccgctgg

SEQ ID NO: 177680 - DNA, 75 bp, synthetic construct
  source 1..75: mol_type = other DNA
gttctaccgcagaggcgggggaactccaagtgatatccatcatcgcatccagtgcgcccggtttatccccgctga

SEQ ID NO: 177681 - DNA, 75 bp, synthetic construct
  source 1..75: mol_type = other DNA
ttggcaccgtcaaactccggtactgtcggtttatccccgctggcgcggggaacactatagagatcgtttttggaa

SEQ ID NO: 177682 - DNA, 75 bp, synthetic construct
  source 1..75: mol_type = other DNA
aaagaaactattttgcgtttcgttcaggtcggtttatccccgctagcacggggaacacttttacagtgtcaacaa

SEQ ID NO: 177683 - DNA, 75 bp, synthetic construct
  source 1..75: mol_type = other DNA
cggtttatccccgctggcgcggggaacacagcaccactgaaaatctgtacgaaagcaatagcggtttatccccgc

SEQ ID NO: 177684 - DNA, 75 bp, synthetic construct
  source 1..75: mol_type = other DNA
cttcgagcgtctgatggaaggcgctaaactgctgaaatgttcagagtttggtgatgcgatcatcaagaacatgta

SEQ ID NO: 177685 - DNA, 75 bp, synthetic construct
  source 1..75: mol_type = other DNA
aatccgattatcccttacatcgaaggtgatggaatcggtgtagatgtaaccccagccatgctgaaagtggtcgac

SEQ ID NO: 177686 - DNA, 75 bp, synthetic construct
  source 1..75: mol_type = other DNA
aatacggtctgaccatgccgggtaaacaccgccgcaccccgccgtatatgttcaccgaggaggtcgcgctcgcgg

SEQ ID NO: 177687 - DNA, 75 bp, synthetic construct
  source 1..75: mol_type = other DNA
cggggaacacgctccgccacggatctgagctttccacgcctcaggtttatccccgctggcgcggggaacacgccg

SEQ ID NO: 177688 - DNA, 75 bp, synthetic construct
  source 1..75: mol_type = other DNA
gtttatccccgctggcgcggggaacacggtcgctggtcaaattcccaatctgagcagtccggtttatccccgctg

SEQ ID NO: 177689 - DNA, 75 bp, synthetic construct
  source 1..75: mol_type = other DNA
ggggaacacgtggcgtccgtcgtcgtttaaagcgtcaatgccggtttatccccgctggcgcggggaacactctaa

SEQ ID NO: 177690 - DNA, 75 bp, synthetic construct
  source 1..75: mol_type = other DNA
cttcggtaaaagcgtgatcaagaatcggtttatccccgctggcgcggggaacacttaccgaagtaatggtcgaaa

SEQ ID NO: 177691 - DNA, 75 bp, synthetic construct
  source 1..75: mol_type = other DNA
cgctggcgcggggaacacaccattacttcggtaaaagcgtgatcaagaatcggtttatccccgctggcgcgggga

SEQ ID NO: 177692 - DNA, 75 bp, synthetic construct
  source 1..75: mol_type = other DNA
gggaactccgcgcaccggtactgaggcacaacaacgagagcggtttatccccgctggcgcggggaactcccgtgc

SEQ ID NO: 177693 - DNA, 75 bp, synthetic construct
  source 1..75: mol_type = other DNA
tatctggaaaaacaataagaagctggctgaagggaagtatcgtcctttgcgagcagttgatgtcagtcagtacaa

SEQ ID NO: 177694 - DNA, 75 bp, synthetic construct
  source 1..75: mol_type = other DNA
cttcttgcacgtaaggataattttgagccgcttcatcttattaccgaaaaattcagtacattgcgcaaatattct

SEQ ID NO: 177695 - DNA, 75 bp, synthetic construct
  source 1..75: mol_type = other DNA
gctgggattcgcttttgccccaaggatccgggatctgcatgacaaacgtttgtttattcaaggtaaagctgataa

SEQ ID NO: 177696 - DNA, 75 bp, synthetic construct
  source 1..75: mol_type = other DNA
ccgctggataactgcgtcccggtgcaggtttcaccgctggcagagctggtttacagcatgctaccgcgccctaaa

SEQ ID NO: 177697 - DNA, 75 bp, synthetic construct
  source 1..75: mol_type = other DNA
tgccccgcgcatgttgtctgctttacagttagtcgccaccccggcagcgcaacctctggctgatgcgctggttgt

SEQ ID NO: 177698 - DNA, 75 bp, synthetic construct
  source 1..75: mol_type = other DNA
acgccatctcgccagaaaaaataattttgacccgctgcatattattactgagaaatacagcacattacggaaata

SEQ ID NO: 177699 - DNA, 75 bp, synthetic construct
  source 1..75: mol_type = other DNA
cactgaaggactagtagaaagtacagaatcattcttatcagtaaagactgatgacctatctacttacaatatcgc

SEQ ID NO: 177700 - DNA, 75 bp, synthetic construct
  source 1..75: mol_type = other DNA
tgtctcaccgtaaaatttactcataaactgatgggtttgactgaaagtggattcaatactcatcttcaggaacgt

SEQ ID NO: 177701 - DNA, 75 bp, synthetic construct
  source 1..75: mol_type = other DNA
gaagcattcacttttggtgagccgacgccagtactcgaccgccgcgatattctcgattatgtcgagtgtatcgac

SEQ ID NO: 177702 - DNA, 75 bp, synthetic construct
  source 1..75: mol_type = other DNA
gttgaacagatattaccgtgggaagattttgccgccagcttggaggaaacccggctccttgcacgtaaggataat

SEQ ID NO: 177703 - DNA, 75 bp, synthetic construct
  source 1..75: mol_type = other DNA
cgcaccttgatatcacgcataaatctgcgcttgatgccctgttggtgacaaatgaaaaacaaatatcccgtttga

SEQ ID NO: 177704 - DNA, 75 bp, synthetic construct
  source 1..75: mol_type = other DNA
aagctgaaaggatcgctgggtgagctcaagcagctttctggcttaagtggcgtggtaatgggctatacaccgaat

SEQ ID NO: 177705 - DNA, 75 bp, synthetic construct
  source 1..75: mol_type = other DNA
attctggggagacgggacaacgtcatcatcagatggacagaatttcagaacaggcagctcaggccgctacgcagg

SEQ ID NO: 177706 - DNA, 75 bp, synthetic construct
  source 1..75: mol_type = other DNA
acaggggacagtcactgcatcgctgatgatgaaaaagttagccagttaccccaaacagaatggactggccaaagc

SEQ ID NO: 177707 - DNA, 75 bp, synthetic construct
  source 1..75: mol_type = other DNA
agttttatacgaacatttctgatcagtacagtccgttttataccaaagtaatcagccgtgttcgtgactccaccc

SEQ ID NO: 177708 - DNA, 75 bp, synthetic construct
  source 1..75: mol_type = other DNA
ctcaagcgcgagcaggccctgcccctggcgatcaacccgaacagcgaccagtacctggaagagcgtttgcagctg

SEQ ID NO: 177709 - DNA, 75 bp, synthetic construct
  source 1..75: mol_type = other DNA
tgggagcatctggctgaactttatcgctacctgaaattatctccattcagccgaacactgcaaaaagactgcatt

SEQ ID NO: 177710 - DNA, 75 bp, synthetic construct
  source 1..75: mol_type = other DNA
ttgccggtgatttgcccgatgtagatatctcagataaaggcgtaaaaatcactccactggagaacagcgttcctt

SEQ ID NO: 177711 - DNA, 75 bp, synthetic construct
  source 1..75: mol_type = other DNA
cagagttaccgggccagtgggctgacgttactgacagcggcaatcgcgttatggaacacggtatacatagaaaga

SEQ ID NO: 177712 - DNA, 75 bp, synthetic construct
  source 1..75: mol_type = other DNA
tgccggtcaggtcaatcttaaatatggtcaggagccgggcgtgcagatttatacgcatatctcagaccaatacag

SEQ ID NO: 177713 - DNA, 75 bp, synthetic construct
  source 1..75: mol_type = other DNA
ctttatgcaccggctcggggaaatcagagatcggggactggaaaaccagagttaccgggccagtgggctgacgtt

SEQ ID NO: 177714 - DNA, 75 bp, synthetic construct
  source 1..75: mol_type = other DNA
ggcaacctcgataaagcagggaaccgtgacggcatccctgatgctgaaaaagcttgccagctaccccaagcaaaa

SEQ ID NO: 177715 - DNA, 75 bp, synthetic construct
  source 1..75: mol_type = other DNA
tttgctgttttactctgttatttgcgggggccggggtttcctcccgataaaaatgcgtcccctcacggcgtggtt

SEQ ID NO: 177716 - DNA, 75 bp, synthetic construct
  source 1..75: mol_type = other DNA
gtcattcaggaagcgcgggccacactgactgatgaggttatcgaactgcacgaacgtattctgggcactctgttc

SEQ ID NO: 177717 - DNA, 75 bp, synthetic construct
  source 1..75: mol_type = other DNA
actgacagcagcgatcacgttgtggaacacggtatatatagaaagagctattgagtcactaaaacgaaagggtat

SEQ ID NO: 177718 - DNA, 75 bp, synthetic construct
  source 1..75: mol_type = other DNA
atggctggcttagtgaacagcagtaacgtgctgcaacagtggcatcacttgtttgaggctgaaggggcaaaacgc

SEQ ID NO: 177719 - DNA, 75 bp, synthetic construct
  source 1..75: mol_type = other DNA
cgaacgcccacttgcagcatatcaagctcgcgtttgaaaatcctgtaagccaccactttgcacataacgatttgc

SEQ ID NO: 177720 - DNA, 75 bp, synthetic construct
  source 1..75: mol_type = other DNA
cgaacgcccacttgcagcatatcaagctggcgtttgaaaacccggtcagtcaccactttgcccataacgatttgt

SEQ ID NO: 177721 - DNA, 75 bp, synthetic construct
  source 1..75: mol_type = other DNA
acccgacgctattcaggcggaagtgtttctgcatttgacggaaagcctggcgcaaagcgtgacgcatatcgccgt

SEQ ID NO: 177722 - DNA, 75 bp, synthetic construct
  source 1..75: mol_type = other DNA
caatgacgaacagatgttctatctgcgttcgcgcgggatcaatcagcaggatgccctgcagatgattatctacgc

SEQ ID NO: 177723 - DNA, 75 bp, synthetic construct
  source 1..75: mol_type = other DNA
ggtccgttgaaacatgccgggctgtcactttctattggtctggcggaaggtgccgaagcaacggtgatcgaacat

SEQ ID NO: 177724 - DNA, 75 bp, synthetic construct
  source 1..75: mol_type = other DNA
agagaatgtctggaatagcgagggtatcttcgcgaagattaagtcaatgggctatacgggcggacgttccatgct

SEQ ID NO: 177725 - DNA, 75 bp, synthetic construct
  source 1..75: mol_type = other DNA
aaaatggttaagctgaaaccgtttatggattacatcgacatgcgcctggcagagaatgtctggaatagcgagggt

SEQ ID NO: 177726 - DNA, 75 bp, synthetic construct
  source 1..75: mol_type = other DNA
gttcgcttcgaaactcagcctggataccagctccagcacgactggggcgaagttgaggtggaggttgccgggcaa

SEQ ID NO: 177727 - DNA, 75 bp, synthetic construct
  source 1..75: mol_type = other DNA
agagatatccccacagcagcgagatgccttagcgttaacgttagacgctgtgcggctggtatttgtcgatggacg

SEQ ID NO: 177728 - DNA, 75 bp, synthetic construct
  source 1..75: mol_type = other DNA
gttaactttgcggttaatacgctggggttctcccgccgcttccatgtcttcgcagcaccaaaacaggatgctgag

SEQ ID NO: 177729 - DNA, 75 bp, synthetic construct
  source 1..75: mol_type = other DNA
aaaatgcgtccgtcaaaaagaacagttcgcttcgaaactcagcctggataccagctccagcacgactggggcgaa

SEQ ID NO: 177730 - DNA, 75 bp, synthetic construct
  source 1..75: mol_type = other DNA
tgcgactggtgtttgtcgatggacgttacatgccagcacttagcgatgcaactgaaggcagcggatatgacgtga

SEQ ID NO: 177731 - DNA, 75 bp, synthetic construct
  source 1..75: mol_type = other DNA
gaaaaaatatcgggtgttgctgaaccgtgttgatacatcaactgcacctgatattgagtggcctacgaaccctgt

SEQ ID NO: 177732 - DNA, 75 bp, synthetic construct
  source 1..75: mol_type = other DNA
gatattccggctggcttcgtggccgttttcaacagtgatgaggcatcgtggaatctcgttgaagaccatcgggga

SEQ ID NO: 177733 - DNA, 75 bp, synthetic construct
  source 1..75: mol_type = other DNA
cactcatgtcaatcaacaactggagcaatggatagccgatgtggctgacaaacgggaacttcgccagttcaaaga

SEQ ID NO: 177734 - DNA, 75 bp, synthetic construct
  source 1..75: mol_type = other DNA
acgcgctgcaacagtggcatcacttgtttgaagctgacggagcgaaacgctctccgcaagcacagcagcatttac

SEQ ID NO: 177735 - DNA, 75 bp, synthetic construct
  source 1..75: mol_type = other DNA
cacagcccattaccgccatcatctggatctggcggaaggcgcggaagcgacggtgattgaacattttgtcagcct

SEQ ID NO: 177736 - DNA, 75 bp, synthetic construct
  source 1..75: mol_type = other DNA
gttaccggaaaatgttacctggttgtcgccagagggggaatttaaaaaatgggatggcgaaaaatggataaaaga

SEQ ID NO: 177737 - DNA, 75 bp, synthetic construct
  source 1..75: mol_type = other DNA
ggatacggacttcgataccagttacttcgacatccgccatgtgtcctgggacagctatatcgaggttggtagtaa

SEQ ID NO: 177738 - DNA, 75 bp, synthetic construct
  source 1..75: mol_type = other DNA
ctacagtaatgagcaacaagtggcatcacaccggctatgttcagcatcatctggctggcaaacggtcccaaaaca

SEQ ID NO: 177739 - DNA, 75 bp, synthetic construct
  source 1..75: mol_type = other DNA
gtggcgaaccgcagatcaattttgatgatattgaacttgatgacactgacgatcgccgtccgactcgtgcgcaaa

SEQ ID NO: 177740 - DNA, 75 bp, synthetic construct
  source 1..75: mol_type = other DNA
ctgcctttacggggatttccaacgatttggccgccgcatcgatcttcgtgtgaaaacgggggcagaagccatccg

SEQ ID NO: 177741 - DNA, 75 bp, synthetic construct
  source 1..75: mol_type = other DNA
ctgcctttacggggatttgcaacgatttggccgccgcatcgagcttcgtgtgaaaacgggggcagaagctatccg

SEQ ID NO: 177742 - DNA, 75 bp, synthetic construct
  source 1..75: mol_type = other DNA
cttaatgagccgctgaaaaatggtgccgtgatccacatcgttccgcgtcttgcgggagcaaaaagtggcggtgtg

SEQ ID NO: 177743 - DNA, 75 bp, synthetic construct
  source 1..75: mol_type = other DNA
catcggtatcggttctgcgctaaaagccccctcgacctcttccagcgatcaaaccgcgtctggcgagaagagtat

SEQ ID NO: 177744 - DNA, 75 bp, synthetic construct
  source 1..75: mol_type = other DNA
tgccactcaggttggttgctctgagcgaactgtcagacggtacctgaaatacccggaacctccggccagaaaaac

SEQ ID NO: 177745 - DNA, 75 bp, synthetic construct
  source 1..75: mol_type = other DNA
atggttaagctgaaaccgtttatggattacatcgacatgcgcctggcagagaatgtctggaatagcgaggttatc

SEQ ID NO: 177746 - DNA, 75 bp, synthetic construct
  source 1..75: mol_type = other DNA
gcgttactacatccagcccaaacgaaaaatgcgtccgtcaaaaagaacagttcgcttcgaaactcagcctggata

SEQ ID NO: 177747 - DNA, 75 bp, synthetic construct
  source 1..75: mol_type = other DNA
ggtaaggttgagcggatggtgaaatacctcagggagaacttcttcgtccggtaccgcaggttcgacagcttcact

SEQ ID NO: 177748 - DNA, 75 bp, synthetic construct
  source 1..75: mol_type = other DNA
aggaacatctgcagccgttaccggatacggactttgataccagttacttcgacatccgccatgtgtcctgggaca

SEQ ID NO: 177749 - DNA, 75 bp, synthetic construct
  source 1..75: mol_type = other DNA
ggtaaggttgagcggatgatgaaatacctcaaggagaacttcttcgtccggtaccgcaggttcgacagcttcact

SEQ ID NO: 177750 - DNA, 75 bp, synthetic construct
  source 1..75: mol_type = other DNA
gggcatgccgtccacgcagggccagaacaaaaggtaaggttgagcggatggtgaaatacctcaaggagaacttct

SEQ ID NO: 177751 - DNA, 75 bp, synthetic construct
  source 1..75: mol_type = other DNA
acttctacgccagccgcaacgccagcgccgaaagagacggcgactactgcgccagtacaaacggcatctccggca

SEQ ID NO: 177752 - DNA, 75 bp, synthetic construct
  source 1..75: mol_type = other DNA
caggtaatgttggttcgttgaaatcggcaccgtccagccattacactctgcagctgagcagttcctctaactacg

SEQ ID NO: 177753 - DNA, 75 bp, synthetic construct
  source 1..75: mol_type = other DNA
actcatgttaatcaacaactggagcaatggatagccgatgtggctgacaaacgggaacttcgccagttcaaataa

SEQ ID NO: 177754 - DNA, 75 bp, synthetic construct
  source 1..75: mol_type = other DNA
atggagtacatcgatatgcggctgaccgaaaatgtctggaacgccgaagtgatattccatgaaatcagaaagatg

SEQ ID NO: 177755 - DNA, 75 bp, synthetic construct
  source 1..75: mol_type = other DNA
gcggagattaaggcaatgggttatacgggcggacgttccatgctgcgttactacatccagcccaaacgtaaaatg

SEQ ID NO: 177756 - DNA, 75 bp, synthetic construct
  source 1..75: mol_type = other DNA
tgcagaagcagaaaaactgtttcggataagggaggcggaagaaacaaaaaacagcctgatgcaggtagccagtga

SEQ ID NO: 177757 - DNA, 75 bp, synthetic construct
  source 1..75: mol_type = other DNA
gaaattgcaacggaggaagaaatctcgttgctggaagcatggaaaaagtatcgggtattgctgaaccgtgttgat

SEQ ID NO: 177758 - DNA, 75 bp, synthetic construct
  source 1..75: mol_type = other DNA
ccgcaccagccgcgaacattatcccgaagcgttccgcatgacgcagaaagatattgatgacgcgccgatggtgcc

SEQ ID NO: 177759 - DNA, 75 bp, synthetic construct
  source 1..75: mol_type = other DNA
actttgaatcttttagtgcagatgaatgccaccgataaaatcgtgggtgttatgtcaaactggaaacagcaactt

SEQ ID NO: 177760 - DNA, 75 bp, synthetic construct
  source 1..75: mol_type = other DNA
ttcttcagaaatttagccttattaaaagcaggagagatattcaggtgcacatataatacaaagaatcacggtatt

SEQ ID NO: 177761 - DNA, 75 bp, synthetic construct
  source 1..75: mol_type = other DNA
agatgaccgaaggggagttaaaacggcttgcagaacggcagctgacgaaatgggcaaagcatgttagcaacggcc

SEQ ID NO: 177762 - DNA, 75 bp, synthetic construct
  source 1..75: mol_type = other DNA
atgactgagcagcaaatccggcaggtcttccgccagtgcatggaccgctgccgggcgggtgaaacatggcctccg

SEQ ID NO: 177763 - DNA, 75 bp, synthetic construct
  source 1..75: mol_type = other DNA
aatttgagcatgtttcgcatgacgaaaaaccggcaggcaatgacagtgttgaagtgcatgaaaagattggtgtgg

SEQ ID NO: 177764 - DNA, 75 bp, synthetic construct
  source 1..75: mol_type = other DNA
tgaaaacggatttatcagcgacggaaacggcctggaagctgtgggaactcatgggggaggtttattcgaaccgct

SEQ ID NO: 177765 - DNA, 75 bp, synthetic construct
  source 1..75: mol_type = other DNA
acgggcagttcaggaaatccgggctgcacgcgaacagtgggaacgtgacaacggatttatcagcaacggaaacgg

SEQ ID NO: 177766 - DNA, 75 bp, synthetic construct
  source 1..75: mol_type = other DNA
aaaggctgccaggacggtgatgggggggacgttagaatagttctgtcgtcgagacgggtgtttgtcttgcgggaa

SEQ ID NO: 177767 - DNA, 75 bp, synthetic construct
  source 1..75: mol_type = other DNA
ccgtgccgcagagcagggatacaccccggcagaatatgtactggggttacgctatatgaacggtgaaggtgtgcc

SEQ ID NO: 177768 - DNA, 75 bp, synthetic construct
  source 1..75: mol_type = other DNA
gtgaagattggtcgtgataagcaagtgaaatggatccttgcaccctctaaaggttgggaaaaaccgctggccagc

SEQ ID NO: 177769 - DNA, 75 bp, synthetic construct
  source 1..75: mol_type = other DNA
aaagatatggcgctggaagattttcatcgtagcgcgctggcgattcagagctggttaccgcgttttattgaattt

SEQ ID NO: 177770 - DNA, 75 bp, synthetic construct
  source 1..75: mol_type = other DNA
gccagaactccccgtacacagacaacggataacggcaaacagaacacctatttttcctcactggataacatggtt

SEQ ID NO: 177771 - DNA, 75 bp, synthetic construct
  source 1..75: mol_type = other DNA
atggtcgacatggcatttatcactcaactgaccggcctgaccgataagtggttttacaaactcatcaaggatggt

SEQ ID NO: 177772 - DNA, 75 bp, synthetic construct
  source 1..75: mol_type = other DNA
ttcgtctgggatatatattggagcaaggtttggcgggagcgaaagagccgttaaaagcactggagtggtaccgta

SEQ ID NO: 177773 - DNA, 75 bp, synthetic construct
  source 1..75: mol_type = other DNA
cagaagcggtactccacggattacgcccaattggtatggcttgcgaaggtgatatgttccgcgccactgcgggcg

SEQ ID NO: 177774 - DNA, 75 bp, synthetic construct
  source 1..75: mol_type = other DNA
ctgctggatcaggggctggatcctgaactggcattgctcgataccttgctcctactgatggcgattaacggcgat

SEQ ID NO: 177775 - DNA, 75 bp, synthetic construct
  source 1..75: mol_type = other DNA
ggagtgtatcgaacgaaatctcagtcccggcggtagcgccgacctactgattcttacctggtttttagcgcagat

SEQ ID NO: 177776 - DNA, 75 bp, synthetic construct
  source 1..75: mol_type = other DNA
gatatgttccgcgccactgcgggcgtaaacacgcataaaggcagcattttttctttagggctactgtgtgcggca

SEQ ID NO: 177777 - DNA, 75 bp, synthetic construct
  source 1..75: mol_type = other DNA
ccacgccctgccgcattacctcactctgctggatcaggggttagatcctgaactggcattgctcgataccttact

SEQ ID NO: 177778 - DNA, 75 bp, synthetic construct
  source 1..75: mol_type = other DNA
ctggttaccccgtttcattgaatttggtgcctgtagtgcagaaatggcaccagaagcggtactccacggattacg

SEQ ID NO: 177779 - DNA, 75 bp, synthetic construct
  source 1..75: mol_type = other DNA
agacatatcgggtattgttgaatcgtgttgatacaacagtagcatcggatgttgagtggccagtcgccccgcaat

SEQ ID NO: 177780 - DNA, 75 bp, synthetic construct
  source 1..75: mol_type = other DNA
ccaaagatattgttggtgtatggaccgtatgtcacgggcatattgcaccgccagatattccggcaggcttcgtgg

SEQ ID NO: 177781 - DNA, 75 bp, synthetic construct
  source 1..75: mol_type = other DNA
cccgcaacaagctggggtgctatatggcgcagcaggcgtcgcttaacaatatcccggtatctgcactggtatcgc

SEQ ID NO: 177782 - DNA, 75 bp, synthetic construct
  source 1..75: mol_type = other DNA
atcgggtgttgctgaaccgtgttgatacatcagtagcaccggatattgtgtggccggaagaaccagacacaatgt

SEQ ID NO: 177783 - DNA, 75 bp, synthetic construct
  source 1..75: mol_type = other DNA
acccttattccagctggcttcgtggctgttttcaacagtgatgagtcatcgtggcatctcgttgaagatcatcgg

SEQ ID NO: 177784 - DNA, 75 bp, synthetic construct
  source 1..75: mol_type = other DNA
aactggcgatgatttttatgtctgtactggcgggcaatatgtatgaaagcatcggtttccagggcgcttatctgg

SEQ ID NO: 177785 - DNA, 75 bp, synthetic construct
  source 1..75: mol_type = other DNA
atgtactatttaaaaaacacaaacttttggatgttcggtttattctttttctttttcttttacttttttatcatg

SEQ ID NO: 177786 - DNA, 75 bp, synthetic construct
  source 1..75: mol_type = other DNA
gtatcgggtgttgctgaaccgtgttgatacatcaactgcacctgatattgagtggccggaagaaccagacacaat

SEQ ID NO: 177787 - DNA, 75 bp, synthetic construct
  source 1..75: mol_type = other DNA
ggtgacgcatatattccgcctcatacaggtctgccagcaaacagtacctatattgcaccgccagatattccggct

SEQ ID NO: 177788 - DNA, 75 bp, synthetic construct
  source 1..75: mol_type = other DNA
tttttcctcactggataacatggttgctcagggcaatgttttgcctgttctgtacggtgaaatgcgtgtggggtc

SEQ ID NO: 177789 - DNA, 75 bp, synthetic construct
  source 1..75: mol_type = other DNA
gaagaagtatcgggtgttgctgaaccgtgttgatacatcaactgcacctgatattgagtggcctacgaaccctgt

SEQ ID NO: 177790 - DNA, 75 bp, synthetic construct
  source 1..75: mol_type = other DNA
ctgaactcggtccgttaccggaaaatgttacctggttgtcgccggatggggagtttcagaagtggaacggcacat

SEQ ID NO: 177791 - DNA, 75 bp, synthetic construct
  source 1..75: mol_type = other DNA
gaataacaacgggaaagtcgtgttcaactccggattcctgttgctggccgaccacaaccagagcaggaacatctg

SEQ ID NO: 177792 - DNA, 75 bp, synthetic construct
  source 1..75: mol_type = other DNA
ctgtatggtatcgaagagagatattacacaactcgatttggtaatgaaaaaaggttggccaactcgatacaaaaa

SEQ ID NO: 177793 - DNA, 75 bp, synthetic construct
  source 1..75: mol_type = other DNA
gtatcgatacactttataaggaagcaaccgagcaggaggttgagcaatttcttaatgaagcttttatttctcttt

SEQ ID NO: 177794 - DNA, 75 bp, synthetic construct
  source 1..75: mol_type = other DNA
atgccgaatattgatatttttgaacgacgtacgatgcttgagcctgttattcagaatttcaaggctcgtcgtttt

SEQ ID NO: 177795 - DNA, 75 bp, synthetic construct
  source 1..75: mol_type = other DNA
caatggtaaagatccaaaaaatgtaagtgccatcgtcagagtagcccttgagcaatacttaaaaacactaacata

SEQ ID NO: 177796 - DNA, 75 bp, synthetic construct
  source 1..75: mol_type = other DNA
ctgatgcagtgtacttcaaagtggccgataccttgatattcaaaaatctggcaacgatctcgagcatttttaaag

SEQ ID NO: 177797 - DNA, 75 bp, synthetic construct
  source 1..75: mol_type = other DNA
gacgatttaacaaaaaaaaactttactaagatttcctatatattctctcatcagaatgatgatttttatttccag

SEQ ID NO: 177798 - DNA, 75 bp, synthetic construct
  source 1..75: mol_type = other DNA
aactctcctgaattagttgtcaacaggaagactattctggagggggaaggggacgtaactccaaagattgaattg

SEQ ID NO: 177799 - DNA, 75 bp, synthetic construct
  source 1..75: mol_type = other DNA
ctccgacaaacaggtaatactgttaatggtgatacatccgttggatggaattgggatagtggtgcatataacgcc

SEQ ID NO: 177800 - DNA, 75 bp, synthetic construct
  source 1..75: mol_type = other DNA
gtggctgtcacccgggccctcaggacgctggtactgaatgagctgatgcatcaactggcagaagaacagcagaaa

SEQ ID NO: 177801 - DNA, 75 bp, synthetic construct
  source 1..75: mol_type = other DNA
atggtcaggattaccaccaccagattctaaattatatatctttgatcagagttttgttcatagaaatgtaatggc

SEQ ID NO: 177802 - DNA, 75 bp, synthetic construct
  source 1..75: mol_type = other DNA
aatactcctgaattggttgttaacagaaagactattctggagggagatggtgaagtaactccaaagattgattta

SEQ ID NO: 177803 - DNA, 75 bp, synthetic construct
  source 1..75: mol_type = other DNA
aaggaatggcagcaaagacatctcaaaaatttaatttggatagaattcttcagatcaaacaaggtcaagacggtt

SEQ ID NO: 177804 - DNA, 75 bp, synthetic construct
  source 1..75: mol_type = other DNA
tgttaattttcgagcgcctgtttaagttgggcgagcactggcagcttgatcaccgcctcgaggcgtttttccgtc

SEQ ID NO: 177805 - DNA, 75 bp, synthetic construct
  source 1..75: mol_type = other DNA
atgttccgccgtctgcttatcgcaacagtcgtcggtattctcgcggcctttgccgttgccgggtttcgtcatgcg

SEQ ID NO: 177806 - DNA, 75 bp, synthetic construct
  source 1..75: mol_type = other DNA
attactatcaaaaatgacggacagaatggagagattggccctcaggcaattagaacacttatgggaatggttgat

SEQ ID NO: 177807 - DNA, 75 bp, synthetic construct
  source 1..75: mol_type = other DNA
gttaatgacttcaatgaaattgcaaaggatcctgtcagtgccatatcaaaacttaatgatcagtaccattttctg

SEQ ID NO: 177808 - DNA, 75 bp, synthetic construct
  source 1..75: mol_type = other DNA
tgtacggtgaaatgcgtgtggggtcacgggtaatttcgcaggaaatcagcacggcagacgaaggggatggtggtc

SEQ ID NO: 177809 - DNA, 75 bp, synthetic construct
  source 1..75: mol_type = other DNA
ttgcccaacgttttacgccacgccaggagtggaaattatggatcgcctgtggagctgcggcgggaatggctgcgg

SEQ ID NO: 177810 - DNA, 75 bp, synthetic construct
  source 1..75: mol_type = other DNA
tggcgacactgttggcggcaaccacgcacgcgccgattatgtcgacgttgatgatatgtgaaatgaccggggagt

SEQ ID NO: 177811 - DNA, 75 bp, synthetic construct
  source 1..75: mol_type = other DNA
ttcaaaacaatatcagacccgggagcagcagagagctagtgaacttgcaaaactggaaaagctaaagaatcagta

SEQ ID NO: 177812 - DNA, 75 bp, synthetic construct
  source 1..75: mol_type = other DNA
gaaaataaatggttctcagtttgagaattatagccgaaaaatacaggaaacacggcgagagcttaccggagaggc

SEQ ID NO: 177813 - DNA, 75 bp, synthetic construct
  source 1..75: mol_type = other DNA
ggtgatttccatacttcgcaatatcaggtattaacgcgtctggcacagttctctctggcgcgtgaaccgcatgtc

SEQ ID NO: 177814 - DNA, 75 bp, synthetic construct
  source 1..75: mol_type = other DNA
aggacgaatttaataaatctcttattcttaccggaaatcagttgggggcaacgagtgggcaattggcggatatag

SEQ ID NO: 177815 - DNA, 75 bp, synthetic construct
  source 1..75: mol_type = other DNA
gacctagagtcacgaccatcatcgaaattaacccaggatcagaaatcgcttctcttacaccgggaagaaataacc

SEQ ID NO: 177816 - DNA, 75 bp, synthetic construct
  source 1..75: mol_type = other DNA
actggattagtggtgcctcccagggattcaataactggctggatgacactaaggatatcggtgcgcaaataaaat

SEQ ID NO: 177817 - DNA, 75 bp, synthetic construct
  source 1..75: mol_type = other DNA
gaaatcgcggcgatgggggcaaccattgccgggatgggcgtggagtcagaaattgccgccacagggatcaagaac

SEQ ID NO: 177818 - DNA, 75 bp, synthetic construct
  source 1..75: mol_type = other DNA
cttttgacaccacggcagaagaatccggtcagatgatggcacagtggcgcactgcctttaaactgacacagggag

SEQ ID NO: 177819 - DNA, 75 bp, synthetic construct
  source 1..75: mol_type = other DNA
gaaagaaaattttgtaaattcacttgagcgatacagagctggtcttctcaacaatcagcaattgcaggatgaata

SEQ ID NO: 177820 - DNA, 75 bp, synthetic construct
  source 1..75: mol_type = other DNA
gaagtcgatctgagtcttaatccgctggttcgccgggggatagaaaacgaagatgctgcaagacgcgctttcgag

SEQ ID NO: 177821 - DNA, 75 bp, synthetic construct
  source 1..75: mol_type = other DNA
attcaggagctgaaacagcgactggttgagcttcaagaaaggcaaaaacctcatctcgacactatgaagttcctc

SEQ ID NO: 177822 - DNA, 75 bp, synthetic construct
  source 1..75: mol_type = other DNA
agaaagacgcccgtggggccatgctgcacgtactggattctctggcgaaagtgccgaaagaaaaacaggccgccg

SEQ ID NO: 177823 - DNA, 75 bp, synthetic construct
  source 1..75: mol_type = other DNA
aacctatgacttcgaacgtctgatggatggcgctaatctgctgaaatgttcagagtttggtgatgcgatcatcga

SEQ ID NO: 177824 - DNA, 75 bp, synthetic construct
  source 1..75: mol_type = other DNA
aacctatgacttcgaacgtctgatggaaggcgctaatctgctgaaatgttcagagtttggtgaggcgatcatcga

SEQ ID NO: 177825 - DNA, 75 bp, synthetic construct
  source 1..75: mol_type = other DNA
ccgctgagatgatgctgcgccacatgggttggacggaagcggctgacgttattgttaaaggtatggaaggcgcaa

SEQ ID NO: 177826 - DNA, 75 bp, synthetic construct
  source 1..75: mol_type = other DNA
cttacgcttaaggattttacccgtatgatcgaagtggctgacagtatcgggatgtggcgtcatacatgtctacca

SEQ ID NO: 177827 - DNA, 75 bp, synthetic construct
  source 1..75: mol_type = other DNA
gatgaaggttgcgatgtagtcagggcagcaatggagatttcctacctttgtctggctcgccagggagacgttctg

SEQ ID NO: 177828 - DNA, 75 bp, synthetic construct
  source 1..75: mol_type = other DNA
aacctatgacttcgaacgtctgatggagggcgctaatctgctgaaatgttcagagtttggtgaagcgatcatcga

SEQ ID NO: 177829 - DNA, 75 bp, synthetic construct
  source 1..75: mol_type = other DNA
cccgctcatgagggcctccctggatggcctgagagataacggggagcccgtcgagctgaaaagcccgagtgcgac

SEQ ID NO: 177830 - DNA, 75 bp, synthetic construct
  source 1..75: mol_type = other DNA
aacttaaatctgctaaatggtcggcgggatatgcatcagacatcatggaagcgtttaagaacgacatttttcctt

SEQ ID NO: 177831 - DNA, 75 bp, synthetic construct
  source 1..75: mol_type = other DNA
atatgttatcaacaattttgcatgaagaaggttttcaatcagcatttattgaagtccaattagctcatgttgata

SEQ ID NO: 177832 - DNA, 75 bp, synthetic construct
  source 1..75: mol_type = other DNA
agggaactatcgttatgtttttccaggacggaacgatccgaacaaaccgatgagcgaagctagcataaatcaagt

SEQ ID NO: 177833 - DNA, 75 bp, synthetic construct
  source 1..75: mol_type = other DNA
cagtcccttcggcttctggagttgtgttttccgttaccgaaaaaactggaacttctccggcagtatacggtaacg

SEQ ID NO: 177834 - DNA, 75 bp, synthetic construct
  source 1..75: mol_type = other DNA
tcattatacgagcaggcagtaccggcagttattgtggcgataccagatcagacagagtatgagccggcgcggaaa

SEQ ID NO: 177835 - DNA, 75 bp, synthetic construct
  source 1..75: mol_type = other DNA
atgaagtatgtctttattgaaaaacatcaggctgagttcaacatcacgacaatgtgccacgtgctccgggagggc

SEQ ID NO: 177836 - DNA, 75 bp, synthetic construct
  source 1..75: mol_type = other DNA
cagaaccgtattgatatttactgagaggtcagatcaactttccagggcaacagatcgcgtacccggtttgccggc

SEQ ID NO: 177837 - DNA, 75 bp, synthetic construct
  source 1..75: mol_type = other DNA
ccagcagtatggcagttcgatgcagaaggaatatgcttcgagggcagcgacgacggaaaaccagcttttacttct

SEQ ID NO: 177838 - DNA, 75 bp, synthetic construct
  source 1..75: mol_type = other DNA
gtcagattcaggagtttccaatactccgagacgaagccatgattcaagaaatcttggccgaggctaaaaagttct

SEQ ID NO: 177839 - DNA, 75 bp, synthetic construct
  source 1..75: mol_type = other DNA
tttgggaaattcctgccgaaagaatgaaaatgcgtaggccgcacctagtacccttatcgacccaggtattaggct

SEQ ID NO: 177840 - DNA, 75 bp, synthetic construct
  source 1..75: mol_type = other DNA
ctatacacttggggatgggcaagggttgtctttacttgtagagccaaatggaagtaaaagctggcgatttcgtta

SEQ ID NO: 177841 - DNA, 75 bp, synthetic construct
  source 1..75: mol_type = other DNA
tgctggccttgctacagcaggattgcaccctctctttgcaggcactggctgaagccgttaatctgacaaccaccc

SEQ ID NO: 177842 - DNA, 75 bp, synthetic construct
  source 1..75: mol_type = other DNA
caatgtatggcgctggtgctgaaacgtataatgaacctgggcgaacttattatttcagtgtgaatacacactttt

SEQ ID NO: 177843 - DNA, 75 bp, synthetic construct
  source 1..75: mol_type = other DNA
tttagtacggaaacccgctctccatacacgtcagcaaatatattttctttatttattgaagataatatagaactg

SEQ ID NO: 177844 - DNA, 75 bp, synthetic construct
  source 1..75: mol_type = other DNA
ctatctatcgtcagggaggaaccaccactgacgagggagaacgcattgattaccgtgtcaaaatgtacaacccgg

SEQ ID NO: 177845 - DNA, 75 bp, synthetic construct
  source 1..75: mol_type = other DNA
gcccttgccggaccgatttcctttattgctttagtcgcgccacacattgcccgccgcatcagcggcaccgctcgc

SEQ ID NO: 177846 - DNA, 75 bp, synthetic construct
  source 1..75: mol_type = other DNA
agcttgtgtgatggcaggcgtgtggggattacgtagcggtgccgtcacgctggaaacttcgcaggtattcgccgc

SEQ ID NO: 177847 - DNA, 75 bp, synthetic construct
  source 1..75: mol_type = other DNA
tgcgtaacccgctcggcagccctgacgtaatgggctttaacaccggggcgtggagcggcgtgctggtggcgatgg

SEQ ID NO: 177848 - DNA, 75 bp, synthetic construct
  source 1..75: mol_type = other DNA
aaagatgtgagcatgtggtataagtgcgcttatgccgatttacagcaaacctgtacgacctcagggacaatatca

SEQ ID NO: 177849 - DNA, 75 bp, synthetic construct
  source 1..75: mol_type = other DNA
tggtcgcattaacgctgactcctgcgctttgtggttctgtcctccatcatgttccaccgcataaaaaaggttttt

SEQ ID NO: 177850 - DNA, 75 bp, synthetic construct
  source 1..75: mol_type = other DNA
gtcatccggccgcaggggtagccgtgatgctctcaccgggagcgaatgcgttaaacacggcgacgctggtaaagg

SEQ ID NO: 177851 - DNA, 75 bp, synthetic construct
  source 1..75: mol_type = other DNA
caatcggtggtgtttgggaaggttcggtcaaattgcagtttactaatccgtctacggattatcgcgccgatatta

SEQ ID NO: 177852 - DNA, 75 bp, synthetic construct
  source 1..75: mol_type = other DNA
gcggcagggcgcagagatggttatttttccatttatcgtcagggaagaacaacgactgacgatgtagagcgtatc

SEQ ID NO: 177853 - DNA, 75 bp, synthetic construct
  source 1..75: mol_type = other DNA
ttaacgtgacggcaaaacaggcgggatattatatgggtaaattgtcggtcatctttaccccgtcattgccgacga

SEQ ID NO: 177854 - DNA, 75 bp, synthetic construct
  source 1..75: mol_type = other DNA
tcatcacctgtttgctgctaattaccgcctgtgtggttgcaggtatctggggattacgcagcggtgccgtcacgc

SEQ ID NO: 177855 - DNA, 75 bp, synthetic construct
  source 1..75: mol_type = other DNA
accaatcaatctttggcacaaagtaactttgcggtgatcatcgatgaagcacacacctcgcaaacaggctctaca

SEQ ID NO: 177856 - DNA, 75 bp, synthetic construct
  source 1..75: mol_type = other DNA
tcgtttacgcagcaccgatggtaaagcggtctttaaatcagtgatcattgtgaccgaccgcaccgtgctggattc

SEQ ID NO: 177857 - DNA, 75 bp, synthetic construct
  source 1..75: mol_type = other DNA
ggtgatttccgtacttcgcaatatcaggtattaacgcgtctggcgcagttctctctggcgcgtgaaccgcatgtc

SEQ ID NO: 177858 - DNA, 75 bp, synthetic construct
  source 1..75: mol_type = other DNA
cgcgtctggcgggtgctaaaagtggtggtgtatttcaggcggtgctgggtgcggcgctgattgcaacggcaatct

SEQ ID NO: 177859 - DNA, 75 bp, synthetic construct
  source 1..75: mol_type = other DNA
ggatcgtgaacaggcatttcttgccgatatcattcgccgcctaaacgaactgtttggcgatgtcggcgacgaacc

SEQ ID NO: 177860 - DNA, 75 bp, synthetic construct
  source 1..75: mol_type = other DNA
cagatttagctcgatttgtgaagcactatagctatatggcgcaattgattgagtttggtgatcctgaactggaaa

SEQ ID NO: 177861 - DNA, 75 bp, synthetic construct
  source 1..75: mol_type = other DNA
gcggcgctgattgcaacggcaatctggatgccgggaatcagtatcgctttcagtgacatcctcttttctatgggg

SEQ ID NO: 177862 - DNA, 75 bp, synthetic construct
  source 1..75: mol_type = other DNA
gcctatctggattatatcgccagacagagcacgccgttcacatcaaccgatgaatggcttgccggatggatggcg

SEQ ID NO: 177863 - DNA, 75 bp, synthetic construct
  source 1..75: mol_type = other DNA
taacagcggttttgccggatatcacagacgatgtgacaggaggaggcgcttccggaaatgccgatgctggcacca

SEQ ID NO: 177864 - DNA, 75 bp, synthetic construct
  source 1..75: mol_type = other DNA
gcctggacgttacatttgccgccttgacggaatcgatggaccagcgaatgagccttgacgccgaaattaaccatc

SEQ ID NO: 177865 - DNA, 75 bp, synthetic construct
  source 1..75: mol_type = other DNA
agataaaattgatattacagagtttgctaatttaatggaaaatggttatctattaaagaatgagataattagatc

SEQ ID NO: 177866 - DNA, 75 bp, synthetic construct
  source 1..75: mol_type = other DNA
tctgatgtaggagcattaccgctttcaggtggcacattatctgggggggtaacgtcttctggtgagatcgtttca

SEQ ID NO: 177867 - DNA, 75 bp, synthetic construct
  source 1..75: mol_type = other DNA
cgtcatcggcatcatctgcgtctgcttcaaaagatgaggcgaccagacaggcgtcagcagcgaagggtagcgcca

SEQ ID NO: 177868 - DNA, 75 bp, synthetic construct
  source 1..75: mol_type = other DNA
catttacacatggtagcaatactctggttggggcagggacagcctggaacgtaacagctaatggtgtgttgccgg

SEQ ID NO: 177869 - DNA, 75 bp, synthetic construct
  source 1..75: mol_type = other DNA
aaatgcgcgtgggatcacgtgtggtatctcaggagatcagcacagcagatgaaggtgatggtggtcaggttgtgg

SEQ ID NO: 177870 - DNA, 75 bp, synthetic construct
  source 1..75: mol_type = other DNA
aatcctcgtttatcactaccgtagtaatagaagtccgtcaggtcaatggctgaaatttgcaggtactgttggggc

SEQ ID NO: 177871 - DNA, 75 bp, synthetic construct
  source 1..75: mol_type = other DNA
taaccagaacgtcatcttcgggaggaacgctgtaagtacaagctctgcacaagcgttgttgagacaagaccacgc

SEQ ID NO: 177872 - DNA, 75 bp, synthetic construct
  source 1..75: mol_type = other DNA
gccaggttaaagctcggaacgtacgggaagatgtcgcttaaggaagctcgcgatgcattggaagagtgtaaaggg

SEQ ID NO: 177873 - DNA, 75 bp, synthetic construct
  source 1..75: mol_type = other DNA
ggctgcgcagtactggcggcaacccaggtggaagagattgaagaggtgcactggacagaactcggaatgccggag

SEQ ID NO: 177874 - DNA, 75 bp, synthetic construct
  source 1..75: mol_type = other DNA
ggctgcgcggtgctggcggcaacccaggtggaagagattgaagaagtgcactggacagaactcgggatgccggag

SEQ ID NO: 177875 - DNA, 75 bp, synthetic construct
  source 1..75: mol_type = other DNA
actgacgccagagcttgttgcgcgttataacttacctgctatcccgcataacaatgctgatgccgacatccaccg

SEQ ID NO: 177876 - DNA, 75 bp, synthetic construct
  source 1..75: mol_type = other DNA
cattattgttttgagcgcggggaaaatgctgaagaaatatatcaatatttaggcggggagaaagaggatgattga

SEQ ID NO: 177877 - DNA, 75 bp, synthetic construct
  source 1..75: mol_type = other DNA
taaatcagccatagataatatatataacttctataacaatcctcccactggtttaaacctatacaagtggttact

SEQ ID NO: 177878 - DNA, 75 bp, synthetic construct
  source 1..75: mol_type = other DNA
tatttaataacggtagtagttcaaataattatacgatccgcataacaacggccacaacgacaagtgtttccggtg

SEQ ID NO: 177879 - DNA, 75 bp, synthetic construct
  source 1..75: mol_type = other DNA
atgttttcgcgcttttttgttcgccgcccggtctttgcctgggttatcgccattttgattatgttggcggggatt

SEQ ID NO: 177880 - DNA, 75 bp, synthetic construct
  source 1..75: mol_type = other DNA
attgaagaatggggtgccgatcgcattggcattcgcgtttcaccaatcggtactttccagaacacagataacggc

SEQ ID NO: 177881 - DNA, 75 bp, synthetic construct
  source 1..75: mol_type = other DNA
tcgctcgcctgcagcgcaaagccgaacttaacccacagcgtgccgaaagtttctacggcggcggcgcagaaggtt

SEQ ID NO: 177882 - DNA, 75 bp, synthetic construct
  source 1..75: mol_type = other DNA
ctattaaccactatcggtttgtcgtcgaaaaacgccattctgattgtagagtttgccgaagcggcggttgctgag

SEQ ID NO: 177883 - DNA, 75 bp, synthetic construct
  source 1..75: mol_type = other DNA
tacgcgcggcgcagactcgtttacgcccaatcatcatgacctcgctggcgtttattgcgggggtaatgccgctgg

SEQ ID NO: 177884 - DNA, 75 bp, synthetic construct
  source 1..75: mol_type = other DNA
tcgttgaaaaactggtcacaacgtaaaggcgctgaaaataccgcccaggccattgccttacgggcaaccaaagag

SEQ ID NO: 177885 - DNA, 75 bp, synthetic construct
  source 1..75: mol_type = other DNA
agaacagcacagccaaagagttttgtgaaggggtgggcctgcggagcagctttggcaccgaatttagcaaaatgc

SEQ ID NO: 177886 - DNA, 75 bp, synthetic construct
  source 1..75: mol_type = other DNA
acaggtacttctggggtacagctggattgacgataagctggagctttaccttctgagcattggtccacatgaaaa

SEQ ID NO: 177887 - DNA, 75 bp, synthetic construct
  source 1..75: mol_type = other DNA
ctgcttcaaaagatgaggcgaccagacaggcgtcagcagcgaagggcagcgccacgacggcatccacgaaagcaa

SEQ ID NO: 177888 - DNA, 75 bp, synthetic construct
  source 1..75: mol_type = other DNA
cccgccatgatattcagaagaatgcggacggttcctggacggcgaatggtcatatgccgctggaggatctggtgc

SEQ ID NO: 177889 - DNA, 75 bp, synthetic construct
  source 1..75: mol_type = other DNA
tactggacgccattttctcactcgactcagtgattaccgccgtcgggatggtcgaccatttactggtcatgatgg

SEQ ID NO: 177890 - DNA, 75 bp, synthetic construct
  source 1..75: mol_type = other DNA
atttaattgcgccagttctgttcagccgcaacggaaagcttggttttgagccggaaggttcataccagcagttta

SEQ ID NO: 177891 - DNA, 75 bp, synthetic construct
  source 1..75: mol_type = other DNA
attgtttccagaatatgaggatgcgggaacgcttccagatgatgttattgaaattacccgagaaacatatgagca

SEQ ID NO: 177892 - DNA, 75 bp, synthetic construct
  source 1..75: mol_type = other DNA
tatgacaatatatatacatctgtcaatggcaagtatgtaaagaccgacagttccttttccagtgaacgggcactt

SEQ ID NO: 177893 - DNA, 75 bp, synthetic construct
  source 1..75: mol_type = other DNA
agcaaaagaatagcggtatgagtgtcagtgcgttagcacgcagatacggagtttccagagcgactatagcagcga

SEQ ID NO: 177894 - DNA, 75 bp, synthetic construct
  source 1..75: mol_type = other DNA
aaaatccgtattgccggagatgatgggatgcctgcgtgggcagatattcctccacccacgcatgaagagcttatt

SEQ ID NO: 177895 - DNA, 75 bp, synthetic construct
  source 1..75: mol_type = other DNA
ggcataatgcttttttccctgtggatatgattgataaatataaatcagagggatgggatttatcagatgcaaagg

SEQ ID NO: 177896 - DNA, 75 bp, synthetic construct
  source 1..75: mol_type = other DNA
ttcctgcatggtctgaaattccaccaccaacacatgaggaacagattgctgcagccgaacaggaaaagcagcaac

SEQ ID NO: 177897 - DNA, 75 bp, synthetic construct
  source 1..75: mol_type = other DNA
ccatcgtcgggcacacgacctgcggcagcgagcgcgaggacaagaagctctggcatcagcgctggcgcacccgtg

SEQ ID NO: 177898 - DNA, 75 bp, synthetic construct
  source 1..75: mol_type = other DNA
ctgaaggtgccacgctggagttttacgaagctgaggcgaaaaagcaggcgaagcagtttttcatggatattgctg

SEQ ID NO: 177899 - DNA, 75 bp, synthetic construct
  source 1..75: mol_type = other DNA
caaacacggtaaaagctatcgacaatcagattgccgtgttaagccgcccgggcaaatctcaggatagagccgcgg

SEQ ID NO: 177900 - DNA, 75 bp, synthetic construct
  source 1..75: mol_type = other DNA
tcagagttgctgggcaagatcagggacgatgaaacgctggttgtagcaaaattagaccgtttggggcgtgatgct

SEQ ID NO: 177901 - DNA, 75 bp, synthetic construct
  source 1..75: mol_type = other DNA
ggcggcggcctgtgtactgccatggttcgtggtgatgttgcagcctgtaaagcggcgaccgatgccggtgccgca

SEQ ID NO: 177902 - DNA, 75 bp, synthetic construct
  source 1..75: mol_type = other DNA
tttcaacaacgcagcaggatactgagaaccagagactggagcttgagcaagctgggtggcaaattgactattggt

SEQ ID NO: 177903 - DNA, 75 bp, synthetic construct
  source 1..75: mol_type = other DNA
gtatctggctcgttgctggcgttacctatatgcgtaaatccttcaacggactgggagaacaggtacaacatgtgc

SEQ ID NO: 177904 - DNA, 75 bp, synthetic construct
  source 1..75: mol_type = other DNA
atggaaaccttaactgttcatgcaccatcaccatcaactaacttaccaagttatggcaatggtgcattttctctt

SEQ ID NO: 177905 - DNA, 75 bp, synthetic construct
  source 1..75: mol_type = other DNA
tagcaaccctctcacattgcagatcatatcgacaaatattggttacttctgtaacgccgaccgaaatctggttct

SEQ ID NO: 177906 - DNA, 75 bp, synthetic construct
  source 1..75: mol_type = other DNA
cctgtttctacaaagttcacacatgccactggtgattataatgttattaccggtgcatatcttggtaatatcaca

SEQ ID NO: 177907 - DNA, 75 bp, synthetic construct
  source 1..75: mol_type = other DNA
gactttcagttgcggggccaactgcagcttatgaatttcatgcccaaagcgccgacggtcgggtggcggatgcca

SEQ ID NO: 177908 - DNA, 75 bp, synthetic construct
  source 1..75: mol_type = other DNA
tccgagcctctcgtcaaactgctggaggaaaatgcttatcgtgagcttatctggcgtcagcgtgtgaatgaggct

SEQ ID NO: 177909 - DNA, 75 bp, synthetic construct
  source 1..75: mol_type = other DNA
ataatgtcgctggtggatttgatgccgataattttgcgttggtggcaaaaaatcacaggttaattgatacgctgg

SEQ ID NO: 177910 - DNA, 75 bp, synthetic construct
  source 1..75: mol_type = other DNA
cgccacgaatgcgcctacatcctggcaaaaggacgtccggcgctgcctcagaagccattgcccgacgtgctgggc

SEQ ID NO: 177911 - DNA, 75 bp, synthetic construct
  source 1..75: mol_type = other DNA
aaacaaaaattgtggatttagatgcattcgaagaaatggataatgatattacaccagaagaagtgaacttattcg

SEQ ID NO: 177912 - DNA, 75 bp, synthetic construct
  source 1..75: mol_type = other DNA
ttaggtgagtttgggcttgatttaaactcaagaaaaacagaactacatgacgacatcattcttcactcccttaaa

SEQ ID NO: 177913 - DNA, 75 bp, synthetic construct
  source 1..75: mol_type = other DNA
tcctcgatatcgacgatgaagtggtgagcgtaaaatcgctgtacggtgattacgacacgccgcaggatttcctcg

SEQ ID NO: 177914 - DNA, 75 bp, synthetic construct
  source 1..75: mol_type = other DNA
cactttgaggaatcttccctgcgcaaagcatggaaagagacgcgcaatgaagatatcgccgcccggctgattgga

SEQ ID NO: 177915 - DNA, 75 bp, synthetic construct
  source 1..75: mol_type = other DNA
gtactaccgtctggtcactaaagattatgacttcccggtgccggtgtttgtgttgccggaacgtggtgaaaacct

SEQ ID NO: 177916 - DNA, 75 bp, synthetic construct
  source 1..75: mol_type = other DNA
ctacaagagccacgcttaaaccattctctgccgcaatattgatgccagagacagggtgtgttcgccttgagaact

SEQ ID NO: 177917 - DNA, 75 bp, synthetic construct
  source 1..75: mol_type = other DNA
atgtttattatcaacatcaacattaacgtaaccaagagctcttcatcttgttctggagacggtcagatgaagaaa

SEQ ID NO: 177918 - DNA, 75 bp, synthetic construct
  source 1..75: mol_type = other DNA
gcagagctggtcgctgtcggcgcttacccttccccatccgctggttcgcgtgctggtcgcagagagtctgtaccg

SEQ ID NO: 177919 - DNA, 75 bp, synthetic construct
  source 1..75: mol_type = other DNA
gctgttatgcaatttagtgctgatatggcgctgaatgaggcaggcaaaattcttaccgcagatattcaaggggcg

SEQ ID NO: 177920 - DNA, 75 bp, synthetic construct
  source 1..75: mol_type = other DNA
tcgttgatctgaataacctcacatttgatagacagtacgattttattctttcgactgtggtgctgatgttccttg

SEQ ID NO: 177921 - DNA, 75 bp, synthetic construct
  source 1..75: mol_type = other DNA
ctcaatataaaacaggagatatgattcttgtaaaaaaagcaggaggacgctacggaattcgttatgacgaattag

SEQ ID NO: 177922 - DNA, 75 bp, synthetic construct
  source 1..75: mol_type = other DNA
gaggccagatgtgtacagtcagaatccctggctactgcaatcacaatcctgaaacgtctgtactggcgcattatc

SEQ ID NO: 177923 - DNA, 75 bp, synthetic construct
  source 1..75: mol_type = other DNA
gcgatagcctgtagctcatgccacgatctaatcgactggcgggtaaaaacaagcgattacaccaaagaagaatta

SEQ ID NO: 177924 - DNA, 75 bp, synthetic construct
  source 1..75: mol_type = other DNA
cagcgattacaccaaagatgaattgcgcctgatgcacgcggagggcgtttttcgcacgcaacaaatctggagaaa

SEQ ID NO: 177925 - DNA, 75 bp, synthetic construct
  source 1..75: mol_type = other DNA
tttgttgattggccatctgtagatggtggcgatgaggacgacgacgatgattttggtgatcatgtaggtcagaat

SEQ ID NO: 177926 - DNA, 75 bp, synthetic construct
  source 1..75: mol_type = other DNA
tttgttgattggccagcagtagatggtggcgatgatgacgacgacgatgatgattttggtgatcatgtagaccag

SEQ ID NO: 177927 - DNA, 75 bp, synthetic construct
  source 1..75: mol_type = other DNA
ggctggcgggaacgtgcggaacagcgataaaaccacacgatatgcaggcggctattgcctgtagctcgtgccacg

SEQ ID NO: 177928 - DNA, 75 bp, synthetic construct
  source 1..75: mol_type = other DNA
tgatgtactgaatatcgccgccgattatgcggaatatgtggcagaggcgcgttacagaagaaaatttcctgagga

SEQ ID NO: 177929 - DNA, 75 bp, synthetic construct
  source 1..75: mol_type = other DNA
tctcaaaacccgcgcaccgttctggaagcgcgaagccacgccggagggcgaccgctgggtcgaagctcgggagag

SEQ ID NO: 177930 - DNA, 75 bp, synthetic construct
  source 1..75: mol_type = other DNA
aaaattacggatttcggcatttcaaagatggccggagatgaaattgatgaggctgcaagaaatggtcaagattca

SEQ ID NO: 177931 - DNA, 75 bp, synthetic construct
  source 1..75: mol_type = other DNA
aaggtgacaagaaacaaccctattttattcaccgggcagacggtcagccgatttttatggcggcgatcggcagca

SEQ ID NO: 177932 - DNA, 75 bp, synthetic construct
  source 1..75: mol_type = other DNA
aggtgatcgacgaaatctgttactacatgacctgccagagcgcggtttacctttgcagtcagtttatacgacagg

SEQ ID NO: 177933 - DNA, 75 bp, synthetic construct
  source 1..75: mol_type = other DNA
atgaaacttgccccggaaacccgcgaaatcctgcgacaatacaaggcagtgattaatgcccgccgccgtgagaat

SEQ ID NO: 177934 - DNA, 75 bp, synthetic construct
  source 1..75: mol_type = other DNA
gcagtaagccggtcataaaaccggtggttgtaaaagaattcggtggagcggtagttcagtcggttagaatacctg

SEQ ID NO: 177935 - DNA, 75 bp, synthetic construct
  source 1..75: mol_type = other DNA
cgatgaactggagcatctgattaccctgcaaatgatgggtaatgatgagatcactactaagtatctcagttcgtt

SEQ ID NO: 177936 - DNA, 75 bp, synthetic construct
  source 1..75: mol_type = other DNA
cgaggcaagccaggatgctgcctgtaaacaagcaagtgacgcgcttaagcaatcaatgagcgctgccggaattaa

SEQ ID NO: 177937 - DNA, 75 bp, synthetic construct
  source 1..75: mol_type = other DNA
atggcgaataacagtatgggcagccatttacgagaaacgattctgtcgctgccaggcagtgaatgggaaaaagaa

SEQ ID NO: 177938 - DNA, 75 bp, synthetic construct
  source 1..75: mol_type = other DNA
atgcggcaggatataggcgggaaagaagctgaagagatagcggccgacggcacagtggacgccgacaagtttatc

SEQ ID NO: 177939 - DNA, 75 bp, synthetic construct
  source 1..75: mol_type = other DNA
aaggcgaccaaaaacaaccctactttattcaccgggcagacggtcagccgatttttatggcggcgatcggcagca

SEQ ID NO: 177940 - DNA, 75 bp, synthetic construct
  source 1..75: mol_type = other DNA
tatctgtgggcatacgtcagtggagaaaggacgggaccgtcagttgtgtgcttcgactgccggaccggacgtagc

SEQ ID NO: 177941 - DNA, 75 bp, synthetic construct
  source 1..75: mol_type = other DNA
tcgtatcagggtgaagtgacgcaagagcctatcgccaagatgcgtgcaatgacgctcaccggcctatgcctgttc

SEQ ID NO: 177942 - DNA, 75 bp, synthetic construct
  source 1..75: mol_type = other DNA
ggtcaaccttgcgaactgggctatcggccccaaacagcatggcgctcgcaatagcttgatcgcttggatgcctgc

SEQ ID NO: 177943 - DNA, 75 bp, synthetic construct
  source 1..75: mol_type = other DNA
tccttatattccaccagaaccatttgagattccaagagttgaaattgatttttcgatgaatgatgaatgtgagct

SEQ ID NO: 177944 - DNA, 75 bp, synthetic construct
  source 1..75: mol_type = other DNA
gtcgcatgtttaaaccgctctggcaacatggtcgggcaatctgctttgccgatggctggtttgagtggaaaaaag

SEQ ID NO: 177945 - DNA, 75 bp, synthetic construct
  source 1..75: mol_type = other DNA
ctgatgctgatggtctgtgcctgttcaccaaacgcctggaggaaggccagtttatctgtgaaccgccccgggttt

SEQ ID NO: 177946 - DNA, 75 bp, synthetic construct
  source 1..75: mol_type = other DNA
ggtctgtgcctgttcaccaaacgcttggaggaaggccagtttatctggcctgcggtacgtgtcaacgacggatga

SEQ ID NO: 177947 - DNA, 75 bp, synthetic construct
  source 1..75: mol_type = other DNA
cgatacgcgctacaatgcgaagcttggtcaagcctacttcggcgcgcagatgaagaagtatgacaataatcctgt

SEQ ID NO: 177948 - DNA, 75 bp, synthetic construct
  source 1..75: mol_type = other DNA
cagagtatctcccgcattcgtgataatgcgcagtgggttaccaacagcgacgaaacaggacttaccctgatgctc

SEQ ID NO: 177949 - DNA, 75 bp, synthetic construct
  source 1..75: mol_type = other DNA
gctttgcctgggcgacactgcatttaaccagttacgcattgctggagctgggcgtgaataatctggcgttattag

SEQ ID NO: 177950 - DNA, 75 bp, synthetic construct
  source 1..75: mol_type = other DNA
atgtctatccgtaatgaacatgaaatgcttatcgaacacaaaccaagtgcacttgatattcacgaattaactttg

SEQ ID NO: 177951 - DNA, 75 bp, synthetic construct
  source 1..75: mol_type = other DNA
ctatcttaactgccgtcctgtcacgcagatattggtatggagaacccagaagcctaagcatcgtgctgtgcttca

SEQ ID NO: 177952 - DNA, 75 bp, synthetic construct
  source 1..75: mol_type = other DNA
atcaggcgcagtttccttacacaccgtcaggtgtgcagggagcgcaggtcacggcgcgacagaggcggcgcgacc

SEQ ID NO: 177953 - DNA, 75 bp, synthetic construct
  source 1..75: mol_type = other DNA
caccgtttgagcgtggtgacgaagccggaagaagtttttgtaagcccgctcagggtctttcagtgactgttgcaa

SEQ ID NO: 177954 - DNA, 75 bp, synthetic construct
  source 1..75: mol_type = other DNA
tgacggggatcgcgactttcctgattttaatgctgcaacgtcgcgggcaaaaaccgttggagaaagtgattggcg

SEQ ID NO: 177955 - DNA, 75 bp, synthetic construct
  source 1..75: mol_type = other DNA
ttacattgtcgagctgattttctctcagcctaacctggcgcagttgagtaaagggatggtgattccgagtttacc

SEQ ID NO: 177956 - DNA, 75 bp, synthetic construct
  source 1..75: mol_type = other DNA
ggttcgcgtcaacaacgttattccgccaccaaatgggatgtggctatcgccatgactattgccggttttgtcaat

SEQ ID NO: 177957 - DNA, 75 bp, synthetic construct
  source 1..75: mol_type = other DNA
gaatctggtggggcaaccgctacatactatggatgaagaagcgcgggcaacgttacgcgcgaagcatgtcggctt

SEQ ID NO: 177958 - DNA, 75 bp, synthetic construct
  source 1..75: mol_type = other DNA
gctgcttaactccgtcatctgcatggcggtgtggctggctcgcgggaacctggcgaaggtcgttataacggagta

SEQ ID NO: 177959 - DNA, 75 bp, synthetic construct
  source 1..75: mol_type = other DNA
ggggatgccgctgggtgatgacatcatgctcaactaccagaccaccgcattccacgataccgccactgtgcgtca

SEQ ID NO: 177960 - DNA, 75 bp, synthetic construct
  source 1..75: mol_type = other DNA
acgccagacgctgtatcgcgccaatcgcctgttcatggaggcgtataccgaaattctggaactggattcctgctt

SEQ ID NO: 177961 - DNA, 75 bp, synthetic construct
  source 1..75: mol_type = other DNA
ttcacctggcacccggtatcgcgcgcggtgggtaatgttaaaaaccagggcgcggcgttaattcaacctgtttga

SEQ ID NO: 177962 - DNA, 75 bp, synthetic construct
  source 1..75: mol_type = other DNA
acatggtcgggcaatctgttttgccgatggctggtttgagtggaaaaaagaaggcgacaaaaaaacagccttatt

SEQ ID NO: 177963 - DNA, 75 bp, synthetic construct
  source 1..75: mol_type = other DNA
ttgtcgtttgggctaacctgatggcgatgctgattcaaatcctctcggccaaactggggattgccaccggtaaaa

SEQ ID NO: 177964 - DNA, 75 bp, synthetic construct
  source 1..75: mol_type = other DNA
aacgcgtaaaacagacaggctgggtgattgtggtgctggtcgtggcgctgaatatctggttgctggtaggaacgg

SEQ ID NO: 177965 - DNA, 75 bp, synthetic construct
  source 1..75: mol_type = other DNA
ggttcgcgtcaacaacgttattctgccaccaaatgggatgtggctatcgctatgactattgccggttttgtcaat

SEQ ID NO: 177966 - DNA, 75 bp, synthetic construct
  source 1..75: mol_type = other DNA
gtggccgaccgcgtgaccgtgcagtctgctgccatcgttgaataccagataaacgccacgctttacctttaccct

SEQ ID NO: 177967 - DNA, 75 bp, synthetic construct
  source 1..75: mol_type = other DNA
ccgcaggccgacattgtgctgagtaagtcgcaggcgtcgaattgtactgagtaccagataactatcgggggctcg

SEQ ID NO: 177968 - DNA, 75 bp, synthetic construct
  source 1..75: mol_type = other DNA
gtggctgaccgtctgacggttcgcagcgcagaaatcatcccgtaccgtgtggaagccaccatttttctttatccg

SEQ ID NO: 177969 - DNA, 75 bp, synthetic construct
  source 1..75: mol_type = other DNA
gagggtgacggtacagcaggggctgacctgctggcagtggttgagcaggcgcttaatagtgaaaaggttcgcccg

SEQ ID NO: 177970 - DNA, 75 bp, synthetic construct
  source 1..75: mol_type = other DNA
cgatcgctttatggctgcctggaaaaatgcgggattcagcgtggttggccacctggtgtttaccaaaacctacac

SEQ ID NO: 177971 - DNA, 75 bp, synthetic construct
  source 1..75: mol_type = other DNA
cacatcgctgagactgcgggcgcaacgggcgtatgacggtctgagtgttgctggcccgtcaggcgcatacgagta

SEQ ID NO: 177972 - DNA, 75 bp, synthetic construct
  source 1..75: mol_type = other DNA
cgtaccgtcacgaatgcgcctatatcctggcaaaaggccgtccggcgctgcctccgaagccattacccgacgtgc

SEQ ID NO: 177973 - DNA, 75 bp, synthetic construct
  source 1..75: mol_type = other DNA
tgaccgctttatggcagcctggaaacgcgccggattcagcgttgtagggcaccttgtgttcaccaaaagctacac

SEQ ID NO: 177974 - DNA, 75 bp, synthetic construct
  source 1..75: mol_type = other DNA
ggtggtgctgactgttctgagccgcgaaggcgacggaacagcagaaaaagacctgctggatgtggtggagaaagc

SEQ ID NO: 177975 - DNA, 75 bp, synthetic construct
  source 1..75: mol_type = other DNA
tgcctgcaccgcagattgtggatgtgccggactttgagacgctgcttgccgaacgcaaggctgaatttgtggcgc

SEQ ID NO: 177976 - DNA, 75 bp, synthetic construct
  source 1..75: mol_type = other DNA
tccgtgaccgttccgggcgcaccatcgctggcgataaaaccgatgaatggctgcaaccggccagcaatgagatgt

SEQ ID NO: 177977 - DNA, 75 bp, synthetic construct
  source 1..75: mol_type = other DNA
tccagcctgcaaccgttgatcgagagcttcacacacccgaacgccattgttctcgatccgtttgccgggagtggc

SEQ ID NO: 177978 - DNA, 75 bp, synthetic construct
  source 1..75: mol_type = other DNA
atgtcccgatttatccagggtaattgcgtccatatcatgtccggctttccggataatgctgtcgatttcattctc

SEQ ID NO: 177979 - DNA, 75 bp, synthetic construct
  source 1..75: mol_type = other DNA
ccaaaaacactcacggcactggttgtacgctctctgcggcgttggctgcactacgcccgcgccatacaaactggg

SEQ ID NO: 177980 - DNA, 75 bp, synthetic construct
  source 1..75: mol_type = other DNA
gatgggctgtggcgcagtgctaatgaaaggtggtcatctggatgatgaacaaagcccggactggctgtttactcg

SEQ ID NO: 177981 - DNA, 75 bp, synthetic construct
  source 1..75: mol_type = other DNA
tgacggcgaacaacggtttaccgcgccacgtattatgaccaaaaacacccacggcacaggttgtacgctctctgc

SEQ ID NO: 177982 - DNA, 75 bp, synthetic construct
  source 1..75: mol_type = other DNA
tagggctgggcaaacgtcttgatcatctcccggcacagctttccggtggcgaacagcaacgggtggcgctggcgc

SEQ ID NO: 177983 - DNA, 75 bp, synthetic construct
  source 1..75: mol_type = other DNA
ttcatcatattaagaagtccgtcggtcagggggagcatgaactctccatcctcaccggagttgagctggttgtca

SEQ ID NO: 177984 - DNA, 75 bp, synthetic construct
  source 1..75: mol_type = other DNA
tactgcttttagccttacggtataagaagttgctttcccttttcaaccagttacgcaagcaggttcacaacaaat

SEQ ID NO: 177985 - DNA, 75 bp, synthetic construct
  source 1..75: mol_type = other DNA
agtgatgcgtacgctggaactggaatctgaacccgttaccaaattgttgcaggagaacgcttatcgtgagttgct

SEQ ID NO: 177986 - DNA, 75 bp, synthetic construct
  source 1..75: mol_type = other DNA
gaaggcgacggaactgcagaaaaagacttgctggatgtggtggagaacgccctgaacagtgagaacgtccgcccg

SEQ ID NO: 177987 - DNA, 75 bp, synthetic construct
  source 1..75: mol_type = other DNA
cattcactggcactggcggcgtcactggatgcgcaggggtacagcgttaacgacatcattcatatcctgatggcg

SEQ ID NO: 177988 - DNA, 75 bp, synthetic construct
  source 1..75: mol_type = other DNA
ttgcaggcaccgatccgagcggcggcgcgggagttcaagccgatctaaaaaccttctccgcgcttggtgcatacg

SEQ ID NO: 177989 - DNA, 75 bp, synthetic construct
  source 1..75: mol_type = other DNA
gacggctccttcctgaagattggctggccgtcgatcactgtattttcctcttcggattaccgtcgtgtggcgctg

SEQ ID NO: 177990 - DNA, 75 bp, synthetic construct
  source 1..75: mol_type = other DNA
gaacgcaaggctgaatttgtggcgcttcatcctaaagatgaacaggaagccgtgatccgtacgctggaattggaa

SEQ ID NO: 177991 - DNA, 75 bp, synthetic construct
  source 1..75: mol_type = other DNA
ggggccagatgtgccaggtcagaatccctggctactgcaatcacaatcccgaaacttctgtgctggcgcattaca

SEQ ID NO: 177992 - DNA, 75 bp, synthetic construct
  source 1..75: mol_type = other DNA
cctcgcatgggatacggtcaccagtaccaccgccaccgcgtatgccaccgcccgtgcgctgggtctgcgtgccag

SEQ ID NO: 177993 - DNA, 75 bp, synthetic construct
  source 1..75: mol_type = other DNA
agctgatggtcatctggccggatttcctcgtatgggatacggtcaccagtaccaccgccaccgcgtatgccaccg

SEQ ID NO: 177994 - DNA, 75 bp, synthetic construct
  source 1..75: mol_type = other DNA
accaccgccaccgcgtatgccaccgcccgtgcgctgggtctgcgtgccaaaatcgaccaggagcagggctggcat

SEQ ID NO: 177995 - DNA, 75 bp, synthetic construct
  source 1..75: mol_type = other DNA
ggaagaagaaaccacaaccaatatcatcggcgcagtgaccgccgagggtaaaaaaacaggcatgaaagccctgct

SEQ ID NO: 177996 - DNA, 75 bp, synthetic construct
  source 1..75: mol_type = other DNA
atgaataaggcaatgttggtgatgtcaggactactgttttcaccgttggcggtagcagggcagatcacaatgacc

SEQ ID NO: 177997 - DNA, 75 bp, synthetic construct
  source 1..75: mol_type = other DNA
tgtgcatccgcaatgcgagtctacccgaatgaaaaacacaaaccgagccgtcagcttttccattgcataaattag

SEQ ID NO: 177998 - DNA, 75 bp, synthetic construct
  source 1..75: mol_type = other DNA
ccaactgagctaacgacccactttttcgttgctttcggtttgtttgatatcccgtggcaacggcggcatatatta

SEQ ID NO: 177999 - DNA, 75 bp, synthetic construct
  source 1..75: mol_type = other DNA
ggtgctgaatgccgaagcaacggcatatgccgccgcccgtgcgcttggtctgcgcgccaaaattgacgagcagac

SEQ ID NO: 178000 - DNA, 75 bp, synthetic construct
  source 1..75: mol_type = other DNA
atcggcgcagtgactgctgaaggtaaaaaaacaggtatgaaagccctgttatctgcccagtcacagctcggcgtt

SEQ ID NO: 178001 - DNA, 75 bp, synthetic construct
  source 1..75: mol_type = other DNA
gtcttcctcagcagcaacttgatgagctggataatttcattaacaacattgacggtcagtataagccgtcccgct

SEQ ID NO: 178002 - DNA, 75 bp, synthetic construct
  source 1..75: mol_type = other DNA
cctgcgcagtggtaaacgcgcccgtgttccggccttaaagctgaaatactggcagcagtttatgaccgttgtata

SEQ ID NO: 178003 - DNA, 75 bp, synthetic construct
  source 1..75: mol_type = other DNA
accgtttccaatatcattggcaccaccgacgaaaacggtcagtacaccggactgaaagccctgctggcggcggag

SEQ ID NO: 178004 - DNA, 75 bp, synthetic construct
  source 1..75: mol_type = other DNA
cggcgacgaggcacaggcgcaaaccatttcaaacatcatcggcaccacggatgagaacggcaaatacaccgggct

SEQ ID NO: 178005 - DNA, 75 bp, synthetic construct
  source 1..75: mol_type = other DNA
atgagtgactatcatcatggcgtgcaggtgctggagattaacgatggcacccgcgtcatttccactgtatccact

SEQ ID NO: 178006 - DNA, 75 bp, synthetic construct
  source 1..75: mol_type = other DNA
atagctgttttaggtaatacgggtagtggtaaatcatgttcggtggccggcttaattcaatggtctcttgatgct

SEQ ID NO: 178007 - DNA, 75 bp, synthetic construct
  source 1..75: mol_type = other DNA
accgtctttcacaggaaacaggtggaatgaccagcataaccatttccggctccgacacaccggaaacccggcgca

SEQ ID NO: 178008 - DNA, 75 bp, synthetic construct
  source 1..75: mol_type = other DNA
aggtgcttgagattaacgacggtacccgcgtcatttccacggtcgcaaccgcaatcgtcggcatggtctgcacgg

SEQ ID NO: 178009 - DNA, 75 bp, synthetic construct
  source 1..75: mol_type = other DNA
ccccctcaacgagccggtactgattaccaatgtgcagagcgccattgcgaaagccggtaaaaaaggcacgctgtc

SEQ ID NO: 178010 - DNA, 75 bp, synthetic construct
  source 1..75: mol_type = other DNA
atggctgaggcgcacatgtgggcggtggacaagcctatcaccgcaacgctgattcgcgacatcgttgacggcatc

SEQ ID NO: 178011 - DNA, 75 bp, synthetic construct
  source 1..75: mol_type = other DNA
ctgtcagcgtatggctgcaagacggtacaggaggcgatcacttaccgtgaaaactttagccagcgcgaagggatg

SEQ ID NO: 178012 - DNA, 75 bp, synthetic construct
  source 1..75: mol_type = other DNA
atgagcgactatcatcatggcgtgcaggtgctggagattaacgacggcacccgcgtcatttccactgtatccact

SEQ ID NO: 178013 - DNA, 75 bp, synthetic construct
  source 1..75: mol_type = other DNA
ggtgccgccgctcgagaacctgaccttacgccagcgcatcaccgataaatatctggcgaatctggtctcatccgt

SEQ ID NO: 178014 - DNA, 75 bp, synthetic construct
  source 1..75: mol_type = other DNA
atcactgatgtgctgactgccagcagtaaagcgggtgagtcaggtactctggcccgttcgctggatgccatcgct

SEQ ID NO: 178015 - DNA, 75 bp, synthetic construct
  source 1..75: mol_type = other DNA
tcagtctgtcagaagctgcgcgctttcgggtatatcagcgcatggggctgtaaaaccatttccgaggtgaaagcc

SEQ ID NO: 178016 - DNA, 75 bp, synthetic construct
  source 1..75: mol_type = other DNA
aaactttagccagcgcgaagggatgctgatctggcctgactttactggctgggacacggtgctgaatgccgaagc

SEQ ID NO: 178017 - DNA, 75 bp, synthetic construct
  source 1..75: mol_type = other DNA
gtcgttaaagagatgcaaggcgtggtaagagagtttatcgacagcagccagccaccgcttagcgaggtaaatcag

SEQ ID NO: 178018 - DNA, 75 bp, synthetic construct
  source 1..75: mol_type = other DNA
tttaataccggtagtcaaacagcagataactactacgctctgagagatcccctcataatttccccaaagcgtaac

SEQ ID NO: 178019 - DNA, 75 bp, synthetic construct
  source 1..75: mol_type = other DNA
taagtacctcgatatctttgatactggcatctggtatggctgcatttgctgctcatgcggcagatgatgtaaagc

SEQ ID NO: 178020 - DNA, 75 bp, synthetic construct
  source 1..75: mol_type = other DNA
aatttaaactgctgcacttttttatgacgcatcccgagcgcgtgtacagtcgcgagcaactgttaaatcacgtat

SEQ ID NO: 178021 - DNA, 75 bp, synthetic construct
  source 1..75: mol_type = other DNA
atctcaccgggtgatggcgggcgaagagccgctggagatggggccgacagaatttaaactgctgcacttttttat

SEQ ID NO: 178022 - DNA, 75 bp, synthetic construct
  source 1..75: mol_type = other DNA
cgccaacactcctttcgttaatggatgaaggtgtacgttttactaacggctatgtggcgcacggggtttccggtc

SEQ ID NO: 178023 - DNA, 75 bp, synthetic construct
  source 1..75: mol_type = other DNA
gtcatccgcgagctgaaatcgcaaggccgcggtattgtctatatctcccaccgcatgaaagaaatcttcgagatt

SEQ ID NO: 178024 - DNA, 75 bp, synthetic construct
  source 1..75: mol_type = other DNA
aagccagcgtcaatgacgcggatcggctacgcaaatacctggcgcgttttggtctgacatgggaagcaatgcagg

SEQ ID NO: 178025 - DNA, 75 bp, synthetic construct
  source 1..75: mol_type = other DNA
cagacgggcaatcgtgatgagaaggatgaacagcgcgaaaactgtctgagtataaaaaatgaaggagaggctttc

SEQ ID NO: 178026 - DNA, 75 bp, synthetic construct
  source 1..75: mol_type = other DNA
catcccgtgctgcaattatgacgggccgagcgcctgcccgttttggtgtttactccaataccgatgctcaggatg

SEQ ID NO: 178027 - DNA, 75 bp, synthetic construct
  source 1..75: mol_type = other DNA
tacctacaaaataggtattgataaagccatcgaagcggctcaaaaatcaacgccaactcttctttctttaatgga

SEQ ID NO: 178028 - DNA, 75 bp, synthetic construct
  source 1..75: mol_type = other DNA
aaaagctctctcgggagccgcgttaaatgtctatccaggtcgtgtgatggcactggtgggtgaaaacggcgcggg

SEQ ID NO: 178029 - DNA, 75 bp, synthetic construct
  source 1..75: mol_type = other DNA
gtgcgcggtacagggtatcgtttttcaacccgcttttaaggccttgctcatcggacgtagagcagggcttatgat

SEQ ID NO: 178030 - DNA, 75 bp, synthetic construct
  source 1..75: mol_type = other DNA
agacgaagaaacgaaacttgcgcagaccgtttccaatatcatcggcaccaccgacgaaaacggtcagtacaccgg

SEQ ID NO: 178031 - DNA, 75 bp, synthetic construct
  source 1..75: mol_type = other DNA
gtcaaaaagatatcacaggaatgtgatatctattcagggtataccgattacagagaaatgctcaaaaatgaagac

SEQ ID NO: 178032 - DNA, 75 bp, synthetic construct
  source 1..75: mol_type = other DNA
ggcactgatgctgacctgctgaacgaggcaggcgtcacaacgctggttcgccgcgacggttttcgtttctggggt

SEQ ID NO: 178033 - DNA, 75 bp, synthetic construct
  source 1..75: mol_type = other DNA
ttgtgcgtgtgccgcagggtgaaacggaagacgaaaccacgaccaatatcatcggcgcagtgaccgctgaaggta

SEQ ID NO: 178034 - DNA, 75 bp, synthetic construct
  source 1..75: mol_type = other DNA
aagggaaaattatctttgaacccagaactttacaaaaagaaggataacaccttgaacgaaggaaagaatgattca

SEQ ID NO: 178035 - DNA, 75 bp, synthetic construct
  source 1..75: mol_type = other DNA
atacagaacaaagcatctacctggttcaggtcgagcgttattgattcaggattctatgaggggatgtaccaaacg

SEQ ID NO: 178036 - DNA, 75 bp, synthetic construct
  source 1..75: mol_type = other DNA
tgttttgccatcaactgaaaatgtattctctgattttattaagaacaatccagctttgacaaccaatgcttttac

SEQ ID NO: 178037 - DNA, 75 bp, synthetic construct
  source 1..75: mol_type = other DNA
aacaatttaacggatgaggatatgaagttttcgctgtctaaaattactgacgaacttctctctagagtaggtgac

SEQ ID NO: 178038 - DNA, 75 bp, synthetic construct
  source 1..75: mol_type = other DNA
cgtacaggatatcagcggcgtactggccgtgtacgctgaacgacgccgggaccgccacggcccgtacacccgcct

SEQ ID NO: 178039 - DNA, 75 bp, synthetic construct
  source 1..75: mol_type = other DNA
cccggtgcctcctcttgaaaatctgaccctgcgccagcgcattaccgataaatacctggcaaatctggtcacttc

SEQ ID NO: 178040 - DNA, 75 bp, synthetic construct
  source 1..75: mol_type = other DNA
actctaagagtgtgatgccagcatcagaagagctaatgtcagtttattatcctgagatgcttaaattaggtggat

SEQ ID NO: 178041 - DNA, 75 bp, synthetic construct
  source 1..75: mol_type = other DNA
tccaggaaccattttgcatggtggcaattgaagctatgggtgctggtaagcctgttttagtgagtacgcgtgggg

SEQ ID NO: 178042 - DNA, 75 bp, synthetic construct
  source 1..75: mol_type = other DNA
atgaacagagcggaattaacggcaaaagccgtcagtctgattgaatcagcgacaccaattagccgtagcttggcg

SEQ ID NO: 178043 - DNA, 75 bp, synthetic construct
  source 1..75: mol_type = other DNA
aagtgtctcgcctgacaaacccttattctatgcggctttatgagtccttatgccagtatagaaaggatgatggga

SEQ ID NO: 178044 - DNA, 75 bp, synthetic construct
  source 1..75: mol_type = other DNA
atatgttacgactacggccatgagttctcgtatgttattggaatggcgagagacgttttaatcaatcacacacga

SEQ ID NO: 178045 - DNA, 75 bp, synthetic construct
  source 1..75: mol_type = other DNA
taataaagctggtaataatcttaaccagcttgcttataaggttaactcggcttttttgatggggcgtatttctga

SEQ ID NO: 178046 - DNA, 75 bp, synthetic construct
  source 1..75: mol_type = other DNA
cgtttcggcgctgccggaagtggactatccgaccattcaggtggtcacgctctacccaggtgccagcccggatgt

SEQ ID NO: 178047 - DNA, 75 bp, synthetic construct
  source 1..75: mol_type = other DNA
acctgtttttgcgtacctgtttttgcgtaatattccggcgaccatcattcccggcgtcgcagtgccgctgtcgtt

SEQ ID NO: 178048 - DNA, 75 bp, synthetic construct
  source 1..75: mol_type = other DNA
ccgaagcgtggcgaccgtagccgtcgcgatgatgaccgctatctgttcctggaagcgttaatttccgcgcagcaa

SEQ ID NO: 178049 - DNA, 75 bp, synthetic construct
  source 1..75: mol_type = other DNA
atggcgcttttggtgaaattttctgggaaacgcagtgtcaggagatgcagcaacttgccgacagagtcattgcct

SEQ ID NO: 178050 - DNA, 75 bp, synthetic construct
  source 1..75: mol_type = other DNA
tggaaacgctacaacgattctgggcacatccggtgcgggcgtttttccagatgcgtttgcaggtgaacttccgta

SEQ ID NO: 178051 - DNA, 75 bp, synthetic construct
  source 1..75: mol_type = other DNA
aaacaaagatttgctaaaggtattgtggaaatcgcaataccttcagttggcggtatgcagaccatgatttgcctt

SEQ ID NO: 178052 - DNA, 75 bp, synthetic construct
  source 1..75: mol_type = other DNA
ctatcaacgtgccattccacggcgcagagctttatgtcgtcaatcacaacggcgaaccgtacaccccaatgaaac

SEQ ID NO: 178053 - DNA, 75 bp, synthetic construct
  source 1..75: mol_type = other DNA
aacttgaggcgcgcggattatggcggcgtgcggcgacccgatggggtgaagtgctgattaacgccgaaacagaca

SEQ ID NO: 178054 - DNA, 75 bp, synthetic construct
  source 1..75: mol_type = other DNA
gctcgcatcgatgcacttatgtgtggcgagctgacgaaaattagtgcccttccccataccggcgatttgcaggtt

SEQ ID NO: 178055 - DNA, 75 bp, synthetic construct
  source 1..75: mol_type = other DNA
agtttgatttttatcacggtggcggtctggatgtttgttatttgagttttgctgaagtcgaccagcacggtaacg

SEQ ID NO: 178056 - DNA, 75 bp, synthetic construct
  source 1..75: mol_type = other DNA
ggggtatcattcagtaagatcatacttgatgagaggatgcaaatggctgaatatttactcagcactcgttgttat

SEQ ID NO: 178057 - DNA, 75 bp, synthetic construct
  source 1..75: mol_type = other DNA
accggccagcgggtattgctccggtaaataaagcgacctttaaaaagttactggtaaatcgcagtggcaatggat

SEQ ID NO: 178058 - DNA, 75 bp, synthetic construct
  source 1..75: mol_type = other DNA
attgagatgtttcagggagatctgtttgctaaagctaaattgaatggtatcccttccatagcgtggccagagaaa

SEQ ID NO: 178059 - DNA, 75 bp, synthetic construct
  source 1..75: mol_type = other DNA
agatgtttcagggggatctgtttgctaaagctaaattgaatggtatcccttcagttgcgtggccggagaaaaaat

SEQ ID NO: 178060 - DNA, 75 bp, synthetic construct
  source 1..75: mol_type = other DNA
aaataaaggccaatgctctggtgcctgaacaaatcatcgttgaatttactgaaagtgaagtcatatctcggtttg

SEQ ID NO: 178061 - DNA, 75 bp, synthetic construct
  source 1..75: mol_type = other DNA
tgaagtaaatcgtaacgatatcattcgagaaggcatgaaaccgagcaatattcctggaactgctggagatattgg

SEQ ID NO: 178062 - DNA, 75 bp, synthetic construct
  source 1..75: mol_type = other DNA
attattgaggaacagggcaaagaaatcgacactcttaaaacacagtcaacagttgcagccatgaatccgtccagc

SEQ ID NO: 178063 - DNA, 75 bp, synthetic construct
  source 1..75: mol_type = other DNA
cagttgaagcaagagccagatcagtaatgagaatgctagataacgcagtagaaaagatagaaaaccgcttctgtg

SEQ ID NO: 178064 - DNA, 75 bp, synthetic construct
  source 1..75: mol_type = other DNA
atgtccggatttaaatttagtaagatatgtaaagccgtatgtttatatgcagcggtgtccatgcctgctttttcc

SEQ ID NO: 178065 - DNA, 75 bp, synthetic construct
  source 1..75: mol_type = other DNA
taatgatagctggcgtatcttttagagatggggtgattacagatgaactaagccgaacagatatagcaatagctg

SEQ ID NO: 178066 - DNA, 75 bp, synthetic construct
  source 1..75: mol_type = other DNA
cagttgcagatgaaagccgaggttgaggcgctgacagagctgaaggcgatccgcagttatgttgtcggatggcct

SEQ ID NO: 178067 - DNA, 75 bp, synthetic construct
  source 1..75: mol_type = other DNA
aaggctttgcgtggacggatggtgaaaataatgtggtgccggtgacggcggcagacatcatagccctgtcggatg

SEQ ID NO: 178068 - DNA, 75 bp, synthetic construct
  source 1..75: mol_type = other DNA
ttgcagtacgaaatgcagccagcaacgaatatggcgggataaactgtgaggggcagtttgaagacgcggtgaatg

SEQ ID NO: 178069 - DNA, 75 bp, synthetic construct
  source 1..75: mol_type = other DNA
ggacaccggctggcacaaaactctgtcaaacgttggcgtgaatggcgtcactggcatcagcgcgtcggtgttctg

SEQ ID NO: 178070 - DNA, 75 bp, synthetic construct
  source 1..75: mol_type = other DNA
gctgttgactgccgaagcggtcaccggcgttaagccgcgcattctcggcgtgccggggctcgataccaaagaggt

SEQ ID NO: 178071 - DNA, 75 bp, synthetic construct
  source 1..75: mol_type = other DNA
atgagtgactatcatcatggcgtgcaggtgctggagattaacgacggcacccgcgtcatttccaccgtatccact

SEQ ID NO: 178072 - DNA, 75 bp, synthetic construct
  source 1..75: mol_type = other DNA
tgcgcgttgttgaaatcaacgaaggcacccgatccattaccacggtgagcaccgccatcgtgggtatggtctgca

SEQ ID NO: 178073 - DNA, 75 bp, synthetic construct
  source 1..75: mol_type = other DNA
aggtcgtcgaaattaacgacggcacccgcacaatctcgacggtatcaacagcggtcgttggtatggtctgtacag

SEQ ID NO: 178074 - DNA, 75 bp, synthetic construct
  source 1..75: mol_type = other DNA
tgccgggtctcgataccaaagaggtcgcagtcgcacttgcttcggtctgtatcagcctgcgcgcctttggctata

SEQ ID NO: 178075 - DNA, 75 bp, synthetic construct
  source 1..75: mol_type = other DNA
tttctagggaatgttctcataaccttaaaacatgataaaagttcagggaaaccctttggagcttgggggcctgca

SEQ ID NO: 178076 - DNA, 75 bp, synthetic construct
  source 1..75: mol_type = other DNA
atgtgggcggtggacaaaccgctgaacccgtcgctggcgcgcgacattatcgagggtatccgcgccaaaatgcgc

SEQ ID NO: 178077 - DNA, 75 bp, synthetic construct
  source 1..75: mol_type = other DNA
ccgcaccatttccaccgtttcaaccgccatcatcggcatggtctgtacggccagcgatgctgacgagaaaacatt

SEQ ID NO: 178078 - DNA, 75 bp, synthetic construct
  source 1..75: mol_type = other DNA
ggtcacatgtgggcgatcgacaagccgatcacggccacgctgattaaagacatcgttgcgggtatcaatgcgaaa

SEQ ID NO: 178079 - DNA, 75 bp, synthetic construct
  source 1..75: mol_type = other DNA
ctgatcgactacatcgggcaaagccattatctgccgggcgatgaagcgcttaactgcgatgaaagtgaggcgagg

SEQ ID NO: 178080 - DNA, 75 bp, synthetic construct
  source 1..75: mol_type = other DNA
tttgtcgatgtgacgccagataacctgctgcataacattcagtctgacattctggaactggaaaaccgcgccgtt

SEQ ID NO: 178081 - DNA, 75 bp, synthetic construct
  source 1..75: mol_type = other DNA
cccgcagcgataacaaacggcagctcgatccgcaggataacagcgtcaccttccatgtttgccatagcccgcagc

SEQ ID NO: 178082 - DNA, 75 bp, synthetic construct
  source 1..75: mol_type = other DNA
ttaacagcgatggtgaacaggatgtcggcaacccgctgctggcttcatggggtaagcttgggcgcgactacattt

SEQ ID NO: 178083 - DNA, 75 bp, synthetic construct
  source 1..75: mol_type = other DNA
gcgtccctctttgctcagtgtggcacagggaatgcaactttggctggaacaccttgtctactgtgccagcggtgg

SEQ ID NO: 178084 - DNA, 75 bp, synthetic construct
  source 1..75: mol_type = other DNA
caaattacgggctggttgccgcaggtccagccggatggtctgttgcgctggcgtccctctttgctcagtgtggca

SEQ ID NO: 178085 - DNA, 75 bp, synthetic construct
  source 1..75: mol_type = other DNA
agccagcgttttctcgccggaccggttaacatttgtactctgatgccaatgcgttcaattccgttcaaagtggtt

SEQ ID NO: 178086 - DNA, 75 bp, synthetic construct
  source 1..75: mol_type = other DNA
gctacgcgatggagagcgcgcagggcgagtggcaatcggttctaccttatgatgaatcgagcggcttaattgcag

SEQ ID NO: 178087 - DNA, 75 bp, synthetic construct
  source 1..75: mol_type = other DNA
aaattacaaactaaagaaattagtttactcaattatcatgttgcgaaaatacatgatacctttggcacgttagat

SEQ ID NO: 178088 - DNA, 75 bp, synthetic construct
  source 1..75: mol_type = other DNA
ttaacatttgtactctgatgccaatgcgttccatcccattcaaagtggtttgcctgctgggaatgaacgacggcg

SEQ ID NO: 178089 - DNA, 75 bp, synthetic construct
  source 1..75: mol_type = other DNA
cgatgcagagcgcttgttccgccgcttccgggcagcaggggatttgccatatggcgcatttggggaaattttctg

SEQ ID NO: 178090 - DNA, 75 bp, synthetic construct
  source 1..75: mol_type = other DNA
gcgttcaattccgttcaaagtggtttgcctgctgggaatgaacgacggcgtttatccacgtcagcttgcgccatt

SEQ ID NO: 178091 - DNA, 75 bp, synthetic construct
  source 1..75: mol_type = other DNA
gaaaaagcttatgacctgctgactctggcgcagggtgagttccaggccgataccgccgttgctggtttgcaggct

SEQ ID NO: 178092 - DNA, 75 bp, synthetic construct
  source 1..75: mol_type = other DNA
ctgctgggcattatcggcaggagcgaatccaagcttcatagcaaaccaaatgggccatgcaaatgcacaaatggt

SEQ ID NO: 178093 - DNA, 75 bp, synthetic construct
  source 1..75: mol_type = other DNA
cttaaaaaagtccaaggtaaaaccagatcctctcacccgtgacgaatttattcgttttattgaggcttgccgtca

SEQ ID NO: 178094 - DNA, 75 bp, synthetic construct
  source 1..75: mol_type = other DNA
cgtgatgctgaccgaatacgctgccgacatcaaaaccgcagtggcttacccacccgcttccctggttaacacctt

SEQ ID NO: 178095 - DNA, 75 bp, synthetic construct
  source 1..75: mol_type = other DNA
gatatcaaaactgcggttgcttatccaccagcgtctctggttaacacctttggcgagtggatggcgaaaaacgac

SEQ ID NO: 178096 - DNA, 75 bp, synthetic construct
  source 1..75: mol_type = other DNA
gggtgatggaagcggcggttaaagcggttgaagcgctggatactgcgtggaagaagtcgcgaaagcggttgagtc

SEQ ID NO: 178097 - DNA, 75 bp, synthetic construct
  source 1..75: mol_type = other DNA
gtgtttgccaaattaccggcactggtcgagcgtgccggaaatggcattagcggcggctcgattaccgcgttttat

SEQ ID NO: 178098 - DNA, 75 bp, synthetic construct
  source 1..75: mol_type = other DNA
ccactgaccagagatgagtttagccgtctcattgatgcctgccatcatcaacagaccaaaaacctctggacagtg

SEQ ID NO: 178099 - DNA, 75 bp, synthetic construct
  source 1..75: mol_type = other DNA
tactcgtcttagcaggcagcatcagatcactgttcaattacgcgagtacggaagaacaattttgcacgagtgcac

SEQ ID NO: 178100 - DNA, 75 bp, synthetic construct
  source 1..75: mol_type = other DNA
gcgttgaaaaccatggcggatcactccgtatatggtttcactataatggcaaacgtgtcagagaaaacctcggtg

SEQ ID NO: 178101 - DNA, 75 bp, synthetic construct
  source 1..75: mol_type = other DNA
attttcgcgatcgtggtcagcatgtgttgctgattatggactccctcacccgctacgcgatggcccagcgtgaaa

SEQ ID NO: 178102 - DNA, 75 bp, synthetic construct
  source 1..75: mol_type = other DNA
ttgcgctggcgattggcgaaccacctgccactaaaggttatccacattgcgctggcgattggcgaaccacctgcc

SEQ ID NO: 178103 - DNA, 75 bp, synthetic construct
  source 1..75: mol_type = other DNA
tcgcgataaccgttgggatcgcgttgaaaaagcttatgacctgctgactctggcgcaaggtgagttccaggctaa

SEQ ID NO: 178104 - DNA, 75 bp, synthetic construct
  source 1..75: mol_type = other DNA
tgggcgaactgatgttactgtacggtattgcggatctcgcctttgtcggtggttcgctggtcgaacgcggtggac

SEQ ID NO: 178105 - DNA, 75 bp, synthetic construct
  source 1..75: mol_type = other DNA
tgtaggtggtactgcaaaagcagggacggtgaagttagcttttactggcccaatagttgctgcccatagtgatga

SEQ ID NO: 178106 - DNA, 75 bp, synthetic construct
  source 1..75: mol_type = other DNA
gacattctgctgagctagatacaaatggtggtacgggcacagctatcgtagttcagggggcaggtaaaaacgtgg

SEQ ID NO: 178107 - DNA, 75 bp, synthetic construct
  source 1..75: mol_type = other DNA
tttcaaaaagcttccttgaggcaggaggtgtatccaaaccaatggacttagatattgaattggttaattgtgata

SEQ ID NO: 178108 - DNA, 75 bp, synthetic construct
  source 1..75: mol_type = other DNA
agaagtcgtcagccgttggtgccgctgttactgaaggtgccttctctgccgttgcgaatttcaacctgacctatc

SEQ ID NO: 178109 - DNA, 75 bp, synthetic construct
  source 1..75: mol_type = other DNA
tgggcgagctgatgttgctatacggcattgccgatctcgcgtttgttggcggttcactggttgaacgaggtgggc

SEQ ID NO: 178110 - DNA, 75 bp, synthetic construct
  source 1..75: mol_type = other DNA
acgaacttgacgagttctttcgaaccggggtgctcgatactcatggtgttggtgaatcggatcgtaaagtaaaag

SEQ ID NO: 178111 - DNA, 75 bp, synthetic construct
  source 1..75: mol_type = other DNA
acagtaaacaatggcccggtaaagcagttattggtcgtctgaaagatgacgaactggagcaatataatttgtggc

SEQ ID NO: 178112 - DNA, 75 bp, synthetic construct
  source 1..75: mol_type = other DNA
ccctggtgagctgtgtgcacttggatgggaggacatagatctgaaaaatggaacaatgatgatcaggagaaattt

SEQ ID NO: 178113 - DNA, 75 bp, synthetic construct
  source 1..75: mol_type = other DNA
cgtgaaagttgcgttcactggcaagactgtaggtactcagttagatgaattaggtactactggtcacactggaac

SEQ ID NO: 178114 - DNA, 75 bp, synthetic construct
  source 1..75: mol_type = other DNA
tattgctcagtgatgagtctgacggtcagtttctgctccaaagtgttgcgcaaagttttcatgagcaaggaacgg

SEQ ID NO: 178115 - DNA, 75 bp, synthetic construct
  source 1..75: mol_type = other DNA
ataaaaatgcgtttttccctgtggagcttaaaatcgcttatcaggaatccggcgaatggcccgatgatggaatca

SEQ ID NO: 178116 - DNA, 75 bp, synthetic construct
  source 1..75: mol_type = other DNA
gcttgataaaacattaattaatggcctgaatgtttgccagaaactggagattaatgttccggtttatgcggggat

SEQ ID NO: 178117 - DNA, 75 bp, synthetic construct
  source 1..75: mol_type = other DNA
gtatctggctcgttgccggcgttactgatatgcgtaaatccttcaacggtctgggagaacaggtacaacatgtgc

SEQ ID NO: 178118 - DNA, 75 bp, synthetic construct
  source 1..75: mol_type = other DNA
ctcgataagctggactggcgtcagccaaaaacatcccgccttaacgcactgacaaaactcctgaccgcattataa

SEQ ID NO: 178119 - DNA, 75 bp, synthetic construct
  source 1..75: mol_type = other DNA
tagtgatgatgggcctcgatcttaccaaccagaccgtttgcaccccggacgtgattgctcggatggaaagggcag

SEQ ID NO: 178120 - DNA, 75 bp, synthetic construct
  source 1..75: mol_type = other DNA
aaaccggtctggatggcccggtgttcgaaccgctgacccgccaggctgaaagcacccatgcggtgaaatacatca

SEQ ID NO: 178121 - DNA, 75 bp, synthetic construct
  source 1..75: mol_type = other DNA
ctggcggcccggtacatgacgccacctgtatcggttatctgattaaccctgatggcattaaaacccaggagatgt

SEQ ID NO: 178122 - DNA, 75 bp, synthetic construct
  source 1..75: mol_type = other DNA
tggccgtcagcccgtgatggcaaagtgttccttacgcaggcgcagctggcgatgctgctggaaggtatcgactga

SEQ ID NO: 178123 - DNA, 75 bp, synthetic construct
  source 1..75: mol_type = other DNA
gacgatttctcgtgtgtctgtgaggtggtctattttccccgtacgccgtcggtatcgacgacggggattattgag

SEQ ID NO: 178124 - DNA, 75 bp, synthetic construct
  source 1..75: mol_type = other DNA
tggtctattttccccgtacgccatcggtatcgacgacggggatcattgaggtgattaggggtaaatcagccacct

SEQ ID NO: 178125 - DNA, 75 bp, synthetic construct
  source 1..75: mol_type = other DNA
tacacatcgaaggccgcatatgtgggctatcgccacgaatgcgcctatatcctggcaaaaggccgtccacgtctg

SEQ ID NO: 178126 - DNA, 75 bp, synthetic construct
  source 1..75: mol_type = other DNA
atgatctcactcccatccggtacccgtatctggctcgttgccgggataaccgatatgcgtaagtctttcaacggg

SEQ ID NO: 178127 - DNA, 75 bp, synthetic construct
  source 1..75: mol_type = other DNA
gaatctggctggttgccggcgttactgatatgcgtaaatctttcaacggtctgggagaacaggtacaacatgtgc

SEQ ID NO: 178128 - DNA, 75 bp, synthetic construct
  source 1..75: mol_type = other DNA
ccgctaataccaaagtcggcatcacaattgataccgactggttctggggattagtcgaagaatgcgttcgcggct

SEQ ID NO: 178129 - DNA, 75 bp, synthetic construct
  source 1..75: mol_type = other DNA
ggaagcagagcaggatcgccagatgaacatactgacgggggcttctgcacctgcaagacaacaactgagtgttgg

SEQ ID NO: 178130 - DNA, 75 bp, synthetic construct
  source 1..75: mol_type = other DNA
ttttcataaacgttggtttgggagaaggctctgcattaccgattggggtgcctgttccgtggccttcagccactc

SEQ ID NO: 178131 - DNA, 75 bp, synthetic construct
  source 1..75: mol_type = other DNA
aacggtaaaaacctcgacgcaggtaaagcaggcgtggaagtggacgaccgtggcttcatccgcgttgataaacaa

SEQ ID NO: 178132 - DNA, 75 bp, synthetic construct
  source 1..75: mol_type = other DNA
atgcaaaacagtttccctcctcacgcaatctggaaaaatttggtgaggcccgacaagatttaaccataaaagaac

SEQ ID NO: 178133 - DNA, 75 bp, synthetic construct
  source 1..75: mol_type = other DNA
acatccgcagcgctgacccgccagcaatacgacgactggcgcaccagatatttaccccgtgtagcaaggctggct

SEQ ID NO: 178134 - DNA, 75 bp, synthetic construct
  source 1..75: mol_type = other DNA
ttgctggcgcgaaaaatggtatccgtgaagccgaacaggatcgccagatgaatattctgacgggggcttctgcac

SEQ ID NO: 178135 - DNA, 75 bp, synthetic construct
  source 1..75: mol_type = other DNA
tgcgatgacagcacacaggattatcccacgaaaacagacttgggcgggcgcagtcatttactggtatcaacggaa

SEQ ID NO: 178136 - DNA, 75 bp, synthetic construct
  source 1..75: mol_type = other DNA
gatgatttcacttataacggacaggaaatatggcgtggcgatagcatttatcttgtaaaaagttatcaagatgaa

SEQ ID NO: 178137 - DNA, 75 bp, synthetic construct
  source 1..75: mol_type = other DNA
ggtgacaccgtgaggatcctctgggctgatgctgacggtctgtgtctgtttaccaaacgtctggaagagggacag

SEQ ID NO: 178138 - DNA, 75 bp, synthetic construct
  source 1..75: mol_type = other DNA
tcttataactggacattcgacgcctctcgctcagttcgtacagcatctgaaacccgcccccgtaatattgcgttt

SEQ ID NO: 178139 - DNA, 75 bp, synthetic construct
  source 1..75: mol_type = other DNA
aaggctgtgtactacatggctatgctatggattcacaaagcaaaagaggctgcaaatgctcttggaggtgagtga

SEQ ID NO: 178140 - DNA, 75 bp, synthetic construct
  source 1..75: mol_type = other DNA
cggttgttgcctgagccccgcctgggcaaaggcaggcctgttcagctgggccgtaccggtttactggggctgaaa

SEQ ID NO: 178141 - DNA, 75 bp, synthetic construct
  source 1..75: mol_type = other DNA
tgacacgcctggatgtctgtaaggcgaaagtcagaattgccgaacgtacgtttactacctttggctcacgcggcg

SEQ ID NO: 178142 - DNA, 75 bp, synthetic construct
  source 1..75: mol_type = other DNA
gttgaagctcacggctggtcgacgttctatctgttctctgtcgcagccgccgtccccggacttattttactgctg

SEQ ID NO: 178143 - DNA, 75 bp, synthetic construct
  source 1..75: mol_type = other DNA
catcagcctttgtcgcgctgttaatgacgctgtgtaataagtcattttccgctactcaatttgccctgctctcag

SEQ ID NO: 178144 - DNA, 75 bp, synthetic construct
  source 1..75: mol_type = other DNA
gggattataactggcgcaggcagggaggctcgtcccgcatgattgaaatcagcaaacgcgaacaattctatcagc

SEQ ID NO: 178145 - DNA, 75 bp, synthetic construct
  source 1..75: mol_type = other DNA
cgtgaaggcaaaactgacggaagggcagatgtcgatggatttcaacgtcatgacacgccttgatatctgtaaggc

SEQ ID NO: 178146 - DNA, 75 bp, synthetic construct
  source 1..75: mol_type = other DNA
tttacaaccgcaaggcaaactgctgttcagtgaaattagctggcttgcaggctattcaccggatcaagttcagtg

SEQ ID NO: 178147 - DNA, 75 bp, synthetic construct
  source 1..75: mol_type = other DNA
atcgtctttgatgcctggaaaacggatgtacttccagcggaagaacgcggcgcaggagcggcaatcagcgtactg

SEQ ID NO: 178148 - DNA, 75 bp, synthetic construct
  source 1..75: mol_type = other DNA
cgctttctgctgtaggacgggtttatgtaggaccagtagctggttggtttgtggaagctcacggctggccgacgt

SEQ ID NO: 178149 - DNA, 75 bp, synthetic construct
  source 1..75: mol_type = other DNA
ccggcggcttagccctgtggctggcagataaatggctgggctggcagggctggcagggcatgtactggttgatgg

SEQ ID NO: 178150 - DNA, 75 bp, synthetic construct
  source 1..75: mol_type = other DNA
agtcgccattgcggcgatgggttttctcgaaccaggcacccagctccgctggatggcggcactggcggtggtgat

SEQ ID NO: 178151 - DNA, 75 bp, synthetic construct
  source 1..75: mol_type = other DNA
atgtccagtcaatatttacgtattttccaacagccacgttcagctattttgctgatcctgggttttgcttccggg

SEQ ID NO: 178152 - DNA, 75 bp, synthetic construct
  source 1..75: mol_type = other DNA
gcgacgcagtttgccttgctctcagcgctttctgctgtagggcgagtttatgtcggccccgtggcaggttggttt

SEQ ID NO: 178153 - DNA, 75 bp, synthetic construct
  source 1..75: mol_type = other DNA
cggatgtgctgggctggaaatattcgggcaaccgccatcacccgacggaaaagcccgttaccagcctgcaaccgc

SEQ ID NO: 178154 - DNA, 75 bp, synthetic construct
  source 1..75: mol_type = other DNA
aaattgtcacgtgatgatccataatggtatggaagtacgtacaatagaacagttaagagagatattagaaagaac

SEQ ID NO: 178155 - DNA, 75 bp, synthetic construct
  source 1..75: mol_type = other DNA
tccttcgcgatctggaaaaccaggtctgtgatgccgtcgtggatcgggtgaatgaacatctgccggggaatatcg

SEQ ID NO: 178156 - DNA, 75 bp, synthetic construct
  source 1..75: mol_type = other DNA
ggtgttgataaaagtattcttggattcagtaactccaggatggcttataatgatttactttctcgtgtgtgcctt

SEQ ID NO: 178157 - DNA, 75 bp, synthetic construct
  source 1..75: mol_type = other DNA
gattgcggagggtaagtggtatcctttgtcctaccggcagtgggtggaacaacaggcggctcagggagacagggc

SEQ ID NO: 178158 - DNA, 75 bp, synthetic construct
  source 1..75: mol_type = other DNA
ggaaatggacacttcaccataagtcgtccggacgtggatttacaccgccagcgcagtgaagagtattaccacgaa

SEQ ID NO: 178159 - DNA, 75 bp, synthetic construct
  source 1..75: mol_type = other DNA
gatggggacaggtccacagggagcaataaagcgcgaactgttttctgataaggaaagtctgtgggggtacacgac

SEQ ID NO: 178160 - DNA, 75 bp, synthetic construct
  source 1..75: mol_type = other DNA
aggaatattgtggctgtgtgtattctctgcgcgataccaatctacaccgcaaatctcagggacgccctctaatca

SEQ ID NO: 178161 - DNA, 75 bp, synthetic construct
  source 1..75: mol_type = other DNA
ccgaacattcatcctcagaaagagtatttaattcgtaaggatgagaatattcgctttgctgaacaacacggcgtg

SEQ ID NO: 178162 - DNA, 75 bp, synthetic construct
  source 1..75: mol_type = other DNA
cggaaaagcccgttaccagcctgcaaccactgattgagagcttcacacatccgaatgcgattgtgctggacccgt

SEQ ID NO: 178163 - DNA, 75 bp, synthetic construct
  source 1..75: mol_type = other DNA
gccgttattgattatgctgcgagcctggtcaataagaatcgtaccgatttcatcattgaactggcttaccaggaa

SEQ ID NO: 178164 - DNA, 75 bp, synthetic construct
  source 1..75: mol_type = other DNA
tcacaccagaacgtattgaacaaattttggaatttgccgagggtagtaacccaagcgaagcaatgagtctcagag

SEQ ID NO: 178165 - DNA, 75 bp, synthetic construct
  source 1..75: mol_type = other DNA
cacgctggaaaaatatgcagcaggttaacgactgtggacggcgagccgtcgcgtattatccgggcatggtgtact

SEQ ID NO: 178166 - DNA, 75 bp, synthetic construct
  source 1..75: mol_type = other DNA
ttgaagtttatccggaagttgaactgcagggtctggaagcgatcgaagttgaaaaaccgatcgttgaagtgaccg

SEQ ID NO: 178167 - DNA, 75 bp, synthetic construct
  source 1..75: mol_type = other DNA
caggttgaaactctcagagaaaaactcgaagtccttgaatggcagattagctgtgcggcaagcgatagcctctac

SEQ ID NO: 178168 - DNA, 75 bp, synthetic construct
  source 1..75: mol_type = other DNA
aacatgcttatttgatcctgggctcagtagctttgattttcactttcatttcattttttacgctaaaggaaaaac

SEQ ID NO: 178169 - DNA, 75 bp, synthetic construct
  source 1..75: mol_type = other DNA
agctgaaagctgacgaagagcgcgtgaaaggcctgatcgaagagatggcttctgcgtatgaagatccgaaagaag

SEQ ID NO: 178170 - DNA, 75 bp, synthetic construct
  source 1..75: mol_type = other DNA
cgcgagctgaagagcgcaattcgcaatcgcgttaagtcccaggcgattgaaggtctggtaaaagctaacgacatc

SEQ ID NO: 178171 - DNA, 75 bp, synthetic construct
  source 1..75: mol_type = other DNA
cgctgaagtgcgtaaaaacatggagcgcgagctgaagagcgccatccgtaaccgcgttaagtctcaggcgatcga

SEQ ID NO: 178172 - DNA, 75 bp, synthetic construct
  source 1..75: mol_type = other DNA
gaggaagcgcgtgcgattgaaatccctgaccagattaaagaagcatttagtgattttactgcgtttatcatctgg

SEQ ID NO: 178173 - DNA, 75 bp, synthetic construct
  source 1..75: mol_type = other DNA
ggcgttgttgattgccctgctggtgattgtggcgctgtggccagggccgaaatggcagcgtatgtgcgcccgtct

SEQ ID NO: 178174 - DNA, 75 bp, synthetic construct
  source 1..75: mol_type = other DNA
cggtggtggggcgaagactggcacagtatctctgactttttcgggtgtcccaagtggtccgcagagtgacatgtt

SEQ ID NO: 178175 - DNA, 75 bp, synthetic construct
  source 1..75: mol_type = other DNA
ggcaactgcgcctgatggcgcagtcaacccttccgccgccacccctgcggcctgtttcccgctgtggactttccg

SEQ ID NO: 178176 - DNA, 75 bp, synthetic construct
  source 1..75: mol_type = other DNA
tgctggcgcacccgccagtctccgccgaacccgctggcgcggtttcgggctgccgctacggtccgatgtctgaaa

SEQ ID NO: 178177 - DNA, 75 bp, synthetic construct
  source 1..75: mol_type = other DNA
cagccctcaaaagccagaatgaacacttacaacggaccgtatctgatttaaaggtcagtgtcagtcagcttgaac

SEQ ID NO: 178178 - DNA, 75 bp, synthetic construct
  source 1..75: mol_type = other DNA
tttgatgacctctttcgtatgcaatctgaacttgctactatgttatacaaatatgaatataagccaggaaaaagg

SEQ ID NO: 178179 - DNA, 75 bp, synthetic construct
  source 1..75: mol_type = other DNA
aatcatgacagacactgcgggtagcagcgatattattttcggtctgttctggctactggggtatcagttttcccc

SEQ ID NO: 178180 - DNA, 75 bp, synthetic construct
  source 1..75: mol_type = other DNA
ccgatacagcaggtgccagcgaacttgtctttggccttttctggctgctgggataccagttttctccaggcactg

SEQ ID NO: 178181 - DNA, 75 bp, synthetic construct
  source 1..75: mol_type = other DNA
ctatatgattattcccgaaatcgccattaatttaggctgtgtattaccgtatcacggctcttattttgctgcggc

SEQ ID NO: 178182 - DNA, 75 bp, synthetic construct
  source 1..75: mol_type = other DNA
ccagagggcgatcagatccccgaaaaatagtccttcagtgggacgaaatgatccggaccgctggctccctgaagc

SEQ ID NO: 178183 - DNA, 75 bp, synthetic construct
  source 1..75: mol_type = other DNA
cgtccctccggactgactcaggcaatcattgaagtggggcgcatcaacaaaacgctgtatctgcttaattatatt

SEQ ID NO: 178184 - DNA, 75 bp, synthetic construct
  source 1..75: mol_type = other DNA
tgcagaatacggtcagagggaaaatccccgccgtgagcatgcagcgctgatacgtcagcactatcagtatcgtga

SEQ ID NO: 178185 - DNA, 75 bp, synthetic construct
  source 1..75: mol_type = other DNA
tcgtttcctcggccttgagaagaaaacccgtttctaccaggcatccacctctgaactgtatggtctggtgcagga

SEQ ID NO: 178186 - DNA, 75 bp, synthetic construct
  source 1..75: mol_type = other DNA
gcatgacgcgccgggtgttaaaccgggtgatgtgattatcgccgttgatccgcgttacttccgtccggctgaagt

SEQ ID NO: 178187 - DNA, 75 bp, synthetic construct
  source 1..75: mol_type = other DNA
tgagagacctttgtgaagagattttacaaaaattagatgatgcaattggtattgaacgaactacacctgagatta

SEQ ID NO: 178188 - DNA, 75 bp, synthetic construct
  source 1..75: mol_type = other DNA
tcttcaaccatgaatccccgcgccgtggcgaaaccttcgttacccgcaaaatcacccgcgcaatcgccaatatcg

SEQ ID NO: 178189 - DNA, 75 bp, synthetic construct
  source 1..75: mol_type = other DNA
gtcaccgggcatgacgcgccgggcgttaaaccgggcgatgtgattatcgccgttgacccgcgttacttccgtccg

SEQ ID NO: 178190 - DNA, 75 bp, synthetic construct
  source 1..75: mol_type = other DNA
gcacgctgcgtctgctggaggcgatccgttttctcggtctggaaaagaaaacccgtttctatcaagcctccactt

SEQ ID NO: 178191 - DNA, 75 bp, synthetic construct
  source 1..75: mol_type = other DNA
ttatcgccgggctggcgtgcgtggatggcgtatttctggaggaatcgctggagcagaaagcggagtatttgcggg

SEQ ID NO: 178192 - DNA, 75 bp, synthetic construct
  source 1..75: mol_type = other DNA
caccccgatcctttagttagagaagaatacacaatacgcctgaaacaattgcgtcagccttttcttatttattat

SEQ ID NO: 178193 - DNA, 75 bp, synthetic construct
  source 1..75: mol_type = other DNA
aatacatggcgtcacaattctgaacgcactgaagatgaagttattgaccattttgtatcactggacctgctcatc

SEQ ID NO: 178194 - DNA, 75 bp, synthetic construct
  source 1..75: mol_type = other DNA
atgtcccgctttgtcctcggtaactgcatcgatgttatggcccgtatccctgataacgccattgatctcatactt

SEQ ID NO: 178195 - DNA, 75 bp, synthetic construct
  source 1..75: mol_type = other DNA
atgtcccgttttgtcctcggtaactgcatcgatgttatggccacgattcctgataacgccattgatttcatctta

SEQ ID NO: 178196 - DNA, 75 bp, synthetic construct
  source 1..75: mol_type = other DNA
tcggactcttccgggcggccagtgaaggtgtgtcacagggcggtgtgatctcgccgttgctgtcgaacatcatgc

SEQ ID NO: 178197 - DNA, 75 bp, synthetic construct
  source 1..75: mol_type = other DNA
aattaaatcaagttttttggggatcttagttattgatgaaatgcaaaggttggtgttcaagcgcacgggaggtga

SEQ ID NO: 178198 - DNA, 75 bp, synthetic construct
  source 1..75: mol_type = other DNA
gacattcgccgtgcggcagctgctgcaggagccagcgattttattaacgccctgccgaaaggcttcgatagcctg

SEQ ID NO: 178199 - DNA, 75 bp, synthetic construct
  source 1..75: mol_type = other DNA
atcttcgcgatatcagactggaggcgcttcgtcgccgggtaggcatcgtatttgaagatgcttttctgtttgccg

SEQ ID NO: 178200 - DNA, 75 bp, synthetic construct
  source 1..75: mol_type = other DNA
ctttctgaaaatgaagagttatcagctgtatttaatttttatagaattaattctggcggttgtattgaaaggttt

SEQ ID NO: 178201 - DNA, 75 bp, synthetic construct
  source 1..75: mol_type = other DNA
ttatcaatgcccggtacgaaagtattctgccaaccatcctgatcagcaatctttcaccgaaggcgttgtgggcat

SEQ ID NO: 178202 - DNA, 75 bp, synthetic construct
  source 1..75: mol_type = other DNA
caaatgctcgatgatgcctcgctcactgagtatcgtcgccagattgggcttgtcgatcaggatgtagcactgttt

SEQ ID NO: 178203 - DNA, 75 bp, synthetic construct
  source 1..75: mol_type = other DNA
actgccggggtactggcggctttcttcctgttgctggggcaattctatgggccagtgcagcagttatcagggatt

SEQ ID NO: 178204 - DNA, 75 bp, synthetic construct
  source 1..75: mol_type = other DNA
ggctgtatcagttccgtcgttgttcatcccgggagacgctgaaaaaagtgatttcccacactcgttataaactta

SEQ ID NO: 178205 - DNA, 75 bp, synthetic construct
  source 1..75: mol_type = other DNA
catttatcacaggcgtaactggacaagatggttcatatcttgcagaatttcttattgaaaaaggttatgaagtac

SEQ ID NO: 178206 - DNA, 75 bp, synthetic construct
  source 1..75: mol_type = other DNA
ttacaggtcaggatggttcttacttggcagaatttcttcttgaaaaaggttatgaagtgcatggtataaaacgcc

SEQ ID NO: 178207 - DNA, 75 bp, synthetic construct
  source 1..75: mol_type = other DNA
aaagaaatccaaccagacgaagtttataaccttggtgctcaatctcatgtagcggtttcattcgaatcacctgaa

SEQ ID NO: 178208 - DNA, 75 bp, synthetic construct
  source 1..75: mol_type = other DNA
gaattactggacaagatggttcttatcttgccgaatttttattagataaaggttatgaagttcatggcataaaaa

SEQ ID NO: 178209 - DNA, 75 bp, synthetic construct
  source 1..75: mol_type = other DNA
atcacccgcgcaatcgccaatatcgcccagggctggagtcgtgcctgtacctcggcaatatggattccctgcgtg

SEQ ID NO: 178210 - DNA, 75 bp, synthetic construct
  source 1..75: mol_type = other DNA
cctggcagagtttctgctggaaaaaggttacgaggtgcatggtatcaagcgtcgtgcatcgtcattcaacaccga

SEQ ID NO: 178211 - DNA, 75 bp, synthetic construct
  source 1..75: mol_type = other DNA
agtgtttctgtattcaatggtgaacgtgacgttccggtaatgtctttgccagaagagccgatactgaccggaaat

SEQ ID NO: 178212 - DNA, 75 bp, synthetic construct
  source 1..75: mol_type = other DNA
aacgcagacggcgtaccacacaggaaaagatcgcaattgttcagcagagctttgaaccgggggatgacggtctcc

SEQ ID NO: 178213 - DNA, 75 bp, synthetic construct
  source 1..75: mol_type = other DNA
attcaaatgactttaaagctaaggtagcacttgctgcgattaaagcagaaaaaacacttgctgaattgagtgctg

SEQ ID NO: 178214 - DNA, 75 bp, synthetic construct
  source 1..75: mol_type = other DNA
cttctgaactcttcggcttagtccaagaaattccgcagcgagaaactacaccgttctatcctcgttcgccttatg

SEQ ID NO: 178215 - DNA, 75 bp, synthetic construct
  source 1..75: mol_type = other DNA
gactggggacatgctaaagattatgtcaggatgcagtggatgatgctacagcaggaacaacctgaagatttcgtt

SEQ ID NO: 178216 - DNA, 75 bp, synthetic construct
  source 1..75: mol_type = other DNA
aatacctcagaaagagacgacacctttttacccacgttcaccgtatgctgtagccaaactgtatgcttactggat

SEQ ID NO: 178217 - DNA, 75 bp, synthetic construct
  source 1..75: mol_type = other DNA
ttcgctggtcgccgctggagaaatgactgccggggtactggcggctttcttcctgttgctggggcaattctatgg

SEQ ID NO: 178218 - DNA, 75 bp, synthetic construct
  source 1..75: mol_type = other DNA
caccatggcgacagacatatcctcagcgatatctccttttccctgcgcgccggtgaaaccgtggcggtggtgggc

SEQ ID NO: 178219 - DNA, 75 bp, synthetic construct
  source 1..75: mol_type = other DNA
gaatgctcacatcctgctgctcgacgaagccacgtcatgtctggatcgcacatccgaagaacgactgatgtcatc

SEQ ID NO: 178220 - DNA, 75 bp, synthetic construct
  source 1..75: mol_type = other DNA
aaaatacccgctcgctggtttttgatctcggtggcggcacgtttgacgtcacggtgctcgaatacgccacgccgg

SEQ ID NO: 178221 - DNA, 75 bp, synthetic construct
  source 1..75: mol_type = other DNA
gcgagaagagattggccgggtgatcaccgattttgatgcggcgttgcagtcaaacgatatggcccgcgtcgatga

SEQ ID NO: 178222 - DNA, 75 bp, synthetic construct
  source 1..75: mol_type = other DNA
agaacgaactggaagatttgtggttgccgctgctcaatcgcttgcgagtgccgattgaacaggcgttgcgcgatg

SEQ ID NO: 178223 - DNA, 75 bp, synthetic construct
  source 1..75: mol_type = other DNA
gattatctgaacctcatcgagcaactggatgaagaaggttttgatgactttacccgtgtacgtgaactgctgggt

SEQ ID NO: 178224 - DNA, 75 bp, synthetic construct
  source 1..75: mol_type = other DNA
gcattattgtccctggcatgtctgacatttatccggcagaagatttatggctcgccaacaacagcatgggtagcc

SEQ ID NO: 178225 - DNA, 75 bp, synthetic construct
  source 1..75: mol_type = other DNA
caatgatgcgtcagatgctgttccggaactcaacatcagaaaactggtaccctcgcacgccgtttgaccaaaatc

SEQ ID NO: 178226 - DNA, 75 bp, synthetic construct
  source 1..75: mol_type = other DNA
gttgtggtgctggataagggccgtatggtggataccggaaccccggcagaacttgaagcgcgctgtccggcgttc

SEQ ID NO: 178227 - DNA, 75 bp, synthetic construct
  source 1..75: mol_type = other DNA
ccacctcagcggttgatgctgttacggaagcggagattaataccgcgctgggtcgctatgctgacgaagggcata

SEQ ID NO: 178228 - DNA, 75 bp, synthetic construct
  source 1..75: mol_type = other DNA
catgcacccggaacaggattcaattacggttaacgtctatcagggagaaaaccacaaagttaaaaataacattct

SEQ ID NO: 178229 - DNA, 75 bp, synthetic construct
  source 1..75: mol_type = other DNA
gcaaagtgtataacggaagcgatggagccactctaggacttagtgatttggagcctctggcgcgaaaggtgtcag

SEQ ID NO: 178230 - DNA, 75 bp, synthetic construct
  source 1..75: mol_type = other DNA
cgtaccccagcttttggagcttcatcgacaaggttgatccagagcaggttggtttcgtggagatctacgctcggc

SEQ ID NO: 178231 - DNA, 75 bp, synthetic construct
  source 1..75: mol_type = other DNA
tagaagagtttttaagattgttaggaaatgatttttatttgtttgataatcgcgtggaaattgattttaatggtt

SEQ ID NO: 178232 - DNA, 75 bp, synthetic construct
  source 1..75: mol_type = other DNA
ctgagcagcagttattctgttatttatacggctgcgcgctggcactggttcagatggttttattttctcctgtat

SEQ ID NO: 178233 - DNA, 75 bp, synthetic construct
  source 1..75: mol_type = other DNA
cagggacaaattgttgataacaaacgtcttggtgctgttctgaagttggcgcaaagcaaaatggatgaactcgaa

SEQ ID NO: 178234 - DNA, 75 bp, synthetic construct
  source 1..75: mol_type = other DNA
ctgggatgatggtgaaaccgaacctctgttacaaaacgacgactatcaggctgaacttgaaaatgtgtttagtgt

SEQ ID NO: 178235 - DNA, 75 bp, synthetic construct
  source 1..75: mol_type = other DNA
ggaattgtcctctctggtattacgctcattaaaagaagatgccgaagaattcctgcaacaaccaattaaaaatgt

SEQ ID NO: 178236 - DNA, 75 bp, synthetic construct
  source 1..75: mol_type = other DNA
agaaacttattcaaccatgcacccggaacaggattctattacggttaacgtctatcagggagaaaaccacaaagt

SEQ ID NO: 178237 - DNA, 75 bp, synthetic construct
  source 1..75: mol_type = other DNA
taaccacagcccggtaacgttaagtacccagcaaattgaagagagtcgggcacggttatccgcattaaaaattta

SEQ ID NO: 178238 - DNA, 75 bp, synthetic construct
  source 1..75: mol_type = other DNA
cgtttagcagcagagttggcagggttaaatgcggtacgcttaattaatgaacccacggcagccgcgatggcttat

SEQ ID NO: 178239 - DNA, 75 bp, synthetic construct
  source 1..75: mol_type = other DNA
gaaaccgagtcaaatcgacagtctggtgctggttggtggcgcttcgcaaatgccattagtacagcgaattgcggt

SEQ ID NO: 178240 - DNA, 75 bp, synthetic construct
  source 1..75: mol_type = other DNA
gaacaggattctattacggttaacgtctatcagggagaaaaccacaaagtaaaaataacattctggtggaatcct

SEQ ID NO: 178241 - DNA, 75 bp, synthetic construct
  source 1..75: mol_type = other DNA
tcgtacctgtcacgcggcgatcatcgctcgtgaactgggtattccggcggtagtgggctgtggtgatgcaaccga

SEQ ID NO: 178242 - DNA, 75 bp, synthetic construct
  source 1..75: mol_type = other DNA
ccggttacgtttatgccgagttgctggaatttagcgtgaaaagctccagcgtggaaaccatgccggatctgccgc

SEQ ID NO: 178243 - DNA, 75 bp, synthetic construct
  source 1..75: mol_type = other DNA
cgtaacgatgccgtgaaagcactgctatcaatggcgatccgcaccgctaagaaacagggtaaatatgtcggtatt

SEQ ID NO: 178244 - DNA, 75 bp, synthetic construct
  source 1..75: mol_type = other DNA
tcggcatgaatgatgtagacagggttgggggcaaaaatgcctccctgggtgaaatgattactaacctttccggaa

SEQ ID NO: 178245 - DNA, 75 bp, synthetic construct
  source 1..75: mol_type = other DNA
attgttcgtctctcggactttaaatctaacgaatacgccaacctggtgggcggcgagcgttacgagccgcatgaa

SEQ ID NO: 178246 - DNA, 75 bp, synthetic construct
  source 1..75: mol_type = other DNA
cttccgcgactgcttcgcgctggagtgtgaagcggtgaaacgtgtgcgcaacgacatggggttaaccaacgttga

SEQ ID NO: 178247 - DNA, 75 bp, synthetic construct
  source 1..75: mol_type = other DNA
gtcatccatgacatcagcgaaatgaaccgcatcgaacctggcgacgtgctggtcactgacatgaccgacccggac

SEQ ID NO: 178248 - DNA, 75 bp, synthetic construct
  source 1..75: mol_type = other DNA
tcggggcgttgttacgcctgtcagtgacatcgtgtcatcgctgcatgaaatgagtaattcggggagactggatga

SEQ ID NO: 178249 - DNA, 75 bp, synthetic construct
  source 1..75: mol_type = other DNA
tcaaagctgaacaggctcttgaccggaatattgcccgtatcgagtcaattgaacgctcattgctgacgctggacg

SEQ ID NO: 178250 - DNA, 75 bp, synthetic construct
  source 1..75: mol_type = other DNA
ggaatttagcgtgaaaagctccagcgtagaaacgatgccggatctgccgttgaaagtaatgatgaacgtcggtaa

SEQ ID NO: 178251 - DNA, 75 bp, synthetic construct
  source 1..75: mol_type = other DNA
acgacatggggctgaccaacgttgagatcatgatcccgttcgtgcgtaccgtagatcaggcgaaagcggtggttg

SEQ ID NO: 178252 - DNA, 75 bp, synthetic construct
  source 1..75: mol_type = other DNA
agaggggatcgacagcctgtctctgaacccggacaccgtagtgcaaacctggttaagtctggctgaactgaagaa

SEQ ID NO: 178253 - DNA, 75 bp, synthetic construct
  source 1..75: mol_type = other DNA
gtttctggaatcagccaatatttttaaccgatgcctttagtgttcattccgacttaaaaattgtaaaaccaaagt

SEQ ID NO: 178254 - DNA, 75 bp, synthetic construct
  source 1..75: mol_type = other DNA
actggcaatgctcctcgataagctggactggcgtcagccaaaaacatccagacgtaactcactgacaatgttgta

SEQ ID NO: 178255 - DNA, 75 bp, synthetic construct
  source 1..75: mol_type = other DNA
cgaagcgctacgctgcggagccttcgactatgttattaaaccgtttgatctcgatgagttgaatttaatcgttca

SEQ ID NO: 178256 - DNA, 75 bp, synthetic construct
  source 1..75: mol_type = other DNA
ctgatggggtcactgaaaaacaccagcgaatggcaatttgcaggaacagacctgaatcaggccgttgatatggca

SEQ ID NO: 178257 - DNA, 75 bp, synthetic construct
  source 1..75: mol_type = other DNA
cgccaaaaagggcagggcaccggtttaccatcaggatgaccgcatggcgattatcgccgggctggcgtgcgtgga

SEQ ID NO: 178258 - DNA, 75 bp, synthetic construct
  source 1..75: mol_type = other DNA
tggcgtatttctggaagagtcgctggagcaaaaaagcggagtatttgcgcgggtacagtgcggatattttagtga

SEQ ID NO: 178259 - DNA, 75 bp, synthetic construct
  source 1..75: mol_type = other DNA
gatagcttcgcgtatatttgtgaggtggtgtatttcccccgtacgccgtcggtgtcgacgacggggatcattgag

SEQ ID NO: 178260 - DNA, 75 bp, synthetic construct
  source 1..75: mol_type = other DNA
ttctctggtaaggactggaaagtgacagcccgtgccggtctgggctaccagttcgacctgctggctaacggcgaa

SEQ ID NO: 178261 - DNA, 75 bp, synthetic construct
  source 1..75: mol_type = other DNA
agcagtgcctccgccgatgttttcagtggtaaaacgaagtctgtgggggctggcctgtatgcttccgccatgttt

SEQ ID NO: 178262 - DNA, 75 bp, synthetic construct
  source 1..75: mol_type = other DNA
gtagccttactggtgggcttatagctgtatcagagttaagtaaaaaagttaaaggaaaaacaggcagaaaattaa

SEQ ID NO: 178263 - DNA, 75 bp, synthetic construct
  source 1..75: mol_type = other DNA
taaaacaacatggaacctgaccgggtacaggatggcagaaaatcccgccgcaacccaaagtgcctcaggccttgc

SEQ ID NO: 178264 - DNA, 75 bp, synthetic construct
  source 1..75: mol_type = other DNA
gtaaagaacatatgtcatggacatatgatgcagccaaaggcgtgggccgtattcagcaggatgaccaacagtttg

SEQ ID NO: 178265 - DNA, 75 bp, synthetic construct
  source 1..75: mol_type = other DNA
cagtcatatcaatgtttcttcatcttcagtcctgttctcagatgcatcgtcatttataaacagctccctgaatat

SEQ ID NO: 178266 - DNA, 75 bp, synthetic construct
  source 1..75: mol_type = other DNA
aagaagatgaaacgataactgaagaaatctatgaaaggctaaaaagtggaggatattccccttggatggatgtaa

SEQ ID NO: 178267 - DNA, 75 bp, synthetic construct
  source 1..75: mol_type = other DNA
tcttggtaatatggactccttacgagactgggggcatgcgaaagactatgtcaaaatgcaatggttaatgctgca

SEQ ID NO: 178268 - DNA, 75 bp, synthetic construct
  source 1..75: mol_type = other DNA
gcgttactggtcaggatggttcttatcttgcagagtttttactcgagaaaggatatgaagttcatggtattaaac

SEQ ID NO: 178269 - DNA, 75 bp, synthetic construct
  source 1..75: mol_type = other DNA
ggcaattatttcgtcatgacggaaaagaagatgaacgacgcgagttagtggtgtttatcacgccacgactggttt

SEQ ID NO: 178270 - DNA, 75 bp, synthetic construct
  source 1..75: mol_type = other DNA
aagcacaaaatgtattccttgaatcatggctggacttgccggaaacagaacagcaagaaatggatcatgtggaat

SEQ ID NO: 178271 - DNA, 75 bp, synthetic construct
  source 1..75: mol_type = other DNA
ttaacttctaacctccgtactaagatagacggtagccaaattgtactgcatgattattgtcgatacgtcgatgat

SEQ ID NO: 178272 - DNA, 75 bp, synthetic construct
  source 1..75: mol_type = other DNA
cacaatcaaaatccaaatttctttcttcattacggtgatttgacagatacttcaaacttggttcgcctcattaaa

SEQ ID NO: 178273 - DNA, 75 bp, synthetic construct
  source 1..75: mol_type = other DNA
gtgagctcagtatttaccccccgcccctatcaggacctcatcatcaaccacgaaatcgacattcatcgctgcaac

SEQ ID NO: 178274 - DNA, 75 bp, synthetic construct
  source 1..75: mol_type = other DNA
cggtacaccagcgccgaatggcctggttgatttgtgggggcaggcgtggtttgtggatcaggggcagcgcctcgg

SEQ ID NO: 178275 - DNA, 75 bp, synthetic construct
  source 1..75: mol_type = other DNA
caaggtattttaggcctgcagaagttgaaaccttgcttggcgatcctactaatgcgcataaaaaattaggatgga

SEQ ID NO: 178276 - DNA, 75 bp, synthetic construct
  source 1..75: mol_type = other DNA
aactttatgggttagtacaagaaatacctcagaaagaaacaacaccattttatccacgatctccatatgctgtgg

SEQ ID NO: 178277 - DNA, 75 bp, synthetic construct
  source 1..75: mol_type = other DNA
tggcaatatggattcactgcgcgactgggggcatgcgaaagattacgtgcgtatgcagtggatgatgttgcagca

SEQ ID NO: 178278 - DNA, 75 bp, synthetic construct
  source 1..75: mol_type = other DNA
tcgggtggggcttacgtcgctgatgatggtgtctggcaatattccgacaagatggtcgcatatgctaaaaaaaat

SEQ ID NO: 178279 - DNA, 75 bp, synthetic construct
  source 1..75: mol_type = other DNA
gttattacagcggtaatgtgctgctggaaaaccattcgtctctagaggtcagggagaattttactggtggtattg

SEQ ID NO: 178280 - DNA, 75 bp, synthetic construct
  source 1..75: mol_type = other DNA
taataccaatgtctggcaaaatgttggtcacgatcgtgataaagcgattcaaatcgtgaaacagcagaagattgg

SEQ ID NO: 178281 - DNA, 75 bp, synthetic construct
  source 1..75: mol_type = other DNA
atggcaaaaattcacgaggtaaagcttcacgcaaaatatttcgaccttgtgctggaaggacataaacgtgcagag

SEQ ID NO: 178282 - DNA, 75 bp, synthetic construct
  source 1..75: mol_type = other DNA
atgtcccgttttgttcttggtaactgcatcgatgttatgacgcgtatccctgataacgccattgatttcatatta

SEQ ID NO: 178283 - DNA, 75 bp, synthetic construct
  source 1..75: mol_type = other DNA
tgccgaaacgggaataacattactggagtggtgccgtaagaaaaagattaattacaacaccgccagaacccgtat

SEQ ID NO: 178284 - DNA, 75 bp, synthetic construct
  source 1..75: mol_type = other DNA
tggagcaggcattccgacgcgaacatgccagaactggcataaaacttcaggactggtgtcgacagaacaatatct

SEQ ID NO: 178285 - DNA, 75 bp, synthetic construct
  source 1..75: mol_type = other DNA
gcttctgatatcgctcaacaaatggcgttaagccagatcgaaccagaaaaaacagaaagcccatttgcccagttt

SEQ ID NO: 178286 - DNA, 75 bp, synthetic construct
  source 1..75: mol_type = other DNA
aaatcgcgcgttccacagctgatgtcaaaatcatcatgcttaccgtccatacagaaaaccctttaccagcgaaag

SEQ ID NO: 178287 - DNA, 75 bp, synthetic construct
  source 1..75: mol_type = other DNA
tattcagggcagcgttacattgcttctgacatcgctcaacaaatggcgttaagccagatcgaaccagaaaaaaca

SEQ ID NO: 178288 - DNA, 75 bp, synthetic construct
  source 1..75: mol_type = other DNA
tgataacgccattgatttcatattaactgacccgccatatctcgtcggttttcgtgaccgttccgggcgcaccat

SEQ ID NO: 178289 - DNA, 75 bp, synthetic construct
  source 1..75: mol_type = other DNA
gcttccgatatcgcccaacaaatggcattaagccagatcgaaccagagaagacggaaagcccatttgccagtttg

SEQ ID NO: 178290 - DNA, 75 bp, synthetic construct
  source 1..75: mol_type = other DNA
gtcaaaatcatcatgcttacggtccatactgaaaaccctttacctgcgaaagttatgcaggccggcgccgcaggc

SEQ ID NO: 178291 - DNA, 75 bp, synthetic construct
  source 1..75: mol_type = other DNA
gcattgccgggcgtgatgcaggtgaaaccgaattgtctgcccgtcttaatgagccgctggcaaatggtgccgtga

SEQ ID NO: 178292 - DNA, 75 bp, synthetic construct
  source 1..75: mol_type = other DNA
cgatttgtagagggtaaacacttctttaaaatcaaaggagatgagataaaaagtttgcgactatcttttagcgag

SEQ ID NO: 178293 - DNA, 75 bp, synthetic construct
  source 1..75: mol_type = other DNA
gagaacggcatcctgatagcgtccgtggacgtaaaaatgtgccgttccagcagtacatcaacgcggggtatttca

SEQ ID NO: 178294 - DNA, 75 bp, synthetic construct
  source 1..75: mol_type = other DNA
ggtgatgcagcagtacagaaagttctggataacctgtcacagcaaaaacttgttcacagagatgtgctgccgttc

SEQ ID NO: 178295 - DNA, 75 bp, synthetic construct
  source 1..75: mol_type = other DNA
gcctctatcagcccggtctatgatgtgctcgcgcatctgcagaacctggtaatgactttctcggatatcaccgaa

SEQ ID NO: 178296 - DNA, 75 bp, synthetic construct
  source 1..75: mol_type = other DNA
agaacagaaaatgcagttggaacaacagctggtggccgcagcccctaaagtcgattttgccgaccgggtatcagt

SEQ ID NO: 178297 - DNA, 75 bp, synthetic construct
  source 1..75: mol_type = other DNA
tgacgccccaattaacgggtaaaggccagcagtggttaactcgcaagctacttgatgctggtttgttaaaaccag

SEQ ID NO: 178298 - DNA, 75 bp, synthetic construct
  source 1..75: mol_type = other DNA
gtgaaagaggcgcagggagaatcacgcatgggcgagcctgtaatacgtgagccagcaccggtagtgcctgaagaa

SEQ ID NO: 178299 - DNA, 75 bp, synthetic construct
  source 1..75: mol_type = other DNA
gccgggaaattattctgggctttaacggatgaaagcaataaagagcaaccggacgttattcctgtttatgctgac

SEQ ID NO: 178300 - DNA, 75 bp, synthetic construct
  source 1..75: mol_type = other DNA
cgtttatttctcttaactgcgcggcgttaaatgaaaatctgctggattccgaactgtttggccatgaagctggcg

SEQ ID NO: 178301 - DNA, 75 bp, synthetic construct
  source 1..75: mol_type = other DNA
cgcggaaacgtcaaccaactatccgataattcctagtgaggtgttgtccgcaatcctgaaggttgccaagattcg

SEQ ID NO: 178302 - DNA, 75 bp, synthetic construct
  source 1..75: mol_type = other DNA
gcagccacaatcagcaccatgatgacacgctatatgttcgagctgacttggtaaatggcaattctccggtaactc

SEQ ID NO: 178303 - DNA, 75 bp, synthetic construct
  source 1..75: mol_type = other DNA
tttatcctggaatcttgggtggagcagtttgtaaaaagaaataagaattgcttagttatttatatcgtaccaaca

SEQ ID NO: 178304 - DNA, 75 bp, synthetic construct
  source 1..75: mol_type = other DNA
atgaccgtaacccgtgggaaattgcccacgaaggccatatcgacgccttaattcgtcgcctgatcgaacagcaca

SEQ ID NO: 178305 - DNA, 75 bp, synthetic construct
  source 1..75: mol_type = other DNA
ggcacaatccgccccgccatatggcaataccattgatcgccagccagtttccgccagcgactttgccctgcaatt

SEQ ID NO: 178306 - DNA, 75 bp, synthetic construct
  source 1..75: mol_type = other DNA
gcgatgttaacggcgccagttttaccctcaagcaaatggtcgcctggcgagaccatccgcaagtaactggtctgg

SEQ ID NO: 178307 - DNA, 75 bp, synthetic construct
  source 1..75: mol_type = other DNA
attcgccgcctgatcgaacaacacaatgtgccgctgcatgtggcatatcgcgtcgccagctggtcgacgcgcgcc

SEQ ID NO: 178308 - DNA, 75 bp, synthetic construct
  source 1..75: mol_type = other DNA
gcgatgatgtctgttttatcgccgtacttgagcgttacggtcagcggctggccccggcctgtggtttgctcggcg

SEQ ID NO: 178309 - DNA, 75 bp, synthetic construct
  source 1..75: mol_type = other DNA
tgatgctccggctttgcagcggattgatgcccgcggcgcaacggcggtgccagggtttattgatgctcacctgca

SEQ ID NO: 178310 - DNA, 75 bp, synthetic construct
  source 1..75: mol_type = other DNA
caagatatagaaactcttgcatcatcgatggggttggagtgttttcaatttaaagaaaaaacaggaaagacagag

SEQ ID NO: 178311 - DNA, 75 bp, synthetic construct
  source 1..75: mol_type = other DNA
aatatacctgtcttgacatgggggctggagaatatttatgcatgtacattttttggttcgttaactggattgatt

SEQ ID NO: 178312 - DNA, 75 bp, synthetic construct
  source 1..75: mol_type = other DNA
gaatagaactggtgtaattaatatacaaacattaccactcagaagtgcttatgataactcaaggacgaatgtttt

SEQ ID NO: 178313 - DNA, 75 bp, synthetic construct
  source 1..75: mol_type = other DNA
cgaccctcatgaaatcgtcaacgtgatgggcgaagccggattcgcctggtttgcccgctgtgccgaacaggcaag

SEQ ID NO: 178314 - DNA, 75 bp, synthetic construct
  source 1..75: mol_type = other DNA
gtggccgggctgtttcagcgtctgcgcgcgccgttctcctccgggaaggtggcctccgtggtggacaccctgaag

SEQ ID NO: 178315 - DNA, 75 bp, synthetic construct
  source 1..75: mol_type = other DNA
gcggcgtttgcatcagctcttaaaagtcatacgcgggagtcttttttttcgtgcatcgcagagcagctacatgag

SEQ ID NO: 178316 - DNA, 75 bp, synthetic construct
  source 1..75: mol_type = other DNA
ttgattatgatccggaaacaaatattatcaccctacgtaatgtacctgaagaatttagggaaatgtggatgactg

SEQ ID NO: 178317 - DNA, 75 bp, synthetic construct
  source 1..75: mol_type = other DNA
taatcgtgatcaggatgtaatcattctaaggaatattcctgatagcttcagagaagagatactggatgaggttga

SEQ ID NO: 178318 - DNA, 75 bp, synthetic construct
  source 1..75: mol_type = other DNA
atgccagcaaatgaacctgcaaatgcaatcgttgtaaatcatgtggttgttcatcttttagataaagaaccgcat

SEQ ID NO: 178319 - DNA, 75 bp, synthetic construct
  source 1..75: mol_type = other DNA
tggcagagcatcgaaaacgagtaacgcaaaaagtaacgccaacagcgttacaaaaggagttaccagaggaagagg

SEQ ID NO: 178320 - DNA, 75 bp, synthetic construct
  source 1..75: mol_type = other DNA
ctgtgccgggagtccagcggccagatcgccaccgcagggccggagctgatgcagcaggccgggcaggtgctggac

SEQ ID NO: 178321 - DNA, 75 bp, synthetic construct
  source 1..75: mol_type = other DNA
aaaccggcagcaggtcgggcggccaatcggccagggccaaggccgactacatccagcgcgaaggcaagtatgccc

SEQ ID NO: 178322 - DNA, 75 bp, synthetic construct
  source 1..75: mol_type = other DNA
attattgctgaccgtctgactcagaagcagcttttcgacaagcttcacctgccgaccgcaccgtggcagttactt

SEQ ID NO: 178323 - DNA, 75 bp, synthetic construct
  source 1..75: mol_type = other DNA
ctggaagccttaatcccgctgctgccgccggagtatgccagcggcgtgatgtgggcgcagagtaagttcagttaa

SEQ ID NO: 178324 - DNA, 75 bp, synthetic construct
  source 1..75: mol_type = other DNA
gctgagatcgaacgctggccggaaaccgcattaacccgcgagctggcgcgccatccggcctttgtgaaccgcgat

SEQ ID NO: 178325 - DNA, 75 bp, synthetic construct
  source 1..75: mol_type = other DNA
aggtgcgcatttccgggcgtgatgcaggcgaaaacgaattatctgcccgtcttaatgagccgctggcaaatggtg

SEQ ID NO: 178326 - DNA, 75 bp, synthetic construct
  source 1..75: mol_type = other DNA
gagctatgtaggcgtgatggcaatggagtgttttgtcaccccgcaaggtctgctgatcaacgaactggctccgcg

SEQ ID NO: 178327 - DNA, 75 bp, synthetic construct
  source 1..75: mol_type = other DNA
caaaacggcgccagcatcagtcagtttgagctgcatctacgggcgattaccaatttgccgttaccgcaaccagtg

SEQ ID NO: 178328 - DNA, 75 bp, synthetic construct
  source 1..75: mol_type = other DNA
tccccctgtgtgcctgagagacggccgaccacaccacgactcacggcccacgagcggacgccgcagcaggagcgc

SEQ ID NO: 178329 - DNA, 75 bp, synthetic construct
  source 1..75: mol_type = other DNA
ttccgctcgattgcagcggctaatgatatgaagcacggggagttgctggaggcataccaggaattctggaaaaag

SEQ ID NO: 178330 - DNA, 75 bp, synthetic construct
  source 1..75: mol_type = other DNA
tctggaggatacacaacacggatttaatccgacgcgtaaaaacgctgatgggagaaaagctcagcttaaccttta

SEQ ID NO: 178331 - DNA, 75 bp, synthetic construct
  source 1..75: mol_type = other DNA
gaggaagatctaaatactgatctccccctcgccaaaaacgagcgtctaaaaaattcgagccggaggctattgagc

SEQ ID NO: 178332 - DNA, 75 bp, synthetic construct
  source 1..75: mol_type = other DNA
aggatattattatccgccgacattgctgctggatgttcgccaggaaatgtcgattatgcatgaggaaacctttgg

SEQ ID NO: 178333 - DNA, 75 bp, synthetic construct
  source 1..75: mol_type = other DNA
gatgatcgtctccacatcaggcaaattaagacaggaatgatgattgctatccccctgtcactcagccttcctgtc

SEQ ID NO: 178334 - DNA, 75 bp, synthetic construct
  source 1..75: mol_type = other DNA
gattcgaacggagcagggcgctaacggggcgatacgggaactggaaaaattccgtcagcaggggtttacacctga

SEQ ID NO: 178335 - DNA, 75 bp, synthetic construct
  source 1..75: mol_type = other DNA
aacgaataccagggcttgttcgcgccgaaaggcgttcgaccggagacgttgcctcggcaggttaacaccgtctcg

SEQ ID NO: 178336 - DNA, 75 bp, synthetic construct
  source 1..75: mol_type = other DNA
gccagcgttacacaaacggatcaaaaagcgttaccagaggaagaggaagaggaagaggaagatataaatactgat

SEQ ID NO: 178337 - DNA, 75 bp, synthetic construct
  source 1..75: mol_type = other DNA
ccgcctgcgcgtaatgttcgctgggatatgccggaacgtaacctgctgctgcatgacggcattgccacacacatg

SEQ ID NO: 178338 - DNA, 75 bp, synthetic construct
  source 1..75: mol_type = other DNA
tatggtgctccacgccattcttcagaaagacgatgtaacccatgtcacggtaatcgaaaaagaacaggatgttat

SEQ ID NO: 178339 - DNA, 75 bp, synthetic construct
  source 1..75: mol_type = other DNA
ccgttaaagacggcacgtccggaacctggaaactggacacattcgaaattaccgcagataaggcgatgagcctcg

SEQ ID NO: 178340 - DNA, 75 bp, synthetic construct
  source 1..75: mol_type = other DNA
aaagaagaactgatatctccggtgctggtcgggcgcgatcaaccggtgatgattgtttaccagagcgcggggatc

SEQ ID NO: 178341 - DNA, 75 bp, synthetic construct
  source 1..75: mol_type = other DNA
ggtgccggtggtgatggcaaagtcactggttgcccgcgatacgccgctcacggcgaatgatgtggagctgaagcc

SEQ ID NO: 178342 - DNA, 75 bp, synthetic construct
  source 1..75: mol_type = other DNA
aacgccagcagccagcgggtcatcagcgcgatggtggcggaaagcggcgtggtgacaacggtaagcgcggagtaa

SEQ ID NO: 178343 - DNA, 75 bp, synthetic construct
  source 1..75: mol_type = other DNA
tgattaaagaaatcaaagaacgcataggcagcctggacgtgagagacaatattgaacgccgtgcttatgaaattg

SEQ ID NO: 178344 - DNA, 75 bp, synthetic construct
  source 1..75: mol_type = other DNA
ttgccacaaacgcagtttaaacaggttgctgacctctacgaaatgcaatttgatgacggtcgcacttgtgccttt

SEQ ID NO: 178345 - DNA, 75 bp, synthetic construct
  source 1..75: mol_type = other DNA
aacaaatggtgggcagttactgacgatatggaagaaccggcatcgaaagtaacccactggatgccgctaccggaa

SEQ ID NO: 178346 - DNA, 75 bp, synthetic construct
  source 1..75: mol_type = other DNA
cctatccgctccgaaaccatcgagttctttggtgataatgcaccaggatcgcgccgaatatgggcaccgacgtgg

SEQ ID NO: 178347 - DNA, 75 bp, synthetic construct
  source 1..75: mol_type = other DNA
gcggatcaggtacacaccacggcgcgtattcagcatccgatggtgagaaaaagctatctcgataatccactgcaa

SEQ ID NO: 178348 - DNA, 75 bp, synthetic construct
  source 1..75: mol_type = other DNA
taaagtgttccttgaaaaatacaccaccgggtatccgcagtttgaagaatatctgacaggtaagagcgataatac

SEQ ID NO: 178349 - DNA, 75 bp, synthetic construct
  source 1..75: mol_type = other DNA
gcgcaacagcggcgctggcatgactatcgctacacctttaaggtctatattccgtcgcagattgcgaccgccgcg

SEQ ID NO: 178350 - DNA, 75 bp, synthetic construct
  source 1..75: mol_type = other DNA
tgaaaaaggtgcatttactggtgcacaaaccttgcgtcagggattatttgaacgtgccaacgaaggtactctgct

SEQ ID NO: 178351 - DNA, 75 bp, synthetic construct
  source 1..75: mol_type = other DNA
gatctcttttatcgccttaacgttattcatttaatactgccgcctctgcgcgatcgccgggaagatatttccctg

SEQ ID NO: 178352 - DNA, 75 bp, synthetic construct
  source 1..75: mol_type = other DNA
ggcttaggtattccggcaataacgaggagtaaacacattgctgacagttggttatcaaagggctggtatgttcag

SEQ ID NO: 178353 - DNA, 75 bp, synthetic construct
  source 1..75: mol_type = other DNA
ccattcgcgtttttggtacggtggggttcattgtcgccatgtgggcagtaagcctgctgcatctggaattgagta

SEQ ID NO: 178354 - DNA, 75 bp, synthetic construct
  source 1..75: mol_type = other DNA
tgctgatgagtatggtggcctggacgctgcgctttggcttcttcgcggcgatccgtcaacaaccggatttatttt

SEQ ID NO: 178355 - DNA, 75 bp, synthetic construct
  source 1..75: mol_type = other DNA
ctcaactcccgctcaccactggaggctcattttaaaaatcttaagcgcagaaaaaatggacaagatgcaataata

SEQ ID NO: 178356 - DNA, 75 bp, synthetic construct
  source 1..75: mol_type = other DNA
acaacattcgtacacttcgcgctcagtctcgtgagttttctcttgaaaatcttgaagaaatgctggagaaactga

SEQ ID NO: 178357 - DNA, 75 bp, synthetic construct
  source 1..75: mol_type = other DNA
atgagcatcgctatgcgcttaaaggtaatgtcctttttgcaatattttatctgggggagctggctggttaccctc

SEQ ID NO: 178358 - DNA, 75 bp, synthetic construct
  source 1..75: mol_type = other DNA
agcttactgcatttggaattgagcagcctgcagctgtatgttgcgtccggtgcgtcattgttgctgtcggcttat

SEQ ID NO: 178359 - DNA, 75 bp, synthetic construct
  source 1..75: mol_type = other DNA
ctccggatggttggataagctgtagtgagcgaatgccagaggacggtcagcacgtaattattttatgtgatggcg

SEQ ID NO: 178360 - DNA, 75 bp, synthetic construct
  source 1..75: mol_type = other DNA
aatcgatatatcagggctgggtatgttgatggctggaactcctgccgcgctgccatgcttcagagccaaggtgga

SEQ ID NO: 178361 - DNA, 75 bp, synthetic construct
  source 1..75: mol_type = other DNA
ccgctatatatagccaagccagtgccggtggtgccagatgctcgtccgtctttaaataatggcatagtcggtttt

SEQ ID NO: 178362 - DNA, 75 bp, synthetic construct
  source 1..75: mol_type = other DNA
tgggcagcaggagtaagtagaggtgagacagaagattatttatttttagaactgaataaacttaatctagacagg

SEQ ID NO: 178363 - DNA, 75 bp, synthetic construct
  source 1..75: mol_type = other DNA
ttcgccagcgcgatctgatggggcttatcgatcaactgaaccgccccgggtttcctggagagtgttttatctgtg

SEQ ID NO: 178364 - DNA, 75 bp, synthetic construct
  source 1..75: mol_type = other DNA
gggctggtatgttcagccgctatatatagccaagccagtgccggtggtgccagatgctcgtccgtctttaaataa

SEQ ID NO: 178365 - DNA, 75 bp, synthetic construct
  source 1..75: mol_type = other DNA
cgattttctgattgaagctgatgtccatacaccagcactgcaacgactggcggaccatctgatgcctcctgaaac

SEQ ID NO: 178366 - DNA, 75 bp, synthetic construct
  source 1..75: mol_type = other DNA
gtttgatggcgagaaggagatcctgcttgagctgatagaccgctgcaaaatggagtgtgacagcaagcgccagcg

SEQ ID NO: 178367 - DNA, 75 bp, synthetic construct
  source 1..75: mol_type = other DNA
ggaaaaccatcgaagctgggctgatcgtgcgtcaacacgtcacggaaaatccgctcgcccactgcgtggtgattg

SEQ ID NO: 178368 - DNA, 75 bp, synthetic construct
  source 1..75: mol_type = other DNA
ttaacttgtctgcgctgcactttcgcagtaatcagctgcctaatcaggtatctgatgcaatgcacgcctggggta

SEQ ID NO: 178369 - DNA, 75 bp, synthetic construct
  source 1..75: mol_type = other DNA
ttatcgaagaaatgtcgtctgggagatgcgttccggtatatcaggaagcactgggctgcgttgtgcaacttctgt

SEQ ID NO: 178370 - DNA, 75 bp, synthetic construct
  source 1..75: mol_type = other DNA
tcacaggttacgacaggctgttcagtgccgaacgtgagggcgacgcgttgacggaagcaggatgctgggctcatg

SEQ ID NO: 178371 - DNA, 75 bp, synthetic construct
  source 1..75: mol_type = other DNA
cgtcgccagttggtcaacagcgcgccattttggtcttaatcatctcggtttactggcgcccggcaagcaggccga

SEQ ID NO: 178372 - DNA, 75 bp, synthetic construct
  source 1..75: mol_type = other DNA
gataaactggacgcgtttcgccatctgacgctggacggtcactgccccggtttaggcggtaaagaacttaacgcc

SEQ ID NO: 178373 - DNA, 75 bp, synthetic construct
  source 1..75: mol_type = other DNA
tattgaatccagcatgatgacgccagtcacctttgaaaccgccaccctgccacgcggcctgacaactgttatttg

SEQ ID NO: 178374 - DNA, 75 bp, synthetic construct
  source 1..75: mol_type = other DNA
gacattatataaagaaaccctagggctaggatctttcgggttaagtcgtacacattgggcagtaaaaaataagga

SEQ ID NO: 178375 - DNA, 75 bp, synthetic construct
  source 1..75: mol_type = other DNA
gtatcgcattaacattgccgttctgggcttgcgccaaagatgtcaccatcatttataccaacgacctccatgcgc

SEQ ID NO: 178376 - DNA, 75 bp, synthetic construct
  source 1..75: mol_type = other DNA
ccgagatgatggactatccaggcgtgattagcggccaaaatgcgctactcgataaactggacgcgtttcgccatc

SEQ ID NO: 178377 - DNA, 75 bp, synthetic construct
  source 1..75: mol_type = other DNA
agaaaaatttgtctaatttgaaaaaatctggccttaaaaagccagctaacttaacgattgcggcacaacaaataa

SEQ ID NO: 178378 - DNA, 75 bp, synthetic construct
  source 1..75: mol_type = other DNA
atggtgataaaaatatttttttgtatcaacatagataccccaattttttacacaaaaaatcaaggctctcatttt

SEQ ID NO: 178379 - DNA, 75 bp, synthetic construct
  source 1..75: mol_type = other DNA
atgctaccgtttgatgtactcgtagggcagcaaacctggacgctgacacataaatggtttgagttggtatggacg

SEQ ID NO: 178380 - DNA, 75 bp, synthetic construct
  source 1..75: mol_type = other DNA
atagcgatttcgaataagggggacgctaaagtggatgagcatgatatttacttggctatccaagttttgtgtaat

SEQ ID NO: 178381 - DNA, 75 bp, synthetic construct
  source 1..75: mol_type = other DNA
tgcccagggcaatgttctgcccgttctgtacggtgaaatgcgcgtggggtcgcgggtggtttctcaggagatcag

SEQ ID NO: 178382 - DNA, 75 bp, synthetic construct
  source 1..75: mol_type = other DNA
gattgcgccctgggtagccatgccatgatgcgccgtgcattttcgctggcgatttatcatgcacatcaacgccat

SEQ ID NO: 178383 - DNA, 75 bp, synthetic construct
  source 1..75: mol_type = other DNA
ggttccggcaacattatgtgtctggatgctctgcgcgttcttaacaaacaagcgggcgtatacgatttattgacg

SEQ ID NO: 178384 - DNA, 75 bp, synthetic construct
  source 1..75: mol_type = other DNA
cggcacgaaagcggtctgaatccccgggcaatgaatctccgcaatcgtaacggaacggtggactacggactgatg

SEQ ID NO: 178385 - DNA, 75 bp, synthetic construct
  source 1..75: mol_type = other DNA
atcccgtcttaatgagccgctgaaaaatggtgccgtgatccacatcgttccgcgtcttgcgggagcaaaaagtgg

SEQ ID NO: 178386 - DNA, 75 bp, synthetic construct
  source 1..75: mol_type = other DNA
gtgatgcaggtgaaactgaattgtctgcccgtcttaatgagccgctggaaaatggtgccgtgatccacatcgtgc

SEQ ID NO: 178387 - DNA, 75 bp, synthetic construct
  source 1..75: mol_type = other DNA
tcatcaaagaaatatgtgcagagcgccctgatataggggcgctagcttgctatttgtatgatgaaattggtgtga

SEQ ID NO: 178388 - DNA, 75 bp, synthetic construct
  source 1..75: mol_type = other DNA
cagagataattgatcctgagctaattgaaaaaaggcctcatcaagcgagaaagttaatgagaaacatcttgaaaa

SEQ ID NO: 178389 - DNA, 75 bp, synthetic construct
  source 1..75: mol_type = other DNA
agtggtttaatatctattgcaccatttggtgttgcacgtaaaaaagtattaataataactccaggtcttataaca

SEQ ID NO: 178390 - DNA, 75 bp, synthetic construct
  source 1..75: mol_type = other DNA
tgtttgatcgtttaggtgagctggcgattgttaagcgtcgcactggtggctatgacggtcgcggtcaatggcgtt

SEQ ID NO: 178391 - DNA, 75 bp, synthetic construct
  source 1..75: mol_type = other DNA
agcgtcatcagcggttatttaggtaaaaactggggcatcctgttaggtgcgctctatttcgtgatgctggtgatc

SEQ ID NO: 178392 - DNA, 75 bp, synthetic construct
  source 1..75: mol_type = other DNA
ggaatgtggcatttatataacgtgggggcgctaccgccgctggggctgttggtaaaaaacgccattattacgttg

SEQ ID NO: 178393 - DNA, 75 bp, synthetic construct
  source 1..75: mol_type = other DNA
agtgctgcaactgacgccagaaaaaatcgcgatgctgccgcaaggcagtcgctgcaacagctggcggttgggtac

SEQ ID NO: 178394 - DNA, 75 bp, synthetic construct
  source 1..75: mol_type = other DNA
atcgccgaaggttgtctgcaatccggctgtgcgctggtgggcggcgaaacggcggaaatgccggggatgtatcac

SEQ ID NO: 178395 - DNA, 75 bp, synthetic construct
  source 1..75: mol_type = other DNA
acgcaaccggaaaactggatgtggataccgcttcagcggtgatcagtggcattgcggaaggttgtctgcaatcgg

SEQ ID NO: 178396 - DNA, 75 bp, synthetic construct
  source 1..75: mol_type = other DNA
cagcgtttgggctgatgccgcaagcgatctgaaaagccgcctggataaagtcagcagcttccacgccagcttcac

SEQ ID NO: 178397 - DNA, 75 bp, synthetic construct
  source 1..75: mol_type = other DNA
cactaagcatatcggcgagagcgcatccgacattttacggcgcatgttgaaattttccgccgcatcacagcctgt

SEQ ID NO: 178398 - DNA, 75 bp, synthetic construct
  source 1..75: mol_type = other DNA
gattactcgtctgttccatgctttccgtcgtgactcgcaccctatggcagttatgtgcggtattaccggtgcact

SEQ ID NO: 178399 - DNA, 75 bp, synthetic construct
  source 1..75: mol_type = other DNA
attcgtgaactgaaaaacgtcgtggagcgttcggtataccgacacgggaccagcgattacccactgaatgagatt

SEQ ID NO: 178400 - DNA, 75 bp, synthetic construct
  source 1..75: mol_type = other DNA
cttcattacagcttcagcacgggcggtttgagagctgggccgaacggctgaacgtcgagccaggtaaactcaacg

SEQ ID NO: 178401 - DNA, 75 bp, synthetic construct
  source 1..75: mol_type = other DNA
ccagtccagcgactggcagcagtacaatatcaaacagaatggcgatgactttgtcctgacgccgaaagccagcaa

SEQ ID NO: 178402 - DNA, 75 bp, synthetic construct
  source 1..75: mol_type = other DNA
gatccgctggtgagtgacgttttgcgcgcattaaccgttagccccgagcaggtactgcaattgacgcccgaaagg

SEQ ID NO: 178403 - DNA, 75 bp, synthetic construct
  source 1..75: mol_type = other DNA
tgcgtgaaaaggcagagaaagcaacgtgtggtgagtggtcgctcgaatatggagagggccgatttgatggtgatg

SEQ ID NO: 178404 - DNA, 75 bp, synthetic construct
  source 1..75: mol_type = other DNA
tggataccgtaacgcaaccttatcaggcacagacttcaaccgaatgtggaaacaatggaaatctatccgcgccgc

SEQ ID NO: 178405 - DNA, 75 bp, synthetic construct
  source 1..75: mol_type = other DNA
cgccgcgatcaggagaacgaggatattgcgctaacggtagggaagctgagagttgagcttgaggaagtaaaacaa

SEQ ID NO: 178406 - DNA, 75 bp, synthetic construct
  source 1..75: mol_type = other DNA
ctttaccgatcttcgggttacggataatttctcattctttaactacctgtatcagcagatcgatcaccggcgcag

SEQ ID NO: 178407 - DNA, 75 bp, synthetic construct
  source 1..75: mol_type = other DNA
gttcgttgatcaaacagaacggaagttgggtcactaacggtgaggccattaccactgagtataagctgatgctgg

SEQ ID NO: 178408 - DNA, 75 bp, synthetic construct
  source 1..75: mol_type = other DNA
gcgctggccgaaggccagcagaaagcgattgagtcaattaagcaggctgattcggctgttaagttggcacacgag

SEQ ID NO: 178409 - DNA, 75 bp, synthetic construct
  source 1..75: mol_type = other DNA
tggatttatctggctgatttagagcacgtactacgtgttgctggtattcgcatcaaaggggaggagcatggaaat

SEQ ID NO: 178410 - DNA, 75 bp, synthetic construct
  source 1..75: mol_type = other DNA
atgcaaacctgggacagccgtttactgccgcatctggaaatttcccggttggcatctctgacctcgctgatataa

SEQ ID NO: 178411 - DNA, 75 bp, synthetic construct
  source 1..75: mol_type = other DNA
aaacaggccgaatggtgcgaagtgtttgaccgcgggcgcaccacgtcgctgctgctgttcgaacatgttcatgcc

SEQ ID NO: 178412 - DNA, 75 bp, synthetic construct
  source 1..75: mol_type = other DNA
agtgacggcatgaagattgcgcgtccgcgtcagctgtataccggctatgaaaaacgcgactttaaaagcgacatc

SEQ ID NO: 178413 - DNA, 75 bp, synthetic construct
  source 1..75: mol_type = other DNA
tgattgatgatagagaacaatgcagggtctacgaactggaggaacgcgttaaagagctggaaacgcgggaagttc

SEQ ID NO: 178414 - DNA, 75 bp, synthetic construct
  source 1..75: mol_type = other DNA
gacatatggtggcccattagatagttacaccattccaacaaaggacggtgacggtgagttttcatgtgagcatta

SEQ ID NO: 178415 - DNA, 75 bp, synthetic construct
  source 1..75: mol_type = other DNA
ttgtttttctcattattctattagtttgcattcattcactgataacaactataaataaaagttatggctgttctg

SEQ ID NO: 178416 - DNA, 75 bp, synthetic construct
  source 1..75: mol_type = other DNA
gctggaaaacatcgccctgaatgacccgtactttatcgagaagaaactctatccaaacgtcgacttctactccgg

SEQ ID NO: 178417 - DNA, 75 bp, synthetic construct
  source 1..75: mol_type = other DNA
agaaaacaaaattctgtcaaaaagcaatcaaacgatattgatcgcatgggggaatacattaaaaacctagcaaaa

SEQ ID NO: 178418 - DNA, 75 bp, synthetic construct
  source 1..75: mol_type = other DNA
ttgatcctgatttgtttcaagcaattgaaatatataagactaggatgaatactaaagccgaaaagatgcaaatgt

SEQ ID NO: 178419 - DNA, 75 bp, synthetic construct
  source 1..75: mol_type = other DNA
accttcattaagaaagaaaaattttactgacgcatataatgctgcatcttcccatatcgaatactggataggtgc

SEQ ID NO: 178420 - DNA, 75 bp, synthetic construct
  source 1..75: mol_type = other DNA
ttatctctggataagttatcaacttcatcgtttgtttcattttctttttttctagtaattggcgtgttaataaat

SEQ ID NO: 178421 - DNA, 75 bp, synthetic construct
  source 1..75: mol_type = other DNA
tcctttccttttttacatcgatatctatcccttgggtagaattatctttagggttattcaaaaatgaagagaata

SEQ ID NO: 178422 - DNA, 75 bp, synthetic construct
  source 1..75: mol_type = other DNA
cctcaacctttgaaggctgggactcccctgaacgtagtgccttcccactgcaactgtttggtttccattacaaat

SEQ ID NO: 178423 - DNA, 75 bp, synthetic construct
  source 1..75: mol_type = other DNA
tgacgattcctgcatgggtaatgactccaacttattgatagtgttttatgttcagataatgcccgatgactttgt

SEQ ID NO: 178424 - DNA, 75 bp, synthetic construct
  source 1..75: mol_type = other DNA
ccaataacaatatagttttccctactgtcagaaaccttttcaccaatggttgtattctgccgtataatgacattc

SEQ ID NO: 178425 - DNA, 75 bp, synthetic construct
  source 1..75: mol_type = other DNA
gcgttttccttgacggagccgcaggctttggcgcaccggtagcaattaccgccgcattgctggtcggtccgggct

SEQ ID NO: 178426 - DNA, 75 bp, synthetic construct
  source 1..75: mol_type = other DNA
atgtttgtaacgagcaaaaaaatgaccgcggctgttctggcaattactttggcaatgtctctgagtgcctgttct

SEQ ID NO: 178427 - DNA, 75 bp, synthetic construct
  source 1..75: mol_type = other DNA
gatcagcagatgattgagtgggcggtagacagcaatatcgccgtgctggtgctgctgaccaaagcggacaaactg

SEQ ID NO: 178428 - DNA, 75 bp, synthetic construct
  source 1..75: mol_type = other DNA
tattcgccacttaccttccgataccgggatcgaagtggcttttgcaggccgttccaacgcaggtaaatccagcgc

SEQ ID NO: 178429 - DNA, 75 bp, synthetic construct
  source 1..75: mol_type = other DNA
gtataaaccctgatgtttttgaacaatttcttaccctcctgaatacacactgtaaatcatcagaagctgaacttg

SEQ ID NO: 178430 - DNA, 75 bp, synthetic construct
  source 1..75: mol_type = other DNA
gcggtgcaggggtaatagataaggacatctgcaaaggtatgatgcaggtcgtgaagatactggaaattgaatgcc

SEQ ID NO: 178431 - DNA, 75 bp, synthetic construct
  source 1..75: mol_type = other DNA
gtcaacgtactggaaacagagtgccatctgccggtgcgcagtgagcaaggaacgatggcgatgacacatatggcg

SEQ ID NO: 178432 - DNA, 75 bp, synthetic construct
  source 1..75: mol_type = other DNA
actggatacctggttcccacttccaccagcagcggcacatccagacgggtacagtttccatcagttgatgaatct

SEQ ID NO: 178433 - DNA, 75 bp, synthetic construct
  source 1..75: mol_type = other DNA
atgcttaagagcttttttaactggttgggggcgtggcttttggctacgctttttgttttcctggcggccctgact

SEQ ID NO: 178434 - DNA, 75 bp, synthetic construct
  source 1..75: mol_type = other DNA
aatccggcaacaggattagctatgcatggaggatttgattcagcaggaaatacttttgggacttgttggcaggac

SEQ ID NO: 178435 - DNA, 75 bp, synthetic construct
  source 1..75: mol_type = other DNA
aatcaaagctgctgtgcagaaactgtttgaagtcgaagtcgaagtcgaagtcgttaacaccctggtagttaaagg

SEQ ID NO: 178436 - DNA, 75 bp, synthetic construct
  source 1..75: mol_type = other DNA
acgagataacttttttaaactgaatcgcgaactgcacgataaatcgctgcggttgaatcttcacctggatcagga

SEQ ID NO: 178437 - DNA, 75 bp, synthetic construct
  source 1..75: mol_type = other DNA
tccaagtgctgcaagattagaggaaattacacgccgcgctgaacaatatcttaatgatatgacggatgatgattt

SEQ ID NO: 178438 - DNA, 75 bp, synthetic construct
  source 1..75: mol_type = other DNA
atcgccccgcaggatatctcttaagtgccagcgcattcgaagcgttaatggacatgcttgctgaacaagaggaga

SEQ ID NO: 178439 - DNA, 75 bp, synthetic construct
  source 1..75: mol_type = other DNA
tgcggctgtatcgggcatgtatgctgcgggggccagtatgatccttggcggtgtggcgcagatgctggcaccgaa

SEQ ID NO: 178440 - DNA, 75 bp, synthetic construct
  source 1..75: mol_type = other DNA
cgtatcaagatcgcctacatcaacgccttcaactggatgtacgcgatgcttcaggttgggcggcgccagtttgaa

SEQ ID NO: 178441 - DNA, 75 bp, synthetic construct
  source 1..75: mol_type = other DNA
gatattgcatattaaggatgaggctcttgaatacttggtggatatatgtactaaggatgattttgtcgtacaggg

SEQ ID NO: 178442 - DNA, 75 bp, synthetic construct
  source 1..75: mol_type = other DNA
ggccttagcggtgatttttgccctgttcttccgttataaacatgaacctgaaaaaatggcacagaaatcattggc

SEQ ID NO: 178443 - DNA, 75 bp, synthetic construct
  source 1..75: mol_type = other DNA
agccctggcggtgatctttgctctgtttttccgttatcagcatgaacctgaaaaaatagcacaaaaatcattagc

SEQ ID NO: 178444 - DNA, 75 bp, synthetic construct
  source 1..75: mol_type = other DNA
cgccagcgctcagggcttatttatgacgatggtcaatggcgttggggcgtgggttggctctcttctcagtggcat

SEQ ID NO: 178445 - DNA, 75 bp, synthetic construct
  source 1..75: mol_type = other DNA
cattaacagcattgaacacatcctgcgtgacaagctgtcaccgtatgacaccgaagagatgcttgaggctatgcg

SEQ ID NO: 178446 - DNA, 75 bp, synthetic construct
  source 1..75: mol_type = other DNA
cgtgacaagttgtcaccgtatgacaccgaagagatgcttgaggctatgcgtatttttctggaagaacagagtggt

SEQ ID NO: 178447 - DNA, 75 bp, synthetic construct
  source 1..75: mol_type = other DNA
acgtgcgcagggcgtggagatgtttgctgagtgtgcatacacacttgaacatcatgatcacgcagtagccttcgc

SEQ ID NO: 178448 - DNA, 75 bp, synthetic construct
  source 1..75: mol_type = other DNA
cgtgacaagctgtcaccgtatgacaccgaagagatgcttgaggctatgcgtatttttctggaagaacagggaggt

SEQ ID NO: 178449 - DNA, 75 bp, synthetic construct
  source 1..75: mol_type = other DNA
gcggagaatgtggcattgcgatctaaggctgcggaactggcacatgaagcgtcaaaaatttactcggcatataac

SEQ ID NO: 178450 - DNA, 75 bp, synthetic construct
  source 1..75: mol_type = other DNA
agtcgggagaactacagtatggtgtcatgactggtatatagcaaatcaaaaccatgtattcaaaggacgaaatat

SEQ ID NO: 178451 - DNA, 75 bp, synthetic construct
  source 1..75: mol_type = other DNA
atacaaccgtatcgccacctaccagtccatcaatgacgcttatgtcgttgaagactatggcaagtgcgcgatggt

SEQ ID NO: 178452 - DNA, 75 bp, synthetic construct
  source 1..75: mol_type = other DNA
cgttcttcccggatgcaacgatgctgatcacctcgttcaacaacctgtcgatttactggcagaaaggttcaatgc

SEQ ID NO: 178453 - DNA, 75 bp, synthetic construct
  source 1..75: mol_type = other DNA
gcggctcacagtgattttcagtcgcgcatcagcacacagattgcccggcaggtggcgcttgaccgcatcatgatc

SEQ ID NO: 178454 - DNA, 75 bp, synthetic construct
  source 1..75: mol_type = other DNA
ctgcccgtgctgaacagcatcagcggccagaatcccaatgcggaattactcgccgggcagctcatcctgtcatcg

SEQ ID NO: 178455 - DNA, 75 bp, synthetic construct
  source 1..75: mol_type = other DNA
ctgaaccggcggcggtgccttttcaacaaagcgtgattaccgctgagatcgaacgctggccggaaaccgcattaa

SEQ ID NO: 178456 - DNA, 75 bp, synthetic construct
  source 1..75: mol_type = other DNA
actggatggggtgcgtcttcctgagagcaacacaccaccgtcaccaggactcagcgaaaagacgtcgcccgtctg

SEQ ID NO: 178457 - DNA, 75 bp, synthetic construct
  source 1..75: mol_type = other DNA
acgtttctgaccaacgttaatacgatggaaacctggcctctgctgcagggtgctgcagaggccggagaggtccgt

SEQ ID NO: 178458 - DNA, 75 bp, synthetic construct
  source 1..75: mol_type = other DNA
atttactggcagaaaggttcaatgcgtcgtctgatgaaagacgacccggaatacaaccgcatcgccacctaccag

SEQ ID NO: 178459 - DNA, 75 bp, synthetic construct
  source 1..75: mol_type = other DNA
gcgcgcagattgcccgccgtatcgcccttgaccgcatcatgattggtttcaacggcacgtcccgcgccgtgaagt

SEQ ID NO: 178460 - DNA, 75 bp, synthetic construct
  source 1..75: mol_type = other DNA
tgaaatgcgtgtggggtcacgggtaatttcgcaggaaatcagcacggcagacgaaggggatggtggtgaaatcgt

SEQ ID NO: 178461 - DNA, 75 bp, synthetic construct
  source 1..75: mol_type = other DNA
gaatggcacaaggaagctgacgacctcgcggtgattatggggcgcaacctgtttaactcgctgcgtctgcccgtg

SEQ ID NO: 178462 - DNA, 75 bp, synthetic construct
  source 1..75: mol_type = other DNA
ttcgtatccgcagcttgatgcctggtcggcacaccctgattttcagtcccgcatcagcgcacagattgcccgaca

SEQ ID NO: 178463 - DNA, 75 bp, synthetic construct
  source 1..75: mol_type = other DNA
acgatgaaccggcgtcggagctgctgaagcgtattgcggcggaaaaagccgagctggtgaaacaaggtaaaatta

SEQ ID NO: 178464 - DNA, 75 bp, synthetic construct
  source 1..75: mol_type = other DNA
ctggtcagaaacgtgttccaaggtttttttttgaaaataatcctattcccttccctccattgcaagaacaagagc

SEQ ID NO: 178465 - DNA, 75 bp, synthetic construct
  source 1..75: mol_type = other DNA
gcacgcccttttagcgatataattaatcgaaaatatcttcttttaaactttaaatcacctaattttcttaagtct

SEQ ID NO: 178466 - DNA, 75 bp, synthetic construct
  source 1..75: mol_type = other DNA
tccttatttacgtgttgcaaacgtccaacgcggatatcttgatcttacggaaattaaacagattgaaatccctat

SEQ ID NO: 178467 - DNA, 75 bp, synthetic construct
  source 1..75: mol_type = other DNA
aaaacaaaaaccgttgccgccaattagcgatgaggaaaaaccgtttgaacttccggaagggtgggagtggtgttt

SEQ ID NO: 178468 - DNA, 75 bp, synthetic construct
  source 1..75: mol_type = other DNA
tgtgccgcaggatccgaatgacgaaccagcctctgaactgctcaaacgtattgcgcaggaaaaagcgcaattggt

SEQ ID NO: 178469 - DNA, 75 bp, synthetic construct
  source 1..75: mol_type = other DNA
gctggaaaacatcgcgctgaatgacccgtactttatcgagaagaaactgtacccgaacgtagatttctactccgg

SEQ ID NO: 178470 - DNA, 75 bp, synthetic construct
  source 1..75: mol_type = other DNA
tcaaacctcttgatttctcgattaatgacattaccgcctggaacaaaagcatcattgggcatatggcctatgact

SEQ ID NO: 178471 - DNA, 75 bp, synthetic construct
  source 1..75: mol_type = other DNA
atgaaaaactatcatgccctgtctgttatttttactcttctgtttcctgcgctggcgaatgcgagcatgagcatc

SEQ ID NO: 178472 - DNA, 75 bp, synthetic construct
  source 1..75: mol_type = other DNA
gtggatgcgttaaaacagaccattctgcaactggccgtaatgggtaaacttgtgccgcaggatccgaatgacgac

SEQ ID NO: 178473 - DNA, 75 bp, synthetic construct
  source 1..75: mol_type = other DNA
aaaagcaaaaaccactgccggaaattagcgaggaagagaagccgtttgaattgccggaggggtgggagtggacaa

SEQ ID NO: 178474 - DNA, 75 bp, synthetic construct
  source 1..75: mol_type = other DNA
ggtaaactggtgccgcaggatccgaatgatgaaccggcgtcggagctgctgaagcgtattgcggcggaaaaagca

SEQ ID NO: 178475 - DNA, 75 bp, synthetic construct
  source 1..75: mol_type = other DNA
tagtctgtgaaaacctaaaaacatctacccaatccgcccagcaaacccaactacaccttgcagatgcactcactg

SEQ ID NO: 178476 - DNA, 75 bp, synthetic construct
  source 1..75: mol_type = other DNA
ttgaccgcgtgttaagcgtgggcaagcaaagccatgctatcagcaccgccagcggtgctggcgaacattttgctg

SEQ ID NO: 178477 - DNA, 75 bp, synthetic construct
  source 1..75: mol_type = other DNA
cagttgctgctcgacgactcctacaacgctaacgtcggctccatgaccgccgctgttcaggttctggctgagatg

SEQ ID NO: 178478 - DNA, 75 bp, synthetic construct
  source 1..75: mol_type = other DNA
ttgtgcaggcaaaagctcaactggtgaaagaagggaaaataaaaaaacaaaaaccgttgccaccgattagcgatg

SEQ ID NO: 178479 - DNA, 75 bp, synthetic construct
  source 1..75: mol_type = other DNA
attgcctcatcactaatgatcattagaccatttatcacagaaatgggagggtatatttataattatttaaccagt

SEQ ID NO: 178480 - DNA, 75 bp, synthetic construct
  source 1..75: mol_type = other DNA
ttgccggagggatgggagtgggtgcgggttgcagatctcatggaggttattaacggtcgagcatataaaaaacat

SEQ ID NO: 178481 - DNA, 75 bp, synthetic construct
  source 1..75: mol_type = other DNA
gtgattacgattttagttaaaggttcacgtagtgccgccatggaagaggtagtacgcgctttacaggagaatgga

SEQ ID NO: 178482 - DNA, 75 bp, synthetic construct
  source 1..75: mol_type = other DNA
aagaattaaagaatcatatccaatccgcccagcaaacccaactgcaccttgcagatgcactcactgacgcggcgg

SEQ ID NO: 178483 - DNA, 75 bp, synthetic construct
  source 1..75: mol_type = other DNA
gttgaaggtaatggtagtgctgatgaaattggtcgttgtgctatttggcacgctccaatcgaaaaatgtgtttat

SEQ ID NO: 178484 - DNA, 75 bp, synthetic construct
  source 1..75: mol_type = other DNA
tttgaacttccggaagggtggtccttagcccactttggtgatattgctatagaaatagcaaccggtccttttggc

SEQ ID NO: 178485 - DNA, 75 bp, synthetic construct
  source 1..75: mol_type = other DNA
ccattcatttctgcccaatgtgttaaaccttttaagtttatgcctgaaaactgccgatatgtttcagaggaagat

SEQ ID NO: 178486 - DNA, 75 bp, synthetic construct
  source 1..75: mol_type = other DNA
tttccttatgtctaaactatgggtttacttcaacatatcttgaaaactccaaatctggcatggcagaaagtcaga

SEQ ID NO: 178487 - DNA, 75 bp, synthetic construct
  source 1..75: mol_type = other DNA
aaattaaagaaaaatgatcttcttattataagatcaaatggaagtactaatattgttggaaaaagtacccttgta

SEQ ID NO: 178488 - DNA, 75 bp, synthetic construct
  source 1..75: mol_type = other DNA
cgttcgatacgccgactcatccaaacagcctggcgctgtctgccgatggcaaaacgctgtatgtcagtgtgaaac

SEQ ID NO: 178489 - DNA, 75 bp, synthetic construct
  source 1..75: mol_type = other DNA
gtgactcttaaacgggcctgttccctgctgacggtgaaatccttcagtgagcgggtgatcaccgggattgcgtca

SEQ ID NO: 178490 - DNA, 75 bp, synthetic construct
  source 1..75: mol_type = other DNA
ctggcaaccctaaaacaaaagagcaataccagctaacaaagcaatttaacatcaaatggctttatacagaggatg

SEQ ID NO: 178491 - DNA, 75 bp, synthetic construct
  source 1..75: mol_type = other DNA
tcaaagaaccgatgttctttggtcagccggtcaacgtggctcgctacgatcagcaaaaatatgacatcttcgaaa

SEQ ID NO: 178492 - DNA, 75 bp, synthetic construct
  source 1..75: mol_type = other DNA
tgattgcccgtgacgaagcactacacctgaccggcactcagcatatgctgaatctgctgcgcagcggtgcggacg

SEQ ID NO: 178493 - DNA, 75 bp, synthetic construct
  source 1..75: mol_type = other DNA
aaaattctttatgacgagaataatattattgtcgccatcactaaagatgcctccacgcttaaccctgaaggtttt

SEQ ID NO: 178494 - DNA, 75 bp, synthetic construct
  source 1..75: mol_type = other DNA
agcagaacgaggccagaacacgcaaaactgcatctgctggtttttcgttttgatgatgtattctggcaaacgcat

SEQ ID NO: 178495 - DNA, 75 bp, synthetic construct
  source 1..75: mol_type = other DNA
tctccacccgcaatgttgaggctggcgtggataagcagaccggggaagtcagagaaatgccggtgaccacatatt

SEQ ID NO: 178496 - DNA, 75 bp, synthetic construct
  source 1..75: mol_type = other DNA
gtccccgccgtctggcgctgatttacaacgtgaacacccgtgtggcttacaatgccgggcgttacacgcagatga

SEQ ID NO: 178497 - DNA, 75 bp, synthetic construct
  source 1..75: mol_type = other DNA
gcccggagcggcagctggcgttccgcatctgggcaaaaaatatcatgaagacccggcgcggtggtcacgatatcc

SEQ ID NO: 178498 - DNA, 75 bp, synthetic construct
  source 1..75: mol_type = other DNA
ttaccgggttatcaatatgggcaagctgaaatcggatatccggggcggaatgcttgaggtgctggaaggagatat

SEQ ID NO: 178499 - DNA, 75 bp, synthetic construct
  source 1..75: mol_type = other DNA
attgcgcaggcggtggaaagccggacgggaacgccaccggcccgcctgctggcgatgagcggtaaaaatgtgctc

SEQ ID NO: 178500 - DNA, 75 bp, synthetic construct
  source 1..75: mol_type = other DNA
tcgatccctgaactggaaacctgggtcgaaacctgggcgttctcagaaaccattcactctcgttcttatacccat

SEQ ID NO: 178501 - DNA, 75 bp, synthetic construct
  source 1..75: mol_type = other DNA
aaagcagctggcgttacgcgcggtgcaatctactggcattttaaagacaagtcggatttgttcagtgagatctag

SEQ ID NO: 178502 - DNA, 75 bp, synthetic construct
  source 1..75: mol_type = other DNA
gaaaaaactggtatgaggaacaaaagaatttccagccagacactttgaaaatggtctatgaccataacggcgtta

SEQ ID NO: 178503 - DNA, 75 bp, synthetic construct
  source 1..75: mol_type = other DNA
aaaaaggcaacactttcggtttaaccgcattcacctcttacggttctttctggctgacgctggttgcgattctgc

SEQ ID NO: 178504 - DNA, 75 bp, synthetic construct
  source 1..75: mol_type = other DNA
tttaaagtgcctgctacacgcactgagttctggctggagaagattggcaaaaatgtaacgcgtgacaagcgggac

SEQ ID NO: 178505 - DNA, 75 bp, synthetic construct
  source 1..75: mol_type = other DNA
cactttttcgtgccgggttaaaggcgctaaagcacgatgcaggttaagagtttcagttattattggtggaacaga

SEQ ID NO: 178506 - DNA, 75 bp, synthetic construct
  source 1..75: mol_type = other DNA
ggttactatcccctcggcgaataacctgtcaacacggccttttacagtattgtgcgaagtaaggaggaactggag

SEQ ID NO: 178507 - DNA, 75 bp, synthetic construct
  source 1..75: mol_type = other DNA
ttccgacgagagtaaacaaaaattaacagagtggatactctttgcgcagaaagtcgaatctacagacacttccag

SEQ ID NO: 178508 - DNA, 75 bp, synthetic construct
  source 1..75: mol_type = other DNA
atggtctatgaccgtaacggcgttattatttgtattgaaaaggatgtttcagcaattaatccggaaggcgcaagc

SEQ ID NO: 178509 - DNA, 75 bp, synthetic construct
  source 1..75: mol_type = other DNA
aaactggaagtttctggatggtaaagtagtaaagcgggaatatacagaacaggaactgcaacagcaggcagagtt

SEQ ID NO: 178510 - DNA, 75 bp, synthetic construct
  source 1..75: mol_type = other DNA
accgagtggatgctctatgcgcagaaagtcgaatccacagacacctccagcctgccggtaacattccccgaacaa

SEQ ID NO: 178511 - DNA, 75 bp, synthetic construct
  source 1..75: mol_type = other DNA
tgaaaagcagagcctgctgcagctcgtcagggataaaacccaactgtgggactctcagctacggctgggcatcat

SEQ ID NO: 178512 - DNA, 75 bp, synthetic construct
  source 1..75: mol_type = other DNA
taaatggatgttcaaagatggcgtagtggtaaagcgaacttataccgaggaagagcagaggcaacaagcggaaaa

SEQ ID NO: 178513 - DNA, 75 bp, synthetic construct
  source 1..75: mol_type = other DNA
acaaatgcagggtaatcccggttatttgcatgtggtgattgaacatcaaagcaagccggataagaaaatgacctt

SEQ ID NO: 178514 - DNA, 75 bp, synthetic construct
  source 1..75: mol_type = other DNA
ttctgagtaaaggaatgtctcgggaagacgttgcagagatggcaaatttaccccttgctgaggttgataagctga

SEQ ID NO: 178515 - DNA, 75 bp, synthetic construct
  source 1..75: mol_type = other DNA
attgtagctatttacctcgaccggccatatgtgaggtaggttcaactacgctggatccggttacgggcaagcagt

SEQ ID NO: 178516 - DNA, 75 bp, synthetic construct
  source 1..75: mol_type = other DNA
agaagcaacggcgcgcaaacgctcaggccgcagcgaataaaagagcggcagcagcagcagcggataaaaaagctc

SEQ ID NO: 178517 - DNA, 75 bp, synthetic construct
  source 1..75: mol_type = other DNA
tatgaagatgagctacgcagcttagagattcagaaacaaaaactggcgctggcgaaagaagaagcccgcgttaag

SEQ ID NO: 178518 - DNA, 75 bp, synthetic construct
  source 1..75: mol_type = other DNA
atgacgaatgggtcgcggagcgcaacagggaaatccagcaagagaagcaacgtcgcgcaaatgcccaggccgccg

SEQ ID NO: 178519 - DNA, 75 bp, synthetic construct
  source 1..75: mol_type = other DNA
agaaaacccagcatctactattaaacctaacgaccctatgttcaatgcgggtcgaaacgaaataggaaatgctgt

SEQ ID NO: 178520 - DNA, 75 bp, synthetic construct
  source 1..75: mol_type = other DNA
aatgctggtggccggtatggagatgaaaatggcttcatcaatgacatcaaaaatcgaaaaagtcagctgtttgaa

SEQ ID NO: 178521 - DNA, 75 bp, synthetic construct
  source 1..75: mol_type = other DNA
agttactttctagggacagcagcggtaatattggaataagtaacaacccgaatacaacggcaggtaccaaaacca

SEQ ID NO: 178522 - DNA, 75 bp, synthetic construct
  source 1..75: mol_type = other DNA
aaatgatgcagcatgtgtactcgataaacaaacatgtgcagagggttggttcgatgagggcactaacagttgcta

SEQ ID NO: 178523 - DNA, 75 bp, synthetic construct
  source 1..75: mol_type = other DNA
agcacgtccaggaaccagctggttgttacgatgctgtacaaacaccaaatacattctgccgtttcgatcggttta

SEQ ID NO: 178524 - DNA, 75 bp, synthetic construct
  source 1..75: mol_type = other DNA
atgaaacatagaaaaataatttcttcagcaattattgcgtctatgatagctaatactatgagttgggcattttac

SEQ ID NO: 178525 - DNA, 75 bp, synthetic construct
  source 1..75: mol_type = other DNA
gctaacagaaatgtgacagaaggcggtcgcgatttgatgaaaagcgtgggtaaagcagaagagaataaatcggac

SEQ ID NO: 178526 - DNA, 75 bp, synthetic construct
  source 1..75: mol_type = other DNA
ggtatttattggcgtcattatgtcgaccattatgtaccggatatttaatcacgaagtcgcgttaattgacgtagg

SEQ ID NO: 178527 - DNA, 75 bp, synthetic construct
  source 1..75: mol_type = other DNA
cggaatgggggccattactggcggcatctattcgcgcgccgttaacggggatcattctggttctggagatgaccg

SEQ ID NO: 178528 - DNA, 75 bp, synthetic construct
  source 1..75: mol_type = other DNA
acgctgtggctttatctgatcctcggtattatttttggtattttcggccctatttttaataaatgggtgctgggg

SEQ ID NO: 178529 - DNA, 75 bp, synthetic construct
  source 1..75: mol_type = other DNA
acgctactggcaaccggtgctgcggcggggctggctgcggcctttaacgcgccgctggcgggtattttgtttatt

SEQ ID NO: 178530 - DNA, 75 bp, synthetic construct
  source 1..75: mol_type = other DNA
atgcaggatttactgcaccgtgtgcacggcggcaatatcactaaatgggtgctgatgggcggtgcgattggcggt

SEQ ID NO: 178531 - DNA, 75 bp, synthetic construct
  source 1..75: mol_type = other DNA
aaataccgcaggccgcgcgtctgcgacgcagacaactgattcgccaacttcttgagcgcgacaaaacgccattag

SEQ ID NO: 178532 - DNA, 75 bp, synthetic construct
  source 1..75: mol_type = other DNA
gctgcccggatggatgtcctgaccacaatccgtgaggaagtggagcgggctgtcagtgagggtatcacccgtgag

SEQ ID NO: 178533 - DNA, 75 bp, synthetic construct
  source 1..75: mol_type = other DNA
gctaacaggaatatgactgaaggcggccgcgatttgatgaagagcgtgggtaaagcagaagagaataaatcggac

SEQ ID NO: 178534 - DNA, 75 bp, synthetic construct
  source 1..75: mol_type = other DNA
cgatgttgtgcaatctgaagctgacgctaacaggaatatgactgaaggcggccgcgatttgatgaagagcgtggg

SEQ ID NO: 178535 - DNA, 75 bp, synthetic construct
  source 1..75: mol_type = other DNA
aatgccgggcgttacacgcagatgatgaacaacacggacacgcatccgttctggcagtatgtggcggtcatggac

SEQ ID NO: 178536 - DNA, 75 bp, synthetic construct
  source 1..75: mol_type = other DNA
tttcgcactacttccaccacgtttgataatggtcgcgtgaaaatgacaccaggggtgggctggtcatataaccct

SEQ ID NO: 178537 - DNA, 75 bp, synthetic construct
  source 1..75: mol_type = other DNA
gttctggcagtacgttgttgtcgaagatggcagaacgcgcccggaacacctcttgctgcgcaatatggttttccg

SEQ ID NO: 178538 - DNA, 75 bp, synthetic construct
  source 1..75: mol_type = other DNA
cgatatggagccgcctttctgaacaattaacccgctgcgccttatgtgtatgtgatcccaaacataagcacgggg

SEQ ID NO: 178539 - DNA, 75 bp, synthetic construct
  source 1..75: mol_type = other DNA
taactcaaagaaagaagagtcctgttttataatggtatcgcatagtttaaattcattaaaagactattgtgatat

SEQ ID NO: 178540 - DNA, 75 bp, synthetic construct
  source 1..75: mol_type = other DNA
agtcatatcgcacgccaacggggcgacactatgtgtttaaggatttaaacctcgaaatcccttcaggaaaaagcg

SEQ ID NO: 178541 - DNA, 75 bp, synthetic construct
  source 1..75: mol_type = other DNA
tcaagtacaaccgagacagcaaaggcgagcgtcacgcaatagttaacggcgtcctgatggtaacgccaggcaaaa

SEQ ID NO: 178542 - DNA, 75 bp, synthetic construct
  source 1..75: mol_type = other DNA
tcttaccgcgtctgaaaaaagacgctggcctgccgtttttcttcccgttgatcactcattcccaccccccccccc

SEQ ID NO: 178543 - DNA, 75 bp, synthetic construct
  source 1..75: mol_type = other DNA
gcgacaagcgtcgcatcaggcattatgcgccgactgccggatgcggcgtgaacgccttatccggcctacggttcg

SEQ ID NO: 178544 - DNA, 75 bp, synthetic construct
  source 1..75: mol_type = other DNA
tcgatgaaattaccgcggttggtgatgctcgatttagagagaaatgtgcaaaaatatttaaagctaggcgttctg

SEQ ID NO: 178545 - DNA, 75 bp, synthetic construct
  source 1..75: mol_type = other DNA
tcggcaaagcggtggtggcagatgttaatgattactaccgcaaccaggcttatatcgatttgaacaaactgccgg

SEQ ID NO: 178546 - DNA, 75 bp, synthetic construct
  source 1..75: mol_type = other DNA
atcatatgcctgcttatcgccagagctggttgcccagtttggtctgaaggaagatattgcgaagaatttgcaatg

SEQ ID NO: 178547 - DNA, 75 bp, synthetic construct
  source 1..75: mol_type = other DNA
gtaacggcggtcggtgatgccaggtttaaagaaaaatgcgctcaattgtttaaagaaaggcataaagagtctagt

SEQ ID NO: 178548 - DNA, 75 bp, synthetic construct
  source 1..75: mol_type = other DNA
agtcgtatcgaacaccgaaggggcgacattttgtttttaaagatttgaatgtggatcttccatcaggaaaaagtg

SEQ ID NO: 178549 - DNA, 75 bp, synthetic construct
  source 1..75: mol_type = other DNA
attataatggtatctcatagtctaaacgcattaaaagaattttgtgatatagctatatatcttaaagcatatgat

SEQ ID NO: 178550 - DNA, 75 bp, synthetic construct
  source 1..75: mol_type = other DNA
actatcgtgacggcgccaagcttgcaaagcatgaaatggagacgtggtgcggacatgtaccacaattttcagact

SEQ ID NO: 178551 - DNA, 75 bp, synthetic construct
  source 1..75: mol_type = other DNA
acggtggccgagaaagaagataatgaagtgttgaagattggcgttcgggtggctgaagaggaagctgaatcttaa

SEQ ID NO: 178552 - DNA, 75 bp, synthetic construct
  source 1..75: mol_type = other DNA
tgtttattagttgggttggattacgcggcgcagtgccgatcatcctggcggtgttcccgatgatggcggggctgg

SEQ ID NO: 178553 - DNA, 75 bp, synthetic construct
  source 1..75: mol_type = other DNA
aagcgcctcgccagtttgttaaccgggcagggcctggcgtttcgcgttcaggacgccagtctgcccggacgcccg

SEQ ID NO: 178554 - DNA, 75 bp, synthetic construct
  source 1..75: mol_type = other DNA
catagcgacagttccattgttccgttaagcaaaagcacgccggatgtcgaaacgcccagcctgaaaccgctgtgg

SEQ ID NO: 178555 - DNA, 75 bp, synthetic construct
  source 1..75: mol_type = other DNA
ttaatgtcgccttctttgtggttctggtttcactgctcttgcagggaacatcactctcgtgggcggcgaaaaaag

SEQ ID NO: 178556 - DNA, 75 bp, synthetic construct
  source 1..75: mol_type = other DNA
tcgtgctcggcctgttggttaatccgagcgacctgctgcctattgccattccggcgctcatattgtccgcatgga

SEQ ID NO: 178557 - DNA, 75 bp, synthetic construct
  source 1..75: mol_type = other DNA
atgggagctgctgaaaagcatcatccatcttgcaatctggatcccttacttccgcttatccaagcgtgtcaaatt

SEQ ID NO: 178558 - DNA, 75 bp, synthetic construct
  source 1..75: mol_type = other DNA
taaaggcaacgtgcaaaagctgcggtgtgagtgttttaccgcctgacgattattgcaaaagttgtactgataaaa

SEQ ID NO: 178559 - DNA, 75 bp, synthetic construct
  source 1..75: mol_type = other DNA
gctattgagcattgagcaggaaacgctgcttgttccttgcaagaattgtctggcagcaatcatcaaaacggcgca

SEQ ID NO: 178560 - DNA, 75 bp, synthetic construct
  source 1..75: mol_type = other DNA
gacagcgagtttcaacgcttgctcgacggcatcatcacgcccgatgtctacggcgctgctcagcggcttcgcaat

SEQ ID NO: 178561 - DNA, 75 bp, synthetic construct
  source 1..75: mol_type = other DNA
tcgctatgatgtgatgcttcttataaacggtgtaccagttgtgcagatcgagcttaaagcactgtctgttagccc

SEQ ID NO: 178562 - DNA, 75 bp, synthetic construct
  source 1..75: mol_type = other DNA
gttgatttatactacttatttgttttttaacaaaaaacgccagcttccacagtattatattgcccttcttctgtc

SEQ ID NO: 178563 - DNA, 75 bp, synthetic construct
  source 1..75: mol_type = other DNA
gatgtgtggataccgtttaacgattcactggatatgattacgggtttttcgccatcttataaaaagatagttatt

SEQ ID NO: 178564 - DNA, 75 bp, synthetic construct
  source 1..75: mol_type = other DNA
gtgattagcctgttctttatgctcggctgtattccgccgatgctgtggttaaacactgccggacggcgtccattg

SEQ ID NO: 178565 - DNA, 75 bp, synthetic construct
  source 1..75: mol_type = other DNA
ggtgtatgcctttttctctggtgggccgggtaatttgcagtggctctatcctaatgagctcttcccgacggatat

SEQ ID NO: 178566 - DNA, 75 bp, synthetic construct
  source 1..75: mol_type = other DNA
ctggccggagtaaaagctggcgaacgtatgagcgtctcatggaatggggcttcccactgtgagatctccctgcca

SEQ ID NO: 178567 - DNA, 75 bp, synthetic construct
  source 1..75: mol_type = other DNA
gctctgggttacatgatgcaacgttgtgaagaagttgactgccagaatcatggcaatgccgaagtcgctcatagc

SEQ ID NO: 178568 - DNA, 75 bp, synthetic construct
  source 1..75: mol_type = other DNA
agcgttatcctgcttgttgaaggttttccgccttcacatgccggaaccattaccgtctatgaaggttccagacca

SEQ ID NO: 178569 - DNA, 75 bp, synthetic construct
  source 1..75: mol_type = other DNA
ccgcattttgctgtggggaagcggtggtccgtttctggatggttatgtactggtaatgattggcgtggcgctgga

SEQ ID NO: 178570 - DNA, 75 bp, synthetic construct
  source 1..75: mol_type = other DNA
ttacagcatggatgtcgagtatggccagtacagcgtcaccctgctggttgaaggttttccgccttcacatgccgg

SEQ ID NO: 178571 - DNA, 75 bp, synthetic construct
  source 1..75: mol_type = other DNA
aaacgtctcgccagcttattaaccgagcaggggctggcgtttcgtgttcaggatgccagtctgccaggacgcccg

SEQ ID NO: 178572 - DNA, 75 bp, synthetic construct
  source 1..75: mol_type = other DNA
catcggcgtaatatcggtggcgacgatgtttgtctcatcccccgtcgaactgctggtgatgcgggtcctaatcgg

SEQ ID NO: 178573 - DNA, 75 bp, synthetic construct
  source 1..75: mol_type = other DNA
aaccctgtttcagcaaactcgattctaagttgccaagagggatgatttcatacccgacttatctatcgtatagcg

SEQ ID NO: 178574 - DNA, 75 bp, synthetic construct
  source 1..75: mol_type = other DNA
ctggatgctgggtagcgcggcgatcccctgtttgttgattttgattggtcgattcgaactgcctgaatctccccg

SEQ ID NO: 178575 - DNA, 75 bp, synthetic construct
  source 1..75: mol_type = other DNA
caggatctcggtgaatttaactctggtacgctgcatgtgcgcattgaagagctgaacggccaggtgcaggagtat

SEQ ID NO: 178576 - DNA, 75 bp, synthetic construct
  source 1..75: mol_type = other DNA
atgattacaattgaaaatctaacaaagtcatacagaacgccactcggacgacactatatatttaaagatttaaat

SEQ ID NO: 178577 - DNA, 75 bp, synthetic construct
  source 1..75: mol_type = other DNA
cctctctggaagaggccgttgaaatcaaaaacggaaccaaagcccccgcccgtgtgacccgctacgagctggcag

SEQ ID NO: 178578 - DNA, 75 bp, synthetic construct
  source 1..75: mol_type = other DNA
cccgctgatgtacagcctgtgattcaggagcagacgcagcaggtaacgccaacggaaccaccaacctccatttca

SEQ ID NO: 178579 - DNA, 75 bp, synthetic construct
  source 1..75: mol_type = other DNA
ctttgatatgccgattaaaacttactcatctggtatgcgatcgcgtttaggctttggtttaagcatggcatttaa

SEQ ID NO: 178580 - DNA, 75 bp, synthetic construct
  source 1..75: mol_type = other DNA
gggtaaatcaacgttactgagaatgattggcggcattgaccgccccgatagcggaaagatcatcaccaataaaac

SEQ ID NO: 178581 - DNA, 75 bp, synthetic construct
  source 1..75: mol_type = other DNA
ttcattatggtttcacatagcttgcattccttaaaagagttttgtgatgttgctatatatttaggtagaaacaac

SEQ ID NO: 178582 - DNA, 75 bp, synthetic construct
  source 1..75: mol_type = other DNA
acggcctgttactgccgtgcaagcaacaaggcgcggtgatgcctgcggctccggcagagattaaaccgatgattc

SEQ ID NO: 178583 - DNA, 75 bp, synthetic construct
  source 1..75: mol_type = other DNA
gtatcgatgacgccagtcattatcagataaacgtgggcaacagtgaaaatcactccagcgtggatggttattaca

SEQ ID NO: 178584 - DNA, 75 bp, synthetic construct
  source 1..75: mol_type = other DNA
ggctcacggtggcgcgttgcatcgtactcaaaacatgggcggtacgcgcctgcttatcgatgctgacggcgtggc

SEQ ID NO: 178585 - DNA, 75 bp, synthetic construct
  source 1..75: mol_type = other DNA
ccgcgcacggcggggcgctgcaccgcacgcagaatatgggcggcacgcgtctgctgattgacgccgacggcgtgt

SEQ ID NO: 178586 - DNA, 75 bp, synthetic construct
  source 1..75: mol_type = other DNA
ccggcagaggttaaaccgataattcaggaacagacgcagcaggtcacacctggtgcggaacctatggctatttca

SEQ ID NO: 178587 - DNA, 75 bp, synthetic construct
  source 1..75: mol_type = other DNA
cgacatttcgctgccggacccgttaccggccgatctgttcaacggcctgttgctgccctgccagacaaaaggtgc

SEQ ID NO: 178588 - DNA, 75 bp, synthetic construct
  source 1..75: mol_type = other DNA
cagacaggaggccttgctgcaattaagcaacagctaatgaataaggcctacgatatgttgccagatgctgtaaga

SEQ ID NO: 178589 - DNA, 75 bp, synthetic construct
  source 1..75: mol_type = other DNA
tgccgtttgatgccagcattgaggaacagcgtaatctgccgccgatggtgatggcgaacgaatttgcaccggaac

SEQ ID NO: 178590 - DNA, 75 bp, synthetic construct
  source 1..75: mol_type = other DNA
agcgggtattaacacaaggattaagtctgatgtcctctttatcgggagcaatcatgcgctctcttgagaaaggca

SEQ ID NO: 178591 - DNA, 75 bp, synthetic construct
  source 1..75: mol_type = other DNA
tcttaatgagccgctggcaaatggtgccgtgatccacatcgtgccgcgtcttgcgggagcaaaaagtggcggtgt

SEQ ID NO: 178592 - DNA, 75 bp, synthetic construct
  source 1..75: mol_type = other DNA
ttatctgacacgaaaatcgctgtgcgagattcgttacagagacggacacagggaggtggcggctttcatggctta

SEQ ID NO: 178593 - DNA, 75 bp, synthetic construct
  source 1..75: mol_type = other DNA
tgacccgcattatattgcccggggtgacttctccttcgaagccggaagcaaagctatgcagcaattactcgacct

SEQ ID NO: 178594 - DNA, 75 bp, synthetic construct
  source 1..75: mol_type = other DNA
gcatttgatgcagtaaattatttatatgagcaagggcataaacggattggctgtatagccggtcccgaagagatg

SEQ ID NO: 178595 - DNA, 75 bp, synthetic construct
  source 1..75: mol_type = other DNA
gattctcctgtccgtatcacccgcgcgtctcaggcaacagaactctgggggcgtggctccatgattgctcagatg

SEQ ID NO: 178596 - DNA, 75 bp, synthetic construct
  source 1..75: mol_type = other DNA
gtcaccggcaccccggcacagcgtcagtgtgtactgctgtttggtcaggcgagaatgaaagagaatgccgtggac

SEQ ID NO: 178597 - DNA, 75 bp, synthetic construct
  source 1..75: mol_type = other DNA
ggtgaaaccctgccgtcagggctgacgccccagacaggctttccctcctcaagagcccgcaatcccgatatcacc

SEQ ID NO: 178598 - DNA, 75 bp, synthetic construct
  source 1..75: mol_type = other DNA
ttacggtgctttccctggggagagccaccgctcattgttttaagtcgtatccagacacaaaaaacttctattacg

SEQ ID NO: 178599 - DNA, 75 bp, synthetic construct
  source 1..75: mol_type = other DNA
ctacctggatatgcttcaaaggaacaaagttccgttttgtgaaggagttcaactggctgctgaatgggtgaagca

SEQ ID NO: 178600 - DNA, 75 bp, synthetic construct
  source 1..75: mol_type = other DNA
aaaaagcggcggatgttgccggaaaactggctctgctcataaatcaggatctggatgcgcctgttgctgctgtgg

SEQ ID NO: 178601 - DNA, 75 bp, synthetic construct
  source 1..75: mol_type = other DNA
atgatttaaaggaaatatattccccatctattattcttcttgatgcattgctttcaatgttgtccaaacctcaat

SEQ ID NO: 178602 - DNA, 75 bp, synthetic construct
  source 1..75: mol_type = other DNA
ttgaaacaatcagagaatttgactgcatggtaagtgcggcaaatagtttcggcctgatggatggcggcgttgatg

SEQ ID NO: 178603 - DNA, 75 bp, synthetic construct
  source 1..75: mol_type = other DNA
cggagcatggaaagacgctattgactgggtgctcaaagaggcttgccaggctgtaaatataggcatcaaaggaga

SEQ ID NO: 178604 - DNA, 75 bp, synthetic construct
  source 1..75: mol_type = other DNA
cagccagccagccagccagccagccagccagccagccagccagccagccagccagccagccagccagccagccag

SEQ ID NO: 178605 - DNA, 75 bp, synthetic construct
  source 1..75: mol_type = other DNA
tgggaaagttttgacagatcttggttatatgtatttaacaataatggtgtgttaggatacatcaatggtcttttg

SEQ ID NO: 178606 - DNA, 75 bp, synthetic construct
  source 1..75: mol_type = other DNA
tgcgtgaaaaagcagaaaaagcaacgtgttgtgtatggtcgctcgaatatggagagagccgatttgatggtgatg

SEQ ID NO: 178607 - DNA, 75 bp, synthetic construct
  source 1..75: mol_type = other DNA
ggcctgatggatggcggcgttgatgccgccattaccgcattcttcggtactcagttacagtcccgcgttcagaat

SEQ ID NO: 178608 - DNA, 75 bp, synthetic construct
  source 1..75: mol_type = other DNA
atgaaattattattacttacaggtgcaacaggatttcttggtggcgcggtcctggataagctgctggataactgt

SEQ ID NO: 178609 - DNA, 75 bp, synthetic construct
  source 1..75: mol_type = other DNA
catcagtgtcctgatttacctttattaattgcccgcccgtcaattattgttggtcatactcgcttaggatgttta

SEQ ID NO: 178610 - DNA, 75 bp, synthetic construct
  source 1..75: mol_type = other DNA
ttaggtgactcatggtataaagcttataaacatggttcttctgataacccaaattctgctcagagatttatatcg

SEQ ID NO: 178611 - DNA, 75 bp, synthetic construct
  source 1..75: mol_type = other DNA
cgatagaaaacgaacaggaacgtctttttgatgaagattacctaatggattcgaaagaatgcattgacgtaattc

SEQ ID NO: 178612 - DNA, 75 bp, synthetic construct
  source 1..75: mol_type = other DNA
gggttgtaaagactacctggcagccaatggtcacaatcttcgcttgccatttatatatgtaaaaagcggtttcag

SEQ ID NO: 178613 - DNA, 75 bp, synthetic construct
  source 1..75: mol_type = other DNA
ggaagctgagagttgagcttgaggagacaaaatcaaaactcaacgagcagcgtgtgtattacgagggagtaatcg

SEQ ID NO: 178614 - DNA, 75 bp, synthetic construct
  source 1..75: mol_type = other DNA
aaaaatctggtggcccaagaatatgagtataaggatttcaaagcggcgcagagtgattgctgtatgcaccctggt

SEQ ID NO: 178615 - DNA, 75 bp, synthetic construct
  source 1..75: mol_type = other DNA
gattaactataccgcaagccgtcttgctgctgctttcaaccacggatttatcaataagtctttacgtgaagtttt

SEQ ID NO: 178616 - DNA, 75 bp, synthetic construct
  source 1..75: mol_type = other DNA
atgaatagggagttagatttgaccgtggaagacttaagcacaattgcggaatacatgcgctgcgacgatcctgat

SEQ ID NO: 178617 - DNA, 75 bp, synthetic construct
  source 1..75: mol_type = other DNA
acgctcgtcatgttgccgcgttcaacccaaaggttgcactggagctgcttggtgaaattaagtgcctggaggaca

SEQ ID NO: 178618 - DNA, 75 bp, synthetic construct
  source 1..75: mol_type = other DNA
tgccctgcaccacagcgaaactccagccaccgatgcttttctggctgaaattcgtgcggcggctcgcaacgaggg

SEQ ID NO: 178619 - DNA, 75 bp, synthetic construct
  source 1..75: mol_type = other DNA
aatggctgtaactcttgagcatgtgtcggtcacggatgcagggcaggccggagttgctgcaatgattatcaacga

SEQ ID NO: 178620 - DNA, 75 bp, synthetic construct
  source 1..75: mol_type = other DNA
ctggtttcctttgccagctcgttcagaatgttattaatcggtcgagcctgtctggggctggcgctgggcggattc

SEQ ID NO: 178621 - DNA, 75 bp, synthetic construct
  source 1..75: mol_type = other DNA
tggtctgacttcgccgctgatgttgtccggcacattgatgttgcttaccgcgctgttagtcaccgcaaaggtgaa

SEQ ID NO: 178622 - DNA, 75 bp, synthetic construct
  source 1..75: mol_type = other DNA
gtccgggtgtgatggcagggatgatcgccatcttcatgtctttcgccgggcagtttgctttcttcacgtatattc

SEQ ID NO: 178623 - DNA, 75 bp, synthetic construct
  source 1..75: mol_type = other DNA
tgtaccaaacaagtacggtatgattggtatagcagcattggtatttacaactatgttaggaccattattaattat

SEQ ID NO: 178624 - DNA, 75 bp, synthetic construct
  source 1..75: mol_type = other DNA
tgagttttggtatcgccagttttgtcggtacgtcgctttcgtcgatcattcttaaacgttcagtaaaactggcct

SEQ ID NO: 178625 - DNA, 75 bp, synthetic construct
  source 1..75: mol_type = other DNA
tcagtttgttgacgccaatggcccaggatttaggcatttcggaaggggttgccgggcaatcggtgaccgtgaccg

SEQ ID NO: 178626 - DNA, 75 bp, synthetic construct
  source 1..75: mol_type = other DNA
ttatcaacgatgccctgcaccacagcgaaactccagctaccgatgcttttctagctgaagtgaagactgaagcac

SEQ ID NO: 178627 - DNA, 75 bp, synthetic construct
  source 1..75: mol_type = other DNA
ctgcccgtatggcacctgaagcaccagctcgtctgacgcgggaagagcgaaacagcctgctttataccggcatgt

SEQ ID NO: 178628 - DNA, 75 bp, synthetic construct
  source 1..75: mol_type = other DNA
atgaatttaacccataccagtgtacaatggctatggtttttacattttacgcaaggggcaattgtgaaactggat

SEQ ID NO: 178629 - DNA, 75 bp, synthetic construct
  source 1..75: mol_type = other DNA
tacaactgcaatttggggccttctctcggcaatgacgggatttgtcaccagtgaaacacaatttattattttgcg

SEQ ID NO: 178630 - DNA, 75 bp, synthetic construct
  source 1..75: mol_type = other DNA
acagagcggtgtcctgcacgtttatatcggcggcaggcgttatttactggctgtcacgaagggacagaaaggcag

SEQ ID NO: 178631 - DNA, 75 bp, synthetic construct
  source 1..75: mol_type = other DNA
gcaaaacgcaatgattttctggcgacctgcacattcattcccaaagcccctgaaccggattacctctgggcagcg

SEQ ID NO: 178632 - DNA, 75 bp, synthetic construct
  source 1..75: mol_type = other DNA
gaatgtacacttgaaacgctggaagaaatgctggaaaaattagaagttgttgttaacgaacgtcgcgaagaagaa

SEQ ID NO: 178633 - DNA, 75 bp, synthetic construct
  source 1..75: mol_type = other DNA
aatgggaaataatgatggatggcgatgagattaaaatcatccaggcagactctcttgaaaatggcacaggctggc

SEQ ID NO: 178634 - DNA, 75 bp, synthetic construct
  source 1..75: mol_type = other DNA
aaatagaacaacgacaacatatccagaatggtatgaagctgttaataaaggtcttgcagcaatcagaaaagctct

SEQ ID NO: 178635 - DNA, 75 bp, synthetic construct
  source 1..75: mol_type = other DNA
gccaatgcgccggaaggcgattttgaccgttcattctctgatggcgttctcgaagatatcgccgaacagcttcgt

SEQ ID NO: 178636 - DNA, 75 bp, synthetic construct
  source 1..75: mol_type = other DNA
atccgctgttgaattccgcaattcaaaaatcgtggaaacgtttagtacccttaatgttcataatgtattttgttg

SEQ ID NO: 178637 - DNA, 75 bp, synthetic construct
  source 1..75: mol_type = other DNA
ctggcgttaacactgggatcaccgctttccggcgcgctgctggagatgcatggatttatggggttcatcccggct

SEQ ID NO: 178638 - DNA, 75 bp, synthetic construct
  source 1..75: mol_type = other DNA
ggcagaagaggtcgcgcaggccattgtctggctactaagtgataaagcctcttacgtcacgggaagttttatcga

SEQ ID NO: 178639 - DNA, 75 bp, synthetic construct
  source 1..75: mol_type = other DNA
atgaaatggtttacaccggaacacgtcgtcgcggcatttcaaaaaggtgagctgacacgccatcaaatagtaatg

SEQ ID NO: 178640 - DNA, 75 bp, synthetic construct
  source 1..75: mol_type = other DNA
tcatagaggcatttaaaaaaggtgagctaacacgacatcaaatagtaatgaatcgtaatatggcaaggagtagag

SEQ ID NO: 178641 - DNA, 75 bp, synthetic construct
  source 1..75: mol_type = other DNA
atgaaatggtttacaccggaacacgtcgtcacggcatttcaaaaaggtgagttatctcgccaccaagtagtaatg

SEQ ID NO: 178642 - DNA, 75 bp, synthetic construct
  source 1..75: mol_type = other DNA
tttggtggaactggcgttagaaatgtgtcgtgatgttctggcgccaggtggcagttttgttgtgaaggtgttcca

SEQ ID NO: 178643 - DNA, 75 bp, synthetic construct
  source 1..75: mol_type = other DNA
aggtcaaagttcgtaagccggactcttctcgtgcacgttcgcgggaagtgtatattgtagcgaccgggcgtaaac

SEQ ID NO: 178644 - DNA, 75 bp, synthetic construct
  source 1..75: mol_type = other DNA
atgaaatggtttacaccggagcacgtcgtagtggcatttaaaaaaggtgagttatctcgccatcaagtagtaatg

SEQ ID NO: 178645 - DNA, 75 bp, synthetic construct
  source 1..75: mol_type = other DNA
aattgagtagtcttgaccattttcggaatgatttattagcaaatagtacaccaaagtcagttgaagcccatctat

SEQ ID NO: 178646 - DNA, 75 bp, synthetic construct
  source 1..75: mol_type = other DNA
tgattgcgccggtaactgatgaccaggcagcatccgccgaagaaggttataaacccgctgaacccgttactgcgg

SEQ ID NO: 178647 - DNA, 75 bp, synthetic construct
  source 1..75: mol_type = other DNA
ttcagaggagcgaaagctcctcctgccgtccacttcacagggttttctccccgcagtggacctttccgatggggg

SEQ ID NO: 178648 - DNA, 75 bp, synthetic construct
  source 1..75: mol_type = other DNA
cgatgcagcactaaaaattattgatgaactgcgaaaaaatgaaaaaggatctgaaaaagaatctgaaacagagta

SEQ ID NO: 178649 - DNA, 75 bp, synthetic construct
  source 1..75: mol_type = other DNA
tcagatgaggtgcgtaaattaattactcggctcggagcgaaagatattcatggattaatgtctttcttatatatg

SEQ ID NO: 178650 - DNA, 75 bp, synthetic construct
  source 1..75: mol_type = other DNA
ctatgcttcataccacatagggacggcattggctgaaattaatgccaaagatggtgatatagttcagattattca

SEQ ID NO: 178651 - DNA, 75 bp, synthetic construct
  source 1..75: mol_type = other DNA
acagcaaagtgacaaactctttaaaccgggaatgacggtagtcgaccttggcgccgcgccgggtggttggtcaca

SEQ ID NO: 178652 - DNA, 75 bp, synthetic construct
  source 1..75: mol_type = other DNA
cgccctgcgtcttctgagtaaaggaatgtctcgggaagacgttgcagagatggcaaatttacctcttgctgagat

SEQ ID NO: 178653 - DNA, 75 bp, synthetic construct
  source 1..75: mol_type = other DNA
gagaaggggattcagcagggaagacaggaagtaagtcaggaattcgccctgcgtcttctaagtaaaggaatgcct

SEQ ID NO: 178654 - DNA, 75 bp, synthetic construct
  source 1..75: mol_type = other DNA
ggtaatcgaagctgcaccttctgttattgatggtgatattcgccataaggttgttgccactctggagcttcagcg

SEQ ID NO: 178655 - DNA, 75 bp, synthetic construct
  source 1..75: mol_type = other DNA
aactatgaccagataaagaatatgcctgatgcatgttcaaaatactcgacaaactctgcatgcactatgtccagc

SEQ ID NO: 178656 - DNA, 75 bp, synthetic construct
  source 1..75: mol_type = other DNA
cacgaagttgaaatgtcatcgactgtatgggtcgggggtaacggtgaagggtactttgaagtagaactaattttt

SEQ ID NO: 178657 - DNA, 75 bp, synthetic construct
  source 1..75: mol_type = other DNA
tgatgggcaagcatatcgttcgctggtggctgcaacaaaatccaatccagctccaaatatttcgccaaatgatcc

SEQ ID NO: 178658 - DNA, 75 bp, synthetic construct
  source 1..75: mol_type = other DNA
ataatatttacgcgtatgaagatgagtgtgatgaagagttcattgccgaaggattaacgctaataacagaaaatg

SEQ ID NO: 178659 - DNA, 75 bp, synthetic construct
  source 1..75: mol_type = other DNA
tgatatcagcagtacagataaagaaaaactatccgcctggatggactacaaaaaagaagtaaaagccgtcgacac

SEQ ID NO: 178660 - DNA, 75 bp, synthetic construct
  source 1..75: mol_type = other DNA
atgaaatggtttacaccgaagcacgtcgtcgaggcatttcaaaaaggtgagctaacacgccatcaaatagtaatg

SEQ ID NO: 178661 - DNA, 75 bp, synthetic construct
  source 1..75: mol_type = other DNA
atggctgtaattccaatgtcttactcccctgctactgtagctcgtcgtttttcgatactggatggagtaactatt

SEQ ID NO: 178662 - DNA, 75 bp, synthetic construct
  source 1..75: mol_type = other DNA
atgtcttactctcctgctactgtagcccgccgtttttcgatactggatggagtaactattcagggcgtgctttac

SEQ ID NO: 178663 - DNA, 75 bp, synthetic construct
  source 1..75: mol_type = other DNA
gtgcctgtactgttaaagggggactctaaaatggctgtgattccaatgtcgtactccccgggtactgtcgctcgt

SEQ ID NO: 178664 - DNA, 75 bp, synthetic construct
  source 1..75: mol_type = other DNA
aagtttgcgggtaacccttataagctccatacctataccagtcaggagtcatttcaggatgccatgtcgcggatc

SEQ ID NO: 178665 - DNA, 75 bp, synthetic construct
  source 1..75: mol_type = other DNA
ctgggagagggactttctggtggtcaaaaacagcgtatatttattgcacgagccttataccggaaaccaggaata

SEQ ID NO: 178666 - DNA, 75 bp, synthetic construct
  source 1..75: mol_type = other DNA
ccagagcaagtcatattcatgatgtgataatgaaaatgccaatggggtatgaaacgttaataggtgaactggggg

SEQ ID NO: 178667 - DNA, 75 bp, synthetic construct
  source 1..75: mol_type = other DNA
catgggcggctaaaaaagccaaagtagtggttcccccagtggggcgtccggtgtcgcgcgttggcctggatattc

SEQ ID NO: 178668 - DNA, 75 bp, synthetic construct
  source 1..75: mol_type = other DNA
gaccgattcgcaatcgctatggcattttgcaaaatttcgacggcctcgcgtggctggcgcaaattgccatgttcc

SEQ ID NO: 178669 - DNA, 75 bp, synthetic construct
  source 1..75: mol_type = other DNA
ttatcttgcctgactgaactggcgattaagtttccgcgtacccggcgtttagttattgcggatgatgatattgaa

SEQ ID NO: 178670 - DNA, 75 bp, synthetic construct
  source 1..75: mol_type = other DNA
gggtgcaagccttgtgatcgataatcagatgacaatagggatgtttgtggcatttggttcttttcgtgggcagtt

SEQ ID NO: 178671 - DNA, 75 bp, synthetic construct
  source 1..75: mol_type = other DNA
gatataccagatcaaccaggtagagcgaatatgcagataggctctgtaaatgaactcaatcagcaatgcactgtg

SEQ ID NO: 178672 - DNA, 75 bp, synthetic construct
  source 1..75: mol_type = other DNA
gcgaaccgcaatatgtcggaaggcggacgcgatttgatgaaaagtgccggcaaagcagaagaaaataaatctgat

SEQ ID NO: 178673 - DNA, 75 bp, synthetic construct
  source 1..75: mol_type = other DNA
tatgatagcctgtgttatgcaggacgaccggctattttcaggatcaattcgtgaaaatatctgtgggtttgcaga

SEQ ID NO: 178674 - DNA, 75 bp, synthetic construct
  source 1..75: mol_type = other DNA
tcgggtctgtttaaccaccttctcagactgccgctggcattttttgaacgccgtaaattaggtgatatccagtcg

SEQ ID NO: 178675 - DNA, 75 bp, synthetic construct
  source 1..75: mol_type = other DNA
cagatgacaataggaatgtttgtagcgtttagttcttttcgtgggcagttttcggaaagagttgcctctctgacc

SEQ ID NO: 178676 - DNA, 75 bp, synthetic construct
  source 1..75: mol_type = other DNA
cgctacactccgatattctgtggtcggtagagacccgtgaaggtgatggctatatctatgtggtgattgaacatc

SEQ ID NO: 178677 - DNA, 75 bp, synthetic construct
  source 1..75: mol_type = other DNA
gttttcacgcatcggaccgtagcgacagcccgaaaccgcgccagcgggttcggcggagactggcgggtgcgccag

SEQ ID NO: 178678 - DNA, 75 bp, synthetic construct
  source 1..75: mol_type = other DNA
accggaacggtcgctgcaagcccgggttttcacgcatcggaccgtagcggcagcccgaaaccgcgccagcgggtt

SEQ ID NO: 178679 - DNA, 75 bp, synthetic construct
  source 1..75: mol_type = other DNA
agcgaacttaccaggcgaatgccacaccacagggagcgaataatgacaattgcagagcgaattcataatgatgga

SEQ ID NO: 178680 - DNA, 75 bp, synthetic construct
  source 1..75: mol_type = other DNA
caggaaaacgcgctgtggctcgctacttcacaaagccgcaaactggataaaggcggggtggtttatcgtctcgat

SEQ ID NO: 178681 - DNA, 75 bp, synthetic construct
  source 1..75: mol_type = other DNA
tggtgccaccatcaataacacgactcagacgttgtggtttggtaacactgtaaacagcgcggtcacggcgataga

SEQ ID NO: 178682 - DNA, 75 bp, synthetic construct
  source 1..75: mol_type = other DNA
tcaaacaggtgcagggcaccggacacaacaacgggcaggcacccgccgcaacgacgtgaagcgcggtttgcgaaa

SEQ ID NO: 178683 - DNA, 75 bp, synthetic construct
  source 1..75: mol_type = other DNA
cccgatgctgttttatcacggtagccgtagtccttatccctggtccctgtgctggctggacgaatttgccgaccc

SEQ ID NO: 178684 - DNA, 75 bp, synthetic construct
  source 1..75: mol_type = other DNA
tggatacaaaagattaccggactttcggcagagcaaatacaggcattagagcagcccttgcctgagcgtgagcac

SEQ ID NO: 178685 - DNA, 75 bp, synthetic construct
  source 1..75: mol_type = other DNA
ctttcggcagagcaaatgcaggcattagatcagcccttgcctgaaagcaagcgcgaaccatggatcgagtactaa

SEQ ID NO: 178686 - DNA, 75 bp, synthetic construct
  source 1..75: mol_type = other DNA
atatcactgtggtgccggacgacgagattgttcagcatcgcagagttgccctactggagttgatccaaaagcata

SEQ ID NO: 178687 - DNA, 75 bp, synthetic construct
  source 1..75: mol_type = other DNA
gcgaataatgacgattgcagagcgaattcataatgatggatatataaaaggggagcagcgcattcttcgattgtt

SEQ ID NO: 178688 - DNA, 75 bp, synthetic construct
  source 1..75: mol_type = other DNA
ggtaaagacccgcgaaggcgatggttatatctatgtggtgattgaacatcagagccgcgaggatattcatatggc

SEQ ID NO: 178689 - DNA, 75 bp, synthetic construct
  source 1..75: mol_type = other DNA
ttgggatcaggtaaaacccgttgtgccgctgttaagcgcggtaatggtgaaagaaacctgcaccgcaggctgcat

SEQ ID NO: 178690 - DNA, 75 bp, synthetic construct
  source 1..75: mol_type = other DNA
gccactcaataggtatcgctctcggtgcctgtaccgttcctgccgcgggcaaaccttcttttaccctggcggata

SEQ ID NO: 178691 - DNA, 75 bp, synthetic construct
  source 1..75: mol_type = other DNA
gcagtacgtttcaactcgctgactaaagaacagcagcaggacgttattactcgtaccttcactcaatctatgtaa

SEQ ID NO: 178692 - DNA, 75 bp, synthetic construct
  source 1..75: mol_type = other DNA
ggtgatgcctccgaaattcgtgaattcgatctggtgaccagatgcttcgtcaaagacggattcaacgtacctgtg

SEQ ID NO: 178693 - DNA, 75 bp, synthetic construct
  source 1..75: mol_type = other DNA
ttttgttggcaggatgacagacttctggtgccgggattatttcttgctggcacagggtgaccagcttatcaaaat

SEQ ID NO: 178694 - DNA, 75 bp, synthetic construct
  source 1..75: mol_type = other DNA
tgcgatggttgaaggtattgagctgacgctgaagtcgatgctggatgtagtacgtaaatttggcgttgatgtcat

SEQ ID NO: 178695 - DNA, 75 bp, synthetic construct
  source 1..75: mol_type = other DNA
aggcgatgtcctgaactatgatgaagtgatggagcgcatggatcacttcatggactggctgggtaaacagtacat

SEQ ID NO: 178696 - DNA, 75 bp, synthetic construct
  source 1..75: mol_type = other DNA
gaaaggtgctgtagcttctctgacttccgttgctaaactgccgttcgcctacgctaaagatggtatctcctacac

SEQ ID NO: 178697 - DNA, 75 bp, synthetic construct
  source 1..75: mol_type = other DNA
cgcatggctggagaagatccggcacagcttaacgacccaacctatcgccgtatgcgcctgattactggcaacatg

SEQ ID NO: 178698 - DNA, 75 bp, synthetic construct
  source 1..75: mol_type = other DNA
gaaaaccatgctgtatgcaatcaacggcggcgttgacgaaaaactgaaaatgcaggttggtccgaagtctgaacc

SEQ ID NO: 178699 - DNA, 75 bp, synthetic construct
  source 1..75: mol_type = other DNA
gaaaggtgctgtagcttctctgacttccgttgctaaactgccgttcgcttacgctaaagatggtatctcttacac

SEQ ID NO: 178700 - DNA, 75 bp, synthetic construct
  source 1..75: mol_type = other DNA
gaaggtggtcagcacctgaacgtgaacgtaatgaaccgtgaaatgctgctcgatgcgatggaaaacccggaaaaa

SEQ ID NO: 178701 - DNA, 75 bp, synthetic construct
  source 1..75: mol_type = other DNA
aatgtcggcgcacaaatagctgccatgacaccgggcgaactggcggcctggcttgcggagaatcttcagtcatga

SEQ ID NO: 178702 - DNA, 75 bp, synthetic construct
  source 1..75: mol_type = other DNA
cagtaaacaattatgccatgtcattcagcgaccgtagtggggggatctcgcgtcgacgagtaatatttaatttct

SEQ ID NO: 178703 - DNA, 75 bp, synthetic construct
  source 1..75: mol_type = other DNA
ccggactcaaggccatcaccggcggcgatgcggtgtccgttgacccgaaataccgggatgcgtactccacgcata

SEQ ID NO: 178704 - DNA, 75 bp, synthetic construct
  source 1..75: mol_type = other DNA
gaccatctatcagaccagcggcaacccgtatggccacattattatgcgtggcggcaaaaaaccgaattaccatgc

SEQ ID NO: 178705 - DNA, 75 bp, synthetic construct
  source 1..75: mol_type = other DNA
tgatggcggagatttgcaccatgctggcgggtaaggctaatacagtatcagcaagcatgaaggcgctggaagacg

SEQ ID NO: 178706 - DNA, 75 bp, synthetic construct
  source 1..75: mol_type = other DNA
gggaatacagcccgtaacctgattggattcagtaacggtgtttttgatacccggacaggcgattttcgggagcat

SEQ ID NO: 178707 - DNA, 75 bp, synthetic construct
  source 1..75: mol_type = other DNA
tcgctggtggacttctgcggctatctcatgtcgtcggtaatgtgtgatggtctgttagtgggtaatgccgaaatt

SEQ ID NO: 178708 - DNA, 75 bp, synthetic construct
  source 1..75: mol_type = other DNA
tcgatggttgattcggtgatccactccgcggtgatggcggcctgtttatggcagttacccggcattcgtacccat

SEQ ID NO: 178709 - DNA, 75 bp, synthetic construct
  source 1..75: mol_type = other DNA
gccgttatcgcctgtgttggcggtggttcgaatgccatcggtatgtttgcagatttcatcaacgaaaccgacgtc

SEQ ID NO: 178710 - DNA, 75 bp, synthetic construct
  source 1..75: mol_type = other DNA
cggcgcaccgttaaaacatggtcgcgtgggcatctatttcggtatgaaagcgccgatgatgcaaaccgaagacgg

SEQ ID NO: 178711 - DNA, 75 bp, synthetic construct
  source 1..75: mol_type = other DNA
gaagctggcggcggcaagtatacagaatgcgaattattaccctgatggcatgcacagccagaagtgtgaaaactg

SEQ ID NO: 178712 - DNA, 75 bp, synthetic construct
  source 1..75: mol_type = other DNA
agtaagcataaaagccagagtctacgaaaatatatgcaaccggaacatttgtggattcaagcgaaatttaggggg

SEQ ID NO: 178713 - DNA, 75 bp, synthetic construct
  source 1..75: mol_type = other DNA
gtaaaaacggcggcagtgatgctgctaatgccacgggtgattaaaacccatcatggatggtttaacgcccatcgc

SEQ ID NO: 178714 - DNA, 75 bp, synthetic construct
  source 1..75: mol_type = other DNA
atgttttcagaagtcatgcgttatattctcgacctcggccctacggtcatgttgccgattgtcatcattattttt

SEQ ID NO: 178715 - DNA, 75 bp, synthetic construct
  source 1..75: mol_type = other DNA
taatgccacgggtgattaaacccatcatggatggtttaacgcccatcgctaagcaggcccgtagtcgtttacagg

SEQ ID NO: 178716 - DNA, 75 bp, synthetic construct
  source 1..75: mol_type = other DNA
ttaaaactgagtcataatcaggataagtctcatcctgttcataaagcgatggagttctttgcgaaaaagagcaaa

SEQ ID NO: 178717 - DNA, 75 bp, synthetic construct
  source 1..75: mol_type = other DNA
ttcacgcggcgtttgtttataagctcggcgactggtttgcccgcgatacccgaaatttctttgagctggaaggca

SEQ ID NO: 178718 - DNA, 75 bp, synthetic construct
  source 1..75: mol_type = other DNA
gctggtggatgctatcatcgagaaaatcccaggggttaaccgtattaaatttagtgccgacgatatccagcgcaa

SEQ ID NO: 178719 - DNA, 75 bp, synthetic construct
  source 1..75: mol_type = other DNA
agcgtggtgcgcagaatatgatgaatggggcaacctgctgaatgaagagaacccgcatcatctgcagcagctcat

SEQ ID NO: 178720 - DNA, 75 bp, synthetic construct
  source 1..75: mol_type = other DNA
gttaaaaatggatacagtgctaacagcaccaacgaaccttaattcaaataaggatctaatggctataacaacaaa

SEQ ID NO: 178721 - DNA, 75 bp, synthetic construct
  source 1..75: mol_type = other DNA
aaggggggatggaatttttatcagtatccgttgaatccggtcataaatgtagatccgcaaggtttggttgatata

SEQ ID NO: 178722 - DNA, 75 bp, synthetic construct
  source 1..75: mol_type = other DNA
caatgaggttgagaatcatcgtgacatagatgataaagtttcaagggtaactcaagttggacttacgactagact

SEQ ID NO: 178723 - DNA, 75 bp, synthetic construct
  source 1..75: mol_type = other DNA
atcatccaaaggggttgggggagctgcaagtatcgagagaggatatggaagggtgggctgagagagtggttagag

SEQ ID NO: 178724 - DNA, 75 bp, synthetic construct
  source 1..75: mol_type = other DNA
ttaagtcgagctaaggtggttaacagtacaacaaagcaaataaataaggcggatcgtgtgattgagtttgaagca

SEQ ID NO: 178725 - DNA, 75 bp, synthetic construct
  source 1..75: mol_type = other DNA
atctgaaaggcatgaaagtccgtgtccagccaagccctggcgcagttgaaatgatcaaagtcatgggcggtaacc

SEQ ID NO: 178726 - DNA, 75 bp, synthetic construct
  source 1..75: mol_type = other DNA
atgcgtaacttcgatttatccccactgatgcgtcaatggatcggttttgacaaattggccaacgcactgcaaaac

SEQ ID NO: 178727 - DNA, 75 bp, synthetic construct
  source 1..75: mol_type = other DNA
ttggggcgcgtaatattaaagttaaacaggcgattgtaaatcaggctaaagctatacgtgcacgtattgaatggc

SEQ ID NO: 178728 - DNA, 75 bp, synthetic construct
  source 1..75: mol_type = other DNA
atcgggcatgtatgcggcaggggccagtatgatcctgggcggagtggcgcagatgctggcaccgaaagccaggac

SEQ ID NO: 178729 - DNA, 75 bp, synthetic construct
  source 1..75: mol_type = other DNA
atggcaggtaaagcaacggctcttaacactaaccagcttttcgcgtacctgaatcgtggtgatattgctgaattt

SEQ ID NO: 178730 - DNA, 75 bp, synthetic construct
  source 1..75: mol_type = other DNA
gggtacgaaacaagcattattcgccctggctacatgaagccaaaacacgaaatcgatccattaaaaacaataatg

SEQ ID NO: 178731 - DNA, 75 bp, synthetic construct
  source 1..75: mol_type = other DNA
atcctaataaaggtttgtttatactggaatatttatgggagttagtggaatttataaatcaacaatatcacaaca

SEQ ID NO: 178732 - DNA, 75 bp, synthetic construct
  source 1..75: mol_type = other DNA
ccgggctgcccagattgtttcagctgtttacggtgcgcagggggtcaaagtgccactgaatgatgcgcttcttca

SEQ ID NO: 178733 - DNA, 75 bp, synthetic construct
  source 1..75: mol_type = other DNA
tcgcgtaatgtgtatcaaggttctggggggctcgcaccgtcgctacgcaggcgtaggcgacatcatcaagatcac

SEQ ID NO: 178734 - DNA, 75 bp, synthetic construct
  source 1..75: mol_type = other DNA
accgtttatcgagaaagtgcagccgatgtacgcagcctttgctaaggaaaaccctgctctcgccccaatgctaac

SEQ ID NO: 178735 - DNA, 75 bp, synthetic construct
  source 1..75: mol_type = other DNA
aaatccgtgaacaattcgacgacgttgaaagctttatcactcatgatatccgtttccaccagctactggctgttg

SEQ ID NO: 178736 - DNA, 75 bp, synthetic construct
  source 1..75: mol_type = other DNA
tgaagacggtcaatgaaaatttcttcaacgccatcgatgatgtcagtgacacggacacgttcgattgtgtcatca

SEQ ID NO: 178737 - DNA, 75 bp, synthetic construct
  source 1..75: mol_type = other DNA
acgggctgatatccgggctgcccagattgtttcagctgtttacggtgcgcagggggtcaaagtgccactgaatga

SEQ ID NO: 178738 - DNA, 75 bp, synthetic construct
  source 1..75: mol_type = other DNA
ttatctggcaatagcgtttaaaaaatggggcgtcccctgggaggccgttggtgcatacaatgcaggattcaggaa

SEQ ID NO: 178739 - DNA, 75 bp, synthetic construct
  source 1..75: mol_type = other DNA
ttatctggcaatagcctttaaaaaatggggcgtcacctgggaggccgttggtgcatacaatgccggattcaggaa

SEQ ID NO: 178740 - DNA, 75 bp, synthetic construct
  source 1..75: mol_type = other DNA
ttatctggcaatagcttttaaaaaatggggcgtcccctgggaggccgttggtgcatacaatgctggattcaggaa

SEQ ID NO: 178741 - DNA, 75 bp, synthetic construct
  source 1..75: mol_type = other DNA
agattcccagcattttaacgaactggcccgctatggaattaagccggaacatctgacaacagatccctgcatgaa

SEQ ID NO: 178742 - DNA, 75 bp, synthetic construct
  source 1..75: mol_type = other DNA
atgaaaaaatggatgttagccatctgcctgatatttataaatgagatctgccatgccactgattgctttgatctt

SEQ ID NO: 178743 - DNA, 75 bp, synthetic construct
  source 1..75: mol_type = other DNA
catcagacgtttaccggatttataccgggataaagagcagtaaaggcatccaggttccgaccacgaagaaatccc

SEQ ID NO: 178744 - DNA, 75 bp, synthetic construct
  source 1..75: mol_type = other DNA
aaaaaaaacacttttttattaatcagttatgggcaattgaggatgaaaaaaattctatttacgtcacccctgatg

SEQ ID NO: 178745 - DNA, 75 bp, synthetic construct
  source 1..75: mol_type = other DNA
aataatatttttctttattttttaaatttaaaaattaattgtgctgatgatttttttgatattaataattttact

SEQ ID NO: 178746 - DNA, 75 bp, synthetic construct
  source 1..75: mol_type = other DNA
tctattcctttcaatcgactgcggatgaaatggttttaataaaaaaatacgggtttgggcttgagagagatatca

SEQ ID NO: 178747 - DNA, 75 bp, synthetic construct
  source 1..75: mol_type = other DNA
ttatctggcaatagcatttaaaaaatggggcgtcccctgggaggccgttggtgcatacaatgcgggattcaggaa

SEQ ID NO: 178748 - DNA, 75 bp, synthetic construct
  source 1..75: mol_type = other DNA
atgaattatatagcggatgtcaatgctcaattagctatgagtaaaaaaaataacaggatttttgctaacataacc

SEQ ID NO: 178749 - DNA, 75 bp, synthetic construct
  source 1..75: mol_type = other DNA
aaaaaaaacacttttttattaatcagttatgggcaattgaggatgaaaaaattctatttacgtcacccctgatga

SEQ ID NO: 178750 - DNA, 75 bp, synthetic construct
  source 1..75: mol_type = other DNA
atgcataagattatcgccattatcctcataatgtttgcaggaaatacatattcctctgactgttttgaacttgct

SEQ ID NO: 178751 - DNA, 75 bp, synthetic construct
  source 1..75: mol_type = other DNA
taatacgcttgaaattgttgatggtttccaccgccatgaaattggtaaaggctctaacacgttaaaaacgcgctt

SEQ ID NO: 178752 - DNA, 75 bp, synthetic construct
  source 1..75: mol_type = other DNA
tttaccggatttataccgggataaaaagcagtaaaggtatccggattccggtcacgaagaaatcacttcccaaat

SEQ ID NO: 178753 - DNA, 75 bp, synthetic construct
  source 1..75: mol_type = other DNA
gcctgatgtttataaatgagatctgccaagccactgattgctttgatcttgcaggccgggattacaaaatagatc

SEQ ID NO: 178754 - DNA, 75 bp, synthetic construct
  source 1..75: mol_type = other DNA
tcgattgtgttttgtgggttaagaacacccaactcacccccaatgattacaatccgaataacgtcgcgccgccag

SEQ ID NO: 178755 - DNA, 75 bp, synthetic construct
  source 1..75: mol_type = other DNA
tcgctgcaacgattcgccacaaccgcgcgcgtggccgccaccaaatcacagcaatgtcagaaatcgttcgtgaac

SEQ ID NO: 178756 - DNA, 75 bp, synthetic construct
  source 1..75: mol_type = other DNA
aaattggtaaaggctcatcatcgttaaaattacgcttaaaaggttatttgccggtgacctgtctggaaggtacgc

SEQ ID NO: 178757 - DNA, 75 bp, synthetic construct
  source 1..75: mol_type = other DNA
ggtcaccggggcgctggtgttcgaagggctggcgaaagatctcgatgaggcggctgaactggcggcctccgggga

SEQ ID NO: 178758 - DNA, 75 bp, synthetic construct
  source 1..75: mol_type = other DNA
gggctggcgaaagatctcgatgaggcggctgaactggcggcctccggggagatcaccttctcgccgtgccacgaa

SEQ ID NO: 178759 - DNA, 75 bp, synthetic construct
  source 1..75: mol_type = other DNA
aaaaagcagcatgtagaagtgactcaactcgactggacgccgccggggcagggcaatatgcaggtggtgcaggcg

SEQ ID NO: 178760 - DNA, 75 bp, synthetic construct
  source 1..75: mol_type = other DNA
agactcccagcattttaacgaactggcccgctacggaattaaaccggaacatcttacagcagatccctgtctgaa

SEQ ID NO: 178761 - DNA, 75 bp, synthetic construct
  source 1..75: mol_type = other DNA
ttataaatgtgacctgcgaggctggtgattgctttgatctggctggcagagattataaaattgaccctgacttgc

SEQ ID NO: 178762 - DNA, 75 bp, synthetic construct
  source 1..75: mol_type = other DNA
ccagaaccagagacgtcttgcctacgcatcagaggtttaccggatttataccgggataaaaagcagtaaaggtat

SEQ ID NO: 178763 - DNA, 75 bp, synthetic construct
  source 1..75: mol_type = other DNA
acgactggttgttaattgccagtgaattaccgttcagcccaccagcagagggggaaacgctggcaacacatgcgc

SEQ ID NO: 178764 - DNA, 75 bp, synthetic construct
  source 1..75: mol_type = other DNA
cctggatgaagaaaacctcaaagttgcatttaacgatgtagatttttgtctaaaagtaagggcggcgggatatcg

SEQ ID NO: 178765 - DNA, 75 bp, synthetic construct
  source 1..75: mol_type = other DNA
tatcccccgcgtgctataccattggcgcaccattgaaggctctaccgcgctggcatctggcgaaaaaagctatac

SEQ ID NO: 178766 - DNA, 75 bp, synthetic construct
  source 1..75: mol_type = other DNA
tcgctattgtgtccggctgtacaaggcaggccacatcaagccgtcaaatattaatgccatcgggcaaaagctggc

SEQ ID NO: 178767 - DNA, 75 bp, synthetic construct
  source 1..75: mol_type = other DNA
atatgccaggcgcaatggcggaatatggcagggagtatatgaaaaagagaactaaagaaggtgtgcgatcaaacg

SEQ ID NO: 178768 - DNA, 75 bp, synthetic construct
  source 1..75: mol_type = other DNA
ggataaagagttacagcgggctatggcgcagatttttattgatgcggaaatcagctattcgcagaacgccatcaa

SEQ ID NO: 178769 - DNA, 75 bp, synthetic construct
  source 1..75: mol_type = other DNA
tgacaaggtggcaatcgacccaaaacataaagccccatattcaacgcgtatcccggcagtagtgctggcggttaa

SEQ ID NO: 178770 - DNA, 75 bp, synthetic construct
  source 1..75: mol_type = other DNA
aggaacaggacgggcgactggctggcgataacgtgccacctgtctggcttggagagcaacaacttgccgaactgg

SEQ ID NO: 178771 - DNA, 75 bp, synthetic construct
  source 1..75: mol_type = other DNA
gcttcggtgcagatatgccaggcgcaatggcggaatatggcagggagtatatgaaaaagagaacgaaagaaggtg

SEQ ID NO: 178772 - DNA, 75 bp, synthetic construct
  source 1..75: mol_type = other DNA
ggggtatatcgtcgtaaattgcttcagcaaatcggtggcttccgtctgggcgtagaaggtagtcaggatcaagat

SEQ ID NO: 178773 - DNA, 75 bp, synthetic construct
  source 1..75: mol_type = other DNA
cagaaacccaaattctctacagcgatgaagacaagctcaacggccgcggcgagcgctttgatcctcatttcaaga

SEQ ID NO: 178774 - DNA, 75 bp, synthetic construct
  source 1..75: mol_type = other DNA
ttctgaccaggacgaagctaaacgcctgctgtatgagcagcagaaatcagaagaagcactggtgataaaacgcga

SEQ ID NO: 178775 - DNA, 75 bp, synthetic construct
  source 1..75: mol_type = other DNA
gcgtgaataccttgcccgtgagcgtaaaaacattgatgacggactgattatccggtttccggcaaagaaaaaaac

SEQ ID NO: 178776 - DNA, 75 bp, synthetic construct
  source 1..75: mol_type = other DNA
ggggcaaaaataaagagtaacgacgagcttgttgcatttcagtttttacttaataagcgtaacgtaactcacgtt

SEQ ID NO: 178777 - DNA, 75 bp, synthetic construct
  source 1..75: mol_type = other DNA
ggatttcaaaagtgcattctcttctaatgagctcatttctatcagtacttgcagttcacatgattattgcatggg

SEQ ID NO: 178778 - DNA, 75 bp, synthetic construct
  source 1..75: mol_type = other DNA
tggctctcactcaacatctcaccccatcacgttcgcaaggtctggaagcgatgattcgcgcaattcgcaccaaag

SEQ ID NO: 178779 - DNA, 75 bp, synthetic construct
  source 1..75: mol_type = other DNA
aacgaagcaacggttggcgcagcagttgactacctgatcaacattctggctgaaattcagcagggaggtgcttaa

SEQ ID NO: 178780 - DNA, 75 bp, synthetic construct
  source 1..75: mol_type = other DNA
atgggcaacgaaattttggtaactaccaatgaggcaatgttcgaagctttaaccacaacaaaattgcggttagcg

SEQ ID NO: 178781 - DNA, 75 bp, synthetic construct
  source 1..75: mol_type = other DNA
tgtcacgtccggcagtgacaatttcgttacgatagtagcacctgaaggtaaattcagtattgatgccagtgctgt

SEQ ID NO: 178782 - DNA, 75 bp, synthetic construct
  source 1..75: mol_type = other DNA
ggatacagcacgatatttcctttttacagcagaacgcagtatgcgttaccaggtgagcgtacggaggcgatgtaa

SEQ ID NO: 178783 - DNA, 75 bp, synthetic construct
  source 1..75: mol_type = other DNA
tcggaagttgtaccggagaacgaacgcgatccaatgctggcggaaaaaatagaaggtgagctggcggtagtgatt

SEQ ID NO: 178784 - DNA, 75 bp, synthetic construct
  source 1..75: mol_type = other DNA
aacgcgtattccggcagtagtgctggcggttaacaataacgccatgtcattcagtgaccgcagcggggggatctc

SEQ ID NO: 178785 - DNA, 75 bp, synthetic construct
  source 1..75: mol_type = other DNA
atgaaacggaaaataaaatattccttaattgctctttcattgttatctggtgccagtcatgccgtaatgagtgat

SEQ ID NO: 178786 - DNA, 75 bp, synthetic construct
  source 1..75: mol_type = other DNA
ttgaactgtggaacggggcggacggtggcggcagtacttcccgtcagtctgcggcggcccgcgacacgctgcgac

SEQ ID NO: 178787 - DNA, 75 bp, synthetic construct
  source 1..75: mol_type = other DNA
gcccatccccggctacaccaccgtcttcccgctgtaccagcgcgtgcaatacgccatgccgggcgaacggaccga

SEQ ID NO: 178788 - DNA, 75 bp, synthetic construct
  source 1..75: mol_type = other DNA
gcgcacccaccggtaccattacgacagtcagcaccggctggtgcactacacgcggacacaatatgcagagccgct

SEQ ID NO: 178789 - DNA, 75 bp, synthetic construct
  source 1..75: mol_type = other DNA
gtggaaagccatctggtggaaggcaatcagagcctcgagagcggggagccgctggcctacggtaagagcatcacc

SEQ ID NO: 178790 - DNA, 75 bp, synthetic construct
  source 1..75: mol_type = other DNA
ttgagatagccaggttatcacggcataacaataccatgagtatttttaaggccatgcaatccattaacgatgacc

SEQ ID NO: 178791 - DNA, 75 bp, synthetic construct
  source 1..75: mol_type = other DNA
aacaactgggaaaagctgcagaaagctctggcaccggtgctcaatcagcgtatcagagacaaaaccgattatggc

SEQ ID NO: 178792 - DNA, 75 bp, synthetic construct
  source 1..75: mol_type = other DNA
ttttcaggaaacctacgacgctttagttgccgaagtcgagacattaaagggaaaagatcctgaaaattatcagag

SEQ ID NO: 178793 - DNA, 75 bp, synthetic construct
  source 1..75: mol_type = other DNA
gtaaaaacgtctgcatggggttcagcatcatcgaccgcacaagcaatagatatacaacgtatgacaccattgaat

SEQ ID NO: 178794 - DNA, 75 bp, synthetic construct
  source 1..75: mol_type = other DNA
gtgcgcgtgcaaacctagcgaaaaccatgctgtacgcaatcaacggtggcgttgacgaaaaactgaaaatgcagg

SEQ ID NO: 178795 - DNA, 75 bp, synthetic construct
  source 1..75: mol_type = other DNA
tcgtggcgtgatgagcaggggatcgtgcgggtagaaaaatcgcagtgcatcggctgcagttattgcattggcgct

SEQ ID NO: 178796 - DNA, 75 bp, synthetic construct
  source 1..75: mol_type = other DNA
gtgctggggctgacagcgtcaacctggatcctgtggactgtactcggtagtaacactctgctgttgatagataaa

SEQ ID NO: 178797 - DNA, 75 bp, synthetic construct
  source 1..75: mol_type = other DNA
aatatgatcaagatgtacgtctggtttgactgcaatatacaagatcagacctgcggcaaacatgccagaaaaaac

SEQ ID NO: 178798 - DNA, 75 bp, synthetic construct
  source 1..75: mol_type = other DNA
atggatctggtaaacctcaaaaccggcaccgacacatatcaggatgaggatggtaaaacccagactcgtgatgat

SEQ ID NO: 178799 - DNA, 75 bp, synthetic construct
  source 1..75: mol_type = other DNA
gtttcactgatggatgaccagatggtcgacatgtcgtttatcactcagctgaccggcctgaccgataaatggttt

SEQ ID NO: 178800 - DNA, 75 bp, synthetic construct
  source 1..75: mol_type = other DNA
atgccgttgcaggtgtgctcggttctggcgtctcaccgtttgtatttattgtcgcctttgctttgcttaccagta

SEQ ID NO: 178801 - DNA, 75 bp, synthetic construct
  source 1..75: mol_type = other DNA
gttgggacgcgtgtgcaaattatcgaccagccagtaaaatacaccactgaaccagatggctcgaactggctggaa

SEQ ID NO: 178802 - DNA, 75 bp, synthetic construct
  source 1..75: mol_type = other DNA
ttgatgtaaaccgtgcaaatgctgcgttgcaacgtcgctcgggaatgcctgtgcaaattaatcctggcgcaaggc

SEQ ID NO: 178803 - DNA, 75 bp, synthetic construct
  source 1..75: mol_type = other DNA
aggggatgatgtcgcattctgtcctaaatgctttgaaactgaccacaaacggatacatacaatatttcgtgatta

SEQ ID NO: 178804 - DNA, 75 bp, synthetic construct
  source 1..75: mol_type = other DNA
tcgctcgcgtcgccaaacacctgaaccacgacgcaatcaagtttgacgaagccgctgcttcgaagcgaatcaacg

SEQ ID NO: 178805 - DNA, 75 bp, synthetic construct
  source 1..75: mol_type = other DNA
ctcaagagcatgtctactggctgcataaaataggtaatttaacactcataagtggttccaaaaattctgaagcac

SEQ ID NO: 178806 - DNA, 75 bp, synthetic construct
  source 1..75: mol_type = other DNA
cggagtatgagtcagacagaaaagttcctttgccgataacgccttctttgcggacgtttatcaacgaacaaggcg

SEQ ID NO: 178807 - DNA, 75 bp, synthetic construct
  source 1..75: mol_type = other DNA
taatggtgactcatgcacaatgccttatagttaccgagtattcggcatgcccaaaacgcacacactaaaattaaa

SEQ ID NO: 178808 - DNA, 75 bp, synthetic construct
  source 1..75: mol_type = other DNA
ttctgggtgttctctgtaccaatgtatctcatccgcattctggcgctttgtgcaggcgctgtttttatcttccca

SEQ ID NO: 178809 - DNA, 75 bp, synthetic construct
  source 1..75: mol_type = other DNA
gtgaagatggaagtaatcacaacccaagcacttctttttgaggctgaacagaaaaataagcagcttgaagatcag

SEQ ID NO: 178810 - DNA, 75 bp, synthetic construct
  source 1..75: mol_type = other DNA
tgaaaatgggcaagaattaccgccagggacgtatcgtgtcgatatctatttgaataatggttatatggcaacgcg

SEQ ID NO: 178811 - DNA, 75 bp, synthetic construct
  source 1..75: mol_type = other DNA
ggcgctgtccacacaggtcccggcgtttcgtcagaaactgaatgacggctggtatcaggtgcgcattgccgggcg

SEQ ID NO: 178812 - DNA, 75 bp, synthetic construct
  source 1..75: mol_type = other DNA
ggtggatatgcgcttcatcacaaagctaacggggctgacggataaatggttctataagttgataaaagacggact

SEQ ID NO: 178813 - DNA, 75 bp, synthetic construct
  source 1..75: mol_type = other DNA
tttgccattctgactattctgccagcggcgttagtggttattgccgaacacgtagggcacctggtagtaacggct

SEQ ID NO: 178814 - DNA, 75 bp, synthetic construct
  source 1..75: mol_type = other DNA
aatatcgtcaaaaaagatctgctgcgcgatccaggtctgcaccgttcgatgtttgctaacggcttgtcgaccgtg

SEQ ID NO: 178815 - DNA, 75 bp, synthetic construct
  source 1..75: mol_type = other DNA
ctttgacgttgatgttcacgcatcaataaatcctctgacgggaaagccgttcttcatgccgtttcgtggtgtaga

SEQ ID NO: 178816 - DNA, 75 bp, synthetic construct
  source 1..75: mol_type = other DNA
ttcttgagttattacatgatttaacgcgtcatcacgggcgtacagtcgtcgtggtgttgcatgatctgaattttg

SEQ ID NO: 178817 - DNA, 75 bp, synthetic construct
  source 1..75: mol_type = other DNA
tgttgaaaaactctctggtgggcagcgccagcgttgctggattgcgatggtgttggcgcaaaagacgccttatat

SEQ ID NO: 178818 - DNA, 75 bp, synthetic construct
  source 1..75: mol_type = other DNA
gatcctgacttccgttattttgatcatcggcgtcagtggcgcgaaggtaaacattggcgcggcggagctgaaagg

SEQ ID NO: 178819 - DNA, 75 bp, synthetic construct
  source 1..75: mol_type = other DNA
tggcgtgatggcgatcacccgtgtttacagtacctgggttatcggcggtgcggcgattttcgctatcctgctttc

SEQ ID NO: 178820 - DNA, 75 bp, synthetic construct
  source 1..75: mol_type = other DNA
ccggataacccgatgggtctgtatgcactctacatcggtcgcctgtatgctatccatggcaccaacgccaacttc

SEQ ID NO: 178821 - DNA, 75 bp, synthetic construct
  source 1..75: mol_type = other DNA
aacatcgtcaaaaaagatctactgcgcgatccgggtctgcaccgttcgatgtttgctaacggcctgtcgaccgtg

SEQ ID NO: 178822 - DNA, 75 bp, synthetic construct
  source 1..75: mol_type = other DNA
catggcgggcttactgcctgctgaagggcaaacgccagattccaaaaccatcatcatctctattaccactttggc

SEQ ID NO: 178823 - DNA, 75 bp, synthetic construct
  source 1..75: mol_type = other DNA
aacattgtcaaaaaggatttgctgcgcgatccgggtctgcaccgttcgatgttcgctaacggcctgtcgactgtg

SEQ ID NO: 178824 - DNA, 75 bp, synthetic construct
  source 1..75: mol_type = other DNA
acgataagtttgtcgatatggcgtttatcacccagctaaccggtttaacagacaaatggttctacaagctcattc

SEQ ID NO: 178825 - DNA, 75 bp, synthetic construct
  source 1..75: mol_type = other DNA
caaactgggccgtagctcccgatggctgaaaagcgaagtggaagcctggctgcaggcgcgtattgcacagtcccg

SEQ ID NO: 178826 - DNA, 75 bp, synthetic construct
  source 1..75: mol_type = other DNA
atgaataccccagtttcactgatggatgaccagatggtcgacatggcatttatcactcaactgaccggcctgacc

SEQ ID NO: 178827 - DNA, 75 bp, synthetic construct
  source 1..75: mol_type = other DNA
gtttgttgctgatgggctggcagaaatttacccaacaacgccctcatgcgccgaccgattacatggaagcgttgc

SEQ ID NO: 178828 - DNA, 75 bp, synthetic construct
  source 1..75: mol_type = other DNA
ggggcttcttcatcctttgctttattgccaccgttacgctggttaacgcctgctcttataccctggcgatgtcca

SEQ ID NO: 178829 - DNA, 75 bp, synthetic construct
  source 1..75: mol_type = other DNA
tctgccgccgtactgttctgggggtcgattgagatctactactacatctccacgccgccatttgctttagcgcca

SEQ ID NO: 178830 - DNA, 75 bp, synthetic construct
  source 1..75: mol_type = other DNA
atcttcgcaatgggcaccagtctcggccttgccacaccgctggtgaccgagtgtatgcagtatctgtttggtatt

SEQ ID NO: 178831 - DNA, 75 bp, synthetic construct
  source 1..75: mol_type = other DNA
tctgatcagcggctcgacgcttggcgtacgcgtattggcgatgagcatcattgcttacctggtggcgctgaaata

SEQ ID NO: 178832 - DNA, 75 bp, synthetic construct
  source 1..75: mol_type = other DNA
gcctttccggctcccatcaaacttggccgcagctcccgctggctgaaaagtgaagtggaagcctggctgcaggcg

SEQ ID NO: 178833 - DNA, 75 bp, synthetic construct
  source 1..75: mol_type = other DNA
caaaatgggtcgcagctcccgctggctgaaaagcgaagtggaagcctggctgcaggcacgtattgcacagtcccg

SEQ ID NO: 178834 - DNA, 75 bp, synthetic construct
  source 1..75: mol_type = other DNA
tgccgttgccgggtttcgtcatgcgatgctgctactggagtggttgttcctcaataatgactccggcagtctggt

SEQ ID NO: 178835 - DNA, 75 bp, synthetic construct
  source 1..75: mol_type = other DNA
atgactacccgcccctctcttctggaagaccagtttgttgacatggcatttattacgagtctgaccgggcttacg

SEQ ID NO: 178836 - DNA, 75 bp, synthetic construct
  source 1..75: mol_type = other DNA
atatctgtttgataatgttcctgtaggcactcgtgtacaaattattgatcagccagtgaaatacacaacggaacc

SEQ ID NO: 178837 - DNA, 75 bp, synthetic construct
  source 1..75: mol_type = other DNA
tgtatcatgggcgtaaatggtcgggcatcacgccagaaaagttcatgcagcaagtggatacttacatcagatggt

SEQ ID NO: 178838 - DNA, 75 bp, synthetic construct
  source 1..75: mol_type = other DNA
agcagttatttttatcaccgggctgcactgaaagccggtgataaatacgccacaatacgtacgatgctgacagat

SEQ ID NO: 178839 - DNA, 75 bp, synthetic construct
  source 1..75: mol_type = other DNA
tcacctgaacaacagagaaaaaacaaagattactgatgccctgagacaaacatatcccctgacagaattaggtct

SEQ ID NO: 178840 - DNA, 75 bp, synthetic construct
  source 1..75: mol_type = other DNA
gactggagccgcgaacaacgtctgacgctggtgaatgcgattgttgaaactggcgtgcgcgtaccgtccatgtgc

SEQ ID NO: 178841 - DNA, 75 bp, synthetic construct
  source 1..75: mol_type = other DNA
gcgattgttgaaaccggcgtgcgcgtgccgtccatgtgcctttctgctcatcgtcgtttcccgctgggcagcgaa

SEQ ID NO: 178842 - DNA, 75 bp, synthetic construct
  source 1..75: mol_type = other DNA
aacaacccgtggttccagctctacccggatatcggcaacctgtcggcgtgggacaacgacgtgcagatggagttg

SEQ ID NO: 178843 - DNA, 75 bp, synthetic construct
  source 1..75: mol_type = other DNA
ccgaaccggaaagcagatatcattgttgaccagcagtcacagttcaacaccacccagcgggagttgaacgagttt

SEQ ID NO: 178844 - DNA, 75 bp, synthetic construct
  source 1..75: mol_type = other DNA
atgcagatcccggcgtttcgtcagaagctgagcgacggctggtatctggtacggattgccgggcgtgatacaggt

SEQ ID NO: 178845 - DNA, 75 bp, synthetic construct
  source 1..75: mol_type = other DNA
cagccagtgaaatcgccaggcgtattggtgtcagtagtgcggtattgtataaatggaaatatgaaattatcggca

SEQ ID NO: 178846 - DNA, 75 bp, synthetic construct
  source 1..75: mol_type = other DNA
atgaacaacagagaaaaaacaaagatagctgatgccctgagacaaacatatcccctgacagaattactgcgtgtt

SEQ ID NO: 178847 - DNA, 75 bp, synthetic construct
  source 1..75: mol_type = other DNA
tatcatgacagctaaagatctagcaggtaatgactccaacttattgatagtgttttatgttcagataatgcccga

SEQ ID NO: 178848 - DNA, 75 bp, synthetic construct
  source 1..75: mol_type = other DNA
tactgcgcaattcggtgcgctagatgcgttgactactgtgaataatgcccagagagaggcctatggttttcgtgt

SEQ ID NO: 178849 - DNA, 75 bp, synthetic construct
  source 1..75: mol_type = other DNA
cgtaagcaatttgctaccaaaggcgaagccattgcgtttgaaagcttcacaatggaagaagtgaacaaaaaaccg

SEQ ID NO: 178850 - DNA, 75 bp, synthetic construct
  source 1..75: mol_type = other DNA
cgtaagcaatttgctacgaaaggcgaagccattgcttttgaaagcttcacaatggaagaagtgaataaaaaaccg

SEQ ID NO: 178851 - DNA, 75 bp, synthetic construct
  source 1..75: mol_type = other DNA
tttttgaacaggatcaagagaaagtcgccgcccatctggggatcagcaaaatgagtttatggcgtaaatacaatc

SEQ ID NO: 178852 - DNA, 75 bp, synthetic construct
  source 1..75: mol_type = other DNA
ctgaccacggaagaaattaaacgcctgcttgatgcttgcgcagattctcatagctccagcctattgatgattgca

SEQ ID NO: 178853 - DNA, 75 bp, synthetic construct
  source 1..75: mol_type = other DNA
ctgacaccagaagaaattaagcgcctattagatgcctgcgctgattctcaaagccccagcctgctgttgattgca

SEQ ID NO: 178854 - DNA, 75 bp, synthetic construct
  source 1..75: mol_type = other DNA
gaaaatggttgtgcgagtgctacccgaatgggcgcgacggtaagcgtgtgcgcaaacaatttgcgacgaaaggtg

SEQ ID NO: 178855 - DNA, 75 bp, synthetic construct
  source 1..75: mol_type = other DNA
gtcaaacgatcatttcatcacattctccccaaatagcggtaaactttgagccaggctctataataagattgcttg

SEQ ID NO: 178856 - DNA, 75 bp, synthetic construct
  source 1..75: mol_type = other DNA
attcttcattttaaagatatcaatgaagatgcggttctttcaattttgaaaggtaatgtcagtgactctggtgaa

SEQ ID NO: 178857 - DNA, 75 bp, synthetic construct
  source 1..75: mol_type = other DNA
gcaaaagtaatatgctgcattcgctaagaatgctattagataaaagtgtatcagattcagaaattgaaccaaatg

SEQ ID NO: 178858 - DNA, 75 bp, synthetic construct
  source 1..75: mol_type = other DNA
tcacagacgaatgggaggatcgtcgcggatctgagtaaaggacaactgaaagccgtcattaaagatcttgagcga

SEQ ID NO: 178859 - DNA, 75 bp, synthetic construct
  source 1..75: mol_type = other DNA
ctggaagttgatatggggaaaatgacgctgatgaaaccggtttcggttggaagggtcttaaacgaacagggtttt

SEQ ID NO: 178860 - DNA, 75 bp, synthetic construct
  source 1..75: mol_type = other DNA
atgctttgggaaaatatctaacagcacgtcagcagcagattgtagctgataagctactggtcgaacctttggtag

SEQ ID NO: 178861 - DNA, 75 bp, synthetic construct
  source 1..75: mol_type = other DNA
tgcgcgcatattgttgcgtacgcacccagatacgcgttttagcaaaaaaagaggtgtgctagcgagcttggtcaa

SEQ ID NO: 178862 - DNA, 75 bp, synthetic construct
  source 1..75: mol_type = other DNA
atgattttatatacaaattcaaaagggattttagctaagaaatattatatacaatccatcctaaatatggaattg

SEQ ID NO: 178863 - DNA, 75 bp, synthetic construct
  source 1..75: mol_type = other DNA
tcggcgcggcggagctgaaaggtatggcgctggcgaccatcgtcggtatcggcttaagtttgatcttcaaactga

SEQ ID NO: 178864 - DNA, 75 bp, synthetic construct
  source 1..75: mol_type = other DNA
aggcgctgacgccgggaattattcaggcaggttattccgtcgagcaacagcgcgaagtgtttgagtttgtcgcca

SEQ ID NO: 178865 - DNA, 75 bp, synthetic construct
  source 1..75: mol_type = other DNA
gataatattgccgattcgccactggcggacaaaatcgcctccgcgaatcagcaggcgctggagcgcattatccag

SEQ ID NO: 178866 - DNA, 75 bp, synthetic construct
  source 1..75: mol_type = other DNA
cgcccaacttatcgttgataaaggttactcataccgggaagccagtgaagctatgagtgttggttcctctactat

SEQ ID NO: 178867 - DNA, 75 bp, synthetic construct
  source 1..75: mol_type = other DNA
ctgtggccgctgtttgaaatcgcgccggagttggtgtttcctgatggggagacgttgcgtgaaatactcacttcg

SEQ ID NO: 178868 - DNA, 75 bp, synthetic construct
  source 1..75: mol_type = other DNA
cgggactggtgtttcctgatggaacagtattagaaaacatattaaaaataaataaattccatgaattaaataaat

SEQ ID NO: 178869 - DNA, 75 bp, synthetic construct
  source 1..75: mol_type = other DNA
ggaacaagtactgtaacgtggtctgattttttctatgaaacaacgcagttagaacgattgtcaacttacctccag

SEQ ID NO: 178870 - DNA, 75 bp, synthetic construct
  source 1..75: mol_type = other DNA
ttcaaactgatcagtgtgctgcgccctgaagaagtggtgctggacgcagaagacgcggatataacagacaaataa

SEQ ID NO: 178871 - DNA, 75 bp, synthetic construct
  source 1..75: mol_type = other DNA
cgtgttttgatcgaatcgaaagtggattacaacaaagcacagaacctgatcctgacttccgtgattttgatcatc

SEQ ID NO: 178872 - DNA, 75 bp, synthetic construct
  source 1..75: mol_type = other DNA
cggagttggtgtttcctgatggggagacgttgcgtgaaatactcacttcgctagcagtactacaaacctgccggt

SEQ ID NO: 178873 - DNA, 75 bp, synthetic construct
  source 1..75: mol_type = other DNA
ggcaacatcgcttacaccaacatgagcgagcagatggcgaagattttgcgtatgggtgccaacgatcagagcgtg

SEQ ID NO: 178874 - DNA, 75 bp, synthetic construct
  source 1..75: mol_type = other DNA
tggcgctgaccgatattccacagggtgaaacaggcgacggcatgaccgaaggtgtgtttatgctgcctaagctga

SEQ ID NO: 178875 - DNA, 75 bp, synthetic construct
  source 1..75: mol_type = other DNA
ttatcgtttttcttctgtttatagtttacatgctgaactatatggatcgttctgcattatcgattacggccccac

SEQ ID NO: 178876 - DNA, 75 bp, synthetic construct
  source 1..75: mol_type = other DNA
agtctttacctacatcgggagtcagcaattcagtaggtgtaacggttggcggcggagttgggggggcattttgcg

SEQ ID NO: 178877 - DNA, 75 bp, synthetic construct
  source 1..75: mol_type = other DNA
gttaaccatttgccggtgatgatggcggcggtagtgattgcgatggcagttatgctgctggcatcaaaaccgctg

SEQ ID NO: 178878 - DNA, 75 bp, synthetic construct
  source 1..75: mol_type = other DNA
gccatcctgcgtttgatgggcgggaaacgtcaggccaatgttcagcacgatgccgataacccgatgccgatcccg

SEQ ID NO: 178879 - DNA, 75 bp, synthetic construct
  source 1..75: mol_type = other DNA
tgaaacaggcgacggcatgaccgaaggtgtgtttatgctgcctaagctgaaaacggatgacatgaaaacgggtaa

SEQ ID NO: 178880 - DNA, 75 bp, synthetic construct
  source 1..75: mol_type = other DNA
gccgctggcgcttatcagtgcggaaggggcaacagaatggtgcgcagaatacgatgaatggggcaacctgctgaa

SEQ ID NO: 178881 - DNA, 75 bp, synthetic construct
  source 1..75: mol_type = other DNA
cccggtgtacacgccggcgcgaaaaatccacctgtaccactgcgaccatcgcggcctgccgctggcccttatcag

SEQ ID NO: 178882 - DNA, 75 bp, synthetic construct
  source 1..75: mol_type = other DNA
cacaggatgatccccagtatccagggatggatacaaagacagcaagtgattacctgccacagacaaattggccaa

SEQ ID NO: 178883 - DNA, 75 bp, synthetic construct
  source 1..75: mol_type = other DNA
ccaggcgttttcacaatcggggggcatggtacccccacatctattgaatccgcaacgcgcagtatcatgacagct

SEQ ID NO: 178884 - DNA, 75 bp, synthetic construct
  source 1..75: mol_type = other DNA
tggtcagaacgaagtggctacccgcttcaataccatgaccaaaaaagctgacgaaattcagatctacaaatatgt

SEQ ID NO: 178885 - DNA, 75 bp, synthetic construct
  source 1..75: mol_type = other DNA
gtgtggatcactattgcaccgttcgtgacacctgcgggtgtaaaaaccgcatcaacatggttcccggcaaaagag

SEQ ID NO: 178886 - DNA, 75 bp, synthetic construct
  source 1..75: mol_type = other DNA
gcgcgttctcgcatcaatgtctttctactgtagcagcaactctgggtggcgatctgttcaaaaaagacgaagtag

SEQ ID NO: 178887 - DNA, 75 bp, synthetic construct
  source 1..75: mol_type = other DNA
gatccacaatttgaagaaaataatcgggcgctggccgctattttctttctggcaaaaataccggcggctcgtcat

SEQ ID NO: 178888 - DNA, 75 bp, synthetic construct
  source 1..75: mol_type = other DNA
ggttacgaagcaccggtaatgctggcttactctgcgcgtaaccgctctgcttctatccgtattccggtggttgcg

SEQ ID NO: 178889 - DNA, 75 bp, synthetic construct
  source 1..75: mol_type = other DNA
gacggctcctcgattggcggctggaaaggcattaacgaatccgatatggtgctgatgccagacgcatccaccgca

SEQ ID NO: 178890 - DNA, 75 bp, synthetic construct
  source 1..75: mol_type = other DNA
atctcaccaatacgatgaaattagccggttaaatgttcaccatgcacttcatgcttctggtttagttcctcagga

SEQ ID NO: 178891 - DNA, 75 bp, synthetic construct
  source 1..75: mol_type = other DNA
tgtcaggggttttgaccgtattggttgctcaatcgtatatgatgaaatccgtcgttatttggattctgcaaagct

SEQ ID NO: 178892 - DNA, 75 bp, synthetic construct
  source 1..75: mol_type = other DNA
gtgaaaccaataatgaaaacatccaacgaaaaaaagacaacctgatgaagccggtggagcgttatattgatggta

SEQ ID NO: 178893 - DNA, 75 bp, synthetic construct
  source 1..75: mol_type = other DNA
ggcgggtgttaaaacagcatcaacatggttcccggcaaaagagcgcggtgtggctacgggggttttcaatatggg

SEQ ID NO: 178894 - DNA, 75 bp, synthetic construct
  source 1..75: mol_type = other DNA
tcgcgcgttttctcgctgacccggcatggggaaccattaacttctgggtgccgattttctttgttgaaacactgc

SEQ ID NO: 178895 - DNA, 75 bp, synthetic construct
  source 1..75: mol_type = other DNA
gaatacgagtaatgcttacattcatcatcttgttgataatcgtcatgataaatcagctttgaaggttgcagagga

SEQ ID NO: 178896 - DNA, 75 bp, synthetic construct
  source 1..75: mol_type = other DNA
gggcgctggccgctattttctttctggcaaaaataccggcggctcgtcatgaactcgaattaagtgagctgacta

SEQ ID NO: 178897 - DNA, 75 bp, synthetic construct
  source 1..75: mol_type = other DNA
cttcggggtacatcttttcgaacaatcatcggcagggaaaaccaccacacagaacatcgcatcaagtttatgggg

SEQ ID NO: 178898 - DNA, 75 bp, synthetic construct
  source 1..75: mol_type = other DNA
gtgagttttcgttccactgagcgtcagacccctaatacatcctacaaacaaattatccctgcgacagactggtat

SEQ ID NO: 178899 - DNA, 75 bp, synthetic construct
  source 1..75: mol_type = other DNA
gaatcagattaagccacaattatcaattctaagtgcagtcgtggtgaaagagacatgtactgcaggatgcattta

SEQ ID NO: 178900 - DNA, 75 bp, synthetic construct
  source 1..75: mol_type = other DNA
gaaactggcagcggcaggtgtcagggatgctgattattaccctgaaggaatgcacaaccagaaacgggagaactg

SEQ ID NO: 178901 - DNA, 75 bp, synthetic construct
  source 1..75: mol_type = other DNA
tttgttttacgtgctgccggagccgtttagctcacatgtggcgaagggatttaacaaggatgccgtagcaaagac

SEQ ID NO: 178902 - DNA, 75 bp, synthetic construct
  source 1..75: mol_type = other DNA
cacggggcggcaggtcgtgagtgggttaaatggctggcaggccaccagcaggaggcaaaggacgcggtaagggca

SEQ ID NO: 178903 - DNA, 75 bp, synthetic construct
  source 1..75: mol_type = other DNA
aagttagcatccttaattgaaataaactcgaccaatcataaagtagtttatatagatgcttttactgaagatcac

SEQ ID NO: 178904 - DNA, 75 bp, synthetic construct
  source 1..75: mol_type = other DNA
aacgggcactggctgctatattctttatggcaaaaattccagctgaacgtcatagcatcagcattaatgagctga

SEQ ID NO: 178905 - DNA, 75 bp, synthetic construct
  source 1..75: mol_type = other DNA
cctgaatggacttaatcacattgcggagctaagggcgaaagtttttggcctaaatattgagtcagagcttgagcg

SEQ ID NO: 178906 - DNA, 75 bp, synthetic construct
  source 1..75: mol_type = other DNA
cgtggacgacggtttttctgctgattgttgccagttgttgtctcaacagtattattggcgcattgcgcaacaagt

SEQ ID NO: 178907 - DNA, 75 bp, synthetic construct
  source 1..75: mol_type = other DNA
tcgatccgcgcaaagccgccgtcgaagccgctattgcccgcgccaaagcacgcaagctggaacagcaacaggcta

SEQ ID NO: 178908 - DNA, 75 bp, synthetic construct
  source 1..75: mol_type = other DNA
ccattttttaaaaggtagtggcggtattggtgaaccaacaaatattgtgaaagatgctttaaaagtttttttact

SEQ ID NO: 178909 - DNA, 75 bp, synthetic construct
  source 1..75: mol_type = other DNA
aacgcggtttaaccagtcgcttgcaggccactgaagcccaattacccgtgctttctgaagagatggcgttactga

SEQ ID NO: 178910 - DNA, 75 bp, synthetic construct
  source 1..75: mol_type = other DNA
gaagagatgtcattactgatgctggacagccgccgggtgatccaaagcattcagttgatgaaatcgctgggcggc

SEQ ID NO: 178911 - DNA, 75 bp, synthetic construct
  source 1..75: mol_type = other DNA
tgaaattgccgctgtttgacggtggacggttgaatgccaatctcgaaggcactcgcgccgccagcaacatgatga

SEQ ID NO: 178912 - DNA, 75 bp, synthetic construct
  source 1..75: mol_type = other DNA
taatgatgggtggataatacctggtgcgtcgtggataccatcacactggatgcctctaccagaaccgccgcagga

SEQ ID NO: 178913 - DNA, 75 bp, synthetic construct
  source 1..75: mol_type = other DNA
ggatgataagtttatcaccaccgactatttgcaacagtgcccttatcagagacttaggcgaggccggcacgtcgt

SEQ ID NO: 178914 - DNA, 75 bp, synthetic construct
  source 1..75: mol_type = other DNA
gccagaccaacgtactggtctccctgactcaggccgcaccggatggcggtgattcgctgctggtttcggcggtaa

SEQ ID NO: 178915 - DNA, 75 bp, synthetic construct
  source 1..75: mol_type = other DNA
gtaccaccgaaatcattcatgataattacgcgttatgcctgcaattctggctcaatggcgttgatcgtcaggaat

SEQ ID NO: 178916 - DNA, 75 bp, synthetic construct
  source 1..75: mol_type = other DNA
tcgcaaacaggccaaaggcgatgagctgactgctgatgagcgcaaacaatttaaatacatgcgagcgcgctacaa

SEQ ID NO: 178917 - DNA, 75 bp, synthetic construct
  source 1..75: mol_type = other DNA
ttgaggcgagcgagcgctatttttgcgattgaagaagatgatgtcgttgatgcacaggttagtttgccgccgact

SEQ ID NO: 178918 - DNA, 75 bp, synthetic construct
  source 1..75: mol_type = other DNA
cgccattggcgcgcataatgccgcgctggcagaaaccgcagcagtagagctatcgctgaccacgggcgtagcgca

SEQ ID NO: 178919 - DNA, 75 bp, synthetic construct
  source 1..75: mol_type = other DNA
atgatgagaaaatatttcccgcttgaggcgagcgagcatctatttgttgcgattgaggaagatgatgttgttgat

SEQ ID NO: 178920 - DNA, 75 bp, synthetic construct
  source 1..75: mol_type = other DNA
ggacgatatggaaaaccgccagccgtatgacgcgccggtagcgctcgacagcaatattcgccagcgcttagagct

SEQ ID NO: 178921 - DNA, 75 bp, synthetic construct
  source 1..75: mol_type = other DNA
gaagcggtcgagaagcgtgcatgtaacagccgggtacgcgaatcactgcaaaaagtcggtgcgttcgcatcgatt

SEQ ID NO: 178922 - DNA, 75 bp, synthetic construct
  source 1..75: mol_type = other DNA
agaggaaaaagcgtactcaaatgtacaaacgagctggcaggatgcgaaatattacgctactggctggaatgcctg

SEQ ID NO: 178923 - DNA, 75 bp, synthetic construct
  source 1..75: mol_type = other DNA
cgtcaaccaactctccggtaattcctggtgaggtgttgtctgcaatcctgaagtttgccagggttcgcgccgatt

SEQ ID NO: 178924 - DNA, 75 bp, synthetic construct
  source 1..75: mol_type = other DNA
gctcaccattctgggcgaggataagcaccaggggctgggtaaggatgcgctgacctatggcattcgcgtattgcc

SEQ ID NO: 178925 - DNA, 75 bp, synthetic construct
  source 1..75: mol_type = other DNA
ggctggcggaggctatcagacacaactgcagcgtctggtttccgctgaatcccggaggtaaagggaatgatgctt

SEQ ID NO: 178926 - DNA, 75 bp, synthetic construct
  source 1..75: mol_type = other DNA
cctggcgaagtctgacgtcagccagattaaagcactgtatagcggtgaggacggggagaggctggcggaggttat

SEQ ID NO: 178927 - DNA, 75 bp, synthetic construct
  source 1..75: mol_type = other DNA
gtctgacgtcagccggattaaagcgctgtacagcggagaggacggggagaggctggcggaggctatcagacacaa

SEQ ID NO: 178928 - DNA, 75 bp, synthetic construct
  source 1..75: mol_type = other DNA
cggatttaacccgaatatcctgtacttccgaccggaagaaggagagcgactggaggccattctggctgatatcgc

SEQ ID NO: 178929 - DNA, 75 bp, synthetic construct
  source 1..75: mol_type = other DNA
gtacgtccgacctatgtgctgacgtgtggcagtcgggcaacggcattgtttaacaacaaaaacaagccatccgat

SEQ ID NO: 178930 - DNA, 75 bp, synthetic construct
  source 1..75: mol_type = other DNA
acctacctgggcgcagcctctgcactacgtgacaccgctcgtatttatggtgtggagtccgcagatatggcggta

SEQ ID NO: 178931 - DNA, 75 bp, synthetic construct
  source 1..75: mol_type = other DNA
ccgcgaccaggctgaattgatgggaaaccttgtcatagacgcagttaaagcctcacgtccgtttgagatgaaccc

SEQ ID NO: 178932 - DNA, 75 bp, synthetic construct
  source 1..75: mol_type = other DNA
ggccaaaggcttcatggctccacattccttacacccaatgctggacgacatctctcgcgacacaaacggagttct

SEQ ID NO: 178933 - DNA, 75 bp, synthetic construct
  source 1..75: mol_type = other DNA
ccgggcgatgaaagtggcgagcgcactgaaaatagagccagtggcgttctatcccgcttattacgaagcgatcga

SEQ ID NO: 178934 - DNA, 75 bp, synthetic construct
  source 1..75: mol_type = other DNA
tttgctggcgaaagataagaagttacatcaccttacgtctaaacatcgcgtacgccgctgcccctgtcgtggccg

SEQ ID NO: 178935 - DNA, 75 bp, synthetic construct
  source 1..75: mol_type = other DNA
ccggcggtagtgtctttgctggcgaaagataagaagttacatcaccttacgtctaaacatcgcgtacgccgctga

SEQ ID NO: 178936 - DNA, 75 bp, synthetic construct
  source 1..75: mol_type = other DNA
aactcgattttgccatccgctccaggctgagtcaggagtatgggattaacctggataaagacgcgaaggtctctg

SEQ ID NO: 178937 - DNA, 75 bp, synthetic construct
  source 1..75: mol_type = other DNA
agatgaaagatcgaagcgaaaagctcaaaataactttcggtattccgctttattcttcaaggtcgtcagttcatg

SEQ ID NO: 178938 - DNA, 75 bp, synthetic construct
  source 1..75: mol_type = other DNA
gttcctggttcacttggtcatgtgaacgtcctggcgaatatgatgtttggttccatttctggttcagccgttgcg

SEQ ID NO: 178939 - DNA, 75 bp, synthetic construct
  source 1..75: mol_type = other DNA
atggaaaaagaaatcaaatttgcgcctaaagatatcgacgaagaactggctaaaatcggcatgcttgagcgtatg

SEQ ID NO: 178940 - DNA, 75 bp, synthetic construct
  source 1..75: mol_type = other DNA
ccatgggctcgcgccacaattcgtaagcaagatattgatgaaagtcagttcgaaattgttactggcatcaggatt

SEQ ID NO: 178941 - DNA, 75 bp, synthetic construct
  source 1..75: mol_type = other DNA
aaaggttatgcaggttttcgttttgttgaggcaaaaaaagaaggtgaatttgatttagtcattgttacgcattgt

SEQ ID NO: 178942 - DNA, 75 bp, synthetic construct
  source 1..75: mol_type = other DNA
gaaattcaatcaggaaatctggagcgagggatttaaggacattgttaaaattgacactgttgacagttatcaggg

SEQ ID NO: 178943 - DNA, 75 bp, synthetic construct
  source 1..75: mol_type = other DNA
gcattttactggtcagccagtcacacgaggctgtaaatacagcggccgagcgcatcagaaagcactgttcccggc

SEQ ID NO: 178944 - DNA, 75 bp, synthetic construct
  source 1..75: mol_type = other DNA
aagtagtgatgaagtcgaagccttacaggtcgatcaggaaggtgttgagcgatttataggtgaggtgtcacttaa

SEQ ID NO: 178945 - DNA, 75 bp, synthetic construct
  source 1..75: mol_type = other DNA
ttgtatcaaagaccttctacgaagggaagcttcgaaatggagagcgagcaattcctgatgtctatcagcatgcac

SEQ ID NO: 178946 - DNA, 75 bp, synthetic construct
  source 1..75: mol_type = other DNA
attttaagtgcatccgaagcgcaggcatttaaaaatgcagaagccgcacaacacgcccaggcggcaaagaaagcc

SEQ ID NO: 178947 - DNA, 75 bp, synthetic construct
  source 1..75: mol_type = other DNA
ttccgttttcgtgcgcagccggtgtttccggcaaacgtgaaggcaggggaatacacgggggcgctgacctttgtg

SEQ ID NO: 178948 - DNA, 75 bp, synthetic construct
  source 1..75: mol_type = other DNA
cagcctttaaggctgggcaggtcgccaccttggattttggtaacccgggccaactggacgcgggaggtgtggtca

SEQ ID NO: 178949 - DNA, 75 bp, synthetic construct
  source 1..75: mol_type = other DNA
ggagtttgctgctaaaggacagttccgttttcgtgcgcagccggtgtttccggcgaacgtgaaggcggggggaat

SEQ ID NO: 178950 - DNA, 75 bp, synthetic construct
  source 1..75: mol_type = other DNA
tctggctgtactggcaaaatcccgggaagaagagacgacccggccaaccctgaaagaactggcagcgaagctgtc

SEQ ID NO: 178951 - DNA, 75 bp, synthetic construct
  source 1..75: mol_type = other DNA
gtgtctgtgcaaaactttgtcgattatgtgaacagcggtttttataacaacactacctttcaccgcgtcattcct

SEQ ID NO: 178952 - DNA, 75 bp, synthetic construct
  source 1..75: mol_type = other DNA
tgcggacagcaccggcaacagtggccggctgacgttcgggacttaccgtaagtccacgggggcatctgtaccgcc

SEQ ID NO: 178953 - DNA, 75 bp, synthetic construct
  source 1..75: mol_type = other DNA
attttaagtgcatcagaagcgcaggcatttaaaaatgcagaagccgcacaacatgcccaggccgctaaaaaatct

SEQ ID NO: 178954 - DNA, 75 bp, synthetic construct
  source 1..75: mol_type = other DNA
ttatctcaatgattcattatgtgcgattgatgaagataatgccgatgccacagtttatcagtcgggtctgtataa

SEQ ID NO: 178955 - DNA, 75 bp, synthetic construct
  source 1..75: mol_type = other DNA
ccctgctggcggttatattactggctggctgtagttcacccacttcccgcatcgcagattgccaggcgcagggcg

SEQ ID NO: 178956 - DNA, 75 bp, synthetic construct
  source 1..75: mol_type = other DNA
agctaaaagatccgaagattgccaaactgtttgataccaacggcgatggcaaagcggatttaactggctgtaacc

SEQ ID NO: 178957 - DNA, 75 bp, synthetic construct
  source 1..75: mol_type = other DNA
tatgcatgacggcaaagcctcagaaggcgatattcagggccacgttgatggctggatcaaagcccaccagcagca

SEQ ID NO: 178958 - DNA, 75 bp, synthetic construct
  source 1..75: mol_type = other DNA
tttccctgctgactattatcttactggctggctgtagctcccccacttcccgtatcgcagattgccaggcgcagg

SEQ ID NO: 178959 - DNA, 75 bp, synthetic construct
  source 1..75: mol_type = other DNA
tccagcggtcgtgggtggcaaatcaggacaccacggctaaaacacctgaaaggggcgcgcctgagagtgtacggc

SEQ ID NO: 178960 - DNA, 75 bp, synthetic construct
  source 1..75: mol_type = other DNA
tggtggcattggcgaccgtgacggctggcggttgcttaaagatcacggcctgaacgtgacaacaaacggcaaata

SEQ ID NO: 178961 - DNA, 75 bp, synthetic construct
  source 1..75: mol_type = other DNA
ccgcctgcttaatgtaccgatggagaaagccacgaaatttcacgaatacagcaacggtaaggaacatgcggacgc

SEQ ID NO: 178962 - DNA, 75 bp, synthetic construct
  source 1..75: mol_type = other DNA
ctgcaacaatgttgaaaatgccagccaactgcatgaagtatggcaaaaaggggtgatgcttccaattagtagaac

SEQ ID NO: 178963 - DNA, 75 bp, synthetic construct
  source 1..75: mol_type = other DNA
agggatttaatccggcgcattttgcgcgtgccctggatgctgccggaatgctggagaagggaagcgatcgccgat

SEQ ID NO: 178964 - DNA, 75 bp, synthetic construct
  source 1..75: mol_type = other DNA
ttaagcggaaaccatgaggaatggcagttaagcacaacaacgggctggcattttggcgcgtacatcatgccggac

SEQ ID NO: 178965 - DNA, 75 bp, synthetic construct
  source 1..75: mol_type = other DNA
ggaggcaaaggacgcggtaaaggcatgtcgcgagcggtggcgcaacctgataccggagagctacggcgagcaggt

SEQ ID NO: 178966 - DNA, 75 bp, synthetic construct
  source 1..75: mol_type = other DNA
gataccttccgtggcccaacaccgacgagcgtgatttaccgattaaagagcttgccggatacagaaaagggagta

SEQ ID NO: 178967 - DNA, 75 bp, synthetic construct
  source 1..75: mol_type = other DNA
tgcacaaccagaaacgggagaactggcgcgaatatctggaacgtgaacgggcagagcaggcggaaaagaaaaagg

SEQ ID NO: 178968 - DNA, 75 bp, synthetic construct
  source 1..75: mol_type = other DNA
tccgtggcgggtacggcggatagctggcgcgacagcgtggcgcggctggctggtggtaatccgttcatgatgctg

SEQ ID NO: 178969 - DNA, 75 bp, synthetic construct
  source 1..75: mol_type = other DNA
ataggccaggccggaaacgcacgggaggtgtccacgtcagcctatacgctgtttaacggttccgggaaattacag

SEQ ID NO: 178970 - DNA, 75 bp, synthetic construct
  source 1..75: mol_type = other DNA
gcgacagcgtggcgcggctggctggtggcaatccgtccatgatgctgggtgttgccacgtcactggcagcacctt

SEQ ID NO: 178971 - DNA, 75 bp, synthetic construct
  source 1..75: mol_type = other DNA
atcagccgaaggataaattcactgaggtaatcatttttgccgggacggacgcttactcccatgctcaacactgga

SEQ ID NO: 178972 - DNA, 75 bp, synthetic construct
  source 1..75: mol_type = other DNA
accaaaaccgaagtagtgaagtgtatttccaatgatctcgaagtgcccgccagtgcggagattgtgctggaaggg

SEQ ID NO: 178973 - DNA, 75 bp, synthetic construct
  source 1..75: mol_type = other DNA
tttatatctgcaaatatcattttcggcaggctatttttcagtataaaccctgttaatgcaataaaaggaaagatc

SEQ ID NO: 178974 - DNA, 75 bp, synthetic construct
  source 1..75: mol_type = other DNA
tattggtgtttatatcttcaaatatcatcttcggcaggctgtttttcagcataaaccctgttaatgcgataaagg

SEQ ID NO: 178975 - DNA, 75 bp, synthetic construct
  source 1..75: mol_type = other DNA
caataactcccgcactgaaattgacgaggtattacgaagtgactttgcccgagccttcaactctgcttatggtgc

SEQ ID NO: 178976 - DNA, 75 bp, synthetic construct
  source 1..75: mol_type = other DNA
agtttttatccctttaaaaaccatgtttaggtttaaacttgacaatagaattgatacatttaagtttgttttaaa

SEQ ID NO: 178977 - DNA, 75 bp, synthetic construct
  source 1..75: mol_type = other DNA
ttgttcgaaaacccgaagggttattcaatgccggtgctgtgtaacctgtttggtacgccaaagcgcgtggcaatg

SEQ ID NO: 178978 - DNA, 75 bp, synthetic construct
  source 1..75: mol_type = other DNA
caaagagcaccagcagatcatcgagcagtgcgaggcgttcctgaatgcctacggtttaagccgctttgcaccgtt

SEQ ID NO: 178979 - DNA, 75 bp, synthetic construct
  source 1..75: mol_type = other DNA
ctggtgggctgaaagtgaaagcgggccaactggtgcgcttgctcaacatccctatggagaaatcgacggccttta

SEQ ID NO: 178980 - DNA, 75 bp, synthetic construct
  source 1..75: mol_type = other DNA
aatggcacttaagctcgaaggctggctggcattttggcgcgtacatcatgccggacggtacggttatcggcgaat

SEQ ID NO: 178981 - DNA, 75 bp, synthetic construct
  source 1..75: mol_type = other DNA
tcattaaaagctgaaaatgagctgcaagtttatggtgacaaagttatgcatgtaaaactcaaccaacctaaaacc

SEQ ID NO: 178982 - DNA, 75 bp, synthetic construct
  source 1..75: mol_type = other DNA
ttggacaatggcgtgaaggtctcagcagcaaaagacattctgatttccaagctatgtacagagtatggtgtctga

SEQ ID NO: 178983 - DNA, 75 bp, synthetic construct
  source 1..75: mol_type = other DNA
gggcactggccacacagctcccggtgtttcgtcagaaactgaatgagggctggtatcaggtgcgcattgccgggc

SEQ ID NO: 178984 - DNA, 75 bp, synthetic construct
  source 1..75: mol_type = other DNA
gtgcaacacatggtccgctggcgtgtgccgcgtgtactggcggtgtcgattttgatgaccatcatcgtgatggcg

SEQ ID NO: 178985 - DNA, 75 bp, synthetic construct
  source 1..75: mol_type = other DNA
ttgccacaggtgcgtaaaaattacccttttgaggggtttgtggagtggcatcggaaagaggtttttagggggtga

SEQ ID NO: 178986 - DNA, 75 bp, synthetic construct
  source 1..75: mol_type = other DNA
tatgtggctttaatatgcgccacgatgacaccaccgtcgcgctggaagcggcgcatataaaatggaaacagcacg

SEQ ID NO: 178987 - DNA, 75 bp, synthetic construct
  source 1..75: mol_type = other DNA
gacactggatcacggtgacacagtgctggtgccgaatccaagttaccccattcatatttacggcgcggtgattgc

SEQ ID NO: 178988 - DNA, 75 bp, synthetic construct
  source 1..75: mol_type = other DNA
atcgttgctcgcagcccttatttggtgctttttagtcgtctgggtaattatcctccgcagtggctggacgagtcg

SEQ ID NO: 178989 - DNA, 75 bp, synthetic construct
  source 1..75: mol_type = other DNA
attcactgtatgcaggtgcagaagtcggataccgttatcatctgacagatacgacgtttgttgaacctcaggcgg

SEQ ID NO: 178990 - DNA, 75 bp, synthetic construct
  source 1..75: mol_type = other DNA
gataaagggactgtcaccctcggaggggaaggggaactgagtcctgacctgactcttcagaatcagatgttgtac

SEQ ID NO: 178991 - DNA, 75 bp, synthetic construct
  source 1..75: mol_type = other DNA
tggtatgcggtctatcgccagaacagcagcagaggagtctggtaagttcagaacagaagttctcgaggcggctct

SEQ ID NO: 178992 - DNA, 75 bp, synthetic construct
  source 1..75: mol_type = other DNA
acaacaaagcagcggacaatgatggggctcggtgccttccctgccctttcgcttgctgatgcacgaaggttaaga

SEQ ID NO: 178993 - DNA, 75 bp, synthetic construct
  source 1..75: mol_type = other DNA
cggtcgccgctaactggttccagcttaaaagcaaaagcgtaacccctgattacgcaagagacatttggcgctcat

SEQ ID NO: 178994 - DNA, 75 bp, synthetic construct
  source 1..75: mol_type = other DNA
gtcaggctgtcagaggtatcaaagcgatgttccgcgccgacggtttactgcccgccagcagtaaacatattcacg

SEQ ID NO: 178995 - DNA, 75 bp, synthetic construct
  source 1..75: mol_type = other DNA
cataagccattgttattgctatacgtattagcgggatacctgaatggacatccgcgccttttcgattatggatcg

SEQ ID NO: 178996 - DNA, 75 bp, synthetic construct
  source 1..75: mol_type = other DNA
tggtatgagatctattgcaaggacagcagccgaagaatacggtaagtttagaacggaggtgcttgaatccgctct

SEQ ID NO: 178997 - DNA, 75 bp, synthetic construct
  source 1..75: mol_type = other DNA
atttactgccggaaaagtcatggtagttgaacggcgcaacttccagcgagtttatgatctaacccatcgcgtcat

SEQ ID NO: 178998 - DNA, 75 bp, synthetic construct
  source 1..75: mol_type = other DNA
ctcattgtccacacagtcagcttcacttcaatctgtgaagtttttttacgaattctggaggcaaaagtatggtgt

SEQ ID NO: 178999 - DNA, 75 bp, synthetic construct
  source 1..75: mol_type = other DNA
catgggcttatttgatcttaaagagaatttatgctgctaaatatcagtctgttatgagaaattgcaagcttgccg

SEQ ID NO: 179000 - DNA, 75 bp, synthetic construct
  source 1..75: mol_type = other DNA
gcaaattgaagagtcttactccatttctgccgggctggatttcccgtccgtcggcccgcaacatgcgtatctcaa

SEQ ID NO: 179001 - DNA, 75 bp, synthetic construct
  source 1..75: mol_type = other DNA
aagtctggtttatttatcaatatatcatttcatcaggtgtggcgattgatggacaaaaagatgtgagcattattt

SEQ ID NO: 179002 - DNA, 75 bp, synthetic construct
  source 1..75: mol_type = other DNA
gtatatcgcatagtcgtaccaagttcaaaacataaaaataattttctaaaccccttcccttctggattcattcag

SEQ ID NO: 179003 - DNA, 75 bp, synthetic construct
  source 1..75: mol_type = other DNA
tattacacgacatacatgggcttacttaactataaagaaactatatcatttgaaaaataaaagattcaatggctc

SEQ ID NO: 179004 - DNA, 75 bp, synthetic construct
  source 1..75: mol_type = other DNA
tggtggagcacgtagctggaatatggccgcagaatcaggcttttataaactgattgcccgtagtcgtaaagcttc

SEQ ID NO: 179005 - DNA, 75 bp, synthetic construct
  source 1..75: mol_type = other DNA
aagcgagggctgaacagcagcaaatcattgctgtgcatgttgaaaaattgggcaatctttggctgcatgctgatt

SEQ ID NO: 179006 - DNA, 75 bp, synthetic construct
  source 1..75: mol_type = other DNA
accgattttgctagctggcagcaggcgacgcgagtgacattagggcgctgcccacccgatctttttaccgattgc

SEQ ID NO: 179007 - DNA, 75 bp, synthetic construct
  source 1..75: mol_type = other DNA
cgaagggatcatcccggcgctggaatcctcccacgccctggcccatgcgctgaaaatgatgcgcgaaaacccgga

SEQ ID NO: 179008 - DNA, 75 bp, synthetic construct
  source 1..75: mol_type = other DNA
gcgcgcaaaaagatcctgaatttcaggcccagttcaacgacctgctgaaaaactatgccgggcgtccaaccgcac

SEQ ID NO: 179009 - DNA, 75 bp, synthetic construct
  source 1..75: mol_type = other DNA
gtgcgtgagtttcagcggatgattggcgaagaaaccaaagcgcagattctggaaagagaaggtcgcctgccggat

SEQ ID NO: 179010 - DNA, 75 bp, synthetic construct
  source 1..75: mol_type = other DNA
ttcgcccatggaggtatgtcgcaggggctctgctggcctgtgtttttctggccgggagcaacgcggggctggcac

SEQ ID NO: 179011 - DNA, 75 bp, synthetic construct
  source 1..75: mol_type = other DNA
ttctgctgttatgcctcgatgcaggtatcacgcattatcgactctggcagcaggctggagactggcagcagacga

SEQ ID NO: 179012 - DNA, 75 bp, synthetic construct
  source 1..75: mol_type = other DNA
ctgatagaggcgaagtgttctcatgctgacttgttggcagataaaaaaaagcgtttccgtaaaaatccgtctctt

SEQ ID NO: 179013 - DNA, 75 bp, synthetic construct
  source 1..75: mol_type = other DNA
aagttgatgacgaaacgctggcactctgggacgccccggtccacacccggcccttaactggggtaaataaggaga

SEQ ID NO: 179014 - DNA, 75 bp, synthetic construct
  source 1..75: mol_type = other DNA
gctttacggcgtctataaccgtctgactacgcgttgtcagcaagcggggctgactatcgaacgcaatttaattgg

SEQ ID NO: 179015 - DNA, 75 bp, synthetic construct
  source 1..75: mol_type = other DNA
atacgcagacgtctggcaatgcgttacaaggccgatagcctggagccttttgatctgctgacggagctgggaaaa

SEQ ID NO: 179016 - DNA, 75 bp, synthetic construct
  source 1..75: mol_type = other DNA
ctgatagaggcgaagtgttctcgtgctgacttgttggcagatagaaaaaagcgtttccgtaaaaatccgtctctt

SEQ ID NO: 179017 - DNA, 75 bp, synthetic construct
  source 1..75: mol_type = other DNA
ctgatagaggcgaagtgttctcgtgctgatttgttggcagatagaaaaaagcgtttccgtaaaaatccctcactt

SEQ ID NO: 179018 - DNA, 75 bp, synthetic construct
  source 1..75: mol_type = other DNA
ctgaaaaaatccattgaaactaatggttttacccaacccattgtggtgaccaacacgacagccaattcacttgaa

SEQ ID NO: 179019 - DNA, 75 bp, synthetic construct
  source 1..75: mol_type = other DNA
tgaggatttacctcccggctggggattacttcacgttgttaacggaagagtacggaaagtacatgggtggcccaa

SEQ ID NO: 179020 - DNA, 75 bp, synthetic construct
  source 1..75: mol_type = other DNA
gcgcaacgggttcaaggtttgttttcatgaccgctttatagctgtaaccagtaccggagaacagccagatgctat

SEQ ID NO: 179021 - DNA, 75 bp, synthetic construct
  source 1..75: mol_type = other DNA
acggtgtaattgttaataagaaagaaggaaacgcggtggatttgcccctatatttccagacacctgttatcactt

SEQ ID NO: 179022 - DNA, 75 bp, synthetic construct
  source 1..75: mol_type = other DNA
ctgggacgccccggtccacaccccggcccttaactggggtaaattaggagaaagcaatgtcactgagcagaactc

SEQ ID NO: 179023 - DNA, 75 bp, synthetic construct
  source 1..75: mol_type = other DNA
ttgaagatgaaaaatatgaggatgtaatgcacagagttgttaaccacgctcaccaacgaaatccaaataaaaaat

SEQ ID NO: 179024 - DNA, 75 bp, synthetic construct
  source 1..75: mol_type = other DNA
attttcggtttgtttgttgccgtactttcggttcttcagttggtctatcagtttggccaggaggctggaatgtct

SEQ ID NO: 179025 - DNA, 75 bp, synthetic construct
  source 1..75: mol_type = other DNA
tcgatctcacggcagacgttgccgatccggtggagttattaatgaaagtacagttaggcggcggaacgcacatcg

SEQ ID NO: 179026 - DNA, 75 bp, synthetic construct
  source 1..75: mol_type = other DNA
ttggacgagaaggtaaagacctcaggtatctcacaagaccatgcagaagacatctggcgaagcctggagagaaat

SEQ ID NO: 179027 - DNA, 75 bp, synthetic construct
  source 1..75: mol_type = other DNA
gcgaatgcggccataatccgtatgggctttggtggagagcttgtagcccatggaatgagatctattgcacgaacg

SEQ ID NO: 179028 - DNA, 75 bp, synthetic construct
  source 1..75: mol_type = other DNA
atcattttccagtgatggctgagcttgtatatgctccggctcacgggatgcagcaggagagtctggaaaaagaaa

SEQ ID NO: 179029 - DNA, 75 bp, synthetic construct
  source 1..75: mol_type = other DNA
ccaatatcgcggtggtggagcgtttcttgccggtgcggtttggtttgatagaaacagatggcgtaacgcgggtga

SEQ ID NO: 179030 - DNA, 75 bp, synthetic construct
  source 1..75: mol_type = other DNA
tggtagccgcgcagttagtgaaagaggtgaaacgctacctggcaagcccggcggcggtgggggaatatctcgccg

SEQ ID NO: 179031 - DNA, 75 bp, synthetic construct
  source 1..75: mol_type = other DNA
ccagaatgggtagttgatgaacagggaagacctttatcgctttctttgcctttcactcccggtaatcagctttgg

SEQ ID NO: 179032 - DNA, 75 bp, synthetic construct
  source 1..75: mol_type = other DNA
tcatcattgctgacgcatcaggtgaaaaagtgtgtccagagcggcatcaaagtgctgggactggcagcgctcgat

SEQ ID NO: 179033 - DNA, 75 bp, synthetic construct
  source 1..75: mol_type = other DNA
cgtactgcgctacggcattgaagatgtggtgacgaatctcgacgtgctggaacgtatgcagccttctgaaagcct

SEQ ID NO: 179034 - DNA, 75 bp, synthetic construct
  source 1..75: mol_type = other DNA
tcgatggttgactcggtgatccactcagcggtgatggcggcctgtttatggcagttacccggtattcgtacccat

SEQ ID NO: 179035 - DNA, 75 bp, synthetic construct
  source 1..75: mol_type = other DNA
tgcgttgggacttcgcccctatgcaatcactcgaacttgaagcgggctacagccgccagggtaacctgtatgcgg

SEQ ID NO: 179036 - DNA, 75 bp, synthetic construct
  source 1..75: mol_type = other DNA
ggtcagcgtgggaataaccgacagattgatattcgcggtatgggtccggaaaacacgctgattttgattgacggc

SEQ ID NO: 179037 - DNA, 75 bp, synthetic construct
  source 1..75: mol_type = other DNA
tgccacgacgttaccagccgggcgcgaaggggtgatcaacaaagatattaatggcgtggtgcgctgggacttcgc

SEQ ID NO: 179038 - DNA, 75 bp, synthetic construct
  source 1..75: mol_type = other DNA
tacagcattgttggcctgagcgcgacctgggatgtgacgaagaatgtcagtctgaccggcggcgtggacaatctg

SEQ ID NO: 179039 - DNA, 75 bp, synthetic construct
  source 1..75: mol_type = other DNA
ttgtcggcaataactggagcccggcgctgaacatatcgcaaggtttaggcgatgacttcacgctgaaaatgggca

SEQ ID NO: 179040 - DNA, 75 bp, synthetic construct
  source 1..75: mol_type = other DNA
ttgtatggcaacctcgacaaaacccaggctgacgcgtgggatatcaaccagggccatcagtccgcgcgtgccgga

SEQ ID NO: 179041 - DNA, 75 bp, synthetic construct
  source 1..75: mol_type = other DNA
aggttcaattcctgcctttattttgggattaagcggatatatcgccaatcaggtgcaaacgccggaagttattat

SEQ ID NO: 179042 - DNA, 75 bp, synthetic construct
  source 1..75: mol_type = other DNA
atgcctgacgctaaaaaacaggggcggtcaaacaaggcaatgacgtttttcgtctgcttcctttgcttccttgct

SEQ ID NO: 179043 - DNA, 75 bp, synthetic construct
  source 1..75: mol_type = other DNA
tcaaacagagcggttgggcactgtttaaagaaaacagcaacttccgtcgtgcggtattccttggcgtgctgttac

SEQ ID NO: 179044 - DNA, 75 bp, synthetic construct
  source 1..75: mol_type = other DNA
gatatcaaccagggccatcagtccgcgcgtgccggaacgtatgccacgacgttaccagccgggcgcgaaggggtg

SEQ ID NO: 179045 - DNA, 75 bp, synthetic construct
  source 1..75: mol_type = other DNA
ccttgctggtcaatctggggatttatggggtagctctgccagtactggcagaagaaacaagcgataatgccgttt

SEQ ID NO: 179046 - DNA, 75 bp, synthetic construct
  source 1..75: mol_type = other DNA
atgttgtgcatcggtgcgctgtgtgtgctgatttcgacctttgcggtcagcgcctcgtcgttgttctacgtgcgc

SEQ ID NO: 179047 - DNA, 75 bp, synthetic construct
  source 1..75: mol_type = other DNA
ccagtggtcagcgtgggaataaccgacagattgatattcgcggcatgggtccggaaaacacgctgattttgattg

SEQ ID NO: 179048 - DNA, 75 bp, synthetic construct
  source 1..75: mol_type = other DNA
tgtggggtcgcgggtggtatctcaggagatcagcacagcagatgaaggtgatggtggtcaggttgtggtgattgg

SEQ ID NO: 179049 - DNA, 75 bp, synthetic construct
  source 1..75: mol_type = other DNA
ggacgcggtgtacggttggtggggctgcatgtgacgttgcttgatccgcaaatggaaagacagttggtgctggga

SEQ ID NO: 179050 - DNA, 75 bp, synthetic construct
  source 1..75: mol_type = other DNA
ctcgtcagggggtgaagttaaagttcgacgattttcagcaaaccactcaggaacatgtctggccgcgattgaata

SEQ ID NO: 179051 - DNA, 75 bp, synthetic construct
  source 1..75: mol_type = other DNA
cggtgcaattatggtgcctattgccggttggctgaccgatcgcttcggcagggttcttgtctatcgtagtctggc

SEQ ID NO: 179052 - DNA, 75 bp, synthetic construct
  source 1..75: mol_type = other DNA
agccgccgtactgatgaccgaatatgctcctgacggcaaacggggttattacgccgcgctgccgttcctcggaat

SEQ ID NO: 179053 - DNA, 75 bp, synthetic construct
  source 1..75: mol_type = other DNA
gggtattacccacttacgaaacagcgggaatctgggcgccaattatgcttattgcattacgcctgctgcaagggc

SEQ ID NO: 179054 - DNA, 75 bp, synthetic construct
  source 1..75: mol_type = other DNA
cctgggtgccgcctgaaatgattgaacgtattgaagttctgcgtggtccggcagctgcgcgttatggcaacggcg

SEQ ID NO: 179055 - DNA, 75 bp, synthetic construct
  source 1..75: mol_type = other DNA
ctactcgctgacctggaacggcggctgggataacggcgtgaccaccagcaactgggtgcagtacgaacacacccg

SEQ ID NO: 179056 - DNA, 75 bp, synthetic construct
  source 1..75: mol_type = other DNA
gtatcgccagaactactcgctgacctggaacggcggctgggataacggcgtgaccaccagcaactgggtgcagta

SEQ ID NO: 179057 - DNA, 75 bp, synthetic construct
  source 1..75: mol_type = other DNA
tgcagcttactgcctctgctggcgtagcgccggtaaagtttctcgccaaaattgcttccgatatgaataaaccca

SEQ ID NO: 179058 - DNA, 75 bp, synthetic construct
  source 1..75: mol_type = other DNA
ggtgatgtacaaaagtgtgatctggtgatactgcttaaacgctttggcaaatttggccgcattttgtgggagcgt

SEQ ID NO: 179059 - DNA, 75 bp, synthetic construct
  source 1..75: mol_type = other DNA
cgacaaaactcaggctgatgcgtgggatattaaccagggccatcagtcagcgcgtgccggaacgtatgccacgac

SEQ ID NO: 179060 - DNA, 75 bp, synthetic construct
  source 1..75: mol_type = other DNA
atggttttggctctggcagccacagttactgccggtgttatgttttactatcagtcagcatcagactcaaataaa

SEQ ID NO: 179061 - DNA, 75 bp, synthetic construct
  source 1..75: mol_type = other DNA
aaatcaataataaaaaagaagaaaaagggttatcgttgattgaatcagcaatggttttggctctggcagccacag

SEQ ID NO: 179062 - DNA, 75 bp, synthetic construct
  source 1..75: mol_type = other DNA
ttaacacaagttcacctcatcctctgagcagagaaaaaataacagagtcaatgattgttaaggaaaactcgtgct

SEQ ID NO: 179063 - DNA, 75 bp, synthetic construct
  source 1..75: mol_type = other DNA
caggaaatcaacgaaatccttcatgacaaagagcttttattgtctttagaaaatcctcgccgtttcattttctct

SEQ ID NO: 179064 - DNA, 75 bp, synthetic construct
  source 1..75: mol_type = other DNA
atgtctaaagggttcacattcgaaaaaaatttacctcatcaaaaggctggcgttgattcggtaatgaatgtcttt

SEQ ID NO: 179065 - DNA, 75 bp, synthetic construct
  source 1..75: mol_type = other DNA
agcattatcagtggtgatgataactttgctaaactaaacacaatgagctatcgggaatttcttgataacttatca

SEQ ID NO: 179066 - DNA, 75 bp, synthetic construct
  source 1..75: mol_type = other DNA
ccagccgcttttatatccgttaatatatcttatcgaccatcttgctttgcgttcatcagccacgcaatccgcttc

SEQ ID NO: 179067 - DNA, 75 bp, synthetic construct
  source 1..75: mol_type = other DNA
tcgaagggaatatacgactattgttacgattgccggctatttaaatgtttcggaaaaaaccattcaacgtgattt

SEQ ID NO: 179068 - DNA, 75 bp, synthetic construct
  source 1..75: mol_type = other DNA
gttgatgttatttcagcagcgaatttatcacaggttttgcctgacaatatcgaactgattatttcgaccattaat

SEQ ID NO: 179069 - DNA, 75 bp, synthetic construct
  source 1..75: mol_type = other DNA
gtgggggactggggaaaataccgcaggatactctttctggcatacgaacactggcttttaacggaggagctcagg

SEQ ID NO: 179070 - DNA, 75 bp, synthetic construct
  source 1..75: mol_type = other DNA
atgaagccaaggatgaattacgactgcttggcggctggagtcacaatagccatatgcctgatgtttatgccaaaa

SEQ ID NO: 179071 - DNA, 75 bp, synthetic construct
  source 1..75: mol_type = other DNA
ggccaatcttcaccgaatcgcaatggacaacgaggccctgagagcaaccttttctcatgtatgtgacgaatggag

SEQ ID NO: 179072 - DNA, 75 bp, synthetic construct
  source 1..75: mol_type = other DNA
tcaaataagcaaaacaatcaaggttgaattcatgactcaatttgctaatgatgagatttatgagttaataaagaa

SEQ ID NO: 179073 - DNA, 75 bp, synthetic construct
  source 1..75: mol_type = other DNA
ctgtatccggaacttgaacgccgtctggcaaaggtaaaacctgatttactgattgcccgccagggggtgaaatta

SEQ ID NO: 179074 - DNA, 75 bp, synthetic construct
  source 1..75: mol_type = other DNA
acggccagtttgtgattacgccggcagaagttccggcatttctgcaaaccttaccgctggcaaaaattcccggtg

SEQ ID NO: 179075 - DNA, 75 bp, synthetic construct
  source 1..75: mol_type = other DNA
aatatcatcggatactatacgttatcagcggccagtatattattaactgacttacctgagcatttgagaaaaaag

SEQ ID NO: 179076 - DNA, 75 bp, synthetic construct
  source 1..75: mol_type = other DNA
acgtacttgccacctttatcgcaatcggccttgttgaccgctggggacgtaaaccaacgctaacgctgggcttcc

SEQ ID NO: 179077 - DNA, 75 bp, synthetic construct
  source 1..75: mol_type = other DNA
tccgctgatttgggtactgtgttccgaaattcagccgctgaaaggccgcgattttggcatcacctgctccaccgc

SEQ ID NO: 179078 - DNA, 75 bp, synthetic construct
  source 1..75: mol_type = other DNA
ggtgtgcgactggtggggctgcatgtgacgttgctggatccgcaaatggaaagacaactggtgctgggattatga

SEQ ID NO: 179079 - DNA, 75 bp, synthetic construct
  source 1..75: mol_type = other DNA
aatttttaagttagccaaaggtgaatcactatctaagacgcatagtgcgatccatgatttaactcttgatgcttt

SEQ ID NO: 179080 - DNA, 75 bp, synthetic construct
  source 1..75: mol_type = other DNA
gataacgcagcagcagacctggcagcattctcgcgtcaaaaaccgctgagcaccaaagcacgcaaatttgttgca

SEQ ID NO: 179081 - DNA, 75 bp, synthetic construct
  source 1..75: mol_type = other DNA
tgaactaaagacttacgttgttgaaagtcagaaaagttcgggtaaaaatacaaaatcgtatatgcctcaagctat

SEQ ID NO: 179082 - DNA, 75 bp, synthetic construct
  source 1..75: mol_type = other DNA
gagcacgtctggccgcggctgaataaatctgatctaatcgccaccgcgcgtaaaacctgggatgaacgccgcggc

SEQ ID NO: 179083 - DNA, 75 bp, synthetic construct
  source 1..75: mol_type = other DNA
gggcgcggtgtgcggctggtggggctgcatgtgacgttgctggatccgcaaatggaaagacaactggtgttggga

SEQ ID NO: 179084 - DNA, 75 bp, synthetic construct
  source 1..75: mol_type = other DNA
tgctgattcagggcggtgactttgttctgaataccggtaatgaacctgaattatgtaataacagaaaaagtatcg

SEQ ID NO: 179085 - DNA, 75 bp, synthetic construct
  source 1..75: mol_type = other DNA
ccgggatcagttttgctggcacgctgtttgtgctcaaactggggttggccttcggcggcgctcttatcggctgga

SEQ ID NO: 179086 - DNA, 75 bp, synthetic construct
  source 1..75: mol_type = other DNA
cagtctgccctgttagacccggaatcagatcaggttgtccttcaggttgatcctaagattttcgagctctatcaa

SEQ ID NO: 179087 - DNA, 75 bp, synthetic construct
  source 1..75: mol_type = other DNA
cgacgctggctgagatcctgaagttcgtcaatgaagtcccgtttgcggcgatccgctttattctcgattctgcga

SEQ ID NO: 179088 - DNA, 75 bp, synthetic construct
  source 1..75: mol_type = other DNA
gaaatcctcttctctcgcgccaaagtctggagtggcgagaagtgggcgtgtgtcaccatcgtcggcggacatacc

SEQ ID NO: 179089 - DNA, 75 bp, synthetic construct
  source 1..75: mol_type = other DNA
gcagaatcaaaacgctgaacacccggcggataaatgtcctgaagggtgaacagcgtcgtgtcagtggcagtgccc

SEQ ID NO: 179090 - DNA, 75 bp, synthetic construct
  source 1..75: mol_type = other DNA
gatctcagcgatgagtttgtcaatgaactgacggcagctggcgtagtgttccgctactacgatccccgccctcgc

SEQ ID NO: 179091 - DNA, 75 bp, synthetic construct
  source 1..75: mol_type = other DNA
gcccgctccacggcaaagtggcgttgatggacgatcactgggcgacggtagggtccagtaatctcgatccgctca

SEQ ID NO: 179092 - DNA, 75 bp, synthetic construct
  source 1..75: mol_type = other DNA
aacccagcgagctgggagagctggtctatcgctatgccgataaaatgttcaccttaagccaggaaatgctggata

SEQ ID NO: 179093 - DNA, 75 bp, synthetic construct
  source 1..75: mol_type = other DNA
tgcacaatgcaatcttcgttgccccaacgctttatgcgtatgacttttatgccgataaaactgtcgtagaaattg

SEQ ID NO: 179094 - DNA, 75 bp, synthetic construct
  source 1..75: mol_type = other DNA
tttaagcgtaaaggacgtggtctggaacccagcgaactgggggaactggtctatcgctatgccgataaaatgttc

SEQ ID NO: 179095 - DNA, 75 bp, synthetic construct
  source 1..75: mol_type = other DNA
ctgggatggcgtggctggtggatgggcgttatgaaacgatctctatggctatcagcagtatgatcggcgatgtca

SEQ ID NO: 179096 - DNA, 75 bp, synthetic construct
  source 1..75: mol_type = other DNA
ttgccaacctgtgtgcgctggcaagccattcgatgcagcaaacggatcggcagattatcgagattatggcgagca

SEQ ID NO: 179097 - DNA, 75 bp, synthetic construct
  source 1..75: mol_type = other DNA
atcagcagtatgatcggcgatgtcagcggcatgatttgcgatggtgcgtcgaacagctgcgcgatgaaggtttcg

SEQ ID NO: 179098 - DNA, 75 bp, synthetic construct
  source 1..75: mol_type = other DNA
cgatcaccgaattgcacttcagttcggtggtggtaatgaggagacgaatctctggacgctctgtaccgaatgcca

SEQ ID NO: 179099 - DNA, 75 bp, synthetic construct
  source 1..75: mol_type = other DNA
gttatttcagccagcagtacatcgacatgccgattactcaggcgctgattgatgcactgacggagtcggtcaacg

SEQ ID NO: 179100 - DNA, 75 bp, synthetic construct
  source 1..75: mol_type = other DNA
aatcaacctgattatcttacttttttaagagcaatggatggattcgaagttaatggattacgattatttagcctc

SEQ ID NO: 179101 - DNA, 75 bp, synthetic construct
  source 1..75: mol_type = other DNA
tatcgcaaataccgagttcagctatttggttggcactccctgaaaattataaccgtttgtttttaccaaattcaa

SEQ ID NO: 179102 - DNA, 75 bp, synthetic construct
  source 1..75: mol_type = other DNA
tttacctcacgggctgcaggtggagctgccggacattccgatcaccaccaccgtgcagaccgtccagctatggga

SEQ ID NO: 179103 - DNA, 75 bp, synthetic construct
  source 1..75: mol_type = other DNA
ggcggctcgtgaaattaaaagcctgattgaagactcggtggggaaagtggatgttggctctacgctggtcgaaag

SEQ ID NO: 179104 - DNA, 75 bp, synthetic construct
  source 1..75: mol_type = other DNA
tatggcgtacatgcagcaaaacgatcgtctctatgacatcgccgtcgctgataataatgctgcctttaaccaggc

SEQ ID NO: 179105 - DNA, 75 bp, synthetic construct
  source 1..75: mol_type = other DNA
ggtactaaagccctcttcatcaaattcatcaacctttaacaccgcagcatttagcgtagatgaacaaacaggcat

SEQ ID NO: 179106 - DNA, 75 bp, synthetic construct
  source 1..75: mol_type = other DNA
aaaggagccgcgcgtggcagatctcgatgatggttatacgcgcattgcaaatgagttgctggaagctgtgatgct

SEQ ID NO: 179107 - DNA, 75 bp, synthetic construct
  source 1..75: mol_type = other DNA
gctgagggatgccgggcagtgctgtctctgtggtcgtgtggttgacctctgtgacagtgaactcgatcaccgcat

SEQ ID NO: 179108 - DNA, 75 bp, synthetic construct
  source 1..75: mol_type = other DNA
aaggctatgatcaaatactaaatgaaaaaacagcgggcatagcgatagcaacagcatctattcttttaacaaagc

SEQ ID NO: 179109 - DNA, 75 bp, synthetic construct
  source 1..75: mol_type = other DNA
tgccagggtcgacatggacaagggttactggtggtcgtcctccaaccaggagattctgggtatcactggtgtgga

SEQ ID NO: 179110 - DNA, 75 bp, synthetic construct
  source 1..75: mol_type = other DNA
tagaaaccattgaaattgaaaccggtccgcgcccggttaaagcggtaaaatccgctgtaatcgctttaatcggta

SEQ ID NO: 179111 - DNA, 75 bp, synthetic construct
  source 1..75: mol_type = other DNA
gtacaacccaacggcactgaaggttatcgcactgctgaagtgacgctcggcggcgtggacaccaacgagctttct

SEQ ID NO: 179112 - DNA, 75 bp, synthetic construct
  source 1..75: mol_type = other DNA
gtgcgagaagggcaatgtgaccttcagattgcgtagcgaagtgctgggtgtggcgaaagatgaaacgggcttctc

SEQ ID NO: 179113 - DNA, 75 bp, synthetic construct
  source 1..75: mol_type = other DNA
gaccggtaaaatggagtagctggtttatctgttcactgttgcttcatgggctgcttttcttggcgtttgtctggc

SEQ ID NO: 179114 - DNA, 75 bp, synthetic construct
  source 1..75: mol_type = other DNA
atgaaaactttacctgcaacaactccgcaggcggcgaagctatgtctgccgcccgtggccgtctggcaaatgtta

SEQ ID NO: 179115 - DNA, 75 bp, synthetic construct
  source 1..75: mol_type = other DNA
gagcacattgacgccggtatttccctgtgtgatgccgtcaattttatcgtcgaaaaatacgatctggtacgcact

SEQ ID NO: 179116 - DNA, 75 bp, synthetic construct
  source 1..75: mol_type = other DNA
tgtggcctgatgaaacgtcgcggctaccggactgttaccgacatcaccaccggcagatacagcggggtagcacga

SEQ ID NO: 179117 - DNA, 75 bp, synthetic construct
  source 1..75: mol_type = other DNA
aaggcatggatttcccataatgctattcaatgatttttatgcccccgactcaaagatagaatattgtgatttatc

SEQ ID NO: 179118 - DNA, 75 bp, synthetic construct
  source 1..75: mol_type = other DNA
tcctgaaaccgcagcactggttgcagactggactgacgaacagatctgggcactgaaccgtggtggtcacgatcc

SEQ ID NO: 179119 - DNA, 75 bp, synthetic construct
  source 1..75: mol_type = other DNA
gatgaacgacgctccggctgtagcctctaccgactatatgaaactgttcgcagagcaggtccgtacttatgtacc

SEQ ID NO: 179120 - DNA, 75 bp, synthetic construct
  source 1..75: mol_type = other DNA
taactactccatataccgcaaagccgtcgaagaccttgcgacgcgcgggttcagcattgttaacagtcagggcag

SEQ ID NO: 179121 - DNA, 75 bp, synthetic construct
  source 1..75: mol_type = other DNA
cgcgggcggcgaagccctgtctgtcgcccgtggctgtctggcaaatgttactgacacgcctgcttgaacagcact

SEQ ID NO: 179122 - DNA, 75 bp, synthetic construct
  source 1..75: mol_type = other DNA
ttttaagaaattcaacaataaatctattggtgaaaatattgccacactcagaaatgaattagcacatgttgaccg

SEQ ID NO: 179123 - DNA, 75 bp, synthetic construct
  source 1..75: mol_type = other DNA
tgaaaaatatgaactggtaagaattgactgtaatgattgctctgtcatggagaagtcaccgttcatcaccagtat

SEQ ID NO: 179124 - DNA, 75 bp, synthetic construct
  source 1..75: mol_type = other DNA
gtgcagtctgccttgcttgacccggactctgatcaggtagagctacagatagaccctaagatattcgagttgtat

SEQ ID NO: 179125 - DNA, 75 bp, synthetic construct
  source 1..75: mol_type = other DNA
gcgttgatgaaagcctttggggcgacgcataacgctattttcgttgcaccttcgctttacgctaatgatttctat

SEQ ID NO: 179126 - DNA, 75 bp, synthetic construct
  source 1..75: mol_type = other DNA
caaagccatggtgcacgtactgaacaatatctggcgtgccgcagaagtcgaaaaagagttgcaacgcaaagctca

SEQ ID NO: 179127 - DNA, 75 bp, synthetic construct
  source 1..75: mol_type = other DNA
taccccaattacgccatgttctgccagcaaaccggttttggtgatgggcaaatttaccgtcgcattctcgatctc

SEQ ID NO: 179128 - DNA, 75 bp, synthetic construct
  source 1..75: mol_type = other DNA
gagccaacgcgctgggcggatgcggtggcctcggaacgtccggcgttcgtgcgctatacagcaaatcagccctaa

SEQ ID NO: 179129 - DNA, 75 bp, synthetic construct
  source 1..75: mol_type = other DNA
tttgtcgatggtcatgggatctcgcatcctcgccgtcttggcgtcgccagccattttggcttattggtggatgtg

SEQ ID NO: 179130 - DNA, 75 bp, synthetic construct
  source 1..75: mol_type = other DNA
ggtgatcgaacgcgccatctatatggtgaaacgtgcacgcaattacaccgatgatgttgaattttcttgcgaaga

SEQ ID NO: 179131 - DNA, 75 bp, synthetic construct
  source 1..75: mol_type = other DNA
atggatatcaaacctaactcagtgatccacctggagccaggcgatacattacccggccataccaatctgaaaccc

SEQ ID NO: 179132 - DNA, 75 bp, synthetic construct
  source 1..75: mol_type = other DNA
agaagtcaccgttcatcaccagtatcgatattctacgtgcccggaaagcctccggtctgatgaaacgcaacagtc

SEQ ID NO: 179133 - DNA, 75 bp, synthetic construct
  source 1..75: mol_type = other DNA
atctattggtctgaaccaaatccagctgaatctgacctctcgttcgggggcgtgcggcggtgaaacatcgcatgg

SEQ ID NO: 179134 - DNA, 75 bp, synthetic construct
  source 1..75: mol_type = other DNA
tgcgtggagaaagatattgacgtggcggccgaatctctgaaagtcgccgaagccttccggattcatacctttatt

SEQ ID NO: 179135 - DNA, 75 bp, synthetic construct
  source 1..75: mol_type = other DNA
ccgccattaatcaccaggagatatggcgcaccagccagttagttagccagatttgtaatatgccgatcccggcaa

SEQ ID NO: 179136 - DNA, 75 bp, synthetic construct
  source 1..75: mol_type = other DNA
aagcgcgccgctgttcaggtcttaagtggttattcaattcctgtggtgactgtaaaagtgcgcgtttgctgcggt

SEQ ID NO: 179137 - DNA, 75 bp, synthetic construct
  source 1..75: mol_type = other DNA
agactatcacttatttaagtgatactggttgtctggaaattcagggggccagtctaatcgtctataagggcaacg

SEQ ID NO: 179138 - DNA, 75 bp, synthetic construct
  source 1..75: mol_type = other DNA
ggtgataaagaccgcgatgatggcgttctactgttagtcgcctggcaggatcataccgtgcgtattgaaatcggt

SEQ ID NO: 179139 - DNA, 75 bp, synthetic construct
  source 1..75: mol_type = other DNA
gtgtcacatccaataatcaatgtcgggaagcatcatggtggttctgatgactggcgtacaccgtatcgtttattt

SEQ ID NO: 179140 - DNA, 75 bp, synthetic construct
  source 1..75: mol_type = other DNA
aaagttgaagttacccagacaatctattgtggtgacacaatgcttttacttgccgtggttaacaggggtggttta

SEQ ID NO: 179141 - DNA, 75 bp, synthetic construct
  source 1..75: mol_type = other DNA
atacaggaacacaccccgtaaaccgaaggttgaagttacccagacaatctattgtggtgacacaatgcttttact

SEQ ID NO: 179142 - DNA, 75 bp, synthetic construct
  source 1..75: mol_type = other DNA
ctttcttctgttcatctgtgtttgctacacaaattccagtacctgaatcacccaggtatgtgaatgacttaaccg

SEQ ID NO: 179143 - DNA, 75 bp, synthetic construct
  source 1..75: mol_type = other DNA
ggaactggaaaaagatgaagtgataagcccactgccagtttatgcctcaacctttgaaggctgggactcccctga

SEQ ID NO: 179144 - DNA, 75 bp, synthetic construct
  source 1..75: mol_type = other DNA
tgacgtttatttctgccagaggatatgtcaaaacgctgggagtgatttgctttgctgccataatactggcctttg

SEQ ID NO: 179145 - DNA, 75 bp, synthetic construct
  source 1..75: mol_type = other DNA
tcatcctcttttgacaatgataatttcagcggcggtggcggttcatctggtggcggtggcgcttcagggcgctgg

SEQ ID NO: 179146 - DNA, 75 bp, synthetic construct
  source 1..75: mol_type = other DNA
ctgacgcaaaaaagccacgcacaactggtcgtgttagtggttgaaacaacgggcgatgaaaccatcgagcagtac

SEQ ID NO: 179147 - DNA, 75 bp, synthetic construct
  source 1..75: mol_type = other DNA
atacaagaagcaattcttcctcccactattcatcatcgtcatcctcttcattcgacaatgacaattttagcggtg

SEQ ID NO: 179148 - DNA, 75 bp, synthetic construct
  source 1..75: mol_type = other DNA
aaggttgaaattacacaaacaatctattgcggtgacacaatgcttttacttgccgtggttaataggggtggttta

SEQ ID NO: 179149 - DNA, 75 bp, synthetic construct
  source 1..75: mol_type = other DNA
gaattcagttaagggaaccggaataccagacagcaacctggatgaagactttactgcaaaagttgttatcttcga

SEQ ID NO: 179150 - DNA, 75 bp, synthetic construct
  source 1..75: mol_type = other DNA
ctgtagccggactcggtatgtctgttcaggccccagctcagatatatgaatcggcctttaaagacacgaacggta

SEQ ID NO: 179151 - DNA, 75 bp, synthetic construct
  source 1..75: mol_type = other DNA
tttcggtcggttatgggaaaccacgagcgattaatgatcgatgcgttaagtcccgcaggcaacgtgaataactgg

SEQ ID NO: 179152 - DNA, 75 bp, synthetic construct
  source 1..75: mol_type = other DNA
tttccattcgtgcactgcttgaagatcgcgcccgctatctggtgcccatgtaccagcgcaactatgcctggggtg

SEQ ID NO: 179153 - DNA, 75 bp, synthetic construct
  source 1..75: mol_type = other DNA
aaaccgattaacgatcgccgttcgcgccagcaggaagtgacaccggcaggtaccagcatgcgctatgaggcgagc

SEQ ID NO: 179154 - DNA, 75 bp, synthetic construct
  source 1..75: mol_type = other DNA
tgctggacacatcgagcatgagccagaatcagatcgcccagctgatcggctgttcacggaacaccgtgagccggg

SEQ ID NO: 179155 - DNA, 75 bp, synthetic construct
  source 1..75: mol_type = other DNA
gcatactggaatcagcactacatagacacgggcgcggttttttgcggaaatctgacgctaatgcaggtgaaggga

SEQ ID NO: 179156 - DNA, 75 bp, synthetic construct
  source 1..75: mol_type = other DNA
ggaacagcaacaggctaatgcggaaccagaagaacaggtcgatccgcgcaaagccgccgtcgaagccgctattgc

SEQ ID NO: 179157 - DNA, 75 bp, synthetic construct
  source 1..75: mol_type = other DNA
gcatgatacgttattaccccgctttaccgatgatatccacaatcagtcatgggatggtgaacgggtattctgtaa

SEQ ID NO: 179158 - DNA, 75 bp, synthetic construct
  source 1..75: mol_type = other DNA
ctgatcaggaaatattagcttgggcgctggtggagctggtaaagcgtctgccctatatcattgagttgaacaccg

SEQ ID NO: 179159 - DNA, 75 bp, synthetic construct
  source 1..75: mol_type = other DNA
ggtggcgaaatttcgggcgcagatcgttttatctttggtcacactccggtgaaaagcccgaagacattctggaat

SEQ ID NO: 179160 - DNA, 75 bp, synthetic construct
  source 1..75: mol_type = other DNA
ggcaagaaactatcgttatagcccatgccgactatccggataatgaataccaattcggtaaggaggtgccgcttt

SEQ ID NO: 179161 - DNA, 75 bp, synthetic construct
  source 1..75: mol_type = other DNA
cggggcttgccgaatttggcccttttttacctcacgggctgcaggtggatctgccggacattccgaccaccacca

SEQ ID NO: 179162 - DNA, 75 bp, synthetic construct
  source 1..75: mol_type = other DNA
gtgttgctgcaggtgcggtatctgatgaaagtgcgtgcgcatcagtatgacacggtggacgcgctttgctggcgt

SEQ ID NO: 179163 - DNA, 75 bp, synthetic construct
  source 1..75: mol_type = other DNA
aaacgcagggcagatggttgaaatgccggacattgatacccagcccgcacaggaaatggtgcagttatggagttg

SEQ ID NO: 179164 - DNA, 75 bp, synthetic construct
  source 1..75: mol_type = other DNA
tcaactcccagggattaaatgtcgagattcttggcgagtttgatgatgccgcattgatgaaagcatttggtgcaa

SEQ ID NO: 179165 - DNA, 75 bp, synthetic construct
  source 1..75: mol_type = other DNA
ccttggtccggtctgtccggcgggagtggaaatcgtgttgccggactgggtatatgaaccggaagtgaaggagac

SEQ ID NO: 179166 - DNA, 75 bp, synthetic construct
  source 1..75: mol_type = other DNA
atgaaagtgcgtgcgtaccagaatgacacggtggacgcgctttgctggcgtcattacggacgcacgcagggcgtc

SEQ ID NO: 179167 - DNA, 75 bp, synthetic construct
  source 1..75: mol_type = other DNA
cctcacgggctgcagttggagctgccggacattccgaccaccaccaccgtgcagaccgtccagctatgggactga

SEQ ID NO: 179168 - DNA, 75 bp, synthetic construct
  source 1..75: mol_type = other DNA
atctggtatttgataccgatccggccagtgataaaggaggcagcagtgccgcaacgaaacgacaggagccgcagc

SEQ ID NO: 179169 - DNA, 75 bp, synthetic construct
  source 1..75: mol_type = other DNA
cgcaaatgatcattgcgactttgcagcaatgcacgccaccattcatcatctgatttatcttttatcgtcgccagt

SEQ ID NO: 179170 - DNA, 75 bp, synthetic construct
  source 1..75: mol_type = other DNA
attctgatgatttttctcggtgttttgctcatgcttcccgctgcggtggtggttattcttcaggtggcaaaacgt

SEQ ID NO: 179171 - DNA, 75 bp, synthetic construct
  source 1..75: mol_type = other DNA
acagtgtgttgatactggaatttctcggaatgatgttactggctgtgtcgctgctgtcggtaagcgactaccttt

SEQ ID NO: 179172 - DNA, 75 bp, synthetic construct
  source 1..75: mol_type = other DNA
aaagcgtgttgatactggaatttatcggaatgatgctgctggcggcggtgctgttatcggtaagccactacctta

SEQ ID NO: 179173 - DNA, 75 bp, synthetic construct
  source 1..75: mol_type = other DNA
aacgctttatgcatatgacttttatgccgataaaaactgtcgtagaaattggtcgcgtcgagaatgtgatggaag

SEQ ID NO: 179174 - DNA, 75 bp, synthetic construct
  source 1..75: mol_type = other DNA
gaggaaaaacctttaacgggctaatttcttatttattaaaacctgcttcgcaccacaaattagatccgagtgtgg

SEQ ID NO: 179175 - DNA, 75 bp, synthetic construct
  source 1..75: mol_type = other DNA
ttctgcttcactacttcatatagagctgccatgccttccatctgttgaaaaatccgtgaaaacgaacatctttag

SEQ ID NO: 179176 - DNA, 75 bp, synthetic construct
  source 1..75: mol_type = other DNA
gagaacaccctgcttcctttacctgtcttgcctgtagaagatgatatctatcatgagaaagttaagcccaaaaac

SEQ ID NO: 179177 - DNA, 75 bp, synthetic construct
  source 1..75: mol_type = other DNA
gctctgttagtctgggcgatagtactgacgtttatttctgccagaggatatgtcaaaacgctgggagtgatttgc

SEQ ID NO: 179178 - DNA, 75 bp, synthetic construct
  source 1..75: mol_type = other DNA
aaaagctgttcctaacagggcttcaactggaaagatgaatggtttttcctttgagtacgccaacattacattcaa

SEQ ID NO: 179179 - DNA, 75 bp, synthetic construct
  source 1..75: mol_type = other DNA
agaaccttatcagcactcgtatcatccaggaacttgaaaaggactaccagctaacaagaactaaaggaactgatg

SEQ ID NO: 179180 - DNA, 75 bp, synthetic construct
  source 1..75: mol_type = other DNA
tgttgacacctgttcctgttacagcatcttattctcttcaggaacagtcagttagcaataaccagcacctcacac

SEQ ID NO: 179181 - DNA, 75 bp, synthetic construct
  source 1..75: mol_type = other DNA
atgctttctcaacggacaggcttgccctgccccaagaaatccctacaacagatcattgatgaatgtttgactgat

SEQ ID NO: 179182 - DNA, 75 bp, synthetic construct
  source 1..75: mol_type = other DNA
tcttagaaggcttgcagagcttctccggagctatggtaagagcattcttcacaagcccctccctggattctcaaa

SEQ ID NO: 179183 - DNA, 75 bp, synthetic construct
  source 1..75: mol_type = other DNA
ctgaaacgcatctacgtgcatacgtgcttcatgatgataaagatggtcaacatatccatatagtagcaagccgca

SEQ ID NO: 179184 - DNA, 75 bp, synthetic construct
  source 1..75: mol_type = other DNA
ttgagtacgccaacatttcattcaaggcttcgcagcttggaaaaaagtattcatggaaaaacttagagccgttca

SEQ ID NO: 179185 - DNA, 75 bp, synthetic construct
  source 1..75: mol_type = other DNA
gagggaaaatctttaatggccttatttcttatttattaaaacctgcttcgcatcacaagtcagatccgtatgtag

SEQ ID NO: 179186 - DNA, 75 bp, synthetic construct
  source 1..75: mol_type = other DNA
aaacgtgtgggatatcactgccggtggtggtattccacacggcttatacgaagcaatcgcagcccctgaaaccct

SEQ ID NO: 179187 - DNA, 75 bp, synthetic construct
  source 1..75: mol_type = other DNA
ttgcagtgaagagcggcacgggttccgttgattacgcaaaaactaacatcaaaaccaaagatctacgtcagttcc

SEQ ID NO: 179188 - DNA, 75 bp, synthetic construct
  source 1..75: mol_type = other DNA
cggccagttcaaagcggtaggtgactctctggaagcacagcaatacggtattgcgttcccgaaaggtagcgacga

SEQ ID NO: 179189 - DNA, 75 bp, synthetic construct
  source 1..75: mol_type = other DNA
taaaacaataggattaagtattattgccacttctattctgtttgcaagaaacagtataaaaataaacaaaatcaa

SEQ ID NO: 179190 - DNA, 75 bp, synthetic construct
  source 1..75: mol_type = other DNA
tttccccgtccaggtccgtttcacgcctgcccacgaacgttttcacctggcgttatgttcaccgggcgatgtctc

SEQ ID NO: 179191 - DNA, 75 bp, synthetic construct
  source 1..75: mol_type = other DNA
aactgagccgtaaatttattgatgagaacgatgccacgcccgccgaggcgcagcaggtggtctattacagtctgg

SEQ ID NO: 179192 - DNA, 75 bp, synthetic construct
  source 1..75: mol_type = other DNA
gcggtaggtgactctctggaagcacagcaatacggtattgcgttcccgaaaggtagcgacgagctgcgtgacaaa

SEQ ID NO: 179193 - DNA, 75 bp, synthetic construct
  source 1..75: mol_type = other DNA
gccattcagctccaactcgtgtcaggcgtagtttacgcaggctgcgttcaaggtgatggatattgctcactgcga

SEQ ID NO: 179194 - DNA, 75 bp, synthetic construct
  source 1..75: mol_type = other DNA
gccagcgctcgtttttccagagcgtgccattcagctccaactcgtgtcaggcgtagtttacgcaggctgcgttca

SEQ ID NO: 179195 - DNA, 75 bp, synthetic construct
  source 1..75: mol_type = other DNA
gcgttatgaccgtccgcacacgctgttctactgtgatccgccctatctggggacggaaggctatggtgtggattt

SEQ ID NO: 179196 - DNA, 75 bp, synthetic construct
  source 1..75: mol_type = other DNA
gatttctcgatggacaaactggtggttcagcagacctaactaaatttaaatcttttcaactattgagaaccaatt

SEQ ID NO: 179197 - DNA, 75 bp, synthetic construct
  source 1..75: mol_type = other DNA
tatttgatcataaatcatgtgttttaaaaattaaaagaacgagtttggatggtggaaaaagtttcttaaactcca

SEQ ID NO: 179198 - DNA, 75 bp, synthetic construct
  source 1..75: mol_type = other DNA
gccatcatatggcgcgattaaaaaaaatccgccgtcgttatcgcacagcaggcgatggaagcaaaaaagcatcag

SEQ ID NO: 179199 - DNA, 75 bp, synthetic construct
  source 1..75: mol_type = other DNA
ggaagcgatatgcgccgtaatctcactcacgaggtgatgcgtgaagtggacgcaccagctaactggatgatgaac

SEQ ID NO: 179200 - DNA, 75 bp, synthetic construct
  source 1..75: mol_type = other DNA
atgaaaattaaccatattgcgttacctatatctcttgctgtaatcctaactggttgcgtgcctcatgcttctaac

SEQ ID NO: 179201 - DNA, 75 bp, synthetic construct
  source 1..75: mol_type = other DNA
gaaaaatgataatttcggtgaacgacatcccgcagatgcgcgaggtgttcactggactgaacatacagacagtga

SEQ ID NO: 179202 - DNA, 75 bp, synthetic construct
  source 1..75: mol_type = other DNA
cgttcaggtgggtgcggataaaaaacatgaactggacggtctggacctcttcaccggggtgaccatgacatatac

SEQ ID NO: 179203 - DNA, 75 bp, synthetic construct
  source 1..75: mol_type = other DNA
aacgtggtcagattctgacaggcgcggtggtgactgacgggatcaaaaaaggcgtggtatgcgtgcatgaaggtg

SEQ ID NO: 179204 - DNA, 75 bp, synthetic construct
  source 1..75: mol_type = other DNA
tgctgaatcagaagctggcagattatgtcccaatgatgtcccatggtcaccaaagtgacacaagaggcttattaa

SEQ ID NO: 179205 - DNA, 75 bp, synthetic construct
  source 1..75: mol_type = other DNA
atgagtaacgcatcatacccgacaggcgttgaaaaccatggcggatcactacgcatatggtttcactataacggc

SEQ ID NO: 179206 - DNA, 75 bp, synthetic construct
  source 1..75: mol_type = other DNA
ctgactggagtctggtgtcaaacccggggtatctgtaccagagtgtcaatggtccgctggcatcttacgggacac

SEQ ID NO: 179207 - DNA, 75 bp, synthetic construct
  source 1..75: mol_type = other DNA
gcgttcattattaatattctgctgacactgcttgggtatatccccggtttgattcacgcgttctgggtgcaaacc

SEQ ID NO: 179208 - DNA, 75 bp, synthetic construct
  source 1..75: mol_type = other DNA
gctacaacacggggcgttttggttatgcggatgatacgacatatcgccttgttgaccgtaatgagcactggcgtg

SEQ ID NO: 179209 - DNA, 75 bp, synthetic construct
  source 1..75: mol_type = other DNA
aacatccgttttggtctggagtttgagaaatcagcctttggtaagtacaacgttgataatgctgtcaacgccagc

SEQ ID NO: 179210 - DNA, 75 bp, synthetic construct
  source 1..75: mol_type = other DNA
gccacagttcgtctggatttcagcccgtcagggcagaaggccgtgatgtggcatggtcattttaccggcaacctc

SEQ ID NO: 179211 - DNA, 75 bp, synthetic construct
  source 1..75: mol_type = other DNA
atatcacctttgggggtaagggcacggttgttctgaaggatgatgttgtccagggggcgggttcgctcacgttta

SEQ ID NO: 179212 - DNA, 75 bp, synthetic construct
  source 1..75: mol_type = other DNA
atggaccgctgccgggcgggtgaaacatggcctccggatctagctgagtttgtggcgctgatttcggaaagcggg

SEQ ID NO: 179213 - DNA, 75 bp, synthetic construct
  source 1..75: mol_type = other DNA
ttcggcacctccaccacctccccgccacgcttcaacctgctacggattgaagaagaactgtcagcggcacacctg

SEQ ID NO: 179214 - DNA, 75 bp, synthetic construct
  source 1..75: mol_type = other DNA
gcagaacggcaactgacgaaatgggcaaagcatgttggtaacgggatgagtgttccgccagtgcgacgacaactg

SEQ ID NO: 179215 - DNA, 75 bp, synthetic construct
  source 1..75: mol_type = other DNA
gtgacacgatgaagacgggtgaaaataccttccattatgaaagcctgcgcggtcgttatgtcagtctgatggccg

SEQ ID NO: 179216 - DNA, 75 bp, synthetic construct
  source 1..75: mol_type = other DNA
cgctggttcagcgtgatggcggggccgtctgtgcgcgtgaatgaatggttcagcgcgtatgcgatggcgggtgtg

SEQ ID NO: 179217 - DNA, 75 bp, synthetic construct
  source 1..75: mol_type = other DNA
atgcggcatttatacgcaacgatattattgtttactaccctgctggcaggaattgccttcctgcacaggctgaaa

SEQ ID NO: 179218 - DNA, 75 bp, synthetic construct
  source 1..75: mol_type = other DNA
gactgaaagtgagctgaaacgacttgcagaacgactgttgaccaaatgggcaaagaatgttggtaacggcatgag

SEQ ID NO: 179219 - DNA, 75 bp, synthetic construct
  source 1..75: mol_type = other DNA
aatcctggcggtacgacgggagtgataaatacccgtggccacagcctgtgctgtaccacatttgcctcgagatgc

SEQ ID NO: 179220 - DNA, 75 bp, synthetic construct
  source 1..75: mol_type = other DNA
ccgatacccgaggcgcggcagcctatgacgaatcctacgctgatacccgtcgatgggtggaacaagggttgctgg

SEQ ID NO: 179221 - DNA, 75 bp, synthetic construct
  source 1..75: mol_type = other DNA
gggcaaagcatgttagcaacggcctgagtgttccgcctgtccggcgacaactggcagcacccaaacgtcctgcgg

SEQ ID NO: 179222 - DNA, 75 bp, synthetic construct
  source 1..75: mol_type = other DNA
tggaagctgtgggagcttatgggggaggtgtattcgaaccgctggactcagaagaacggggctgcgccgtcgaaa

SEQ ID NO: 179223 - DNA, 75 bp, synthetic construct
  source 1..75: mol_type = other DNA
cacccgcaagggccaacgccaattgaacggctgaaacaggaatacgaacgccggaaggcagctggttttatttga

SEQ ID NO: 179224 - DNA, 75 bp, synthetic construct
  source 1..75: mol_type = other DNA
taatatcccccccagatgctttttgacgtgcaaatgccgggcaccattcttgggcatatcacaccacaagctgcg

SEQ ID NO: 179225 - DNA, 75 bp, synthetic construct
  source 1..75: mol_type = other DNA
ctggtatgaggtcttaggtaaaatagctgaaaaggattttgatgaggatcaactaattgagcactctgattttag

SEQ ID NO: 179226 - DNA, 75 bp, synthetic construct
  source 1..75: mol_type = other DNA
ctggtaatggtatcagtccgatggagtggtataatttattgggtaaaattgcagagcaagactttattccagatg

SEQ ID NO: 179227 - DNA, 75 bp, synthetic construct
  source 1..75: mol_type = other DNA
cttttaaatacatacctaactttgacaatctacatatatctcagaaacgagaacttgtttctatgtggataggta

SEQ ID NO: 179228 - DNA, 75 bp, synthetic construct
  source 1..75: mol_type = other DNA
tccacatcaaccgtcagtgcagcaactgtttgcgcatctgacagcaatacgctgaccttcagcactgattcctga

SEQ ID NO: 179229 - DNA, 75 bp, synthetic construct
  source 1..75: mol_type = other DNA
tattgccaggtgataaaaaaattattctatcgacaggtatggcaactctcgccgaaataaagcaagcattgaaga

SEQ ID NO: 179230 - DNA, 75 bp, synthetic construct
  source 1..75: mol_type = other DNA
gtatgaggttttaggtaaaaaagcggagcaggattttttagaggatcaattaataaaagtatctggttttgaaga

SEQ ID NO: 179231 - DNA, 75 bp, synthetic construct
  source 1..75: mol_type = other DNA
gaccaacgggatatccgcgctacaaaacaccacggtcatcatggggctgccgtttagttttgtgattttcttcgt

SEQ ID NO: 179232 - DNA, 75 bp, synthetic construct
  source 1..75: mol_type = other DNA
tattgtctgaactcaatgtcgcactggcgctggggctgatcctgttcgtgctgtttatgggcgacacctcgttcc

SEQ ID NO: 179233 - DNA, 75 bp, synthetic construct
  source 1..75: mol_type = other DNA
tttgctgccgggatcggtatcgacctgatgttcttttccgtagccgaaccggtaacgcagtatatgcagccgccg

SEQ ID NO: 179234 - DNA, 75 bp, synthetic construct
  source 1..75: mol_type = other DNA
tagggctctctgtgaatgccttacggaaatatatcctaactccagattaaaactaccacatacagtaattgactt

SEQ ID NO: 179235 - DNA, 75 bp, synthetic construct
  source 1..75: mol_type = other DNA
atttcacctcgcagcttaaagatatcaacagcgacgccccggctggctgcgcgtcttctggtcggtggcgattgg

SEQ ID NO: 179236 - DNA, 75 bp, synthetic construct
  source 1..75: mol_type = other DNA
ttataatttgccgctcaccatccgctcagcgttgtacccgatcttcggtaaacggattaatgggccgattggtca

SEQ ID NO: 179237 - DNA, 75 bp, synthetic construct
  source 1..75: mol_type = other DNA
tacatcactacgctgaacgaaaactaccatatgccggcaatgccggaaggtgctgaggaaggtatccgtaaaggt

SEQ ID NO: 179238 - DNA, 75 bp, synthetic construct
  source 1..75: mol_type = other DNA
aggttaagaaaatgaacatggacggtgtgcgtcacatccgcgaccgtttcaatgtgccggtgtctgatgcagata

SEQ ID NO: 179239 - DNA, 75 bp, synthetic construct
  source 1..75: mol_type = other DNA
ttggtcgtatcggtcgactggtattgcgtcgattactggaggtcaaaagcaatatagatgttgtcgccattaatg

SEQ ID NO: 179240 - DNA, 75 bp, synthetic construct
  source 1..75: mol_type = other DNA
caaagtggttttgcccccactgtgcgcggtattgctaaaagcaatgctcaggtaacgatcaaacaaaatggctat

SEQ ID NO: 179241 - DNA, 75 bp, synthetic construct
  source 1..75: mol_type = other DNA
gtattcgtggtgctaaacttgaatccgatgaaaacatgctacccgatagccaaagtggttttgcccccactgtgc

SEQ ID NO: 179242 - DNA, 75 bp, synthetic construct
  source 1..75: mol_type = other DNA
atgcggaccatattgctttttattcgcgggcgtattggttttgaactgcctgcctggtttatcccgaaggatgag

SEQ ID NO: 179243 - DNA, 75 bp, synthetic construct
  source 1..75: mol_type = other DNA
atctggtacaggaagggaagattattgaagcggcagaactctgtcaccagaccagctccttaccagaaatttgcg

SEQ ID NO: 179244 - DNA, 75 bp, synthetic construct
  source 1..75: mol_type = other DNA
cgcaaaacggcagaaggaaaggtgtcatcagatgctcagtcatctcgccgtgcagcgttgctccccgttaacccg

SEQ ID NO: 179245 - DNA, 75 bp, synthetic construct
  source 1..75: mol_type = other DNA
taactgcaactggcattgtccgctgcataacgccattcctgactacattcgtctggtgcaagaaggaaagattat

SEQ ID NO: 179246 - DNA, 75 bp, synthetic construct
  source 1..75: mol_type = other DNA
attcatgcctacaccggtacgcaatcactggttgatggtccgcgtggtaaggatttacgtgcatcacgtgctgcg

SEQ ID NO: 179247 - DNA, 75 bp, synthetic construct
  source 1..75: mol_type = other DNA
ttggtcgtatcggtcgtctggtgttgcgtcgactacttgaggtcaaaagtgacatagaagttgttgcgatcaatg

SEQ ID NO: 179248 - DNA, 75 bp, synthetic construct
  source 1..75: mol_type = other DNA
gccgtgggttcagcattgttaacagccaggggggcgagagccgaaatcctgcactgagtgcaaaggccgatgctg

SEQ ID NO: 179249 - DNA, 75 bp, synthetic construct
  source 1..75: mol_type = other DNA
aaacaaagttgttcggatcgctattcaacggatggataaaaagaaatggataccgctttttgatgtgaaaaatag

SEQ ID NO: 179250 - DNA, 75 bp, synthetic construct
  source 1..75: mol_type = other DNA
aacaacagtattaagggtatctatctaaatgttgcgtggaattacagtaaatcaccagggacaaatgcggataaa

SEQ ID NO: 179251 - DNA, 75 bp, synthetic construct
  source 1..75: mol_type = other DNA
ctgcaacgagaaggtcatttaaaatattctactacggttggccaatatcgaagcaatagctataaccagaaaagt

SEQ ID NO: 179252 - DNA, 75 bp, synthetic construct
  source 1..75: mol_type = other DNA
gttttcgcgattattcaacctggagtcgtgggagtaattcagcaggtaaactggagcatatcagtagtacgttgc

SEQ ID NO: 179253 - DNA, 75 bp, synthetic construct
  source 1..75: mol_type = other DNA
aggccgtatgctggcatggctggcgggagaagtaatggaaactgaatgcattcagagagtacgacgccggaacgg

SEQ ID NO: 179254 - DNA, 75 bp, synthetic construct
  source 1..75: mol_type = other DNA
tggaaacctattgtgacattccgatcaacaacggtacccatgcgtatgccgaaggcgttgaagtgatgcttttcg

SEQ ID NO: 179255 - DNA, 75 bp, synthetic construct
  source 1..75: mol_type = other DNA
ataacatacaacatggttttgctaatcaggataatagcagtagtggttctgttggtgttaattatcgtggggcat

SEQ ID NO: 179256 - DNA, 75 bp, synthetic construct
  source 1..75: mol_type = other DNA
tacctgatgggcggtgcaccatcgtattaacaatctccattaccggactttatgacaggcgcaggagaaaatctc

SEQ ID NO: 179257 - DNA, 75 bp, synthetic construct
  source 1..75: mol_type = other DNA
tcctcaactcgtcatcagtgagtcaggtgtttgcctcggtgtttatgatgactatcagtggttcagggatgaatt

SEQ ID NO: 179258 - DNA, 75 bp, synthetic construct
  source 1..75: mol_type = other DNA
ttagaacgtgggccgatctgcggatactggccgacatgctgagagacgattttaatgcaagagaagtggggcttt

SEQ ID NO: 179259 - DNA, 75 bp, synthetic construct
  source 1..75: mol_type = other DNA
ctggttattatgcctgcatgttcaatcgcgggaatgcgctttaaccctgcttttctgtcgggtgatactgaagct

SEQ ID NO: 179260 - DNA, 75 bp, synthetic construct
  source 1..75: mol_type = other DNA
ttgcggagattgaatcggcacgcggtgatatttccctgacctatttcgaatacggtacgctgtcggcgttgtggc

SEQ ID NO: 179261 - DNA, 75 bp, synthetic construct
  source 1..75: mol_type = other DNA
atacgatgcctgttgctgttcagccaggagcttttctgccatccgcgagccagtgtgacagatgatgaagaatgt

SEQ ID NO: 179262 - DNA, 75 bp, synthetic construct
  source 1..75: mol_type = other DNA
ggcgttcagtgaatcatgaatgtactttcgtatttaacccccaggtggttagaaaaagcaaacaggtcggtttta

SEQ ID NO: 179263 - DNA, 75 bp, synthetic construct
  source 1..75: mol_type = other DNA
aattggaggcagcagactggtgtcatcggtaactaaagaggaattgctgtatatcaggaaagatttgctgaccgg

SEQ ID NO: 179264 - DNA, 75 bp, synthetic construct
  source 1..75: mol_type = other DNA
atctgaggaaatatttgctaactggttatcagaatccgacgaaaaacaaagccccggcaaaagggcgaagcgttg

SEQ ID NO: 179265 - DNA, 75 bp, synthetic construct
  source 1..75: mol_type = other DNA
aagagaaccgccagccgggagaagcgcaggtattgctggtctggcgcgataacgaagaacatcgcgatgatattg

SEQ ID NO: 179266 - DNA, 75 bp, synthetic construct
  source 1..75: mol_type = other DNA
cgagcaatattatcccgcggtgtttaaggcgattggcgaggcgcaagaacgcatcattcttgaaacgtttatctg

SEQ ID NO: 179267 - DNA, 75 bp, synthetic construct
  source 1..75: mol_type = other DNA
acggtgaccaaagaggaattgctgtatatcaggaaagatttgctgaccggataccaaaatccaacaaaaggtaag

SEQ ID NO: 179268 - DNA, 75 bp, synthetic construct
  source 1..75: mol_type = other DNA
gctgctgggctttgatccggtgagccgccgccggaatccggtagaaacggaagaggaagacgagcttgaccgtct

SEQ ID NO: 179269 - DNA, 75 bp, synthetic construct
  source 1..75: mol_type = other DNA
aactgggcgagttcacactaccgaaaacggacgccagtacggatagagtgatacacctcattcagccagccatcg

SEQ ID NO: 179270 - DNA, 75 bp, synthetic construct
  source 1..75: mol_type = other DNA
aacactggacgaaatgtgtttattccaggtggaaatgcatattttgttaatgacactattaagatgaatacatct

SEQ ID NO: 179271 - DNA, 75 bp, synthetic construct
  source 1..75: mol_type = other DNA
aagccagatgggccacacaaacgcacaaatggtattcaatgtttacggagcatggatgaaagacaacaatcacga

SEQ ID NO: 179272 - DNA, 75 bp, synthetic construct
  source 1..75: mol_type = other DNA
agcaacattctgtagaggtgaagcagagggaatatgggagaactgctgtgcataaatgcacttttgtttttagtc

SEQ ID NO: 179273 - DNA, 75 bp, synthetic construct
  source 1..75: mol_type = other DNA
atggaaagacttcttccataaaagggcgctcagtggtcacggtaaactactatatgacaaccatagctggaatgt

SEQ ID NO: 179274 - DNA, 75 bp, synthetic construct
  source 1..75: mol_type = other DNA
tgcaacagcattactggcaaagccgctactctgtctccttcccacgcctgcgtccatgtactggcggcattgagc

SEQ ID NO: 179275 - DNA, 75 bp, synthetic construct
  source 1..75: mol_type = other DNA
aacacagcttacgcctggcaacaagaatatatcgttgatacgcaacccgggcattccacagagcgttacacctag

SEQ ID NO: 179276 - DNA, 75 bp, synthetic construct
  source 1..75: mol_type = other DNA
cgtggtaatcagtgccttttttctcaacacagattacgcctggcaacaagactatatcgttgatacgcaaaccgg

SEQ ID NO: 179277 - DNA, 75 bp, synthetic construct
  source 1..75: mol_type = other DNA
ctctggagttggcttatctaatccaaattaatggcctcaagagtttggatggttcggccagcactgcggtggtca

SEQ ID NO: 179278 - DNA, 75 bp, synthetic construct
  source 1..75: mol_type = other DNA
gtgatgaagtcagtatgcccggctcgcgaaaagaggtgattaatgcgcgtgaggaaggcgttgagtttcagttca

SEQ ID NO: 179279 - DNA, 75 bp, synthetic construct
  source 1..75: mol_type = other DNA
tagggtgtgctgatattctggcgcgcgcgggagttcaggttgatgtctttgatcgccatccagaaattggcggta

SEQ ID NO: 179280 - DNA, 75 bp, synthetic construct
  source 1..75: mol_type = other DNA
gttttcatcggcgtggggacttacgggatgatgcgagcagatctgccgcatgaagatgcgcccggtgtcattcag

SEQ ID NO: 179281 - DNA, 75 bp, synthetic construct
  source 1..75: mol_type = other DNA
tttgcggtattactctgttacctgcgtgggcctggatttgttccggacaaaaataatgttccccactgtggcgtt

SEQ ID NO: 179282 - DNA, 75 bp, synthetic construct
  source 1..75: mol_type = other DNA
ctgattatctgcattgttgcggggatgcttgattacgcagggatcactcgctggctgagtgaaacgacggcacct

SEQ ID NO: 179283 - DNA, 75 bp, synthetic construct
  source 1..75: mol_type = other DNA
tgtcactctccacgcgggaatcaccgtggtttcgcgatcgcgtgattccgctggcaattaataacgtcagcgctt

SEQ ID NO: 179284 - DNA, 75 bp, synthetic construct
  source 1..75: mol_type = other DNA
aattaatggcctcaaaggtttggggagttcagtcagcgtaacagcggccaatgacatacccacgtcggcgcagaa

SEQ ID NO: 179285 - DNA, 75 bp, synthetic construct
  source 1..75: mol_type = other DNA
attatacggaagattcacttatcgttgatgggaaaagtatcgcggtttacgccgaaaaagaggctaaaaatattc

SEQ ID NO: 179286 - DNA, 75 bp, synthetic construct
  source 1..75: mol_type = other DNA
ttgcgtggatagattttggctattgccgtaagccaaatgtaactcgaggattgaaaatttgggatttcccatttg

SEQ ID NO: 179287 - DNA, 75 bp, synthetic construct
  source 1..75: mol_type = other DNA
gaaaaaattatgcaaaaacgttatcttggaaaatcagggctggaagtatcgtcgctgggacttggctgtatggga

SEQ ID NO: 179288 - DNA, 75 bp, synthetic construct
  source 1..75: mol_type = other DNA
cacagcggctaccggcgtatcgctgacttccgctgagatgaccgagctcacccgctcactggatgcgatcactat

SEQ ID NO: 179289 - DNA, 75 bp, synthetic construct
  source 1..75: mol_type = other DNA
taaatgcggtgtaaatcatcgcattggctttttcctgcacattccttttccgacgccggaaatcttcaacgcgct

SEQ ID NO: 179290 - DNA, 75 bp, synthetic construct
  source 1..75: mol_type = other DNA
cgcctggatggacgacacgctgcatgtggagctggttatgccgttcgtctggcatagcgcgttcgaagagttaaa

SEQ ID NO: 179291 - DNA, 75 bp, synthetic construct
  source 1..75: mol_type = other DNA
aggaaggcgcatggacccgccttcatcccggtcagcgtatccggacttccggagagtcgggggacaactgcgact

SEQ ID NO: 179292 - DNA, 75 bp, synthetic construct
  source 1..75: mol_type = other DNA
ggccgactgtccggaaaacctcgtccccgcctgtgcgccgtgcaacctgctgaaaacaacatattcgctggagat

SEQ ID NO: 179293 - DNA, 75 bp, synthetic construct
  source 1..75: mol_type = other DNA
aggaagctccctttatcgggcgaacgcccgtatttctgggcgatgatttaaccgatgaatctggcttcgcagtcg

SEQ ID NO: 179294 - DNA, 75 bp, synthetic construct
  source 1..75: mol_type = other DNA
taaatgcaatgctggcagataaattattgccgctcctgcaagacgatgacattatctggatccacgattatcacc

SEQ ID NO: 179295 - DNA, 75 bp, synthetic construct
  source 1..75: mol_type = other DNA
gaagaatgtttcttcgattccagatattgaggggattactcctgccgaagagaaaattcgtaagttatctgcaca

SEQ ID NO: 179296 - DNA, 75 bp, synthetic construct
  source 1..75: mol_type = other DNA
ctggcaggagtattttattcgcgatctaaagcagatagttccgcgaagcgcggaaagtcagcagcgcgataaagt

SEQ ID NO: 179297 - DNA, 75 bp, synthetic construct
  source 1..75: mol_type = other DNA
cgcgaaagagtatgttgccgcacaggatcctgccaatccgggcgtactggtactttcgcaatttgccggagcggc

SEQ ID NO: 179298 - DNA, 75 bp, synthetic construct
  source 1..75: mol_type = other DNA
tgttgccatttgcgcatgaattacgcaaacgaggggtgaataatcgcattggtttcttcctgcatattcctttcc

SEQ ID NO: 179299 - DNA, 75 bp, synthetic construct
  source 1..75: mol_type = other DNA
catggcctggcaaccaactcaattggttatctggtcactgacgacaacgcgatggtgtggcgtggcccgatggcg

SEQ ID NO: 179300 - DNA, 75 bp, synthetic construct
  source 1..75: mol_type = other DNA
caggcgtggattgatgatggtgatacgtcgttaccaccagaaaaaattcaggttcctttcatgttaacgccacca

SEQ ID NO: 179301 - DNA, 75 bp, synthetic construct
  source 1..75: mol_type = other DNA
ccggctggctgtttgccgcagttgttttgtttgtacaaatagtcgcgatctctccgcaacaggttccggtggtgg

SEQ ID NO: 179302 - DNA, 75 bp, synthetic construct
  source 1..75: mol_type = other DNA
cggtcgcaagggggggatcgctaaaggcgaagcctacgaggacaagcgtttcatggcgttatgtatgctggagaa

SEQ ID NO: 179303 - DNA, 75 bp, synthetic construct
  source 1..75: mol_type = other DNA
tttgccgatctgaccggagcaaatccgacgtcaattatcagcgtggtaattttcgctgcattccttggtgtcgct

SEQ ID NO: 179304 - DNA, 75 bp, synthetic construct
  source 1..75: mol_type = other DNA
ggttccaacctgcaagacatcattaagctgggtagcttcgttgtcgcgtcctacctgggtcttatcattatgttt

SEQ ID NO: 179305 - DNA, 75 bp, synthetic construct
  source 1..75: mol_type = other DNA
tcgccgttttctgctgctgcgcgggttattcagtgcttacctcctgaagataaagcctcgcttcagtcgtcttat

SEQ ID NO: 179306 - DNA, 75 bp, synthetic construct
  source 1..75: mol_type = other DNA
cgaacagcctcatgcgcatatcatgatgagtcagcgtgtgaatgatggcattgaacgtacaccggaacagtattt

SEQ ID NO: 179307 - DNA, 75 bp, synthetic construct
  source 1..75: mol_type = other DNA
gaccggggaggtgcgaaaaaggattccggaagcctgactcccactcagcaaaaagagcagttgcgggaattgcga

SEQ ID NO: 179308 - DNA, 75 bp, synthetic construct
  source 1..75: mol_type = other DNA
ctatctggtgctcgatatgccgccaggcaccggcgacattcaattaacgctggcgcaaaacattccagtaactgg

SEQ ID NO: 179309 - DNA, 75 bp, synthetic construct
  source 1..75: mol_type = other DNA
cgcgttgcttcaccatgcgcgtgaaattggctttacttccaccaatattgacctcatttacggtctgccgaaaca

SEQ ID NO: 179310 - DNA, 75 bp, synthetic construct
  source 1..75: mol_type = other DNA
acttccagggctataccactcagggcgataccgatttgctggggatgggcgtttccgccatcagcatgattggcg

SEQ ID NO: 179311 - DNA, 75 bp, synthetic construct
  source 1..75: mol_type = other DNA
gaaggcttcaacatgatgttgcgcgggagcatggcgttgacatgagagacagagtgagcagacaggaccgaactg

SEQ ID NO: 179312 - DNA, 75 bp, synthetic construct
  source 1..75: mol_type = other DNA
aatcgttgtttatcatcaggaacaagtaaatggaccgcttgtcgacgagtcagggcgggttatttttgccgattt

SEQ ID NO: 179313 - DNA, 75 bp, synthetic construct
  source 1..75: mol_type = other DNA
acgatacccatcaacatggcatgatgctggacgcgacggacatcagatcctcgacctgggcgatgatttttacac

SEQ ID NO: 179314 - DNA, 75 bp, synthetic construct
  source 1..75: mol_type = other DNA
cgcgtattgctgcttgatgtcgtgattggcttcggtgcgaccgccgatcctgccgcctcgctggtaagcgcctgg

SEQ ID NO: 179315 - DNA, 75 bp, synthetic construct
  source 1..75: mol_type = other DNA
ttatagttcggttgcagagcattccgttgccatatttgcacataataacagacagttcagtctgagcgtcggcga

SEQ ID NO: 179316 - DNA, 75 bp, synthetic construct
  source 1..75: mol_type = other DNA
cagaaaaacgttggctatttctttaaagatattgaacgctcggccctgacattaaaggactcactgtatttatta

SEQ ID NO: 179317 - DNA, 75 bp, synthetic construct
  source 1..75: mol_type = other DNA
tcttttacgctacacatcaacggcaaagatcacgatttgttagcggtggataaaattcatgtcgcgatatctgaa

SEQ ID NO: 179318 - DNA, 75 bp, synthetic construct
  source 1..75: mol_type = other DNA
atgtaccgcgaacggatcggttgttggtacaccgtttttatcgaccgcccaggtttctggcatgacgattttaat

SEQ ID NO: 179319 - DNA, 75 bp, synthetic construct
  source 1..75: mol_type = other DNA
cgcctgtcagcagcggatttatttgcggtttgtataccggcggtacgctggctgccgaagcggcgggattacttg

SEQ ID NO: 179320 - DNA, 75 bp, synthetic construct
  source 1..75: mol_type = other DNA
gctctcgcctgccacacagcaacacacaccgtcattactggaaaacgtcgccgtgattaacatcggattacgcag

SEQ ID NO: 179321 - DNA, 75 bp, synthetic construct
  source 1..75: mol_type = other DNA
tgtgttcgcagattgcgctggcaggtgagggaattactcacgcgattggtcttggcgggcgcgacctcagccgtg

SEQ ID NO: 179322 - DNA, 75 bp, synthetic construct
  source 1..75: mol_type = other DNA
gctggacgctgatggtcaccagatcctcgatctgggcgatgatttctacaccgtcgggcgtccccatccgatgat

SEQ ID NO: 179323 - DNA, 75 bp, synthetic construct
  source 1..75: mol_type = other DNA
gctcgacgccgacggacatcagatcctcgacctgggcgatgatttttacaccgtcgggcgtccccatccgatgat

SEQ ID NO: 179324 - DNA, 75 bp, synthetic construct
  source 1..75: mol_type = other DNA
gtagaaagtgtttttgatattatgagcttttcagccgttacggttaataatacattaagcggttatcgcttgatt

SEQ ID NO: 179325 - DNA, 75 bp, synthetic construct
  source 1..75: mol_type = other DNA
atcagcgaaacaggacgggagatcctgcgctatcatcaactcacactgactactggttatgacggcagctaccgg

SEQ ID NO: 179326 - DNA, 75 bp, synthetic construct
  source 1..75: mol_type = other DNA
catcagatgctgcatttgcatagtgcaatctccccttacttatccggaggcaattgcaatatctctgtgaactta

SEQ ID NO: 179327 - DNA, 75 bp, synthetic construct
  source 1..75: mol_type = other DNA
acccgcagggaaccggcacgctgagcgacagcgaacacctgaaaaacagcgtgcgggatatcctgaccacaccgc

SEQ ID NO: 179328 - DNA, 75 bp, synthetic construct
  source 1..75: mol_type = other DNA
gatcgcttggagccattgctggggctgatattggagcaagattggcgagtaaagctcgattagctggtggagcag

SEQ ID NO: 179329 - DNA, 75 bp, synthetic construct
  source 1..75: mol_type = other DNA
gttgcgggttcccgatccactgcgggatgcgcatcagcgggacaggcaactgcgtaagtctatcaaacgtctggt

SEQ ID NO: 179330 - DNA, 75 bp, synthetic construct
  source 1..75: mol_type = other DNA
ccctgaagagtgaactgaagcggcgcggaattgcgcgtaacttttacgacgataccaatctacaagcgttagtga

SEQ ID NO: 179331 - DNA, 75 bp, synthetic construct
  source 1..75: mol_type = other DNA
ttcgagaacgggcaaaaagcggatgcgctggggctggatttcctgggtattccggtcacattgttgaattactcg

SEQ ID NO: 179332 - DNA, 75 bp, synthetic construct
  source 1..75: mol_type = other DNA
ttaatgcgtggttaccgtcggcaatcaaaaatttcttcacaccattgctatgtctgatggttatcacacccgtca

SEQ ID NO: 179333 - DNA, 75 bp, synthetic construct
  source 1..75: mol_type = other DNA
ttagcgaccatattgttattaactctcagggaaaaaatgcatcactgtcgttgcaatatgataatccagtaaaaa

SEQ ID NO: 179334 - DNA, 75 bp, synthetic construct
  source 1..75: mol_type = other DNA
atccggacgggacgggaaacctgaacgatatggagcacctgaaacagtcagtcagggatatcctgaccaccccgc

SEQ ID NO: 179335 - DNA, 75 bp, synthetic construct
  source 1..75: mol_type = other DNA
aaccatcccgtcaacgggaattgatttcactgaaccgccccgggaatcctggagactaaacttcctgagaaagag

SEQ ID NO: 179336 - DNA, 75 bp, synthetic construct
  source 1..75: mol_type = other DNA
cgcaacaggcaccggaaaatgatgataaaggtaatctgttaaaccgctttgtttatgttatttcaggtattttta

SEQ ID NO: 179337 - DNA, 75 bp, synthetic construct
  source 1..75: mol_type = other DNA
ctcgatccgaaaaacagcgatgctgcactgggatacaatgaagagttgaaacgttcatctgatcccaacgacaac

SEQ ID NO: 179338 - DNA, 75 bp, synthetic construct
  source 1..75: mol_type = other DNA
tatcgcatcccgctaccaggacagcgaaaaaaggtctgattcaaactcatcacaacacttaaacagcaaccagga

SEQ ID NO: 179339 - DNA, 75 bp, synthetic construct
  source 1..75: mol_type = other DNA
cacagtttgatcccggggtgcctcaggatgcgcgtctttcagagcagtacctgaaactggccggtctgtttggtg

SEQ ID NO: 179340 - DNA, 75 bp, synthetic construct
  source 1..75: mol_type = other DNA
tgagtgctggcggatggggctgaaaatcctgccgccggatataaactccggtctttaccatttccacgtcaacga

SEQ ID NO: 179341 - DNA, 75 bp, synthetic construct
  source 1..75: mol_type = other DNA
tttcaatacagtagaaaggaaaaaagtcggcatcatgctgaaagtcacgccgcagattaacgaaggtaacgcggt

SEQ ID NO: 179342 - DNA, 75 bp, synthetic construct
  source 1..75: mol_type = other DNA
tcgacgtggtgtttggtgagcgcaaactgaaaaccaccgtgttggctaacgatggtgagctaattgtgcttggcg

SEQ ID NO: 179343 - DNA, 75 bp, synthetic construct
  source 1..75: mol_type = other DNA
ggccacctattccggaatgactgacgtcataaagggaacacagtttgatcccggtgtcccccaggatgcccgtct

SEQ ID NO: 179344 - DNA, 75 bp, synthetic construct
  source 1..75: mol_type = other DNA
ccgactcaggcaggagacggtcatttccggggtggaaaacggaattaaccccgtacagcaaaaaatgctcgggta

SEQ ID NO: 179345 - DNA, 75 bp, synthetic construct
  source 1..75: mol_type = other DNA
tctgttcacaatagaatcaccaccagaggggcgtatccccggtgcaattcagacggccgttatggataccgctca

SEQ ID NO: 179346 - DNA, 75 bp, synthetic construct
  source 1..75: mol_type = other DNA
aaatttctggccggaccagaaaccgtgctggaactgctggatgaacgggaaagaaaccagcaatacatcaaacgc

SEQ ID NO: 179347 - DNA, 75 bp, synthetic construct
  source 1..75: mol_type = other DNA
gttaagtacccctgtatacccggacatgaaattggcggcacggtactggcaactggcgatctggcgggggcaatc

SEQ ID NO: 179348 - DNA, 75 bp, synthetic construct
  source 1..75: mol_type = other DNA
atccaccacgctgaggacggcttctgccgcctatctggaacagtatggcttcaacgataccggagggatcctgct

SEQ ID NO: 179349 - DNA, 75 bp, synthetic construct
  source 1..75: mol_type = other DNA
ggcaatcgtatcggtatctgcacgctggatgaccgttccgggcggctggaagtgatgttgtttactgacgccctg

SEQ ID NO: 179350 - DNA, 75 bp, synthetic construct
  source 1..75: mol_type = other DNA
gcggttagtggttgtcctcgccgttttatggggcgggggcatcgcgttgtttagcatagcgcccgttccgttctc

SEQ ID NO: 179351 - DNA, 75 bp, synthetic construct
  source 1..75: mol_type = other DNA
gtaaggtgcattacaacgggcagcgcagcaagccgagtaaagtcgtcgaactgaatgccacgctcactctgcgcc

SEQ ID NO: 179352 - DNA, 75 bp, synthetic construct
  source 1..75: mol_type = other DNA
cgccccgccagcgaggcagccttgctgtatgaagagactgcggaaagtgtagagaaacgcgaaaaaaatggcgct

SEQ ID NO: 179353 - DNA, 75 bp, synthetic construct
  source 1..75: mol_type = other DNA
ctgattgagctgcataccgacaacctcgataaattcttcaccccgcgcccgaaagtcgactggcccgcccactcg

SEQ ID NO: 179354 - DNA, 75 bp, synthetic construct
  source 1..75: mol_type = other DNA
gggccagcgccagttcgccaaccgcgagaagtatcgcgagtattatcagggtaaatactcgctcactgatgcgca

SEQ ID NO: 179355 - DNA, 75 bp, synthetic construct
  source 1..75: mol_type = other DNA
gccatcgggctacgtgcgtagccgtcaggcgtggattttacggcagatgtatcagttaggcggtgagccgtttat

SEQ ID NO: 179356 - DNA, 75 bp, synthetic construct
  source 1..75: mol_type = other DNA
tgacccagcaggtgggcaagcggatgcgcctagccggcaaaggcggctcgatcattaacgtcggctcgatttatg

SEQ ID NO: 179357 - DNA, 75 bp, synthetic construct
  source 1..75: mol_type = other DNA
cgtcgatgggctgagtcctgtcttgagtttcaggtagcacaggaaattggtcgccactggcaacgccgggcacgc

SEQ ID NO: 179358 - DNA, 75 bp, synthetic construct
  source 1..75: mol_type = other DNA
gtcgaaggtacagtacttaaccaacgtttatgtttatttcactggctacgacgcggtttccgtttatgtccatca

SEQ ID NO: 179359 - DNA, 75 bp, synthetic construct
  source 1..75: mol_type = other DNA
cgacgtttcgccgtgaactggaaaatatcctgaaagacccgacgttgagttcagaactgcgtgatgaactggcga

SEQ ID NO: 179360 - DNA, 75 bp, synthetic construct
  source 1..75: mol_type = other DNA
atgacaattgactatcaggcactgcgtgaaaaggcagagaaagcaacgtgtggtgagtggtcgctcgaatatgga

SEQ ID NO: 179361 - DNA, 75 bp, synthetic construct
  source 1..75: mol_type = other DNA
tgttctcctgaactgcgggaaaaccaggaattaatgtcgctgtttcttcctcttctgcgcgctgatttttacgcc

SEQ ID NO: 179362 - DNA, 75 bp, synthetic construct
  source 1..75: mol_type = other DNA
ttctttaccctgcaactgcgtttttcgcgccctttgcccgtggacatccggctgcgccgcgattccctgcgcctg

SEQ ID NO: 179363 - DNA, 75 bp, synthetic construct
  source 1..75: mol_type = other DNA
cgctgaacgggattattctgacactcgatttacccgatctgctgaccgcagacaaacgccgccgcgagcatctgt

SEQ ID NO: 179364 - DNA, 75 bp, synthetic construct
  source 1..75: mol_type = other DNA
tcaaaaacgtttcgtcgtctgatcgtcacgctcattcgccattatggcgtcagtctcattcatctggatgcctgc

SEQ ID NO: 179365 - DNA, 75 bp, synthetic construct
  source 1..75: mol_type = other DNA
aattcaggccgccacatggcggccatcatccaaaattacttcctcaaccccgcaaacgccgcccgaatctcatcc

SEQ ID NO: 179366 - DNA, 75 bp, synthetic construct
  source 1..75: mol_type = other DNA
ctgggagaattagcggtagaaaaaggcgtgacgccagcacaaattgctctggcatggttgatggcgcaaaaaccg

SEQ ID NO: 179367 - DNA, 75 bp, synthetic construct
  source 1..75: mol_type = other DNA
aaggcatgtcgtggctgtttatgcacctgaacagtaatccgctcggttgtgcagtattagccggactgttcctga

SEQ ID NO: 179368 - DNA, 75 bp, synthetic construct
  source 1..75: mol_type = other DNA
ctggtgggctataacgccgcccaggcatttggcggcacgggcgtcaatggcgcaattatcgccgcgctctttttg

SEQ ID NO: 179369 - DNA, 75 bp, synthetic construct
  source 1..75: mol_type = other DNA
atggccaaagagatcagcagtgaacttctgaacaccatccttacccgtgtcggcggaccgggaaatatcgccagt

SEQ ID NO: 179370 - DNA, 75 bp, synthetic construct
  source 1..75: mol_type = other DNA
tcgccaattttgaccgccatgcaattcatcacccacagacagcgcggttgtcacagcaaaagctggatgccattg

SEQ ID NO: 179371 - DNA, 75 bp, synthetic construct
  source 1..75: mol_type = other DNA
acatccctgttccatcgcggctttgatcatacccttgcctttatacatgctgatggcagttatcctgcatcgccg

SEQ ID NO: 179372 - DNA, 75 bp, synthetic construct
  source 1..75: mol_type = other DNA
cagttaaaagccagacaaacttccggcgtgcaacaatttctcgccaaattcgccaccatcttcacgccgctgatc

SEQ ID NO: 179373 - DNA, 75 bp, synthetic construct
  source 1..75: mol_type = other DNA
ggctcacacggtccttccgatttgtcaccagtctgcatggctgcagcgctgcactttgatctgtgggtccccaat

SEQ ID NO: 179374 - DNA, 75 bp, synthetic construct
  source 1..75: mol_type = other DNA
tggtgaaaccgctaattgacaccgggcaatatcgcagagccattacccatgttgtgagggataaagatgccgaat

SEQ ID NO: 179375 - DNA, 75 bp, synthetic construct
  source 1..75: mol_type = other DNA
cgagggtggataacgctcaggccattctggatgcgctcaggtcgttaaccaaaaaagatgtgctggtcggcatcc

SEQ ID NO: 179376 - DNA, 75 bp, synthetic construct
  source 1..75: mol_type = other DNA
cctgagtgggattgcgctgtcagggcgtgaagatgtggcaaaagttgctgcctggttccatcaacatggcctgaa

SEQ ID NO: 179377 - DNA, 75 bp, synthetic construct
  source 1..75: mol_type = other DNA
gttgacgaccttacacgccaacgatgccctgaatattattgagcgccttgaaatggagaatattcaggccaggct

SEQ ID NO: 179378 - DNA, 75 bp, synthetic construct
  source 1..75: mol_type = other DNA
gtagaggaacagacgttgccgcagctcaaaacagcggcgcaggctgcgcttgatggaaatgcggcgggtgcggaa

SEQ ID NO: 179379 - DNA, 75 bp, synthetic construct
  source 1..75: mol_type = other DNA
cgagggtggataacgctaaggccattctggatgcgctccggtcgttaaccaaaaaagatgtgctggtcggcatcc

SEQ ID NO: 179380 - DNA, 75 bp, synthetic construct
  source 1..75: mol_type = other DNA
cgatcaaaaccaatgttattaatgttaccggagcgggcgatgccatgatggcgggacttgcttcgtgttgggtag

SEQ ID NO: 179381 - DNA, 75 bp, synthetic construct
  source 1..75: mol_type = other DNA
tcaagccaaaccgccttgaagcggaaaccctgagtgggattgcgctgtcagggcgtgacgatgtggcaaaagttg

SEQ ID NO: 179382 - DNA, 75 bp, synthetic construct
  source 1..75: mol_type = other DNA
gcgttgctgggaaacaaagcctggctactgagcgccgtaggcagtgatttttatggtcaatcgctcctgacacaa

SEQ ID NO: 179383 - DNA, 75 bp, synthetic construct
  source 1..75: mol_type = other DNA
gaaccgcctggtgctgagcatgggaggggatggcgtttactacagtgatatcaacggtgaaagtgggtggtcggc

SEQ ID NO: 179384 - DNA, 75 bp, synthetic construct
  source 1..75: mol_type = other DNA
gtgcaaaggttattgtcgcggattgcaaccttagtgaagaggcgctggtctgggttctggaaaatagcggggaaa

SEQ ID NO: 179385 - DNA, 75 bp, synthetic construct
  source 1..75: mol_type = other DNA
caatggcgctctcctgtgaatacaccaataaccccgatttatcgattgccaacgttatatcgggtgatgctgcca

SEQ ID NO: 179386 - DNA, 75 bp, synthetic construct
  source 1..75: mol_type = other DNA
tgttggcaccattatggacaactccgactgcaccgcgtcttacagccgtgtgtttgcaaaccgcgcagaagcaga

SEQ ID NO: 179387 - DNA, 75 bp, synthetic construct
  source 1..75: mol_type = other DNA
attttatctcaatcaagatggtaaagataagtttacttttcaaacattatcttctggctactcatcaatattgag

SEQ ID NO: 179388 - DNA, 75 bp, synthetic construct
  source 1..75: mol_type = other DNA
agaatctgattatcgccttgctattatggcaggttatcaggaaagccgttacagttttaatgctacaggaggaac

SEQ ID NO: 179389 - DNA, 75 bp, synthetic construct
  source 1..75: mol_type = other DNA
ccgttagcggatacgccagcggatcatatcggtactttattgctggcagcttcctggttggaagatcagtcaaca

SEQ ID NO: 179390 - DNA, 75 bp, synthetic construct
  source 1..75: mol_type = other DNA
caacgccgctattattaaaggtgctattaactgggatctactcccccgtttgtccttcaatgcatcaggctggac

SEQ ID NO: 179391 - DNA, 75 bp, synthetic construct
  source 1..75: mol_type = other DNA
tgaaccagattaccgccttggcctcatggcggggtatcaggaaagccgttacagctttaccgccagaggcggttc

SEQ ID NO: 179392 - DNA, 75 bp, synthetic construct
  source 1..75: mol_type = other DNA
tgtctgttggtgcatcaggctggactaccctcggtcataaaggggggaatatggttgaccgtgactggctggata

SEQ ID NO: 179393 - DNA, 75 bp, synthetic construct
  source 1..75: mol_type = other DNA
acatggtgcagaacaccgatcgcgccactttcaacaatattgaagagctggggctcggatttatcaactattccc

SEQ ID NO: 179394 - DNA, 75 bp, synthetic construct
  source 1..75: mol_type = other DNA
cgagctttcctggaaggtcgtctgactcaggagcaactagataatttccgtcaggaagtccacggtaatggcctc

SEQ ID NO: 179395 - DNA, 75 bp, synthetic construct
  source 1..75: mol_type = other DNA
acgacccggcttacgcttacgaagttgctgtcatcatgcatgacggtctggtgcgtatgtacggtgaaaaacaag

SEQ ID NO: 179396 - DNA, 75 bp, synthetic construct
  source 1..75: mol_type = other DNA
ccaaccgcaggaccctttactggttccgctgtttaccttgattcgtgaaggaaaactggcggcgaactggccgct

SEQ ID NO: 179397 - DNA, 75 bp, synthetic construct
  source 1..75: mol_type = other DNA
ttggctatgagaatgcacttggtagaggtaaatctttagttaacgttaatggcattgagtcgataaggagtggtg

SEQ ID NO: 179398 - DNA, 75 bp, synthetic construct
  source 1..75: mol_type = other DNA
cggatctcgaagagtattgcttcatccattgccacggcgaattgaaaggtgaactccatcccggtttgcaatttt

SEQ ID NO: 179399 - DNA, 75 bp, synthetic construct
  source 1..75: mol_type = other DNA
cagataaacctagcatctggactgatgagagcaggcatcccgatacccgacttaattttgccaatgaatttgacc

SEQ ID NO: 179400 - DNA, 75 bp, synthetic construct
  source 1..75: mol_type = other DNA
tattctgttgcagtcaatgcaggttattacgtaacacctaacgcaaaagtttatgttgaaggcgcatggaatcgg

SEQ ID NO: 179401 - DNA, 75 bp, synthetic construct
  source 1..75: mol_type = other DNA
agtcatttatccgaacccggattatggttaacggcgattggtttatcgcaggtgatcagtaacgtgccgagcacg

SEQ ID NO: 179402 - DNA, 75 bp, synthetic construct
  source 1..75: mol_type = other DNA
attttgctgctgaactatgtgccgccgtcgttgttactggcctgggcggtaaatgtcgggggttttggtttgtta

SEQ ID NO: 179403 - DNA, 75 bp, synthetic construct
  source 1..75: mol_type = other DNA
tactctcggcagccgaggtggcaatatggtcgatcaggactggatggattccagtaaccccggaacctggacaga

SEQ ID NO: 179404 - DNA, 75 bp, synthetic construct
  source 1..75: mol_type = other DNA
tggcgcaatgatgctgacgctcctgctcctgtgctggtgttgtttccctggaaaggcgctgcaataccatacggg

SEQ ID NO: 179405 - DNA, 75 bp, synthetic construct
  source 1..75: mol_type = other DNA
gagcctgaagaaggtggacgtaaagtcagccaactggactggaaatacagtaacgccgccattcttaaaggcgcc

SEQ ID NO: 179406 - DNA, 75 bp, synthetic construct
  source 1..75: mol_type = other DNA
cggaaaaacaaaagagcgtgtttatctagccgaagaaggaggccgaaaagtcagtcaactcgactggaaattcaa

SEQ ID NO: 179407 - DNA, 75 bp, synthetic construct
  source 1..75: mol_type = other DNA
gcagcgttttaagatgccttatattggcctgactggaagttaccgctatgacaactttgaactgggcggcacatt

SEQ ID NO: 179408 - DNA, 75 bp, synthetic construct
  source 1..75: mol_type = other DNA
atggcgggatatcaggaaaaccgttacagtttcaccgccagaggcggctcttatatctattcttatgaagggttt

SEQ ID NO: 179409 - DNA, 75 bp, synthetic construct
  source 1..75: mol_type = other DNA
ctatatctacagttctgaggagggattcagagatgatatcggctccttcccgaatggagaaagagcaatcggcta

SEQ ID NO: 179410 - DNA, 75 bp, synthetic construct
  source 1..75: mol_type = other DNA
gttacgaataaaaaaggtgatacttcactttatgatcacaatgataacacttctgactacagcaaaaatggtgca

SEQ ID NO: 179411 - DNA, 75 bp, synthetic construct
  source 1..75: mol_type = other DNA
atcattttgcctgcggtatccatcgcctttatgtcgctggcgattaacgcgcgtttgctgcgcgccagtatgctg

SEQ ID NO: 179412 - DNA, 75 bp, synthetic construct
  source 1..75: mol_type = other DNA
gaactgctgcccgtcgatcccggctgtgtggtaccgaagcttaacagtagctgggagccgatctatcaggtcaca

SEQ ID NO: 179413 - DNA, 75 bp, synthetic construct
  source 1..75: mol_type = other DNA
acgccaaatttaatgccggagcattgttacgtggcgacatgaaatcccgatttgaagcgtatgccacggggatta

SEQ ID NO: 179414 - DNA, 75 bp, synthetic construct
  source 1..75: mol_type = other DNA
ttgtggcctgttcttatactttaaagccagaattcataattaataaattatataattatttaccagattatgaac

SEQ ID NO: 179415 - DNA, 75 bp, synthetic construct
  source 1..75: mol_type = other DNA
caatccaagacttcggcagaatcgccaaagactgaagcaattcatagcgatatgactgtcaagacgaaattatcc

SEQ ID NO: 179416 - DNA, 75 bp, synthetic construct
  source 1..75: mol_type = other DNA
gagcttcttccgatagatccgggctgtgtggagccgaagctgaacagccagtggcagccggtttatcaggtgacg

SEQ ID NO: 179417 - DNA, 75 bp, synthetic construct
  source 1..75: mol_type = other DNA
ggggatatgaaatcccgttttgaagcctacgccaccgggattaactggggaatttactctcccaatgactgccgc

SEQ ID NO: 179418 - DNA, 75 bp, synthetic construct
  source 1..75: mol_type = other DNA
cattggcgcggcgattcaggctgatattctggtgggtaacaagccggacagtgaaatgctgctgctcgacgtgat

SEQ ID NO: 179419 - DNA, 75 bp, synthetic construct
  source 1..75: mol_type = other DNA
tgaagggctgatcaatggctatgaacttattggcaaggtactacgcgacttgaaattagttggtgagtcattaaa

SEQ ID NO: 179420 - DNA, 75 bp, synthetic construct
  source 1..75: mol_type = other DNA
gctgaaccagatacccgaggaagagcatcgtcgccaaagtattcatatcctgacccgggtatgggatgcctgcgc

SEQ ID NO: 179421 - DNA, 75 bp, synthetic construct
  source 1..75: mol_type = other DNA
atcgcgctgagcgatgcggactccgtgaccgttaacgttgcgggctggcagggcgaaatcagccgtgaacaattc

SEQ ID NO: 179422 - DNA, 75 bp, synthetic construct
  source 1..75: mol_type = other DNA
ggcgtgatcgccgtttatgacctcggcggcgggacgtttgatatttccattctgcgcttaagtcgcggcgtgttt

SEQ ID NO: 179423 - DNA, 75 bp, synthetic construct
  source 1..75: mol_type = other DNA
acgaaccgactgctgcggctatcgcctacgggctggattccggtcaggaaggcgtgatcgccgtttatgacctcg

SEQ ID NO: 179424 - DNA, 75 bp, synthetic construct
  source 1..75: mol_type = other DNA
ttcgcctcgctattccattcggtttatcacacttacttcacgtcaattaccagcgacacagtgataaagctggat

SEQ ID NO: 179425 - DNA, 75 bp, synthetic construct
  source 1..75: mol_type = other DNA
gcggcgacctggtttacttccagggccacatctccccgggcgtttacgctcgtgctttcctggaaggtcgtctga

SEQ ID NO: 179426 - DNA, 75 bp, synthetic construct
  source 1..75: mol_type = other DNA
aagacagtcagtttcttgagaccaggaaattccagctggaggaaatatgccgcctgttccgggtgccgatgcaca

SEQ ID NO: 179427 - DNA, 75 bp, synthetic construct
  source 1..75: mol_type = other DNA
cgccaatgaacatgacgacgaagccgtcagacagcagcaagaacaaaataactgaggaacaacataatgccgatg

SEQ ID NO: 179428 - DNA, 75 bp, synthetic construct
  source 1..75: mol_type = other DNA
gccgtgagaacctacgtcaccacttcgaagttgatgcttcttatgtcgtggttgcggcgctgggcgaactggcta

SEQ ID NO: 179429 - DNA, 75 bp, synthetic construct
  source 1..75: mol_type = other DNA
cgaaaccattgaaggtagcaaaggtaaagttcaactgctgggctccggttctatcctgcgccacgtccgtgaagc

SEQ ID NO: 179430 - DNA, 75 bp, synthetic construct
  source 1..75: mol_type = other DNA
cgaaaccattgaaggtagcaacggtaaagttcagctgctgggctccggttccatcctgcgtcacgtccgtgaagc

SEQ ID NO: 179431 - DNA, 75 bp, synthetic construct
  source 1..75: mol_type = other DNA
gaaagcagatcagcagccagcgggccatgcgacagacggcggttttttcctgtgtcagggtgctggcggagtcgg

SEQ ID NO: 179432 - DNA, 75 bp, synthetic construct
  source 1..75: mol_type = other DNA
gctcacgccggatgcttatgagcgcatgaagagggattttgaggagcggcatcttgggctgggtaatgcgcaccg

SEQ ID NO: 179433 - DNA, 75 bp, synthetic construct
  source 1..75: mol_type = other DNA
tttggcgcaccatggcaccgctaacccgcgatgctattagtgcaatgtgggacgagctggaagaagattctgaag

SEQ ID NO: 179434 - DNA, 75 bp, synthetic construct
  source 1..75: mol_type = other DNA
cgcgcaggcggagatatttaccttacgccaatgaacatgacgacgaagccgtcagacagcagcaagaacaaaata

SEQ ID NO: 179435 - DNA, 75 bp, synthetic construct
  source 1..75: mol_type = other DNA
aagacagtcagttccttgagaccagaaaatttcagctggaggaaatatgccgcctgttccgggtgccgatgcaca

SEQ ID NO: 179436 - DNA, 75 bp, synthetic construct
  source 1..75: mol_type = other DNA
cactgatgctgcttacgcaaggctgaaaaaagattttgaggatcgtcacctcgggctgagcaacgcgcaccgacc

SEQ ID NO: 179437 - DNA, 75 bp, synthetic construct
  source 1..75: mol_type = other DNA
tggatgtgcgagacaatgttgagcgccgggcttatgaaattgctctggcatcgctggaagcagtatcggatgaac

SEQ ID NO: 179438 - DNA, 75 bp, synthetic construct
  source 1..75: mol_type = other DNA
tggaagtgcgagacaattttgagcgccgggcttatgaaattgctctggcatcgctggaagcagtatcggatgaac

SEQ ID NO: 179439 - DNA, 75 bp, synthetic construct
  source 1..75: mol_type = other DNA
gctagtgctaaatcgctggattcaaagctttattgtaaaatggatactcttggggggaagcagtatgctatagca

SEQ ID NO: 179440 - DNA, 75 bp, synthetic construct
  source 1..75: mol_type = other DNA
aagaatggtatcattattaatcctgatgatgaggacgatttatacgaagctttattaaaaatcaataatatgaag

SEQ ID NO: 179441 - DNA, 75 bp, synthetic construct
  source 1..75: mol_type = other DNA
agatgaacgcgaagcttatgaattattcatggaaaagcgtttcggtgacttagtagatcgtcggagagcaaaaaa

SEQ ID NO: 179442 - DNA, 75 bp, synthetic construct
  source 1..75: mol_type = other DNA
ccctattaaaacgaatgtcatcaatgttactggggcaggcgacgccatgatggcggggctggcctcctgttgggt

SEQ ID NO: 179443 - DNA, 75 bp, synthetic construct
  source 1..75: mol_type = other DNA
gatgcggtggtgacggtgacgacaaatgacggcggacacacggcaacattacaggtcagctgttacgtgccggcg

SEQ ID NO: 179444 - DNA, 75 bp, synthetic construct
  source 1..75: mol_type = other DNA
tctcgatatgccgccgggcactggtgatattcagttgacgctggcgcagaacattcctgtaactggtgctgttgt

SEQ ID NO: 179445 - DNA, 75 bp, synthetic construct
  source 1..75: mol_type = other DNA
acacttctccagctcacagaccggcattaacggttcactggacagtgaaaataacctcagctacggcatttcaac

SEQ ID NO: 179446 - DNA, 75 bp, synthetic construct
  source 1..75: mol_type = other DNA
ttccggatgggagcattacgaccatagaaataacagaacagtttataaaccagttgctgttgcgctttgaaggta

SEQ ID NO: 179447 - DNA, 75 bp, synthetic construct
  source 1..75: mol_type = other DNA
ggcggaccttttacggttgttccgggctgagaacgctgggcgacaatgtgtttgccggttgtgtcagtgccacaa

SEQ ID NO: 179448 - DNA, 75 bp, synthetic construct
  source 1..75: mol_type = other DNA
gggctggtaacgataccggcagggttatttgaaaaactcaccagtgtcacgacgtttgacagcgcgttttacggg

SEQ ID NO: 179449 - DNA, 75 bp, synthetic construct
  source 1..75: mol_type = other DNA
ataatgcctgctatgttaaaaaaaatttttctccagaaaattatataaacaaaattacttcagtaataatagagg

SEQ ID NO: 179450 - DNA, 75 bp, synthetic construct
  source 1..75: mol_type = other DNA
ggcgatttttaaccgtgactatccggtgatccagtgctttacgctgatgatggtggtggtttttgtggtctgtaa

SEQ ID NO: 179451 - DNA, 75 bp, synthetic construct
  source 1..75: mol_type = other DNA
actctcaccgtttctgggttgagagcgagaagcgttttgtcaccctgcgcgtatctgctaaaggtatgcgtgtaa

SEQ ID NO: 179452 - DNA, 75 bp, synthetic construct
  source 1..75: mol_type = other DNA
tgccgaactgctatttcacactggcgcgtgatatctggctacaacccctgatggtaagggatgtacggaatacca

SEQ ID NO: 179453 - DNA, 75 bp, synthetic construct
  source 1..75: mol_type = other DNA
tggccagtcacggacggcgacatgcactggtcgctgatttccgcgatgaacctgaactacctctccctgctggac

SEQ ID NO: 179454 - DNA, 75 bp, synthetic construct
  source 1..75: mol_type = other DNA
catcgcgatcgtctgccggattttgccgtgcgctttatcgcgtttctcggcgtgtcgatgcccaacttctggctg

SEQ ID NO: 179455 - DNA, 75 bp, synthetic construct
  source 1..75: mol_type = other DNA
cggtgtatctgcaatggctacccgcgatgggctacggcggctggcagcacatcattttgcctgcggtttccattg

SEQ ID NO: 179456 - DNA, 75 bp, synthetic construct
  source 1..75: mol_type = other DNA
gggaagttttgctggatggtgaaaaagtgggtgaagtgaaatggtcgctggtgggggaacataacatgcacaacg

SEQ ID NO: 179457 - DNA, 75 bp, synthetic construct
  source 1..75: mol_type = other DNA
gtggcacgtttatgggcggtctggccgatgctggcgcgccagttaggccatgaagtaacgggttcggacgccaat

SEQ ID NO: 179458 - DNA, 75 bp, synthetic construct
  source 1..75: mol_type = other DNA
ccgtgtgtggaagcggtactggaaaaaaacatcccttatatgtctggcccgcagtggctgcacgattttgtgctg

SEQ ID NO: 179459 - DNA, 75 bp, synthetic construct
  source 1..75: mol_type = other DNA
accccgtaaggaactgaaatcatccgtccaggtacaccgcgacgagctgataaaaacgcagacaggcagcagtat

SEQ ID NO: 179460 - DNA, 75 bp, synthetic construct
  source 1..75: mol_type = other DNA
tcgatatgatggggatgcagatgctaatggagaaatatggcgatcaggcgatggccgggatggatcacagccaga

SEQ ID NO: 179461 - DNA, 75 bp, synthetic construct
  source 1..75: mol_type = other DNA
tctttctgctgcaaccgcctcacattccgtggcaggtcgctgaagtagcagaagcctgcgttcagcctgcacact

SEQ ID NO: 179462 - DNA, 75 bp, synthetic construct
  source 1..75: mol_type = other DNA
gttaagtcagatgttgaagaagcaccggaagttaaagtagaatctccggtagccaacattttctctgacgaagca

SEQ ID NO: 179463 - DNA, 75 bp, synthetic construct
  source 1..75: mol_type = other DNA
ttgaagaaacaaaagaagaatctccagcagttgaaccagtggtcgaagaagttaagtcagatgttgaagaagcac

SEQ ID NO: 179464 - DNA, 75 bp, synthetic construct
  source 1..75: mol_type = other DNA
gcaatgaaagaacctgagatcgtcattgaagaaacaaaagaagaatctccagcagttgaaccagtggtcgaagaa

SEQ ID NO: 179465 - DNA, 75 bp, synthetic construct
  source 1..75: mol_type = other DNA
gctctcccaggtggcgaacgaaccgatcaccgtcttctgcgccgggcgtactgacgcaggggtacacggtaccgg

SEQ ID NO: 179466 - DNA, 75 bp, synthetic construct
  source 1..75: mol_type = other DNA
atcaccgtgttctgcgccgggcgtactgacgcaggcgtgcatggtacggggcaggtggtgcatttcgaaactacc

SEQ ID NO: 179467 - DNA, 75 bp, synthetic construct
  source 1..75: mol_type = other DNA
ttatcgctacatcatctacaatcatcgcctgcgcccggcagtgctgagtaaaggggtaacccacttttacgaacc

SEQ ID NO: 179468 - DNA, 75 bp, synthetic construct
  source 1..75: mol_type = other DNA
cactaacgtcccgtggctcgggccgcaggatgtgctgcgtatcattgaacagcgctgtgtgcagcacccaaagca

SEQ ID NO: 179469 - DNA, 75 bp, synthetic construct
  source 1..75: mol_type = other DNA
cgcggtcgagcaactgtttgataccacgctgctggatcagatgtttggtgcttattgtcatgcgctgcaggcgct

SEQ ID NO: 179470 - DNA, 75 bp, synthetic construct
  source 1..75: mol_type = other DNA
gtcggctggtcgcttttgccaaactgcacgatcgccaccaggcgcaggcattgcaagctaaggaagcggaggcgg

SEQ ID NO: 179471 - DNA, 75 bp, synthetic construct
  source 1..75: mol_type = other DNA
aagaaactccggtagtggaaccagtcattgaagaagttcagccagtagttgaagaagtaccggaagttaacgcag

SEQ ID NO: 179472 - DNA, 75 bp, synthetic construct
  source 1..75: mol_type = other DNA
ctccggatgaatatgatgatctcatatcaggaacttgttcgcaccttcccaagagaacgcaacagcgcacttgct

SEQ ID NO: 179473 - DNA, 75 bp, synthetic construct
  source 1..75: mol_type = other DNA
cattttacgactgggtgcggtctatctgccagtggatccggtgctaccgccacagcgtcgccagcttttgctgac

SEQ ID NO: 179474 - DNA, 75 bp, synthetic construct
  source 1..75: mol_type = other DNA
ccaccagccggagagctggatagcagagctgttggcggcaaaagacagaacgctggcggcagcaacggcgaaagc

SEQ ID NO: 179475 - DNA, 75 bp, synthetic construct
  source 1..75: mol_type = other DNA
tactcctttcacaatttcactgagtgggtgtaatactgctgccgctacaggagctcaaagtgtgaaggcttattt

SEQ ID NO: 179476 - DNA, 75 bp, synthetic construct
  source 1..75: mol_type = other DNA
aaccgctcccttggcagttacactaccaactgtctccacaaaatcattagattcaaccgggaaggtagcaggcct

SEQ ID NO: 179477 - DNA, 75 bp, synthetic construct
  source 1..75: mol_type = other DNA
acattgcgttataacgcacggtactatgcaacaggtcaggccactgccggcaacgtttctgccactgtgaattac

SEQ ID NO: 179478 - DNA, 75 bp, synthetic construct
  source 1..75: mol_type = other DNA
gaaaagtcagccgcgcgctggcgatagtgctctgtgcttttccgcccttttccggcggcgcggaaaatacggaaa

SEQ ID NO: 179479 - DNA, 75 bp, synthetic construct
  source 1..75: mol_type = other DNA
tcgacactatcggtctgcgcggggttaatctttccaccgatgacaatatgttcccggacggcatgcgctcgtatg

SEQ ID NO: 179480 - DNA, 75 bp, synthetic construct
  source 1..75: mol_type = other DNA
atgttcagccatattccgggctggttgaatgccatgctctgcaagatgctgcatcagacgctgagccacatcagg

SEQ ID NO: 179481 - DNA, 75 bp, synthetic construct
  source 1..75: mol_type = other DNA
ttagtacaacaaaaacttgaacaatattttattgataatcaacgattagaaaaaaacaacttccagaattatatg

SEQ ID NO: 179482 - DNA, 75 bp, synthetic construct
  source 1..75: mol_type = other DNA
ttagtacaacaaaaacttgaacaatattttattgataatcaacgattagaaaaaaaacagcttccagaattatat

SEQ ID NO: 179483 - DNA, 75 bp, synthetic construct
  source 1..75: mol_type = other DNA
cagaattaactaaactggcttccgaaatggaagaagaaactccggcagaaggaaccagtattaacgatcttattc

SEQ ID NO: 179484 - DNA, 75 bp, synthetic construct
  source 1..75: mol_type = other DNA
atgaaaataaaagttatagcattggctacatttgtttctgctgtgtttgttggttcagctatggcctatgacgga

SEQ ID NO: 179485 - DNA, 75 bp, synthetic construct
  source 1..75: mol_type = other DNA
cagattgtaaagagctttattttgaattacaatctaatgcaaatactccgcttagggttttagaaaatgaaaatt

SEQ ID NO: 179486 - DNA, 75 bp, synthetic construct
  source 1..75: mol_type = other DNA
aatggttagtcgttcaaaaacatttttaggattaattagcattccttttgctttgatatccgaatggcgaacatg

SEQ ID NO: 179487 - DNA, 75 bp, synthetic construct
  source 1..75: mol_type = other DNA
cggagaccacgaccacagaacaaaccgcgaccacgactactgtcgcgcaggttgagtttaacacggagcagattc

SEQ ID NO: 179488 - DNA, 75 bp, synthetic construct
  source 1..75: mol_type = other DNA
ctctcatgcgcaaacgggccgcagcgccaaccgtggcgattgctcgcaggcgtgccgcttgccatataccttgaa

SEQ ID NO: 179489 - DNA, 75 bp, synthetic construct
  source 1..75: mol_type = other DNA
tcgacggaaaagactttccaccgtggtagcacagattattttgtgaatgcccgtaaaggcgatattggcgcgttc

SEQ ID NO: 179490 - DNA, 75 bp, synthetic construct
  source 1..75: mol_type = other DNA
cgatgaagtattaacgctaaagtttgattgccgcccatgcgagatgcacgtcattggcaaaatcaaaaatcacat

SEQ ID NO: 179491 - DNA, 75 bp, synthetic construct
  source 1..75: mol_type = other DNA
gtatttccctcatgttgatggtggttttacccgttataaaatggtcgaaacgtcgcaatgtgtcccttatccggc

SEQ ID NO: 179492 - DNA, 75 bp, synthetic construct
  source 1..75: mol_type = other DNA
ctttgtttggcgcgctgaataatcagagcgaatggcaaaggctgggtaaggataaagaaaaagcaattgggttat

SEQ ID NO: 179493 - DNA, 75 bp, synthetic construct
  source 1..75: mol_type = other DNA
caaaaaatgggtattaactggagttactctgcataattatggagtaaaaggtgcacgaaatgactggctcctgat

SEQ ID NO: 179494 - DNA, 75 bp, synthetic construct
  source 1..75: mol_type = other DNA
attgacgcggcgtatgaagcacatgaagagaagggcgaagtcccggtgatgatcaccaagcattgtctgcgcttt

SEQ ID NO: 179495 - DNA, 75 bp, synthetic construct
  source 1..75: mol_type = other DNA
tcatccggtcgtaccgagcatttcttcgtaccgtcgacggaaaaaaccttccatcgtggcagtaccgactacttt

SEQ ID NO: 179496 - DNA, 75 bp, synthetic construct
  source 1..75: mol_type = other DNA
tacgccgcaggatgcatggacctgggcatttcttgatctcatcggccaggtgaaattcctcacgctttttgcgct

SEQ ID NO: 179497 - DNA, 75 bp, synthetic construct
  source 1..75: mol_type = other DNA
aaagtggcgaaagatcatcttgatgttgaggtgaccgaaccactggctaacggtgatggcctgaacgtgatgatt

SEQ ID NO: 179498 - DNA, 75 bp, synthetic construct
  source 1..75: mol_type = other DNA
gcttcacgcagattgtgctggcgcgagagctgaatcttgatcagatccgcgcgattcaccaggccacggacgcga

SEQ ID NO: 179499 - DNA, 75 bp, synthetic construct
  source 1..75: mol_type = other DNA
ctgactctgaccagcgaagagggcgtcagtatcacgcataccctggacgggcagttcgacgaggcgaataatgcc

SEQ ID NO: 179500 - DNA, 75 bp, synthetic construct
  source 1..75: mol_type = other DNA
caaagctgacgaaaaggttatggcttttgccgaacctttagccgtcgcgattcatgccgcacatcaggccggcga

SEQ ID NO: 179501 - DNA, 75 bp, synthetic construct
  source 1..75: mol_type = other DNA
caacatatatatgcaacatgttataggtatagatagaggtaattttcttttttggaagtatattgtgtgctctcc

SEQ ID NO: 179502 - DNA, 75 bp, synthetic construct
  source 1..75: mol_type = other DNA
cgaccaggcacaacgggaagcctcgcgctgccttaagtgcggcgagcacagcgtttgtgaatggacctgcccgct

SEQ ID NO: 179503 - DNA, 75 bp, synthetic construct
  source 1..75: mol_type = other DNA
accggtgtacgccatatcaaggaagtttttatccttatcccaagaaaaactcgaagtccacgctggccgcgggga

SEQ ID NO: 179504 - DNA, 75 bp, synthetic construct
  source 1..75: mol_type = other DNA
ttcccggaaaagccgtccgaatatcgcctcaatcattctgtcggcgcgttgctgctgagctatgctggttcgcgc

SEQ ID NO: 179505 - DNA, 75 bp, synthetic construct
  source 1..75: mol_type = other DNA
cgcgacctgacaaaagatgaagccaagcgtatcagtctgattgtggaatcttttgcgatgattgatggcggaaca

SEQ ID NO: 179506 - DNA, 75 bp, synthetic construct
  source 1..75: mol_type = other DNA
gtcctgaaaggatggctagactaggctatatgattaaaggattattaaatgggctccttggcaatgtaggaagaa

SEQ ID NO: 179507 - DNA, 75 bp, synthetic construct
  source 1..75: mol_type = other DNA
caattttttcttaataaaaaaatccaatcttaccggactttacatgtaccaccgtggttcatgcagtctgaacaa

SEQ ID NO: 179508 - DNA, 75 bp, synthetic construct
  source 1..75: mol_type = other DNA
ttcgccaatgaaagcgttgctggatgatggtccacacgaaccgttgtttacgccaattgttgaacctgtacagca

SEQ ID NO: 179509 - DNA, 75 bp, synthetic construct
  source 1..75: mol_type = other DNA
aggtaggtatgggaggcgcgatggcagaattcccaatgatgacgttgattggtaaggagatttcactcagaggct

SEQ ID NO: 179510 - DNA, 75 bp, synthetic construct
  source 1..75: mol_type = other DNA
cattaaagcgtgcgctgcatccgttcggtggcattaaggaaggtgcgaataagcggggaaattcttctcggctga

SEQ ID NO: 179511 - DNA, 75 bp, synthetic construct
  source 1..75: mol_type = other DNA
ttcagctttccggagtaatcaacatgaaggctgagtctgacgccagcggcgcaatgcagttaaccggccggaacg

SEQ ID NO: 179512 - DNA, 75 bp, synthetic construct
  source 1..75: mol_type = other DNA
gtcgtcggtgctgttatcggagcgtatggcgttcaaactgcaccgtcaggggatgatcctgaacagcatcggtga

SEQ ID NO: 179513 - DNA, 75 bp, synthetic construct
  source 1..75: mol_type = other DNA
gtcacttaaaaaactcaggccggagtcggtaacctcgcgcatacaaccgggcagtgatgtgattgtctgcgctga

SEQ ID NO: 179514 - DNA, 75 bp, synthetic construct
  source 1..75: mol_type = other DNA
atgccagtgtacaagcgccagtgcacgcattatgggcgttggcctcaacacggttttacgtcacttaaaaaactc

SEQ ID NO: 179515 - DNA, 75 bp, synthetic construct
  source 1..75: mol_type = other DNA
gtttcagcaatgtcacacctgttattacagctatagacgccggagataaaacaacatggaacctgaccgggtaca

SEQ ID NO: 179516 - DNA, 75 bp, synthetic construct
  source 1..75: mol_type = other DNA
ggcctgaatgcagaaatcagggataacgtccgctttggactggagtttgagaaatccgcctttggtaagtacaac

SEQ ID NO: 179517 - DNA, 75 bp, synthetic construct
  source 1..75: mol_type = other DNA
cgcattcatggtatgccggtgctgaagcaggctaccgctgtcttgtcactgaggatacctggattgagccacagg

SEQ ID NO: 179518 - DNA, 75 bp, synthetic construct
  source 1..75: mol_type = other DNA
tgaggagtggcgtcgctggcggcgttggattgtgggatacgcggtcctgagagatcccctcataatttccccaaa

SEQ ID NO: 179519 - DNA, 75 bp, synthetic construct
  source 1..75: mol_type = other DNA
caagacggaatgggctatatgctggcagaaattgagcgcggtgctgatgccgtaggcggcattccctctactgcg

SEQ ID NO: 179520 - DNA, 75 bp, synthetic construct
  source 1..75: mol_type = other DNA
tggtattccacaaatcgtcttcggcctgggagccgatcgcccggtaaatgcccgcgttgttgccgaacgcggctg

SEQ ID NO: 179521 - DNA, 75 bp, synthetic construct
  source 1..75: mol_type = other DNA
gcctggtttcatcgttgctggttgttggtgcctttagcgccgctttccgttgtgggtgatgctgccaacttactg

SEQ ID NO: 179522 - DNA, 75 bp, synthetic construct
  source 1..75: mol_type = other DNA
ctggtttaatgaattcatcaccaccgggccgcatggtgtggtgatcttacccagcaatagtggacacgcggctaa

SEQ ID NO: 179523 - DNA, 75 bp, synthetic construct
  source 1..75: mol_type = other DNA
aactccagagggaattatcgctaccggatgcgataaattaggttgttatatcgggcagcgttcacgccttggcgt

SEQ ID NO: 179524 - DNA, 75 bp, synthetic construct
  source 1..75: mol_type = other DNA
attgccctgctacaggagggcttattgccgtatctgagcttgccagtcgcataataaaaaaaacagagctaaagt

SEQ ID NO: 179525 - DNA, 75 bp, synthetic construct
  source 1..75: mol_type = other DNA
aatgccgcgggaactgagtgcgccgtttcagggattggctatgcgtcgctgttttatggcttctggccgcaattg

SEQ ID NO: 179526 - DNA, 75 bp, synthetic construct
  source 1..75: mol_type = other DNA
cttctctgttatctggctgcgttacttccgccaggggccggtggaatggctctggcgtcagttaactttgcgtgc

SEQ ID NO: 179527 - DNA, 75 bp, synthetic construct
  source 1..75: mol_type = other DNA
gtaatcgtgccgatggtgttggcaacagtttactggcactgggcgcacagtatggctggcaactggctgggatga

SEQ ID NO: 179528 - DNA, 75 bp, synthetic construct
  source 1..75: mol_type = other DNA
gtctggaactgctggcgtttgttgtcccggtatggctggcaaacctgcttttctctgttatctggctgcgctatt

SEQ ID NO: 179529 - DNA, 75 bp, synthetic construct
  source 1..75: mol_type = other DNA
ccatcggtaaaaagtctgtttaattctggcgtgatgctgtacctggtagggcttggcgtgttgctgttgttggga

SEQ ID NO: 179530 - DNA, 75 bp, synthetic construct
  source 1..75: mol_type = other DNA
gatgattaaccttcctgctatcgcactacaatggcggctggactgggcgtatcgctggtgcgccttcttacttca

SEQ ID NO: 179531 - DNA, 75 bp, synthetic construct
  source 1..75: mol_type = other DNA
acgccgggaaatttgtacagtatgacacttaataatcagacccgtttttatattctgaaatcctccacctatggt

SEQ ID NO: 179532 - DNA, 75 bp, synthetic construct
  source 1..75: mol_type = other DNA
tgggcagaaagggaatgacctcaatgcgggtaaaaatctggtgttcagtggagataacggagtaattgttctgaa

SEQ ID NO: 179533 - DNA, 75 bp, synthetic construct
  source 1..75: mol_type = other DNA
tttgacctgctgaataatggcgagacagttcttcgtgatgcatccggggagaaacggattaaaggggagaaggac

SEQ ID NO: 179534 - DNA, 75 bp, synthetic construct
  source 1..75: mol_type = other DNA
tccagtcacgtctaacactgctggtcttgctgggctttattcacggtttattattctgggacggcgatatcctgc

SEQ ID NO: 179535 - DNA, 75 bp, synthetic construct
  source 1..75: mol_type = other DNA
ttgttctgggacggcgatattctgctggcttacgggctggtgggcttaatctgctggcggctggtgcgcgatgcg

SEQ ID NO: 179536 - DNA, 75 bp, synthetic construct
  source 1..75: mol_type = other DNA
gcatttctcgatctcatcggccaggtgaaattcctcacgctttttgcgctgctgtttggtgcgggcctgcaaatg

SEQ ID NO: 179537 - DNA, 75 bp, synthetic construct
  source 1..75: mol_type = other DNA
cagaactggcgaaagccgatgcccatatgcgcgaccgtctgttggggagcgggaaagatttacccgccagtgagc

SEQ ID NO: 179538 - DNA, 75 bp, synthetic construct
  source 1..75: mol_type = other DNA
aggcgttggagcgacggcaattggtgatttcggcagtgcggcaggagagctgcccgtgcctgtggagctggcgga

SEQ ID NO: 179539 - DNA, 75 bp, synthetic construct
  source 1..75: mol_type = other DNA
gctgctgtggggcgcggatcgtaacggcgctaacccgatgacgccggaagaggtgcatcgtgttgctaatgaacg

SEQ ID NO: 179540 - DNA, 75 bp, synthetic construct
  source 1..75: mol_type = other DNA
agttaatgaaaaaaatagcttggataagtattgtttcaaaaacatttatgaccttaagtgtatttgtgttagtca

SEQ ID NO: 179541 - DNA, 75 bp, synthetic construct
  source 1..75: mol_type = other DNA
taccgaaaggttacatctacttcgcgatgttcttctctattgcggttgaaagcctaaacctgattcgcaacaaaa

SEQ ID NO: 179542 - DNA, 75 bp, synthetic construct
  source 1..75: mol_type = other DNA
tccggccgcccgtctggttgccgtgccggatgccatccgttgtgtgaactgccagagcatcatggaggccggtca

SEQ ID NO: 179543 - DNA, 75 bp, synthetic construct
  source 1..75: mol_type = other DNA
cgccgaacgaggtatatcgcgatttacgtgcgggggcggcttctggttgggattattcctcccgctggctgcgtg

SEQ ID NO: 179544 - DNA, 75 bp, synthetic construct
  source 1..75: mol_type = other DNA
gattactcttcccgttggctgcgtgatactggtcgtctggcgagcattcgtaccacccagttcatccccatcgat

SEQ ID NO: 179545 - DNA, 75 bp, synthetic construct
  source 1..75: mol_type = other DNA
ctgaatgctttcctgtttaaactggagagcgccatcgccaacatctcggcgctgaaaggcgacaaggagacggaa

SEQ ID NO: 179546 - DNA, 75 bp, synthetic construct
  source 1..75: mol_type = other DNA
gaaaggtcaggatttccgtcatgtaggcggtgatgagctggataaactgctggccggaaaagacccgaaagagta

SEQ ID NO: 179547 - DNA, 75 bp, synthetic construct
  source 1..75: mol_type = other DNA
gtgttcgcgctgatggtggagctgtttgaagaagatggtgtacgcggcgcgcgccgttaccttgagcatcttaaa

SEQ ID NO: 179548 - DNA, 75 bp, synthetic construct
  source 1..75: mol_type = other DNA
aacccgcgagccacaggatcacatcccgtggtcttctctgctggcgctgccgcagtcgtacattgttccaggggg

SEQ ID NO: 179549 - DNA, 75 bp, synthetic construct
  source 1..75: mol_type = other DNA
agaaaatgaaaagtattgcatgggttactgtactagcaaggaccttgatgttgttatctgtctttctgtttgtaa

SEQ ID NO: 179550 - DNA, 75 bp, synthetic construct
  source 1..75: mol_type = other DNA
gcgcatttctaacttgtcacgggaccttgcccgttcactttcgacggtggcggtgcgtgtcgttgaagttattcc

SEQ ID NO: 179551 - DNA, 75 bp, synthetic construct
  source 1..75: mol_type = other DNA
gaacagatggcgcgtctggtggaagcacgtctggctgatttccgtattaaagccgatgtcgtcaattactctccg

SEQ ID NO: 179552 - DNA, 75 bp, synthetic construct
  source 1..75: mol_type = other DNA
cttctgttgcagcagtacctccagtagaagccgctgccgctgtttctccgctggcatctggcgtgaaaaaagcga

SEQ ID NO: 179553 - DNA, 75 bp, synthetic construct
  source 1..75: mol_type = other DNA
gacaacaactgaaagactggcgcaactcagtattgtggggctacgaaattcacttttcttttgggagggagggga

SEQ ID NO: 179554 - DNA, 75 bp, synthetic construct
  source 1..75: mol_type = other DNA
atctgtttatcaacaagaacagccatttgaaaaagatcagagtttcagaggtgatgaaaatctctgattctgact

SEQ ID NO: 179555 - DNA, 75 bp, synthetic construct
  source 1..75: mol_type = other DNA
ccaaggaaatcaagaagtggttagatatcgatacttatcgcagatttgaagatctgactctcatacagctttatc

SEQ ID NO: 179556 - DNA, 75 bp, synthetic construct
  source 1..75: mol_type = other DNA
gccattcctgataagaaccaggacagatatttacatatcactattagctttcgtgaaaacgaagtgcctgtagaa

SEQ ID NO: 179557 - DNA, 75 bp, synthetic construct
  source 1..75: mol_type = other DNA
tttttcaaaggcaatacatccaagagcgtcgccttgaaaaacccaggctttcatcgactcaggtagaaagactta

SEQ ID NO: 179558 - DNA, 75 bp, synthetic construct
  source 1..75: mol_type = other DNA
ttcttttatttcatccttgcagggtaaatatagcgaggtaagagttagaaacaaaggtaaagcaaacgagtatct

SEQ ID NO: 179559 - DNA, 75 bp, synthetic construct
  source 1..75: mol_type = other DNA
acaactggtggcactggcgaaaaaagcacgtcagcttggcggcgctgtggcggtgttaaccacgaatcgacacgc

SEQ ID NO: 179560 - DNA, 75 bp, synthetic construct
  source 1..75: mol_type = other DNA
gctttcagaaagaaatatctcattcaaagagcttgcggcaaatgcaaaaacatcgcctgataaaagtgttggtga

SEQ ID NO: 179561 - DNA, 75 bp, synthetic construct
  source 1..75: mol_type = other DNA
gtttatcagacgttattggcggtgctgctgaaaaaaatgctttcagcccgtttgaacctgaatatggcattaatc

SEQ ID NO: 179562 - DNA, 75 bp, synthetic construct
  source 1..75: mol_type = other DNA
gaccttttatgcgccagcaacatcgctactggccgctggtcgctgcgctaacctttccctggtatatctgggtgg

SEQ ID NO: 179563 - DNA, 75 bp, synthetic construct
  source 1..75: mol_type = other DNA
cggtgcgtgtcgttgaagttattcctggcaaaccctatgtaggtctggagttaccgaataaaaaacgacaaaccg

SEQ ID NO: 179564 - DNA, 75 bp, synthetic construct
  source 1..75: mol_type = other DNA
gcaacagtcgtattacgcccctgcgccagaacaatcggtggcaggtaacgcctggcaagccgaagagcagcaatc

SEQ ID NO: 179565 - DNA, 75 bp, synthetic construct
  source 1..75: mol_type = other DNA
aacgtgggtgaataatcatgctcatgtaataagagctatctctggactaagccataacaagtatttatgccatta

SEQ ID NO: 179566 - DNA, 75 bp, synthetic construct
  source 1..75: mol_type = other DNA
cacaaaaaacagtatcgctgtcgagtctccgaaattttgagatctctgttccccctttaaaagaacaacacgaaa

SEQ ID NO: 179567 - DNA, 75 bp, synthetic construct
  source 1..75: mol_type = other DNA
ttgtttccagcgacatattgccatcatcaagccaaacagaaatttaattgatcatagattcttagctttctattt

SEQ ID NO: 179568 - DNA, 75 bp, synthetic construct
  source 1..75: mol_type = other DNA
atgatcctttttgtcactcccgcatctgaggcagcactgttcaccgcaccacttttcacagaacgctgtccggca

SEQ ID NO: 179569 - DNA, 75 bp, synthetic construct
  source 1..75: mol_type = other DNA
ttcgataagccggatgatatcggcgcggtgatccagcctcagacactccagttgtgtgtgacggtggttttccgg

SEQ ID NO: 179570 - DNA, 75 bp, synthetic construct
  source 1..75: mol_type = other DNA
gacttcgcgactgaaagcatctttatcgaagacagcgatttaccgtccggcccgctgttaaccgaagtgaactat

SEQ ID NO: 179571 - DNA, 75 bp, synthetic construct
  source 1..75: mol_type = other DNA
gtccacacgaaccgttgtttacgccaattgttgaacctgtacagcagccgcaacaaccggttgcaccgcagcagc

SEQ ID NO: 179572 - DNA, 75 bp, synthetic construct
  source 1..75: mol_type = other DNA
cggtggcgtcattggcagcttactaagcactacgctacaaccactgctacacagtagcgggggaactattgcgct

SEQ ID NO: 179573 - DNA, 75 bp, synthetic construct
  source 1..75: mol_type = other DNA
gaaaacgacggtgaacccattattccgatgcagtacgtcccgtataacggtggcgcagtgtgggaaccatggtgg

SEQ ID NO: 179574 - DNA, 75 bp, synthetic construct
  source 1..75: mol_type = other DNA
cctcaacacattgataagaattatttttattacctattgtcgtcgtcgcaactacaagaacagttctccaattta

SEQ ID NO: 179575 - DNA, 75 bp, synthetic construct
  source 1..75: mol_type = other DNA
gggtaagcttatctcaatttggacgtattattatacaattgatcagcttgactgttttaacaagatttataccac

SEQ ID NO: 179576 - DNA, 75 bp, synthetic construct
  source 1..75: mol_type = other DNA
gcccgaaaagaggcttacgatgttatcgcattctcaccggatggaagtaaaaaagtcttccagcgaatcgaatag

SEQ ID NO: 179577 - DNA, 75 bp, synthetic construct
  source 1..75: mol_type = other DNA
tgtaaggccattaacaacctttgaaagagcaagattgcaaacatttcctgaagactttaaatttaaaggtgcaaa

SEQ ID NO: 179578 - DNA, 75 bp, synthetic construct
  source 1..75: mol_type = other DNA
ccagcccgcaccgtgctgcgcgcgctggatattgtaaaacgcgattatgaaaagaagttacagagcgatgagact

SEQ ID NO: 179579 - DNA, 75 bp, synthetic construct
  source 1..75: mol_type = other DNA
agcttatagaattatgttgtttccgctccagagtttaacatttattgcgtcaagatcactatatccgatattaag

SEQ ID NO: 179580 - DNA, 75 bp, synthetic construct
  source 1..75: mol_type = other DNA
cgatacaagttttatcattcttcattggttctttatttagtataaatatttttgtttttgcgtactttatagcaa

SEQ ID NO: 179581 - DNA, 75 bp, synthetic construct
  source 1..75: mol_type = other DNA
gacgaatctcgattggtgattttttgatctccagagcaaatacgcttgaactcttagggaacccagttattgtaa

SEQ ID NO: 179582 - DNA, 75 bp, synthetic construct
  source 1..75: mol_type = other DNA
atgtattgaaatacctcctgacaaccaccaatatgggattataaaaattagtgcagtgacttggggagaatatga

SEQ ID NO: 179583 - DNA, 75 bp, synthetic construct
  source 1..75: mol_type = other DNA
tctggatatattaatgatgagagtaaacttatcaaaataactacacctatttgtatatttggcgatcacaccagg

SEQ ID NO: 179584 - DNA, 75 bp, synthetic construct
  source 1..75: mol_type = other DNA
ccgaagcccgctggtctgatgtcgtgatccacaacaacactctctactatacgggtgtgccggaaaaccttgacg

SEQ ID NO: 179585 - DNA, 75 bp, synthetic construct
  source 1..75: mol_type = other DNA
ttatcgcgttatcgtcccgccgatgacctcagagatgatgaacctggtgaaaaactccgccatcgcctcgactat

SEQ ID NO: 179586 - DNA, 75 bp, synthetic construct
  source 1..75: mol_type = other DNA
tgtcacgctgattgctctctggtgggggctttcttctgtgctcgcagaccaggtggcacggcttaccgggcaggg

SEQ ID NO: 179587 - DNA, 75 bp, synthetic construct
  source 1..75: mol_type = other DNA
atggcggaagtcaaacgcaaatggggcgaccgctttgttgccgtcacgcaaaaaaatactggtaaaggtggtgcg

SEQ ID NO: 179588 - DNA, 75 bp, synthetic construct
  source 1..75: mol_type = other DNA
tcggccttgcacaacaggatctcgacgaaggtaagtcacaaattgctcacggcgaaaccgttcgcgaaaccgcca

SEQ ID NO: 179589 - DNA, 75 bp, synthetic construct
  source 1..75: mol_type = other DNA
cgggcaggggagttacgacgcgttaggcgcaggaatgtataccttgctgagcgtgccgaaagatgtgcaaatctt

SEQ ID NO: 179590 - DNA, 75 bp, synthetic construct
  source 1..75: mol_type = other DNA
tggtgcagtgccctgggggtggatgccggatgctatgccacactggcgaattttccgtccaggccggtggtgtgg

SEQ ID NO: 179591 - DNA, 75 bp, synthetic construct
  source 1..75: mol_type = other DNA
gcagtgccctgggggtggatgccggatgttatgccacgctggtgcattttccagtcaggccggcggtgtggctgg

SEQ ID NO: 179592 - DNA, 75 bp, synthetic construct
  source 1..75: mol_type = other DNA
caggcgtggtgcagtgccctgggagtggatgtcgggtgccatgccacgctggtgcattttccggcctggccggcg

SEQ ID NO: 179593 - DNA, 75 bp, synthetic construct
  source 1..75: mol_type = other DNA
gtcaatggctgacctggcatggttacgtgaacactttggttcactggaaaacctgaaaggtaaaaaaatcgccat

SEQ ID NO: 179594 - DNA, 75 bp, synthetic construct
  source 1..75: mol_type = other DNA
tgcgtctcccggatgtaccggcagcaactgacgcagcagtgatatcccgcttcatcaatgccctgaaagcccgaa

SEQ ID NO: 179595 - DNA, 75 bp, synthetic construct
  source 1..75: mol_type = other DNA
tgctgtacaggcattaccctgtagcgcaattcatattctcaaagccgcagccatgcctgcaggcattgccgggtt

SEQ ID NO: 179596 - DNA, 75 bp, synthetic construct
  source 1..75: mol_type = other DNA
actggccggaatgattgaacaggcctggtgcagtgccctgggggtggatgctggatgctatgccacgctggtgca

SEQ ID NO: 179597 - DNA, 75 bp, synthetic construct
  source 1..75: mol_type = other DNA
tcgggtgctatgccacgctggtgcattttccggcctggccggcggtgtggctggcgcgtaatgatgacaccggct

SEQ ID NO: 179598 - DNA, 75 bp, synthetic construct
  source 1..75: mol_type = other DNA
tggatgtcgggtgccatgccacgctggtgcattttccggcctggccggcggtgtggctggcgcgtaatgatgaca

SEQ ID NO: 179599 - DNA, 75 bp, synthetic construct
  source 1..75: mol_type = other DNA
tccggggtcactggccggaatgatttaacaggcctggtgcagtgccctgggggtggatgccgggccttatgccac

SEQ ID NO: 179600 - DNA, 75 bp, synthetic construct
  source 1..75: mol_type = other DNA
tccgggttcactggccggtatgatttaacaggcctggtgcagtgccctgggggtggatgccgggccttatgccac

SEQ ID NO: 179601 - DNA, 75 bp, synthetic construct
  source 1..75: mol_type = other DNA
tccgggatcactggccgggatgatttaacaggcctggtgcagtgccctgggggtggatgccgggccttatgccac

SEQ ID NO: 179602 - DNA, 75 bp, synthetic construct
  source 1..75: mol_type = other DNA
aacggacgcagctgtgatatcccgcttcatcaatgccctgaaagcccgaatcgacgcttaccagaaacgtaagct

SEQ ID NO: 179603 - DNA, 75 bp, synthetic construct
  source 1..75: mol_type = other DNA
aacggacgcagctgtgatatcccgcttcatcaatgccctgaaagcccgaatctacgcttaccagaagcgtaagcc

SEQ ID NO: 179604 - DNA, 75 bp, synthetic construct
  source 1..75: mol_type = other DNA
aacggacgcagctgtgatatcccgcttcatcaatgccctgaaagcccgaatctacgcttaccagaaccgtaagcg

SEQ ID NO: 179605 - DNA, 75 bp, synthetic construct
  source 1..75: mol_type = other DNA
tacctggtgtcgtgccggcgattaccgcgctccgggatcactggccgggatgattaaacaggcgtggtgcagtgc

SEQ ID NO: 179606 - DNA, 75 bp, synthetic construct
  source 1..75: mol_type = other DNA
atgctgctggttaaccgggatacctggtgtcgtgccggtgattaccgtgctccgggatcactggccgggatgatt

SEQ ID NO: 179607 - DNA, 75 bp, synthetic construct
  source 1..75: mol_type = other DNA
cgcctgacggcattgcgggttgacctgcgtctcccggatgtaccggcagcaacggacgcagctgtgatatcccgc

SEQ ID NO: 179608 - DNA, 75 bp, synthetic construct
  source 1..75: mol_type = other DNA
cctgggcccgggagttcggggtactcaggggcaaaaaacactatcacctcctgctgctggtcaaccgggatacct

SEQ ID NO: 179609 - DNA, 75 bp, synthetic construct
  source 1..75: mol_type = other DNA
tgccgtacaggcattaccctgtagcgcaattcatattcttaaagccgcagccatgcccgtaggcgttgccgggtt

SEQ ID NO: 179610 - DNA, 75 bp, synthetic construct
  source 1..75: mol_type = other DNA
cgctccgggatcactggccggaatgattgaacaggcctggtgcagtgccctgggggtggatgccggatgccatgc

SEQ ID NO: 179611 - DNA, 75 bp, synthetic construct
  source 1..75: mol_type = other DNA
tttcgtaaggcttagtggagatgtttatgataattatgctgaagcgacgctaatcagttcaggttatccagaaga

SEQ ID NO: 179612 - DNA, 75 bp, synthetic construct
  source 1..75: mol_type = other DNA
aaccgatgaacaaaaggaagtagttgatgctttaggttctggcttgattaatagcttaaaagtcttggctggtgt

SEQ ID NO: 179613 - DNA, 75 bp, synthetic construct
  source 1..75: mol_type = other DNA
gctgttagctggtagtgcagtttatgcaggttatgaaaggttagcttctacacctgaacgaatggaagcacaagc

SEQ ID NO: 179614 - DNA, 75 bp, synthetic construct
  source 1..75: mol_type = other DNA
gctggtgcattttccggcctggccggcggtgtggctggaacgcgatgatgatgctggtttacgggatatgctgaa

SEQ ID NO: 179615 - DNA, 75 bp, synthetic construct
  source 1..75: mol_type = other DNA
tgcttacagagaattagatgacactcaaaaagctgtggctgatggtcttgctaatggcctgttaagtgcattaaa

SEQ ID NO: 179616 - DNA, 75 bp, synthetic construct
  source 1..75: mol_type = other DNA
attggtttccaacaggttgcttctaaaggtcaggttatgagtgaagaggtgaaaggccagattgcagaagccttg

SEQ ID NO: 179617 - DNA, 75 bp, synthetic construct
  source 1..75: mol_type = other DNA
gaagcccttgctaaactaaattcaagtgtaagagaagcaattgctaaagccagaggtcatacatccaccagcatt

SEQ ID NO: 179618 - DNA, 75 bp, synthetic construct
  source 1..75: mol_type = other DNA
taattgcagaccatgacaagccgcagccgtcaggctgcctactcgataatttaagttcagcagcagttaaaacag

SEQ ID NO: 179619 - DNA, 75 bp, synthetic construct
  source 1..75: mol_type = other DNA
ctattacaggtgatattgtgaacagcaatgctcaattagctatggctgtatcagagttaggcagaaaggtagacg

SEQ ID NO: 179620 - DNA, 75 bp, synthetic construct
  source 1..75: mol_type = other DNA
ggctggaaagctatttcagaaagtacacaggcacaattagggaacttgagaaacgcttggaataccacgcttgat

SEQ ID NO: 179621 - DNA, 75 bp, synthetic construct
  source 1..75: mol_type = other DNA
caagctaaaaggctttgaccctattttgcagaaatacatcaaatctcagttttacgggctatctgctaaagctgg

SEQ ID NO: 179622 - DNA, 75 bp, synthetic construct
  source 1..75: mol_type = other DNA
gagcaatcacagcagcttactcagcgaatatgaccaaactgaaaggtcttaacccaattgtcgagaaatacatta

SEQ ID NO: 179623 - DNA, 75 bp, synthetic construct
  source 1..75: mol_type = other DNA
cacgctggtgcattttccggcctggccggcggtgtggctggcgcgtaatgatgacaccggctttcagcaagtgct

SEQ ID NO: 179624 - DNA, 75 bp, synthetic construct
  source 1..75: mol_type = other DNA
caggtggcgctgtcggtaatgaaaaccgctattccactggtattgctgacgatggcgatgggtgagtggatcgcg

SEQ ID NO: 179625 - DNA, 75 bp, synthetic construct
  source 1..75: mol_type = other DNA
gcgtactttgtaactagaaagagaataaatggagtggtttggattttattattgttgcttgcttatattttaatg

SEQ ID NO: 179626 - DNA, 75 bp, synthetic construct
  source 1..75: mol_type = other DNA
gcggcacgcactggcggtgcatccccgcctgacggcacttcgggtggatctgcgtctgccggatatatccgcaga

SEQ ID NO: 179627 - DNA, 75 bp, synthetic construct
  source 1..75: mol_type = other DNA
tcgttggattcaacaaaatgccggggctggacgtttattatgccgctgatgtttgttatgccgagaaagtagcgc

SEQ ID NO: 179628 - DNA, 75 bp, synthetic construct
  source 1..75: mol_type = other DNA
ggttttaccggcgatacggcgacaagttatgccgatcgtctgacaatgtcgaccgacaacagtatttaccaactt

SEQ ID NO: 179629 - DNA, 75 bp, synthetic construct
  source 1..75: mol_type = other DNA
cggctcgttgctctctactcagcaaggtttatgggcgaaagatggcaacaattttgtttatatcgagcgggtaaa

SEQ ID NO: 179630 - DNA, 75 bp, synthetic construct
  source 1..75: mol_type = other DNA
gcgccggatgtctccggtctcattacccaagtgaatgttcatgataaccagttggtgaaaaaagggcaggtactg

SEQ ID NO: 179631 - DNA, 75 bp, synthetic construct
  source 1..75: mol_type = other DNA
attacgcgcggatcaacggcggttgcgctggtgaaacagaattccttctatgtgctggcctatatggaagaaacc

SEQ ID NO: 179632 - DNA, 75 bp, synthetic construct
  source 1..75: mol_type = other DNA
tataaactggcactgggcgaggaacgtggcgagtttaacgtcttactggcgaatgaatggctggcaagcgcactt

SEQ ID NO: 179633 - DNA, 75 bp, synthetic construct
  source 1..75: mol_type = other DNA
ggtgcggggatgtataccctgctgagcgtgccgaaagatgtgcaaatcttcttcccgatggcggccttgctgggc

SEQ ID NO: 179634 - DNA, 75 bp, synthetic construct
  source 1..75: mol_type = other DNA
ccgcagggcgaacagatggcgcgtaactaccgtgcgcaggcgatgtacggcggctcgttgctctctacccagcaa

SEQ ID NO: 179635 - DNA, 75 bp, synthetic construct
  source 1..75: mol_type = other DNA
aatatgacttctcacacgaagtcaaagaggcgatgtcgggctgtctggcctgtaaagcgtgttcgacccagtgcc

SEQ ID NO: 179636 - DNA, 75 bp, synthetic construct
  source 1..75: mol_type = other DNA
ttctgatgaatcggtgatgcgtaaaatctgtactgttaaaaccattcacagcaatgaatttaagcaactggtttc

SEQ ID NO: 179637 - DNA, 75 bp, synthetic construct
  source 1..75: mol_type = other DNA
actacatcatgaccggcgatacccgctctctctccacgttagtgcaggctgacggcggctataccgttatccctg

SEQ ID NO: 179638 - DNA, 75 bp, synthetic construct
  source 1..75: mol_type = other DNA
cctgacaacatcaccgaaccgggtttctacaaggtacataccgataaatacctgggcggcggcgtggtggactcc

SEQ ID NO: 179639 - DNA, 75 bp, synthetic construct
  source 1..75: mol_type = other DNA
atgcgtcccgcgactatcgcccctttaacgccatacgataaatgggatggtgagaaatgggtgacggatactgaa

SEQ ID NO: 179640 - DNA, 75 bp, synthetic construct
  source 1..75: mol_type = other DNA
atgcgtcccgcgactatcgccccattatcgccatacgataaatgggatggtgagaaatgggtgacggatactgaa

SEQ ID NO: 179641 - DNA, 75 bp, synthetic construct
  source 1..75: mol_type = other DNA
ggttccctgcgctggcacgtctggccgcggctaagcattttgtccggacgtatgaccttaaccgcgcccggcgcc

SEQ ID NO: 179642 - DNA, 75 bp, synthetic construct
  source 1..75: mol_type = other DNA
atgactccagtaaaagtgtggcaagagcgcgttgagatcccgacttatgaaaccgggccgcaggatatacaccct

SEQ ID NO: 179643 - DNA, 75 bp, synthetic construct
  source 1..75: mol_type = other DNA
gcgatttacaacagcagcataaagaaaaatgcctgatggtggcgatgctggcggccgcgggattaggcgagattg

SEQ ID NO: 179644 - DNA, 75 bp, synthetic construct
  source 1..75: mol_type = other DNA
cacaccggagaaacgactggcgcgtctggaaaataatctggaaattgcgctgaaacgcgacgacatgaccgcaga

SEQ ID NO: 179645 - DNA, 75 bp, synthetic construct
  source 1..75: mol_type = other DNA
gttgcaggatgatagcgtgatgcgctccatcgcaacggtaaagaccaccaaaaccaacgaataccagaaactggt

SEQ ID NO: 179646 - DNA, 75 bp, synthetic construct
  source 1..75: mol_type = other DNA
gcgcgttgatatcaaactcaacccgatctacgcctacccgaaaaccactcaggagattctcgacttctccgaggt

SEQ ID NO: 179647 - DNA, 75 bp, synthetic construct
  source 1..75: mol_type = other DNA
gcacgactggcggcgcgtaatggtcacttcgacgctggtctggatttttgccaacaaagtcttcgcgcctgccca

SEQ ID NO: 179648 - DNA, 75 bp, synthetic construct
  source 1..75: mol_type = other DNA
atgcgtcccgcgactatcgcccccttagcgccatacgataaatgggatggtgagaaatgggtgactgatactgaa

SEQ ID NO: 179649 - DNA, 75 bp, synthetic construct
  source 1..75: mol_type = other DNA
cggcagaagcacagcgccagtcgctgattgatgctgcaatggcttccattagtctgattcaactgaaattacagg

SEQ ID NO: 179650 - DNA, 75 bp, synthetic construct
  source 1..75: mol_type = other DNA
ccgcagaagcacagcgccagtcgctgattgatcctgcaatggcttccattagtctgattcaactgaaattacagg

SEQ ID NO: 179651 - DNA, 75 bp, synthetic construct
  source 1..75: mol_type = other DNA
ctgcagaagcacagcgccagtcgctgattgattctgcaatggcttccattagtctgattcaactgaaattacagg

SEQ ID NO: 179652 - DNA, 75 bp, synthetic construct
  source 1..75: mol_type = other DNA
aggtgctccagtggcttccatctccatcagttgtccctcctgctcagctactgaaggcgtggtgcgtaacggtaa

SEQ ID NO: 179653 - DNA, 75 bp, synthetic construct
  source 1..75: mol_type = other DNA
gtgctcagccacctcggttctaactttctttcaatgatggataacgccgaaattctgcgcggcacgctggcgctg

SEQ ID NO: 179654 - DNA, 75 bp, synthetic construct
  source 1..75: mol_type = other DNA
tgagaaatgggtgacggatacggatgcacagcatagcgtcgcagtagaagccgcagaagcacagcgccagtcact

SEQ ID NO: 179655 - DNA, 75 bp, synthetic construct
  source 1..75: mol_type = other DNA
tgagaaatgggtgacggatactgatgcacagcatagcgccgcagtagaagcggcagaagcacagcgccagtcact

SEQ ID NO: 179656 - DNA, 75 bp, synthetic construct
  source 1..75: mol_type = other DNA
atgcgtcccgcgactatcgccccgttaccgccatacgataaatgggatggtgagaaatgggtgactgatactgaa

SEQ ID NO: 179657 - DNA, 75 bp, synthetic construct
  source 1..75: mol_type = other DNA
cagcagaagcacagcgccagtcgctgattgatgctgcaatggcttccattagtctgattcaactgaaattgcagg

SEQ ID NO: 179658 - DNA, 75 bp, synthetic construct
  source 1..75: mol_type = other DNA
cagcagaagcacagcgccagtcgctgattgatcctgcaatggcttccattagtctgattcaactgaaattccagg

SEQ ID NO: 179659 - DNA, 75 bp, synthetic construct
  source 1..75: mol_type = other DNA
cagcagaagcacagcgccagtcgctgattgatactgcaatggcttccattagtctgattcaactgaaattacagg

SEQ ID NO: 179660 - DNA, 75 bp, synthetic construct
  source 1..75: mol_type = other DNA
gggagttcggggtactcaggggcaaaaaacactatcacctcctgctgctggtcaaccgggatacctggtgtcgtg

SEQ ID NO: 179661 - DNA, 75 bp, synthetic construct
  source 1..75: mol_type = other DNA
atgacctacaaatacaaccccttctggcagcaacgtattcgtgagacagtgcggcacgcactgaatgttcatccc

SEQ ID NO: 179662 - DNA, 75 bp, synthetic construct
  source 1..75: mol_type = other DNA
gcggcctctgcggcggcattaatgactgaaatgcctgcaattatcaaacgtccattgctctgcgcgcctggtaag

SEQ ID NO: 179663 - DNA, 75 bp, synthetic construct
  source 1..75: mol_type = other DNA
tgccgccaaatatgatataccggtcgtgatgcaaaccgtaggcttcggccataccccctggcatatcaggggtgt

SEQ ID NO: 179664 - DNA, 75 bp, synthetic construct
  source 1..75: mol_type = other DNA
cgtatctgaatgaagaagtggtcggcgaagccttaaaaccgtttcgtgaccgcgtggtaattgccactaaattcg

SEQ ID NO: 179665 - DNA, 75 bp, synthetic construct
  source 1..75: mol_type = other DNA
attagcacaaaagccgtggattgttcccatccctggcaccactaaactgcaccggctggaagaaaacctggccgc

SEQ ID NO: 179666 - DNA, 75 bp, synthetic construct
  source 1..75: mol_type = other DNA
aaacaggcgtggtgcagtgccctgggagtggatgtcgggtgccatgccacgctggtgcattttccggcctggccg

SEQ ID NO: 179667 - DNA, 75 bp, synthetic construct
  source 1..75: mol_type = other DNA
caacggacgcagctgtgatatcccgcttcatcaatgccctgaaagcccgaatccacgcttaccagaatcgtaagc

SEQ ID NO: 179668 - DNA, 75 bp, synthetic construct
  source 1..75: mol_type = other DNA
aacggacgcagctgtgatatcccgcttcatcaatgccctgaaagcccgaatcgacgcttaccagaatcgtaagca

SEQ ID NO: 179669 - DNA, 75 bp, synthetic construct
  source 1..75: mol_type = other DNA
gctcactgcaccggtgagcgcaattttggctgtagccccatatcttcacgggcgacggggcccgtcacagtttgt

SEQ ID NO: 179670 - DNA, 75 bp, synthetic construct
  source 1..75: mol_type = other DNA
gtaaacgcgtacatcccacgaccctgcattacgcctgggcccgggaattcggtgtgctcaggggtaaaaaacact

SEQ ID NO: 179671 - DNA, 75 bp, synthetic construct
  source 1..75: mol_type = other DNA
tctccgcggcgttaaaaataatcgccacggggatcgccttaccccctgatcaaatcacttctaaacaactggatg

SEQ ID NO: 179672 - DNA, 75 bp, synthetic construct
  source 1..75: mol_type = other DNA
aagtgggtgaacagtcgatcatttcccgtgcgggcggtgcgccgacgctggcggtggggatggcttacatcctgc

SEQ ID NO: 179673 - DNA, 75 bp, synthetic construct
  source 1..75: mol_type = other DNA
gtacagatgaagcctggtttatcggccagcatctggagcaataccatcacgccagccgttcaccattcgattact

SEQ ID NO: 179674 - DNA, 75 bp, synthetic construct
  source 1..75: mol_type = other DNA
ccgctgtttctccgctggcatctggtgtgaaaaaagcgacactggcgacgggggctgccgcaaccgttgccgcgc

SEQ ID NO: 179675 - DNA, 75 bp, synthetic construct
  source 1..75: mol_type = other DNA
ctccggtaagcggatggatgatgaagaagagattacctacactgcacgcggtgtggctgccgaccctgacgacgt

SEQ ID NO: 179676 - DNA, 75 bp, synthetic construct
  source 1..75: mol_type = other DNA
gtgctggtttgctcgccatttactggcctgcttctactacaacaaacgtagctacaacgaagccattgccttatg

SEQ ID NO: 179677 - DNA, 75 bp, synthetic construct
  source 1..75: mol_type = other DNA
ctgttcactgaaatgaaacagtgggcacaagagatggcgaaaaccagtatcgaagcggatttctttgccgtttcg

SEQ ID NO: 179678 - DNA, 75 bp, synthetic construct
  source 1..75: mol_type = other DNA
tgccagagagccgcagcaggccagcgaactgcttcatgccgcgctgcattatccggagaatttaagcgaaggccg

SEQ ID NO: 179679 - DNA, 75 bp, synthetic construct
  source 1..75: mol_type = other DNA
gctggtccgctggtgggtccggttctcgccgcgcagatgggctacctgcctggcacactgtggctgctggcgggg

SEQ ID NO: 179680 - DNA, 75 bp, synthetic construct
  source 1..75: mol_type = other DNA
tcgggatcaggaagttcatgccgtggtgcaggactggaaagcgcgtggtcgcccacagtatgttgatggcatcac

SEQ ID NO: 179681 - DNA, 75 bp, synthetic construct
  source 1..75: mol_type = other DNA
aagaagtcacattgacaaagttaagcagcgggcgccgacttctggaggcgttgctgattcttattgtcctgtttg

SEQ ID NO: 179682 - DNA, 75 bp, synthetic construct
  source 1..75: mol_type = other DNA
gcggaaaaattcattaatccgatggggcggcaaacagatgctgcgctgttctccggtaagcggatggatgatgaa

SEQ ID NO: 179683 - DNA, 75 bp, synthetic construct
  source 1..75: mol_type = other DNA
gcagccacaatatcagcagccgcaacaaccggttgcgccacagccgcaatatcagcagccgcaacaaccggttgc

SEQ ID NO: 179684 - DNA, 75 bp, synthetic construct
  source 1..75: mol_type = other DNA
caaccaaccgttacgtgttgtttggtcaccacttcgccgctatcgccggcgcgggtccgctggttggtccggttc

SEQ ID NO: 179685 - DNA, 75 bp, synthetic construct
  source 1..75: mol_type = other DNA
ttcgtcagaagatcgatgtaactgaagcgcttgaagcgctggaggagtgccaaagaagaaaaccagtagttccag

SEQ ID NO: 179686 - DNA, 75 bp, synthetic construct
  source 1..75: mol_type = other DNA
caagatgggatggtgcgtagagaaaaaaatgaagaacggatatgtattactttttcaccggaggctcaagttctt

SEQ ID NO: 179687 - DNA, 75 bp, synthetic construct
  source 1..75: mol_type = other DNA
accagaaaacctagcgataaagaaaagttgttattttggcttgaggaacatgttatcagtaataaatcttacgat

SEQ ID NO: 179688 - DNA, 75 bp, synthetic construct
  source 1..75: mol_type = other DNA
tgaaaatccgcgtatcatcgttgaagtaaagcaccgcagggaacagatgggaagccaacagatacgcagctttat

SEQ ID NO: 179689 - DNA, 75 bp, synthetic construct
  source 1..75: mol_type = other DNA
tggcagtgctgggcggcagcctgaaacgtcgcgagcgcatctcggcccgtctgggggatattttaagccagctct

SEQ ID NO: 179690 - DNA, 75 bp, synthetic construct
  source 1..75: mol_type = other DNA
accacggagtttaagctgagttggctggatcgattcccgccacacaaaccaacgccaccaacgccaaccggcgca

SEQ ID NO: 179691 - DNA, 75 bp, synthetic construct
  source 1..75: mol_type = other DNA
tgggcggaaaaaacgtggcgtgggcgcagtctgaaatcacagcatggatggcggatcgtattgccgaacgcaacc

SEQ ID NO: 179692 - DNA, 75 bp, synthetic construct
  source 1..75: mol_type = other DNA
cggcagccgtcaggtaatcattcgcccacggaaagcggcacgtcagtgcgatcagaataaggacttagtaacggc

SEQ ID NO: 179693 - DNA, 75 bp, synthetic construct
  source 1..75: mol_type = other DNA
cgctactttatgcattcaaaccccagtagatcctgaacattcagtaaactatacaagggccggtatgcaggtaac

SEQ ID NO: 179694 - DNA, 75 bp, synthetic construct
  source 1..75: mol_type = other DNA
aacaatgcaaaatgctactaactttctcgcgcgtctgatgtcatgtaaaaatcaggcatccagatcgcatcacag

SEQ ID NO: 179695 - DNA, 75 bp, synthetic construct
  source 1..75: mol_type = other DNA
gtccgccagttcaaatgggcgctggtcagccgtcagatctacaaatggctgcagatcaccccggaagaaacactg

SEQ ID NO: 179696 - DNA, 75 bp, synthetic construct
  source 1..75: mol_type = other DNA
tcccatggattggcggtaaacgtcgtctggcgaagcatattttaccattgtttccggcccatacctgctatgtgg

SEQ ID NO: 179697 - DNA, 75 bp, synthetic construct
  source 1..75: mol_type = other DNA
gattgggacgagatgcaaaatctggttgccggagtcttacgcagcatgggctataaaacgcaggtctcacctgcg

SEQ ID NO: 179698 - DNA, 75 bp, synthetic construct
  source 1..75: mol_type = other DNA
aagactaatatcattaggtgacgaggataaagatcctgaagggatgctggagacattccgtgtatttattgatta

SEQ ID NO: 179699 - DNA, 75 bp, synthetic construct
  source 1..75: mol_type = other DNA
atgaaggagcaaaggaaaatacccctgacgcatattatgattatcggtgcgtttatttttgccttcttgcaagtg

SEQ ID NO: 179700 - DNA, 75 bp, synthetic construct
  source 1..75: mol_type = other DNA
gtgttattagcctccctggttcacgctgtgaatgttaacaatgaaatccaggaaggcttatttcagtcggggcgc

SEQ ID NO: 179701 - DNA, 75 bp, synthetic construct
  source 1..75: mol_type = other DNA
ataacgatgcgtggatacagagtctgacccgaaaatcacagcaggcatccgcccgcagtaaaaaaacaccgcgtg

SEQ ID NO: 179702 - DNA, 75 bp, synthetic construct
  source 1..75: mol_type = other DNA
aatatccgcctgaaagcggcgctggagcgggtggcgaaggagggggaatgtgccccggtggctgaagcgattctc

SEQ ID NO: 179703 - DNA, 75 bp, synthetic construct
  source 1..75: mol_type = other DNA
cagcgctgtcacccaggcgcgtcagcgcgtgggggccccctggtggaatggctcttccgccagaccgcacagaca

SEQ ID NO: 179704 - DNA, 75 bp, synthetic construct
  source 1..75: mol_type = other DNA
gaggtagtttctgatccgcttcgcgatgtggagtcgttggcgcgtgaaggtattaaagatcgagttaatgggctc

SEQ ID NO: 179705 - DNA, 75 bp, synthetic construct
  source 1..75: mol_type = other DNA
gaggtcgtttctgatccgcttcgcgatatggaaatgctggcgtttgagggtatcaaagatcgtatcaactctctt

SEQ ID NO: 179706 - DNA, 75 bp, synthetic construct
  source 1..75: mol_type = other DNA
gtgctcttattgaaaactatgagcaagtcgacatcgagaccaagattttagtgcccctaaagaaaactttcctac

SEQ ID NO: 179707 - DNA, 75 bp, synthetic construct
  source 1..75: mol_type = other DNA
ggaaggtttatttcagtctgggcgaattatggtagaaagtttgcagcacattctttctgtgcaaacgggaattaa

SEQ ID NO: 179708 - DNA, 75 bp, synthetic construct
  source 1..75: mol_type = other DNA
gaggcagatccattaacaaagctgggaactgcgcgttctggtgcatcgcaggtctggcgttttgtgaacgaaatc

SEQ ID NO: 179709 - DNA, 75 bp, synthetic construct
  source 1..75: mol_type = other DNA
cggcggtcgccataaagacgatcgcgggctttatgtcagtacagggggctttacgaaagatgctcgctatgaggc

SEQ ID NO: 179710 - DNA, 75 bp, synthetic construct
  source 1..75: mol_type = other DNA
tgaagccaactttaaccgtcttaaccgtgactatcgcggcatgatgctgtacgccatgctgcgctcacgcggaat

SEQ ID NO: 179711 - DNA, 75 bp, synthetic construct
  source 1..75: mol_type = other DNA
attgatgacgctaaaccggtgctgattgtctcggctgatgccggagcgcgcggtggcaaaatcattccctataaa

SEQ ID NO: 179712 - DNA, 75 bp, synthetic construct
  source 1..75: mol_type = other DNA
ctgcgcgccatcgcgcccgttctgaatggtattcccaaccgtattagcctttcgggtcataccgatgatttccct

SEQ ID NO: 179713 - DNA, 75 bp, synthetic construct
  source 1..75: mol_type = other DNA
actgggatgggaagtactgcacgggccggatattgcgccagatggtagcaatccgctgcgtgcttcattccacga

SEQ ID NO: 179714 - DNA, 75 bp, synthetic construct
  source 1..75: mol_type = other DNA
caagaaaaaaccaaaggtgactggagccgtctggaaaagctggtcggttcagagccacgtattcagcaggtcgcc

SEQ ID NO: 179715 - DNA, 75 bp, synthetic construct
  source 1..75: mol_type = other DNA
agaaacgttacgcaataccttcgcaccgttgacgcaatgggaagataaatatcgccagttgatcatgctggggaa

SEQ ID NO: 179716 - DNA, 75 bp, synthetic construct
  source 1..75: mol_type = other DNA
cggaatatttccgcacgccgctggcgacggcagtaacgggcggtgatcgcatttctaatagtgaaagcccaattc

SEQ ID NO: 179717 - DNA, 75 bp, synthetic construct
  source 1..75: mol_type = other DNA
cctaccctgatgaagaagctgacattgatgatgttgagataatcggccgcctcttctggtactcggtactgctgt

SEQ ID NO: 179718 - DNA, 75 bp, synthetic construct
  source 1..75: mol_type = other DNA
ggcttacatacgcgatggatcaggctgggtttactcaggcttctcttggcaatgctgttggcatgtctcagccaa

SEQ ID NO: 179719 - DNA, 75 bp, synthetic construct
  source 1..75: mol_type = other DNA
cagatcatcgatagccagaatcgcccgatgttcagaaccggcagtgccgacgtcgaaccctatatgcgcgacatt

SEQ ID NO: 179720 - DNA, 75 bp, synthetic construct
  source 1..75: mol_type = other DNA
cggtaagtgttctggaaaaaacagggagcgcaccgcaggtcagtgttcccacaatgccatcagccgaaccgaggt

SEQ ID NO: 179721 - DNA, 75 bp, synthetic construct
  source 1..75: mol_type = other DNA
atgaagaatcacgcgcacccaataattgtcgtcaaacgacgcaaagcaaaaagccacggctcggcgcatggatcg

SEQ ID NO: 179722 - DNA, 75 bp, synthetic construct
  source 1..75: mol_type = other DNA
cgaaacagcctcgccgcccggatatcatctgctttattaacggaataccactggcggttgtggaactaaaaagcc

SEQ ID NO: 179723 - DNA, 75 bp, synthetic construct
  source 1..75: mol_type = other DNA
ccgttgatgatggccgatatgctggagtccttacatacttggttctcaagtaggacttcattggcagatacatta

SEQ ID NO: 179724 - DNA, 75 bp, synthetic construct
  source 1..75: mol_type = other DNA
ttgccagagccaataccgaaacgtcaaattacaatgtcgatcagctcattattaaccgccacgatgaagattatc

SEQ ID NO: 179725 - DNA, 75 bp, synthetic construct
  source 1..75: mol_type = other DNA
agttaatattcgtgatgaccgtttcttcgtggcggatgacccgcaacttgctcttgttcatggcctgaaagcaat

SEQ ID NO: 179726 - DNA, 75 bp, synthetic construct
  source 1..75: mol_type = other DNA
ttgaaagcgcaagccaaagagattgccggatgcgagaaccgcgtctggctgggctataccgttgctgaaaacggt

SEQ ID NO: 179727 - DNA, 75 bp, synthetic construct
  source 1..75: mol_type = other DNA
cctcaggttttgatttattctggttttttcgatatcccggaccaggttgatcacgacagaaaaagtgccggtatt

SEQ ID NO: 179728 - DNA, 75 bp, synthetic construct
  source 1..75: mol_type = other DNA
tgatgtaggtcagtatgatgattcagggttttatacgactagtagaattctgaatgctttgcacttaactagaga

SEQ ID NO: 179729 - DNA, 75 bp, synthetic construct
  source 1..75: mol_type = other DNA
ggattatattggtatcgccaatgagctgaaactggcgctgaaaacttataccgatgcaaacggtaaaggtgatgc

SEQ ID NO: 179730 - DNA, 75 bp, synthetic construct
  source 1..75: mol_type = other DNA
ggcgatgattgtcgccatgagccgtgaaatctgcgtccatctttacgatgaaattattgcgttgcgtccggagtg

SEQ ID NO: 179731 - DNA, 75 bp, synthetic construct
  source 1..75: mol_type = other DNA
agagaaaaaaccaaaggtgaatggagccgtctggagaaactagttggtgctaaaccacgtcttcagcagatcgct

SEQ ID NO: 179732 - DNA, 75 bp, synthetic construct
  source 1..75: mol_type = other DNA
cttaacgtcctggctgttcaccatgccctgctgacaagtggcattgagccgcaggaagtagaaattgtggtcacg

SEQ ID NO: 179733 - DNA, 75 bp, synthetic construct
  source 1..75: mol_type = other DNA
aacttaatatcaatcaactcgcagaactggcgggagtttgccgccagacagtagcgaaaaggctaaaggacattc

SEQ ID NO: 179734 - DNA, 75 bp, synthetic construct
  source 1..75: mol_type = other DNA
tcgaacaggaaacggcgcaactcatacccgccgatgatgtgcgaaaagagatggctatatggggagaaatcgtaa

SEQ ID NO: 179735 - DNA, 75 bp, synthetic construct
  source 1..75: mol_type = other DNA
tattaggggtagttttaccccttttcataataatactgtaaacatcgccctaatgaaaaaaatatatttccctaa

SEQ ID NO: 179736 - DNA, 75 bp, synthetic construct
  source 1..75: mol_type = other DNA
cgtatgacagccgggaattatgtaaaacaagcgcaactattgttttgtatgaaactatcaagcttaaaatagaac

SEQ ID NO: 179737 - DNA, 75 bp, synthetic construct
  source 1..75: mol_type = other DNA
tgccggagctgtcagaagatcgcggctggtcgtttgatatctccagcctgaaggtagctgacagtgtgctggtgt

SEQ ID NO: 179738 - DNA, 75 bp, synthetic construct
  source 1..75: mol_type = other DNA
gcgtctggcgcaggcaaaggcgttgattgcgcgcaaacgccgtccgctggtggtgtgcggcggcggtgtacgcta

SEQ ID NO: 179739 - DNA, 75 bp, synthetic construct
  source 1..75: mol_type = other DNA
gccgggagccgccaatatgatcaccgcggcggcgaccgccacggcgaaccgtattccgctgctgctgctgccggg

SEQ ID NO: 179740 - DNA, 75 bp, synthetic construct
  source 1..75: mol_type = other DNA
ccaacaatatgttagcgttgatggtaaagaaacgccctttgtggagggcgtggcaacgatctttgggcacggtaa

SEQ ID NO: 179741 - DNA, 75 bp, synthetic construct
  source 1..75: mol_type = other DNA
tgccggatctgtcagacgatcgcggatggtcgtttgatatatccagtcttaaggtggcggacagcgttctggtgt

SEQ ID NO: 179742 - DNA, 75 bp, synthetic construct
  source 1..75: mol_type = other DNA
aacacttacaggatgaagccaaacgtcgcctgcacgattgggctgagcgcaataaagattcccgcaatggcaaag

SEQ ID NO: 179743 - DNA, 75 bp, synthetic construct
  source 1..75: mol_type = other DNA
tgccgcgcccggtcatttcttcgcgtattgatgaaccggcctatcagggactgcaaggctttacggctgatattt

SEQ ID NO: 179744 - DNA, 75 bp, synthetic construct
  source 1..75: mol_type = other DNA
ctggcagatcaaacctgcgacacccagtttgatattcgggtcgtgggtggctggaacggggaaagcaaactgatt

SEQ ID NO: 179745 - DNA, 75 bp, synthetic construct
  source 1..75: mol_type = other DNA
cttctgattatccgcatgatttaaccgcagccattgagcaaattagctggcagctgcaaggcgcagatctgccac

SEQ ID NO: 179746 - DNA, 75 bp, synthetic construct
  source 1..75: mol_type = other DNA
agccagccactggtgcgcgccgataatatgcgccttgatgtggcgttattgccgttattgagtcatcaactgagc

SEQ ID NO: 179747 - DNA, 75 bp, synthetic construct
  source 1..75: mol_type = other DNA
ttactaccggctctaaggcgctcttttctcatcccgacgtcgagttcctgctgctgaacgtggctgagtttgact

SEQ ID NO: 179748 - DNA, 75 bp, synthetic construct
  source 1..75: mol_type = other DNA
cttaagtaactacagattgagcaaagctaaaccagatactttaggggggctgggcttttatcagttcgattgggt

SEQ ID NO: 179749 - DNA, 75 bp, synthetic construct
  source 1..75: mol_type = other DNA
aaggagaagactttttatatcacgatgatgaggatgattggtatgggtcttatgaaccgccccgggtttcctgga

SEQ ID NO: 179750 - DNA, 75 bp, synthetic construct
  source 1..75: mol_type = other DNA
gaccttgtttcatatctgcttggatggaatgctcttgttgtaaagtggattacttttgatgctaaaggtctgcct

SEQ ID NO: 179751 - DNA, 75 bp, synthetic construct
  source 1..75: mol_type = other DNA
atgccgtggaacaattttccgcacctcgccgccagggcgttcaatcaaccgcttttgctggagcccacctacgcg

SEQ ID NO: 179752 - DNA, 75 bp, synthetic construct
  source 1..75: mol_type = other DNA
cgataccaggggaagaagggactttcaacgttaggaaaggagaagattttttatatcatgatgatgaggatgatt

SEQ ID NO: 179753 - DNA, 75 bp, synthetic construct
  source 1..75: mol_type = other DNA
atacagggagagcccgataccgggggaagaagggactttcaacgttaggaaaggggaagactttttatatcacga

SEQ ID NO: 179754 - DNA, 75 bp, synthetic construct
  source 1..75: mol_type = other DNA
acggtattcccaaccgaattagcctctcgggtcataccgatgattttccctacgccagcggtgagaaaggttaca

SEQ ID NO: 179755 - DNA, 75 bp, synthetic construct
  source 1..75: mol_type = other DNA
ggtggcagagtcgccagcagtgcgccaggccgccgagcaaacacaggctcaggtgaaaaaagctcgtcagtattg

SEQ ID NO: 179756 - DNA, 75 bp, synthetic construct
  source 1..75: mol_type = other DNA
acagcgttgacccacgcactgaaagattatcgtagtggctggggggaggcgattgcccatgcgaaatccgcctgg

SEQ ID NO: 179757 - DNA, 75 bp, synthetic construct
  source 1..75: mol_type = other DNA
tctggctggccacggtgtctcgcctcgactggccaccggtttcctcggttaacattagtaaccccaccagccggg

SEQ ID NO: 179758 - DNA, 75 bp, synthetic construct
  source 1..75: mol_type = other DNA
ggttgttggtgctatcgcaggctgaatgtgtacaattgagacgtatcgtgcgcaattttttcagaatcgaaaggt

SEQ ID NO: 179759 - DNA, 75 bp, synthetic construct
  source 1..75: mol_type = other DNA
ctgcgggctattgcaccagtgctgaatgggatccccaaccgtatcagcctctcaggacataccgatgacttcccc

SEQ ID NO: 179760 - DNA, 75 bp, synthetic construct
  source 1..75: mol_type = other DNA
cgcgttatctgaatggaaaaaataccgggtcttgctgatgcgcgttgatacagcaaaacccgtatggcctgtcaa

SEQ ID NO: 179761 - DNA, 75 bp, synthetic construct
  source 1..75: mol_type = other DNA
gaagttaaaaaatcccaattacgggaaaaagctgacagtgaaatatcctggcgtcaggatgctgttgatgctgat

SEQ ID NO: 179762 - DNA, 75 bp, synthetic construct
  source 1..75: mol_type = other DNA
atgaatatcgctaagcaaaaaaaattctcccgcgaaattaatctgacaattgtttgttttaatcgtcttgcgacc

SEQ ID NO: 179763 - DNA, 75 bp, synthetic construct
  source 1..75: mol_type = other DNA
ctgatgcatatctcaccgcctttaatttacgcccaggggcaaacaccctggatttgcccctatatttccagacac

SEQ ID NO: 179764 - DNA, 75 bp, synthetic construct
  source 1..75: mol_type = other DNA
ctccagcaaattttgcctcatcgtggtgcgttattaactaattttatcaggcacatgattatttaccgcatggcg

SEQ ID NO: 179765 - DNA, 75 bp, synthetic construct
  source 1..75: mol_type = other DNA
tggaattgatcttgaaatgtcctggctaaactatgtgttgcttggcaaagtttacgaaatgaaggggatgaaccg

SEQ ID NO: 179766 - DNA, 75 bp, synthetic construct
  source 1..75: mol_type = other DNA
aaagtgcagagtggtgaatggcctgaacaaaagctgatagaggccatggatagctatctggaacgcgaccacgac

SEQ ID NO: 179767 - DNA, 75 bp, synthetic construct
  source 1..75: mol_type = other DNA
gtatgggggcagtggctgtatttatcgggattgttttgctctggcttattcctgaatataaaaagacgcccagga

SEQ ID NO: 179768 - DNA, 75 bp, synthetic construct
  source 1..75: mol_type = other DNA
ccccgttgcgcgacacctttgaacggtttggccctgtttttgacgtaatcggaagcggttcagccaggtgtttaa

SEQ ID NO: 179769 - DNA, 75 bp, synthetic construct
  source 1..75: mol_type = other DNA
ctttcagcgccgttgacaggctgacccgacctgccgaaaacgcacgccgcctgatggggcagtttggtgactcca

SEQ ID NO: 179770 - DNA, 75 bp, synthetic construct
  source 1..75: mol_type = other DNA
taccggacgtggcggtagcgataatgttatcttgccagcagatagttcacctgaagagatcggcgctggtctcag

SEQ ID NO: 179771 - DNA, 75 bp, synthetic construct
  source 1..75: mol_type = other DNA
catgattttactgcggcatttaccgcgggctatgctcagaacggtagtaccgttgcaccaggtctggtgaaatcg

SEQ ID NO: 179772 - DNA, 75 bp, synthetic construct
  source 1..75: mol_type = other DNA
ctggaaatggcgacggtacgtgcaccgtttgatggtcgcgttgtttcactgaagacttcggtcggtcagtttgcc

SEQ ID NO: 179773 - DNA, 75 bp, synthetic construct
  source 1..75: mol_type = other DNA
atgatcggttctggtgttggttctgcaagtcagggcttgaataatatggcagtgaaactagccaagaaagcggct

SEQ ID NO: 179774 - DNA, 75 bp, synthetic construct
  source 1..75: mol_type = other DNA
tagcggttatcaattgcagctcgacgggccactgcgttggcacgtctggccgcagcttagtatcctctccgggcg

SEQ ID NO: 179775 - DNA, 75 bp, synthetic construct
  source 1..75: mol_type = other DNA
gatctggcgtttctggaaaagcagaggatcgctgtgcgtgcctatggtggcgcgttgatctgcgatagcacgacg

SEQ ID NO: 179776 - DNA, 75 bp, synthetic construct
  source 1..75: mol_type = other DNA
gatctggcattcctggaaaaacaggggatcgctgtgcgtgcctacggcggcgcgttgatctgcgacagtaatacg

SEQ ID NO: 179777 - DNA, 75 bp, synthetic construct
  source 1..75: mol_type = other DNA
accggaaaacgacattgtcgctatccgcgaactgcgcccgacacggctgcttattgtcgacgccacggatatggg

SEQ ID NO: 179778 - DNA, 75 bp, synthetic construct
  source 1..75: mol_type = other DNA
acggcccgctgtttaaaggcaaacgcgtagcggtcatcggcggcggtaactccggtgtcgaagcggcaatcgacc

SEQ ID NO: 179779 - DNA, 75 bp, synthetic construct
  source 1..75: mol_type = other DNA
atgggcgaacgttttggtggtcagatcctcgataccgttgatatcgaaaactacatttctgtaccgaagaccgaa

SEQ ID NO: 179780 - DNA, 75 bp, synthetic construct
  source 1..75: mol_type = other DNA
tccctgttctgcaacacagcactctggcagaccacggttggcaatacgatatccaaagcggagccaggaacctta

SEQ ID NO: 179781 - DNA, 75 bp, synthetic construct
  source 1..75: mol_type = other DNA
gctaaaccccggcgaaatccgcatcatcgacccggatgatatcgccgagatgtttatgatgactacccataacat

SEQ ID NO: 179782 - DNA, 75 bp, synthetic construct
  source 1..75: mol_type = other DNA
cagccgattaaagatgcggtggaaacggtgtatcaacgactggaaggctgggaagggaatggcggcttcgcgcag

SEQ ID NO: 179783 - DNA, 75 bp, synthetic construct
  source 1..75: mol_type = other DNA
atgctcgggcagagcaacttcctggcccgtgcttaccagggcgcaccgattgccatcaccgttgaaggggctaac

SEQ ID NO: 179784 - DNA, 75 bp, synthetic construct
  source 1..75: mol_type = other DNA
cacgccgtgctcgtattcttcgcggcgcgctagcgcgtcgtaaacggttggcggaaaaattcattaatccgatgg

SEQ ID NO: 179785 - DNA, 75 bp, synthetic construct
  source 1..75: mol_type = other DNA
gcgcgtctggctgatttccgtattaaagccgatgttgtcaattactctccggggccagttatcactcgctttgaa

SEQ ID NO: 179786 - DNA, 75 bp, synthetic construct
  source 1..75: mol_type = other DNA
ggcggtgcaaaacaataccgtgcagcaaaagccgatcctgctgcgtgggaaaatgctctgagaccaaaaccttgc

SEQ ID NO: 179787 - DNA, 75 bp, synthetic construct
  source 1..75: mol_type = other DNA
cagcagcagtatcagcagccacaacagcaggttgcgccgcagccacaatatcagcagccgcaacagccggttgca

SEQ ID NO: 179788 - DNA, 75 bp, synthetic construct
  source 1..75: mol_type = other DNA
ggcggcaaacagatgctgcgctgttctccggtaagcggatggatgatgaagaagagattacctacactgaagaag

SEQ ID NO: 179789 - DNA, 75 bp, synthetic construct
  source 1..75: mol_type = other DNA
gatgatcctgagcatgctttataaagcacagccagaagatgtgcgtttcatcatgatcgacccgaaaatgctgga

SEQ ID NO: 179790 - DNA, 75 bp, synthetic construct
  source 1..75: mol_type = other DNA
actcgatacccagcgcgcttataccgtgatccaggcgcgtccgactgcgggactgcaacgtttgcgttatctgct

SEQ ID NO: 179791 - DNA, 75 bp, synthetic construct
  source 1..75: mol_type = other DNA
gactgcaacgtttgcgttatctgctgctgctgtggggggcagatcgtaacggcgctaacccgatgacgccggaag

SEQ ID NO: 179792 - DNA, 75 bp, synthetic construct
  source 1..75: mol_type = other DNA
ggcccatcttaccggcagcaaagagtacgcgatggtgctctataccgataagctcaaggttatccatatttcgac

SEQ ID NO: 179793 - DNA, 75 bp, synthetic construct
  source 1..75: mol_type = other DNA
gcaatccagaaagtgcctatgtttgaaggcgtaaatccagaggtcgctcgtcagatcactggtgggtgggctatg

SEQ ID NO: 179794 - DNA, 75 bp, synthetic construct
  source 1..75: mol_type = other DNA
atcagaaagcgcaggccggtgaacgaatgccgtcatgtattaacatcatcagtggtcccagggctttgttgaata

SEQ ID NO: 179795 - DNA, 75 bp, synthetic construct
  source 1..75: mol_type = other DNA
tgaaggttgcacaatatgccgcactgatcctgcctgcttctctcggcgcagccaccagcgacgcatgtacgttta

SEQ ID NO: 179796 - DNA, 75 bp, synthetic construct
  source 1..75: mol_type = other DNA
cacctgcagctgaacaacctgcgcaacaaccttactacgctcctgcggcggaacaacctgttcagcagccgtatt

SEQ ID NO: 179797 - DNA, 75 bp, synthetic construct
  source 1..75: mol_type = other DNA
tacagacgacggatgatgcttacattggtggtaatatcaccacggtggcaagtaaagtttctggttatatttctg

SEQ ID NO: 179798 - DNA, 75 bp, synthetic construct
  source 1..75: mol_type = other DNA
atgacaacacaatcccaccatgaccacgtagaaaagcagtttagctcgcaggccagtgaatatttgaccagtacc

SEQ ID NO: 179799 - DNA, 75 bp, synthetic construct
  source 1..75: mol_type = other DNA
agtggttgacgttaatcaatgaagccaatctgatagttgataatttaattacagataagttaccgctggaatttt

SEQ ID NO: 179800 - DNA, 75 bp, synthetic construct
  source 1..75: mol_type = other DNA
actttctgctcgcccgctacgaacaggccgcctcccgtgctgacctgctggagcgtctggcgtttgtggacagat

SEQ ID NO: 179801 - DNA, 75 bp, synthetic construct
  source 1..75: mol_type = other DNA
gagaagcaacggctggcagttttatctgctcaggaagaaaacgcacgtgcgagtatcgaagaagttcaggccgct

SEQ ID NO: 179802 - DNA, 75 bp, synthetic construct
  source 1..75: mol_type = other DNA
gagtatcgaagaagttcaggccgctttgactcaggcactactggatctggaatatacccttgttcgtgcgccgat

SEQ ID NO: 179803 - DNA, 75 bp, synthetic construct
  source 1..75: mol_type = other DNA
atatagaaaaatacaaaagtcaaatacaagaatatgctttatgctgtgataatccatcaaaaggtgtatatagaa

SEQ ID NO: 179804 - DNA, 75 bp, synthetic construct
  source 1..75: mol_type = other DNA
ttatgctttaaaaagtccggtattaaaaacagacatggcaagagataagcctttaaagttggccgctattgttca

SEQ ID NO: 179805 - DNA, 75 bp, synthetic construct
  source 1..75: mol_type = other DNA
cagcagcagtatcagcagccacaacagcaggttgcgccgcagccacaatatcagcagccgcaacaaccggttgcg

SEQ ID NO: 179806 - DNA, 75 bp, synthetic construct
  source 1..75: mol_type = other DNA
gctgattgtgatggacgtaatgtctccgggtcacccagtgcgcgacatctggttacagacggtagaagcattacg

SEQ ID NO: 179807 - DNA, 75 bp, synthetic construct
  source 1..75: mol_type = other DNA
atcaagatgaatgttaacgatttcaacggttttcatgttgatatcttacaagcccctacgcttccacaaacaaaa

SEQ ID NO: 179808 - DNA, 75 bp, synthetic construct
  source 1..75: mol_type = other DNA
ctgaaatacaatcggcaagagcacaaaaaacaagaagaacaaatttaaaaacaaaactagataaagtatgggaga

SEQ ID NO: 179809 - DNA, 75 bp, synthetic construct
  source 1..75: mol_type = other DNA
gtcagttaaaaacggctattgagcaaggggaactgaaacccggcgcaaggctgccttcaagtcgtacctggtcgc

SEQ ID NO: 179810 - DNA, 75 bp, synthetic construct
  source 1..75: mol_type = other DNA
ccggcgtgcccgttattgccagtgagaccggcgggatccctgatgtcattcagaataatgtgacagggacacttt

SEQ ID NO: 179811 - DNA, 75 bp, synthetic construct
  source 1..75: mol_type = other DNA
agagggaatgatgtcacttttattcctttcagaaacagtcttcaccttccttccatcctcagactgcgacagatt

SEQ ID NO: 179812 - DNA, 75 bp, synthetic construct
  source 1..75: mol_type = other DNA
tgcagatgataataacgcagatctcatcccatgcctgagtacagatcttctagtcagtcttggcataaaaaaatc

SEQ ID NO: 179813 - DNA, 75 bp, synthetic construct
  source 1..75: mol_type = other DNA
ggtttcgctcctgtgattcatggtattgcccgtggaaccgcacaagtgagtgtaaaacagaacggatacgatgtt

SEQ ID NO: 179814 - DNA, 75 bp, synthetic construct
  source 1..75: mol_type = other DNA
cgccacgttcgctttcatcacggctttaccaatattgaattttacgatcctgacaccgcagaaaatggcattctt

SEQ ID NO: 179815 - DNA, 75 bp, synthetic construct
  source 1..75: mol_type = other DNA
tttttcaacctccccatttctttctcacaactcttgatcgccttgctgaaacgagcattattgcaatgcaacgtg

SEQ ID NO: 179816 - DNA, 75 bp, synthetic construct
  source 1..75: mol_type = other DNA
actctttggataaagtaattgacaatcgtaatataacgctttcatataaaggtgaaacagaaaaggtacaatttg

SEQ ID NO: 179817 - DNA, 75 bp, synthetic construct
  source 1..75: mol_type = other DNA
ggaatcgatattacgtttattcctttcaggaatagtcttcatatcccttccatcctcaagttgagacgagtgatc

SEQ ID NO: 179818 - DNA, 75 bp, synthetic construct
  source 1..75: mol_type = other DNA
aatgtttttcctgccgcccccgtatatcgggttgccagtctggtggttctgccttcagaaaacgaatcttttggt

SEQ ID NO: 179819 - DNA, 75 bp, synthetic construct
  source 1..75: mol_type = other DNA
gcgggagcaccggtggagaaactcgataaggcgctgattgaccatcatattgcagagcttgattatcagatcagc

SEQ ID NO: 179820 - DNA, 75 bp, synthetic construct
  source 1..75: mol_type = other DNA
cgaatgtcgttttaatattaatacgattgtaaagaatataattaaattggcagagctaagggtaaaaaacacatc

SEQ ID NO: 179821 - DNA, 75 bp, synthetic construct
  source 1..75: mol_type = other DNA
cgactgcgcgataactcaacgtggagttataacagtgggagtagcaattcatctgacagcaataaatggcagtgg

SEQ ID NO: 179822 - DNA, 75 bp, synthetic construct
  source 1..75: mol_type = other DNA
tgtaaccggcccggaggaagcccaaaaagcgtttaaacaggtttcacctgatttcttcgatctgatcgtgattga

SEQ ID NO: 179823 - DNA, 75 bp, synthetic construct
  source 1..75: mol_type = other DNA
caaaaagcgtttaaacaagtcgcaccagatttcttcgatctgatcgtgatcgacgaatgccatcgcggcagcgca

SEQ ID NO: 179824 - DNA, 75 bp, synthetic construct
  source 1..75: mol_type = other DNA
gcgtaaaagcaccatcctgccgcgcgtggcgcagctggcagaaaaactgcatcagaaagcacaggccggtgagcg

SEQ ID NO: 179825 - DNA, 75 bp, synthetic construct
  source 1..75: mol_type = other DNA
gcaggctgggacaacacaacgcaaatcagacaggaggtcaaactccgggacggtaaagtcatcgtacgtggtaaa

SEQ ID NO: 179826 - DNA, 75 bp, synthetic construct
  source 1..75: mol_type = other DNA
ttaaaaccggatttggtgatcgtaacgggtataatcaggctctcagcgagctggaaaacgaaatctaccggttac

SEQ ID NO: 179827 - DNA, 75 bp, synthetic construct
  source 1..75: mol_type = other DNA
tctcaacgttccatcgcgatgtcgcgcgagggttatatcccattgattgggcgggagacgttacggatttgagtg

SEQ ID NO: 179828 - DNA, 75 bp, synthetic construct
  source 1..75: mol_type = other DNA
tttaagtatgcgcttgatgaactcaccaataaaaaacgcccggtgtgcaagaccgagcgttctgaacaaatcaag

SEQ ID NO: 179829 - DNA, 75 bp, synthetic construct
  source 1..75: mol_type = other DNA
tatcacagcgagaaattgatcgcgctgaaactgatttactcatcaacctgtcaacgcttacccagcgcggtctgg

SEQ ID NO: 179830 - DNA, 75 bp, synthetic construct
  source 1..75: mol_type = other DNA
tctcaacgttccatcgcgatgtcgagcgagggttatatcccatcgattgggcgggggacgtaaccataagcgcta

SEQ ID NO: 179831 - DNA, 75 bp, synthetic construct
  source 1..75: mol_type = other DNA
agtggacccagctcgacggccgatattgagcttatcaaggtggttggggtgcatggtccggtgaaggcggtatat

SEQ ID NO: 179832 - DNA, 75 bp, synthetic construct
  source 1..75: mol_type = other DNA
ggacattcattgatgccatgccagaatggacgttcaggttattccgtccagttctgctggcagcacgagatctcc

SEQ ID NO: 179833 - DNA, 75 bp, synthetic construct
  source 1..75: mol_type = other DNA
ttacgcctcctatatcgactcttcccaggcagaaaggctgtctactttcctggatggattggctggtagtggtat

SEQ ID NO: 179834 - DNA, 75 bp, synthetic construct
  source 1..75: mol_type = other DNA
attgaatctgccgttgggaccgttaatggcaacggtgggcggtaaaggcgtttacaccaacccgaacgacggcga

SEQ ID NO: 179835 - DNA, 75 bp, synthetic construct
  source 1..75: mol_type = other DNA
tttgaatctgcctctcgggccattaatggcgaccgttggtggtaaaggcgtttacactaacccgaacgatggtga

SEQ ID NO: 179836 - DNA, 75 bp, synthetic construct
  source 1..75: mol_type = other DNA
gcgagctgcgtaagttagcgcaggcgctggaaagtatgcgcgtgaagctggaagggaaaaactatattgagcagt

SEQ ID NO: 179837 - DNA, 75 bp, synthetic construct
  source 1..75: mol_type = other DNA
cgcataacgcgctggcgaaggggctgattgataaagatgaagccgctattctggtgaaagctgaagaaagccgtc

SEQ ID NO: 179838 - DNA, 75 bp, synthetic construct
  source 1..75: mol_type = other DNA
atggcgaccgttggcggaaaaggcgtttacaccaacccgaacgatggtgatgaaggttatgcagcggcagttggc

SEQ ID NO: 179839 - DNA, 75 bp, synthetic construct
  source 1..75: mol_type = other DNA
ttactactctccggattcgctctccagcggtattaaaagttatgaagaagcgaatgctggcgcgcgttacaccat

SEQ ID NO: 179840 - DNA, 75 bp, synthetic construct
  source 1..75: mol_type = other DNA
cagcgaagttgcccgtttgcttaatggtgaagtcacactgcgcaacgtgccgcaaggcggcgtgctggcctcgct

SEQ ID NO: 179841 - DNA, 75 bp, synthetic construct
  source 1..75: mol_type = other DNA
gcgagttgcgtaaactcgcgcaggcgctggaaagtatgcgcgtgaagctggaagggaaaaactatattgagcagt

SEQ ID NO: 179842 - DNA, 75 bp, synthetic construct
  source 1..75: mol_type = other DNA
ggcttattggcgttttgagcgtaggcaaaccgaacgcggcgatggctccggtcattaaacgcagcgagcggcgaa

SEQ ID NO: 179843 - DNA, 75 bp, synthetic construct
  source 1..75: mol_type = other DNA
acgcttaaggtgctggataccggtagtggtattcctgactacgccctgtcgcgtgtttttgagcgcttttactct

SEQ ID NO: 179844 - DNA, 75 bp, synthetic construct
  source 1..75: mol_type = other DNA
ttttatgggcgagtaccattttgctggggattgcgctggtgattggcgcgggaatggtttggtggatcaaccgct

SEQ ID NO: 179845 - DNA, 75 bp, synthetic construct
  source 1..75: mol_type = other DNA
ggcgcaggcgtttaaccagctacaaaatcgcccgtttcgcgccaatatcggcggcattaacaaagtgcgcaatga

SEQ ID NO: 179846 - DNA, 75 bp, synthetic construct
  source 1..75: mol_type = other DNA
accttacgcctatgcgtaagtcgatgatttccgcaccggtatttcgcggtttccgtaaggtgatgccgccgatgt

SEQ ID NO: 179847 - DNA, 75 bp, synthetic construct
  source 1..75: mol_type = other DNA
cgcagttaggcgatgaagtgaaaatcgagtacaaacatccgctgccgaagaaatttgacctggtgatcaccgcca

SEQ ID NO: 179848 - DNA, 75 bp, synthetic construct
  source 1..75: mol_type = other DNA
tgctggacgaagcatggaaaaaatttgaagaactgtctcgctccggccaacggttttcgctgtttactctgacgg

SEQ ID NO: 179849 - DNA, 75 bp, synthetic construct
  source 1..75: mol_type = other DNA
ctgaaaaattccggttatcagaactatttcgtgcagggagccaacctgcgttttgcgggtaaagatgtgttcctg

SEQ ID NO: 179850 - DNA, 75 bp, synthetic construct
  source 1..75: mol_type = other DNA
tgtcatcactaacggtaatcagctggcgattcaaaatgatttactccagagtttatcaaaagcgttaaaccaacc

SEQ ID NO: 179851 - DNA, 75 bp, synthetic construct
  source 1..75: mol_type = other DNA
ggtgaaatcgtagcggtgaacgacgcactgagcgactccccggaactggtaaacagcgagccatacactggcggc

SEQ ID NO: 179852 - DNA, 75 bp, synthetic construct
  source 1..75: mol_type = other DNA
atgattgccttctcgggtagccatttccgtttgccgctgctgttgcgggtttcagacaaacgcgtggaaccgctg

SEQ ID NO: 179853 - DNA, 75 bp, synthetic construct
  source 1..75: mol_type = other DNA
gggcagcttggcggtcagcaaattgttcagcatgttgacaaaacaatgtggaagggcaaaacggcatttaaagat

SEQ ID NO: 179854 - DNA, 75 bp, synthetic construct
  source 1..75: mol_type = other DNA
gaagatcttgagcttgctggtttggttgccagtgaggctatcaacaaatatcacggacaatatgcgagggttgaa

SEQ ID NO: 179855 - DNA, 75 bp, synthetic construct
  source 1..75: mol_type = other DNA
aaccggcgatgccactaaacgttattatcagcacctgaaccgcctgagtgccaacctcgccctgctttctgatgt

SEQ ID NO: 179856 - DNA, 75 bp, synthetic construct
  source 1..75: mol_type = other DNA
atggcccggtttagtgaggatcgcccgttgtcagaactactctctttcgccctttttctctcctctgtgctgatt

SEQ ID NO: 179857 - DNA, 75 bp, synthetic construct
  source 1..75: mol_type = other DNA
gatctcacgcctgaactgggcgcgttgaaaaatgaaggcctggatttcagccacacgcagcagctgccgggaacg

SEQ ID NO: 179858 - DNA, 75 bp, synthetic construct
  source 1..75: mol_type = other DNA
agagctttcccgttctggtcagcgattctcactgtttaccctgacagtcgatacccatcacccggatggttttat

SEQ ID NO: 179859 - DNA, 75 bp, synthetic construct
  source 1..75: mol_type = other DNA
gtgttgctgagatccgcttagggatgccctttaaatcggcaatacaagatgctggtgagcaaggcttctgttatc

SEQ ID NO: 179860 - DNA, 75 bp, synthetic construct
  source 1..75: mol_type = other DNA
ggggaagtgtttcacggtcacattgaaagcctttccccagcgacaggagccagtttcagcttgatattcaaattg

SEQ ID NO: 179861 - DNA, 75 bp, synthetic construct
  source 1..75: mol_type = other DNA
atatagtgctgagaaacaactaaccagggcactatctaaacttagtcgctccgcatatagtgataaattaaccgc

SEQ ID NO: 179862 - DNA, 75 bp, synthetic construct
  source 1..75: mol_type = other DNA
ttgcgagtactttctttacttcacgataactacagcgactttggaccaacgcttgccgcagaaaaattgcgcgaa

SEQ ID NO: 179863 - DNA, 75 bp, synthetic construct
  source 1..75: mol_type = other DNA
atgttggtgaccatgtcagataaagaaattcatcgcttgccagtgatacaggctgtttgtgaaaagcgcctacgc

SEQ ID NO: 179864 - DNA, 75 bp, synthetic construct
  source 1..75: mol_type = other DNA
ccacaaagagcaaaaattccaaggcgcgtcatcaatattaataaaccatgatgacgccagtcgtctgataaaaga

SEQ ID NO: 179865 - DNA, 75 bp, synthetic construct
  source 1..75: mol_type = other DNA
ttctgaccatcctggttgttaaacgtatattatcccttccgcttcgcctgcttattgccgtaccatttgtgttac

SEQ ID NO: 179866 - DNA, 75 bp, synthetic construct
  source 1..75: mol_type = other DNA
gctacacggcgcgggcattacttgaacgacgtgttacttccaactggtttgttggcacggcaattgatatccagc

SEQ ID NO: 179867 - DNA, 75 bp, synthetic construct
  source 1..75: mol_type = other DNA
tatcgggccgctgggttacaccgttaacgcccaccgtcggcccatctccagttctttgctggcctttggtgggca

SEQ ID NO: 179868 - DNA, 75 bp, synthetic construct
  source 1..75: mol_type = other DNA
caccattgcgtggcgtgggtggcgggtgcgccggatgattctcaacaactgggtttctctgacgacggggagccg

SEQ ID NO: 179869 - DNA, 75 bp, synthetic construct
  source 1..75: mol_type = other DNA
caccggtcacggtcgttgaagagatcaaaaagagccgcttcattacgctgttggcgcataccgatggcgttgagg

SEQ ID NO: 179870 - DNA, 75 bp, synthetic construct
  source 1..75: mol_type = other DNA
cgcgcacaagccagggttcaggagcaactcagggcaattaacccggttttggcaaatcccgaggagttcagggcc

SEQ ID NO: 179871 - DNA, 75 bp, synthetic construct
  source 1..75: mol_type = other DNA
cgttcagctttgtgatcttcttcgtgatggcggggttgtataaatctctgaaggtagaagattaccgccgtgaaa

SEQ ID NO: 179872 - DNA, 75 bp, synthetic construct
  source 1..75: mol_type = other DNA
tgccgagaatatctcgcaggcagagcaggctaaagtgggtgtcgtgtatgctgaatatggtttaaccgaatcggg

SEQ ID NO: 179873 - DNA, 75 bp, synthetic construct
  source 1..75: mol_type = other DNA
ggaaaaagctgcataactatccgcagccgcgcctgaccgctgaagagcaagcgtttctcgatggcccggtagaag

SEQ ID NO: 179874 - DNA, 75 bp, synthetic construct
  source 1..75: mol_type = other DNA
ttaacgttgctgctgaaccggcgttactggagcaggcgctggggaatttactggataacgccatcgattttaccc

SEQ ID NO: 179875 - DNA, 75 bp, synthetic construct
  source 1..75: mol_type = other DNA
ggcgcaggcgtttaatcagctacaacatcgcccgtttcgcgccaatatcggtggcattaacaaagtgcgcaatga

SEQ ID NO: 179876 - DNA, 75 bp, synthetic construct
  source 1..75: mol_type = other DNA
ttaagagcaaaaatctatgagaatgggcttaaaaatgtaaatgaaggtgatgttttatctgaaaaatataaagta

SEQ ID NO: 179877 - DNA, 75 bp, synthetic construct
  source 1..75: mol_type = other DNA
tcggattttacagcgtggtcgtgttctggctgaaggtacattcagtggtaaatgcacggaatgttattcacgaat

SEQ ID NO: 179878 - DNA, 75 bp, synthetic construct
  source 1..75: mol_type = other DNA
tctcaacgtttcaccgcgatgttgcgaaagggttatatcccatcgattgggcgggagacgtaacggattttagtg

SEQ ID NO: 179879 - DNA, 75 bp, synthetic construct
  source 1..75: mol_type = other DNA
aggttaatcgcggcctcctgttagagatagcagcagcgcacatgaatccattactgatacaaccggagtttactt

SEQ ID NO: 179880 - DNA, 75 bp, synthetic construct
  source 1..75: mol_type = other DNA
ctcgcgtgctgcaaaaactctctggggtgagcgggattctggcgattaccgtcggcgtgccaaactcattaggtc

SEQ ID NO: 179881 - DNA, 75 bp, synthetic construct
  source 1..75: mol_type = other DNA
cactgagcagaccgctgtgtgaggcacttgtagatctctactccatggcggaatttattccgggtcacgcctgtg

SEQ ID NO: 179882 - DNA, 75 bp, synthetic construct
  source 1..75: mol_type = other DNA
gatataaccgttgagtgtaatgccgggattgtatcggccacattgcttcatgggcgaattgggttgtcgctggag

SEQ ID NO: 179883 - DNA, 75 bp, synthetic construct
  source 1..75: mol_type = other DNA
atgattatcaataacgttaaactggtgctggaaaacgaagtagtacacggctcgctggagatgcaggatggcgaa

SEQ ID NO: 179884 - DNA, 75 bp, synthetic construct
  source 1..75: mol_type = other DNA
cgctgatgctgaaccggttccctccgcatgatgcttattccgcggccgttgacgctttaatgatgattcttgata

SEQ ID NO: 179885 - DNA, 75 bp, synthetic construct
  source 1..75: mol_type = other DNA
actacaaagcgggcgcggatgaagaggcgttaagctggctaaccgaacaaagtcagaaagatacccgctccggta

SEQ ID NO: 179886 - DNA, 75 bp, synthetic construct
  source 1..75: mol_type = other DNA
aagagatgttaaattaccaggagggaagtctattaatataggttctccttttagactttattatgtatttaggaa

SEQ ID NO: 179887 - DNA, 75 bp, synthetic construct
  source 1..75: mol_type = other DNA
ttgcaggaggtaattcacgatatggatgaagcatacaaaaagtcaggatgctcttcagaacaatacatgcaagtt

SEQ ID NO: 179888 - DNA, 75 bp, synthetic construct
  source 1..75: mol_type = other DNA
aagagcgttttgaccagttggttaagataatcaatagtggtcaacctcttgatatttggacctttcgagaggtgg

SEQ ID NO: 179889 - DNA, 75 bp, synthetic construct
  source 1..75: mol_type = other DNA
ggaaatgtgcggtatttatgccatgctatccgacagccatcagttttctcctgaattacaggaggctgtaagtca

SEQ ID NO: 179890 - DNA, 75 bp, synthetic construct
  source 1..75: mol_type = other DNA
aggatttaaccaataagcgagcaaaaccggccgtacacttcggcggtaagttccgcattatcgactttgcgctgt

SEQ ID NO: 179891 - DNA, 75 bp, synthetic construct
  source 1..75: mol_type = other DNA
tgaagaaatgaacgagtttgttgatttgctgcccgcacaacagagaatgaaaggggaaaactggtatcgcggtac

SEQ ID NO: 179892 - DNA, 75 bp, synthetic construct
  source 1..75: mol_type = other DNA
tctgccgaagaaaatggcactggagctgttcaaaccgtttatctacggcaagctggaactgcgtggtcttgctac

SEQ ID NO: 179893 - DNA, 75 bp, synthetic construct
  source 1..75: mol_type = other DNA
ataagcaggaatatgaaaattattttcataatagcgtcaaaattaatgaatctgtgtatagtgttaacttcataa

SEQ ID NO: 179894 - DNA, 75 bp, synthetic construct
  source 1..75: mol_type = other DNA
aatacgtggtgatcctggcgggcgaccatatctacaagcaagactactcgcgtatgcttatcgaccacgtcgaaa

SEQ ID NO: 179895 - DNA, 75 bp, synthetic construct
  source 1..75: mol_type = other DNA
tcgatcgtgcttgtgttattccggaaggcatggtgattggtgaaaacgcagaggaagatgcacgtcgtttctatc

SEQ ID NO: 179896 - DNA, 75 bp, synthetic construct
  source 1..75: mol_type = other DNA
aagggggagtatttcatcggtgatcgcatttacccagtcagaaaaggtgatttggttatttataacagcgaagta

SEQ ID NO: 179897 - DNA, 75 bp, synthetic construct
  source 1..75: mol_type = other DNA
gacctgtctacaccaatcggtgaagcaatgctgggtattatgtcaacactggcacagcttgaaagaagcttgata

SEQ ID NO: 179898 - DNA, 75 bp, synthetic construct
  source 1..75: mol_type = other DNA
aagatttgcaggtactggtagaaatcgtccacagcgggagttttagcgccgcagcggcgacgcttgggcagacgc

SEQ ID NO: 179899 - DNA, 75 bp, synthetic construct
  source 1..75: mol_type = other DNA
gggcgctggaaggaaaaggaattatgctgcgttctgagtgggatgttttaccgtttctggagagtggcaaactgg

SEQ ID NO: 179900 - DNA, 75 bp, synthetic construct
  source 1..75: mol_type = other DNA
gaagtggcaatcgagtgccagcgcctcggcgtagaggtgattgcggttgatcgctatgccgacgcgccagccatg

SEQ ID NO: 179901 - DNA, 75 bp, synthetic construct
  source 1..75: mol_type = other DNA
gtgccgtaccgcatgggaaaatatcatcgcgccgcagctggatgcccgtacgcgtccgtgtaatttccatccaca

SEQ ID NO: 179902 - DNA, 75 bp, synthetic construct
  source 1..75: mol_type = other DNA
caaggtaagacacggttgcagattcaggaagagttaggaatctctaaagcaacttattacagacttgctaaataa

SEQ ID NO: 179903 - DNA, 75 bp, synthetic construct
  source 1..75: mol_type = other DNA
agagtcatagtgttttgttagaattggcagagaatattgttgatgccgatttaagaagagttcctatcgataagt

SEQ ID NO: 179904 - DNA, 75 bp, synthetic construct
  source 1..75: mol_type = other DNA
ggatcaaatgttggttagtcaactacagatctcaaatttatttcatgaggatttagataggcctgaaaaacaaaa

SEQ ID NO: 179905 - DNA, 75 bp, synthetic construct
  source 1..75: mol_type = other DNA
gttgaaaatggtagccctataagagtggtgccgttcgctataaataaaaatagtaaaattccaagtgtcagtcgc

SEQ ID NO: 179906 - DNA, 75 bp, synthetic construct
  source 1..75: mol_type = other DNA
tctggcaagcgaagtgcggtgatatctcgggcgctgatgccaaagagaaaatatctgcgggttatttccgtgtta

SEQ ID NO: 179907 - DNA, 75 bp, synthetic construct
  source 1..75: mol_type = other DNA
tctccagcgatttgttcttctttcttgcaaggaaaaccaacgtcgctgccgtttgagaaaaccgagtgcggtatg

SEQ ID NO: 179908 - DNA, 75 bp, synthetic construct
  source 1..75: mol_type = other DNA
gcgccgattcgtccaaaacgcgttacccgcagtggtgagtcgccttctgatgcgctgttacgtggcggcattgaa

SEQ ID NO: 179909 - DNA, 75 bp, synthetic construct
  source 1..75: mol_type = other DNA
cacggtgacgaaaaacagagacgcattgctcagggaggcaacacgaattgaccagacaagcgccattttcgaacg

SEQ ID NO: 179910 - DNA, 75 bp, synthetic construct
  source 1..75: mol_type = other DNA
taacacatctcgacatgtcaagttccgttatccagcgggccatgccaatgctgaaaagtctgcgggcaagacaat

SEQ ID NO: 179911 - DNA, 75 bp, synthetic construct
  source 1..75: mol_type = other DNA
gcaacattcagccagtacaaactgagcagcaattcacagccgaagaaatcatcctcctttgctacatgcagctct

SEQ ID NO: 179912 - DNA, 75 bp, synthetic construct
  source 1..75: mol_type = other DNA
cgcgcgacgcctgacgctattccggcctggccgctgggcggcgtgatcggctgcgtggtcttaacttttgttctg

SEQ ID NO: 179913 - DNA, 75 bp, synthetic construct
  source 1..75: mol_type = other DNA
cgtttgctgacccggaaaacgaagcggcgcttatcaaggcgctcgcggcggccatgcgtggccggacggtcatca

SEQ ID NO: 179914 - DNA, 75 bp, synthetic construct
  source 1..75: mol_type = other DNA
cattatatgatcaggaagcattgactgaacttatcctgcgtaacgctctccaccccctcagccgtgacccctttg

SEQ ID NO: 179915 - DNA, 75 bp, synthetic construct
  source 1..75: mol_type = other DNA
gcgagcgttacggcgaagataccggtcatttcggcatgattgacgccattgatgatccgcaggtttttgccgcgt

SEQ ID NO: 179916 - DNA, 75 bp, synthetic construct
  source 1..75: mol_type = other DNA
gtgaccattcgctgcatcaatcgtcagcggtttgccgaagaaatgcagatcctgcgtgagattttcaactctggc

SEQ ID NO: 179917 - DNA, 75 bp, synthetic construct
  source 1..75: mol_type = other DNA
acgagtatcagttcagccgcatcggcccggtgattgcgttgttattgattgaagccttacgcgatccgtttgccc

SEQ ID NO: 179918 - DNA, 75 bp, synthetic construct
  source 1..75: mol_type = other DNA
tacgcgatccgtttgcccgccggaagatcgattgcgctggagatgtcatggatcctcgaaaccaatacaggcatg

SEQ ID NO: 179919 - DNA, 75 bp, synthetic construct
  source 1..75: mol_type = other DNA
tctggcaggcgtgggtagcaaaaaaagcggggcagatagtcgggcggattaccgcgcaaatcgataccttgcacc

SEQ ID NO: 179920 - DNA, 75 bp, synthetic construct
  source 1..75: mol_type = other DNA
gcaccttccttaataaaaatgaccttaaggcatttatcgcttttccgtcatcactttatcccgacgatccaaact

SEQ ID NO: 179921 - DNA, 75 bp, synthetic construct
  source 1..75: mol_type = other DNA
gttattgagttcgtgcaggccatgcccgtggtgagaacgtttgatagcggcagcaccagttttttgcgctatcaa

SEQ ID NO: 179922 - DNA, 75 bp, synthetic construct
  source 1..75: mol_type = other DNA
actgacggcaaggaaacagcaggcagaacagaacaaggcagcagcagaaaaagcaaaggcagatgcagcggcgaa

SEQ ID NO: 179923 - DNA, 75 bp, synthetic construct
  source 1..75: mol_type = other DNA
aaaaagatattcaaaaatcactcttatcaccgtattcgtgatgcccagagggaatatgatgatgcccgaaataaa

SEQ ID NO: 179924 - DNA, 75 bp, synthetic construct
  source 1..75: mol_type = other DNA
actgactgcaaggaaacagcaggcagaaaagaacaaggcggcagcagaaaaagcaaaagctgatgcaaaggcgaa

SEQ ID NO: 179925 - DNA, 75 bp, synthetic construct
  source 1..75: mol_type = other DNA
ttgtacgctttactgacatgatcgacggccagaccattacgcgtcagaccgacgaattgaccggtctgtcttcgc

SEQ ID NO: 179926 - DNA, 75 bp, synthetic construct
  source 1..75: mol_type = other DNA
cctgccgtttgctgtgcgacgaatcaacactacaacagtggcgctatccgccttccgcatcacctaccgctttgg

SEQ ID NO: 179927 - DNA, 75 bp, synthetic construct
  source 1..75: mol_type = other DNA
tccggctgactccgttgagcgtcagatggtacaacggttgattaacgcctgtccggcaggtcttttttcgctcac

SEQ ID NO: 179928 - DNA, 75 bp, synthetic construct
  source 1..75: mol_type = other DNA
gtgcgggagtgtcaagcactgggtcaccttaaacctggccaacgatctgggcctcccctggtgcgtatttctgga

SEQ ID NO: 179929 - DNA, 75 bp, synthetic construct
  source 1..75: mol_type = other DNA
gaccacactcgcctctgaacatcttctcaataaagacggtaatttcgagatcgtaaaatcctttaaagccacaac

SEQ ID NO: 179930 - DNA, 75 bp, synthetic construct
  source 1..75: mol_type = other DNA
gcgcaggcaaaacttgaaaaacacacgcagcgttataacgccaggatgaaagagacagaagatgctcgttgcaac

SEQ ID NO: 179931 - DNA, 75 bp, synthetic construct
  source 1..75: mol_type = other DNA
atgccggggtttaattacggtgggtatggtgacggtactggctggagttctgaaagtggtggtccagctccaggc

SEQ ID NO: 179932 - DNA, 75 bp, synthetic construct
  source 1..75: mol_type = other DNA
accttccattcagattgtattgatgcttctgttgccgtttattgtttatctggttgcggaacattttggcttatc

SEQ ID NO: 179933 - DNA, 75 bp, synthetic construct
  source 1..75: mol_type = other DNA
agaaagaagtcgaggaggccgggaggatgttttttgccacgcgtaagcgcgagatagagaattatctttgcccgg

SEQ ID NO: 179934 - DNA, 75 bp, synthetic construct
  source 1..75: mol_type = other DNA
ggctacccgcacaattgttgaccgcttcggggtgcatgacaaacctgaagaagtggaaaaattaatgggcggcca

SEQ ID NO: 179935 - DNA, 75 bp, synthetic construct
  source 1..75: mol_type = other DNA
gagcacgtagtcattgacgtctcacatgcccatttctgggatattacgtcggtcagcgcactcgacagggtggtt

SEQ ID NO: 179936 - DNA, 75 bp, synthetic construct
  source 1..75: mol_type = other DNA
gggtgacatgggcaagctgccggacagcctgccggtgtttctgatccctgatattccgcttaacctcgacacgct

SEQ ID NO: 179937 - DNA, 75 bp, synthetic construct
  source 1..75: mol_type = other DNA
actggctgggtaacgtccgtggtgacgttctggccggtattgttgtcgcgctcgcactcattccagaagcgatcg

SEQ ID NO: 179938 - DNA, 75 bp, synthetic construct
  source 1..75: mol_type = other DNA
ttttgtatcccgctgataatcgccatctgtggtggtcgtccagggatgatatcttcgtcaaccggtgctatggca

SEQ ID NO: 179939 - DNA, 75 bp, synthetic construct
  source 1..75: mol_type = other DNA
ttctgtattcccctggttatggccttcctcggcggccgtccggcaatgatatcgtccgccaccggtgcgatggcg

SEQ ID NO: 179940 - DNA, 75 bp, synthetic construct
  source 1..75: mol_type = other DNA
accttgcccggcgcggtggcattttcgatgctggagaatctggcggtggtgctgattgcgcccgcgctgccctgc

SEQ ID NO: 179941 - DNA, 75 bp, synthetic construct
  source 1..75: mol_type = other DNA
attacatatcttctgctcggtgaccgctgcctacagccatctgccaccgattctcgaccgcttccgcgcggaaca

SEQ ID NO: 179942 - DNA, 75 bp, synthetic construct
  source 1..75: mol_type = other DNA
ttcgcggtagcggcgcggtgtttgatccggacgacgaagcggtgcgcggcgacaacggacaggccgcccgcctga

SEQ ID NO: 179943 - DNA, 75 bp, synthetic construct
  source 1..75: mol_type = other DNA
gtgtgtgcgcaaaaaaagcggctgcatgagccgctgattgaggcgttctggaggattttgccgaaccacaaatga

SEQ ID NO: 179944 - DNA, 75 bp, synthetic construct
  source 1..75: mol_type = other DNA
catgaagcgatggtatcaatggtggcgcttggctgtggcgtggcgctgctgccagaagtggtgctggataatagc

SEQ ID NO: 179945 - DNA, 75 bp, synthetic construct
  source 1..75: mol_type = other DNA
tgattcttgatcgcagcgatgagaaaacaccgtttgaactgggcgtttgcgcacaaaaaaagcggctacatgagc

SEQ ID NO: 179946 - DNA, 75 bp, synthetic construct
  source 1..75: mol_type = other DNA
agttctggaggggacgagccggacgtataccgtcaccggccaggtattctttgcatcagcagaccgctttacgag

SEQ ID NO: 179947 - DNA, 75 bp, synthetic construct
  source 1..75: mol_type = other DNA
atcaaacccatcttccggttattctgctgggctttgatggttcgccagtctatgacgatgccgccgtactcaacc

SEQ ID NO: 179948 - DNA, 75 bp, synthetic construct
  source 1..75: mol_type = other DNA
gcaagaacaacaggtgtttgaaatggcttgccgtgcttttgagtttattcgcggttctgatgtgatggaggccgt

SEQ ID NO: 179949 - DNA, 75 bp, synthetic construct
  source 1..75: mol_type = other DNA
atgatgacggtaaaacggatgtttatgcttttattcagaacagtgattgtctggccggccatgctgacgggatgc

SEQ ID NO: 179950 - DNA, 75 bp, synthetic construct
  source 1..75: mol_type = other DNA
ctactggctggcctgctggatcggcaatatcgccatggtggtcattggcgtcggctatttgagctatttcttccc

SEQ ID NO: 179951 - DNA, 75 bp, synthetic construct
  source 1..75: mol_type = other DNA
aagtgggcttaatccccgtcactctgatggtatcggggaatattatggggtcaggtgtctttctgttacctgcaa

SEQ ID NO: 179952 - DNA, 75 bp, synthetic construct
  source 1..75: mol_type = other DNA
ctactggctggcctgctggatcggcaatattgctatggtggtcattggcgtcggctacctgagctatttcttccc

SEQ ID NO: 179953 - DNA, 75 bp, synthetic construct
  source 1..75: mol_type = other DNA
ttttcacgctgccgctgaacggtggcgcagttgagacagcgccggacgatctgcgtctgctggccgctgtggggg

SEQ ID NO: 179954 - DNA, 75 bp, synthetic construct
  source 1..75: mol_type = other DNA
ggcctgggtctgcgtcgtattggtcacaccatagagcgcgaggatactcctgctattcgcggtatgatcaacgcg

SEQ ID NO: 179955 - DNA, 75 bp, synthetic construct
  source 1..75: mol_type = other DNA
tggaagatggcgtacagatcagctccggtgacaccctggcgcgtattccgcaagaatctggcggtaccaaggaca

SEQ ID NO: 179956 - DNA, 75 bp, synthetic construct
  source 1..75: mol_type = other DNA
acaaccggggagtggcgtgcactgtccaccactgatgcagaatgcctccggtcaccgcgctctttcaggcaggct

SEQ ID NO: 179957 - DNA, 75 bp, synthetic construct
  source 1..75: mol_type = other DNA
atgatgctgtatttcgttgaggtcgccagcggtggtgtgacagggctggcgcagcgttacgaggtggagtcagca

SEQ ID NO: 179958 - DNA, 75 bp, synthetic construct
  source 1..75: mol_type = other DNA
ctggccatccgtgctgacgggatgcctgatgatgctgtatttcgttgaggttgccagcggaggtgtgacggggct

SEQ ID NO: 179959 - DNA, 75 bp, synthetic construct
  source 1..75: mol_type = other DNA
cttgtccatcttcctgatattggtatcaaaggcaattctcatttcctgatggcggaaaagaataatcaggagatt

SEQ ID NO: 179960 - DNA, 75 bp, synthetic construct
  source 1..75: mol_type = other DNA
aagaaaattcggcatgacaagtgttgaagaaattgatgaagaatgtaattttgaagaagaaattgatggagacgc

SEQ ID NO: 179961 - DNA, 75 bp, synthetic construct
  source 1..75: mol_type = other DNA
tgacgacgcggatatggtgatcgtcaacacttgcggctttattgacagtgcggtgcaagaatcactggaagccat

SEQ ID NO: 179962 - DNA, 75 bp, synthetic construct
  source 1..75: mol_type = other DNA
ttgctgctgacgctgctggacatcccgtttgcggtgtcgccggtggtggcgggcctggtttatctgctgttctac

SEQ ID NO: 179963 - DNA, 75 bp, synthetic construct
  source 1..75: mol_type = other DNA
atggcggaagttacccaattgaagcgttatggcgcgcgcccgattaactggggcaagtggtttctgattggtatc

SEQ ID NO: 179964 - DNA, 75 bp, synthetic construct
  source 1..75: mol_type = other DNA
cgtttgccgtatcgccggtggttgccggtctggtgtatctgctgttctacggctctaacggcccgctgggcggct

SEQ ID NO: 179965 - DNA, 75 bp, synthetic construct
  source 1..75: mol_type = other DNA
aggtaaagaacccgaatccggtgtttacaccccgtgaaggtgcaggaacgctgaagttctgcgaaaaactgatgg

SEQ ID NO: 179966 - DNA, 75 bp, synthetic construct
  source 1..75: mol_type = other DNA
tatcagccagcggacgggcacggcattttcagataatgcggccctgtttgcccgctcggcagcctcaatgcgtga

SEQ ID NO: 179967 - DNA, 75 bp, synthetic construct
  source 1..75: mol_type = other DNA
atggcagccgtcgtctgggggtggcactggctactgcagagagtgttgatgaagcgattgagcgcgcaaagcacg

SEQ ID NO: 179968 - DNA, 75 bp, synthetic construct
  source 1..75: mol_type = other DNA
atgaaaaaaattatcgcattgatgttgtttttgacattctttgcccacgcaaacgactccgaacccggcagccag

SEQ ID NO: 179969 - DNA, 75 bp, synthetic construct
  source 1..75: mol_type = other DNA
tggactatccacaagcaaaagtgcttgccgaaaaagcggcgcaagcgggcagtaaagaaggtgaagtgacgctgg

SEQ ID NO: 179970 - DNA, 75 bp, synthetic construct
  source 1..75: mol_type = other DNA
atgttccggtgggagtatgggtaatcgatcaagctcttctcgaccgcctcgataacggacaagaatgttggccaa

SEQ ID NO: 179971 - DNA, 75 bp, synthetic construct
  source 1..75: mol_type = other DNA
cgtgcaggcattcagcaaagggctgatgccggttttacagaatctggctgatccggacatgctacatgccatctg

SEQ ID NO: 179972 - DNA, 75 bp, synthetic construct
  source 1..75: mol_type = other DNA
gttggcagcgacatttaccagtctgttgagaaggtcttcggcttttgcgaacaggacaacctcgaagagtttcgc

SEQ ID NO: 179973 - DNA, 75 bp, synthetic construct
  source 1..75: mol_type = other DNA
cctaagcaggaggagtggatccactggattatggaacgctggagcaatcgggagaatggtattaccgaaaaatcc

SEQ ID NO: 179974 - DNA, 75 bp, synthetic construct
  source 1..75: mol_type = other DNA
ggagaatggtattaccgataaatcccgtgaaatggggctcagttggaccgcgatcggactggcctgctcgctttg

SEQ ID NO: 179975 - DNA, 75 bp, synthetic construct
  source 1..75: mol_type = other DNA
acgcctgggcgcgatggacgtcgccgacgaaggccgggacaaaaacgccttttcgacccgtcacggcttcctcct

SEQ ID NO: 179976 - DNA, 75 bp, synthetic construct
  source 1..75: mol_type = other DNA
attgacctgagctcggttaatggcatggcgaacccgttcgcgcagaagcgccacggcgggaagataccggtattc

SEQ ID NO: 179977 - DNA, 75 bp, synthetic construct
  source 1..75: mol_type = other DNA
atgccgttaccattccccttcgattttaaacatcctgattaccagatggtttttgaatggcggatggaacgccta

SEQ ID NO: 179978 - DNA, 75 bp, synthetic construct
  source 1..75: mol_type = other DNA
tccgcaaaccggactataccgccgtgtttgagtggagaatggagaggctggagcggatcaggaaagcgcctgaaa

SEQ ID NO: 179979 - DNA, 75 bp, synthetic construct
  source 1..75: mol_type = other DNA
tcagggagttcctgaaacgcacaccaagagatcgcataacgctcggcacttttagtgatgtgaaggagtggttgt

SEQ ID NO: 179980 - DNA, 75 bp, synthetic construct
  source 1..75: mol_type = other DNA
ggctcgattcgcggcgaaaccctgtcgctgccgttacagattgaattgctggagcaggactataacgcagtcggc

SEQ ID NO: 179981 - DNA, 75 bp, synthetic construct
  source 1..75: mol_type = other DNA
ggagaatggtattaccgaaaaatcccgtgaaatggggctcagttggaccgcgatcggactggcatgttcgctttg

SEQ ID NO: 179982 - DNA, 75 bp, synthetic construct
  source 1..75: mol_type = other DNA
gtgctgactggcccgaaagaagcagaacgtctgtatcgctctggtctggcttctctgcatgcgcgcgttaaagtg

SEQ ID NO: 179983 - DNA, 75 bp, synthetic construct
  source 1..75: mol_type = other DNA
gtgcgcgtggcgatgctcgcgtgataaacgagctcaggcaggctgaaggccggggaacaatcacagctacgcctt

SEQ ID NO: 179984 - DNA, 75 bp, synthetic construct
  source 1..75: mol_type = other DNA
gctataccccgtcatgagagaactgaattctgattactacgggaaactgtttgatctggcctacgagactcgtca

SEQ ID NO: 179985 - DNA, 75 bp, synthetic construct
  source 1..75: mol_type = other DNA
atctggctgcgccggacatcatcgtacgtaacgaaaaacgtatgctgcaggaagcggtagatgccctgctggata

SEQ ID NO: 179986 - DNA, 75 bp, synthetic construct
  source 1..75: mol_type = other DNA
ggcctgctgccgaccgttcttgatgttgttgagaacccaaaaaatctgaaaattgttgaactggaagcaccgcag

SEQ ID NO: 179987 - DNA, 75 bp, synthetic construct
  source 1..75: mol_type = other DNA
tggacgttgagctggtaaccttcaacgactatgttctgccaaacgaagcattgagcaaaggcgatatcgacgcca

SEQ ID NO: 179988 - DNA, 75 bp, synthetic construct
  source 1..75: mol_type = other DNA
aatcagttaccgtctcttatacgcaaacagatcgctacgggcgagtcctgggacgagtggtgacagcgaacggca

SEQ ID NO: 179989 - DNA, 75 bp, synthetic construct
  source 1..75: mol_type = other DNA
tgacaggtacaacaccgataactcattaccggctctgcaacgggaagcacagacacagaagcgcggcctgtgggc

SEQ ID NO: 179990 - DNA, 75 bp, synthetic construct
  source 1..75: mol_type = other DNA
tatttattttttcatggccggtattgtctgcagatattcatggatgggttgttcgtgtactggacggtgatacca

SEQ ID NO: 179991 - DNA, 75 bp, synthetic construct
  source 1..75: mol_type = other DNA
tctggacgagttgactcctgatgatatcgagaccgatgcgccgctgttcggcgacggtttagggctggattccat

SEQ ID NO: 179992 - DNA, 75 bp, synthetic construct
  source 1..75: mol_type = other DNA
catctccgaactggaaatttctgaaggtgaagagtcagtacgcattagccgtgcagctcctgccgcaagtttccc

SEQ ID NO: 179993 - DNA, 75 bp, synthetic construct
  source 1..75: mol_type = other DNA
ttatgaactggccaaacagtttgctgactatcttggcgttaaactgaaagtcaccgtgcggcagaacatcagcca

SEQ ID NO: 179994 - DNA, 75 bp, synthetic construct
  source 1..75: mol_type = other DNA
ggcggcttctctggatgagcttaaccgggcgatcaatgatgcggagtcggtactggggacaacccggcgtcgccg

SEQ ID NO: 179995 - DNA, 75 bp, synthetic construct
  source 1..75: mol_type = other DNA
agagtacgagaagatcgaaggctgtgacgacggtgtgatcatgcatctgaagtcgggtaaaaaactgaaagctga

SEQ ID NO: 179996 - DNA, 75 bp, synthetic construct
  source 1..75: mol_type = other DNA
gttaagcaaggtgcgcgcgtcgcagttatcgagcgttatcaaaatgttggcggcggttgcacccactggggcacc

SEQ ID NO: 179997 - DNA, 75 bp, synthetic construct
  source 1..75: mol_type = other DNA
atgaaattgacaaaatacgttttcttttttgtcaccattttttccggtgcgttgtgtgcggctgaaatccagggg

SEQ ID NO: 179998 - DNA, 75 bp, synthetic construct
  source 1..75: mol_type = other DNA
ttttgtctggtggagagaaacaaagattagcactagcaagagcaataattaaagaaccagaaattcttctcgccg

SEQ ID NO: 179999 - DNA, 75 bp, synthetic construct
  source 1..75: mol_type = other DNA
atcggtcatgtgttcacgacgaacggcacggatgccagccgctttatggttcagtctggcgctgcatgggtatat

SEQ ID NO: 180000 - DNA, 75 bp, synthetic construct
  source 1..75: mol_type = other DNA
ggacgagtggtgacagcgaacggcactgaggctaaccgccagcaagtgctaaaaggggctgcatgggtttatgac

SEQ ID NO: 180001 - DNA, 75 bp, synthetic construct
  source 1..75: mol_type = other DNA
aaaaattcgctgcgcaccgctcgcgcaacaatcagatcctgctggcggcgctggcgcagatccagccgcaggttg

SEQ ID NO: 180002 - DNA, 75 bp, synthetic construct
  source 1..75: mol_type = other DNA
cgcgcgcaggctggttgcaggggcatccgcaggcggtcctggctggcgtggatggcgagcttccgcttatccccg

SEQ ID NO: 180003 - DNA, 75 bp, synthetic construct
  source 1..75: mol_type = other DNA
atattaaaagattttagtatttctggtggtattgtcgtcatggttacgcatgaccttgagctcatatcccctaac

SEQ ID NO: 180004 - DNA, 75 bp, synthetic construct
  source 1..75: mol_type = other DNA
ctttgcaacgggaagcgcaggaacaaaaacgcggtttatgggctgatacaaatccggttccgccgtgggaatggc

SEQ ID NO: 180005 - DNA, 75 bp, synthetic construct
  source 1..75: mol_type = other DNA
ccgttaccgtctcttatacgcaaacagatcgctacggccgcattgtcggtcgcgtgttcacgacgaacggcacgg

SEQ ID NO: 180006 - DNA, 75 bp, synthetic construct
  source 1..75: mol_type = other DNA
gttgtgtgcggctgaaatccaggggaaagttattcgcgttctcgatggcgacaccatagaagttaaaacactacc

SEQ ID NO: 180007 - DNA, 75 bp, synthetic construct
  source 1..75: mol_type = other DNA
tggaaaaacagatgaccgctcgcggttatatggttggcccgaatggcccggttaatctgcaaatcatcgttagcc

SEQ ID NO: 180008 - DNA, 75 bp, synthetic construct
  source 1..75: mol_type = other DNA
ctccaacaaaaatatcgccgatgcggttaacagtgtgctgaccgataccatcgctgatatgtctcaggacaccag

SEQ ID NO: 180009 - DNA, 75 bp, synthetic construct
  source 1..75: mol_type = other DNA
acagaccgctacggacgcattatcggtcgtgtgttcacgacgaacggcacggatgccagccgctttatggttcag

SEQ ID NO: 180010 - DNA, 75 bp, synthetic construct
  source 1..75: mol_type = other DNA
tggtggaaatatatgactgacgttatgcccgctaatccgaataacagcccgatcagtagcgagctacaagaagtg

SEQ ID NO: 180011 - DNA, 75 bp, synthetic construct
  source 1..75: mol_type = other DNA
tggtggaaatatatgaccgacgttatgcccgctaacccggataacagcccggtgagtagcgaactgcaagaagtg

SEQ ID NO: 180012 - DNA, 75 bp, synthetic construct
  source 1..75: mol_type = other DNA
atgtggctaattctggcacgctaactttccctcaaaatgctactcctgatgactggaaagcgagcctgaaagtta

SEQ ID NO: 180013 - DNA, 75 bp, synthetic construct
  source 1..75: mol_type = other DNA
aaagagccggcaatcttggctgaaatcagcggtatcgtttccttcggtaaagaaaccaaaggtaaacgtcgtctg

SEQ ID NO: 180014 - DNA, 75 bp, synthetic construct
  source 1..75: mol_type = other DNA
cataatcctgtttaaccctgacacagttgaagcatacgcaaaacgtgcggaaatatcacctaaaccactattctc

SEQ ID NO: 180015 - DNA, 75 bp, synthetic construct
  source 1..75: mol_type = other DNA
tggtggaaatatatgaccgatgttatgcccgctaaggaaggtgcgaataagtcaccaaacgcaaaaaaacgccta

SEQ ID NO: 180016 - DNA, 75 bp, synthetic construct
  source 1..75: mol_type = other DNA
aacccgtacccgcgcgacttccgctcgccgcgaaaacggtctgtggattgtggaagcagaagatatcgatactgg

SEQ ID NO: 180017 - DNA, 75 bp, synthetic construct
  source 1..75: mol_type = other DNA
cgtctgcgccgccgttacccattcctgaccgaatcgctggcacgtcattacgcacgcacttacggcagcaacagc

SEQ ID NO: 180018 - DNA, 75 bp, synthetic construct
  source 1..75: mol_type = other DNA
ttgaagagagtgaaatcaattacctgctgaaagtgtataacgcgcactttaaaaagcagttaagccgtgacgata

SEQ ID NO: 180019 - DNA, 75 bp, synthetic construct
  source 1..75: mol_type = other DNA
aatgaaagtgcagattcaatcaacttgaaacttgcagacgctgttcattccggttctgacaatgtatggaataat

SEQ ID NO: 180020 - DNA, 75 bp, synthetic construct
  source 1..75: mol_type = other DNA
gaactgctgctcggcaatgcggagacgataaacgatctcggggaagatttcggtcatgagttttacgaagcggag

SEQ ID NO: 180021 - DNA, 75 bp, synthetic construct
  source 1..75: mol_type = other DNA
cggcaaagcaccgctgctgtcggtatttggcggcaagctgacgacctatcgtaaactggcggaacatgcgctgga

SEQ ID NO: 180022 - DNA, 75 bp, synthetic construct
  source 1..75: mol_type = other DNA
cactgcgtcaggcacgccttgatttattaaccggtaaacgggtggtgtcggtacagaaagatggtcgaagaattg

SEQ ID NO: 180023 - DNA, 75 bp, synthetic construct
  source 1..75: mol_type = other DNA
aatttgattttaaaaataaatgatagatttcccagaataattataaagaaataccgaacattacaaggtaaagtc

SEQ ID NO: 180024 - DNA, 75 bp, synthetic construct
  source 1..75: mol_type = other DNA
aggcatcgccatactatgaatattgtgtttgtcgtgattcaatttttatttataacctctacccggagcaaattc

SEQ ID NO: 180025 - DNA, 75 bp, synthetic construct
  source 1..75: mol_type = other DNA
tatcagtatcgccagtgggatgcagaatatgatgaatggggagaatgggaagattgcggggaatatgctttcgaa

SEQ ID NO: 180026 - DNA, 75 bp, synthetic construct
  source 1..75: mol_type = other DNA
cgcatttggtttgcgctcgcagcctacaatatgggctacgcacacatgctggatgcccgtgcgctaacggcaaaa

SEQ ID NO: 180027 - DNA, 75 bp, synthetic construct
  source 1..75: mol_type = other DNA
tttattcatttgcgaactatgtttgctggtgttttttttgttattgccggtctcattgctatatcaatttcagat

SEQ ID NO: 180028 - DNA, 75 bp, synthetic construct
  source 1..75: mol_type = other DNA
aagcagctgttgcgggcaaacgcgatgaactgcgcggtctgaaagagaacgttatcgtaggtcgtctgatcccgg

SEQ ID NO: 180029 - DNA, 75 bp, synthetic construct
  source 1..75: mol_type = other DNA
cgcactacacatcggcgaatggcagggagaacccgtttggttagtacaacagcagcgtcgtcacgatatgggatc

SEQ ID NO: 180030 - DNA, 75 bp, synthetic construct
  source 1..75: mol_type = other DNA
ctcccgccgcccggcaccgtagcgcgccgtctgatagaagatacggtggcgatgtgtcgggcagagtacgagtga

SEQ ID NO: 180031 - DNA, 75 bp, synthetic construct
  source 1..75: mol_type = other DNA
ccgatcgcataaatactgtggttactgcgggcatgaaatgtatccgagcaaaaccgaatgggcgatgctgtgcag

SEQ ID NO: 180032 - DNA, 75 bp, synthetic construct
  source 1..75: mol_type = other DNA
atgtaccgtaatgaagaaacgctggagccggtaccgtacttccagaaactggtttctaacatcgatgagcgtatg

SEQ ID NO: 180033 - DNA, 75 bp, synthetic construct
  source 1..75: mol_type = other DNA
gatgcgtgagcaagatatcagcaccaagcgctttcgcgaactcgcttccgaagtgggtagcctgctgacttacga

SEQ ID NO: 180034 - DNA, 75 bp, synthetic construct
  source 1..75: mol_type = other DNA
acttgcccagcatacccggcatcgtaacggtgtccatacggtactcgccggatttgtcgaagtcggagaaaccct

SEQ ID NO: 180035 - DNA, 75 bp, synthetic construct
  source 1..75: mol_type = other DNA
gcgtgctggaagaaatgagcgttggtcgtgaaaagctgtttatcaacaccaggttggtgcaagaaatgaatcaat

SEQ ID NO: 180036 - DNA, 75 bp, synthetic construct
  source 1..75: mol_type = other DNA
ctctatgcgcaaccgtattgccggatcgataaccttgttgaacgaggtatcgctaaacgccagacggcatcagcg

SEQ ID NO: 180037 - DNA, 75 bp, synthetic construct
  source 1..75: mol_type = other DNA
ccggcgacagtccttttgcagcgaatgcgttgggtaaactggcggcgcagaaatgctggcagcttacgcgagtta

SEQ ID NO: 180038 - DNA, 75 bp, synthetic construct
  source 1..75: mol_type = other DNA
acttaatgttggcgcgccagctgccattgaaatctgttgccctgatactggcgggaggacgtggtacccgcctga

SEQ ID NO: 180039 - DNA, 75 bp, synthetic construct
  source 1..75: mol_type = other DNA
tcgacttaatcagcaagtttcagagctaggtgagcttgtgaaaaaaggaagagctggaaaacgtgaccttgaaga

SEQ ID NO: 180040 - DNA, 75 bp, synthetic construct
  source 1..75: mol_type = other DNA
ttcagaactggaacatagagactatattgaaataggcgtttacgaggctgaactgtccttagacaatgaacgaac

SEQ ID NO: 180041 - DNA, 75 bp, synthetic construct
  source 1..75: mol_type = other DNA
gaaggtaagcgggcatctttcctccaatagcggcgagatagtgttgcaatgggcgctggagggcaaagggattat

SEQ ID NO: 180042 - DNA, 75 bp, synthetic construct
  source 1..75: mol_type = other DNA
tattcgtaaagagatgctcgatattccagaaatgcgtgacgccctccactttgttcttgagttaacagatatcta

SEQ ID NO: 180043 - DNA, 75 bp, synthetic construct
  source 1..75: mol_type = other DNA
tagatctgttcgcgcacgagcgtcgaccgggacgaccgaaaactaatccgctttcgcgcgatgaacagctgcgta

SEQ ID NO: 180044 - DNA, 75 bp, synthetic construct
  source 1..75: mol_type = other DNA
ccggcgacagtcctttcgcagcgaatgcgttgggtaaactggcagcacaggaaatgctggcagcttacgtgggtt

SEQ ID NO: 180045 - DNA, 75 bp, synthetic construct
  source 1..75: mol_type = other DNA
ttgtatcatctccatgctgcaggtttcgaattcgaagtggcgaccatttccggtctgatgaccaagtttgaatac

SEQ ID NO: 180046 - DNA, 75 bp, synthetic construct
  source 1..75: mol_type = other DNA
gtgatcgccgcggacgaacgttatttgccgaccgataacggaaaactgttctcgaccggtaaccatccgattgaa

SEQ ID NO: 180047 - DNA, 75 bp, synthetic construct
  source 1..75: mol_type = other DNA
ccttgtcgaaacaagcagcttctgcagagaagaatatggatcttgctcttgcttttgagctctggaaactggcct

SEQ ID NO: 180048 - DNA, 75 bp, synthetic construct
  source 1..75: mol_type = other DNA
gtttgagaccatctacatggtgacgaagaacagagacgcgctactaagggaggtaacacgtctcgacatgtcaag

SEQ ID NO: 180049 - DNA, 75 bp, synthetic construct
  source 1..75: mol_type = other DNA
ctcaaagcccgtattttctggtcaatcggaccacagtgtatcggttggtttgccgggatgctggttgtggggcaa

SEQ ID NO: 180050 - DNA, 75 bp, synthetic construct
  source 1..75: mol_type = other DNA
ttgtatcgggttattaaggaaacggatttttctacaccagaagaaatgcgaacggcgtttcccaacctcgacaat

SEQ ID NO: 180051 - DNA, 75 bp, synthetic construct
  source 1..75: mol_type = other DNA
gactcgtcatataaccaaccggactcgcgacacattgctccgcgaagcagcaaaacttgatcccgccaactatat

SEQ ID NO: 180052 - DNA, 75 bp, synthetic construct
  source 1..75: mol_type = other DNA
ccggttatcaccgaagtaagcggttttgttcgctttactgacatgatcgacggtcagaccattactcgtcagacc

SEQ ID NO: 180053 - DNA, 75 bp, synthetic construct
  source 1..75: mol_type = other DNA
ccggcactgaaaatcgttgatgctcagggtaacgatgtactgatccctggtaccgatatgcctgcgcagtacttc

SEQ ID NO: 180054 - DNA, 75 bp, synthetic construct
  source 1..75: mol_type = other DNA
atgagcatggtcgtggttgttacagaaaatgtcccgccgcgcttacgtggacggctcgcaatctggctactggaa

SEQ ID NO: 180055 - DNA, 75 bp, synthetic construct
  source 1..75: mol_type = other DNA
ttttgaatttcagacctggggtgaaaatagacgtattccggtggatttggatggggtgcgtttggtttcttttct

SEQ ID NO: 180056 - DNA, 75 bp, synthetic construct
  source 1..75: mol_type = other DNA
atgagtatggtcgtcgttgttacagaaaatgtccctccgcgcttacgtggacggctcgcgatctggctcctggaa

SEQ ID NO: 180057 - DNA, 75 bp, synthetic construct
  source 1..75: mol_type = other DNA
aaaatcaattcgattataccggtggaaagtctgttggccaaccatgtgattcgggaactacataagtcgtcataa

SEQ ID NO: 180058 - DNA, 75 bp, synthetic construct
  source 1..75: mol_type = other DNA
ctcgctgagatggaaaccgccttttccgcacttaagcaggaggtgactgacagggcggatgaaaccagccaggca

SEQ ID NO: 180059 - DNA, 75 bp, synthetic construct
  source 1..75: mol_type = other DNA
acaaaaccgaaagtttcagccagccgcgacgtacaaaagccagtggcggtggtggcgacgagctgctgaccgact

SEQ ID NO: 180060 - DNA, 75 bp, synthetic construct
  source 1..75: mol_type = other DNA
ggtcgcgcaatggcaaactggcaacgctcagtgaagagatttgccagaaactgcgcgatgcgctgccagaacatg

SEQ ID NO: 180061 - DNA, 75 bp, synthetic construct
  source 1..75: mol_type = other DNA
aggctgtaaaacctgcattattctttctgccccgacatcgcaacacgaagatctcctagcctgcgcccagcgcca

SEQ ID NO: 180062 - DNA, 75 bp, synthetic construct
  source 1..75: mol_type = other DNA
gccgcgaacgctattttcgatcgggtaaaaatggcctggccgcaggcgcgtattcacggccttttagtgcaaagt

SEQ ID NO: 180063 - DNA, 75 bp, synthetic construct
  source 1..75: mol_type = other DNA
gctcggtaagcgtgttgactactccggtcgttctgtaatcaccgtgggtccatacctgcgtctgcatcagtgcgg

SEQ ID NO: 180064 - DNA, 75 bp, synthetic construct
  source 1..75: mol_type = other DNA
ggctatatcaacctgcacggcaccgccacacaactcaacgaccagattgaatcaatggtggttaacgccctgttt

SEQ ID NO: 180065 - DNA, 75 bp, synthetic construct
  source 1..75: mol_type = other DNA
tggtgaaggggcggggctaatgctgctgacccgggaaccgcagcccatcgcgttgctgggcgttggtgaatcgag

SEQ ID NO: 180066 - DNA, 75 bp, synthetic construct
  source 1..75: mol_type = other DNA
aagcgcatcttctgttgcaacaggcgattgccgaaggggctacgtcgctcgatacccatgaagttcagcccatcc

SEQ ID NO: 180067 - DNA, 75 bp, synthetic construct
  source 1..75: mol_type = other DNA
aacaattaagtgatgcgcgacgttttgtttcggctgcacgtagcgcctcacgtaataaaccgattctggtgatta

SEQ ID NO: 180068 - DNA, 75 bp, synthetic construct
  source 1..75: mol_type = other DNA
cgactatctggcgcgcgacagtaaaaccagcgccatcctgctctatctcgaacagttaagcgacgcacgacgctt

SEQ ID NO: 180069 - DNA, 75 bp, synthetic construct
  source 1..75: mol_type = other DNA
actcctcgcaagaggcacgacgcttattcagcgaagccgggctgccgacctatcgaacaccggaaggcactatta

SEQ ID NO: 180070 - DNA, 75 bp, synthetic construct
  source 1..75: mol_type = other DNA
acgcgatgacgccagcagcgagcattatgtcaaaacgctggacattctgctccacagccaggattttgatgcgct

SEQ ID NO: 180071 - DNA, 75 bp, synthetic construct
  source 1..75: mol_type = other DNA
ctgtgcatattgcagaacagattggttatccggtggcgctgaaattgcgctcgccggatattccgcataaatcgg

SEQ ID NO: 180072 - DNA, 75 bp, synthetic construct
  source 1..75: mol_type = other DNA
cgatagatcatgtacgtgaattatttactgtggcagaaccatcaagattgcaattttctggtatcaaattattag

SEQ ID NO: 180073 - DNA, 75 bp, synthetic construct
  source 1..75: mol_type = other DNA
ttaaaacggctaaataaaatatataaattctcacttataatgaatgaccaaaattatggtctcccatccacttta

SEQ ID NO: 180074 - DNA, 75 bp, synthetic construct
  source 1..75: mol_type = other DNA
gatcaggctcctgcaagcgtggaccctgttaccgtgtgtagcgcggataaaaatgacataactcttgaaaccaac

SEQ ID NO: 180075 - DNA, 75 bp, synthetic construct
  source 1..75: mol_type = other DNA
atgaaattcagatcatgtctttattcttattttgctttaaaaaaagagaaagaggaggataaaggtttaacctta

SEQ ID NO: 180076 - DNA, 75 bp, synthetic construct
  source 1..75: mol_type = other DNA
atgcctgatgcgacgcttaacgcgtcttatcaggcctaccgctcgtaccatttgtccagggcggatgaggcgttt

SEQ ID NO: 180077 - DNA, 75 bp, synthetic construct
  source 1..75: mol_type = other DNA
atgcctgatgcgacgcttgacgcgtcttatcatgcctacaagtctgtgccgaaccgtaggccggataaggcgttc

SEQ ID NO: 180078 - DNA, 75 bp, synthetic construct
  source 1..75: mol_type = other DNA
gaactccagcggcaaactggttatcacttcccgtaacactgaactgaaattgatcgacgaattcggtcgtaccaa

SEQ ID NO: 180079 - DNA, 75 bp, synthetic construct
  source 1..75: mol_type = other DNA
cagtatgatcccaaagtttatgatgaatatcgtaagacgaagcgggcggggcggttgaacaatgaaaatcactcc

SEQ ID NO: 180080 - DNA, 75 bp, synthetic construct
  source 1..75: mol_type = other DNA
ggcatcaagttattagaaatccatgctactgctgatgttcatcaccgtatcgaaatattacgtaacggcattcac

SEQ ID NO: 180081 - DNA, 75 bp, synthetic construct
  source 1..75: mol_type = other DNA
ttatcggcgcgtatccctgtgcaccttcttttcaccaaagaagtgaagaggaagagaaggaattctggcgacaat

SEQ ID NO: 180082 - DNA, 75 bp, synthetic construct
  source 1..75: mol_type = other DNA
ttcctgaaggtcgcgcgatgcgcctgcaagaggcatccggcggggaacttcagtacgaccccaaagtttatgacg

SEQ ID NO: 180083 - DNA, 75 bp, synthetic construct
  source 1..75: mol_type = other DNA
atgtttaaatcagacgtaattaattattacggcacgaaagccaaagtggcgaaagctgctggcgttgatccatct

SEQ ID NO: 180084 - DNA, 75 bp, synthetic construct
  source 1..75: mol_type = other DNA
cttcagtacgaccccaaagtttatgacgaatatcgtaaggcaaaacgacctgggaaggtgattcatgaaaatcag

SEQ ID NO: 180085 - DNA, 75 bp, synthetic construct
  source 1..75: mol_type = other DNA
ctcaaagccgataaaatggatctgcgcacagcccagggattcctgagtcaggggtatcagggggcagcaatggga

SEQ ID NO: 180086 - DNA, 75 bp, synthetic construct
  source 1..75: mol_type = other DNA
acagatcgcactgtttatctgcaaatcaaaaatacctccgataaggatatgagtggccttcagggaaaaattaac

SEQ ID NO: 180087 - DNA, 75 bp, synthetic construct
  source 1..75: mol_type = other DNA
gagtggccttcaggggaaaattaacagccaggtgcaggcgaaaggctatcgtatcgtgaataatcctgccgacgc

SEQ ID NO: 180088 - DNA, 75 bp, synthetic construct
  source 1..75: mol_type = other DNA
aggttaacctgaaatttgaagaggcgaagcctgttctcgaagaccagctggccaaatcaattgctaatatattgt

SEQ ID NO: 180089 - DNA, 75 bp, synthetic construct
  source 1..75: mol_type = other DNA
aattctgccggtgccacactcggtgtgggccttgctgctggtctggtgggtatggctgcagatgcgatggtggaa

SEQ ID NO: 180090 - DNA, 75 bp, synthetic construct
  source 1..75: mol_type = other DNA
aagcgcctgaaacaccgtggcgtcatctgtgagaagtgcggcgttgaagtgacccagactaaagtacgccgtgag

SEQ ID NO: 180091 - DNA, 75 bp, synthetic construct
  source 1..75: mol_type = other DNA
gtttctcgggcggggtttccgctggacccagaaacacacccagcgcctgcaggatacgctgcgcccggaagtggc

SEQ ID NO: 180092 - DNA, 75 bp, synthetic construct
  source 1..75: mol_type = other DNA
ggcacaaattcagaataacgagcaggttatgggggatgatgatgttccacggaatatgcaggggcagccggatgc

SEQ ID NO: 180093 - DNA, 75 bp, synthetic construct
  source 1..75: mol_type = other DNA
tggatatttacaccaaaaccctggtgtccgggatcaccgatatttccaatccgggacagggaagtgattttacct

SEQ ID NO: 180094 - DNA, 75 bp, synthetic construct
  source 1..75: mol_type = other DNA
agttcaatgagttgatgggtgatgaatttatcccgcttattaacaaagggggcggcgccggcatgcaggtgacgg

SEQ ID NO: 180095 - DNA, 75 bp, synthetic construct
  source 1..75: mol_type = other DNA
cgccgtgggcaactccatgttcgccgatctggtgagcgtggccggccatatctacaaacacggtattcatgccgg

SEQ ID NO: 180096 - DNA, 75 bp, synthetic construct
  source 1..75: mol_type = other DNA
aggcatttgccctgctggagggcgggcagctgtggaaaatccgcataccactgcctgccggggacgctgatgatg

SEQ ID NO: 180097 - DNA, 75 bp, synthetic construct
  source 1..75: mol_type = other DNA
caataaagttaatctaaaattcccggaagctcagccagttcttgaagaccaacttgcgaaatctatttctaatat

SEQ ID NO: 180098 - DNA, 75 bp, synthetic construct
  source 1..75: mol_type = other DNA
agtactgaaacgggtaaccagcataaataccagacccgtgtggtctcaaatgcgaacaaggttaacctgaaattt

SEQ ID NO: 180099 - DNA, 75 bp, synthetic construct
  source 1..75: mol_type = other DNA
actcggtgtgggccttgctgctggcctggtgggtatggctgcagatgcgatggtggaagatgtgaactataccat

SEQ ID NO: 180100 - DNA, 75 bp, synthetic construct
  source 1..75: mol_type = other DNA
taatgttgccgccctgcgtcagggcacatcaggtgcgaaaattcagaccagtactgaaacaggtaaccagcataa

SEQ ID NO: 180101 - DNA, 75 bp, synthetic construct
  source 1..75: mol_type = other DNA
gccagtgtccagaccgataatgtagccgcgctgaaacaaggaacatccggatataaggttcagaccagtacacag

SEQ ID NO: 180102 - DNA, 75 bp, synthetic construct
  source 1..75: mol_type = other DNA
cgccggaaagcgcgcattactggatacaggccaatgtcctcaaagccgataaaatggatttgcggacagcccagg

SEQ ID NO: 180103 - DNA, 75 bp, synthetic construct
  source 1..75: mol_type = other DNA
tactgtgcgttataccgccagtaatgccgcacgttttgccggattatgggaaagaaataatctaataaatgaaaa

SEQ ID NO: 180104 - DNA, 75 bp, synthetic construct
  source 1..75: mol_type = other DNA
actcgtcatccgctggcgccacgctgggcgtggggctggccaccggtttgattggtatggctgcggacgccatgg

SEQ ID NO: 180105 - DNA, 75 bp, synthetic construct
  source 1..75: mol_type = other DNA
cgcaggcattatgattattaacggtctgtttttataccgcagtacctttccaccgcatccgggtcgtcgcttacc

SEQ ID NO: 180106 - DNA, 75 bp, synthetic construct
  source 1..75: mol_type = other DNA
caacaaggtgaacctcaagtttgaagaggcgaaacctgttctcgaagcacagctggccaaatccatcgctggcat

SEQ ID NO: 180107 - DNA, 75 bp, synthetic construct
  source 1..75: mol_type = other DNA
acacatctgacaaggatatgagcggattgcaggcaaaaatcagtgatgccgttaaagccaaaggctaccaggttg

SEQ ID NO: 180108 - DNA, 75 bp, synthetic construct
  source 1..75: mol_type = other DNA
gttaacctgaagtttgaagaagcgaagcctgtactggaagagcagctggctaaatccatcgcgaacatcctgtaa

SEQ ID NO: 180109 - DNA, 75 bp, synthetic construct
  source 1..75: mol_type = other DNA
cacaggatataactccagctctgccggtgcggcgctgggtgtagggattgccacagggttgattggtatggctgc

SEQ ID NO: 180110 - DNA, 75 bp, synthetic construct
  source 1..75: mol_type = other DNA
cttttgcggggctttgttccgcgcttgaaaaccgcctggcacgttcagggggcgtggaggctctggtcccccaga

SEQ ID NO: 180111 - DNA, 75 bp, synthetic construct
  source 1..75: mol_type = other DNA
agctgctgaccggtttgttgcagcgttttggagagcacctgcatccacaacggtcacgggccaggaaggcggcgc

SEQ ID NO: 180112 - DNA, 75 bp, synthetic construct
  source 1..75: mol_type = other DNA
cttgcgcgactagatgctgacatgaacagccatatccatagccacttcaaagagcttgctaagcgactgagcagt

SEQ ID NO: 180113 - DNA, 75 bp, synthetic construct
  source 1..75: mol_type = other DNA
atagtcatcagcgttggggcgtccgggggcaattatgggaatagctggcgctgcgttagcaacacagcttgcttc

SEQ ID NO: 180114 - DNA, 75 bp, synthetic construct
  source 1..75: mol_type = other DNA
ggtaaacaaccagaaaactggcatcagagactttcagaattacgaacagacaaaggatatactattttatcttgg

SEQ ID NO: 180115 - DNA, 75 bp, synthetic construct
  source 1..75: mol_type = other DNA
gaagcggcgcttgcctggctccagtcccggccggggatggatacaccacgtcatcgctggctgatacgcctgctc

SEQ ID NO: 180116 - DNA, 75 bp, synthetic construct
  source 1..75: mol_type = other DNA
taatggcggaaaagctgcccttcgtctgggaggagaatacgatgttttactgactaaccggctcatactccaacc

SEQ ID NO: 180117 - DNA, 75 bp, synthetic construct
  source 1..75: mol_type = other DNA
ccatacctgttctggtcgccggtttgtttacctcacagctttctattgcggcgggctccgtctctgcagatcccc

SEQ ID NO: 180118 - DNA, 75 bp, synthetic construct
  source 1..75: mol_type = other DNA
gatttatactggttttcactaccttccgagttttcaaagattgtagtcatgctgatcactcttttttccacggca

SEQ ID NO: 180119 - DNA, 75 bp, synthetic construct
  source 1..75: mol_type = other DNA
atggataacctgcaaactgaaaccgtgattaaccgtgacggtcaggaagagaagcaggtttccttcaacagcatc

SEQ ID NO: 180120 - DNA, 75 bp, synthetic construct
  source 1..75: mol_type = other DNA
ttgcaatggttatacgcaggcgccagttgatagcgatgttggttgctgagcgtaaccgattacatcctgtacatc

SEQ ID NO: 180121 - DNA, 75 bp, synthetic construct
  source 1..75: mol_type = other DNA
ctcgaccggatcaatgagcaaatgaaacaacacatgacagcattcatccaggagcaggccagactgataggcagc

SEQ ID NO: 180122 - DNA, 75 bp, synthetic construct
  source 1..75: mol_type = other DNA
tggcaggatgcgcctgttggaggcagtagcaaagcagctgcatacgcgacaggctggaatgcctgtcgcgccgca

SEQ ID NO: 180123 - DNA, 75 bp, synthetic construct
  source 1..75: mol_type = other DNA
aacagaatatcaactttgcgcaggacatagcccgaagcgaaatggaagcagcaaaacaatggcgcgggttgactt

SEQ ID NO: 180124 - DNA, 75 bp, synthetic construct
  source 1..75: mol_type = other DNA
gcatttttgtcatggctccctgctgttcgtgctaaacgccattaccagattaacctcttcctggactctacgttc

SEQ ID NO: 180125 - DNA, 75 bp, synthetic construct
  source 1..75: mol_type = other DNA
gaggctgcgaagaaataccagactgaagatttttttaaccacgttgaatcccaggaatatctggaaaaagcccgg

SEQ ID NO: 180126 - DNA, 75 bp, synthetic construct
  source 1..75: mol_type = other DNA
cctgggcggtagcgcttgcgccttcggtcagttatgtcacagctgccggatttggcgttctggcggctgtccgtt

SEQ ID NO: 180127 - DNA, 75 bp, synthetic construct
  source 1..75: mol_type = other DNA
atgagtaaccgttatgttattgaggcgttactgaggccagctgtggagttcaatacggccgtggttgcggcaacg

SEQ ID NO: 180128 - DNA, 75 bp, synthetic construct
  source 1..75: mol_type = other DNA
tcagtttattgacagcaatagcagtatcctgaatgtcgcagtctcacgcgctaaagatagttttctggtcttcgg

SEQ ID NO: 180129 - DNA, 75 bp, synthetic construct
  source 1..75: mol_type = other DNA
tcccgccggcagtgcagcacctcacggtggaggtgagtgcctcagacggccagtatctggcgctggcgaaatggg

SEQ ID NO: 180130 - DNA, 75 bp, synthetic construct
  source 1..75: mol_type = other DNA
atatcaccgccatagaggaaaatgcatttcgaaaagcggctccccatgttctcaatcttactgatgaacaactgg

SEQ ID NO: 180131 - DNA, 75 bp, synthetic construct
  source 1..75: mol_type = other DNA
cggcacaagggcctttttcgtatatgcatacgcaaaaaatgaacgtgaaaatataaccgctactgaggaaagtgc

SEQ ID NO: 180132 - DNA, 75 bp, synthetic construct
  source 1..75: mol_type = other DNA
ttttccgtctaaaagccgtcaggttgaggctgcgaagaaataccagactgaagatttttttaaccacgttgaatc

SEQ ID NO: 180133 - DNA, 75 bp, synthetic construct
  source 1..75: mol_type = other DNA
tcattcgatggataaatatcaccgcagggcagttggatgacgagactattcgggcattttttgacggtgaagggg

SEQ ID NO: 180134 - DNA, 75 bp, synthetic construct
  source 1..75: mol_type = other DNA
tattaccgtggtaacggataaaaactgcaatattgcgcatatcgatgatgataagcgccaggagaaactgcatct

SEQ ID NO: 180135 - DNA, 75 bp, synthetic construct
  source 1..75: mol_type = other DNA
cagcccaccagcgatgtgaatagctggacctggtcacgcacggcgaataccaaagatgtgagtaataaaattctc

SEQ ID NO: 180136 - DNA, 75 bp, synthetic construct
  source 1..75: mol_type = other DNA
ccgggaggttctgcttttccgcgactggcagcagtggcagttctcactggaagagcgtctgccgccggatgcagc

SEQ ID NO: 180137 - DNA, 75 bp, synthetic construct
  source 1..75: mol_type = other DNA
aaaaagcccaggcaggttacagtctgaccatgacagcaggtacggatgaatccctgcaacccattgagcagcatc

SEQ ID NO: 180138 - DNA, 75 bp, synthetic construct
  source 1..75: mol_type = other DNA
cagcccaccagcaatgtggatagctggacatggtcacgcacggcgaataccaaagatgtaagcaataaaatcctc

SEQ ID NO: 180139 - DNA, 75 bp, synthetic construct
  source 1..75: mol_type = other DNA
ggtgaacatttaccatcctgacagcagcattcatcctggcagtctgacgcgcaacggtgccaatgctaacggtca

SEQ ID NO: 180140 - DNA, 75 bp, synthetic construct
  source 1..75: mol_type = other DNA
gcggacgcggtgccatcacctgccctgctggcatggcaaaaggttctccggtcaccaccgtcgataccgctaagt

SEQ ID NO: 180141 - DNA, 75 bp, synthetic construct
  source 1..75: mol_type = other DNA
tcagagcgccgcacgcaccatgtacgacaacgcccgcaagtcgggcacacataccgcatcaagccttgcgctgat

SEQ ID NO: 180142 - DNA, 75 bp, synthetic construct
  source 1..75: mol_type = other DNA
attgggaattaagcgacatggatcggtggcatatgcaaacattgcttgataatggcctgatatatagaaagccgt

SEQ ID NO: 180143 - DNA, 75 bp, synthetic construct
  source 1..75: mol_type = other DNA
gaaagccattgtcgctggtggccctcggtatggactgaacgggcagccttgcggtgaagtcacggaagaagataa

SEQ ID NO: 180144 - DNA, 75 bp, synthetic construct
  source 1..75: mol_type = other DNA
tcactctgcccggaagacgtccgggacgccccggacgtcgcatctccgtcattgccgggcttgagtggaaagata

SEQ ID NO: 180145 - DNA, 75 bp, synthetic construct
  source 1..75: mol_type = other DNA
accgctttacgcagcgccgtcagcgccggtcgctccagatggttggataagctgtagtgagcgaatgccaaaaga

SEQ ID NO: 180146 - DNA, 75 bp, synthetic construct
  source 1..75: mol_type = other DNA
aacacaaatcccccctcagccacgcacaatggttgcgcttgcgctatattgagcgccagctactgtgggaacgaa

SEQ ID NO: 180147 - DNA, 75 bp, synthetic construct
  source 1..75: mol_type = other DNA
actgatatcgaaaatgaagttgagcaaaatgatgacggaacttactcgcaatacggtaagaaacgcgtcgaaggc

SEQ ID NO: 180148 - DNA, 75 bp, synthetic construct
  source 1..75: mol_type = other DNA
tctcagtatcagttgtgaggtaacgctccgtcacgggatgctccgtctcaacggcactgtcagcgaaaagctcct

SEQ ID NO: 180149 - DNA, 75 bp, synthetic construct
  source 1..75: mol_type = other DNA
tgacgttccggcacggatcactccgtctgaatggtgccatcagcgaaaatatcctgaacctgctgatacgggagc

SEQ ID NO: 180150 - DNA, 75 bp, synthetic construct
  source 1..75: mol_type = other DNA
taattatcctcccgaatttaaacagctgctcgttgctgcctcctgtgaacccgggatatccatctcaaaacttgc

SEQ ID NO: 180151 - DNA, 75 bp, synthetic construct
  source 1..75: mol_type = other DNA
agcagacagtaataaagcacaaattgccgaaaatgcccagaaattcgttttttcaaaatatagctgggaacatgt

SEQ ID NO: 180152 - DNA, 75 bp, synthetic construct
  source 1..75: mol_type = other DNA
caggtgagttagacaaaaatgcaaagataattgttcctagccagtttcttttcgatttctattcggaaaaaatgc

SEQ ID NO: 180153 - DNA, 75 bp, synthetic construct
  source 1..75: mol_type = other DNA
cggcacgggacactccgcctcaacggcactgtcagcgaaaagcttctgactctgctgatacaggaactgaagcga

SEQ ID NO: 180154 - DNA, 75 bp, synthetic construct
  source 1..75: mol_type = other DNA
ccatgcaggcggcacagtggggaatgaaccctttcgccgtggcgcagaaaacgcatgtggtaaacggaacgttag

SEQ ID NO: 180155 - DNA, 75 bp, synthetic construct
  source 1..75: mol_type = other DNA
cgccgctgcaatcttcagcccggagggcatgaatcaactggtgcgcttcgctgatctgatggcacagagcaaagc

SEQ ID NO: 180156 - DNA, 75 bp, synthetic construct
  source 1..75: mol_type = other DNA
aggatggttcctcatcgctgccgtataccccggaacacgccttcaccttatggagccagtatcaggcaaccgatg

SEQ ID NO: 180157 - DNA, 75 bp, synthetic construct
  source 1..75: mol_type = other DNA
cagatggtacaagaccagtataaagatgttcctgatgagatgcggccattcgcatttcagcagcattggctggaa

SEQ ID NO: 180158 - DNA, 75 bp, synthetic construct
  source 1..75: mol_type = other DNA
acggcgactggtcaaaggtgaatggcaagagcgacaagtcaccatcactgaccgtaacagtatcggcagtgctga

SEQ ID NO: 180159 - DNA, 75 bp, synthetic construct
  source 1..75: mol_type = other DNA
ggctggtgatgatgacctgctggcaaaagcaaccgatgtttacaccatccgttgtgacgaactgaacgaagtacc

SEQ ID NO: 180160 - DNA, 75 bp, synthetic construct
  source 1..75: mol_type = other DNA
gtgtggtctcaaatgcgaacaaggttaacctgaaatttgaagaggcgaagcctgttctcgaagaccagctggcca

SEQ ID NO: 180161 - DNA, 75 bp, synthetic construct
  source 1..75: mol_type = other DNA
acgcatcaaagctgcagtcgcgccagacctgtcggttcatttgctggatggaatgggccgtgaggcgatggtcgc

SEQ ID NO: 180162 - DNA, 75 bp, synthetic construct
  source 1..75: mol_type = other DNA
cgtggtgcggaagtggagatgctcagcgccgatttcctgaaaaccgctcagcttttgcgccagacgtatcctgat

SEQ ID NO: 180163 - DNA, 75 bp, synthetic construct
  source 1..75: mol_type = other DNA
aatggtagtgtccgctattgtcagtacacctcaaccatctggcttgaacctgcgagcgaacgcaccgttttcctg

SEQ ID NO: 180164 - DNA, 75 bp, synthetic construct
  source 1..75: mol_type = other DNA
ttgccggtctgctgctgattatcggtggtggtggtgcattcaagcaagttctcatcgactctggcgttggtcagt

SEQ ID NO: 180165 - DNA, 75 bp, synthetic construct
  source 1..75: mol_type = other DNA
caatgactgccatattgtcttccactctggttttgtctggttgtggcgcgatgagcacagcaatcaagaaacgta

SEQ ID NO: 180166 - DNA, 75 bp, synthetic construct
  source 1..75: mol_type = other DNA
tggcgaaatgcccgatggtggtgggctatcgtatgaagcctttcaccttctggctggcgaaacggctggtgaaaa

SEQ ID NO: 180167 - DNA, 75 bp, synthetic construct
  source 1..75: mol_type = other DNA
gacttcaatattactcttgaaggtaacctcaaaaagcagggtatcaaaaccattcattacgtcagtccatccgtc

SEQ ID NO: 180168 - DNA, 75 bp, synthetic construct
  source 1..75: mol_type = other DNA
actgcagggcaaaattgcggatgccgtgaaagcaaaagggtatcaggtggtgacttcgccggataaagcctacta

SEQ ID NO: 180169 - DNA, 75 bp, synthetic construct
  source 1..75: mol_type = other DNA
cgtggtgcagaagtcgaaatgcttagtgccgatttcctgaaaacggcccagcttttgcgccagacatatccggat

SEQ ID NO: 180170 - DNA, 75 bp, synthetic construct
  source 1..75: mol_type = other DNA
gacctgtcggttcatttgctggatggaatgggccgtgaggcgatggttgccagcgatgcggcgctactggcgtcg

SEQ ID NO: 180171 - DNA, 75 bp, synthetic construct
  source 1..75: mol_type = other DNA
tgcacgacaccttccgcgagctgcatcagcagatccgctgcaatgccgatgagcaggcggcacaagccgttctgg

SEQ ID NO: 180172 - DNA, 75 bp, synthetic construct
  source 1..75: mol_type = other DNA
atgatgtcacggaatatcaaaatggcgacggaagtaaagacctggttacaggagcgcggcagccacgtcaacgaa

SEQ ID NO: 180173 - DNA, 75 bp, synthetic construct
  source 1..75: mol_type = other DNA
aaaatggcaagatggtgatggtcagcgaattcttcaatgaagacgatcctgactttgaccactctctcgaccaaa

SEQ ID NO: 180174 - DNA, 75 bp, synthetic construct
  source 1..75: mol_type = other DNA
acagtgcatttcaggcagacagtgtggaggctttccgtaaaagctacgttgctgcggtgagatcactgactgacc

SEQ ID NO: 180175 - DNA, 75 bp, synthetic construct
  source 1..75: mol_type = other DNA
tgctttgatggtaaagaagtcattccccagcttgatctgactatcaacaatggcgagttcctcacgctgcttggc

SEQ ID NO: 180176 - DNA, 75 bp, synthetic construct
  source 1..75: mol_type = other DNA
gctgacccgggcatggtcagtggccatgctgagcggtctggaggagaaagtggaaccattgttgtttgaggacac

SEQ ID NO: 180177 - DNA, 75 bp, synthetic construct
  source 1..75: mol_type = other DNA
atcaatatgtttaacgccactgtcatcgaacgtctcgacgagcagcgcgtacgcgccaacgttgaaggccgcgaa

SEQ ID NO: 180178 - DNA, 75 bp, synthetic construct
  source 1..75: mol_type = other DNA
ccccgcgtgatggaagccctgcggatggtgcagctggaaaccttcgctcaacgcaaaccgcatcagctctctggt

SEQ ID NO: 180179 - DNA, 75 bp, synthetic construct
  source 1..75: mol_type = other DNA
ataacggtggatgggacggcgctgttatcaccttcttcgccagcatgatcgccatgtatatccgtcagctactgg

SEQ ID NO: 180180 - DNA, 75 bp, synthetic construct
  source 1..75: mol_type = other DNA
aagtccagcacattgtgattctggcggagcaccatctgctggattacaaaggcgtagagaaacgatttagccaaa

SEQ ID NO: 180181 - DNA, 75 bp, synthetic construct
  source 1..75: mol_type = other DNA
atgcaaactgagcaacagcgagccgtaacacggttatgtatccagtgcggattatttcttttgcagcacggggcg

SEQ ID NO: 180182 - DNA, 75 bp, synthetic construct
  source 1..75: mol_type = other DNA
atgaacgcctacacggtgtcccggctggcccttgatgccggggtgagcgtgcatatcgtgcgcgactacctgctg

SEQ ID NO: 180183 - DNA, 75 bp, synthetic construct
  source 1..75: mol_type = other DNA
gcggactgcgatgaaacagccgcacagcttgccgtgctgagtcagttcgtcgaacgccgacgcgaagcgttggcc

SEQ ID NO: 180184 - DNA, 75 bp, synthetic construct
  source 1..75: mol_type = other DNA
agcttgccgtgttgcggcaactcgtcgagcgtcggcgcgaggccctggccagcctcgaaatgcaactggccgcca

SEQ ID NO: 180185 - DNA, 75 bp, synthetic construct
  source 1..75: mol_type = other DNA
tggatcgcggtgctggcttcggtatcgtccagcatttgatcgattaccagcagggcgatacctacggacgcgttt

SEQ ID NO: 180186 - DNA, 75 bp, synthetic construct
  source 1..75: mol_type = other DNA
gcagggcaaaagcccggcagatcgctactcggtgatgaccagcgtgaaacacttcgctgcttacggcgcggtaga

SEQ ID NO: 180187 - DNA, 75 bp, synthetic construct
  source 1..75: mol_type = other DNA
gtgagtctggccctgcagccagcactggtggatgatttattcggtaaccatccattaacgccagtagcgcgggat

SEQ ID NO: 180188 - DNA, 75 bp, synthetic construct
  source 1..75: mol_type = other DNA
gtgcttccgaaggttttggcgaagatacgtatctcacctcaataatgggtaaaaccatggtggaagcgatgcagg

SEQ ID NO: 180189 - DNA, 75 bp, synthetic construct
  source 1..75: mol_type = other DNA
catacggaatcagtttattgtcagcaggatggtggctggcgctgcattgcacattacgggatttctccgcgttaa

SEQ ID NO: 180190 - DNA, 75 bp, synthetic construct
  source 1..75: mol_type = other DNA
cctggcgaagaaacacaatgggtaacccccggtcatacggaatcagtttattgccagcaggatggtggctggcgc

SEQ ID NO: 180191 - DNA, 75 bp, synthetic construct
  source 1..75: mol_type = other DNA
accattccacaaagccagcgtgacttaattacggcactgaaagcgactggcaaaccgctggtgctggtgttgatg

SEQ ID NO: 180192 - DNA, 75 bp, synthetic construct
  source 1..75: mol_type = other DNA
ggtggcgctgaactcgctgaacggcacgccagccacctccgattcctggctgctgaaagatgttctgcgcgacca

SEQ ID NO: 180193 - DNA, 75 bp, synthetic construct
  source 1..75: mol_type = other DNA
cattctggcaggtttcaaagtcgccattatcgttgccgcgatgctgatcggctttatcgccctgatcgccgcgct

SEQ ID NO: 180194 - DNA, 75 bp, synthetic construct
  source 1..75: mol_type = other DNA
cgttgtttctcgcttcggtctgaaactggtttacggttctactctggtgagtgtgctttctgcatcaatcgcagc

SEQ ID NO: 180195 - DNA, 75 bp, synthetic construct
  source 1..75: mol_type = other DNA
agccatctgaataccgggcgtccgtataatgccgacaagccgaacaaatacacttcgcgttattttgatgaagct

SEQ ID NO: 180196 - DNA, 75 bp, synthetic construct
  source 1..75: mol_type = other DNA
taaaccgctggtgctggtgttaatgaacggtcgcccgctggcgctggtgaaagaagatcagcaagccgacgcgat

SEQ ID NO: 180197 - DNA, 75 bp, synthetic construct
  source 1..75: mol_type = other DNA
taacggccagcgtgcaggtgacgaacaccggtaagcgcgaaggggcgacggtagtccagatgtatttgcaggatg

SEQ ID NO: 180198 - DNA, 75 bp, synthetic construct
  source 1..75: mol_type = other DNA
ggtgaatcaggaattgccggtatttgaatatgctgctcgccaggtgaagcaaacggtggtgggtattggtagtgc

SEQ ID NO: 180199 - DNA, 75 bp, synthetic construct
  source 1..75: mol_type = other DNA
cgtttcagaaatttatcgagcaagatcctgaaggacagtatggtctggaagctgctttccgttccgtattcccga

SEQ ID NO: 180200 - DNA, 75 bp, synthetic construct
  source 1..75: mol_type = other DNA
tggttacaacttcgaagactccatcctcgtatccgagcgtgttgttcaggaagaccgtttcaccaccatccacat

SEQ ID NO: 180201 - DNA, 75 bp, synthetic construct
  source 1..75: mol_type = other DNA
gtggttgctaaagactatattgatgagtctaccggcgagctgatctgcgcagcgaacatggagctgagcctggat

SEQ ID NO: 180202 - DNA, 75 bp, synthetic construct
  source 1..75: mol_type = other DNA
attgcatatatacgaccgaatgctgcatgcaaccaaacatagagaatcacgaatctttcctgaaaaataccaacc

SEQ ID NO: 180203 - DNA, 75 bp, synthetic construct
  source 1..75: mol_type = other DNA
cgtagtccgggcgtcttcttcgactccgacaaaggtaaaacccactcttcgggtaaagtactgtataacgcgcgt

SEQ ID NO: 180204 - DNA, 75 bp, synthetic construct
  source 1..75: mol_type = other DNA
gagtaccttcagcgatgaagaagttatgcgtctggctgaaaaccttctcgtcagaactgttcgttctggcggcac

SEQ ID NO: 180205 - DNA, 75 bp, synthetic construct
  source 1..75: mol_type = other DNA
gtgatattgcaaacagcacaacagcccccatcattctttataacttaccaggccaaactggattaagcatcgaat

SEQ ID NO: 180206 - DNA, 75 bp, synthetic construct
  source 1..75: mol_type = other DNA
catttgctatccgatgatgaaaaagttgagctgaccaaagccgttgtcgaagaggttggcggcgaagtgaccatt

SEQ ID NO: 180207 - DNA, 75 bp, synthetic construct
  source 1..75: mol_type = other DNA
cgggttcgcgcgtgaccggctatggcgtcatccgccaggtaggcaggcaactgtcctacctgggtagcggatgca

SEQ ID NO: 180208 - DNA, 75 bp, synthetic construct
  source 1..75: mol_type = other DNA
gcccaggcggtctgacccgtgaacgtgcaggcttcgaagttcgagacgtacccccgactcactacggtcgcgtat

SEQ ID NO: 180209 - DNA, 75 bp, synthetic construct
  source 1..75: mol_type = other DNA
agaactgcagatcctcgaagcgggtctgttcagccgtatccgtgctgtgctggtagccggtggcgttgaagctga

SEQ ID NO: 180210 - DNA, 75 bp, synthetic construct
  source 1..75: mol_type = other DNA
gtatgacgaactgaaacatgagttcgagaagaaactcgaagcgaaacgccgcaaaatcacccagggcgacgatct

SEQ ID NO: 180211 - DNA, 75 bp, synthetic construct
  source 1..75: mol_type = other DNA
aataaagtttttatcgcaggcgtataccacggtgggcaaatctatgaaaccgattttttatccagtgcaccgtaa

SEQ ID NO: 180212 - DNA, 75 bp, synthetic construct
  source 1..75: mol_type = other DNA
ccgccacagaacgattattgcttttgccgttgatggcaataaagtctttatcgctggcgtttaccatggagggca

SEQ ID NO: 180213 - DNA, 75 bp, synthetic construct
  source 1..75: mol_type = other DNA
atgacatttgaagtcatcattacccccgaggccgaacagcagataataaacctgcacggatatataacggagaaa

SEQ ID NO: 180214 - DNA, 75 bp, synthetic construct
  source 1..75: mol_type = other DNA
tggcctggctggaaaaacatcctcaggctttaaaggggatacagcgtgggctggagcgcgaaactttacgtgtaa

SEQ ID NO: 180215 - DNA, 75 bp, synthetic construct
  source 1..75: mol_type = other DNA
tggcctggctggaaaaacatcctcaggcattaaaggggatacagcgtggtcttgagcgcgaaactttgcgtgtta

SEQ ID NO: 180216 - DNA, 75 bp, synthetic construct
  source 1..75: mol_type = other DNA
acccatatccggaccatcacccaccgggtgacggacaccaccctgaaggtggtggcagccgatccgaatacggtg

SEQ ID NO: 180217 - DNA, 75 bp, synthetic construct
  source 1..75: mol_type = other DNA
ggaagcagatgaagatatagaggaaagggaagagctttataaaaagaacggggcgcaacctgactatttaagtta

SEQ ID NO: 180218 - DNA, 75 bp, synthetic construct
  source 1..75: mol_type = other DNA
ctaaagtagctgagatttttataaacaggaaaaatcgtaagatttattcaaacctggatattgaacctgttgcct

SEQ ID NO: 180219 - DNA, 75 bp, synthetic construct
  source 1..75: mol_type = other DNA
agacactccggctccataaagaatattacggcgacgcgtttggcacggtcatcaaggattatgactattatccca

SEQ ID NO: 180220 - DNA, 75 bp, synthetic construct
  source 1..75: mol_type = other DNA
ttattatagctgaagaggttgatgaactttatcgggctgatgccggaacgttaagttttcttgatggagctgata

SEQ ID NO: 180221 - DNA, 75 bp, synthetic construct
  source 1..75: mol_type = other DNA
tagaatttgatcttaaagagcttggcgcagtgctggacagaactacccctgctgaaattaaagaaataattaata

SEQ ID NO: 180222 - DNA, 75 bp, synthetic construct
  source 1..75: mol_type = other DNA
aggcgttactcctccataaagaatattatggtgaaggtgactttggcactgttgtaaaggattatgattattatc

SEQ ID NO: 180223 - DNA, 75 bp, synthetic construct
  source 1..75: mol_type = other DNA
ccgattttgcggaagcattgctggaattcattacaccagtggatggtgatattgaacatatgctgacctttatgc

SEQ ID NO: 180224 - DNA, 75 bp, synthetic construct
  source 1..75: mol_type = other DNA
gcctggtgtcgttgaagtttgccgtggcagtggcgatggggacgatgatcttcaccgtcggcggtgcgacggtcg

SEQ ID NO: 180225 - DNA, 75 bp, synthetic construct
  source 1..75: mol_type = other DNA
cggcatccttgcagcagttgccgccgggatgaccatcacccgttccggcgtgatgcgccgtgcgccgctggcgat

SEQ ID NO: 180226 - DNA, 75 bp, synthetic construct
  source 1..75: mol_type = other DNA
ccacttgcgcgccacacgggagatcagcaatgaaacactgcaaaaattgctgcacgatctcgatttactggaagc

SEQ ID NO: 180227 - DNA, 75 bp, synthetic construct
  source 1..75: mol_type = other DNA
atggaacagcatcagcggcatcaggaaggtgtactggcctactcaattgttaatttactttcggagaagtcatga

SEQ ID NO: 180228 - DNA, 75 bp, synthetic construct
  source 1..75: mol_type = other DNA
cagtccgcatgccgtatcgggccttgggttctaacctgttgcgtagatttatgcagcggactacctttctcccaa

SEQ ID NO: 180229 - DNA, 75 bp, synthetic construct
  source 1..75: mol_type = other DNA
tggctgtatggtcgctcgttgcgtttcctgagtcgctggggcggtgatgaaccggcaacgcagatcgtactgctg

SEQ ID NO: 180230 - DNA, 75 bp, synthetic construct
  source 1..75: mol_type = other DNA
gcgccgattcgtccgaaacgcgttactcgcagcggcgagtcgccttctgatgcgctgttacgcggcggcattgaa

SEQ ID NO: 180231 - DNA, 75 bp, synthetic construct
  source 1..75: mol_type = other DNA
tcccgatctgactttctctgcccgtatcttaaggtctatgattgatactggtattggcggaacaggcaaagcgtt

SEQ ID NO: 180232 - DNA, 75 bp, synthetic construct
  source 1..75: mol_type = other DNA
gacgtaagccggggctgacactgggaattggctgtgaaactgcgcaattcccgttgccgcaggtgggcaaagatc

SEQ ID NO: 180233 - DNA, 75 bp, synthetic construct
  source 1..75: mol_type = other DNA
gcgtctgcgtgctaacagcacctggtcgatgctggagtttgtctttaacggcatggtgttcttgttgttggggct

SEQ ID NO: 180234 - DNA, 75 bp, synthetic construct
  source 1..75: mol_type = other DNA
gtcagtaaaagagaacatgtcgctgacagcgctgcgctacttcagccgcgctggcggcagtttgaagcatgccga

SEQ ID NO: 180235 - DNA, 75 bp, synthetic construct
  source 1..75: mol_type = other DNA
agccacattcaaattaaagggtctggaatccccggtaaacacggctaagctcatatcaaaagaaaacggacagcg

SEQ ID NO: 180236 - DNA, 75 bp, synthetic construct
  source 1..75: mol_type = other DNA
aaaatttcgcctcggacaaacgcccgcgctgacctttgcgccacgggaaatcgccagtgtgagctggcaggaaga

SEQ ID NO: 180237 - DNA, 75 bp, synthetic construct
  source 1..75: mol_type = other DNA
gcaacacctggcaaccacggatggaaaaatttcgcctcggacaaacgcccgcgctgacctttgcgccacgggaaa

SEQ ID NO: 180238 - DNA, 75 bp, synthetic construct
  source 1..75: mol_type = other DNA
ccgatctttttcatcaccgctggctgacgcagttttaccaggcatggcgcagcgcccagtccgccgggggcggtc

SEQ ID NO: 180239 - DNA, 75 bp, synthetic construct
  source 1..75: mol_type = other DNA
ttcagacgcggctgggtttacacagcgaatggcgtaccgcggttggtgtcacaccaacattagatctgaattatt

SEQ ID NO: 180240 - DNA, 75 bp, synthetic construct
  source 1..75: mol_type = other DNA
atggcgtcaacgtcgcggatgagccagctccagtcactccgccaccagcgcctccggctccgcctaaagttagcc

SEQ ID NO: 180241 - DNA, 75 bp, synthetic construct
  source 1..75: mol_type = other DNA
ttcccagctgggacaagactgatggtgtagtcaccattcatgtgccggatcaaccgcccattgagacccgcctga

SEQ ID NO: 180242 - DNA, 75 bp, synthetic construct
  source 1..75: mol_type = other DNA
aattaattgagaattccacttctgaggtaaaacccaaagcgaaggccaaaccgaaaacggcgggcattaaacgcc

SEQ ID NO: 180243 - DNA, 75 bp, synthetic construct
  source 1..75: mol_type = other DNA
taaaccgattaccgatgaatttattcgtggtatgggggcgggggtgccgatcctcgggacggtgactaaaaagtg

SEQ ID NO: 180244 - DNA, 75 bp, synthetic construct
  source 1..75: mol_type = other DNA
gcggaaaaaggcggtcgcccggcgtccaacggtaagcgttttacctcgccggggcgtaaaaagaagggacgctaa

SEQ ID NO: 180245 - DNA, 75 bp, synthetic construct
  source 1..75: mol_type = other DNA
tatgaggggatctctcagggcaatgtgttccttaatggcaagcgagccaccattggcgatcaggtgaaacccggc

SEQ ID NO: 180246 - DNA, 75 bp, synthetic construct
  source 1..75: mol_type = other DNA
aaaaagctggaacgtacgcgcattatgaacgtcagcttaagcggcattccgctgggtgagtggcgcgatttaacc

SEQ ID NO: 180247 - DNA, 75 bp, synthetic construct
  source 1..75: mol_type = other DNA
gttgtaaaagtaaacggtcaactgattgagccacgggaagccgaagatttagtgcttatcgccctgaataaacct

SEQ ID NO: 180248 - DNA, 75 bp, synthetic construct
  source 1..75: mol_type = other DNA
tgtcttcgctggtggttctggattccgcagaacgtacagcaggtggtaaagatctgcgtccggcactgaaaatcg

SEQ ID NO: 180249 - DNA, 75 bp, synthetic construct
  source 1..75: mol_type = other DNA
acgatagccatgaccatgtcggtctatctgattatcagcctgactatctcgctgctgatgaatatctataaccgc

SEQ ID NO: 180250 - DNA, 75 bp, synthetic construct
  source 1..75: mol_type = other DNA
aaggttcactttcatttgccaatcctacagtgcgcgcctggcttttccagatccttgccgttgtcgccgtcgtcg

SEQ ID NO: 180251 - DNA, 75 bp, synthetic construct
  source 1..75: mol_type = other DNA
gtgtcgcttcgcagggcgttgtatatgcccgcaatggtagccaccagtaagactgagtggggacgggcgttccgc

SEQ ID NO: 180252 - DNA, 75 bp, synthetic construct
  source 1..75: mol_type = other DNA
atcgctgagattatccgcgcagggattcaggctgtgccttatggccaacacgaagcagcccgatcgctgggatta

SEQ ID NO: 180253 - DNA, 75 bp, synthetic construct
  source 1..75: mol_type = other DNA
ccgcagctgggagacggatttattgcgtttatcctcgctgttgttatggctatagtcctttcagttgggctattc

SEQ ID NO: 180254 - DNA, 75 bp, synthetic construct
  source 1..75: mol_type = other DNA
atgtctcatcgccgctcaaccgttaaaggctcactctcttttgccaaccctacggttcgcgcctggttattccag

SEQ ID NO: 180255 - DNA, 75 bp, synthetic construct
  source 1..75: mol_type = other DNA
cgaactgagcggccgtcaggaagcagccttaattctgggggaattttaccgtcgtaataatgactggaaattccg

SEQ ID NO: 180256 - DNA, 75 bp, synthetic construct
  source 1..75: mol_type = other DNA
tcggcgtaaatattgccgacgaaccggctcccgcagccccgactcctccggttgtaccccctctgccagctgaga

SEQ ID NO: 180257 - DNA, 75 bp, synthetic construct
  source 1..75: mol_type = other DNA
cggcgttatgaatcaggcagcagtgtgagaggggcaagccggttgagtaaagccggacatgtgtcgcttcgcagg

SEQ ID NO: 180258 - DNA, 75 bp, synthetic construct
  source 1..75: mol_type = other DNA
actgggtcgtgtaactgctgaagacgttctgaagccgggtactgctgatatcctcgttccgcgcaacacgctgct

SEQ ID NO: 180259 - DNA, 75 bp, synthetic construct
  source 1..75: mol_type = other DNA
tcagttcaatgttgtgagtgaagctcacaatgaaggtactattgtttctgtaagtgacggtgttatccgcattca

SEQ ID NO: 180260 - DNA, 75 bp, synthetic construct
  source 1..75: mol_type = other DNA
ttgcgcaatgggcgaatatttccgtgaccgcggtgaagatgcgctgatcatttacgatgatctgtctaaacaggc

SEQ ID NO: 180261 - DNA, 75 bp, synthetic construct
  source 1..75: mol_type = other DNA
aaaaaatcaaggaagggcttagtagtaataattgtggccttcctccttctggctatcggtgtatgtttttattat

SEQ ID NO: 180262 - DNA, 75 bp, synthetic construct
  source 1..75: mol_type = other DNA
aaacgccaccggaaaaagtacagcagaacttcagtcgtgcgctggatgtggcctatggggggagcagctctgctt

SEQ ID NO: 180263 - DNA, 75 bp, synthetic construct
  source 1..75: mol_type = other DNA
cgaccgcagtagaaattgaacaggcactacgggagagacttcagaaagataatgagcaaaacgataaaacggata

SEQ ID NO: 180264 - DNA, 75 bp, synthetic construct
  source 1..75: mol_type = other DNA
gccccactgaagcccggctaccgcagcctgattcattcgccgtctggtgttctcggcctgacggagaactcactg

SEQ ID NO: 180265 - DNA, 75 bp, synthetic construct
  source 1..75: mol_type = other DNA
tctcggcctgacggagaactcactgctgatgaatctgctgaaccagttacaggaagacgggcacgacgtatcggg

SEQ ID NO: 180266 - DNA, 75 bp, synthetic construct
  source 1..75: mol_type = other DNA
tggaaggcggtcgttcccgtacagggcgtttgctggatccgaaaaccggtacgctgtcgatgaccattcaggcga

SEQ ID NO: 180267 - DNA, 75 bp, synthetic construct
  source 1..75: mol_type = other DNA
ctcccgcacgcttcagttgcttgccgcaggtgcgcgcgaaacgctgcaacgttatgcgattaccttctggctgtt

SEQ ID NO: 180268 - DNA, 75 bp, synthetic construct
  source 1..75: mol_type = other DNA
tctcttacgagatgattcgcctgactgaccgtattctgggcttcacctggaaccgactttaccagggcatcaacg

SEQ ID NO: 180269 - DNA, 75 bp, synthetic construct
  source 1..75: mol_type = other DNA
gctaaggcactggtatgtaaagtcaaaggcaatggcgtaaatcaacatgttctggcgatcctcgcggccgatcaa

SEQ ID NO: 180270 - DNA, 75 bp, synthetic construct
  source 1..75: mol_type = other DNA
tgacgcatcagcggttaatcgctttattatcacaagaaggtgctaacttccgcgtcgttacccatgaagcggtag

SEQ ID NO: 180271 - DNA, 75 bp, synthetic construct
  source 1..75: mol_type = other DNA
gaaccggcagagacgatgaaggtgtatcagttgctggcggaattgataacgtccgatgtgcgtttgacgattgag

SEQ ID NO: 180272 - DNA, 75 bp, synthetic construct
  source 1..75: mol_type = other DNA
ttttggttccggcgcaacaatgatactggggttgacgttcattggtcttcgggcaagttctgcgcatcaggcggc

SEQ ID NO: 180273 - DNA, 75 bp, synthetic construct
  source 1..75: mol_type = other DNA
gataagccatcaatggatatggaccagcatttcaacggtattaaccatacgtttgagtatggggatgggatctga

SEQ ID NO: 180274 - DNA, 75 bp, synthetic construct
  source 1..75: mol_type = other DNA
atattcaggcggtgcgtacccgtgacccggcggtggataaatactcaaccccgttgctatatctgaagggttttc

SEQ ID NO: 180275 - DNA, 75 bp, synthetic construct
  source 1..75: mol_type = other DNA
accaggtatctgtgacgttccaggtggatattcatccggcggcaaaaattggtcgcggtatcatgctcgaccacg

SEQ ID NO: 180276 - DNA, 75 bp, synthetic construct
  source 1..75: mol_type = other DNA
cggtggtgaagatggaaaaaacggcggaaaaaggtagtcgcccggcgtcaaatggtaaacgtttcacctcgccgg

SEQ ID NO: 180277 - DNA, 75 bp, synthetic construct
  source 1..75: mol_type = other DNA
aaaaagagtatctggtgacggtggataaaccggtgacagatgagtttgtcaccggtatggcggcaggtgtaccga

SEQ ID NO: 180278 - DNA, 75 bp, synthetic construct
  source 1..75: mol_type = other DNA
cggttatgaactggcggagcgtggtgcagatacccgtttaattcaggattatctcgggcatcgaaatattcgcca

SEQ ID NO: 180279 - DNA, 75 bp, synthetic construct
  source 1..75: mol_type = other DNA
cattcgccgggtacagccaatattttaattaaagcctttgtttccagcgggcaatttttattgccgctaatcatc

SEQ ID NO: 180280 - DNA, 75 bp, synthetic construct
  source 1..75: mol_type = other DNA
gccatttctgaattactgaatatttccaccagcaaaatagagagcatatcagagaagattaacggcttatcaggt

SEQ ID NO: 180281 - DNA, 75 bp, synthetic construct
  source 1..75: mol_type = other DNA
gggcaagttctgcgcatcaggcggcggcactctcggggatggcacaatccgtcgggtatttgctggcagcctgtg

SEQ ID NO: 180282 - DNA, 75 bp, synthetic construct
  source 1..75: mol_type = other DNA
ctctttttatgtcgctgtacctttccgccacatccgggacggcaagtcgtcacgccagaaaaactcaaaacgcct

SEQ ID NO: 180283 - DNA, 75 bp, synthetic construct
  source 1..75: mol_type = other DNA
ccgttgattacggctcatctttcgcaaagaagtattgccgatattatgtggttcgataccgccatcgctgctatc

SEQ ID NO: 180284 - DNA, 75 bp, synthetic construct
  source 1..75: mol_type = other DNA
atacactatgtcgattaaactactcagtatctacaccgtggattcgctgctttgtgctgatgaatcccctaatga

SEQ ID NO: 180285 - DNA, 75 bp, synthetic construct
  source 1..75: mol_type = other DNA
cggtcatgagttctacgaagcggagctgaaatacctggtggatcacgaatgggtccgccgcgccgacgatgccct

SEQ ID NO: 180286 - DNA, 75 bp, synthetic construct
  source 1..75: mol_type = other DNA
tttatgtctggggctgggctcccggcgaagaagcctttctgattgacaagcaaattgtcatggggcgaccggaag

SEQ ID NO: 180287 - DNA, 75 bp, synthetic construct
  source 1..75: mol_type = other DNA
gtcaaatcgtggcggaagaactggtggaaaaggtggttaatggcagggtgaaactgctgtgggataaaaaagggc

SEQ ID NO: 180288 - DNA, 75 bp, synthetic construct
  source 1..75: mol_type = other DNA
atgacacccaccaccattacccatccacaacggctctacgaggaactggcgcgtattcgccgtcagggctggagc

SEQ ID NO: 180289 - DNA, 75 bp, synthetic construct
  source 1..75: mol_type = other DNA
atctgtctatggcaagccggtgatcaccatgccgaaaacccgcaatcagcggggcgtgtatctgtgtgaagtggg

SEQ ID NO: 180290 - DNA, 75 bp, synthetic construct
  source 1..75: mol_type = other DNA
tggttgcagcgctggaatccgcagagaagcgcatagcagaactggaagcacgggaaataaaaccagccaaaggtg

SEQ ID NO: 180291 - DNA, 75 bp, synthetic construct
  source 1..75: mol_type = other DNA
ataactttgctgttgtttgtggagtggcacttcgtgggcttttacgcccactgcctgtaaccactgttgaatggg

SEQ ID NO: 180292 - DNA, 75 bp, synthetic construct
  source 1..75: mol_type = other DNA
ggcctgccggataacaaaaaaatcattctttactccggcaatattggtgaaaagcaggggctggaaaacgttatt

SEQ ID NO: 180293 - DNA, 75 bp, synthetic construct
  source 1..75: mol_type = other DNA
ttgaaggattgcgcaccgaaaccggataccgtaacgcaaccttatcaggcacagacttcaaccgaatgtgggaac

SEQ ID NO: 180294 - DNA, 75 bp, synthetic construct
  source 1..75: mol_type = other DNA
ctgatcaaaattattatctgcctaaagaatcctcatacggtgagggcgaatggaaaacgctgccattccagatcg

SEQ ID NO: 180295 - DNA, 75 bp, synthetic construct
  source 1..75: mol_type = other DNA
ccaataacgagcttaccgctgcgatctcggtggtcggtacccgcttacaaatcaatgaagaataccgtgattatc

SEQ ID NO: 180296 - DNA, 75 bp, synthetic construct
  source 1..75: mol_type = other DNA
actactcgccggagttaaccggcatcggcaaatacaccggcgagatggtggaatggctggcggcacaaggtcatg

SEQ ID NO: 180297 - DNA, 75 bp, synthetic construct
  source 1..75: mol_type = other DNA
cggtgtggcgctgcccgctgtacgtgccaaaacagccgagcaccctgaaacgcctgttgcatctcggcagttttg

SEQ ID NO: 180298 - DNA, 75 bp, synthetic construct
  source 1..75: mol_type = other DNA
cgtggctgggcagaaaacatcgtgacaacacgctcaccctgaagcgtttttcctccggtgtggggttctggtgcc

SEQ ID NO: 180299 - DNA, 75 bp, synthetic construct
  source 1..75: mol_type = other DNA
ccgtgaaaaatctgtcgatgtggtctgctatgacgaactctcctcgtttgaaccggatgtggaaaaagaaggttc

SEQ ID NO: 180300 - DNA, 75 bp, synthetic construct
  source 1..75: mol_type = other DNA
gtaatatgatggtggcagtcactatcgcactgcagccactggtcagggtattgccggtgacggctgtagaatggg

SEQ ID NO: 180301 - DNA, 75 bp, synthetic construct
  source 1..75: mol_type = other DNA
tgaaggcgtacggtttactaacggctatgtggcacacggtgtttccggcccctcccgtgccgcaataatgaccgg

SEQ ID NO: 180302 - DNA, 75 bp, synthetic construct
  source 1..75: mol_type = other DNA
atgagtatatcagagcaacaactgaataatatgatggctgctgtttcagttgcgctgcagcctctggtcagggtt

SEQ ID NO: 180303 - DNA, 75 bp, synthetic construct
  source 1..75: mol_type = other DNA
ccgccgccgcgctccatcacgttccatatctggacggcgtacagtccgttcaccacctgggtacagattgtctat

SEQ ID NO: 180304 - DNA, 75 bp, synthetic construct
  source 1..75: mol_type = other DNA
gattcgaaagaatgcattgacgtaattcgtgaagaagtaaagcgatggaatgattcccgcgccgctggcattcgc

SEQ ID NO: 180305 - DNA, 75 bp, synthetic construct
  source 1..75: mol_type = other DNA
aatgaactgcatggggaatgaccggatccgcacggttaatctgattaaatctgcccgtgttggttatacaaagat

SEQ ID NO: 180306 - DNA, 75 bp, synthetic construct
  source 1..75: mol_type = other DNA
tcacgtggaggcgacgattcgggatgtgccatgtctgaaagacctttgtccatggctggggcgtaaacatcgtga

SEQ ID NO: 180307 - DNA, 75 bp, synthetic construct
  source 1..75: mol_type = other DNA
tgggtggtgcggcagcaaaaaactaccgtgaaaaatccgtggacgtggtctgctatgacgaactttcctcgttcg

SEQ ID NO: 180308 - DNA, 75 bp, synthetic construct
  source 1..75: mol_type = other DNA
tttttgtgctccccatcaaaggggcgtcggtgtacggcaagccggtgatcaccatgccaaaaaagcgaaaccagc

SEQ ID NO: 180309 - DNA, 75 bp, synthetic construct
  source 1..75: mol_type = other DNA
tcgagctcccgcccgctttggtgtctattccaataccgatgctcaggatggtattccgctaaggaaggtgcgaac

SEQ ID NO: 180310 - DNA, 75 bp, synthetic construct
  source 1..75: mol_type = other DNA
tggtatcgaccaggacattgtgtatcagcgatccagaaaacacggcactttttttgtgcttcccataaaaggggc

SEQ ID NO: 180311 - DNA, 75 bp, synthetic construct
  source 1..75: mol_type = other DNA
actatggtgcgcaggttcccctgcgggtggtttacctgaccgccgggatcgactcccagaaagatcgctatgaaa

SEQ ID NO: 180312 - DNA, 75 bp, synthetic construct
  source 1..75: mol_type = other DNA
gaagtgatggcagagcggaaagagtattattcagcgcccgttcctgatcgtgtggcttacctgaccgccggtatc

SEQ ID NO: 180313 - DNA, 75 bp, synthetic construct
  source 1..75: mol_type = other DNA
taataccctcacgctgaaacgcttttcatcgggtgtgggcttctggtgcctgggcggcgctgccgccaaaaacta

SEQ ID NO: 180314 - DNA, 75 bp, synthetic construct
  source 1..75: mol_type = other DNA
tgagctggaagccgcagagaagcggattgctgacatggaggcgcgggaggttgtactgccgcgtgcgcacgatgt

SEQ ID NO: 180315 - DNA, 75 bp, synthetic construct
  source 1..75: mol_type = other DNA
gcaggccaatgctgaattcatcgccgcagccaatccagctaccgtgctggcactgctggatgagctggaaagaaa

SEQ ID NO: 180316 - DNA, 75 bp, synthetic construct
  source 1..75: mol_type = other DNA
gaagatgacaaagttctcctgcaacagctgatttcgaccatctctaactggaagaacgatctcaaaacaccgtcc

SEQ ID NO: 180317 - DNA, 75 bp, synthetic construct
  source 1..75: mol_type = other DNA
ggatttttgccgcaccaaagcagcatcgacgaggacaatatcgatgaagagcggcggctggcctatgtcggcatc

SEQ ID NO: 180318 - DNA, 75 bp, synthetic construct
  source 1..75: mol_type = other DNA
caaagattacgccattctctatcgcggcaaccaccagtcacgggtgtttgaaaaatttctgatgcaaaaccgcat

SEQ ID NO: 180319 - DNA, 75 bp, synthetic construct
  source 1..75: mol_type = other DNA
ctgaaaaccagcccacgcgcgtgatcctgttcaataaaccctacgatgttcttccgcagttcaccgatgaagccg

SEQ ID NO: 180320 - DNA, 75 bp, synthetic construct
  source 1..75: mol_type = other DNA
ataccatgcaaaaaacttcttttagaaatcaccaggttaagcgattcagctcgcaacgttctaccaagcgtaaac

SEQ ID NO: 180321 - DNA, 75 bp, synthetic construct
  source 1..75: mol_type = other DNA
gatgcgtacatgagtaacggaaaaccggttggaatcaccctctatcaattacctcgttcgaaatatgaggagcta

SEQ ID NO: 180322 - DNA, 75 bp, synthetic construct
  source 1..75: mol_type = other DNA
cgccacttagctgataacgaaatcgactctgattattttgctatcacctcaacgaatgagaacggtactgaaatt

SEQ ID NO: 180323 - DNA, 75 bp, synthetic construct
  source 1..75: mol_type = other DNA
tcacagcagggggtatcatccacctcgctgggcgagattgcaaaagcagctggcgttacgcgcggtgcaatctac

SEQ ID NO: 180324 - DNA, 75 bp, synthetic construct
  source 1..75: mol_type = other DNA
atgtatgtaaatctaacgcctgtaaattcacgaacatatggcacgaaaaacaaacaagaagcgcaagaaacgcgc

SEQ ID NO: 180325 - DNA, 75 bp, synthetic construct
  source 1..75: mol_type = other DNA
gtgcaacaggcacaacgtaatctctgtctggaaagttatgaccgaccgtatagaacaaacgttaaaacattgtat

SEQ ID NO: 180326 - DNA, 75 bp, synthetic construct
  source 1..75: mol_type = other DNA
catcatggctgtgtgatccatcagtctgagcttgaccagagtaacgggcggtggatctgtgaaaacacgggtatg

SEQ ID NO: 180327 - DNA, 75 bp, synthetic construct
  source 1..75: mol_type = other DNA
gctgagagttgagctggaaggcaaagacagcaaaatagccaatcttaccgccgaacgcgatgctcttcgtgaagg

SEQ ID NO: 180328 - DNA, 75 bp, synthetic construct
  source 1..75: mol_type = other DNA
tgtatgtctggggatgggcaccgggagaggaagcttttctggtggataaaatcatcattatgggccgtcccgatg

SEQ ID NO: 180329 - DNA, 75 bp, synthetic construct
  source 1..75: mol_type = other DNA
ggatcgcccctgtagtgcaccgcaggggatgtttccgctggttcctttctggggataccgaaaggataaaaccgg

SEQ ID NO: 180330 - DNA, 75 bp, synthetic construct
  source 1..75: mol_type = other DNA
aacgataactaccagtttgcctgccagcaggtgggaagactgttgctggcttatcttctcgatgacctgaaaaag

SEQ ID NO: 180331 - DNA, 75 bp, synthetic construct
  source 1..75: mol_type = other DNA
gatgatgaaacagaaaaactggctgaagccattaatgctgaatttgccgatgcttgccgccttggaaatatgaat

SEQ ID NO: 180332 - DNA, 75 bp, synthetic construct
  source 1..75: mol_type = other DNA
cgattacgtcaccattttattggagatgtatcaactttgccccacgcttcgcgcacctgcggctaatgtaaaatc

SEQ ID NO: 180333 - DNA, 75 bp, synthetic construct
  source 1..75: mol_type = other DNA
gagtatcaggcaaaattccctgacgatccactctctgtattaagagaaatattaattcatgttcttgaagccacg

SEQ ID NO: 180334 - DNA, 75 bp, synthetic construct
  source 1..75: mol_type = other DNA
atccactctcagtattaagagagatattaattcatgttcttgaatccacggtgacagaagaacggcgtcgattat

SEQ ID NO: 180335 - DNA, 75 bp, synthetic construct
  source 1..75: mol_type = other DNA
ttaccggcatacagaatatggaacaggagcaggaagttcttcagcaacagatgctgcatacactacaacagcgga

SEQ ID NO: 180336 - DNA, 75 bp, synthetic construct
  source 1..75: mol_type = other DNA
cagtgtttggtcatacgttacttaatgcgatgcgtattcgcaccaaagcagcgcgcggtctggcgatggggacag

SEQ ID NO: 180337 - DNA, 75 bp, synthetic construct
  source 1..75: mol_type = other DNA
tcttacgacaactattttaaaggtagtgaggttttaaacgatctgctgcaaccggcggtggtggcgctggcctat

SEQ ID NO: 180338 - DNA, 75 bp, synthetic construct
  source 1..75: mol_type = other DNA
ccggtgcagaaattcatgagtatcagcctacccctggcgatattaaacgtgcgcagggggcacaactgattctcg

SEQ ID NO: 180339 - DNA, 75 bp, synthetic construct
  source 1..75: mol_type = other DNA
attcggtggattgagtccagatatgccacaccgagtccgataaatacagcaaaggcgattattttctatggtgtt

SEQ ID NO: 180340 - DNA, 75 bp, synthetic construct
  source 1..75: mol_type = other DNA
ccaatggtatgaatctggaattgtggttccaacgcttttaccaacatctcaatggggttccagaagtaattgtct

SEQ ID NO: 180341 - DNA, 75 bp, synthetic construct
  source 1..75: mol_type = other DNA
cgcccttgaccaattagacgaaaactggctagaggggcaaattgaagaatatagtaaggttttaataaatctgct

SEQ ID NO: 180342 - DNA, 75 bp, synthetic construct
  source 1..75: mol_type = other DNA
gaaaataatattaatgtaatacatattgattcgatgaaacgggaaatatgctttggtgatatcattgcactaaag

SEQ ID NO: 180343 - DNA, 75 bp, synthetic construct
  source 1..75: mol_type = other DNA
ggtgttttccgggtgctgccggtaaaaggcgcatctgtctatggcaagccggtgatcaccatgccaaaaacccgc

SEQ ID NO: 180344 - DNA, 75 bp, synthetic construct
  source 1..75: mol_type = other DNA
ctcgacctgtgggttaaccttctggatgtgccgcagaaacaggaatttgtcgaacgtattcgtgcggcgctgggg

SEQ ID NO: 180345 - DNA, 75 bp, synthetic construct
  source 1..75: mol_type = other DNA
tggcaggccgggtggctaaactggaagcagaagctgccagggcacaggcagctgcgcaacgggataatgctggcg

SEQ ID NO: 180346 - DNA, 75 bp, synthetic construct
  source 1..75: mol_type = other DNA
gaaaaagaaagttaccgctggcagcaggcttcggagcgcatggccgaacggctgggggagatacagaaacaggta

SEQ ID NO: 180347 - DNA, 75 bp, synthetic construct
  source 1..75: mol_type = other DNA
ggagatgctgcagaagtctcatccataaccaagcctggtgcagaaattcatgagtatcagcctacccctggcgat

SEQ ID NO: 180348 - DNA, 75 bp, synthetic construct
  source 1..75: mol_type = other DNA
tgaagcactgatgaaggtgatggatcggtttaacaaagagcatcgaggctctctgtttctggcttgcgaagggat

SEQ ID NO: 180349 - DNA, 75 bp, synthetic construct
  source 1..75: mol_type = other DNA
tgattaacaaggtcgctgaatacggttattcactccgcgtggtggatgaacgtgacgctaccgaaacaccggcga

SEQ ID NO: 180350 - DNA, 75 bp, synthetic construct
  source 1..75: mol_type = other DNA
ccgtgggacgtcgtgaaacgcaccccggtgcggaatcgcaggaaacggcggacggcttacgcggtgaagctgcgc

SEQ ID NO: 180351 - DNA, 75 bp, synthetic construct
  source 1..75: mol_type = other DNA
gcggcaaaacgtacatgggatctgatcccactgtgtcacccgctaatgctcagtaaagttgaagtcaatttgcag

SEQ ID NO: 180352 - DNA, 75 bp, synthetic construct
  source 1..75: mol_type = other DNA
accttatgccgcctgaccgggaaaaccggcgttgaaatggaagcgttaaccgcggcctccgtggcggcgctgacc

SEQ ID NO: 180353 - DNA, 75 bp, synthetic construct
  source 1..75: mol_type = other DNA
gatgattattgatggtcgccaccacaaaggcgacgtatttgccactgcgcgtattgccggtattcaggcggcaaa

SEQ ID NO: 180354 - DNA, 75 bp, synthetic construct
  source 1..75: mol_type = other DNA
gtggttaccaggttaacccgtatgttggctttgaaatgggttacgactggttaggtcgtatgccgtacaaaggca

SEQ ID NO: 180355 - DNA, 75 bp, synthetic construct
  source 1..75: mol_type = other DNA
ttgctggcattatttgttccgggccagaacagattcaagacgtattacaatgaagctgattaccccgataccccg

SEQ ID NO: 180356 - DNA, 75 bp, synthetic construct
  source 1..75: mol_type = other DNA
ttccagatgggaaatcatcagactggtagcggaaaataatattttgcgtcagctaaatactgacgcaaatctggt

SEQ ID NO: 180357 - DNA, 75 bp, synthetic construct
  source 1..75: mol_type = other DNA
acagagcgtgatgccattaaccactgaaacagcgctggatatcctcattgcgtggctgcaggacaatatcgactg

SEQ ID NO: 180358 - DNA, 75 bp, synthetic construct
  source 1..75: mol_type = other DNA
atgcacaaacctaccaacgtaatgccgatacttataaagccaagattacccaaacccttgcccccctgcgtaagc

SEQ ID NO: 180359 - DNA, 75 bp, synthetic construct
  source 1..75: mol_type = other DNA
gcgttgaaaacggtgcatacaaagctcagggcgttcaactgaccgctaaactgggttacccaatcactgacgacc

SEQ ID NO: 180360 - DNA, 75 bp, synthetic construct
  source 1..75: mol_type = other DNA
atggggaatgatcagatccgcactgttaatctgattaaatctgcccgtgttggctatacaaagatgttgctgggg

SEQ ID NO: 180361 - DNA, 75 bp, synthetic construct
  source 1..75: mol_type = other DNA
tagacaacagtcagtcgctacaggccagtaacctgattggtcacggtgtgatgatccccggcaccactattcttg

SEQ ID NO: 180362 - DNA, 75 bp, synthetic construct
  source 1..75: mol_type = other DNA
gcgccagtaacggtggtacacaactggttgcccagccgctgcagtttgctctggtgcagggtgtgatccgcggca

SEQ ID NO: 180363 - DNA, 75 bp, synthetic construct
  source 1..75: mol_type = other DNA
tgggaaacactgccgtttcaggttggcatcatgaactgtatgggcaacgatctgattcgcactgttaacctgatt

SEQ ID NO: 180364 - DNA, 75 bp, synthetic construct
  source 1..75: mol_type = other DNA
ctgccgctgaagattttatgaagtctcacgtggaggcgacgattcggaacgtgccatgcctgaaagacctttccc

SEQ ID NO: 180365 - DNA, 75 bp, synthetic construct
  source 1..75: mol_type = other DNA
ttgctgctgacggaacattgcaacgccgggcgttacgcaaacggatcttcgctgtcccggaagaaaaaaactggc

SEQ ID NO: 180366 - DNA, 75 bp, synthetic construct
  source 1..75: mol_type = other DNA
catggcaggaagcgtttcttccctgaacgtttcggtagcgaccggcatttgcttatttgaagcggtacgccagcg

SEQ ID NO: 180367 - DNA, 75 bp, synthetic construct
  source 1..75: mol_type = other DNA
aacgtctgttaccgctgattcacgcccttgagtctcagggcgtggttatccagttggcaaaccgccaatatctcg

SEQ ID NO: 180368 - DNA, 75 bp, synthetic construct
  source 1..75: mol_type = other DNA
cgcgttgcaggcgcgtttaacccagccgggtaaacgcaccgggaaaatctattatgtgcaggtggaaggtattcc

SEQ ID NO: 180369 - DNA, 75 bp, synthetic construct
  source 1..75: mol_type = other DNA
acaactgggctgcctgcgcgcggatgctggaaaccgacgtcgccaacctgcatcggctggcgaaacgtctgggat

SEQ ID NO: 180370 - DNA, 75 bp, synthetic construct
  source 1..75: mol_type = other DNA
cgctttctgatttggcgcggttatatgattttctggtgctggccagtaaacctgcggccgccagaacggtgcagt

SEQ ID NO: 180371 - DNA, 75 bp, synthetic construct
  source 1..75: mol_type = other DNA
tgattttctggtgctggccagtaaacctgctgccgccagaacggtgcagtccctgacacaggcaccggtcattct

SEQ ID NO: 180372 - DNA, 75 bp, synthetic construct
  source 1..75: mol_type = other DNA
tgatcaccatgccgaaaacccgcaatcagcggggcgtttatctgtgtgaagtggggacggacaccgcaaaagaaa

SEQ ID NO: 180373 - DNA, 75 bp, synthetic construct
  source 1..75: mol_type = other DNA
gggtgctgccggtaaaaggtgcatctgtttatggcaagccggtgatcaccatgccaaaaacccgcaatcagcggg

SEQ ID NO: 180374 - DNA, 75 bp, synthetic construct
  source 1..75: mol_type = other DNA
gtttatcagaggtcaaaaaaacacggtgttttccgggtgctgccggtaaaaggcgcatctgtctatggcaagccg

SEQ ID NO: 180375 - DNA, 75 bp, synthetic construct
  source 1..75: mol_type = other DNA
gatgatccggagattttttcgcagacagaggcgcagcaactggtcgcggaagagcttgtggagaagtgggaaaaa

SEQ ID NO: 180376 - DNA, 75 bp, synthetic construct
  source 1..75: mol_type = other DNA
cagagatcaaaaaaacacggtgttttccgggtgctgccggtaaaaggcgcgtctgtctatggcaagccggtgatc

SEQ ID NO: 180377 - DNA, 75 bp, synthetic construct
  source 1..75: mol_type = other DNA
atttcccgtgtctgctgggacaccggggggatcgatggtgaaattgtttatcagagatcaaaaaaacacggtgtt

SEQ ID NO: 180378 - DNA, 75 bp, synthetic construct
  source 1..75: mol_type = other DNA
acagcgccggtgatgaggagataccgccaccgcgctcaatcacgtaccacgtgtggacagcgtacagtccgttca

SEQ ID NO: 180379 - DNA, 75 bp, synthetic construct
  source 1..75: mol_type = other DNA
cgtgacaatactctcacgctgaaacgcttttcatcgggggtgggcttctggtgcctgggtggtgcggcagcaaaa

SEQ ID NO: 180380 - DNA, 75 bp, synthetic construct
  source 1..75: mol_type = other DNA
gcggatgaagccacgtcgtatgccatccgttttcctgatgatccggagattttttcgcagacagaggcgcagcaa

SEQ ID NO: 180381 - DNA, 75 bp, synthetic construct
  source 1..75: mol_type = other DNA
tggatttctgcactggcggccccactgctgggcgatctgttgcgcgaagtggtatggccgacagatgtgtccacg

SEQ ID NO: 180382 - DNA, 75 bp, synthetic construct
  source 1..75: mol_type = other DNA
gtgcacaacgttgttttaactatagaaatgtcaattaatatgcagaaagatgagcagacggaatacaaaaccgtg

SEQ ID NO: 180383 - DNA, 75 bp, synthetic construct
  source 1..75: mol_type = other DNA
aaaaattcctgatgcaaaaccgcatcccgtacaaaatatccggcggtacttcattcttctcccgccctgaaatca

SEQ ID NO: 180384 - DNA, 75 bp, synthetic construct
  source 1..75: mol_type = other DNA
tcctgaaaaactgtattggggcggcagacctgatgttgacccctcttccaccggctacggttgattttcattctt

SEQ ID NO: 180385 - DNA, 75 bp, synthetic construct
  source 1..75: mol_type = other DNA
gatgcgcgtttaacgcgttctggcgatacgtttatcccactgtacgatcgcgttgaaatcgcccataaacatggc

SEQ ID NO: 180386 - DNA, 75 bp, synthetic construct
  source 1..75: mol_type = other DNA
aaaaaagccgggagcaaacggatagtcgttctcgatcctggtcatggcggaattgataccggagcgattggccgc

SEQ ID NO: 180387 - DNA, 75 bp, synthetic construct
  source 1..75: mol_type = other DNA
cccggacaaaatcagtacgaaatccttcgacgcaatatcattgatcgtgttgcggatgattatgactttatcttt

SEQ ID NO: 180388 - DNA, 75 bp, synthetic construct
  source 1..75: mol_type = other DNA
agcaggccatcaaagagatggaagataatgggtaccagttcaacaagaaacaggtcggtaacgttgaacagtacg

SEQ ID NO: 180389 - DNA, 75 bp, synthetic construct
  source 1..75: mol_type = other DNA
agcctgacgctcggctcgcatattctgaaaaagattaagccggtgcataaactgcacagccgcaacaccgaacaa

SEQ ID NO: 180390 - DNA, 75 bp, synthetic construct
  source 1..75: mol_type = other DNA
cactcacttcgcgccgccaggtgctgaaagccggtttggctgccctgacgttgtcaggaatgtcgcaagccatcg

SEQ ID NO: 180391 - DNA, 75 bp, synthetic construct
  source 1..75: mol_type = other DNA
aggcagaggtgactcggcaggctgatgtgacgcgaatactgccgctgattaacgagctggaggcgctgccagagc

SEQ ID NO: 180392 - DNA, 75 bp, synthetic construct
  source 1..75: mol_type = other DNA
cgcaggagcatcggtttttgccctctctaaccgcggtgcaagtagcgcaatggcgaaatacctgtctgaacgcga

SEQ ID NO: 180393 - DNA, 75 bp, synthetic construct
  source 1..75: mol_type = other DNA
caacggacacagcaagccgaaagcaaaaaaatctggcggcaaacgtgtcgttgttctcgatccaggccacggcgg

SEQ ID NO: 180394 - DNA, 75 bp, synthetic construct
  source 1..75: mol_type = other DNA
cgtttcgtcagaaaatcgccacagcgattgctgaaggcgtgatcagttatttccactggttcgacaaccagaaag

SEQ ID NO: 180395 - DNA, 75 bp, synthetic construct
  source 1..75: mol_type = other DNA
ttccctgccccgcctggatggctttgaacgttgcggagaaacgtttgatacgattattagtgccaacccagcatc

SEQ ID NO: 180396 - DNA, 75 bp, synthetic construct
  source 1..75: mol_type = other DNA
aacgattgaacgctggcagtctcagggactcccttgcgtctccggaggtggtaagggcgttgaatctgtatttga

SEQ ID NO: 180397 - DNA, 75 bp, synthetic construct
  source 1..75: mol_type = other DNA
ggggttgtgctttctttgttgccagtcattactacacttacctgtcagcctggtttacgggctttgaagacgaac

SEQ ID NO: 180398 - DNA, 75 bp, synthetic construct
  source 1..75: mol_type = other DNA
gttgtcaggcaccgatcgggtgctgggcgtctgtttcggtgcgttgcgcggtgtgttgattgttgctgccattct

SEQ ID NO: 180399 - DNA, 75 bp, synthetic construct
  source 1..75: mol_type = other DNA
tatgaatcatatgaaccacggcgggaagttcgatttccaccatgccaacaaaatcaacggtcaggcgtttgatat

SEQ ID NO: 180400 - DNA, 75 bp, synthetic construct
  source 1..75: mol_type = other DNA
gcgccgcgtggctggttgcggctgcgtttgctcaatggctgtaacgcccgctcgctcaattttgccaccagtgat

SEQ ID NO: 180401 - DNA, 75 bp, synthetic construct
  source 1..75: mol_type = other DNA
tatttatgcatatcgtcagatccctaagtatagggatatccataaagagccttatgtgattttcgtcgttaatct

SEQ ID NO: 180402 - DNA, 75 bp, synthetic construct
  source 1..75: mol_type = other DNA
aaaaaagctcgagttgaagctgaacgatttacaaaggcggtttttgatcgaattgagtacatccgtggagcttca

SEQ ID NO: 180403 - DNA, 75 bp, synthetic construct
  source 1..75: mol_type = other DNA
ctattgactcgagcgaacgttgactatgccgtaagtgaaatggaagaaaagggttatgttttcgataaacgccct

SEQ ID NO: 180404 - DNA, 75 bp, synthetic construct
  source 1..75: mol_type = other DNA
ctgccgggtattgtggtggcgttaattgtggctggcgtcagctactaccagactggcaattatcagcaggtgaaa

SEQ ID NO: 180405 - DNA, 75 bp, synthetic construct
  source 1..75: mol_type = other DNA
atctgaaagctctgccaagctggttagggtgataggccaaagcatggagccaacccttcacgatggtgatgttgt

SEQ ID NO: 180406 - DNA, 75 bp, synthetic construct
  source 1..75: mol_type = other DNA
gacgagtttgtcgcattgcctcttcttaacgtttcgctttcggctggaagcggtagctgcgagatagaagaatca

SEQ ID NO: 180407 - DNA, 75 bp, synthetic construct
  source 1..75: mol_type = other DNA
tgcttttttacccgtgctggtaacactctctgtacatgtcccggaactgccgattattggtcatattccttatgg

SEQ ID NO: 180408 - DNA, 75 bp, synthetic construct
  source 1..75: mol_type = other DNA
cgcgacgccgccaacggtacgtgagttgttcagcgccgtgcggaaaaactatttccgcctctattttcactatat

SEQ ID NO: 180409 - DNA, 75 bp, synthetic construct
  source 1..75: mol_type = other DNA
ccgcataaagtcactatcgaacaattttaccgcgaagtgggcgtctttctggggattgcgctgatcgcggtggtg

SEQ ID NO: 180410 - DNA, 75 bp, synthetic construct
  source 1..75: mol_type = other DNA
tcttcggcattgcgattttcgtcgcgctgatgtttatgtttgtgcgttttgtgcatcacaacatcccggataaga

SEQ ID NO: 180411 - DNA, 75 bp, synthetic construct
  source 1..75: mol_type = other DNA
tacaaacgtctgcgcagctttgaacatgagctggatggtgacaaaattcaggaagtaacccatacgttgagttaa

SEQ ID NO: 180412 - DNA, 75 bp, synthetic construct
  source 1..75: mol_type = other DNA
tgttgccggtacgattacgctcggcctgatgacgcagattaccaacgttttttggtcaggttcgcggtgctttcc

SEQ ID NO: 180413 - DNA, 75 bp, synthetic construct
  source 1..75: mol_type = other DNA
attcccacgccagcctcggctgggagaccttcaccgataaagtcatcagcctgattaaccagcaccgcgaaggcg

SEQ ID NO: 180414 - DNA, 75 bp, synthetic construct
  source 1..75: mol_type = other DNA
ctcgccagccacgatgacgccacgcacgcccacgtggccgaatcccatcagcttggcagcgtgatcgccgaattt

SEQ ID NO: 180415 - DNA, 75 bp, synthetic construct
  source 1..75: mol_type = other DNA
tggcctgctggatatcctctcttccgactactaccccgccagcctgctcgatgcggcgttccgcgtcgccgatga

SEQ ID NO: 180416 - DNA, 75 bp, synthetic construct
  source 1..75: mol_type = other DNA
ttgagtcagcaggtgcagcacttgagcgagcggacagaacgcttgagccagttatacagcgagaacaggagataa

SEQ ID NO: 180417 - DNA, 75 bp, synthetic construct
  source 1..75: mol_type = other DNA
tgaacgccttagagcaactgcaacaggactatatgcagcggctgagcgaatgggagagcgccttcgtggaattgc

SEQ ID NO: 180418 - DNA, 75 bp, synthetic construct
  source 1..75: mol_type = other DNA
gctgatgtttatgttcgttcgttttgtataccacaatattcccgataaacaggatcttccttggattaaagggat

SEQ ID NO: 180419 - DNA, 75 bp, synthetic construct
  source 1..75: mol_type = other DNA
tcgaagggaaggtgagccgtcgctgggcgaagaaacaccatccacgctggtatcgtgaaatcgagaaggcagaag

SEQ ID NO: 180420 - DNA, 75 bp, synthetic construct
  source 1..75: mol_type = other DNA
aaggaaaactggagcgtgagtatcaggatatcgccgccctgccgcaggatgcgaaattaaaaatcaaacgtccgg

SEQ ID NO: 180421 - DNA, 75 bp, synthetic construct
  source 1..75: mol_type = other DNA
catttgccggggctgattacacttaatgcttaccgcacgctcaccgttctgcacgaccccgccactttacgtttt

SEQ ID NO: 180422 - DNA, 75 bp, synthetic construct
  source 1..75: mol_type = other DNA
cgtccatcccggaccgtgccgtttcagttaaccgcgattgaacagcggggcggtcgtcttcttgccgcactggct

SEQ ID NO: 180423 - DNA, 75 bp, synthetic construct
  source 1..75: mol_type = other DNA
tctggcgtccgtactttgcgcagtacttcccgatgcaggttgttcgctacagcctgctgatccacgcggctgcgg

SEQ ID NO: 180424 - DNA, 75 bp, synthetic construct
  source 1..75: mol_type = other DNA
cagagcactgaaacgcctaagagctatgaaatggacgccgacgtgagaaaacgcattttaaacgctattggtatt

SEQ ID NO: 180425 - DNA, 75 bp, synthetic construct
  source 1..75: mol_type = other DNA
agttttgtccaaagaactatcttgggcaaaaaatcacttgaacatataaccaaacaactcccacctcgggttaca

SEQ ID NO: 180426 - DNA, 75 bp, synthetic construct
  source 1..75: mol_type = other DNA
aaggtaagatgcttggtgctcgtcagcgtaataaaattaatgggcaaggttattataatgaaattggtattggct

SEQ ID NO: 180427 - DNA, 75 bp, synthetic construct
  source 1..75: mol_type = other DNA
aaggtaaaatgcttggtgctcgtcagcgtaataaagtcaatggtcagggctattacaatgaaattggtatcggtt

SEQ ID NO: 180428 - DNA, 75 bp, synthetic construct
  source 1..75: mol_type = other DNA
accgcattccacgataccgccactgtgcgtcagttactcaacctgcgcccgtcaccggagtttgaacgctggctg

SEQ ID NO: 180429 - DNA, 75 bp, synthetic construct
  source 1..75: mol_type = other DNA
acagcgtgagaccctcagaacggtgacagcgcagctggccgttgccgggaaaccggatgagcagctcgcagtgct

SEQ ID NO: 180430 - DNA, 75 bp, synthetic construct
  source 1..75: mol_type = other DNA
tgcgacggccaagatcctgccgtggccgtggggtgaatcaagctaccggagtgctttagccgatataggggttcg

SEQ ID NO: 180431 - DNA, 75 bp, synthetic construct
  source 1..75: mol_type = other DNA
cggcaggccctgagacgcataaaacggcagtacacgatattcagtaagtcagccgcggtaatcggtgttttggta

SEQ ID NO: 180432 - DNA, 75 bp, synthetic construct
  source 1..75: mol_type = other DNA
aggaaattgcgctaacggtagggaagctgcgcgttgagcttgaagcagaaaaacagcgggcaaaagttctattta

SEQ ID NO: 180433 - DNA, 75 bp, synthetic construct
  source 1..75: mol_type = other DNA
tatcctgctgattttatatatgaaaatattctcattgaagctaatatcatacatgctgcacatgtaaatgatgtc

SEQ ID NO: 180434 - DNA, 75 bp, synthetic construct
  source 1..75: mol_type = other DNA
acgaaccctatgccattgccaagattgccgggataaaactgtgcgaatcctataaccgtcagcacggtcgggatt

SEQ ID NO: 180435 - DNA, 75 bp, synthetic construct
  source 1..75: mol_type = other DNA
ttggcataaacatgaacaacgtcacaaattcatccattgattttaccccactggtcaacgagccattcgtgctgg

SEQ ID NO: 180436 - DNA, 75 bp, synthetic construct
  source 1..75: mol_type = other DNA
aacgtcacaaattcatccattgattttaccccactggtcaacgagccgttcgtgctgcctgtcggcgtgaccatc

SEQ ID NO: 180437 - DNA, 75 bp, synthetic construct
  source 1..75: mol_type = other DNA
tcctggtctggcaatgccccatgcgccctattcttctatcatcggtattccgctggtggaaccggttattcgtcg

SEQ ID NO: 180438 - DNA, 75 bp, synthetic construct
  source 1..75: mol_type = other DNA
ggcaggattcagagcgtacagaggtaaaccggggtattcgggaagcatggtctgggtcaaaatacgttgctgtaa

SEQ ID NO: 180439 - DNA, 75 bp, synthetic construct
  source 1..75: mol_type = other DNA
ccaagctgggtgcgtctatcaaccgtctgaacgacacggctaataacctgaccagtatgcaggacaacaccgaag

SEQ ID NO: 180440 - DNA, 75 bp, synthetic construct
  source 1..75: mol_type = other DNA
tgggcgcggaatcttccgacaccatgaccgtgaatatttcaagccaactgaacacgctggtgactgacctttctg

SEQ ID NO: 180441 - DNA, 75 bp, synthetic construct
  source 1..75: mol_type = other DNA
ctggttccaggctcctgccaatgccgttgaaggtctgttcttccccggatttggcgttgacgacgctgctgctga

SEQ ID NO: 180442 - DNA, 75 bp, synthetic construct
  source 1..75: mol_type = other DNA
atatatcccaaatttacccttaccctggatggcgtaaagctggaagtcagccgtgcggataatgcgactgatggg

SEQ ID NO: 180443 - DNA, 75 bp, synthetic construct
  source 1..75: mol_type = other DNA
tcaggcatgtcaataggaacgacttctgtttctgccatttcacgcccgtcaatacgataggtgttaatacacagt

SEQ ID NO: 180444 - DNA, 75 bp, synthetic construct
  source 1..75: mol_type = other DNA
ttttgccttgctgattaatttatggactgacgataaagacaatttgtggaccaatatcgtcgaacgccagagaca

SEQ ID NO: 180445 - DNA, 75 bp, synthetic construct
  source 1..75: mol_type = other DNA
aggacttgctggcttatctgcgcgtactgactaacccggatgatgacagcgcgtttttgcggatcgttaacacgc

SEQ ID NO: 180446 - DNA, 75 bp, synthetic construct
  source 1..75: mol_type = other DNA
aggatttgctggcttatctgcgtgtgctgactaacccggacgatgatagtgcgttcctgcgtatcgttaacacgc

SEQ ID NO: 180447 - DNA, 75 bp, synthetic construct
  source 1..75: mol_type = other DNA
aatcgacccggtagtgacctttgccaatagcccggaaagctacatgcagtatgtcgatcagcatccggaacagag

SEQ ID NO: 180448 - DNA, 75 bp, synthetic construct
  source 1..75: mol_type = other DNA
atcacttcgtcaataaaacgcagtacaaagattacgccattctttatcgcggcaaccatcagtcgcgggtatttg

SEQ ID NO: 180449 - DNA, 75 bp, synthetic construct
  source 1..75: mol_type = other DNA
ttagctggatgacggagatgttggaaggcagtgaactggatgagccgatgaccctcactcaggtggtaacgcgct

SEQ ID NO: 180450 - DNA, 75 bp, synthetic construct
  source 1..75: mol_type = other DNA
agctgatttcgaccatctctaactggaagaacgatctcaaaacaccggcgcaggcggcggcagaagcaaagggcg

SEQ ID NO: 180451 - DNA, 75 bp, synthetic construct
  source 1..75: mol_type = other DNA
cgatcagccgttcctgttgctcctcgacggtgtaaccgatccgcataacctcggcgcgtgcctgcgtagcgcaga

SEQ ID NO: 180452 - DNA, 75 bp, synthetic construct
  source 1..75: mol_type = other DNA
cctggacgtcagtatcaggaaagcgatctgccggatctgatcgcttcgctcgaacaaccgttcctgctgatcctc

SEQ ID NO: 180453 - DNA, 75 bp, synthetic construct
  source 1..75: mol_type = other DNA
ggaacccgttatacgtcgaacattgggaataattcgccgtaaagatgccgtactttctccagcagcagaacgctt

SEQ ID NO: 180454 - DNA, 75 bp, synthetic construct
  source 1..75: mol_type = other DNA
ctcatgaccgcccagctcgacggcgtggttgaacgctgcaatcagcactggctgaccggggagggcaacgtatga

SEQ ID NO: 180455 - DNA, 75 bp, synthetic construct
  source 1..75: mol_type = other DNA
tacctcatgaccgcccagctcgacggcgtggttgaacgctgcaatcagcactggctgaccggggagggcaacgta

SEQ ID NO: 180456 - DNA, 75 bp, synthetic construct
  source 1..75: mol_type = other DNA
gcgcaatgtcggccagctcgtcagcgacctgatgcaggtacaggactgcgccaccgttcgtcgtgacccggcgca

SEQ ID NO: 180457 - DNA, 75 bp, synthetic construct
  source 1..75: mol_type = other DNA
ccgaaattttcggggtaagcgtccgaacgattcagaactggcaggagcaaggtatgccggttgtccgcggtggtg

SEQ ID NO: 180458 - DNA, 75 bp, synthetic construct
  source 1..75: mol_type = other DNA
actgatattggagcgctgccaacgactggagggactatttcaggtccgttgtctgttactgatgggatcaccggg

SEQ ID NO: 180459 - DNA, 75 bp, synthetic construct
  source 1..75: mol_type = other DNA
atggctaagtacaactctattgatctatctgttagatctcaagatcttttaaccgcttttctgcaacattataca

SEQ ID NO: 180460 - DNA, 75 bp, synthetic construct
  source 1..75: mol_type = other DNA
tgacgggcagattgattatcaactggatgtgatgaccgctgccgtgggttggtttggcgatacgctgctgaccaa

SEQ ID NO: 180461 - DNA, 75 bp, synthetic construct
  source 1..75: mol_type = other DNA
agccttgccgctgtggagccgcgcagtatttgcggcggaacgcccaacgttaccgatccctgatttgctcacgac

SEQ ID NO: 180462 - DNA, 75 bp, synthetic construct
  source 1..75: mol_type = other DNA
gtgctgatgggcgagcgttttgaagtgctggtggaggttaacgacaacaaaccctttgacctggtgacgctgccg

SEQ ID NO: 180463 - DNA, 75 bp, synthetic construct
  source 1..75: mol_type = other DNA
tgaaattcaaccacgatgcgccgaaagaacatgcttatatggcgcactgccacctgctggagcatgaagataccg

SEQ ID NO: 180464 - DNA, 75 bp, synthetic construct
  source 1..75: mol_type = other DNA
cgtttgacaagccgcatccggtaatgcggatccagccgatttccattagtgcttcaggtgccttacctgacgcgt

SEQ ID NO: 180465 - DNA, 75 bp, synthetic construct
  source 1..75: mol_type = other DNA
tcagtgccaatccggtgcctggtcggggtttgaatcctaccccgtgggaagtcctatcccgtggccatctgccac

SEQ ID NO: 180466 - DNA, 75 bp, synthetic construct
  source 1..75: mol_type = other DNA
ggaacggtccgctctgatggtcgtcttactgccggcgagtatttacagctaaacggaatcgccaacgcaggcact

SEQ ID NO: 180467 - DNA, 75 bp, synthetic construct
  source 1..75: mol_type = other DNA
gtgaaaaaattcagactcgatgacgataaaggttttattctgcttgaaattcttgctggcctgatagtaattggt

SEQ ID NO: 180468 - DNA, 75 bp, synthetic construct
  source 1..75: mol_type = other DNA
cagcaaaagcagctcttctctgtctacatctatggaacgcctggcgacaggtaaccggattaactcttctgccga

SEQ ID NO: 180469 - DNA, 75 bp, synthetic construct
  source 1..75: mol_type = other DNA
aggaaaaaatggcacagcaaccggtgtttttggtggatggacagataaacccggcgactatggactcagctgcaa

SEQ ID NO: 180470 - DNA, 75 bp, synthetic construct
  source 1..75: mol_type = other DNA
atatatctgaaaccagcattttaccttctcattagcactattgttttgtttgtagggtatatagcatggcagaaa

SEQ ID NO: 180471 - DNA, 75 bp, synthetic construct
  source 1..75: mol_type = other DNA
ttttcttccttcgccgtggcggctatctgcctgcaaccgctgctgggctgggtaacggataagctgggacctaaa

SEQ ID NO: 180472 - DNA, 75 bp, synthetic construct
  source 1..75: mol_type = other DNA
ttgcactggcaacatgagccagtcgcactggcccccggagataaatatgatcgtgatggctgtttttcaggatgt

SEQ ID NO: 180473 - DNA, 75 bp, synthetic construct
  source 1..75: mol_type = other DNA
gttggatgaatgatccaaatggcctgatttattttaatggccgttaccatgcgttcttccagcatcatccggcaa

SEQ ID NO: 180474 - DNA, 75 bp, synthetic construct
  source 1..75: mol_type = other DNA
tttcttcaggtgtggtaattttcactggctgatgttctcaccacaggggatgaccccttccggttatcggttccg

SEQ ID NO: 180475 - DNA, 75 bp, synthetic construct
  source 1..75: mol_type = other DNA
caggttattcagccggattgcgttaaaaatggcgcagatgcctatctgaatgaacagtggattggatcaaccgaa

SEQ ID NO: 180476 - DNA, 75 bp, synthetic construct
  source 1..75: mol_type = other DNA
gttatccgtggaaacgtagaacaaattgaaccaaatttattaggcgtttacgccggcggtgatgctgccaactta

SEQ ID NO: 180477 - DNA, 75 bp, synthetic construct
  source 1..75: mol_type = other DNA
gatgccagtgatggcgatcatgattaagcgcaacggcgatgctttgcatgaacgctttaagctggcacaggcggc

SEQ ID NO: 180478 - DNA, 75 bp, synthetic construct
  source 1..75: mol_type = other DNA
attgatttgctgggcggtgccggaacctcagaatcaccgctgggcgcaatattgcatacggtagaaggctcaccg

SEQ ID NO: 180479 - DNA, 75 bp, synthetic construct
  source 1..75: mol_type = other DNA
agaggctgatttttgggtggcgattgaagctggcattgatggtgacagcaccttcagttgggtggtgattgaaaa

SEQ ID NO: 180480 - DNA, 75 bp, synthetic construct
  source 1..75: mol_type = other DNA
tgattctggaaaaagtgcgtgaaggtgaggcgcttggtcccgtgatgtcgcgttataccggtattgatgagattg

SEQ ID NO: 180481 - DNA, 75 bp, synthetic construct
  source 1..75: mol_type = other DNA
ggattaagcaagatgaccttgatagtctgaaatctttaaatgcttttggactggatttagcaaggttactaagca

SEQ ID NO: 180482 - DNA, 75 bp, synthetic construct
  source 1..75: mol_type = other DNA
tggtgcgtaaaggcggtgaagtgcttactcgtactcgtgccacatctgctcgccgcgaaaacggcctgtggattg

SEQ ID NO: 180483 - DNA, 75 bp, synthetic construct
  source 1..75: mol_type = other DNA
gaaggcacttaacagctttaagattgatattgcccgtctattgagtatcaaaattcacaagttagcaatggaggt

SEQ ID NO: 180484 - DNA, 75 bp, synthetic construct
  source 1..75: mol_type = other DNA
gccacatcatgcgtgagatccgcgaagctgtcgccagcctgattgtccccggcgtctttatggtcagcctgacgt

SEQ ID NO: 180485 - DNA, 75 bp, synthetic construct
  source 1..75: mol_type = other DNA
tcgcatcacccgcccactggcggaactgcaaaaagagctggaagcgcgtaccgccgacaacctgacacctattgc

SEQ ID NO: 180486 - DNA, 75 bp, synthetic construct
  source 1..75: mol_type = other DNA
gcgtacctgataggcgcgctggtggtctggctggtgatgcagtgtctgggcgagctttccgtggcgatgccggaa

SEQ ID NO: 180487 - DNA, 75 bp, synthetic construct
  source 1..75: mol_type = other DNA
atgttaatcctctggagtacctcgtatctcgacgaagccgagcagtgccgtgacgtgttactgatgaacgaaggc

SEQ ID NO: 180488 - DNA, 75 bp, synthetic construct
  source 1..75: mol_type = other DNA
tgggcatgaagcaggggcatttaccggggcggtcaaaaaacgtatcggtaaaatagaacatgcgaatggcggcac

SEQ ID NO: 180489 - DNA, 75 bp, synthetic construct
  source 1..75: mol_type = other DNA
cattgaacgattaggtgccaatcaattaattccggtgaattgccgtgttattgcagcgaccaaggaagatttact

SEQ ID NO: 180490 - DNA, 75 bp, synthetic construct
  source 1..75: mol_type = other DNA
agcgcagaacagaactcaatttaactcaggtcgaagttgctaaacgagcgggcataagccagcagtcaatagaag

SEQ ID NO: 180491 - DNA, 75 bp, synthetic construct
  source 1..75: mol_type = other DNA
tgccggtggtctggtcctgactgcactgacaagtatgatgaaagcaaactcatccaaggcgaatgaatatcttca

SEQ ID NO: 180492 - DNA, 75 bp, synthetic construct
  source 1..75: mol_type = other DNA
tcgtgcttctgtacctgcaccaaaagttaccgatcggattcgagctgtagctgccgcgaatgatgacgccagtaa

SEQ ID NO: 180493 - DNA, 75 bp, synthetic construct
  source 1..75: mol_type = other DNA
ggcctccggtagcgatattgcctttgaacgactggcacccgtgctggaagccgttgccggaaaagtttatcgcat

SEQ ID NO: 180494 - DNA, 75 bp, synthetic construct
  source 1..75: mol_type = other DNA
gctaacgatgagcaacccgatcccactatggagcaagcctttattcaattgatccacgactgggataaggagcat

SEQ ID NO: 180495 - DNA, 75 bp, synthetic construct
  source 1..75: mol_type = other DNA
gcgggaagctgattgccagcggcacgccggacgatttgaaagcgcagtcggctaacgatgagcaacccgatccca

SEQ ID NO: 180496 - DNA, 75 bp, synthetic construct
  source 1..75: mol_type = other DNA
gccgagcagtgccgtgatgtgttgctgatgaacgaaggcgagctgctgtatcagggggaaccgacggctctgacg

SEQ ID NO: 180497 - DNA, 75 bp, synthetic construct
  source 1..75: mol_type = other DNA
ttatcatctacaagtctacgggaacgttgcccagctattttggcagagacacctcttatcatcgacctcctgata

SEQ ID NO: 180498 - DNA, 75 bp, synthetic construct
  source 1..75: mol_type = other DNA
aatcactggatgaagtcaaagacaaagcgctgatggtccacgttggcggcgataatatgtccgatcaacccaaac

SEQ ID NO: 180499 - DNA, 75 bp, synthetic construct
  source 1..75: mol_type = other DNA
gcatgcaattatgatacacaaaggcggtgacaatcattcagactcaccactcccgtcaggaggagggggaggccg

SEQ ID NO: 180500 - DNA, 75 bp, synthetic construct
  source 1..75: mol_type = other DNA
gataccatggcatataccgcctctgcactgtcgttcatgctggagaatcttggtaaaccggtcattgtgacaggg

SEQ ID NO: 180501 - DNA, 75 bp, synthetic construct
  source 1..75: mol_type = other DNA
agaagccagcgatcgtgggattgtggtggttaacctgacacaatgtatgtccggtaaagtcaatatgggagggta

SEQ ID NO: 180502 - DNA, 75 bp, synthetic construct
  source 1..75: mol_type = other DNA
ggtcaacctgacacaatgtatgtccggtaaagtgaacatgggtggttatgccaccggtaacgccctcgcccatgc

SEQ ID NO: 180503 - DNA, 75 bp, synthetic construct
  source 1..75: mol_type = other DNA
agtgactctactatggttaatcttaaatcgtcagtggaaattattgatgctgacctctatcgttatttctgttgc

SEQ ID NO: 180504 - DNA, 75 bp, synthetic construct
  source 1..75: mol_type = other DNA
taatttataaacttcaacaaactgatagttcttatcgttacactaatggtactcagggtacggcctggacattaa

SEQ ID NO: 180505 - DNA, 75 bp, synthetic construct
  source 1..75: mol_type = other DNA
atggttggcatgtcggctttgtcgtacactttgttaaacagtctggaggaaatactgaaagaaaccgatattgca

SEQ ID NO: 180506 - DNA, 75 bp, synthetic construct
  source 1..75: mol_type = other DNA
gagcctggcatggtcatctgttgccagacggccctaacaccatgggcggctttccgggcgttgcgctgctgacgg

SEQ ID NO: 180507 - DNA, 75 bp, synthetic construct
  source 1..75: mol_type = other DNA
gcggtctgtatcagatcgtcacttattacggcaagctgggtgcagtcgagccagtgtataaagaaactctgtcct

SEQ ID NO: 180508 - DNA, 75 bp, synthetic construct
  source 1..75: mol_type = other DNA
atacgtccgctacccgctggttccgcttcagagcgttcctatccagtatcgtggtctgtatcagattgcgaccta

SEQ ID NO: 180509 - DNA, 75 bp, synthetic construct
  source 1..75: mol_type = other DNA
cacaaccgatcggcgtggtaacaatttatccggggatttctgctgacgttgtgcgcaatttcctccgtcaaccgg

SEQ ID NO: 180510 - DNA, 75 bp, synthetic construct
  source 1..75: mol_type = other DNA
cgattggtgctgtagcaacgacaccgtccaaatacttccatgctaattcaacggaagaagattcactggctgtcg

SEQ ID NO: 180511 - DNA, 75 bp, synthetic construct
  source 1..75: mol_type = other DNA
gtaataaagagaactggaaaccatactggaataaagcgttggtatttctctttattgcaacctttttccttgatg

SEQ ID NO: 180512 - DNA, 75 bp, synthetic construct
  source 1..75: mol_type = other DNA
gtcggatttacttaaatatccagtctctaaaggtcgtaagcacatccgaattactcaggacgctttagatacttt

SEQ ID NO: 180513 - DNA, 75 bp, synthetic construct
  source 1..75: mol_type = other DNA
gaagggacttaacggctttaagattgatattgcccgtctattgagtatcaaaattcacaaattagcgatgggggt

SEQ ID NO: 180514 - DNA, 75 bp, synthetic construct
  source 1..75: mol_type = other DNA
tcgcaaggaattgaacgaccgaaaatcattcggcgaagatgccgaacgccttgctaataacaagtggcttaacaa

SEQ ID NO: 180515 - DNA, 75 bp, synthetic construct
  source 1..75: mol_type = other DNA
ttactcagaacgatttagatactttgaagggacttaacaactttaagattgatattgcccgactattgagtctta

SEQ ID NO: 180516 - DNA, 75 bp, synthetic construct
  source 1..75: mol_type = other DNA
tttgaagggacttaacaactttaaaattgatatttcccgtctaatgagtatcaaaattcacaaattagcgatgga

SEQ ID NO: 180517 - DNA, 75 bp, synthetic construct
  source 1..75: mol_type = other DNA
atgaaaagcagacacacattaacccgtatttcagaggaagcttttaacgagcttacccgaattaaacagacaact

SEQ ID NO: 180518 - DNA, 75 bp, synthetic construct
  source 1..75: mol_type = other DNA
aagttttaaagaattcagtaacacagtgcttaaaggatttttagcatatagtttacttatacccgcattactaaa

SEQ ID NO: 180519 - DNA, 75 bp, synthetic construct
  source 1..75: mol_type = other DNA
agaaaacatcttataaaataggttttataatttttagtgcaattttcttgtttctgcttttaggaacgctctccc

SEQ ID NO: 180520 - DNA, 75 bp, synthetic construct
  source 1..75: mol_type = other DNA
taatcttttttatagtgtcatagcactgtcgctcattcttttatatgccacattcatatcacctgacctgaaaat

SEQ ID NO: 180521 - DNA, 75 bp, synthetic construct
  source 1..75: mol_type = other DNA
tcgccaggaattaagtgaccgcaaagcattcggcgaagatgcagaacggctggctaataacaaatggcttgataa

SEQ ID NO: 180522 - DNA, 75 bp, synthetic construct
  source 1..75: mol_type = other DNA
attgctgctgcaaataatctgtttgtaacgaatctgtatgaacgacagggacaggagttgtatatcagccacatg

SEQ ID NO: 180523 - DNA, 75 bp, synthetic construct
  source 1..75: mol_type = other DNA
gcggctatatgacgctcgcgcagtttgccatgattttctggcacgacctggcagcaccgatcctggcgggaatta

SEQ ID NO: 180524 - DNA, 75 bp, synthetic construct
  source 1..75: mol_type = other DNA
ccctggcgcagcaggtgggtaaccaaaacgacgccagcactgagctgaacctgagccacatcctgatcccgctgc

SEQ ID NO: 180525 - DNA, 75 bp, synthetic construct
  source 1..75: mol_type = other DNA
aacacctatcgtaaccagatccgcaaagagatgattatctctgaagtgcgtaacaacgaagtgcgtcgtcgcatc

SEQ ID NO: 180526 - DNA, 75 bp, synthetic construct
  source 1..75: mol_type = other DNA
tgaacatctttttgcacttgaacagtcggtggcatttttcgatttttaccaggaaaaaatccgtgagtgtgatga

SEQ ID NO: 180527 - DNA, 75 bp, synthetic construct
  source 1..75: mol_type = other DNA
gaacaggcccgcgtgaaactggaacagattgctgccgatatcaagagtggcaaaaccacgtttgccgctgcggcg

SEQ ID NO: 180528 - DNA, 75 bp, synthetic construct
  source 1..75: mol_type = other DNA
tttcgcccaggcattaagcaccgcgaagaaaggcgatattgttggtccgattcgttctggcgttggcttccatat

SEQ ID NO: 180529 - DNA, 75 bp, synthetic construct
  source 1..75: mol_type = other DNA
aaacgatgccagcactgagctgaacttaagccacatcctgatcccgctgccggaaaacccgtcttctgagcaggt

SEQ ID NO: 180530 - DNA, 75 bp, synthetic construct
  source 1..75: mol_type = other DNA
cgaagcgtaattacagcatggagctgaacgcccggacgttccggcagccggagaaaattgcgtttgtggtgaatt

SEQ ID NO: 180531 - DNA, 75 bp, synthetic construct
  source 1..75: mol_type = other DNA
ttgatgaagatgaaacagttatcagtgccagaactggttttccgcagggatgggcggttaataaagaagataacc

SEQ ID NO: 180532 - DNA, 75 bp, synthetic construct
  source 1..75: mol_type = other DNA
cattagtcatgtttggttttacataagcagtacatatctactgacgcactatgcaggaagactgctaattaaatg

SEQ ID NO: 180533 - DNA, 75 bp, synthetic construct
  source 1..75: mol_type = other DNA
caccacctttaactacccgactatggcggaagcctatcgggtcgcggcgctaaacggcttaaatcgcctgtttta

SEQ ID NO: 180534 - DNA, 75 bp, synthetic construct
  source 1..75: mol_type = other DNA
aaaaccggggctttggcaaagtccggcttccggcaggagataccgtttccccgaacgttgagaaagaggtgatcc

SEQ ID NO: 180535 - DNA, 75 bp, synthetic construct
  source 1..75: mol_type = other DNA
aactgggattactggaagcgggtagctgacggcagccagtcaatcagcccggattatgcgtatgacgatggccgc

SEQ ID NO: 180536 - DNA, 75 bp, synthetic construct
  source 1..75: mol_type = other DNA
cgatgaagccgtacaacgggcgctggaattcgctaaaaaggagggtaacacgttggtcatagtcaccgctgatca

SEQ ID NO: 180537 - DNA, 75 bp, synthetic construct
  source 1..75: mol_type = other DNA
gtagtcatgtttggtgcggttgttgctgaacgagataatacccatttatcgattccatttttagccgatgcactt

SEQ ID NO: 180538 - DNA, 75 bp, synthetic construct
  source 1..75: mol_type = other DNA
ctgggagtaagccgtctctctgcggtggcggttatcgcaaccacaatgtccattgagtgggggattctggaaacg

SEQ ID NO: 180539 - DNA, 75 bp, synthetic construct
  source 1..75: mol_type = other DNA
tctttctcagggagtttagtctccaggatttccggggcggttcagccgcaggtatcttcctgatgatgtgcggtg

SEQ ID NO: 180540 - DNA, 75 bp, synthetic construct
  source 1..75: mol_type = other DNA
tacggtggcgaaatgagcgcacaccattacttccgtgatttcgcttactgcgacagcggcatgatcccgtggctg

SEQ ID NO: 180541 - DNA, 75 bp, synthetic construct
  source 1..75: mol_type = other DNA
gatccggatgagaactgtttttgaacaggccattgatcaacgctcttcaactggtgcctggagaaatgctctttc

SEQ ID NO: 180542 - DNA, 75 bp, synthetic construct
  source 1..75: mol_type = other DNA
gtatgccaatgatgaaacacactatggttcttatcttgatagctggctgcaatacagctggtttgataatcatat

SEQ ID NO: 180543 - DNA, 75 bp, synthetic construct
  source 1..75: mol_type = other DNA
agttgaaggtgcatctatcgataaacaggatcatgccgctaatccttgtgggcaaattggtgagacggttgacct

SEQ ID NO: 180544 - DNA, 75 bp, synthetic construct
  source 1..75: mol_type = other DNA
aactctgaagaagactctcaagagcacactggcagccaactgcgaattgccgcttatggtccacatgccgcgaat

SEQ ID NO: 180545 - DNA, 75 bp, synthetic construct
  source 1..75: mol_type = other DNA
agttgagggagcatcgatcgacaaacaagatcacgccgctaatccttgtgggcaaattggtgaaacggtcgatct

SEQ ID NO: 180546 - DNA, 75 bp, synthetic construct
  source 1..75: mol_type = other DNA
cacagggagatattactacgccgggcggcgctcgccgtttaactggcgatcagactgctgccttgcgtgattctc

SEQ ID NO: 180547 - DNA, 75 bp, synthetic construct
  source 1..75: mol_type = other DNA
ggcctcactcaggcgctaaataccaaagatggcgcagtgatggtgatgagttacgggaactccgaagaggattca

SEQ ID NO: 180548 - DNA, 75 bp, synthetic construct
  source 1..75: mol_type = other DNA
gcaaaaacccctgctaggactgtttgctgacggcaatatgccagtgcgctggcaaggaccgaaagcaacgtacca

SEQ ID NO: 180549 - DNA, 75 bp, synthetic construct
  source 1..75: mol_type = other DNA
gtataacagatgatacatctgcattgatcttggctgcagaatatgcacgagaatcatccagaacattacgagcgg

SEQ ID NO: 180550 - DNA, 75 bp, synthetic construct
  source 1..75: mol_type = other DNA
attacgatgcaaagcaaaacaaaatttctaaccttgcagatccatcacttgagcaggacgctgtaaataatcgct

SEQ ID NO: 180551 - DNA, 75 bp, synthetic construct
  source 1..75: mol_type = other DNA
gtgtcaaacctgcagagaagctgaccgataaaaggattgcggagaaactggatatcgagcgtaactggtggcagt

SEQ ID NO: 180552 - DNA, 75 bp, synthetic construct
  source 1..75: mol_type = other DNA
aaaaaatatgctggaataaattcgacagcctgtgtctggtattcagcgtggccactttttttgtcgccccgcttc

SEQ ID NO: 180553 - DNA, 75 bp, synthetic construct
  source 1..75: mol_type = other DNA
tctccttatcttcattaatcaaaattcatttcatttgtgaaacatcacaatatttagaaaatggccctcttgcaa

SEQ ID NO: 180554 - DNA, 75 bp, synthetic construct
  source 1..75: mol_type = other DNA
catctaaccatagatatgctactgttgctaacatttcttccattaagatcaggattaataatgaaggggttccag

SEQ ID NO: 180555 - DNA, 75 bp, synthetic construct
  source 1..75: mol_type = other DNA
actctctgttccagccgtgctctgcgtcacctccgatattaacgtaccacgtattccttcgatgaaagccatcct

SEQ ID NO: 180556 - DNA, 75 bp, synthetic construct
  source 1..75: mol_type = other DNA
atgaaccatgacgatccggtttctctctatattgttacgcagccgaacgataaagcgcgtctgcgcccgctggtt

SEQ ID NO: 180557 - DNA, 75 bp, synthetic construct
  source 1..75: mol_type = other DNA
actaacaaaacagcaaaccaggcaaccttccactgaaataaaaatccggcagcgcaggctaccggatttctccct

SEQ ID NO: 180558 - DNA, 75 bp, synthetic construct
  source 1..75: mol_type = other DNA
aataaatgaactcaaagaaattgcagaacgcataaatgaaatatgcaaaaaacaccagatagattatgtattttc

SEQ ID NO: 180559 - DNA, 75 bp, synthetic construct
  source 1..75: mol_type = other DNA
gtgcggtcaatatcgctactcgttatcacgagtctgggacgtggatttgcccctatatttccagacacctgttat

SEQ ID NO: 180560 - DNA, 75 bp, synthetic construct
  source 1..75: mol_type = other DNA
aaccagggccaaatcggcgaatacgataccgccatcgccagcatcgccaaacgtgcagatgaagtgtacttcctg

SEQ ID NO: 180561 - DNA, 75 bp, synthetic construct
  source 1..75: mol_type = other DNA
gtgatcggcattgcgctgattgtgttacctcacgttgggatcaaagtcaccagcacaaccgaattttgtgtcagt

SEQ ID NO: 180562 - DNA, 75 bp, synthetic construct
  source 1..75: mol_type = other DNA
gcgcaccggaaatatcccactttgacgctaacggttggatcggcacgctcaacggcatgattggctttaccagcc

SEQ ID NO: 180563 - DNA, 75 bp, synthetic construct
  source 1..75: mol_type = other DNA
aatatagagacggtggaacttcttgtcagcaatggaattaatgtaaaccacagaaacaagtcaggcacccttgcc

SEQ ID NO: 180564 - DNA, 75 bp, synthetic construct
  source 1..75: mol_type = other DNA
aagttgatatagaatcactaaaagaacgctacttctatgaagaaatcctccaggaaaaatcacagagagagcaaa

SEQ ID NO: 180565 - DNA, 75 bp, synthetic construct
  source 1..75: mol_type = other DNA
cgcatcgaggcatataacaaacagaaagaagagttagcaattaaccgagagttggaaaacgccaaatcacctcgt

SEQ ID NO: 180566 - DNA, 75 bp, synthetic construct
  source 1..75: mol_type = other DNA
tggcgctggttgttgctaccggcgcgcaagctgccagtgaaaaagtcgagatgaacctcgtcacgtcgcaagggg

SEQ ID NO: 180567 - DNA, 75 bp, synthetic construct
  source 1..75: mol_type = other DNA
tccgggatgaaagacacctggacgattacggcagttaagccgaaataccacacttatgtggtggtgatcggtgaa

SEQ ID NO: 180568 - DNA, 75 bp, synthetic construct
  source 1..75: mol_type = other DNA
tcaactgaaatcctgacgatttttccgtggtacagctatctggtcggcttatttatttttgcgctcggcgtgata

SEQ ID NO: 180569 - DNA, 75 bp, synthetic construct
  source 1..75: mol_type = other DNA
acatggtgaacgatatcaaaccgatctgggcttatgcggattcgctgtacaacggcacctgtaaccagtgccacg

SEQ ID NO: 180570 - DNA, 75 bp, synthetic construct
  source 1..75: mol_type = other DNA
gaaaggcgacatggtgaacgatatcaaaccgatctgggcttatgcggattcgttgtacaacggcacctgtaacca

SEQ ID NO: 180571 - DNA, 75 bp, synthetic construct
  source 1..75: mol_type = other DNA
ggtattgcccaccagttaccggatatgagtagcggcttccgtaagcagttcgatgagctgcgcgccagtgctaat

SEQ ID NO: 180572 - DNA, 75 bp, synthetic construct
  source 1..75: mol_type = other DNA
aaatccgaatggtaaaaactgggtaggcaaagactccaccgctattgctggcgtgaacgtggatatcagcaaaga

SEQ ID NO: 180573 - DNA, 75 bp, synthetic construct
  source 1..75: mol_type = other DNA
gtgagggagccatgaaactgacaaatcagacgatcagcgtcaaagatggcagtaatgttcttagggtgcaggttg

SEQ ID NO: 180574 - DNA, 75 bp, synthetic construct
  source 1..75: mol_type = other DNA
cgaaaacgaaatcagcgtaggaactgaggtatcaagcgctacagcatggacgcgcacctttaccaatacgcagct

SEQ ID NO: 180575 - DNA, 75 bp, synthetic construct
  source 1..75: mol_type = other DNA
cggggaatcagtcacagtcaccacggcatacagtgagacgccacaggccgaagctgtttgggtggttgaatctga

SEQ ID NO: 180576 - DNA, 75 bp, synthetic construct
  source 1..75: mol_type = other DNA
taaaaccctttctgcatcggtcgccggcaacagcgcgaatctggaccgtattgatgaggtgattgccaacgacag

SEQ ID NO: 180577 - DNA, 75 bp, synthetic construct
  source 1..75: mol_type = other DNA
acgtcttctctcggctttgaagtgcagggtatctactcgggtcgctatctggtccgcgtcagggcggtgaacgcc

SEQ ID NO: 180578 - DNA, 75 bp, synthetic construct
  source 1..75: mol_type = other DNA
caaaacaatgccatcgcgctgataaccagcacgctcgcacaggttaaccagcgcaaccttctgagcgttcagtat

SEQ ID NO: 180579 - DNA, 75 bp, synthetic construct
  source 1..75: mol_type = other DNA
cgcatcgataccggagccatcattgaccagcggccggtgagcgtgatcccgcctggtaaccagtcgccgcctgcg

SEQ ID NO: 180580 - DNA, 75 bp, synthetic construct
  source 1..75: mol_type = other DNA
ccgcactgggccagcgaatcgacagcatcagcgtgtctatggacggcatgacgggcggggtgaagaactctgcta

SEQ ID NO: 180581 - DNA, 75 bp, synthetic construct
  source 1..75: mol_type = other DNA
ctacgcggatgcgatggagccggtttttgaacaggagctcgttgctcgcttcggcacaaaccagctcgaaatgac

SEQ ID NO: 180582 - DNA, 75 bp, synthetic construct
  source 1..75: mol_type = other DNA
tcgagctgagctggggattcccggcgaacaccgacgacacgctgaagacggaaattcagtacagtctgactggga

SEQ ID NO: 180583 - DNA, 75 bp, synthetic construct
  source 1..75: mol_type = other DNA
tccaacaactatgcagctggttctgctggttggaagttgaataaagctggagatgctgaattcaacaatgtgacc

SEQ ID NO: 180584 - DNA, 75 bp, synthetic construct
  source 1..75: mol_type = other DNA
ggacagacattcatccgggccagcttcatccaggacggcaccattgagaacgcaaaaatcggcaactatatccag

SEQ ID NO: 180585 - DNA, 75 bp, synthetic construct
  source 1..75: mol_type = other DNA
cagaccaaccagacaatcagcgtcaaggatggcaacaacgttctgagagtgcaggttggccgattaacgggggtg

SEQ ID NO: 180586 - DNA, 75 bp, synthetic construct
  source 1..75: mol_type = other DNA
gtattgtggatacgcccacgtactttgcctttgcaaaaggggcgggactgatgggggaggccggtcctgaagcca

SEQ ID NO: 180587 - DNA, 75 bp, synthetic construct
  source 1..75: mol_type = other DNA
gcacaatcttgaagtgccatttgaagcaggcagcggccccagccagatcgagcgccatcaacggcaaacgcttta

SEQ ID NO: 180588 - DNA, 75 bp, synthetic construct
  source 1..75: mol_type = other DNA
accgttaacggtgagaaacagttttaccactgctttggatgtggcgcgcacggcaacgcgatcgacttcctgatg

SEQ ID NO: 180589 - DNA, 75 bp, synthetic construct
  source 1..75: mol_type = other DNA
ggaaatgagaaaacgaatacaacgccttgaaatggagaatgaaatcctaaaaaaggctaccgcgctcttgatgtc

SEQ ID NO: 180590 - DNA, 75 bp, synthetic construct
  source 1..75: mol_type = other DNA
acattgtctcttactcatgcctccggttcgctgggcaataatctgagcggtaccggtacagtatccctgctcagc

SEQ ID NO: 180591 - DNA, 75 bp, synthetic construct
  source 1..75: mol_type = other DNA
ggcagtatgaacggcagtgcgggtctggtgtattccccggtctaccatatcgccattcagaatgacgggactaat

SEQ ID NO: 180592 - DNA, 75 bp, synthetic construct
  source 1..75: mol_type = other DNA
agcagaatatcagcgtcgaaaccatgcgcgtgagctgggaccaggcgcagaatgctatcgcctatgaagcgcaat

SEQ ID NO: 180593 - DNA, 75 bp, synthetic construct
  source 1..75: mol_type = other DNA
aacttgaccgtgtagctgatgcggcagcaggtgatcgccttatcctcaaccttccctccggagcgtcacagagca

SEQ ID NO: 180594 - DNA, 75 bp, synthetic construct
  source 1..75: mol_type = other DNA
tttcgtccggggactcaggcacaaaaatatattcagggtatccccggcacagaaaatgaaatcagcgtgggcacc

SEQ ID NO: 180595 - DNA, 75 bp, synthetic construct
  source 1..75: mol_type = other DNA
ccaccattacgctgtccggtttgccaccggaacgactggcggcagcatcgagcctctccaactttacgcgaacgc

SEQ ID NO: 180596 - DNA, 75 bp, synthetic construct
  source 1..75: mol_type = other DNA
atacagggcgacctgaccgctcagaacatttttctcaacgatacgccgctggcaaacgacagcggggaatacaac

SEQ ID NO: 180597 - DNA, 75 bp, synthetic construct
  source 1..75: mol_type = other DNA
caatgaaaaaattgctggtatggctgacgacattaaacaggccaacgacgaactggcgcaacaggcgcaggatat

SEQ ID NO: 180598 - DNA, 75 bp, synthetic construct
  source 1..75: mol_type = other DNA
aaaaattttcgctctacggcaacctgacggtcgaacagaatttacgctttttctctggtgtgtatggcttacgcg

SEQ ID NO: 180599 - DNA, 75 bp, synthetic construct
  source 1..75: mol_type = other DNA
ggtgccgatgtgattatcgaaaccagcggctacgccgacgcgctgcaatcggcacttcgcggcctggcatatggc

SEQ ID NO: 180600 - DNA, 75 bp, synthetic construct
  source 1..75: mol_type = other DNA
cgcgcgttgccgcgttggtggagtatgaagacagggcgatttcagccaatgaagtgaagatccgcgtgcggttcg

SEQ ID NO: 180601 - DNA, 75 bp, synthetic construct
  source 1..75: mol_type = other DNA
ctgggaggaattgccgcgttggtcagatctgactccctattcatggggaccatggctgaagattattactgaatt

SEQ ID NO: 180602 - DNA, 75 bp, synthetic construct
  source 1..75: mol_type = other DNA
aatatagccaggagttgcgtgatgccgggcaggagtatattccgcagataattgatgatttttctgaaggtgttt

SEQ ID NO: 180603 - DNA, 75 bp, synthetic construct
  source 1..75: mol_type = other DNA
gctgacgtacagcaggaagacggttttccagcaacagttgaagctctggcggaacagatccgtcaggctgacggt

SEQ ID NO: 180604 - DNA, 75 bp, synthetic construct
  source 1..75: mol_type = other DNA
atgcgtaaaaaagggcttactgtcagccgtctgcgcctgatggcgcgtctggcgggaatggccatggtgacgttt

SEQ ID NO: 180605 - DNA, 75 bp, synthetic construct
  source 1..75: mol_type = other DNA
tatctccaggatggtgttgtgctgtttggtcttgtgctcagtgcagttgcttttgtgaaggtggcagaagcggcg

SEQ ID NO: 180606 - DNA, 75 bp, synthetic construct
  source 1..75: mol_type = other DNA
cgatggataggagaagcatttggggctcgctggggttttgtaggaatgcttatgacctggctacaagtcatcccc

SEQ ID NO: 180607 - DNA, 75 bp, synthetic construct
  source 1..75: mol_type = other DNA
cctcggacgcgaagcgcatttcaataacgccaaaattgtcttctctcgcgtgcagcgaaccgaacccggattatc

SEQ ID NO: 180608 - DNA, 75 bp, synthetic construct
  source 1..75: mol_type = other DNA
atgaaaaagttagtagccacagcaccgcgcgttgctgcgctggttgagtatgaagatcgggcgattttagccaat

SEQ ID NO: 180609 - DNA, 75 bp, synthetic construct
  source 1..75: mol_type = other DNA
cgcgatgccaacgtacgcgtaggggattttgtggtggtggtcgggcttggcgcgatcggtcaaattgccatccaa

SEQ ID NO: 180610 - DNA, 75 bp, synthetic construct
  source 1..75: mol_type = other DNA
gcgcgttattaggtgtcgatcgtgaatttctcgaactcagcgaaaaaatcgccgccaaagaggcggagttgcttg

SEQ ID NO: 180611 - DNA, 75 bp, synthetic construct
  source 1..75: mol_type = other DNA
gccgagccagagaatatggtaagggtgaaggaaccaaggtaacgcccgagattgaacgcctttttaggttgacca

SEQ ID NO: 180612 - DNA, 75 bp, synthetic construct
  source 1..75: mol_type = other DNA
cacgggctgttttaatgaagagattagagctaaacgggttcgtttagtagagcagacaaatatcgcaactaaggc

SEQ ID NO: 180613 - DNA, 75 bp, synthetic construct
  source 1..75: mol_type = other DNA
aatttgatgaaagccactaccggattttattctttcaatctggtgaaatcatatggattcatatggaggaagcca

SEQ ID NO: 180614 - DNA, 75 bp, synthetic construct
  source 1..75: mol_type = other DNA
aaggatatctatctcgatggcacgccactggagaatgcagacggatcgcaaaacttcagtggcgtggcgtgggaa

SEQ ID NO: 180615 - DNA, 75 bp, synthetic construct
  source 1..75: mol_type = other DNA
catcggttattagataaagaaaagatgccgttgcagcggattctggttccgcctgtacgcgttattgaacggcgc

SEQ ID NO: 180616 - DNA, 75 bp, synthetic construct
  source 1..75: mol_type = other DNA
agttaaagcaggggtatataaaaaagacgtacgacccttaagtagtacagccacttctcaggcgttaggccctgg

SEQ ID NO: 180617 - DNA, 75 bp, synthetic construct
  source 1..75: mol_type = other DNA
gccttccgtgaggcgctccgtgaacgaaactggtactactggagcaacagtaatgatgactatacgttaacggac

SEQ ID NO: 180618 - DNA, 75 bp, synthetic construct
  source 1..75: mol_type = other DNA
gttgtgctggtggcgtcttgccaaagaagccggggcgaatgaagagaaacatgctgctattgccgagagatatgg

SEQ ID NO: 180619 - DNA, 75 bp, synthetic construct
  source 1..75: mol_type = other DNA
tttggatcaagatcatcactgcgctactgcctcgccatccacaaagaaacaactggcagctggcgcgcattatcc

SEQ ID NO: 180620 - DNA, 75 bp, synthetic construct
  source 1..75: mol_type = other DNA
aggggcgcaaaaagggctatcgattccagatggatttaaatgacggggataatgttgatatcagtatcagcctgc

SEQ ID NO: 180621 - DNA, 75 bp, synthetic construct
  source 1..75: mol_type = other DNA
attcatgaatatacgccgctgatggattcttctgatatgacgccagaagactggcagcatattgctgaagatatt

SEQ ID NO: 180622 - DNA, 75 bp, synthetic construct
  source 1..75: mol_type = other DNA
aaacaagcagatggttcatttcgttttgttcttcagttggtaaatggtcggtttcataatgaatcaagaggttat

SEQ ID NO: 180623 - DNA, 75 bp, synthetic construct
  source 1..75: mol_type = other DNA
gttcgaaggctgggcgaaagatgaagcgcaggcgctggcaatgctggagcagggggaagtgaacttcattccttg

SEQ ID NO: 180624 - DNA, 75 bp, synthetic construct
  source 1..75: mol_type = other DNA
caggcaccgtgcgggcaccgctggcgtgctttgaacaggcgctggaagcactggctgaaagcatggggattggtt

SEQ ID NO: 180625 - DNA, 75 bp, synthetic construct
  source 1..75: mol_type = other DNA
tggattattcattggttcgcgatgtcatcaaaacggtcgcacctgatgttcctgacggccaggctgttcatgcgc

SEQ ID NO: 180626 - DNA, 75 bp, synthetic construct
  source 1..75: mol_type = other DNA
tgtcggtgcgggtggcatggaagcggccagagcggtatctgaagagatggcggaaatttaccttgaacgcaatat

SEQ ID NO: 180627 - DNA, 75 bp, synthetic construct
  source 1..75: mol_type = other DNA
gattggggcaggcactgtacgggcaccgctggcctgctttgaacaggcgctggaagccctggctgaaagtatggg

SEQ ID NO: 180628 - DNA, 75 bp, synthetic construct
  source 1..75: mol_type = other DNA
atgagttccatcagcgcaatattgctacttcagcactgttaatgcgcgcgctggcaccgcaaattgcccgcctcg

SEQ ID NO: 180629 - DNA, 75 bp, synthetic construct
  source 1..75: mol_type = other DNA
tggcgcaggtctcagagcgggtaaactggctcggcctggggccgcaagaaaactatcccgaccgccttactgcag

SEQ ID NO: 180630 - DNA, 75 bp, synthetic construct
  source 1..75: mol_type = other DNA
atgaaaattcaggttggtgctaatgatggtgaaaccatcactatcaatctggcaaaaattgatgcgaaaactctc

SEQ ID NO: 180631 - DNA, 75 bp, synthetic construct
  source 1..75: mol_type = other DNA
cgaagtgtccaacatgtcgaaagcgcagattatccagcaggccggtaactccgtactggcaaaagccaaccaggt

SEQ ID NO: 180632 - DNA, 75 bp, synthetic construct
  source 1..75: mol_type = other DNA
attttgatgattggggcgcgcagaataaaactggctcagcttcagttgatcaaatgaggagtgagaagtccgaaa

SEQ ID NO: 180633 - DNA, 75 bp, synthetic construct
  source 1..75: mol_type = other DNA
tgctgaagatcccgatttctaccgcaatatgcgtattcaggatctggcgcaagggatccataagctgattcgtaa

SEQ ID NO: 180634 - DNA, 75 bp, synthetic construct
  source 1..75: mol_type = other DNA
acgctcccctccgcgtcccatatcatcccgcaactaaccaccagcgaaacggatttttgcatcgagctgggtaat

SEQ ID NO: 180635 - DNA, 75 bp, synthetic construct
  source 1..75: mol_type = other DNA
tgtttggtacagccatgatggtcgttgtgcccccggctgcgcaggcacagtcacctgccacgatcagcctcccac

SEQ ID NO: 180636 - DNA, 75 bp, synthetic construct
  source 1..75: mol_type = other DNA
gcatggtggcatatacccaggacgagaagttcattcgcttccctctggtgccgctgctgaataccccgctggaat

SEQ ID NO: 180637 - DNA, 75 bp, synthetic construct
  source 1..75: mol_type = other DNA
tactacggcaagctgggccaggtggaaaccccgtattccaatacgatctcttacctggacgttccggcgtcttaa

SEQ ID NO: 180638 - DNA, 75 bp, synthetic construct
  source 1..75: mol_type = other DNA
atacgtgcgctatccgctggtgccgttgcagagcgttcctgtccagtatcgcggtctgtaccagattgcgaccta

SEQ ID NO: 180639 - DNA, 75 bp, synthetic construct
  source 1..75: mol_type = other DNA
atggaacttggctggaccgttgtagagctggcagcagctcagcaggtaggtcgcccgattgacacccagaagtac

SEQ ID NO: 180640 - DNA, 75 bp, synthetic construct
  source 1..75: mol_type = other DNA
cgaccaacgcagcgaagacctgggcgacctccaccgctgacgaaatccgggcgagcattaatgccgggttgagtg

SEQ ID NO: 180641 - DNA, 75 bp, synthetic construct
  source 1..75: mol_type = other DNA
tggcttcccgcttaccctgtggggtatggagctgggctggaccgttccagaattgcaggcagctgcgcaggttgg

SEQ ID NO: 180642 - DNA, 75 bp, synthetic construct
  source 1..75: mol_type = other DNA
atgcgcccggaggggcgtaaaggcaaacgcattcgtaaaaaatttaaaacgaaatcagatgcagttttatatgag

SEQ ID NO: 180643 - DNA, 75 bp, synthetic construct
  source 1..75: mol_type = other DNA
taaactagctagtatacctgttaatggtacaaatgaattaattattaagaacatcaataacgcaacagcaattaa

SEQ ID NO: 180644 - DNA, 75 bp, synthetic construct
  source 1..75: mol_type = other DNA
gtgaaaaagactcttatgcttttaatttgcatgctaataagcagccctgtctttgcaacaaaaccggacgcgccg

SEQ ID NO: 180645 - DNA, 75 bp, synthetic construct
  source 1..75: mol_type = other DNA
gtatgggacttcggcttaatgtcaaagtattatgcgatgctaaaagacagctatcgcaacaggatactatctagg

SEQ ID NO: 180646 - DNA, 75 bp, synthetic construct
  source 1..75: mol_type = other DNA
cagacctggtgaaaaagtattttttagttttccgcgaagcctggtcaataaggaagtcgttagacgtgcccaaac

SEQ ID NO: 180647 - DNA, 75 bp, synthetic construct
  source 1..75: mol_type = other DNA
agaaaggattatattttgatggggaaatcatgttacttgattcggtcatgatggttgagggaaaagaagtaagga

SEQ ID NO: 180648 - DNA, 75 bp, synthetic construct
  source 1..75: mol_type = other DNA
ctgaaaagtgcccgggagcaacaaaaaaggcgtgatgaacgtgctgatggttccgttccgctgaaactgtccgga

SEQ ID NO: 180649 - DNA, 75 bp, synthetic construct
  source 1..75: mol_type = other DNA
aaatattcgtaagtatcagattagcctggtgggttatctgcaagagaaagagaagcaggctacagaagcggcgat

SEQ ID NO: 180650 - DNA, 75 bp, synthetic construct
  source 1..75: mol_type = other DNA
ctcatttaatggcatggttgcacgtaccctgccgaaaattgctccggcgagcatggaagtcaatgcgttaccttc

SEQ ID NO: 180651 - DNA, 75 bp, synthetic construct
  source 1..75: mol_type = other DNA
gaggaatttttaaaaccgctgaacatgtctcatgatgaactggcgcaagctatgggtatttctcgacaagatgtt

SEQ ID NO: 180652 - DNA, 75 bp, synthetic construct
  source 1..75: mol_type = other DNA
tcttgctggcatatttgatactgatgagtatttttggagcaatctgcagatgttgcaagatcgtaaagaaggaaa

SEQ ID NO: 180653 - DNA, 75 bp, synthetic construct
  source 1..75: mol_type = other DNA
aaaaaaaatgctgaatgaaatgattgagcaggcgcacctggattttgtggcaaatgagcagcataagacccggag

SEQ ID NO: 180654 - DNA, 75 bp, synthetic construct
  source 1..75: mol_type = other DNA
tgatgtgattgtgaatgcggctaatccgtcattaatgggaggcggcggcgtcgatggagccattcatcgcgcagc

SEQ ID NO: 180655 - DNA, 75 bp, synthetic construct
  source 1..75: mol_type = other DNA
agaatttattacccgtcacgctttacccgaacaggtatactttgtctgttatgatgaagaaaacgcccacctcta

SEQ ID NO: 180656 - DNA, 75 bp, synthetic construct
  source 1..75: mol_type = other DNA
cgaagaccagcttttgcaggatgcctatctcaatagcctacgactggtggcggcaaacagctatacgtcagtggc

SEQ ID NO: 180657 - DNA, 75 bp, synthetic construct
  source 1..75: mol_type = other DNA
agaccgttaatcgcggcgcggtcatgccaggaatgctggtcaaacacaaagatggtacctggactgcatcagcta

SEQ ID NO: 180658 - DNA, 75 bp, synthetic construct
  source 1..75: mol_type = other DNA
gatggtacctggactgcatcagctaatttacgcggacggctatatctgcatcgcggcatcgagcgcacttatacc

SEQ ID NO: 180659 - DNA, 75 bp, synthetic construct
  source 1..75: mol_type = other DNA
atcgagcgcacttatacccgtgatttgctcgtggaagtttttctcgacggacgcggtaacggcctgaatcactaa

SEQ ID NO: 180660 - DNA, 75 bp, synthetic construct
  source 1..75: mol_type = other DNA
tcttgctgccatatttgggactgatgaagacttctggagtaacctgcaggagatgcaagttcaccgagagcaaca

SEQ ID NO: 180661 - DNA, 75 bp, synthetic construct
  source 1..75: mol_type = other DNA
acgtcaggttaatggcgatgaaccatatatcgaaattatctgcatggattcagaagcagaaatccagaaggcaga

SEQ ID NO: 180662 - DNA, 75 bp, synthetic construct
  source 1..75: mol_type = other DNA
gccattgacggagttgttccatccgaaaaaaacgcagctacttacgtttatctgaacggtacgcgactgcttgtg

SEQ ID NO: 180663 - DNA, 75 bp, synthetic construct
  source 1..75: mol_type = other DNA
cggtgaactgttattacgcgcatcagccattgacggagttgttccatccgaaaaaaacgcagctacttacgttta

SEQ ID NO: 180664 - DNA, 75 bp, synthetic construct
  source 1..75: mol_type = other DNA
agcaacaaaatttaggtgatgcaactattaccaatgaaggtaaaataagcattcactcaaatcatgactggtctc

SEQ ID NO: 180665 - DNA, 75 bp, synthetic construct
  source 1..75: mol_type = other DNA
taaccttaaacaccattgatgttacttatgatgattatgcgaacggtgttgacgatgccaagcaaacaggtcagc

SEQ ID NO: 180666 - DNA, 75 bp, synthetic construct
  source 1..75: mol_type = other DNA
tcgtgaattgaccgttcaggccactaccggtactaactctgattctgacctgtcttcaatacaggacgaaatcaa

SEQ ID NO: 180667 - DNA, 75 bp, synthetic construct
  source 1..75: mol_type = other DNA
ttatcgtgaccggtattccgttgattatcgccgataaattgattggcggtggcgatggcactgccggaattgccg

SEQ ID NO: 180668 - DNA, 75 bp, synthetic construct
  source 1..75: mol_type = other DNA
caggcatgtttggaactgatgaggacttctggagtaaattgcagaccttacaagattaccagaaagaacgacgga

SEQ ID NO: 180669 - DNA, 75 bp, synthetic construct
  source 1..75: mol_type = other DNA
atgtcacaacatgaacagttctgtcaggcttgcggaatgccgatgtcggcaccagatgcacacagtgccagtgat

SEQ ID NO: 180670 - DNA, 75 bp, synthetic construct
  source 1..75: mol_type = other DNA
tgaaaaggctcgtcaggttaatggcgataaaccctatatcgaaattatctgtatggtgtcacgaacggtgcaata

SEQ ID NO: 180671 - DNA, 75 bp, synthetic construct
  source 1..75: mol_type = other DNA
aatccggtacgctggtggtaactaaaattgccgtggcgtgggtggttgcggcaattgcttcacgcattattcctg

SEQ ID NO: 180672 - DNA, 75 bp, synthetic construct
  source 1..75: mol_type = other DNA
ccattctttgccttcgcactgggcaataccattgatttgactgtaattgcccagacaggtttgctggggatcctg

SEQ ID NO: 180673 - DNA, 75 bp, synthetic construct
  source 1..75: mol_type = other DNA
tgtcgctagccttaacgcagaacaatcgtttcgcgggagccacccaagaaccgagttattcacgagaaaactatt

SEQ ID NO: 180674 - DNA, 75 bp, synthetic construct
  source 1..75: mol_type = other DNA
aagcagagaaaggggctgctggacagggaaatcgcgatgacccggcccattgtgcaggcgggggccatgtcggaa

SEQ ID NO: 180675 - DNA, 75 bp, synthetic construct
  source 1..75: mol_type = other DNA
ttgcgctgactaacagtatcgcttttgccaacgtgccggatgtggagcgtgatttcccgcgcattcgtgtgatgg

SEQ ID NO: 180676 - DNA, 75 bp, synthetic construct
  source 1..75: mol_type = other DNA
gccggtccgttgaatcttgcgctacgtgaaaatctccctctggatatcgtcatgactctggcgaaaagagattgg

SEQ ID NO: 180677 - DNA, 75 bp, synthetic construct
  source 1..75: mol_type = other DNA
ctggcgaaaagcaatcttacatttttcaagttcggcgcacttaacaatcgccatacaccgtctgcggcactggcg

SEQ ID NO: 180678 - DNA, 75 bp, synthetic construct
  source 1..75: mol_type = other DNA
tcatggtttacccattctgatcctcagagcgcagagcactgtccgcgggtcatcagtaagatcaagagcttagaa

SEQ ID NO: 180679 - DNA, 75 bp, synthetic construct
  source 1..75: mol_type = other DNA
cactactcaccgagtacggcaacgacaacatatgccgtgttctcgcacttgatggtggcggtgcaaagggctttt

SEQ ID NO: 180680 - DNA, 75 bp, synthetic construct
  source 1..75: mol_type = other DNA
tcagtaaattgcatgtggtggaagcgtaccggcggataaaggcgaatgccggagtggataaccagatgctgaaag

SEQ ID NO: 180681 - DNA, 75 bp, synthetic construct
  source 1..75: mol_type = other DNA
ggccatgagtggccaactccctgagtttactgcaacagatgattacttgaaaacaatactttatcgctcaccatc

SEQ ID NO: 180682 - DNA, 75 bp, synthetic construct
  source 1..75: mol_type = other DNA
atagcacgcttgattaattactttacaaaagaagacgatcttatcttggacttttttgctggttctggaaccacg

SEQ ID NO: 180683 - DNA, 75 bp, synthetic construct
  source 1..75: mol_type = other DNA
atctttttgagagtgaaggacaagttttacctagtgttttttatagttatgcacaaacttctactcaggattttt

SEQ ID NO: 180684 - DNA, 75 bp, synthetic construct
  source 1..75: mol_type = other DNA
aatacgatgaatggggcaacctgctgaatgaagagaacccgcatcagctgcagcagcttatccgcctgccggggc

SEQ ID NO: 180685 - DNA, 75 bp, synthetic construct
  source 1..75: mol_type = other DNA
tgagtacggcgatgaaacaaaaaatttggcatcgcgctttatcgcatcgaaaaaataatcccaaagcagattcag

SEQ ID NO: 180686 - DNA, 75 bp, synthetic construct
  source 1..75: mol_type = other DNA
ggtcagggaaggcgatattgttgagaaaggtcaggtactgctgacactggatgatacccgaagctctgccatgct

SEQ ID NO: 180687 - DNA, 75 bp, synthetic construct
  source 1..75: mol_type = other DNA
atggggtatgacgctgccgggcgcatcaccgtgctgaccaacgagaacggcagccagtccacgttccggtatgac

SEQ ID NO: 180688 - DNA, 75 bp, synthetic construct
  source 1..75: mol_type = other DNA
gacggagtacagcctgcatatggcgtcgggtgcggtgacggggccggacggcaggacggtacggtatggctataa

SEQ ID NO: 180689 - DNA, 75 bp, synthetic construct
  source 1..75: mol_type = other DNA
atagccggtgaacatgatcagttaaattatggtatatatgttaatcagcaacaacaaaataatgatacctcgctt

SEQ ID NO: 180690 - DNA, 75 bp, synthetic construct
  source 1..75: mol_type = other DNA
tatcaagattattcaggtcgatggtctgaatcgtggcggcgctgcgggtgatgcgagtacaggtagcgttagtgg

SEQ ID NO: 180691 - DNA, 75 bp, synthetic construct
  source 1..75: mol_type = other DNA
aggcaccgctgattgactccttgctcaatgaaattggcgtttcaggcggctcactggcggcattgacttcaccct

SEQ ID NO: 180692 - DNA, 75 bp, synthetic construct
  source 1..75: mol_type = other DNA
gacagttcccgccctctctcagcctcagcgttccccgacacactgcccggtaccgaatacggccccgacaggggt

SEQ ID NO: 180693 - DNA, 75 bp, synthetic construct
  source 1..75: mol_type = other DNA
actctgacgctgctttacaacggttattgacacgtttcaacgatcctgaggggtggagtaatctggcgaaaaatc

SEQ ID NO: 180694 - DNA, 75 bp, synthetic construct
  source 1..75: mol_type = other DNA
ggtgaagttgatgaccagatgctattaaatgccacctctctgatacgttcggaaggctgggactttttagagagt

SEQ ID NO: 180695 - DNA, 75 bp, synthetic construct
  source 1..75: mol_type = other DNA
ctgaactgtagtcgcaacacggtcagaaaatacactggcgataaagaagggaaaagacacgctatcgtcaacggt

SEQ ID NO: 180696 - DNA, 75 bp, synthetic construct
  source 1..75: mol_type = other DNA
tccgtgttgaaactcgggatgatggcagccatgttgctatcgggcaaaaaaatggcctcgagaccactgttgttt

SEQ ID NO: 180697 - DNA, 75 bp, synthetic construct
  source 1..75: mol_type = other DNA
tgcggctgctggacagactggaggaagaaatccgggcagaccgcgtgagcagtgaaagccgggcgtggcttgcgc

SEQ ID NO: 180698 - DNA, 75 bp, synthetic construct
  source 1..75: mol_type = other DNA
gttacgccagttaaactcgaaggggcggtccggattaccgatagcgcgacattgactctgggaaatggcgtcgat

SEQ ID NO: 180699 - DNA, 75 bp, synthetic construct
  source 1..75: mol_type = other DNA
gacggtgagcggtacgaatagtgaaggtgcattctccatccacaatcacgtggcagacaatgtgttgctggaaaa

SEQ ID NO: 180700 - DNA, 75 bp, synthetic construct
  source 1..75: mol_type = other DNA
gaaaggtaagcgtaaactgaccgccgtatgtagccatcagacgagaattggtaacttagacgcccatctgatata

SEQ ID NO: 180701 - DNA, 75 bp, synthetic construct
  source 1..75: mol_type = other DNA
tcaacagactatgaaatatactataatttatattcatcctgaatggttagaaatgcagcaaataagtttgtcaga

SEQ ID NO: 180702 - DNA, 75 bp, synthetic construct
  source 1..75: mol_type = other DNA
gtggctatccaccagggggcaatgagttgctgcaatagtgcgggacaaaatattaaggttaattcgccttccttg

SEQ ID NO: 180703 - DNA, 75 bp, synthetic construct
  source 1..75: mol_type = other DNA
cgctgatattaaacaggctaaatactggtttgaaaaagctgccgcacaagatttacctcatgcccaaatatcctt

SEQ ID NO: 180704 - DNA, 75 bp, synthetic construct
  source 1..75: mol_type = other DNA
gcttattacaaagcggctgaagagagggcaagaatggaaaatccccctaaatgcggatcatttttcgacatgctg

SEQ ID NO: 180705 - DNA, 75 bp, synthetic construct
  source 1..75: mol_type = other DNA
cctgaccagaaaactcacacagagtgaagacgaggggcttatcaccctctggcactacgatgcgtcggaccgcat

SEQ ID NO: 180706 - DNA, 75 bp, synthetic construct
  source 1..75: mol_type = other DNA
atgtcgcccgaaaaactggcgctgtatgtgggtagtctgtgcgccatttttacggcggcggtgaatttctggtac

SEQ ID NO: 180707 - DNA, 75 bp, synthetic construct
  source 1..75: mol_type = other DNA
gcgaatgagacaacaattaacgacggcggaatacaaacagtttcagctaacggagaggcaataaaaacaaagatc

SEQ ID NO: 180708 - DNA, 75 bp, synthetic construct
  source 1..75: mol_type = other DNA
tatagcgattatataaatgattatcataaaattgcagaggggtatcgttttcttgatgataacagaacattcatg

SEQ ID NO: 180709 - DNA, 75 bp, synthetic construct
  source 1..75: mol_type = other DNA
cctgacgggctggaaatacgccgggaatatgatgaatggggcaacctgctgaatgatgagaacccgcatcatctg

SEQ ID NO: 180710 - DNA, 75 bp, synthetic construct
  source 1..75: mol_type = other DNA
cgaatatactagcagtcattcatcagttatttgcgtgcccaacccattcatcattacgccaactctatttaagtg

SEQ ID NO: 180711 - DNA, 75 bp, synthetic construct
  source 1..75: mol_type = other DNA
aaataaaaagtggcggagcagaaattgctgctatgagcgcaattgattatatgaattgtcagcatgattttaaat

SEQ ID NO: 180712 - DNA, 75 bp, synthetic construct
  source 1..75: mol_type = other DNA
aggcaatttctatcgatctgctttggaataaaaaatcgccaccaggcgcggctggaaattggcttaagcatcatt

SEQ ID NO: 180713 - DNA, 75 bp, synthetic construct
  source 1..75: mol_type = other DNA
tattaaatgttatggataaagatttagaacggaatgattacagttataccgttgacgggagaagatattttctgt

SEQ ID NO: 180714 - DNA, 75 bp, synthetic construct
  source 1..75: mol_type = other DNA
cgcgcgttattgaaatcaatgaaggcgtacgcccgatccgtaccatctccaccgccgtgatcggcatcgtctgca

SEQ ID NO: 180715 - DNA, 75 bp, synthetic construct
  source 1..75: mol_type = other DNA
gaattaaaaccaaggagcccattaccgaatcctctgcattctcgggctcaattccatgcctgtctcaggatgagc

SEQ ID NO: 180716 - DNA, 75 bp, synthetic construct
  source 1..75: mol_type = other DNA
aggcttgatgatgttacatatctttctcagatggcaaaaataatatattcagttgcaaccgattcgaatcatttc

SEQ ID NO: 180717 - DNA, 75 bp, synthetic construct
  source 1..75: mol_type = other DNA
gatacaacaagctctctcacttcactattaccggaggggaggctaattatgttgtgctggaaaataccggcgaac

SEQ ID NO: 180718 - DNA, 75 bp, synthetic construct
  source 1..75: mol_type = other DNA
tgggagacggggtatcaggtctggggtaacacgatacaggagaaggaccacggcagggtggaacagaacctgcgt

SEQ ID NO: 180719 - DNA, 75 bp, synthetic construct
  source 1..75: mol_type = other DNA
atggcgataagtggaagttgcaaaaagagggcaatgaccgccctagcaagaccgcgcccacaaaggccgagctga

SEQ ID NO: 180720 - DNA, 75 bp, synthetic construct
  source 1..75: mol_type = other DNA
aatctgaaagacgcacctgccagtatcagtgttattagccaggatgatttatcccgtaagccagtccataatctg

SEQ ID NO: 180721 - DNA, 75 bp, synthetic construct
  source 1..75: mol_type = other DNA
tacctcaccgagagcttgttttaggcggtttaacaattcaaacacgagcaaaaggaaataacgaggctgtctata

SEQ ID NO: 180722 - DNA, 75 bp, synthetic construct
  source 1..75: mol_type = other DNA
attgttcatcgtatttccgctcagcgggctttagcgatgcctgaccatacaacaccaacttcgcttcaacaagca

SEQ ID NO: 180723 - DNA, 75 bp, synthetic construct
  source 1..75: mol_type = other DNA
gactacttcgatcttattactggaacatctataggtggaatactggctctcggcttagcgacaggtaagagtgct

SEQ ID NO: 180724 - DNA, 75 bp, synthetic construct
  source 1..75: mol_type = other DNA
gtgatccctaatgaagcagccagcgacatcactctggataatgccacgaagagttccattgaaaacctgcgcgca

SEQ ID NO: 180725 - DNA, 75 bp, synthetic construct
  source 1..75: mol_type = other DNA
tacctcacactgaccgatgaagaaggtgcccctgagccagagaaaaaagatgagcagccagagatatcttctccg

SEQ ID NO: 180726 - DNA, 75 bp, synthetic construct
  source 1..75: mol_type = other DNA
caggaggcggtttttttggtttgtatctggcagaacaacttgcattgaagggttataaagttacagtttatgaga

SEQ ID NO: 180727 - DNA, 75 bp, synthetic construct
  source 1..75: mol_type = other DNA
ttgatgaaatcaatatcgttcgtgctcagccagtatctggtggacgtctgggggtgaaaatttaccccataatgc

SEQ ID NO: 180728 - DNA, 75 bp, synthetic construct
  source 1..75: mol_type = other DNA
tgcggcgttagtgatcatgccaccgatgggtgcgctgataggcatccagttgcaggtttactggctgccattgca

SEQ ID NO: 180729 - DNA, 75 bp, synthetic construct
  source 1..75: mol_type = other DNA
cgaaaccgtttttgcctggcccggaatgggggcatgggtagtgacatcaatacaggcgctcgacttcccggcagt

SEQ ID NO: 180730 - DNA, 75 bp, synthetic construct
  source 1..75: mol_type = other DNA
aacagagcgccttatcaaagacgttctgatgtgacagatcctgccccatatctggatatctggaaaaataacctg

SEQ ID NO: 180731 - DNA, 75 bp, synthetic construct
  source 1..75: mol_type = other DNA
gtgtccgcatcctttacgcgcagtggaaagaaaagcaggtccgtgatgcattgggccactcccgttttcaaatca

SEQ ID NO: 180732 - DNA, 75 bp, synthetic construct
  source 1..75: mol_type = other DNA
aaattaatatagccacatggggtgtaagcattcttactgctgttatttttactctcattgcggtgttttgtgaaa

SEQ ID NO: 180733 - DNA, 75 bp, synthetic construct
  source 1..75: mol_type = other DNA
tggcctacacacagcggcttaaggaagccggattactggcatcaacaggaagtacaggcgactcgtatgacaacg

SEQ ID NO: 180734 - DNA, 75 bp, synthetic construct
  source 1..75: mol_type = other DNA
gcccgggccagcggcttgcccggctggtatatcgttctatgttatgcgctacccaatgcgttgatcccttcgatt

SEQ ID NO: 180735 - DNA, 75 bp, synthetic construct
  source 1..75: mol_type = other DNA
gccacgcgttatatcccttgtttgagtgaatgccaatatcaaagctcaatctgggaagtaaaaacaatccttcca

SEQ ID NO: 180736 - DNA, 75 bp, synthetic construct
  source 1..75: mol_type = other DNA
ttatggtttatcttatttgagattaattagagcaatatttggattgctagtgaatttttctcttaatttaatatt

SEQ ID NO: 180737 - DNA, 75 bp, synthetic construct
  source 1..75: mol_type = other DNA
atgtcgaccacaccatgttcgatatggtacagtcgctgaccattgccgacagcctgaagtttggtaaagcggtac

SEQ ID NO: 180738 - DNA, 75 bp, synthetic construct
  source 1..75: mol_type = other DNA
aaaacaagcacaaaggaaactaatagtgtagccgcagaagttttggtgtgtttttttatccaaaattgcgaggtt

SEQ ID NO: 180739 - DNA, 75 bp, synthetic construct
  source 1..75: mol_type = other DNA
cacacagaacccggtaaaaacccggcagcaggaaatgacgctgacatcggcaacgaccaccggacaacaggacag

SEQ ID NO: 180740 - DNA, 75 bp, synthetic construct
  source 1..75: mol_type = other DNA
tcaaaaccggcacggcgacctcgtcttatccgctggagccgattgcgcaaggacaatcggcaaacggtgcagtac

SEQ ID NO: 180741 - DNA, 75 bp, synthetic construct
  source 1..75: mol_type = other DNA
ctgaagacgaaagccatgctgtgaaagtggatgacggtgtaactggatatataaataatgccagtgtgatgacta

SEQ ID NO: 180742 - DNA, 75 bp, synthetic construct
  source 1..75: mol_type = other DNA
gagacagagaacggcgagcgggagaaagcgcagcgccgcagcctggcggagaagctgcagcaggaagggagcgag

SEQ ID NO: 180743 - DNA, 75 bp, synthetic construct
  source 1..75: mol_type = other DNA
gaacagcctggtgtatgaccgtgactacgggtggaatgacaacggcgacctggtgcgcatcagcggtccgcgaca

SEQ ID NO: 180744 - DNA, 75 bp, synthetic construct
  source 1..75: mol_type = other DNA
aataccaacgatgttcctttgcttttgtatactaccgtgaaagatttaccagatgatactggtacaaaagttatt

SEQ ID NO: 180745 - DNA, 75 bp, synthetic construct
  source 1..75: mol_type = other DNA
gccgctgaacgtgcgcaccagacagaaattatttgccgccttcttgaggtataccctgataaattaaatgatggt

SEQ ID NO: 180746 - DNA, 75 bp, synthetic construct
  source 1..75: mol_type = other DNA
atgacatttcagccatcaaagattgttggcaaaaaaaattcagatgatgatactgacgttaacgtgatcaaatca

SEQ ID NO: 180747 - DNA, 75 bp, synthetic construct
  source 1..75: mol_type = other DNA
tctggcgtattgtataacctatttttgttactggattatgatgatagttgtaataatttcttattttaaggggaa

SEQ ID NO: 180748 - DNA, 75 bp, synthetic construct
  source 1..75: mol_type = other DNA
gatcagtacgccagaacttttgacgcaagagcgacatgcggcccgttcggcggcatggtacttcacgttacgtgg

SEQ ID NO: 180749 - DNA, 75 bp, synthetic construct
  source 1..75: mol_type = other DNA
gagctacaggccgcgcgctcagctgcatggttctacacctctaaaggctgcatggtctacggtgccgatattaat

SEQ ID NO: 180750 - DNA, 75 bp, synthetic construct
  source 1..75: mol_type = other DNA
gtcagacaggatgcggaagcggcaaaaaaagccgcatccgatgcagaacaagccagggatgatattgaaaccgcg

SEQ ID NO: 180751 - DNA, 75 bp, synthetic construct
  source 1..75: mol_type = other DNA
atcataaaatctgtgtttcctacggcgcgtgcggtgccggcggcggattttccacgatctctacagcgtctgggg

SEQ ID NO: 180752 - DNA, 75 bp, synthetic construct
  source 1..75: mol_type = other DNA
tatggtggccttgatggagtagtaacactggtaagtccggatactttacgtgaacagaaacgccctggagactta

SEQ ID NO: 180753 - DNA, 75 bp, synthetic construct
  source 1..75: mol_type = other DNA
gagcgcgtcacgcagattatcaacggcgggcagaacggcattaacgaccgccgtgaacgttacgccaaagctaaa

SEQ ID NO: 180754 - DNA, 75 bp, synthetic construct
  source 1..75: mol_type = other DNA
aagagcaaaggtacaattacaggtgcttcgaacagtggcttaggccgtttggtgggaattgtgcttacgcaagcc

SEQ ID NO: 180755 - DNA, 75 bp, synthetic construct
  source 1..75: mol_type = other DNA
ttatgatgagtcaaatggtgggacgatctatgggttgtaaaattgcgaccgcttactataaagggaatcctcctg

SEQ ID NO: 180756 - DNA, 75 bp, synthetic construct
  source 1..75: mol_type = other DNA
tcaggggagtattattcccggcagcagggagcaggttatacagacccttgacccgggtatactgaaatcacttga

SEQ ID NO: 180757 - DNA, 75 bp, synthetic construct
  source 1..75: mol_type = other DNA
aaaccgattataaatggaactactaactttactggaattatcgaaatacaaatacttgatgtattagatgatgat

SEQ ID NO: 180758 - DNA, 75 bp, synthetic construct
  source 1..75: mol_type = other DNA
ggatacatgactcctgccaacaaactttttcaacctccccatttctttctcacaactcttgatcgccttgctgaa

SEQ ID NO: 180759 - DNA, 75 bp, synthetic construct
  source 1..75: mol_type = other DNA
gttggcggcgtttcgcaagtgtttacttacaacagcgttatcaatggctttcactattactggcaagggactcct

SEQ ID NO: 180760 - DNA, 75 bp, synthetic construct
  source 1..75: mol_type = other DNA
tcacccgggcgatgcgtatgcctgcacttcgggcgtatgagtctgcccccgatcataaaatctgtgtttcctacg

SEQ ID NO: 180761 - DNA, 75 bp, synthetic construct
  source 1..75: mol_type = other DNA
ggtgtaaaaattggttttgctactgaaataaaaaatgcagttattgaatcggaagcaatgattggaccgcaatgt

SEQ ID NO: 180762 - DNA, 75 bp, synthetic construct
  source 1..75: mol_type = other DNA
gtgattattgatgaaagtgccggtgaagttgttatcggtgccaatacccgcatttgccacggtgtggttattcaa

SEQ ID NO: 180763 - DNA, 75 bp, synthetic construct
  source 1..75: mol_type = other DNA
agttggtaattatgcatttattcgtcaacacacagtcatcggaaataacgtcaaaataggattttcaacagaaat

SEQ ID NO: 180764 - DNA, 75 bp, synthetic construct
  source 1..75: mol_type = other DNA
agttccaagcaacgcgatcaaattgagcgcgctatcgatgaattgcgccgaaatcgccctgaatttaacgatgca

SEQ ID NO: 180765 - DNA, 75 bp, synthetic construct
  source 1..75: mol_type = other DNA
aggcaaccggctaaccactgccactatgcgccaaattaacaagcgcgatcgccttcgctatagatgccgacatta

SEQ ID NO: 180766 - DNA, 75 bp, synthetic construct
  source 1..75: mol_type = other DNA
aacacgcaacttggcccgcgcgtgattgtagaacgtaatttacctgccggaacttattcactccgacaagaactt

SEQ ID NO: 180767 - DNA, 75 bp, synthetic construct
  source 1..75: mol_type = other DNA
ccatctgcatccgcagcggctgaaagcaaccggtcagctgattgagcaacatattggtaatgcactggccttttc

SEQ ID NO: 180768 - DNA, 75 bp, synthetic construct
  source 1..75: mol_type = other DNA
ctgaaagccctcctcagatggtcattgcgccatgagatggtaacggtgaacccggcggcaaacatccctcttctg

SEQ ID NO: 180769 - DNA, 75 bp, synthetic construct
  source 1..75: mol_type = other DNA
agactatcacttatttaagtgatattggttgtctggagattcagggggccagtctagtcacccatcttcagtctt

SEQ ID NO: 180770 - DNA, 75 bp, synthetic construct
  source 1..75: mol_type = other DNA
ttatgtggccctgagtttgtcaccagcacagattcgcacgatcgccttgcggaaatgcagcaagtatttacgcct

SEQ ID NO: 180771 - DNA, 75 bp, synthetic construct
  source 1..75: mol_type = other DNA
tagagcaattgaatattaatgaaactgccttaatagtcaaacaatgcaaagataaaccaaccttaatctcggaaa

SEQ ID NO: 180772 - DNA, 75 bp, synthetic construct
  source 1..75: mol_type = other DNA
agtcccccatatataccaagaaattctaaaagagaataaccaaaaagaaatacaggaaagaaaaagagtagcaga

SEQ ID NO: 180773 - DNA, 75 bp, synthetic construct
  source 1..75: mol_type = other DNA
actagaaaaagaatttgaggaaatgcagaatgataatgatctatcattatttatgagaacattgcgtactaatga

SEQ ID NO: 180774 - DNA, 75 bp, synthetic construct
  source 1..75: mol_type = other DNA
gtgttttatgcggttatacaatgaactcagacgtaaagtaaatgaagaggatactccatgtctggaatgtgaatc

SEQ ID NO: 180775 - DNA, 75 bp, synthetic construct
  source 1..75: mol_type = other DNA
gttgcactgcaaataattatttgaaacaagcctggcacaatataaaaaaagagcacgaaaaaaatcaaacatatt

SEQ ID NO: 180776 - DNA, 75 bp, synthetic construct
  source 1..75: mol_type = other DNA
gcagtgcctatcgcgtgacaattccagccgtactgcaaatcgcctgcctgcgccggatggttagcgccactcagg

SEQ ID NO: 180777 - DNA, 75 bp, synthetic construct
  source 1..75: mol_type = other DNA
gaagagacgccaaaccttttgcagtgatggtcgcggatgtggaaagcgcgtcgcgtattgctttcatccccccct

SEQ ID NO: 180778 - DNA, 75 bp, synthetic construct
  source 1..75: mol_type = other DNA
caaacaatgcggttacgttcaaccttgtacaagggaaggtaggcgaaggttttaaatataatgctaaattcgtag

SEQ ID NO: 180779 - DNA, 75 bp, synthetic construct
  source 1..75: mol_type = other DNA
atcgaggctcttgttgatgctgcattttgtgatctcagggaagatgttaaggaaggtgcgaacaagtccctgata

SEQ ID NO: 180780 - DNA, 75 bp, synthetic construct
  source 1..75: mol_type = other DNA
ttacatatactatacaatatgttcgagatattgatattgttagagtgtccttgccgggcagagcttcagagtcta

SEQ ID NO: 180781 - DNA, 75 bp, synthetic construct
  source 1..75: mol_type = other DNA
tatcttttattcagagtgaaattaataaaacttatggattaaaatacgctccagtagatggcgatggctattgtc

SEQ ID NO: 180782 - DNA, 75 bp, synthetic construct
  source 1..75: mol_type = other DNA
actttttgctcagtcataccagttaaaccataaggaaatgaaagcgcaactggactatttaaatcgttatgccat

SEQ ID NO: 180783 - DNA, 75 bp, synthetic construct
  source 1..75: mol_type = other DNA
ctttagataccgacacgtcggataggattaaagcggtgaagaattttcttgctgttctttcagatagcatttgct

SEQ ID NO: 180784 - DNA, 75 bp, synthetic construct
  source 1..75: mol_type = other DNA
gacattatttggcgttgatctgcaatctgacaacaaaattcagggtgtgggtagtcttatgtcatggagctttct

SEQ ID NO: 180785 - DNA, 75 bp, synthetic construct
  source 1..75: mol_type = other DNA
atagtttggtagtcactggaactatctctgttatgaacgaggtagtaaatatatattctatcaaattagataagg

SEQ ID NO: 180786 - DNA, 75 bp, synthetic construct
  source 1..75: mol_type = other DNA
ttgttcatatctgtgctgcaggcaattggggttcatttggagctgaaggtatgatgaaaggaaaattcaataata

SEQ ID NO: 180787 - DNA, 75 bp, synthetic construct
  source 1..75: mol_type = other DNA
ccaatcaatttttgggcaggccggatctacaactttctctgaagctaacacttttgctcagagtgtaaattcata

SEQ ID NO: 180788 - DNA, 75 bp, synthetic construct
  source 1..75: mol_type = other DNA
gtgtccgttaaactcaggctacctcactgcgctcgcaaaggcgatttggtgtttcgttggggaggcgaagagttt

SEQ ID NO: 180789 - DNA, 75 bp, synthetic construct
  source 1..75: mol_type = other DNA
tcagtaaaggaaatattaataactgggctttacttggatatgggttattaattatgcgatttcctttttcagatg

SEQ ID NO: 180790 - DNA, 75 bp, synthetic construct
  source 1..75: mol_type = other DNA
tttccgggaccgtaaaatatagtggcagtagctatccatttcctaccaccagcgaaacgccgcgcgttgtttata

SEQ ID NO: 180791 - DNA, 75 bp, synthetic construct
  source 1..75: mol_type = other DNA
gctatccatttccgaccaccagcgaaacgccgcgggttgtttataattcgagaacggataagccgtggccggtgg

SEQ ID NO: 180792 - DNA, 75 bp, synthetic construct
  source 1..75: mol_type = other DNA
caagaacaagccagacaatatttcatcgaccagtataaaataacaaaaaatgattatttggtgatgctgccaact

SEQ ID NO: 180793 - DNA, 75 bp, synthetic construct
  source 1..75: mol_type = other DNA
gaagaaaaatcaacagttattaaaataaaacaagatatcgataattttattttctacaatcagcatttaaagaaa

SEQ ID NO: 180794 - DNA, 75 bp, synthetic construct
  source 1..75: mol_type = other DNA
ttgaaggaaaaataagcagaaaaaatacaatgagatttttaactataaacaagaacaagccagacaatattttat

SEQ ID NO: 180795 - DNA, 75 bp, synthetic construct
  source 1..75: mol_type = other DNA
agtcttcgcggagagatcggtggcgtgaaacgtgattcgtttgctcgcactgaccagacagcagaaaagttgcgc

SEQ ID NO: 180796 - DNA, 75 bp, synthetic construct
  source 1..75: mol_type = other DNA
gatgtttctttctgaaatatttacaaacatcaacgaaagcaaaagtattaaaaggatactttcaaagtattcgct

SEQ ID NO: 180797 - DNA, 75 bp, synthetic construct
  source 1..75: mol_type = other DNA
attctcattgaaaagccaatgataaatataggtaaacgtttaattgacaagagaaataagagcattaacaaaaaa

SEQ ID NO: 180798 - DNA, 75 bp, synthetic construct
  source 1..75: mol_type = other DNA
tatcctaattatggttctttgacagaatttgattatatgtatccagctcaaaattcaccatcttctgatgtgaat

SEQ ID NO: 180799 - DNA, 75 bp, synthetic construct
  source 1..75: mol_type = other DNA
tagtgcttcaggtgcattgacatgggctggagttggatattccgttgggtctcttactgctgaaaatttttctga

SEQ ID NO: 180800 - DNA, 75 bp, synthetic construct
  source 1..75: mol_type = other DNA
atcgccagcgagcaagcgcggcgtgctgcaaccaatgcttccgcaaacaccaccacggtatcagtcacacaatca

SEQ ID NO: 180801 - DNA, 75 bp, synthetic construct
  source 1..75: mol_type = other DNA
gattaggtgctgcttatcgtggagttcgtggtgcgatagcgccagaagcgcaacaggctatcaggtttgcagagc

SEQ ID NO: 180802 - DNA, 75 bp, synthetic construct
  source 1..75: mol_type = other DNA
cgcagttggatcacttgctgcaaatagtgcgaaagatgatgcggaagcactcgccaccgatttaggcgttggtgt

SEQ ID NO: 180803 - DNA, 75 bp, synthetic construct
  source 1..75: mol_type = other DNA
cacgcggatcaacagcctttgagaaagcaatgcagcaggcacaaaaggcaattaacgctctgacgcagggggcta

SEQ ID NO: 180804 - DNA, 75 bp, synthetic construct
  source 1..75: mol_type = other DNA
ttcttcggctctgatggtggaggcgagagtgcggcagtgatgtacagcctgatcggtagctgcaaacttaacgga

SEQ ID NO: 180805 - DNA, 75 bp, synthetic construct
  source 1..75: mol_type = other DNA
agataacccgtttattgaatcatttaacggcagtctacgggatgagtgtctgaacattcactggttcctgtcact

SEQ ID NO: 180806 - DNA, 75 bp, synthetic construct
  source 1..75: mol_type = other DNA
ttaacggacggcgtttccgggcgctgactgtagtcgataattttagtcgggagtgtctggcgatccatgccggaa

SEQ ID NO: 180807 - DNA, 75 bp, synthetic construct
  source 1..75: mol_type = other DNA
tcagtttttcgatcctaatcgaactgttactcataaacgtactgtatttacttgtgatagccatttcgaactgag

SEQ ID NO: 180808 - DNA, 75 bp, synthetic construct
  source 1..75: mol_type = other DNA
ggatgaccggctattttcaggctcaattcgtgaaaatatctgtggttttgcagaggaaatggatgaagagtggat

SEQ ID NO: 180809 - DNA, 75 bp, synthetic construct
  source 1..75: mol_type = other DNA
atgataatgtagtgtatataaattatacggattttttatttctattcgatgaagctgtagacaaatgggttgata

SEQ ID NO: 180810 - DNA, 75 bp, synthetic construct
  source 1..75: mol_type = other DNA
cacgtggatcaacagcgtttgagaaagccatgcagcaggcacaaaaggcaattagcgccatgactcagggtgcta

SEQ ID NO: 180811 - DNA, 75 bp, synthetic construct
  source 1..75: mol_type = other DNA
aggccgcccacgtccggaccagcaaatatatgtctgagaacgtaaaagagagctatctgcagtgccagaatgtgt

SEQ ID NO: 180812 - DNA, 75 bp, synthetic construct
  source 1..75: mol_type = other DNA
attagcaatctttcttcacttacatattcagcacatgacggttatttatatgcaacagtgaacagaccagcaaaa

SEQ ID NO: 180813 - DNA, 75 bp, synthetic construct
  source 1..75: mol_type = other DNA
taatcttatggctcgacgtggattgtcatatttattgtacgagtataaagtattgtattatcaatataaaattgg

SEQ ID NO: 180814 - DNA, 75 bp, synthetic construct
  source 1..75: mol_type = other DNA
catttttgaaaacattgcatactaaagatacgcaaatttattcaggagtttcaggaggttttacatatactataa

SEQ ID NO: 180815 - DNA, 75 bp, synthetic construct
  source 1..75: mol_type = other DNA
gtcataagacgcaaaaggaagtatacgaagagtttattaaaattgttgataaacaaacgatcgaggctcttgttg

SEQ ID NO: 180816 - DNA, 75 bp, synthetic construct
  source 1..75: mol_type = other DNA
tgttcatgaacgatgtgttcctgaagcgactgtttgcagttagcatcacctcgtccggcaatcccccgacgttct

SEQ ID NO: 180817 - DNA, 75 bp, synthetic construct
  source 1..75: mol_type = other DNA
gcattccggcgattgcggtggcgatctaccgctgcgccagcccggaaaacaaagcgcgggtgaagggcattatgc

SEQ ID NO: 180818 - DNA, 75 bp, synthetic construct
  source 1..75: mol_type = other DNA
cgcgcggatcaacagcgtttgagaaagccatgcagcaggcgcaaaaggccattaacgccctgactcaaggtgcca

SEQ ID NO: 180819 - DNA, 75 bp, synthetic construct
  source 1..75: mol_type = other DNA
cagaaaatatccccctggctggcacaagcggaatgagagcaacgcaacaggaagcgagaagccagttggtgcaga

SEQ ID NO: 180820 - DNA, 75 bp, synthetic construct
  source 1..75: mol_type = other DNA
caaacacacatcgatattataaattcattcattgatgatgttggcaataaaatagtaacatttgtacctttacct

SEQ ID NO: 180821 - DNA, 75 bp, synthetic construct
  source 1..75: mol_type = other DNA
caacaaagatctggttaaatatgttgatattggtatgacctactacttcaacaaaaacatgtccacttatgttga

SEQ ID NO: 180822 - DNA, 75 bp, synthetic construct
  source 1..75: mol_type = other DNA
atgatcccatcggtgatgaagttcgctctattcttgatggacatattgtgcttacccgagaacttgcagaggaaa

SEQ ID NO: 180823 - DNA, 75 bp, synthetic construct
  source 1..75: mol_type = other DNA
attgccccagtgctgctatggtttccgcaaggaccggaacaggctcgcttcttgaatgcggaagagaagagctgg

SEQ ID NO: 180824 - DNA, 75 bp, synthetic construct
  source 1..75: mol_type = other DNA
tggcatcagaccaaaccgtttgaatgctgcggttcccgccattctccattaatggaatacgaccagaaatggcat

SEQ ID NO: 180825 - DNA, 75 bp, synthetic construct
  source 1..75: mol_type = other DNA
tatgcattttcctgacgatcgcgatctcgggtacttcaatcagctgctggcggagcgactggtttacaaagtcat

SEQ ID NO: 180826 - DNA, 75 bp, synthetic construct
  source 1..75: mol_type = other DNA
atgaagtagagctttctgattttgaaaaaagaataaaaaagggcgtaagaaaaaataagaagtatgctctaggat

SEQ ID NO: 180827 - DNA, 75 bp, synthetic construct
  source 1..75: mol_type = other DNA
gaactatgatatatttacgcattactgcaccaatcttgttagtatttacaacaaaaaaagactttatgttagatg

SEQ ID NO: 180828 - DNA, 75 bp, synthetic construct
  source 1..75: mol_type = other DNA
cgaagcaagatgccaaaggcacgttaattgatggcaaacgaataatggacagtattctgcaagcccatcccgatg

SEQ ID NO: 180829 - DNA, 75 bp, synthetic construct
  source 1..75: mol_type = other DNA
caaagaaatacctcgatgcgaaaggggatccggataaggaacaggcctggtggaacacccagatggggttgccgc

SEQ ID NO: 180830 - DNA, 75 bp, synthetic construct
  source 1..75: mol_type = other DNA
cacatgtataagcaacatgtgatcgaatggctgacggatgaacagctttttggggtaatggtggcgctggttaaa

SEQ ID NO: 180831 - DNA, 75 bp, synthetic construct
  source 1..75: mol_type = other DNA
caggcggagtacaaacgcgaatacatccagttccatgcagtgatgattaacgccttcggctacgcggtgcagagg

SEQ ID NO: 180832 - DNA, 75 bp, synthetic construct
  source 1..75: mol_type = other DNA
catatgggattaaaactcaatgttcgggccgctaaccttcaggccgatcccgataagttcctgccggcgccagcc

SEQ ID NO: 180833 - DNA, 75 bp, synthetic construct
  source 1..75: mol_type = other DNA
tcaaacacgttcagtggccgaaagagggagataaacacctgactaaatcggcgatgctctattgcgaatgctgtg

SEQ ID NO: 180834 - DNA, 75 bp, synthetic construct
  source 1..75: mol_type = other DNA
cgtgaagtcttcccggccgtcgttcctgatggcgtggcattgttaactgcgggcgtcgatacccaggatgaccga

SEQ ID NO: 180835 - DNA, 75 bp, synthetic construct
  source 1..75: mol_type = other DNA
tttcggttttatctttattattcagtttgttgtgcgaaaaaaatgttaactggctttttctagcaaatgttaacc

SEQ ID NO: 180836 - DNA, 75 bp, synthetic construct
  source 1..75: mol_type = other DNA
cagagaagttcgccacagcaatccgaaaccactggcacgtggagaataagctgcactggcgtctggacgtggtaa

SEQ ID NO: 180837 - DNA, 75 bp, synthetic construct
  source 1..75: mol_type = other DNA
ttcactttttgcagggctatttgtactccccgccagtaccgggtaataaatttgtttctgaatgggtaatgaaag

SEQ ID NO: 180838 - DNA, 75 bp, synthetic construct
  source 1..75: mol_type = other DNA
cggcggaatacaaacagtttcagctaacggagaggcaataaaaacaacgatcaatgaaggcggaacgctgacagt

SEQ ID NO: 180839 - DNA, 75 bp, synthetic construct
  source 1..75: mol_type = other DNA
tataataaaaaattcaatacagatattgatataataaacatagaaaacggcaacccaagcacagtagtggccatc

SEQ ID NO: 180840 - DNA, 75 bp, synthetic construct
  source 1..75: mol_type = other DNA
ttgccgccgtcgctggcagcctgctgttgggtgacggcgggctgtggctggcgcttgcggccgcggggttcaccc

SEQ ID NO: 180841 - DNA, 75 bp, synthetic construct
  source 1..75: mol_type = other DNA
ttgcataaaagtaagttttggtttcatattaaactcactgacgagagtgtttttttatttgaagaaaacagcttt

SEQ ID NO: 180842 - DNA, 75 bp, synthetic construct
  source 1..75: mol_type = other DNA
taatgaaataaacaaaagaacacaaagcaacagtgagaagttatcaaacagtgataaattaacatatattaatga

SEQ ID NO: 180843 - DNA, 75 bp, synthetic construct
  source 1..75: mol_type = other DNA
tacgctggcgtggcgacggcgatcctgatctttaccaaaggcggtcaaacagatgaggtctggttctacgatcta

SEQ ID NO: 180844 - DNA, 75 bp, synthetic construct
  source 1..75: mol_type = other DNA
atgctgaaagtgggcggccgcagtgccactatcgtgccgcagggcgtgctgtttggctccagtaaggcgcaccag

SEQ ID NO: 180845 - DNA, 75 bp, synthetic construct
  source 1..75: mol_type = other DNA
gaggaggccgtagcatataccaccagacttaacaatggcggcatactcgatgtgcgggagaaaggcagcgcaacg

SEQ ID NO: 180846 - DNA, 75 bp, synthetic construct
  source 1..75: mol_type = other DNA
gcatggatgccggaactgacctgatgaacactctgaaaaatacagcatttaagggtgggaatgtcactgatgagc

SEQ ID NO: 180847 - DNA, 75 bp, synthetic construct
  source 1..75: mol_type = other DNA
cgctgtattgtttatgaatcattagacagtacaaatattattgacacctttaacctgataacgacagagagtgct

SEQ ID NO: 180848 - DNA, 75 bp, synthetic construct
  source 1..75: mol_type = other DNA
cgccatgcaaccgcctatgagcagatgctggttaagctggccgatgaccgccgcacgttaaaaaacatccgttca

SEQ ID NO: 180849 - DNA, 75 bp, synthetic construct
  source 1..75: mol_type = other DNA
cgggaaaactagggaactggtatataagttttaacacgcaaactgatattgcagaaccaatacatcctgccatat

SEQ ID NO: 180850 - DNA, 75 bp, synthetic construct
  source 1..75: mol_type = other DNA
ctgtggattacaactggcgtgctaatggcacccctccctctttccatgagcagagatctttatcagagcgattgt

SEQ ID NO: 180851 - DNA, 75 bp, synthetic construct
  source 1..75: mol_type = other DNA
ggcaaaggcgcacaggatgacattctgatgacggtcatgctgtggcgtctggataccggcgatattgccggtgcg

SEQ ID NO: 180852 - DNA, 75 bp, synthetic construct
  source 1..75: mol_type = other DNA
gggtgaaacccgcaccgtgcaactggggagcgaccgccgcctccgcacgatttttgacaccaacatgcgcaccgc

SEQ ID NO: 180853 - DNA, 75 bp, synthetic construct
  source 1..75: mol_type = other DNA
atggtcgttgcctctccctcctatctcgcagccaacagcacacctgttcatccgcgtgaacttgtgaatcataag

SEQ ID NO: 180854 - DNA, 75 bp, synthetic construct
  source 1..75: mol_type = other DNA
cgtctcatggtagaaaacccgacgccttattatataaattttggtgctttatcgattaatgaacaaaaggttaca

SEQ ID NO: 180855 - DNA, 75 bp, synthetic construct
  source 1..75: mol_type = other DNA
cgtaaaacataaaaaagggaaaattgcatggcgtcttattgatgataacggtgcattaacaaaggaatatgaagt

SEQ ID NO: 180856 - DNA, 75 bp, synthetic construct
  source 1..75: mol_type = other DNA
ggtcttgttgtggaaaacccaactccttattatataaattttggttccttgactgttaacgggcaaaagattacg

SEQ ID NO: 180857 - DNA, 75 bp, synthetic construct
  source 1..75: mol_type = other DNA
ggtctccaaggcctacctgttcgctgccttatatggcaccaacgatatcttctcccgcaatactgacatcgccta

SEQ ID NO: 180858 - DNA, 75 bp, synthetic construct
  source 1..75: mol_type = other DNA
tctcctcgctacctacgccacgttaactctgtacttcaggctacctctgtgaacatgaagaaggtgctctgtgat

SEQ ID NO: 180859 - DNA, 75 bp, synthetic construct
  source 1..75: mol_type = other DNA
ccgagtccgacaatgcggctttcttcggtgacgattccgacctccagcaccagctaccagcaccgacatatgacg

SEQ ID NO: 180860 - DNA, 75 bp, synthetic construct
  source 1..75: mol_type = other DNA
gggccgaacggctggggctgcaaatgcggtacgcggcaaatcagccggtatgagtatgagcagatgaaggccaac

SEQ ID NO: 180861 - DNA, 75 bp, synthetic construct
  source 1..75: mol_type = other DNA
tgtcttgccgatgcgcgccgggcgcagctttatagcctcccgttaccgctgagccagtatcacaccggcccgctg

SEQ ID NO: 180862 - DNA, 75 bp, synthetic construct
  source 1..75: mol_type = other DNA
agacgaaaaccgccgtgaagtctgttttaccagcgaccattccctcccccagacggtggcttaccgtcatcccgt

SEQ ID NO: 180863 - DNA, 75 bp, synthetic construct
  source 1..75: mol_type = other DNA
taattgggcatgaattaaaatcatcgtatagtttgattgattggtttttgaactcaaactcaactgttaatggtt

SEQ ID NO: 180864 - DNA, 75 bp, synthetic construct
  source 1..75: mol_type = other DNA
catcatcagatgatataaatacaattattcaacatgcgttgccaggtgtagctatggaattaatggagtgcgctc

SEQ ID NO: 180865 - DNA, 75 bp, synthetic construct
  source 1..75: mol_type = other DNA
cacattggcctgaagaacgatatcaaagcacacgggagttactggaagattttttaaaagtgacgggggaggtaa

SEQ ID NO: 180866 - DNA, 75 bp, synthetic construct
  source 1..75: mol_type = other DNA
gacaagaccgctataaaagagttgactgatttaagacagcgttttttagttgagatcaaaacacaatgcactctc

SEQ ID NO: 180867 - DNA, 75 bp, synthetic construct
  source 1..75: mol_type = other DNA
gcaacgagaaccattttatagcaagtatgtagatatgataaaaaatatttatgatgctgactcacaccgaagcat

SEQ ID NO: 180868 - DNA, 75 bp, synthetic construct
  source 1..75: mol_type = other DNA
tgaacgccttatccggccacgaacaacaccgcctgtgggcggtgttgtgctttctgcggcaggcttttttccgcc

SEQ ID NO: 180869 - DNA, 75 bp, synthetic construct
  source 1..75: mol_type = other DNA
agctatttataaaaaatacgatgatgattttcctttagagaatatctataacgagagaattgattatttcttcaa

SEQ ID NO: 180870 - DNA, 75 bp, synthetic construct
  source 1..75: mol_type = other DNA
tatttttaacggtgagaaaggaaattatgatgatggtagtttatcaaatgttatagatatgtatggtaaatctaa

SEQ ID NO: 180871 - DNA, 75 bp, synthetic construct
  source 1..75: mol_type = other DNA
tgagtatattgaaatttctcaggcatatcgcatgggttgcaatgttggaaagcaaacacccaagataaatagtga

SEQ ID NO: 180872 - DNA, 75 bp, synthetic construct
  source 1..75: mol_type = other DNA
cccctctcgcagctgatgtggcggctctcattaagaatggcatggattttctggataaggcacgtgaagagttcg

SEQ ID NO: 180873 - DNA, 75 bp, synthetic construct
  source 1..75: mol_type = other DNA
taggggaaattccggaagggtggtcgattaaaccattagatggaatcgcaacctatcaaaatgggttggcgttac

SEQ ID NO: 180874 - DNA, 75 bp, synthetic construct
  source 1..75: mol_type = other DNA
ttgggtaaaggaattcaaacgtgcaacaccctgttacgcttatgagttgctgcgactattagatatgaaagcgtt

SEQ ID NO: 180875 - DNA, 75 bp, synthetic construct
  source 1..75: mol_type = other DNA
gatctacgggtaacttctttaggaagtaccaatggtactcgtttagtacccgcagagaccgttcttttgttggtt

SEQ ID NO: 180876 - DNA, 75 bp, synthetic construct
  source 1..75: mol_type = other DNA
tctgcacatcagcctgtgcgcggtcctgatggcagaggcctgcaatatcgggctggaaccgctgataaagcacaa

SEQ ID NO: 180877 - DNA, 75 bp, synthetic construct
  source 1..75: mol_type = other DNA
tgatgcgaaccgctggttcgctgaagttgggtacaattcatgcgtcagaactcattcgctctttactgaaaagct

SEQ ID NO: 180878 - DNA, 75 bp, synthetic construct
  source 1..75: mol_type = other DNA
cgcagtaatggagaagaaatcggggttgaagatatcgcccggttgtccccactgatgcacgggcatatcaatatg

SEQ ID NO: 180879 - DNA, 75 bp, synthetic construct
  source 1..75: mol_type = other DNA
atgataaaaacaacctcagcggcattaagctgggaaagcaccaatgaacggtataataaggacaaagaggcggga

SEQ ID NO: 180880 - DNA, 75 bp, synthetic construct
  source 1..75: mol_type = other DNA
gcgttcatctcaacaattattgggctaattgatcattttatcggcccaataaccattgctggcatcgttctgctg

SEQ ID NO: 180881 - DNA, 75 bp, synthetic construct
  source 1..75: mol_type = other DNA
tgatacaccaacattgcgccgagcatcagaaagaatggttgtgtatgcatcaaaatctttccctgtattgaaaga

SEQ ID NO: 180882 - DNA, 75 bp, synthetic construct
  source 1..75: mol_type = other DNA
aaacacggatactggattcggggattaactgtaaaaaacatccgtggttatacttccctcttgcaaaatcctcac

SEQ ID NO: 180883 - DNA, 75 bp, synthetic construct
  source 1..75: mol_type = other DNA
ttcaagatccataatgacattaacatacaaaatcatgtaataaactcgtcaacagacgcacatacacacaatgcc

SEQ ID NO: 180884 - DNA, 75 bp, synthetic construct
  source 1..75: mol_type = other DNA
aacagacgcacatacacacaatgccccacctgccataaaagttaatgcgggatacaaagagagtgacctgccccc

SEQ ID NO: 180885 - DNA, 75 bp, synthetic construct
  source 1..75: mol_type = other DNA
atcagccaggaattattgtaaaagcgaaaaatgaactggttgagattatgaaagataaacgcgttgtcacactca

SEQ ID NO: 180886 - DNA, 75 bp, synthetic construct
  source 1..75: mol_type = other DNA
gcaataagatatgattttcaagtggacaatgcaaaatataaatgcgaccatctaaaagaaatagtttctacttta

SEQ ID NO: 180887 - DNA, 75 bp, synthetic construct
  source 1..75: mol_type = other DNA
ggattctgtgtccagtctgctggcaagggggggctcttggggcgtttattaggaaatcatcgtggactcgagggc

SEQ ID NO: 180888 - DNA, 75 bp, synthetic construct
  source 1..75: mol_type = other DNA
gccgtgccatgagtttgaacccggcttttatacagaatgttcagaagatggttactgagacaggatatgcatgca

SEQ ID NO: 180889 - DNA, 75 bp, synthetic construct
  source 1..75: mol_type = other DNA
agtccccgggctgatattgaaccggcaaccggtacggctccccgttgtgccgccgttaatgtgacgcgcagagag

SEQ ID NO: 180890 - DNA, 75 bp, synthetic construct
  source 1..75: mol_type = other DNA
aagatcacctgcgaacgatgaaaacaaaaaagtcggccaaaccatcatcaatgaaaatgtagtagagaatactaa

SEQ ID NO: 180891 - DNA, 75 bp, synthetic construct
  source 1..75: mol_type = other DNA
gggtgacccaaaaaatcggggaaactgaaaacagcctcacgcagctggttgctaaaaaaatgatgagcagtcact

SEQ ID NO: 180892 - DNA, 75 bp, synthetic construct
  source 1..75: mol_type = other DNA
gaatctaattcacccaaaagactatagctatttcaacacattaagcacaaagctcggctggtcaaaaaaattatt

SEQ ID NO: 180893 - DNA, 75 bp, synthetic construct
  source 1..75: mol_type = other DNA
gatgatgaagacgagaaagtctatctctatgtacatctatgcgtcactttggcaagaagtcatctggaccgcgat

SEQ ID NO: 180894 - DNA, 75 bp, synthetic construct
  source 1..75: mol_type = other DNA
aaatagaaaacgagcagcgacggaacagactgaaagattttatcgtagggattgcgcaggataaccccgaaatcc

SEQ ID NO: 180895 - DNA, 75 bp, synthetic construct
  source 1..75: mol_type = other DNA
tatggcagcggttacctggcgggcatgaagctgggcgggacgccgctggtcgagtatacgcgggacaggctgcac

SEQ ID NO: 180896 - DNA, 75 bp, synthetic construct
  source 1..75: mol_type = other DNA
aaagcccgactctcttctctgttactgatgaatcagaattttggcaatggcatgaatgcggtggataacggacag

SEQ ID NO: 180897 - DNA, 75 bp, synthetic construct
  source 1..75: mol_type = other DNA
taaacccgaacgtcgtgaccctcgacaagccgattaagcgcgccggtcagacgattgataaagtcacactgattg

SEQ ID NO: 180898 - DNA, 75 bp, synthetic construct
  source 1..75: mol_type = other DNA
cgcaagcaattgaaaatctcaagcagaagttagtggaatgcaatcgctataactactgcgcagatgcagttaaag

SEQ ID NO: 180899 - DNA, 75 bp, synthetic construct
  source 1..75: mol_type = other DNA
ttacccggccgcgcactcgatgaagggcaaattagcgctattgtacatctggtttccagcgcggttgctggtctg

SEQ ID NO: 180900 - DNA, 75 bp, synthetic construct
  source 1..75: mol_type = other DNA
gaggtcatcccgggttataccaactcccctcctgaaagctgtctcttgatcagatctcctgatcaagagacttca

SEQ ID NO: 180901 - DNA, 75 bp, synthetic construct
  source 1..75: mol_type = other DNA
taaataaactggtaacagatgtggttcctgtagaggtcactagtgcaggaacagccaagggaacatataaaaatg

SEQ ID NO: 180902 - DNA, 75 bp, synthetic construct
  source 1..75: mol_type = other DNA
atgtacaacggtaaagatggtcgtatgttagccaatattgggattgatacacgcattaaagacaatacccgtatc

SEQ ID NO: 180903 - DNA, 75 bp, synthetic construct
  source 1..75: mol_type = other DNA
atattgcagagaagatacaaaaacagggaggtgattatttattcgctgtaaaaggaaaccaggggcggctaaata

SEQ ID NO: 180904 - DNA, 75 bp, synthetic construct
  source 1..75: mol_type = other DNA
aagatgattattgggcaagggataatgatatccgcaatctaaggagaaatttctcaggcaatattacgattgcaa

SEQ ID NO: 180905 - DNA, 75 bp, synthetic construct
  source 1..75: mol_type = other DNA
cagcagatgccggaagttggtcaacgtctgcgcgttggcggaatggtaatgccgggtagcgtgcagcgcgatccc

SEQ ID NO: 180906 - DNA, 75 bp, synthetic construct
  source 1..75: mol_type = other DNA
gaaagaatctatacattactttgggtttagttagtcttctatctgggggggctaacgctgcgtcacaacaaacaa

SEQ ID NO: 180907 - DNA, 75 bp, synthetic construct
  source 1..75: mol_type = other DNA
aagaaagtttattttatctaaatgttatagacatccctccaaacaacccacaaaatgcaggaaagaacaaaatta

SEQ ID NO: 180908 - DNA, 75 bp, synthetic construct
  source 1..75: mol_type = other DNA
taacgaacaaagaaatttgccaaacgaagtcgcaaccacactggccagcgcctcttgcactccaagcaaatatca

SEQ ID NO: 180909 - DNA, 75 bp, synthetic construct
  source 1..75: mol_type = other DNA
gcgaacttgatcgtagggttaaggtaactaaaatacataatggcaccttcattgttttcaagctaaaagattgcc

SEQ ID NO: 180910 - DNA, 75 bp, synthetic construct
  source 1..75: mol_type = other DNA
ttatgggacccccggtgacagtggttcaccgctatttggatgggatacaactctaaataaatgggttcttgtggg

SEQ ID NO: 180911 - DNA, 75 bp, synthetic construct
  source 1..75: mol_type = other DNA
gcattgttaccgctacaagcattgcctacctctaagttaaactctgttataaatcaagtcttcaaggagaaatga

SEQ ID NO: 180912 - DNA, 75 bp, synthetic construct
  source 1..75: mol_type = other DNA
tttttgtttatagcctggtctttactgtgttgctggcaatcccgttgggaatttatttccttggcggcgaagagc

SEQ ID NO: 180913 - DNA, 75 bp, synthetic construct
  source 1..75: mol_type = other DNA
tcaaatgtcgaggcttgggcatgtccaggcggttgaattgagggcgattctttctgagataatgccagtttatga

SEQ ID NO: 180914 - DNA, 75 bp, synthetic construct
  source 1..75: mol_type = other DNA
gtttctttatctttattcttgcccttgtgacctgggccttcttcgacgtgctgtcgccctacttctccgcaatac

SEQ ID NO: 180915 - DNA, 75 bp, synthetic construct
  source 1..75: mol_type = other DNA
atgcactccgagcgctttgttcaggacatggttaaagccctgcaaaacaacgcgatcgaagagtttaaacgctac

SEQ ID NO: 180916 - DNA, 75 bp, synthetic construct
  source 1..75: mol_type = other DNA
ttaatgctaaccaacctttccacggaacaactggtcggcctttccgggcaggcctacaaaagcggcatgtcggtg

SEQ ID NO: 180917 - DNA, 75 bp, synthetic construct
  source 1..75: mol_type = other DNA
gtgtggcaactcatgcagtagtgaatgcagccctgtctctggcacagggtaagaatgctctggctggggccgcag

SEQ ID NO: 180918 - DNA, 75 bp, synthetic construct
  source 1..75: mol_type = other DNA
acaatactcaggcgtttaaaactgtgcctcaacagatgggttttcactcaatgactcctgatgttgaggtggtaa

SEQ ID NO: 180919 - DNA, 75 bp, synthetic construct
  source 1..75: mol_type = other DNA
acgggtggaataaatagtacggatagtactataaatgtatcttcccctggtgcaactatcagtgagtacagtacg

SEQ ID NO: 180920 - DNA, 75 bp, synthetic construct
  source 1..75: mol_type = other DNA
ccctactcatcacgggtaaaaatataaccaaatccctatcacattacttttctactcaaggagaaagaacaatac

SEQ ID NO: 180921 - DNA, 75 bp, synthetic construct
  source 1..75: mol_type = other DNA
gtggtagctcatgccttggtgaatgccgcactggctgtggcacagggtaataacgctcttgccggtgccgcaggt

SEQ ID NO: 180922 - DNA, 75 bp, synthetic construct
  source 1..75: mol_type = other DNA
tacagggactggccggtggtaatctgagtgcagccctggcaggtggtgcagcaccgtatctggctgaagtggtga

SEQ ID NO: 180923 - DNA, 75 bp, synthetic construct
  source 1..75: mol_type = other DNA
tgattgagttcgaagtgtatatcgacgagatctttgcgttttctcagcgttccgatggactgattatttcgacgc

SEQ ID NO: 180924 - DNA, 75 bp, synthetic construct
  source 1..75: mol_type = other DNA
gcgtaaagtctggcgccagttgttacgcgaaggtatcagggtggccagatgtacagtggcccggctcatggcggt

SEQ ID NO: 180925 - DNA, 75 bp, synthetic construct
  source 1..75: mol_type = other DNA
ttccggacaaagacttctttgcttgtgcggaagacgaaatttctttcctgacatcagagttgaccatggtgggcg

SEQ ID NO: 180926 - DNA, 75 bp, synthetic construct
  source 1..75: mol_type = other DNA
ttctgacgactttgaaatcctgataacccagtttgctccggtcaatacggcagtgctggataaactgccaaagct

SEQ ID NO: 180927 - DNA, 75 bp, synthetic construct
  source 1..75: mol_type = other DNA
acgatgtgcatgcaagagcgccaaccgacgtcaccacggaagccctgcagcgtatcagtgaactgtatgccatcg

SEQ ID NO: 180928 - DNA, 75 bp, synthetic construct
  source 1..75: mol_type = other DNA
ctctaccgctggctgtgcacaaaaggttacgaggtcatcgttgagcaacaaatcgctcacgaactgcaactgaag

SEQ ID NO: 180929 - DNA, 75 bp, synthetic construct
  source 1..75: mol_type = other DNA
ctagagatgttttagctgtgagttcagaacaatttagagatttaactatagagcgtcttagggaatttattgaga

SEQ ID NO: 180930 - DNA, 75 bp, synthetic construct
  source 1..75: mol_type = other DNA
gctattgaggcaatgttcatcttctatagaaaacaggttgaccccggctacgataagacgcagaaagagtgcaga

SEQ ID NO: 180931 - DNA, 75 bp, synthetic construct
  source 1..75: mol_type = other DNA
ccattattaatgggtgttcacaggtagttaatgagggcggtctggctgaaaactcggtgcttaatgacggcggca

SEQ ID NO: 180932 - DNA, 75 bp, synthetic construct
  source 1..75: mol_type = other DNA
atgtgtaagcagctggtcaccagttatacttcagtggtacttctgagtgcttctctccgtgaaatgattatcatc

SEQ ID NO: 180933 - DNA, 75 bp, synthetic construct
  source 1..75: mol_type = other DNA
cttttttatcggctattcatcaccagatcattgaaaaccaactggatacagaaaaaataactattagttatgaat

SEQ ID NO: 180934 - DNA, 75 bp, synthetic construct
  source 1..75: mol_type = other DNA
ctcactcttaaataatattaataatacggggcttggttcacagttccatggtataacattttgtaaattaattga

SEQ ID NO: 180935 - DNA, 75 bp, synthetic construct
  source 1..75: mol_type = other DNA
tcgcactggcccggggaattgaggtaatgaacacgccggggcgcaatgcccgcagcgtggcggaatttacggtcg

SEQ ID NO: 180936 - DNA, 75 bp, synthetic construct
  source 1..75: mol_type = other DNA
ttcagactcgcgatctcgacaaattcaaagacggtaaggtttattgcggggttcagatttacggtgcgcctggtg

SEQ ID NO: 180937 - DNA, 75 bp, synthetic construct
  source 1..75: mol_type = other DNA
gagtatcataagcttttcaataatgtcgtatcaaaaggttctacggataaatatgctgttgaattcttgatacca

SEQ ID NO: 180938 - DNA, 75 bp, synthetic construct
  source 1..75: mol_type = other DNA
attcgctatgccgtgatgtgtgtgccgacacccttgactctggcagtcgataaattcagcgtgatggataaacag

SEQ ID NO: 180939 - DNA, 75 bp, synthetic construct
  source 1..75: mol_type = other DNA
gttacaccagagagttaccgaaggaaaagcatctgactggtaagatttttactcagcgcattgagcgcaacaatc

SEQ ID NO: 180940 - DNA, 75 bp, synthetic construct
  source 1..75: mol_type = other DNA
agcctggcgtcgcccactccatcggtgactcattgacttaccgcgtggagacagactccgcgaccgatgcgctat

SEQ ID NO: 180941 - DNA, 75 bp, synthetic construct
  source 1..75: mol_type = other DNA
gtaaactcatttgtcacgacagtgggtttttttctgtctatttattttgccgataaactaccgcgcagatacacc

SEQ ID NO: 180942 - DNA, 75 bp, synthetic construct
  source 1..75: mol_type = other DNA
atgcttttaacagaaattgaggcggcgaagcagattcgggacggacagctaccgtcgccttatcagttttccaac

SEQ ID NO: 180943 - DNA, 75 bp, synthetic construct
  source 1..75: mol_type = other DNA
aacaaattaccgaaatggcattcaatggcgccggtgcccgggatacggtaaggacgctgtggtttcatatggcac

SEQ ID NO: 180944 - DNA, 75 bp, synthetic construct
  source 1..75: mol_type = other DNA
gctttcactgtcgagactgcaatcgcatatttctactgacttatatctatgaagcccgtaagcccagtgtcaaag

SEQ ID NO: 180945 - DNA, 75 bp, synthetic construct
  source 1..75: mol_type = other DNA
aaatgcctcactgcatcatggtgtgggggggaacgcccgacaggtggtaccgggtctgatgatacgggaggcgtc

SEQ ID NO: 180946 - DNA, 75 bp, synthetic construct
  source 1..75: mol_type = other DNA
cctcttcatcacagggggcaccttctgatgctgaaaaagttccggcgtggatgtttcgtctggtcatggtggtga

SEQ ID NO: 180947 - DNA, 75 bp, synthetic construct
  source 1..75: mol_type = other DNA
tgcctcactgcatcatggtgtggggggagatgcccgccggatggtgccggggttgatgatacgggaggcgtcatg

SEQ ID NO: 180948 - DNA, 75 bp, synthetic construct
  source 1..75: mol_type = other DNA
ttatggggcgaatgctcgtcgatatcatgaatcccatctataaacagcaccccgaactaaaacccagagaaatta

SEQ ID NO: 180949 - DNA, 75 bp, synthetic construct
  source 1..75: mol_type = other DNA
catgaaaagggtaatgtaacggacgcagaaatttattataaatttttgtgcatttatgcgttcgaaaatcatgag

SEQ ID NO: 180950 - DNA, 75 bp, synthetic construct
  source 1..75: mol_type = other DNA
ttcgtttaccagaagtcttgaaacggactggtttcggcaaggcctggatctatcgtctgatcagtgaaggtcggt

SEQ ID NO: 180951 - DNA, 75 bp, synthetic construct
  source 1..75: mol_type = other DNA
aaagccatcttggggcttcgcagctattcccttccgccagcgaacaggaagcacatttccaggggattgatggca

SEQ ID NO: 180952 - DNA, 75 bp, synthetic construct
  source 1..75: mol_type = other DNA
attctatctcaaatggattgtggggatatttaatgaccttgagtctggaaggaaagcatataccaaagaagcctt

SEQ ID NO: 180953 - DNA, 75 bp, synthetic construct
  source 1..75: mol_type = other DNA
gcctgcaactcgccgggtgctggaacgcgcgaggctgagtattcacgatatggacgtgattgaactgaacgaagc

SEQ ID NO: 180954 - DNA, 75 bp, synthetic construct
  source 1..75: mol_type = other DNA
ctggcatcacagatgtttgcctgctggctggaggaagcacttattcgcggtgtgatccgcccgccgaaatcccgt

SEQ ID NO: 180955 - DNA, 75 bp, synthetic construct
  source 1..75: mol_type = other DNA
cacctctatccgggggattcactgaatctgcagacggcacagaatgcggataatgggttctctgaactggaaaag

SEQ ID NO: 180956 - DNA, 75 bp, synthetic construct
  source 1..75: mol_type = other DNA
ggccaaccagttttattctgtaatggagcgtctcaagatgctcgacacactgcaggccacgcaactgcagtcggc

SEQ ID NO: 180957 - DNA, 75 bp, synthetic construct
  source 1..75: mol_type = other DNA
ttctacctgcgccagcacggcgaggaaaaaggccgccagattgcctgtgccctgctcgaagatttaatggaagcc

SEQ ID NO: 180958 - DNA, 75 bp, synthetic construct
  source 1..75: mol_type = other DNA
taaaaaacaaattaaatttattggactttcttaagagagagtacagtacaagagtagattatatatctatttatc

SEQ ID NO: 180959 - DNA, 75 bp, synthetic construct
  source 1..75: mol_type = other DNA
aaaacttggcagtttacttcaagacatcgggcgttgttatatttatatcagagcggaaaatattctggagatcct

SEQ ID NO: 180960 - DNA, 75 bp, synthetic construct
  source 1..75: mol_type = other DNA
ttccgtcagggagacgatatctgtgtcaacgcaacagtaaacagatactcaacggatcgagatttcaattgtaag

SEQ ID NO: 180961 - DNA, 75 bp, synthetic construct
  source 1..75: mol_type = other DNA
ggcgtatgctaatgaagcgtcgttttgagagggatattcgagacgggttatgtgataaagactccacctttatga

SEQ ID NO: 180962 - DNA, 75 bp, synthetic construct
  source 1..75: mol_type = other DNA
tgaccatcgccaaacttgagcacggaggccaccagcttacacaggtagatcaacgggagatagaacgctcagtta

SEQ ID NO: 180963 - DNA, 75 bp, synthetic construct
  source 1..75: mol_type = other DNA
gagagcctggcctataacaacgcaatgcatgatttttttgctgaaaacggcgatgaccgtggctggtctccagaa

SEQ ID NO: 180964 - DNA, 75 bp, synthetic construct
  source 1..75: mol_type = other DNA
ccattatataaatctgaatcatatgagagatttattattcagcatcctgattccataatcgctgatctctattac

SEQ ID NO: 180965 - DNA, 75 bp, synthetic construct
  source 1..75: mol_type = other DNA
atattattttattttttttcgctttgtttcagtgtgttagtttattttagacctgaatacatgttaaatactgat

SEQ ID NO: 180966 - DNA, 75 bp, synthetic construct
  source 1..75: mol_type = other DNA
aaccccttgcaaaatctggctgactggctgcgtctggcactcggcagcgccattgttccgcctctgttggggggg

SEQ ID NO: 180967 - DNA, 75 bp, synthetic construct
  source 1..75: mol_type = other DNA
gcgagcaggacgattacagcggcatatccgcgatattaatggtcagttaaagcgtgacggaaaggacgagcgttc

SEQ ID NO: 180968 - DNA, 75 bp, synthetic construct
  source 1..75: mol_type = other DNA
gttacggaactgctggggcctatttctgaagaaggggtgaacatcaaaacctacaggatggacactcttgagcag

SEQ ID NO: 180969 - DNA, 75 bp, synthetic construct
  source 1..75: mol_type = other DNA
actgctttcaaaagcttcgaagagaagcagcgttattttgatacatgctcccgtggcgctcaggctcttaagcag

SEQ ID NO: 180970 - DNA, 75 bp, synthetic construct
  source 1..75: mol_type = other DNA
gcatccgtcgctggactgtcgaatttaaaagccgctgcgactcgaaatatagcccgtactggcgcaagcgcgacc

SEQ ID NO: 180971 - DNA, 75 bp, synthetic construct
  source 1..75: mol_type = other DNA
tccagggttcggcaggtgtaagaattggcgcgccaactggcgtggcgtgctcggtgtgcccgggcgggatgactt

SEQ ID NO: 180972 - DNA, 75 bp, synthetic construct
  source 1..75: mol_type = other DNA
tacaacttagaagagtttcgagagctgcggtattattgcgactgacatcgttgccattggtcagtattgcaggga

SEQ ID NO: 180973 - DNA, 75 bp, synthetic construct
  source 1..75: mol_type = other DNA
tttaagcatttagtttcaagtgaagcggcagagatcccatactgtactgcaaaattaaaagcaaaatggacaaag

SEQ ID NO: 180974 - DNA, 75 bp, synthetic construct
  source 1..75: mol_type = other DNA
ctcccttgcgggacacgtggcgctttctcatagctcacgtcttctggtatctcggggcgacttaggcagttcgct

SEQ ID NO: 180975 - DNA, 75 bp, synthetic construct
  source 1..75: mol_type = other DNA
ttctcaggggaataaaataaaatatatttgctgcatttatgcaacggccccctttattagagatgaagatttaaa

SEQ ID NO: 180976 - DNA, 75 bp, synthetic construct
  source 1..75: mol_type = other DNA
ggaattttaagtaatatatatgatttattaagcctgcgagttcaaaaagatgaaggatatgtacctgttcaggaa

SEQ ID NO: 180977 - DNA, 75 bp, synthetic construct
  source 1..75: mol_type = other DNA
aaagtgttaaatattttaggggtggagatttcgctcagttctgcaccgctttcaacttatacaaagcctgcaaat

SEQ ID NO: 180978 - DNA, 75 bp, synthetic construct
  source 1..75: mol_type = other DNA
taattgcagatataaaaaaaccaaccgtaagggttggttttttcttgggatttttggtccacgagagtagtttaa

SEQ ID NO: 180979 - DNA, 75 bp, synthetic construct
  source 1..75: mol_type = other DNA
tctcatagctcacgtcttctggtatctcggggcgacttaggcagttcgctccgggctgggctgtatgcaggaacc

SEQ ID NO: 180980 - DNA, 75 bp, synthetic construct
  source 1..75: mol_type = other DNA
attaaaacagtctgctacttgcttacttatgtttattttggtttaaaaaaacattgtcaggcgtatagaagtgga

SEQ ID NO: 180981 - DNA, 66 bp, synthetic construct
  source 1..66: mol_type = other DNA
cacagcgtcagcggcagcagcgctgaagggtataacggtcaggccacactgaatgtgaccttctga

SEQ ID NO: 180982 - DNA, 75 bp, synthetic construct
  source 1..75: mol_type = other DNA
tcgctgaaagctggtggtacggggctgaatctgaccgccgccagccaggtgattcattacgatttatggtggaac

SEQ ID NO: 180983 - DNA, 75 bp, synthetic construct
  source 1..75: mol_type = other DNA
tatcaggagacttatatcctcaaccgtccatatttggtgataaggtatcttctgtttctaagaactggtctactt

SEQ ID NO: 180984 - DNA, 75 bp, synthetic construct
  source 1..75: mol_type = other DNA
tcctgcattatcctcagcattatcctcagccttgccaactcgacaccaatgcaggatagacaatccgatgtcaaa

SEQ ID NO: 180985 - DNA, 75 bp, synthetic construct
  source 1..75: mol_type = other DNA
attctgcttatgacacatcttatggaggtcagatatcaggaactacaattgatatgggaagcggtaatgatactg

SEQ ID NO: 180986 - DNA, 75 bp, synthetic construct
  source 1..75: mol_type = other DNA
cagccagttaagcaaaacggaaatcagtagtattaagctaaatagtgaaaccatccccggtttatcagttgcgct

SEQ ID NO: 180987 - DNA, 75 bp, synthetic construct
  source 1..75: mol_type = other DNA
catcacgacggcagcgggaacataaaggccgaatatcggtgaaggaaagcgaccagcgttggtgttccgatggct

SEQ ID NO: 180988 - DNA, 75 bp, synthetic construct
  source 1..75: mol_type = other DNA
aagtaccggaacagtccatccagtggctgacagataacggttcagcgtatagagcgcatgaaagctggaagtact

SEQ ID NO: 180989 - DNA, 75 bp, synthetic construct
  source 1..75: mol_type = other DNA
gccgaatatcggtgaaggaaagcgaccagcgttggtgttccgatggctttgagttcggttgcgatgatggcgaaa

SEQ ID NO: 180990 - DNA, 75 bp, synthetic construct
  source 1..75: mol_type = other DNA
tatgaagcgtcacgcgcttaagcgcatcgatgtcggtattgcccaggtcaatctgggctggaacggtcatcattt

SEQ ID NO: 180991 - DNA, 75 bp, synthetic construct
  source 1..75: mol_type = other DNA
acgttaccgtaaaacgtgagctgtacgaggttgagcgtgacggtaacaccattgagtacgatggtatgacgatgg

SEQ ID NO: 180992 - DNA, 75 bp, synthetic construct
  source 1..75: mol_type = other DNA
tggcgctgttgagcatggctgtcagcagtttctgccgggcgggggagcatgatatccctgaggggtatgtgcgcg

SEQ ID NO: 180993 - DNA, 75 bp, synthetic construct
  source 1..75: mol_type = other DNA
aggcaacgcctttgtcattatgggagctggagaacaattaaaacgtattaaatatgatgttgatgaaaataactt

SEQ ID NO: 180994 - DNA, 75 bp, synthetic construct
  source 1..75: mol_type = other DNA
ctgaacagaccctattagaaaatataataaaaagtgattttcatgttgattcatttaagcctggtagtacgcgta

SEQ ID NO: 180995 - DNA, 75 bp, synthetic construct
  source 1..75: mol_type = other DNA
acatataatcttgaaaaactttttaaagtaagttcattctgtggttgtataggcggcggtggctgttggttactc

SEQ ID NO: 180996 - DNA, 75 bp, synthetic construct
  source 1..75: mol_type = other DNA
cgggtatcgccgtgtctgggcgatactcaggcggcagtcccgaaatgaaggactaccgttcgtgaatgcaaagcg

SEQ ID NO: 180997 - DNA, 75 bp, synthetic construct
  source 1..75: mol_type = other DNA
ttaacactagcacatttataaatagtggaagttgtaatgaaagaaaatcttctaaatccatggagttactagctt

SEQ ID NO: 180998 - DNA, 75 bp, synthetic construct
  source 1..75: mol_type = other DNA
tccaaccccatggggctactagcttatagtattttaaatttaatttgtaaggaagctgcctcagggacgtacaac

SEQ ID NO: 180999 - DNA, 75 bp, synthetic construct
  source 1..75: mol_type = other DNA
ggaacatatagaacgattaacacgcatacgcaatattgatggcttacctcatgttgatttcagccgtgttgataa

SEQ ID NO: 181000 - DNA, 75 bp, synthetic construct
  source 1..75: mol_type = other DNA
gcagcacaaacctggggaagttgttaagacagataattatgataatttcctgattaataattttgcagatattgg

SEQ ID NO: 181001 - DNA, 75 bp, synthetic construct
  source 1..75: mol_type = other DNA
aagacccgggctaaatagaaccgcatcatatcaaataatagaagaattaattacagtaataaatttatatgcaac

SEQ ID NO: 181002 - DNA, 75 bp, synthetic construct
  source 1..75: mol_type = other DNA
ggattcatctttgttagagtcaaaggaacacaccatagatattcaagaaaaacgaataagtttgtgcagcatttt

SEQ ID NO: 181003 - DNA, 75 bp, synthetic construct
  source 1..75: mol_type = other DNA
tgatcgcagacctagagaaaagtgccaaaattaaacgttctgaacttgatttgcgtagtttctggaccctgggca

SEQ ID NO: 181004 - DNA, 75 bp, synthetic construct
  source 1..75: mol_type = other DNA
caaaccacacccgggtgaactacccccttcactatcattttttgctatcgatactaacagcgttatcatcgaaac

SEQ ID NO: 181005 - DNA, 75 bp, synthetic construct
  source 1..75: mol_type = other DNA
attgataatctggcactgctaacggctttaaaagataaatatggtgtatcacaaggcatggcggtatttaatcag

SEQ ID NO: 181006 - DNA, 75 bp, synthetic construct
  source 1..75: mol_type = other DNA
gacacctgatcaggatgatatcgctacgctggaacgagaagccagagcaaaacgtgaggctgaattacaagcatc

SEQ ID NO: 181007 - DNA, 75 bp, synthetic construct
  source 1..75: mol_type = other DNA
accgcaatacggactatacggaaaacagtcgccaggctatggcagatatggctcgtaccactctggaaaacagca

SEQ ID NO: 181008 - DNA, 75 bp, synthetic construct
  source 1..75: mol_type = other DNA
taatccaggaaatgttgatggtttaagtgctatacttggaatggtatttaatagttatgttcatcattcatcatc

SEQ ID NO: 181009 - DNA, 75 bp, synthetic construct
  source 1..75: mol_type = other DNA
tcaagacggtaagcggaaatttattggaaggcttaaatcagatggtgaaagtttagcaacgaaatttgctatgga

SEQ ID NO: 181010 - DNA, 75 bp, synthetic construct
  source 1..75: mol_type = other DNA
gggcaggctgtaaagtatgccaagacaggagaaagtgttgattccatatcaaaagcttcggttgtgtcatgcgag

SEQ ID NO: 181011 - DNA, 75 bp, synthetic construct
  source 1..75: mol_type = other DNA
aaactaatcacgggcgtggcaccattcgatggtatttcatctatggatgatgactttgatgatagttcctctgag

SEQ ID NO: 181012 - DNA, 75 bp, synthetic construct
  source 1..75: mol_type = other DNA
cagggacgctatatcacccaggatcccattgggctgaaggggggatggaacctgtatgcgtatccgctgaacccg

SEQ ID NO: 181013 - DNA, 75 bp, synthetic construct
  source 1..75: mol_type = other DNA
catcgttgcgcgatccttatgctcctcgacaaggctggaaaccaactatgggatgtacccgtgcacagaatgaag

SEQ ID NO: 181014 - DNA, 75 bp, synthetic construct
  source 1..75: mol_type = other DNA
gctgaaactcctcttgttcttactgatatgactggaggagtgactatttattatgatcctgaaacaggtgattca

SEQ ID NO: 181015 - DNA, 75 bp, synthetic construct
  source 1..75: mol_type = other DNA
cgtgcgcaagtgcggggatcgtacatttatacggttgaaattaccgttccaccgttttccgggcaggaaaaagaa

SEQ ID NO: 181016 - DNA, 75 bp, synthetic construct
  source 1..75: mol_type = other DNA
gcaaacccggagggagtcgctgttaaaacagagcatggaacaacaaaaaaagaggaatcattttttgcgaaaaga

SEQ ID NO: 181017 - DNA, 75 bp, synthetic construct
  source 1..75: mol_type = other DNA
ccagaactcccggaagatggacagatgaaagcaggcatcctgatacacgtcttaattatgccaacgaattcgatt

SEQ ID NO: 181018 - DNA, 75 bp, synthetic construct
  source 1..75: mol_type = other DNA
atgagccaatttaaagaatttgcatctgtcagcgacaaacaattagggttctttattgactcttcgcgttgttcg

SEQ ID NO: 181019 - DNA, 75 bp, synthetic construct
  source 1..75: mol_type = other DNA
caagattgctcaaatagatgtattgattatattaatccagagcataaaaaaacgataaatgatcctacccacgta

SEQ ID NO: 181020 - DNA, 75 bp, synthetic construct
  source 1..75: mol_type = other DNA
atgctggcgctgatggatgcggatggaaacattgcgtggagcgcggaatatgatgaatggggcaaccagcttaat

SEQ ID NO: 181021 - DNA, 75 bp, synthetic construct
  source 1..75: mol_type = other DNA
tgtcgaaaaggttctataccttgatgctgatttgataattgatggcgatattcatgaacttcttaattatgagtt

SEQ ID NO: 181022 - DNA, 75 bp, synthetic construct
  source 1..75: mol_type = other DNA
gtggcgctgaccagcggtcatcagcaagcggataccggcaccaagatgatccacatcggtaaaaacaccaaatcg

SEQ ID NO: 181023 - DNA, 75 bp, synthetic construct
  source 1..75: mol_type = other DNA
cactcagtgcgactcaatgctgattggcgctaattgtggggcgcataccttcccgtatgtcgaatgtcgcaataa

SEQ ID NO: 181024 - DNA, 75 bp, synthetic construct
  source 1..75: mol_type = other DNA
cccggatgtggtgacgggcctcatcacgcgcatcaccacgccggatggcagggcatcggcgttttactataacca

SEQ ID NO: 181025 - DNA, 75 bp, synthetic construct
  source 1..75: mol_type = other DNA
gcatcgttatctggcgacaaacagtccgcaggggccgtggtggctgctcggctggtgtgagcgggtgccggaagc

SEQ ID NO: 181026 - DNA, 75 bp, synthetic construct
  source 1..75: mol_type = other DNA
aaccatcatgatgataacaatgatgatttcggcaaagaacagattttcatgttctcaatgtcgataccgctatcg

SEQ ID NO: 181027 - DNA, 75 bp, synthetic construct
  source 1..75: mol_type = other DNA
atgacggcacacaaaaatatctccgggacataccacctctctgttgcagacattctgcaggtggtttaccaggta

SEQ ID NO: 181028 - DNA, 75 bp, synthetic construct
  source 1..75: mol_type = other DNA
ctcatccgcctgccgggtcagcagtatgatgaggagtccggcctgtattacaaccgccaccgctattatgacccg

SEQ ID NO: 181029 - DNA, 75 bp, synthetic construct
  source 1..75: mol_type = other DNA
cggaagcactgctctggcagcatgagaccagacatgcgtacaacgcgcaggggctggcgaaccgctgtataccgg

SEQ ID NO: 181030 - DNA, 75 bp, synthetic construct
  source 1..75: mol_type = other DNA
gctgtacagaatacaagctccgctgattcaggaattgtcggtgaccagggggaactttatctctcagggcttcct

SEQ ID NO: 181031 - DNA, 75 bp, synthetic construct
  source 1..75: mol_type = other DNA
tatagcagtagctggaagcgtctctcttggaatgtttcctggagttattccaataccgcccgacaagggacgagt

SEQ ID NO: 181032 - DNA, 75 bp, synthetic construct
  source 1..75: mol_type = other DNA
gtaaaagttgacgcgctgaaatcgctcaatggggtggatgaaacggtctgtctggatcctgcgccacgtattgaa

SEQ ID NO: 181033 - DNA, 75 bp, synthetic construct
  source 1..75: mol_type = other DNA
gataaaaaacgtgctggcgacctatggtataaaagttgatgcgataaaatctctggcgaatgttgatgacaaaac

SEQ ID NO: 181034 - DNA, 75 bp, synthetic construct
  source 1..75: mol_type = other DNA
tattatcgtgaaaaatctggtagaaaacgcaatccgctatataccggaacacggacaaattgatctcagcgtgat

SEQ ID NO: 181035 - DNA, 75 bp, synthetic construct
  source 1..75: mol_type = other DNA
ggggggaaaataccgccactaaatgcaccttcgattattcactttcaattccagaaggtgaaagtggattaattg

SEQ ID NO: 181036 - DNA, 75 bp, synthetic construct
  source 1..75: mol_type = other DNA
cgtcttctaaacttagtgtcactgggttgtgggtaaagcatggtgttcctaagttaacaaaagaaaatagacgtt

SEQ ID NO: 181037 - DNA, 75 bp, synthetic construct
  source 1..75: mol_type = other DNA
gacatcattagcaaaaaactggaattcattatttactggagggtattttgaaaaccttaaaattcatccggtaat

SEQ ID NO: 181038 - DNA, 75 bp, synthetic construct
  source 1..75: mol_type = other DNA
tggttttaccgcatacaccctctactggcattgtccgtcttgtcgggcctggtcaaccattaaaccgattcgcgg

SEQ ID NO: 181039 - DNA, 75 bp, synthetic construct
  source 1..75: mol_type = other DNA
gtctatgggggccaggtaaagcaagtaatgatacaaaagaagctgctggccgttgtgacctcgttgaaaccgata

SEQ ID NO: 181040 - DNA, 75 bp, synthetic construct
  source 1..75: mol_type = other DNA
gatattgatattagtgagttcgatgattatgaaaaatatttttggtatcgttacctatttttaggaagaggtaaa

SEQ ID NO: 181041 - DNA, 75 bp, synthetic construct
  source 1..75: mol_type = other DNA
tagattttttcgaaacctacaatgtttatttttcatatccatatgatttagattggataatgttaaattcattcc

SEQ ID NO: 181042 - DNA, 75 bp, synthetic construct
  source 1..75: mol_type = other DNA
tcccttttcactggtggttacttcgaagaactccaaattaagccagtagtaaatggtattgaagatgtattaaaa

SEQ ID NO: 181043 - DNA, 75 bp, synthetic construct
  source 1..75: mol_type = other DNA
ttaaaagagattttattatatttacattcacatgcatattcgccgtaactatatcaacaggttttatactatact

SEQ ID NO: 181044 - DNA, 75 bp, synthetic construct
  source 1..75: mol_type = other DNA
aaacgtggctacgccacgtgatcagtgtcatcaacacctggccagccaaccgcgtgaaagagttgttgccctgga

SEQ ID NO: 181045 - DNA, 75 bp, synthetic construct
  source 1..75: mol_type = other DNA
gcgaccgtctgaccactatacagaacgacagtatccgcatccagacgatttatcagccggggagcttcactccac

SEQ ID NO: 181046 - DNA, 75 bp, synthetic construct
  source 1..75: mol_type = other DNA
tgattctttagaaacatgtaagatgaagtgctccggaaataacattggacgttttattagatttgtattcaccgg

SEQ ID NO: 181047 - DNA, 75 bp, synthetic construct
  source 1..75: mol_type = other DNA
gggcgggggccgcattattactggcaggaattctgctggcaggttgcgaccagagcagcagcgatgaaaagcaca

SEQ ID NO: 181048 - DNA, 75 bp, synthetic construct
  source 1..75: mol_type = other DNA
tattgccgacaaggaggcgtttattcgtaagcttggggtggcaagagcttacgggcgtgatctcaaaacaggtga

SEQ ID NO: 181049 - DNA, 75 bp, synthetic construct
  source 1..75: mol_type = other DNA
tggatggctgttgggaagggagagggggaggaaagaagggaaagtagaaggggaacggagcctcctccgattgtt

SEQ ID NO: 181050 - DNA, 75 bp, synthetic construct
  source 1..75: mol_type = other DNA
aaaagcatcaagatcactcttgaccagcctgcaggtgcggatgctatcaagtggaaagcttctctgccggttact

SEQ ID NO: 181051 - DNA, 75 bp, synthetic construct
  source 1..75: mol_type = other DNA
cgctccaggtctgtctccgcaaattagttatggtgatgcagttaatattgatgcttttaaggcaagcgttgcacc

SEQ ID NO: 181052 - DNA, 75 bp, synthetic construct
  source 1..75: mol_type = other DNA
tatgttcggcaaaaaaatgcgtcacgtcggcgatcgcgttgctgcggtggtcgctgaaagtgaagaaattgcgct

SEQ ID NO: 181053 - DNA, 75 bp, synthetic construct
  source 1..75: mol_type = other DNA
acaggccatcaaaactgcaaccatgcagcagctgctgactggtgacactcgcctaccacaatttgctaaacatcc

SEQ ID NO: 181054 - DNA, 75 bp, synthetic construct
  source 1..75: mol_type = other DNA
tcaatgcctcatttaaaaaaacttctaattccgcttccaacgaaaagcgaacagacagttatcgctaatgtgcta

SEQ ID NO: 181055 - DNA, 75 bp, synthetic construct
  source 1..75: mol_type = other DNA
tggcgaacagtcgcagaccattacggcaatgtgcgctcaccatgccggaaaagcggttagcccggcgatgcacat

SEQ ID NO: 181056 - DNA, 75 bp, synthetic construct
  source 1..75: mol_type = other DNA
aaaccggggcgttatctggtttatgcaaaccccgacatagtgataccaaaagtactattcagtggaattcttgaa

SEQ ID NO: 181057 - DNA, 75 bp, synthetic construct
  source 1..75: mol_type = other DNA
gtattgttgtgaggtcagggcggacagtacgaacatacgctggacatgcctgagtcaaaacttaaccgcgataga

SEQ ID NO: 181058 - DNA, 75 bp, synthetic construct
  source 1..75: mol_type = other DNA
ttatggttctggtatcgcacaaggcgaaactatccagatctcccttgatactcctgttgtcggagatgcacaaat

SEQ ID NO: 181059 - DNA, 75 bp, synthetic construct
  source 1..75: mol_type = other DNA
ccaaggggaaactggtattactccacagattaactataatggggcgattaaaacatctgaatttaataacggtta

SEQ ID NO: 181060 - DNA, 75 bp, synthetic construct
  source 1..75: mol_type = other DNA
gcaatgtgcgctcaccatgccggaaaagcggttagcccggcgatgcacatttttattcagtgtgttgaagagtgt

SEQ ID NO: 181061 - DNA, 75 bp, synthetic construct
  source 1..75: mol_type = other DNA
tcaaccgagagacggatgccgaattatttactgacagagcgaagtatagaattatcttcgatggtaacctaaaaa

SEQ ID NO: 181062 - DNA, 75 bp, synthetic construct
  source 1..75: mol_type = other DNA
accggctggctgtcaggctgtcattgataatcagccgtctggttgcgggtgaaacgttgagcgtgcgcaaactgg

SEQ ID NO: 181063 - DNA, 75 bp, synthetic construct
  source 1..75: mol_type = other DNA
ttcaggccttaccccattttcgctttatccagcattcactgcttacgtttgttccggctgacagcccaccggaat

SEQ ID NO: 181064 - DNA, 75 bp, synthetic construct
  source 1..75: mol_type = other DNA
ctgacctttgctcaccggtccggactggccgatatctttccggggctggaccggcgtctggcgggcatgctgctc

SEQ ID NO: 181065 - DNA, 75 bp, synthetic construct
  source 1..75: mol_type = other DNA
gcgttgatatttttattaacgggaaaatgtttgaacgtcaggatgttacctttgttcaggataatcccaattctg

SEQ ID NO: 181066 - DNA, 75 bp, synthetic construct
  source 1..75: mol_type = other DNA
tgatacgtggacggcgagcgatattttcgacagtacgcaaattcgcggcgcgcgtttgtatactgataacgatat

SEQ ID NO: 181067 - DNA, 75 bp, synthetic construct
  source 1..75: mol_type = other DNA
agagtcgcgccgttcgacttgtggctaaagatacaatttgagttgtattgtgtaaaccgcaaacgtggtattttg

SEQ ID NO: 181068 - DNA, 75 bp, synthetic construct
  source 1..75: mol_type = other DNA
tggtccattcattttgtaattggatttagtaaaacatgttacagaagtcttgttgatattgaagttggtgatgtt

SEQ ID NO: 181069 - DNA, 75 bp, synthetic construct
  source 1..75: mol_type = other DNA
ctctgtgcaaaaagaataatatctctgcttcctgaatctgagaaaaatatagagatacgtgtaaatggcgcgcta

SEQ ID NO: 181070 - DNA, 75 bp, synthetic construct
  source 1..75: mol_type = other DNA
gatatgcgtcagcagttttcaccaactcgtgaggatagcccttctcactcctgcaaggttatttcttcagatcct

SEQ ID NO: 181071 - DNA, 75 bp, synthetic construct
  source 1..75: mol_type = other DNA
ttatgtggcgctggatttggcttgttccagtcacccaataaccacaccattattacctccgctcctcgcgaacgt

SEQ ID NO: 181072 - DNA, 75 bp, synthetic construct
  source 1..75: mol_type = other DNA
gcccaggaaccgcttcgctgccttggcgctgcgggtcggcgacaggtagaaatcgaggcactgttgcaaatagtc

SEQ ID NO: 181073 - DNA, 75 bp, synthetic construct
  source 1..75: mol_type = other DNA
ataatctgcttgagctattatggcagcttcaccttacaccgacgcgcttcaagcaacacagtgcagacacaaaac

SEQ ID NO: 181074 - DNA, 75 bp, synthetic construct
  source 1..75: mol_type = other DNA
cttgatatggcttttgatgagtggcgcaagatttttaccgttgatgttgatgttgatggtgcatttttatgctcg

SEQ ID NO: 181075 - DNA, 75 bp, synthetic construct
  source 1..75: mol_type = other DNA
agaattcagtatctggagatgttgacatggcagcacagactatgtttggtgatagcagaagtgagcaagcgactg

SEQ ID NO: 181076 - DNA, 75 bp, synthetic construct
  source 1..75: mol_type = other DNA
agaaaccgatgctgatatccctaaccaagccgaagcagatgaccgcctggcggaagaacttacttactggacgga

SEQ ID NO: 181077 - DNA, 75 bp, synthetic construct
  source 1..75: mol_type = other DNA
aggcattccgcgagtcggtattgcgcaactccaaaggctaccagtacctgcacacaaaggattttgtgtcagcgc

SEQ ID NO: 181078 - DNA, 75 bp, synthetic construct
  source 1..75: mol_type = other DNA
acgccgtcaacgaacagatcaacagtacaattgaagatgcgattgcccgcgctcggggtgaaattccgcgcggcg

SEQ ID NO: 181079 - DNA, 75 bp, synthetic construct
  source 1..75: mol_type = other DNA
agatcgtgcaactggatctcggcaatctgccagaaggtgcgcaggcgctggagacactcatccagcgatttgggc

SEQ ID NO: 181080 - DNA, 75 bp, synthetic construct
  source 1..75: mol_type = other DNA
tctctgcccgtcataaccttccggcagagacaattcaccccatcgaaccaccaatgaaaattgatctttgtttgc

SEQ ID NO: 181081 - DNA, 75 bp, synthetic construct
  source 1..75: mol_type = other DNA
gatcccagcgcgaagcaattattaagaaagtaactgaagtattacgtccgaaatatggccatatgtatggctacg

SEQ ID NO: 181082 - DNA, 75 bp, synthetic construct
  source 1..75: mol_type = other DNA
atggaacagataacaaaaccgcattgtggtgctcggctggatcgcttaccggattgccgctggcattcgtcaatg

SEQ ID NO: 181083 - DNA, 75 bp, synthetic construct
  source 1..75: mol_type = other DNA
agacaactagccgaaagcatagggtttcagttaagtgagagccgaaaacctgcgcttaatgagactttgacaatc

SEQ ID NO: 181084 - DNA, 75 bp, synthetic construct
  source 1..75: mol_type = other DNA
gatgcctgctccatacccaacctcatcgcccatactcatcttccattctccgctcttcatcttctagctgccgac

SEQ ID NO: 181085 - DNA, 75 bp, synthetic construct
  source 1..75: mol_type = other DNA
aacacacaccggaatcaaaaatttgttatggataatcaaaaaaaacctccagcagaaaggtgatcccgatttaat

SEQ ID NO: 181086 - DNA, 75 bp, synthetic construct
  source 1..75: mol_type = other DNA
ttcgccggcgtggcatccatttttccgaggtggaggcgaactcctggatcgcacgcgagcacacgtatttcgtcg

SEQ ID NO: 181087 - DNA, 75 bp, synthetic construct
  source 1..75: mol_type = other DNA
acgtaatattaatatgactataacttgcgaatccgctaccggcattgcgattaccgctcgtgatacacgaatgga

SEQ ID NO: 181088 - DNA, 75 bp, synthetic construct
  source 1..75: mol_type = other DNA
ggcgccaacccagaacttcgctttgaagagcgcaacgcccataagcagtgcaaatcgtgtaatgccggtgccgga

SEQ ID NO: 181089 - DNA, 75 bp, synthetic construct
  source 1..75: mol_type = other DNA
cgtgttggcaggcaacggcgcaacggttgctccgacggtcaccacgcagccggacggcacggtggagatctctgt

SEQ ID NO: 181090 - DNA, 75 bp, synthetic construct
  source 1..75: mol_type = other DNA
accatgaagtagattacttctctcgcctgccggatgatgttagccgggaggaatttattgaatattatcgccaac

SEQ ID NO: 181091 - DNA, 75 bp, synthetic construct
  source 1..75: mol_type = other DNA
ttcaacaactggattgccagtaccggctcggatggctggatcatgaatctggtgctgggggcgatgtatgtggta

SEQ ID NO: 181092 - DNA, 75 bp, synthetic construct
  source 1..75: mol_type = other DNA
cagaatacacaactttctggtggtggtgatacctacatgatgggcaatcagcaggggcagggaacgggtatcgat

SEQ ID NO: 181093 - DNA, 75 bp, synthetic construct
  source 1..75: mol_type = other DNA
gcacgcgagcaaacgtatttcgtcgacaacacggcggatcatagagaaaaccgcctgtggatgatggccaacatg

SEQ ID NO: 181094 - DNA, 75 bp, synthetic construct
  source 1..75: mol_type = other DNA
gcacgcgagcaaacgtatttcgtcgacaatacggctgatcatagagaaaaccggctgtggatgatggccaacatg

SEQ ID NO: 181095 - DNA, 75 bp, synthetic construct
  source 1..75: mol_type = other DNA
gcacgcgagcaaacgtatttcgtcgacaaaacggccgatcatagagaaaaccgactgtggatgatggccaacatg

SEQ ID NO: 181096 - DNA, 75 bp, synthetic construct
  source 1..75: mol_type = other DNA
taatacgcttgccgggcagacggtcagcgtgttggcgggcaacagcgcaacggttgctccgacggtcaccacgca

SEQ ID NO: 181097 - DNA, 75 bp, synthetic construct
  source 1..75: mol_type = other DNA
cccaaattttccatcaaagacacccaaaaacggatcacggaacccaaaggaacccaaaggaacccaaagatctaa

SEQ ID NO: 181098 - DNA, 75 bp, synthetic construct
  source 1..75: mol_type = other DNA
gcacgcgagcaaacgtatttcgtcgacaagacggctgatcatagagaaaaccgtctgtggatgatggccaacatg

SEQ ID NO: 181099 - DNA, 75 bp, synthetic construct
  source 1..75: mol_type = other DNA
gccagcggcgaagtggcgcagattagcctcgatggcggcgcgacctggatcacactcaccaccaacggcacgcag

SEQ ID NO: 181100 - DNA, 75 bp, synthetic construct
  source 1..75: mol_type = other DNA
gggtgattgacgcggcgggcaacgtcggtgccactgacagccagaatgtggtgatcgacaccatcgcgccagatc

SEQ ID NO: 181101 - DNA, 75 bp, synthetic construct
  source 1..75: mol_type = other DNA
gggcaaaccgtcaccgtcacttttggcggtaaaacctacactgcaagcgtcgccgccaacggtagctggagtgtg

SEQ ID NO: 181102 - DNA, 75 bp, synthetic construct
  source 1..75: mol_type = other DNA
attatcaacaacgtcgagcagcttgccgggcagatcatcagcggcaccactaccgccgaagtgggtcagacggtc

SEQ ID NO: 181103 - DNA, 75 bp, synthetic construct
  source 1..75: mol_type = other DNA
aatgtcggcgcgaccgacagccagaacgtggtgatcgataccatcgccccagatccagcggtgaaaaccatcgcc

SEQ ID NO: 181104 - DNA, 75 bp, synthetic construct
  source 1..75: mol_type = other DNA
gttggtaataccggtaacggcacgcgggaaatcaccatagacgcgaatctccccggtctacggattgacaccgtg

SEQ ID NO: 181105 - DNA, 75 bp, synthetic construct
  source 1..75: mol_type = other DNA
cggccaggtaaccggtgcggcggcgggcagcaccgtcaccgttgaactgggcggtaaaacttacaccgccaccgt

SEQ ID NO: 181106 - DNA, 75 bp, synthetic construct
  source 1..75: mol_type = other DNA
gcaacaactacgccaccagctccatcgccgattacgaccgtaacggtacgggcgatctgtttattacccgtgatg

SEQ ID NO: 181107 - DNA, 75 bp, synthetic construct
  source 1..75: mol_type = other DNA
cttgccattaacaccatcgccaccgacgatattctgaacgccgccgaggcgggcaatccgctaaccatcagcggc

SEQ ID NO: 181108 - DNA, 75 bp, synthetic construct
  source 1..75: mol_type = other DNA
aaccattagcgggcaggtgacgggcgcggcgcagggagatacggttactgttacgctgggtggcaacacctacac

SEQ ID NO: 181109 - DNA, 75 bp, synthetic construct
  source 1..75: mol_type = other DNA
tgcgggaacgctgaatattaccgttagcggcgcgaacagtgccggaacgcaaaccagcattacccatccgctgac

SEQ ID NO: 181110 - DNA, 75 bp, synthetic construct
  source 1..75: mol_type = other DNA
gccagcaactggacacaatcggccctcggaagcagtcagagcggcactaccagcggcgtggcggcaatggactac

SEQ ID NO: 181111 - DNA, 75 bp, synthetic construct
  source 1..75: mol_type = other DNA
gccagtgggcagtatgtcgaagtggtgatcaacggcaaaacctacacctcgcagccgggcggcgcggtggtagtc

SEQ ID NO: 181112 - DNA, 75 bp, synthetic construct
  source 1..75: mol_type = other DNA
gcaaattacttccgaaattagaggtggggagtttgttgacgatgattttaggcaacttgtagagatgcttaagct

SEQ ID NO: 181113 - DNA, 75 bp, synthetic construct
  source 1..75: mol_type = other DNA
cttcgttaacagcagtcgaaagaacactgggtgatattcttgttaagaatccagatactattaacggagatttag

SEQ ID NO: 181114 - DNA, 75 bp, synthetic construct
  source 1..75: mol_type = other DNA
tcgttcttcgcgctctgaaaaactgctacccgcgccaatggctgaatgtaagcaatcgacgcatggttctcttca

SEQ ID NO: 181115 - DNA, 75 bp, synthetic construct
  source 1..75: mol_type = other DNA
ttgccggacagccctggtttgtcccgacgggtattagcgtagcggcggcactggccttaactgataaccccatta

SEQ ID NO: 181116 - DNA, 75 bp, synthetic construct
  source 1..75: mol_type = other DNA
aacggcaatggccacaaccggaaacgcagaggaacagagtccccggcaactgcagattgagcagatacaggacga

SEQ ID NO: 181117 - DNA, 75 bp, synthetic construct
  source 1..75: mol_type = other DNA
acgctcagtgactactacatcaaacgtgccgaacagtatcacccggtgataccgattggtgcgggcaatgaagtg

SEQ ID NO: 181118 - DNA, 75 bp, synthetic construct
  source 1..75: mol_type = other DNA
attatcaacaacgccgagcagcttgccgggcagaccatcagcggcaccaccaccgccgaagtgggccagacggtg

SEQ ID NO: 181119 - DNA, 75 bp, synthetic construct
  source 1..75: mol_type = other DNA
ggcgacgatattatcaacgccgccgaagcgggggccgatcaaaccatcagcggggtggtgactcgcgccgccgct

SEQ ID NO: 181120 - DNA, 75 bp, synthetic construct
  source 1..75: mol_type = other DNA
attccggcggcaaacgttagcgcctggccagcgggggcattaaccgttgaggtagacgggcagagcagcgccgga

SEQ ID NO: 181121 - DNA, 75 bp, synthetic construct
  source 1..75: mol_type = other DNA
gatatcttcaggtagccgctgagattgaagcgctggccagtggtgctgataaggatgcaattgtgcgggaggctc

SEQ ID NO: 181122 - DNA, 75 bp, synthetic construct
  source 1..75: mol_type = other DNA
cgcggcggtgagcgacaaagccggaaacccggcctcggttaaccacaacctgacggtggatacttccgttccggt

SEQ ID NO: 181123 - DNA, 75 bp, synthetic construct
  source 1..75: mol_type = other DNA
aaaccatcagcgggcaggttactggagccgcagttggtaacacggtaaccgttacgctgggcggtaatacctaca

SEQ ID NO: 181124 - DNA, 75 bp, synthetic construct
  source 1..75: mol_type = other DNA
gactaaaacggcaacaggaacttgataaatggaaaagggaaaacatgactccatttatgtatgttcttaacactc

SEQ ID NO: 181125 - DNA, 75 bp, synthetic construct
  source 1..75: mol_type = other DNA
aatgacaaccaaccgcaacttacagaacaacaacgaaaaatcatatcgcttttagatgagttacctcaaagcgac

SEQ ID NO: 181126 - DNA, 75 bp, synthetic construct
  source 1..75: mol_type = other DNA
aattatcgtgtggaaatttatcttaacggtgaaaaagttgatgttggggagtttccctttcatcgtccggaatcc

SEQ ID NO: 181127 - DNA, 75 bp, synthetic construct
  source 1..75: mol_type = other DNA
agccctggtatatacaggcactgcgtcccgatggttcgccattaacctttggctatgacgtactggatctccagg

SEQ ID NO: 181128 - DNA, 75 bp, synthetic construct
  source 1..75: mol_type = other DNA
ggagctcataatggggccgccgatgcaatgagacattgttacttgatgtgtcgaatgactaagacatttggatca

SEQ ID NO: 181129 - DNA, 75 bp, synthetic construct
  source 1..75: mol_type = other DNA
tcccgatggttcgccattaacctttggctatgacgtactggatctccaggaaaataatattggagtcgttggcca

SEQ ID NO: 181130 - DNA, 75 bp, synthetic construct
  source 1..75: mol_type = other DNA
ggcgaaagggaacaatgcttcgcctgccgggagtggtaatactaaaaacaatggcgcatcaggggccgatatcaa

SEQ ID NO: 181131 - DNA, 75 bp, synthetic construct
  source 1..75: mol_type = other DNA
gtcgccaaactgctgaagtctcgaattgaatttgcagcctcccagcgcttgcggcagttttacgacgaagtcagc

SEQ ID NO: 181132 - DNA, 75 bp, synthetic construct
  source 1..75: mol_type = other DNA
catggctgcagccatagtcatggataacaccgggaaagagttattcaagatagaaacttccactcacctcatcag

SEQ ID NO: 181133 - DNA, 75 bp, synthetic construct
  source 1..75: mol_type = other DNA
tcagcaccacgcagggcggtctgacgcgcagcatggggtatgacgctgccgggcgcatcaccgtgctgaccaacg

SEQ ID NO: 181134 - DNA, 75 bp, synthetic construct
  source 1..75: mol_type = other DNA
ggtgccgggggcggacgaggtgctgccgccggagccgcccgcataccgggtgctgacgggcgtggtggacggctt

SEQ ID NO: 181135 - DNA, 75 bp, synthetic construct
  source 1..75: mol_type = other DNA
ggggcagatgccaatgcttctgtcactggcaatgaatccacggtaccgatgcagttgcgtatcaccggcctggtg

SEQ ID NO: 181136 - DNA, 75 bp, synthetic construct
  source 1..75: mol_type = other DNA
gacctgacggggtggatgtcgctgtcgcgtaaaccggaggtgacctggtacgggtgggacggcgacaggctgacg

SEQ ID NO: 181137 - DNA, 75 bp, synthetic construct
  source 1..75: mol_type = other DNA
tttctgaaatgctacatgaagtaaaaagacaaaaaaatggtaactatgaaaagagtgatgattatttcatggagg

SEQ ID NO: 181138 - DNA, 75 bp, synthetic construct
  source 1..75: mol_type = other DNA
atcaatagcgcacctgcttcaggacaaccaaaggcgtggacatgtaatattgcaggtggtcccggggtttacagc

SEQ ID NO: 181139 - DNA, 75 bp, synthetic construct
  source 1..75: mol_type = other DNA
aatgccatcaaacgcgttgcaagttgaaaaaacaacattttatctttcgtcagtacctacatccggtttctggga

SEQ ID NO: 181140 - DNA, 75 bp, synthetic construct
  source 1..75: mol_type = other DNA
gcataacatcaataaacttaattgccaggttagtgaattggaattaaaaaatgaatttcttttaaagaaaaaaaa

SEQ ID NO: 181141 - DNA, 75 bp, synthetic construct
  source 1..75: mol_type = other DNA
tgggaaggactggcaattgcctcatggaaatttgctgattcatttgttaaacaaaaaaaatgctggcctccgtct

SEQ ID NO: 181142 - DNA, 75 bp, synthetic construct
  source 1..75: mol_type = other DNA
tcaacacagagatacaaaaaaacatgcatatattataacataattgcttttatatctggagctttagtaacgatt

SEQ ID NO: 181143 - DNA, 75 bp, synthetic construct
  source 1..75: mol_type = other DNA
cggcgcggtggaagacggaatcggggtgacgcggagaataacgcgaaaccggtacggtcagcttcgggccttcac

SEQ ID NO: 181144 - DNA, 75 bp, synthetic construct
  source 1..75: mol_type = other DNA
gcagggcagcgtgagtgaagaaagccagcagtggcttgcacagtgtgggttgacggcggaacagatggcggcgca

SEQ ID NO: 181145 - DNA, 75 bp, synthetic construct
  source 1..75: mol_type = other DNA
ggctggctgacagaaatcagccatatcagcgaaggccaccgtgtggcggtccactacggccacgacgataaaggc

SEQ ID NO: 181146 - DNA, 75 bp, synthetic construct
  source 1..75: mol_type = other DNA
ttgaccccattaatacattatcagcccgtgaatatgacgcggtgtgtttgtgggacctgcgcgaaccgggaaaac

SEQ ID NO: 181147 - DNA, 75 bp, synthetic construct
  source 1..75: mol_type = other DNA
accttgcagtggcgatcgagcattacaatgaaacccatccgcatagtgcgttaagttatctctcaccaagggaat

SEQ ID NO: 181148 - DNA, 75 bp, synthetic construct
  source 1..75: mol_type = other DNA
cgcagacaatcagaaactgacgacatggcggtgatcaatgccaaacgcgtataccgcatcatgcgtcagaatgcg

SEQ ID NO: 181149 - DNA, 75 bp, synthetic construct
  source 1..75: mol_type = other DNA
caccgagattgcacgtttcaaacgccagctggcagaacgggatgaagagctggccatcctccaaaaggccgcgac

SEQ ID NO: 181150 - DNA, 75 bp, synthetic construct
  source 1..75: mol_type = other DNA
ccacctgaacggttttaacaccgaccagatgctgaaacagctgggcaacctgaatccgcagcagtttatgtccgg

SEQ ID NO: 181151 - DNA, 75 bp, synthetic construct
  source 1..75: mol_type = other DNA
atgtccggcagtgcttttgccgttacgcaccacgccttcagtagcagagcaggaaggacatctgatggaaatgga

SEQ ID NO: 181152 - DNA, 75 bp, synthetic construct
  source 1..75: mol_type = other DNA
tgctggatgaaaaagatagcgcgtctgttattcgcgtaaatgtgccagaaccacgggaagaaagtattggcgcac

SEQ ID NO: 181153 - DNA, 75 bp, synthetic construct
  source 1..75: mol_type = other DNA
tctaccgagattgcacgtctcaaacgccagctggcagaacgggatgaagagctggctatcctccaaaaggccgcg

SEQ ID NO: 181154 - DNA, 75 bp, synthetic construct
  source 1..75: mol_type = other DNA
cagtacattgtttatttatgcatctggaggtaatggaggatctgccggaggtgcatgtgcaaatacatcccgact

SEQ ID NO: 181155 - DNA, 75 bp, synthetic construct
  source 1..75: mol_type = other DNA
aatctaccagcagcgcacgcttgggagtggtcagccagattgaaggagagctggtgcgtcaacaggcggagctaa

SEQ ID NO: 181156 - DNA, 75 bp, synthetic construct
  source 1..75: mol_type = other DNA
aatcctccggtttgatgcgcaagctaaataaattaaagaccaaacccaaacatttcattgttgactccagcggtt

SEQ ID NO: 181157 - DNA, 75 bp, synthetic construct
  source 1..75: mol_type = other DNA
cagcaccacagatatcgcaacttcttggtttaaacatactggctatgaagataagaacaacaaatcctatgatcc

SEQ ID NO: 181158 - DNA, 75 bp, synthetic construct
  source 1..75: mol_type = other DNA
cttggaaataaaaaagaaattcattaaaaataacaaatcgcattacagtataattttttgcaataatgttgggta

SEQ ID NO: 181159 - DNA, 75 bp, synthetic construct
  source 1..75: mol_type = other DNA
actgattgttatgctcctgattgcctggggagcgggcatatggcaggactatattcaaacaaaaggatggcaaac

SEQ ID NO: 181160 - DNA, 75 bp, synthetic construct
  source 1..75: mol_type = other DNA
cgggcgagcattaatgccgggttgagtgctgcgtgggccaactcagcttactccatggtaccgacggacatgctg

SEQ ID NO: 181161 - DNA, 75 bp, synthetic construct
  source 1..75: mol_type = other DNA
cagttggagaataacagggcgattattcaggccaacaatctggaagctaaacggttacaggcacagaatcgactg

SEQ ID NO: 181162 - DNA, 75 bp, synthetic construct
  source 1..75: mol_type = other DNA
ctgaaaaattcaaattcctcttgcaaacgtgagcaagacatgtctgttgaaattgcccgtcttaagcggcaactg

SEQ ID NO: 181163 - DNA, 75 bp, synthetic construct
  source 1..75: mol_type = other DNA
aaagaggcgggttatccggttcaccattcgaatatcagccgtatggtggcgacaatcgaatatctatggccgtgg

SEQ ID NO: 181164 - DNA, 75 bp, synthetic construct
  source 1..75: mol_type = other DNA
attgataaagcgatcctgaatacctactttgccgagaatggcgcaccaatccaccttgacgacatccgggagttt

SEQ ID NO: 181165 - DNA, 75 bp, synthetic construct
  source 1..75: mol_type = other DNA
gatcggggccgattacgtcgtatcgagagagcgcattcgccagattcaggccgatataagacaggaatttctagg

SEQ ID NO: 181166 - DNA, 75 bp, synthetic construct
  source 1..75: mol_type = other DNA
ggacgccattgtactggcagctaacagccggggcgcggatctgtcactcgataagctcaaccaacagcttatcga

SEQ ID NO: 181167 - DNA, 75 bp, synthetic construct
  source 1..75: mol_type = other DNA
atgcgtatcggcatgcggttgttgctgggctattttttactggtggcggtggcggcctggttcgttctggctatt

SEQ ID NO: 181168 - DNA, 75 bp, synthetic construct
  source 1..75: mol_type = other DNA
gccattttgtccgcagccatttgtctggccgtatccggtgcgcctgcatgggcgtctgaacatcagtccacgctg

SEQ ID NO: 181169 - DNA, 75 bp, synthetic construct
  source 1..75: mol_type = other DNA
tggtaaccagtccctgctgacctatctggaaaccaacaccatcgcataccaccagaacgggcgtcctctgaacat

SEQ ID NO: 181170 - DNA, 75 bp, synthetic construct
  source 1..75: mol_type = other DNA
cgtacttcccgcaatccaaagtatgaagatatcaaagcgtcgatccgcgcccgggggctggattcggtgccaaaa

SEQ ID NO: 181171 - DNA, 75 bp, synthetic construct
  source 1..75: mol_type = other DNA
catgatttcagcagttgcctgcgggatctacactcaaatggtaaaggaacgggtgtatagcctgaaacagtccgt

SEQ ID NO: 181172 - DNA, 75 bp, synthetic construct
  source 1..75: mol_type = other DNA
gcgcagggcaaagtattgttcgattcggcaaataaagccgttggacaggattattcgcgctggaatgacgtctag

SEQ ID NO: 181173 - DNA, 75 bp, synthetic construct
  source 1..75: mol_type = other DNA
tccggcaactggagcgtcaccgttccggcatcggcggtaaccgcactgggccaggccaactacacggtaacggcg

SEQ ID NO: 181174 - DNA, 75 bp, synthetic construct
  source 1..75: mol_type = other DNA
ggactcgtcacgtgcatcaccacgccggacggcaggaaatcggaattttactataacaatcaaaaccagttaacc

SEQ ID NO: 181175 - DNA, 75 bp, synthetic construct
  source 1..75: mol_type = other DNA
aatcagcgagtcggaagaattttggcaaaagaatgcgcaaatcaggcattcattacttatttgtatttatcagat

SEQ ID NO: 181176 - DNA, 75 bp, synthetic construct
  source 1..75: mol_type = other DNA
accttcaactgttggaagggactatcaacaatcagaagcggcaaaaaatgccccatgaatggtatgcgcagcagt

SEQ ID NO: 181177 - DNA, 75 bp, synthetic construct
  source 1..75: mol_type = other DNA
ctgtgataaaggttctcagtatgtatcgctggcctacatgcagcggcttaaggaagccggattattggcatcttc

SEQ ID NO: 181178 - DNA, 75 bp, synthetic construct
  source 1..75: mol_type = other DNA
aaatctccacacttgagaaaaaactcgcctgcctgagagatgagaaaaaagccctgatgcaacagctactgactg

SEQ ID NO: 181179 - DNA, 75 bp, synthetic construct
  source 1..75: mol_type = other DNA
ccgtgcgcagcgcgatgactggctgaagaaagagatacagcgtgtatacgatgaaaatcaccaggtatacggtgt

SEQ ID NO: 181180 - DNA, 75 bp, synthetic construct
  source 1..75: mol_type = other DNA
ttggattaaggaaaagacaggctttgatccacgtagcatcggtcagacgcttaagcagatttacccgtggctgga

SEQ ID NO: 181181 - DNA, 75 bp, synthetic construct
  source 1..75: mol_type = other DNA
cctggctgacaagatgaaagctgtgcaggcaatcaaagaggctaccaagggatactccgagcagcgttacaccat

SEQ ID NO: 181182 - DNA, 75 bp, synthetic construct
  source 1..75: mol_type = other DNA
aaaagggctatggccttagaagaaaagcgccagcgtgagaaagaggccagtcttaaacgccagagcactgcatac

SEQ ID NO: 181183 - DNA, 75 bp, synthetic construct
  source 1..75: mol_type = other DNA
ttcatatctgaacttttagaattagacagaaaagctctcagcaatcttctggatgaatggtacgacgaacaggag

SEQ ID NO: 181184 - DNA, 75 bp, synthetic construct
  source 1..75: mol_type = other DNA
cgttttagatggtcttattgatacaaagatcaacgataacaacgtcagacagcagaatatgatactgggtatagc

SEQ ID NO: 181185 - DNA, 75 bp, synthetic construct
  source 1..75: mol_type = other DNA
cgctagcgttgaatgttcctagcctgaactatctgacaccccagcaaccgacgtttacggttccgacaattgaca

SEQ ID NO: 181186 - DNA, 75 bp, synthetic construct
  source 1..75: mol_type = other DNA
ccagcgtcagcgatcgggcgggtaacagcgacgacgccagccgcaccgtgacggtaagcctcagcgcgccagcga

SEQ ID NO: 181187 - DNA, 75 bp, synthetic construct
  source 1..75: mol_type = other DNA
ctggtggtgaccatcgccgggcagcagtatgtcaccagcaccgatgccagcggcaactggagcgtcggcgtgcct

SEQ ID NO: 181188 - DNA, 75 bp, synthetic construct
  source 1..75: mol_type = other DNA
aacccggtggcaaccgacgatattattaacgccgccgaagcgggtggtgcgcaaaccatcagcgggcaggttact

SEQ ID NO: 181189 - DNA, 75 bp, synthetic construct
  source 1..75: mol_type = other DNA
aagcccgctcaccatcagcggcaccagcaccgccgaaaccgggcagacggtcaccgtcacccttaacggcgcaac

SEQ ID NO: 181190 - DNA, 75 bp, synthetic construct
  source 1..75: mol_type = other DNA
cacggtcaacgacaaagcgggcaaccccggcagcgccagccataatctggcggtagacaccaccgcgccggttct

SEQ ID NO: 181191 - DNA, 75 bp, synthetic construct
  source 1..75: mol_type = other DNA
acggttccggcggcagatctggcaactctgccagacggcgcggcgaacgtgcaggccagcgtcagcagcgcgagc

SEQ ID NO: 181192 - DNA, 75 bp, synthetic construct
  source 1..75: mol_type = other DNA
ccggcggcagatatggcggccctgcgtgatggcgatgccagcgcacaggccagcgtcagcaatgttaacggcaac

SEQ ID NO: 181193 - DNA, 75 bp, synthetic construct
  source 1..75: mol_type = other DNA
accgttccggcgtcacgggtgagcgccctcggtgaagccacttacacggtgaccgccgccgctactgactctgat

SEQ ID NO: 181194 - DNA, 75 bp, synthetic construct
  source 1..75: mol_type = other DNA
ggctcctggagtctgacggtacctgccgccgcgatgggaaatctgcctgacggcgcggtggcgattaccgcttct

SEQ ID NO: 181195 - DNA, 75 bp, synthetic construct
  source 1..75: mol_type = other DNA
ggtcgatacccaaccgccaacgcttgccatcaacaccatcgctcaggacaacatcatcagtgctgcggaacataa

SEQ ID NO: 181196 - DNA, 75 bp, synthetic construct
  source 1..75: mol_type = other DNA
cagcgatcagccagcgggcacggcgatcaccgtcaccctgaacggacaaaactacagcgccaccaccgactcttc

SEQ ID NO: 181197 - DNA, 75 bp, synthetic construct
  source 1..75: mol_type = other DNA
gatctgatctggcgctttccggcatcagcgatcagccagcgggcacggcgatcaccgtcaccctgaacggacaaa

SEQ ID NO: 181198 - DNA, 75 bp, synthetic construct
  source 1..75: mol_type = other DNA
gcgggcaacagcgacagcactacccataatgtgaccgttgatctcagcggcccgacgctgaccatcagtaccgtc

SEQ ID NO: 181199 - DNA, 75 bp, synthetic construct
  source 1..75: mol_type = other DNA
tataacattgatgtttgtgaacagtactaaaatggcgttaaccggtgagcctttatcatttaatgacattgtttc

SEQ ID NO: 181200 - DNA, 75 bp, synthetic construct
  source 1..75: mol_type = other DNA
gtttcaggccgctgacttctgcaccgcacaggtgcgtgagctgatggactgccacgacaccgcaaggcgtcgcgt

SEQ ID NO: 181201 - DNA, 75 bp, synthetic construct
  source 1..75: mol_type = other DNA
aacctgttatcggaggcagtcaccatgactacgacccctaccccgtcacacccgcaaaaagtcattcttccccac

SEQ ID NO: 181202 - DNA, 75 bp, synthetic construct
  source 1..75: mol_type = other DNA
ggttacatccggattaatcttgcctgtccacgcgccgtggtacaagaagggttagagagaataagaaaagcactg

SEQ ID NO: 181203 - DNA, 75 bp, synthetic construct
  source 1..75: mol_type = other DNA
gaacatgttcgtaagcaatggagatggttacatccggattaatcttgcctgtccacgcgccgtggtacaagaagg

SEQ ID NO: 181204 - DNA, 75 bp, synthetic construct
  source 1..75: mol_type = other DNA
gctttgactttaaggacgatgaatttgtcagaatgtgggttgctgatatggattttgcgacacctccggagatcc

SEQ ID NO: 181205 - DNA, 75 bp, synthetic construct
  source 1..75: mol_type = other DNA
gcaatgacgctttcggcagcagtggtttcaatactggcggagagtggaattttggtgtccaaatggaaacctggt

SEQ ID NO: 181206 - DNA, 75 bp, synthetic construct
  source 1..75: mol_type = other DNA
tactggtagaaaactagatgatgcattaaatttgattttgtcatataaattagattgtaaaatcgcaattcttgg

SEQ ID NO: 181207 - DNA, 75 bp, synthetic construct
  source 1..75: mol_type = other DNA
gaccgccaccgcctcgctgtcggctgaagatatcgcggccgcccatcttctgggtaaaaccgaagccgagttcct

SEQ ID NO: 181208 - DNA, 75 bp, synthetic construct
  source 1..75: mol_type = other DNA
ccttacccaataaaagcgtggattatgtcacggcataatcccttccagacagtcacctgccgtccggacctggtt

SEQ ID NO: 181209 - DNA, 75 bp, synthetic construct
  source 1..75: mol_type = other DNA
gcgacccagtatgtccctttgctcagtgaactgatgtgggataatgcggtctggatccacccgcaaacggcgcga

SEQ ID NO: 181210 - DNA, 75 bp, synthetic construct
  source 1..75: mol_type = other DNA
gttgagcgttacaccaccggatttgaacagttagcactggcggtaaaagacgcaacgccggaatgggccgccacg

SEQ ID NO: 181211 - DNA, 75 bp, synthetic construct
  source 1..75: mol_type = other DNA
gtcatcctgtttacctctttctcagggagtttagtctccaggatttccggggcggttcacagacgggagtttgcc

SEQ ID NO: 181212 - DNA, 75 bp, synthetic construct
  source 1..75: mol_type = other DNA
ggtggcctcgctgccactggtgtaattgcagggggatccctgattggttcaatgggagttgctcgtgttggtcag

SEQ ID NO: 181213 - DNA, 75 bp, synthetic construct
  source 1..75: mol_type = other DNA
tagtgacgagcaccgtcaatatcgtaagctgggaaatttcccgctctagttacgaagcagcgaagaagaaaattc

SEQ ID NO: 181214 - DNA, 75 bp, synthetic construct
  source 1..75: mol_type = other DNA
atctgcaaccgttactgcaaagtgctcagttgacaggaatgactgtcacaatcaaatccagtacctgtgaatcag

SEQ ID NO: 181215 - DNA, 75 bp, synthetic construct
  source 1..75: mol_type = other DNA
ttaacgtgaatgacggcgctattaacggtttgattgatacaaaactgaggagctatgagcaggcacagaacaaca

SEQ ID NO: 181216 - DNA, 75 bp, synthetic construct
  source 1..75: mol_type = other DNA
gatcacgagcgatgacctacaacccaaacatgggcggtcaacattacgatcctggtcttgtttcccgccagactg

SEQ ID NO: 181217 - DNA, 75 bp, synthetic construct
  source 1..75: mol_type = other DNA
ctgagtacaaccgagtacaaacaagtcttgcggatcacttctcagcctcgtttgttgaaggcctggggcagtacg

SEQ ID NO: 181218 - DNA, 75 bp, synthetic construct
  source 1..75: mol_type = other DNA
tcatcagcggttcattttgtgctgccgccagtgcggccagctgtcgggcatcgacagcggcgcttgccggtgctc

SEQ ID NO: 181219 - DNA, 75 bp, synthetic construct
  source 1..75: mol_type = other DNA
cctctccggcaccgcaatccacacctgttccacgggcatcttcatccggggccacaccagattaccccttttcac

SEQ ID NO: 181220 - DNA, 75 bp, synthetic construct
  source 1..75: mol_type = other DNA
agcattatgaaacccatgaaaaagtcgcatatttgtatagctgcgaccatatttcatggggggtatttttgatca

SEQ ID NO: 181221 - DNA, 75 bp, synthetic construct
  source 1..75: mol_type = other DNA
gaaatttgtaccaatcaaggttttaaaaacatcattccgaatgaagggtttaatatcgaatttatttattatttg

SEQ ID NO: 181222 - DNA, 75 bp, synthetic construct
  source 1..75: mol_type = other DNA
acgtctttctaagaactgggaggtgcagctctttactggtgactatgatacacatgatatgatcacatttcgtgg

SEQ ID NO: 181223 - DNA, 75 bp, synthetic construct
  source 1..75: mol_type = other DNA
cggatatgacatccatgctgaacgtgctgcgccgaatgtgttgctctccccttcgctctggcttggtcatgttta

SEQ ID NO: 181224 - DNA, 75 bp, synthetic construct
  source 1..75: mol_type = other DNA
gtgggcaatactggcagcggtacgcgcgaaatcgtgattgacgctaatctccctggtcttcgggtcgataccgtc

SEQ ID NO: 181225 - DNA, 75 bp, synthetic construct
  source 1..75: mol_type = other DNA
gcgaatggcaatacgggcagcggtacgcgggatatcaccattgacgctaacctgccagggctgcgcgtggatacg

SEQ ID NO: 181226 - DNA, 75 bp, synthetic construct
  source 1..75: mol_type = other DNA
agcgtcagcgtaccgactggcgatttagccaatctcaccgccagcccgtataccgtcagcgcagcggtcagcgac

SEQ ID NO: 181227 - DNA, 75 bp, synthetic construct
  source 1..75: mol_type = other DNA
cgctcaataacaacacgtaccagaccactgttctcgcggatggcacctggagcgtgaacgttccggcaacggatt

SEQ ID NO: 181228 - DNA, 75 bp, synthetic construct
  source 1..75: mol_type = other DNA
cctccgccgtcagtgcgctgggcgaagccagttatacggtgacggcgaatgtcaccgacagcgcgggtaacagta

SEQ ID NO: 181229 - DNA, 75 bp, synthetic construct
  source 1..75: mol_type = other DNA
ggcgatgatatcgtcaacagcattgaacacgggcaggcgctggtgatcaccggcggcagtagcggcctgaatgca

SEQ ID NO: 181230 - DNA, 75 bp, synthetic construct
  source 1..75: mol_type = other DNA
tcatcaatacgccggaacacacccaggcgcaaatcatcagcggcacggttaccggcgcgcaggctggcgatatcg

SEQ ID NO: 181231 - DNA, 75 bp, synthetic construct
  source 1..75: mol_type = other DNA
ctggcggcgggcgcggcgttgacggtggttatcaatagcgtcacctacggcgcaacggttttagcggatggtagc

SEQ ID NO: 181232 - DNA, 75 bp, synthetic construct
  source 1..75: mol_type = other DNA
atctcgctgcgctgccggacggcgcgggcaacgtgcaggcgagcgtcagcaacatcaacggcaataacgcccagg

SEQ ID NO: 181233 - DNA, 75 bp, synthetic construct
  source 1..75: mol_type = other DNA
gctggtggtgagcggcaccagcacgggcgcggcggcaggcgatgtggtgaccgtctcgctcaacggcaaaaacta

SEQ ID NO: 181234 - DNA, 75 bp, synthetic construct
  source 1..75: mol_type = other DNA
tccggcaactggagcgtcggcgttccggcagcggacgtcaccgcgctgggcagcggttcacaaaccgtaacggcg

SEQ ID NO: 181235 - DNA, 75 bp, synthetic construct
  source 1..75: mol_type = other DNA
cgcataacctgacggtggatctcgttgcgccggtcgttaccatcaacacggtagcgggcgatgacatcattaacg

SEQ ID NO: 181236 - DNA, 75 bp, synthetic construct
  source 1..75: mol_type = other DNA
gcgatgttgttaatctcgcgaacaccacttataccgtcacagccagcgccaccgatgtgaccggcaacactggca

SEQ ID NO: 181237 - DNA, 75 bp, synthetic construct
  source 1..75: mol_type = other DNA
cactaccgacggttctggcaactggagcgttaccgtgcctgcttcggcggttggcgcactgggcgaggcggtgta

SEQ ID NO: 181238 - DNA, 75 bp, synthetic construct
  source 1..75: mol_type = other DNA
cgcggaaacggggcagacgctcaccgtcacgcttaacggtactaactaccagaccacgatacaggcggacggcag

SEQ ID NO: 181239 - DNA, 75 bp, synthetic construct
  source 1..75: mol_type = other DNA
ggccaccgatgccactcacgcttacgatctcagcgccgaagcgggtaccgcgagcaacaacggcaagttcgtcgg

SEQ ID NO: 181240 - DNA, 75 bp, synthetic construct
  source 1..75: mol_type = other DNA
ccatccccgccagcgcggtcagcagcctggcagacggcgcggcggaaattaccgcgacggtcacgaatatcagcg

SEQ ID NO: 181241 - DNA, 75 bp, synthetic construct
  source 1..75: mol_type = other DNA
cctataccgccacggttgccgccaatggcacctgggcgctgaacgtgcctgcggcggatctggccgcgctcgggc

SEQ ID NO: 181242 - DNA, 75 bp, synthetic construct
  source 1..75: mol_type = other DNA
ttaaacggcaaaacctacaccaccacggtgcagacgggcggtagctggagctacaccctcggcagcgccgatgtc

SEQ ID NO: 181243 - DNA, 75 bp, synthetic construct
  source 1..75: mol_type = other DNA
aacaccatcgccaccgatgacgtgattaacgccaccgaaaaaggcgcggatctgcaaatttccggcaccagtaat

SEQ ID NO: 181244 - DNA, 75 bp, synthetic construct
  source 1..75: mol_type = other DNA
atggcgaaaactatactggcacggttcaaacggacggtagctggagcgtcagcgtaccgccagccgacttaagcg

SEQ ID NO: 181245 - DNA, 75 bp, synthetic construct
  source 1..75: mol_type = other DNA
gttaataccgcgctgccgggcgtcaccattaacgttgtggcaacggacgatattattaacgctgccgaagcaggg

SEQ ID NO: 181246 - DNA, 75 bp, synthetic construct
  source 1..75: mol_type = other DNA
ggtaacacggtttccgtgacgattggcacgaccacctacaccaccgtgctggacgccaacggcaactggagcatc

SEQ ID NO: 181247 - DNA, 75 bp, synthetic construct
  source 1..75: mol_type = other DNA
cggcagctggagtttaacgctgcccgccagcgacttaaccgcacttgccaataacggctacaccctgaccgccac

SEQ ID NO: 181248 - DNA, 75 bp, synthetic construct
  source 1..75: mol_type = other DNA
ttaacgccaccgaaaaaggcgcggatctgcaaatttccggcaccagtaatcagcccgcaggcactacaattacgg

SEQ ID NO: 181249 - DNA, 75 bp, synthetic construct
  source 1..75: mol_type = other DNA
ggcgcagaccatcagcggccaggtgacgggcgcggcggcgggcgatacggtcaccgtcacgctgggcggcaacac

SEQ ID NO: 181250 - DNA, 75 bp, synthetic construct
  source 1..75: mol_type = other DNA
gcattgagcacactcaggcgctggtggtcaccggtagcagtagcggactggcggcgggcgcggcgttgacggtag

SEQ ID NO: 181251 - DNA, 75 bp, synthetic construct
  source 1..75: mol_type = other DNA
tcaacggcgtggcgacgctggatgcgcaggccggaaacatcggtgattttgtcaaagtcacccagagcggcagcg

SEQ ID NO: 181252 - DNA, 75 bp, synthetic construct
  source 1..75: mol_type = other DNA
ggtcaatattgccgtctctggcactaataccgccggaaccacaaccagcattagccatccggtgaccgtcgatct

SEQ ID NO: 181253 - DNA, 75 bp, synthetic construct
  source 1..75: mol_type = other DNA
aggcgcaggtgattaccgggagcagctccggctttacggcaggcacggcgctgaccgtggtgataaataaccaaa

SEQ ID NO: 181254 - DNA, 75 bp, synthetic construct
  source 1..75: mol_type = other DNA
tgacgctgaacgggcaaaattacaccgctaccaccgatagcagtggcaactggagcgccacggtgccagcctcgg

SEQ ID NO: 181255 - DNA, 75 bp, synthetic construct
  source 1..75: mol_type = other DNA
gtggcgagcgatgacgtgattaacgccacggaacatgcccaggcgcagattatcagcggctcggcaacgggcgcg

SEQ ID NO: 181256 - DNA, 75 bp, synthetic construct
  source 1..75: mol_type = other DNA
ggtggtcaccggtagcagtaccggactggcggtgggggcggcgttgacggtagtgatcaacggcgtcacctatgg

SEQ ID NO: 181257 - DNA, 75 bp, synthetic construct
  source 1..75: mol_type = other DNA
gatcacggcggcactcgccagcgggcagtatgttgaagtggtgatcaacggcaaaacctacacctctgaaccggg

SEQ ID NO: 181258 - DNA, 75 bp, synthetic construct
  source 1..75: mol_type = other DNA
gttaccgtgccggcttcggcggtcggcgcactgggcgaggcggtttattcgattagcgccagcgccaccgacagc

SEQ ID NO: 181259 - DNA, 75 bp, synthetic construct
  source 1..75: mol_type = other DNA
cccgacgctgaccattaacactgtctccggtgatgacattattaataatgcggagaaaacccaggatctgatcat

SEQ ID NO: 181260 - DNA, 75 bp, synthetic construct
  source 1..75: mol_type = other DNA
cgctgggcggcaacacctacaccgccacggtgcaggctaatttaagctggagtgttagcgttccagcggcggata

SEQ ID NO: 181261 - DNA, 75 bp, synthetic construct
  source 1..75: mol_type = other DNA
gggtgaacgtgaccgttgccgcagacggtctgaactggacatatgtggacgggcgtacgctgaccaacggcacca

SEQ ID NO: 181262 - DNA, 75 bp, synthetic construct
  source 1..75: mol_type = other DNA
gttgggcgcggcgctcggcgctaatgagttcgcgcaaatcagtaccgacaacggcgcaacctgggtgaacgtgac

SEQ ID NO: 181263 - DNA, 75 bp, synthetic construct
  source 1..75: mol_type = other DNA
taagcgacggcagctacaccattagcgcgacggttagcgatcaggccggaaaccccggcagcgccagccgtggcg

SEQ ID NO: 181264 - DNA, 75 bp, synthetic construct
  source 1..75: mol_type = other DNA
cctgcctcggcggtcagtgcgctgggcgaagccacctacagcgtgacggcgagcgtcaccaacgctcagggtaac

SEQ ID NO: 181265 - DNA, 75 bp, synthetic construct
  source 1..75: mol_type = other DNA
gcggcgattgattacacaccgacctggaccaccgccagcaaaaccaccgcctgggggttgacctacggcctcgac

SEQ ID NO: 181266 - DNA, 75 bp, synthetic construct
  source 1..75: mol_type = other DNA
ccgtaacggcctgctgttaggtgcggtgacgatggtcggcgcgctgaactggacctacagcgacagcgggctggt

SEQ ID NO: 181267 - DNA, 75 bp, synthetic construct
  source 1..75: mol_type = other DNA
ccgggcagaccatcagcggcaccaccaccgccgaagtgggccagacggtgaccgtcacctttaacgggcaaacct

SEQ ID NO: 181268 - DNA, 75 bp, synthetic construct
  source 1..75: mol_type = other DNA
tgacgctgaacgggcaaaattacaccgccaccacagatgcttccggcaactggagcgccacggtgccagcctcgg

SEQ ID NO: 181269 - DNA, 75 bp, synthetic construct
  source 1..75: mol_type = other DNA
tggcgctataacgacagccgcacgctgaccgatggtaactatctctatcaggtgcgggtgattgatgcggcgggc

SEQ ID NO: 181270 - DNA, 75 bp, synthetic construct
  source 1..75: mol_type = other DNA
tacggcgacgaccgacgcctccggcaactggagcgtcaccgttccggcatcggcggtgacagcattaggccaggc

SEQ ID NO: 181271 - DNA, 75 bp, synthetic construct
  source 1..75: mol_type = other DNA
gcggcaacacttacaccgctacggtactgagcaatttaagctggagcgtcaccgtttcgacagtcgatctccagg

SEQ ID NO: 181272 - DNA, 75 bp, synthetic construct
  source 1..75: mol_type = other DNA
cactggcgaacggcacggtgaccattaacgccagcgtcactgatgccggaggaaacagcggcagcaccacccatc

SEQ ID NO: 181273 - DNA, 75 bp, synthetic construct
  source 1..75: mol_type = other DNA
gcatcaacgccattaccgccgatgatgtgattaacgccgccgaaaaaggcgcggcgttaacgctctccggcagca

SEQ ID NO: 181274 - DNA, 75 bp, synthetic construct
  source 1..75: mol_type = other DNA
tgtctccgaagaaggaattgttgaagagatgaagctcagcaagaatcgcctgagcgctgaactcgccaagcgttt

SEQ ID NO: 181275 - DNA, 75 bp, synthetic construct
  source 1..75: mol_type = other DNA
tgacatggtaattacccataattactatagttacacggtaattaccattgtacttaccattgcaaaaaaaacaac

SEQ ID NO: 181276 - DNA, 75 bp, synthetic construct
  source 1..75: mol_type = other DNA
gccggaatgtgaaaccgagtttatcttcaagatcagtggtcgaattgaagggacgacgccgagagctatcgatgc

SEQ ID NO: 181277 - DNA, 75 bp, synthetic construct
  source 1..75: mol_type = other DNA
tgacgttgataactcgctggagaacctgactgtcgaagcggctaccggagaaaaaacggtcggtcaattagcgca

SEQ ID NO: 181278 - DNA, 75 bp, synthetic construct
  source 1..75: mol_type = other DNA
gcgttcttgatctgcttgttgatggacttgaggatggccagttgaacggcaatgacgcagaacaggtgatgcatg

SEQ ID NO: 181279 - DNA, 75 bp, synthetic construct
  source 1..75: mol_type = other DNA
cactgcgcgcggtacggttgaggaaattgaggggtttgtacagaccgtcacgccggatgcgcggagtaaggatac

SEQ ID NO: 181280 - DNA, 75 bp, synthetic construct
  source 1..75: mol_type = other DNA
aagactataacgccagtttaccactagtggtgcttgccggttctcctcttgcacagcttgctcgcgagcaggggt

SEQ ID NO: 181281 - DNA, 75 bp, synthetic construct
  source 1..75: mol_type = other DNA
acccttgcatcaaaaccgggttcaacaatctcaagcatcccatcaaaaagacggatattgattaacattaaccac

SEQ ID NO: 181282 - DNA, 75 bp, synthetic construct
  source 1..75: mol_type = other DNA
ttggcggtgaggcgtggcttaataaaggttgctctacctatcagcagctctacaatgaattccacgcattatata

SEQ ID NO: 181283 - DNA, 75 bp, synthetic construct
  source 1..75: mol_type = other DNA
cgagttgcacgctgacaccgtggcatttgaggagaagcacggctcacagctggagctgctgtttcgatttctgga

SEQ ID NO: 181284 - DNA, 75 bp, synthetic construct
  source 1..75: mol_type = other DNA
tcttaatttttttcaaaaaaagataaataagtcagtgggtaggctcattaaacggcctacccatgttaattctta

SEQ ID NO: 181285 - DNA, 75 bp, synthetic construct
  source 1..75: mol_type = other DNA
tgttcttgggtaaagaaccttacagcaaaaaatctgattttgttaaggcatggttattgtggtgggctattacca

SEQ ID NO: 181286 - DNA, 75 bp, synthetic construct
  source 1..75: mol_type = other DNA
ctgactgtcgaagcggctaccggagaaaaaacggtcggtcaattagcgcaatgtttacgtgaacgagtggatagt

SEQ ID NO: 181287 - DNA, 75 bp, synthetic construct
  source 1..75: mol_type = other DNA
acgaccgactggaattcttacgtgctgaaatcaaacctctgtttcgtactgtttctgaggtcgacttcagggcca

SEQ ID NO: 181288 - DNA, 75 bp, synthetic construct
  source 1..75: mol_type = other DNA
aaaacaatctttttttgtgccaccaaggcccacgcccggcgtatggaagatattttcgataagctctatccgcaa

SEQ ID NO: 181289 - DNA, 75 bp, synthetic construct
  source 1..75: mol_type = other DNA
tcgaagacatcaactttgagggaacccagcttgaaaagcaggtgattaataagggtaccaataccctgatcgtcc

SEQ ID NO: 181290 - DNA, 75 bp, synthetic construct
  source 1..75: mol_type = other DNA
aacaggttgaaatatcttgatgaaattttaaagcttataagcaacaataaacaaatctcaaaatatatttttctt

SEQ ID NO: 181291 - DNA, 75 bp, synthetic construct
  source 1..75: mol_type = other DNA
gcaaagactcggatgactttaatataaatctaatacctttattttacactcgtaaatttgatgcaaagtactatc

SEQ ID NO: 181292 - DNA, 75 bp, synthetic construct
  source 1..75: mol_type = other DNA
ggtcaaagccgatgaagatgcgttcgatgttatagtcgccaggctcggtcctttgatgaagttccgtgaaaaatc

SEQ ID NO: 181293 - DNA, 75 bp, synthetic construct
  source 1..75: mol_type = other DNA
tggctaaattcaaaactagctgggaagataccgaagaagaacaagaagagattgatgtaaacgaagacgagatcc

SEQ ID NO: 181294 - DNA, 75 bp, synthetic construct
  source 1..75: mol_type = other DNA
gaagttgaagcagttgaagaaaaatccattgatgaagaactggaagaactccttaactatcgctggggtgttgtt

SEQ ID NO: 181295 - DNA, 75 bp, synthetic construct
  source 1..75: mol_type = other DNA
cgttaatttcaacggagaacgcactgcaatcactttgcacctcaaaacgatgaacgtgccggccgaaagttatga

SEQ ID NO: 181296 - DNA, 75 bp, synthetic construct
  source 1..75: mol_type = other DNA
aaagccatcacattggggctgactgccacgccaactgatattatcgaccacaataccttccagctatttcactgc

SEQ ID NO: 181297 - DNA, 75 bp, synthetic construct
  source 1..75: mol_type = other DNA
ctacaacatccagaagcaattgggtggtgagctacccttctgcttttacaccaatgggcacgaactttatttctg

SEQ ID NO: 181298 - DNA, 75 bp, synthetic construct
  source 1..75: mol_type = other DNA
ttagttacagtaaagcgctccagaggtggcgtaataagacgtgagcatcttaaaggaaaagatatctccgtgaaa

SEQ ID NO: 181299 - DNA, 75 bp, synthetic construct
  source 1..75: mol_type = other DNA
tccgggggtatgtggtcctttgcacattttcttaaccctgatgcaacggtttgggatggcaataactacacaatt

SEQ ID NO: 181300 - DNA, 75 bp, synthetic construct
  source 1..75: mol_type = other DNA
ctgcacccggacagtaccctcacggcgtggccggataaccgcatcgcagaggatgcgcactatgtttaccactat

SEQ ID NO: 181301 - DNA, 75 bp, synthetic construct
  source 1..75: mol_type = other DNA
agacgcgggaatacggctacagtgccacgggcaggctggagagcgtgcgcaccctcgcaccggacctggacatcc

SEQ ID NO: 181302 - DNA, 75 bp, synthetic construct
  source 1..75: mol_type = other DNA
tagatgaggtcatcgctattcagaagagcacattgccaaatagcggacaaccagaccggggaaaactcgaaggtg

SEQ ID NO: 181303 - DNA, 75 bp, synthetic construct
  source 1..75: mol_type = other DNA
aactgcaccagcgtctgaatgactggcgcaaagcccagaccgacgaagtgctggaaaacccggacccgcgaggtg

SEQ ID NO: 181304 - DNA, 75 bp, synthetic construct
  source 1..75: mol_type = other DNA
ataaaaattactttacttcattatttctcttaaaatatatttatatgataagacgaaggagaaaagatagagcat

SEQ ID NO: 181305 - DNA, 75 bp, synthetic construct
  source 1..75: mol_type = other DNA
ttataagcttaagtttattgggaattggaacaatagcgattatggtattaatcttaaatgtaaatatagtaaatg

SEQ ID NO: 181306 - DNA, 75 bp, synthetic construct
  source 1..75: mol_type = other DNA
actacagaagaaaaagcacattatttttctaactcccttggattaaaaaagataattgatagtttggaatcagac

SEQ ID NO: 181307 - DNA, 75 bp, synthetic construct
  source 1..75: mol_type = other DNA
gctattaatattttgacgaatgataaggtattcaaggcagggttaagacgtaagatgcgaaatgcagctatggac

SEQ ID NO: 181308 - DNA, 75 bp, synthetic construct
  source 1..75: mol_type = other DNA
ggtttcaggttgtttgtttctcccaatatatcgtttattttcaaactctaaaatagttactaatatagatggttt

SEQ ID NO: 181309 - DNA, 75 bp, synthetic construct
  source 1..75: mol_type = other DNA
gaatataatggggcaagcttaagttatctcccgttaagtgcaaatggtattcaaagtattccatatgatatttgt

SEQ ID NO: 181310 - DNA, 75 bp, synthetic construct
  source 1..75: mol_type = other DNA
gctttgtttttctcatcatcaaatgaactttgcgataagattatatcaataaataatgaagaactaacaaccatt

SEQ ID NO: 181311 - DNA, 75 bp, synthetic construct
  source 1..75: mol_type = other DNA
ttttgctgatcaagatgatatatggtttgctgataaattaaggcgggctgttagtgtattaaatgaatatgattt

SEQ ID NO: 181312 - DNA, 75 bp, synthetic construct
  source 1..75: mol_type = other DNA
aggttgctctacctatcagcagctctacaatgaattccacgcattatatatagataaagcaggaggtgatgctgc

SEQ ID NO: 181313 - DNA, 75 bp, synthetic construct
  source 1..75: mol_type = other DNA
ggtgtaaagcctgcatgcgctgacgaagccggtcagcccgccactctgagagattatatgttcgacggaaaaagc

SEQ ID NO: 181314 - DNA, 75 bp, synthetic construct
  source 1..75: mol_type = other DNA
gacgcgttccgtgccgccgtgcgtaatgccatgccgtatgccgaagcgggcaagctggtgaccttcggcattgtg

SEQ ID NO: 181315 - DNA, 75 bp, synthetic construct
  source 1..75: mol_type = other DNA
aatgtcatcgctgctttatgaaagagatgatttaagcgccattgatttttcattgctcatgaaaacgataaaagc

SEQ ID NO: 181316 - DNA, 75 bp, synthetic construct
  source 1..75: mol_type = other DNA
aaatattattaattcttgtggagtttaccctcaaggattaaaagacagagaaattatatcaacttttcacgcaga

SEQ ID NO: 181317 - DNA, 75 bp, synthetic construct
  source 1..75: mol_type = other DNA
ggccagcaagaaacatttaaaatattaatcaatccagaacatctacggcaaacacttgagcgtaaatctcttact

SEQ ID NO: 181318 - DNA, 75 bp, synthetic construct
  source 1..75: mol_type = other DNA
gaaacctgaccgcggactggacgatcatcgctggctacactcagcagcatgcgacagtgacagaggggcagaatg

SEQ ID NO: 181319 - DNA, 75 bp, synthetic construct
  source 1..75: mol_type = other DNA
attgtgatagcacagcactggccttgaagctgctatcaaattataaaaacgacctcttagctgatacgatttatg

SEQ ID NO: 181320 - DNA, 75 bp, synthetic construct
  source 1..75: mol_type = other DNA
tgctaataatagtctgaaatcatttctcaagagatttaagctaatacaaaagaagtggtatcgtactgagatcga

SEQ ID NO: 181321 - DNA, 75 bp, synthetic construct
  source 1..75: mol_type = other DNA
gataagaacttacatgcggcagcgaaaaaaatgaatgttaataatcttattgcacttaaacctgccgttgtaatt

SEQ ID NO: 181322 - DNA, 75 bp, synthetic construct
  source 1..75: mol_type = other DNA
aagatattatttagattatgttgctaacaattcagtaaagtatgattgtgtgataatttggaaaactattattaa

SEQ ID NO: 181323 - DNA, 75 bp, synthetic construct
  source 1..75: mol_type = other DNA
ctgacttagcatctatagaaatggtagatgaaaatgagattttgtctagttatgatgacccacgtagggcttata

SEQ ID NO: 181324 - DNA, 75 bp, synthetic construct
  source 1..75: mol_type = other DNA
ctggcggaattgttattgaagaaggacaccatcgcccaattaaaggtgctgcaattcttcagtctgagtctggag

SEQ ID NO: 181325 - DNA, 75 bp, synthetic construct
  source 1..75: mol_type = other DNA
caattgcgatgtctctggctgcaggctctgcaatggctgctcagcaagatgaaattcagttccatggtgttgtaa

SEQ ID NO: 181326 - DNA, 75 bp, synthetic construct
  source 1..75: mol_type = other DNA
ggctgccgggcctttggcgctgcatttggcgcggcacggctggagcgactttgaccagcctctggagatctggca

SEQ ID NO: 181327 - DNA, 75 bp, synthetic construct
  source 1..75: mol_type = other DNA
atgaccgggtgcacgaattttgtgttcagcggtaaaaccggcaccgggaaaaatcaccttgcagcggcgatgggc

SEQ ID NO: 181328 - DNA, 75 bp, synthetic construct
  source 1..75: mol_type = other DNA
ctggcggcattgcaattgacgaagggcaacatcacccgataaagggcgttgctcttttgataaaagaaaatagcg

SEQ ID NO: 181329 - DNA, 75 bp, synthetic construct
  source 1..75: mol_type = other DNA
gccaccgaaattacttgtgctgcacttggtaggttgctctctcttccgattccagaaccagtattactatttgat

SEQ ID NO: 181330 - DNA, 75 bp, synthetic construct
  source 1..75: mol_type = other DNA
aacgtgacatttatcgccgatgtcagcacggcgaagatcgctgatctggtggtcattaaggatggttcagaggca

SEQ ID NO: 181331 - DNA, 75 bp, synthetic construct
  source 1..75: mol_type = other DNA
gagatctcagtcaccagccagacggcgggagtcagtgcagtcactgcgaccatcaacaacagcagccagagccgg

SEQ ID NO: 181332 - DNA, 75 bp, synthetic construct
  source 1..75: mol_type = other DNA
cacagggcaggacggcacggtggaaatcagtgtcaccagccagaccgccggaatcagtgcggtcaccgccagcat

SEQ ID NO: 181333 - DNA, 75 bp, synthetic construct
  source 1..75: mol_type = other DNA
acagcggcacgtaacgactgaacgtctgtttttggcgattccagctgaaatcggcgcgttgattaggcactatat

SEQ ID NO: 181334 - DNA, 75 bp, synthetic construct
  source 1..75: mol_type = other DNA
ctgacgtatgtcaccggtgcccgaccggtacaactggccaagctggcggtaaaagatttacgtattgatacccga

SEQ ID NO: 181335 - DNA, 75 bp, synthetic construct
  source 1..75: mol_type = other DNA
atcgcggatctggtggtcacccgggataactcagtggctgacggcgcaatggcgaacacgctgcaagtgaaggtt

SEQ ID NO: 181336 - DNA, 75 bp, synthetic construct
  source 1..75: mol_type = other DNA
cccgcagcttcggcggggcgggcagtacagcggggtacgaacaggtcacggcgtacaccctcacagggcagctac

SEQ ID NO: 181337 - DNA, 75 bp, synthetic construct
  source 1..75: mol_type = other DNA
ctagtaaatatttagggggcacagagattcttttttcacgggtcatccaattgttattatccgtaaaacttttaa

SEQ ID NO: 181338 - DNA, 75 bp, synthetic construct
  source 1..75: mol_type = other DNA
ggctttttgcttacttttcgttcagggggggcagggatgattactggaaatacatgcataatattcactcatggt

SEQ ID NO: 181339 - DNA, 75 bp, synthetic construct
  source 1..75: mol_type = other DNA
actggacattccatcaatcccataagggtaaaaaagataatatatcacttcacttacctcaaatttgttgtgtta

SEQ ID NO: 181340 - DNA, 75 bp, synthetic construct
  source 1..75: mol_type = other DNA
agataaattaacggaaattgagggaagaactatttcatcccaggcggtttctaaggctttgaaaagtgtagatag

SEQ ID NO: 181341 - DNA, 75 bp, synthetic construct
  source 1..75: mol_type = other DNA
agcttaaagtcatttcaagagatgaactagttgacctttatttctatcatttcctccaagataaatgcgtcactc

SEQ ID NO: 181342 - DNA, 75 bp, synthetic construct
  source 1..75: mol_type = other DNA
ggtcgtgatatagaattgaacactatttttcctcaatttattggttcttgtccttgcgattttattatcagggag

SEQ ID NO: 181343 - DNA, 75 bp, synthetic construct
  source 1..75: mol_type = other DNA
aaatcgctggtttcttccttacaaaccaaatatgcgctgaaaggttatgacattgaagccgcctccctgcaatca

SEQ ID NO: 181344 - DNA, 75 bp, synthetic construct
  source 1..75: mol_type = other DNA
aacggtgcaacggtcgctccgacggtgattacagagccggacggcacggtggagatctcagtcaccagccagacc

SEQ ID NO: 181345 - DNA, 75 bp, synthetic construct
  source 1..75: mol_type = other DNA
gccggaatcagtgcggtcaccgtcagcatcaacaacagcaccctgagccagaacgtgacatttatcgctgatgtc

SEQ ID NO: 181346 - DNA, 75 bp, synthetic construct
  source 1..75: mol_type = other DNA
cagcgacagcgggctggtgagcggtgcctatacctacagcgcgcgagtggtggatttggcggggaatatcacctc

SEQ ID NO: 181347 - DNA, 75 bp, synthetic construct
  source 1..75: mol_type = other DNA
atcggcaacggcggccacgacaccttgctctataaactgctcaacgccagcgacgccactggcggcaacggctca

SEQ ID NO: 181348 - DNA, 75 bp, synthetic construct
  source 1..75: mol_type = other DNA
gatcgcggatctggtggtcattaaggacgactcagtggcagacggtgcaatggcgaacacgctgcgggtgaaggt

SEQ ID NO: 181349 - DNA, 75 bp, synthetic construct
  source 1..75: mol_type = other DNA
taaaaacattgagctaactccaaggtctataggcacgatcaactcaacaacaatgtcttttagtggtggtgctgg

SEQ ID NO: 181350 - DNA, 75 bp, synthetic construct
  source 1..75: mol_type = other DNA
tttttggttcgtgtagagtcgattcgtaagactacgggatcagattatgcgaacatgcaaacgctgattaacagc

SEQ ID NO: 181351 - DNA, 75 bp, synthetic construct
  source 1..75: mol_type = other DNA
acaggcctggcaggaatatcccaaacgtgctggtggcaattccaagtcagcagccttcaaagcctggaaagcccg

SEQ ID NO: 181352 - DNA, 75 bp, synthetic construct
  source 1..75: mol_type = other DNA
cctgttgagcacagctaatatctggagttctcaacagactttcaaaggtaagacagcgttttcagccgctgctac

SEQ ID NO: 181353 - DNA, 75 bp, synthetic construct
  source 1..75: mol_type = other DNA
tacgatgccggttatagcggaaccagtatgacaggcgggaaaggtgctgctgggatttgtattatcgaggagttt

SEQ ID NO: 181354 - DNA, 75 bp, synthetic construct
  source 1..75: mol_type = other DNA
acatcggttggatttactaattttgcatgggtgaatacatccggtgatacctatgatgtttatgttgaaataggt

SEQ ID NO: 181355 - DNA, 75 bp, synthetic construct
  source 1..75: mol_type = other DNA
gcttctcggatctataattacttttttatggttttttaaattacaatatagtgatttctggttggttgctaaaat

SEQ ID NO: 181356 - DNA, 75 bp, synthetic construct
  source 1..75: mol_type = other DNA
tttttgagctcactattctgcttaatatattctttgtcatttttactccttaagcataagaagtctgtcaacagg

SEQ ID NO: 181357 - DNA, 75 bp, synthetic construct
  source 1..75: mol_type = other DNA
gaccccattgggctggcggggggatggaacctgtataattacccactgaatccgataataaggatggatcctttg

SEQ ID NO: 181358 - DNA, 75 bp, synthetic construct
  source 1..75: mol_type = other DNA
acaagcgtcttgagcacaaaatgttctaccgtatagattgtgagcgccttaatgaaattatcaatgaaaacaatc

SEQ ID NO: 181359 - DNA, 75 bp, synthetic construct
  source 1..75: mol_type = other DNA
aaactggacttacatttgaacaacaggctgtagcgcgtaagcatcttgtgtccagaggcattttggttgaaacca

SEQ ID NO: 181360 - DNA, 75 bp, synthetic construct
  source 1..75: mol_type = other DNA
atgccgcctgggtgcgtgtctcaggaaataccggcacccagttcgtgaagcaggcgtcgacgttctttggacccg

SEQ ID NO: 181361 - DNA, 75 bp, synthetic construct
  source 1..75: mol_type = other DNA
acgctaaacggcgtgctgttgccggaactgaccggcgggcgatttaccctgtttttcctgcgaaagatggccgat

SEQ ID NO: 181362 - DNA, 75 bp, synthetic construct
  source 1..75: mol_type = other DNA
atgcgcaactgaagatggctggttggagcgatgccaattattcaaacaattacactattaaaccaggtgaagtga

SEQ ID NO: 181363 - DNA, 75 bp, synthetic construct
  source 1..75: mol_type = other DNA
aaggttgatggttacgacggtggagatgcaagattcattaccttaacagaaagcactattgtagatttaacaaaa

SEQ ID NO: 181364 - DNA, 75 bp, synthetic construct
  source 1..75: mol_type = other DNA
gtttctatgagtctgactccggtgggaaacgaaatgaaggcgcgctattatttggagaggggaaggctaacggta

SEQ ID NO: 181365 - DNA, 75 bp, synthetic construct
  source 1..75: mol_type = other DNA
taaaggttggcgtatatacggacaaccatcctataccatccttccttttgtggaagtcgagttactgagtgttaa

SEQ ID NO: 181366 - DNA, 75 bp, synthetic construct
  source 1..75: mol_type = other DNA
agtaagtttcgttcacagcttcgtatacacgaacttttagtggtagctggggcggatatacctgtcagtgtttta

SEQ ID NO: 181367 - DNA, 75 bp, synthetic construct
  source 1..75: mol_type = other DNA
tgtgctgacggtggctggcaccgacccgtcagaaacgggaagctgggttgaatcaggtggcgtgtataccacaac

SEQ ID NO: 181368 - DNA, 75 bp, synthetic construct
  source 1..75: mol_type = other DNA
tggcagcatcaccaaaaatcgaataaattttggtggatagattacgaaggggatagtttagctgtcaactatggc

SEQ ID NO: 181369 - DNA, 75 bp, synthetic construct
  source 1..75: mol_type = other DNA
gtattggtaaattccagacaaaagagttcgataatgaagaacagtgtctgaaagaagccagtaaattgattgccg

SEQ ID NO: 181370 - DNA, 75 bp, synthetic construct
  source 1..75: mol_type = other DNA
ttgatctggctaaaacgaacttttatcttttcagtatcaatgctcatggcaaacccgcaggaaagaccaaacttt

SEQ ID NO: 181371 - DNA, 75 bp, synthetic construct
  source 1..75: mol_type = other DNA
cgcggccttctgacccagatacatccggcactggagcgcgttctcggtccgagacttgagcacccggcggtactc

SEQ ID NO: 181372 - DNA, 75 bp, synthetic construct
  source 1..75: mol_type = other DNA
ggcagacggttcgacggcgaacacgctgcaggcgagggtcactgacgcgttcgggaatgcgcttgccggacagac

SEQ ID NO: 181373 - DNA, 75 bp, synthetic construct
  source 1..75: mol_type = other DNA
cccaagaatggtaaagggaatgatgttgtatttaaattcaagattaaaaaatggtttactagtttaggtgctacc

SEQ ID NO: 181374 - DNA, 75 bp, synthetic construct
  source 1..75: mol_type = other DNA
tcttgcaggtatcttcgagccagccacgatcgacattgatctggctatcttgctgacaaaagcaagagaacatag

SEQ ID NO: 181375 - DNA, 75 bp, synthetic construct
  source 1..75: mol_type = other DNA
gggaaagttccattaaaggcttactattcatctccggaagatatacaaaaacatattccattcgagcttgagcag

SEQ ID NO: 181376 - DNA, 75 bp, synthetic construct
  source 1..75: mol_type = other DNA
cgattcgcctggcgttgcaacacgggttcactttcgatgaaattgtggagcagtttacccgtgactttgatggga

SEQ ID NO: 181377 - DNA, 75 bp, synthetic construct
  source 1..75: mol_type = other DNA
ggtccgttaaatcattttgttaatcattgttctgaagttgagttaggtttctatagcgatggtgcatattcaatt

SEQ ID NO: 181378 - DNA, 75 bp, synthetic construct
  source 1..75: mol_type = other DNA
cgcgttctgattaacgacaacacgcttccggcagtgaaaaaggcactggcaaatcttaaagataatcgtgatttc

SEQ ID NO: 181379 - DNA, 75 bp, synthetic construct
  source 1..75: mol_type = other DNA
ccgcagtagcgaatgatattgttaaggcgcttgggggcaattttacccgtcatgatggctggtttgaaagtgata

SEQ ID NO: 181380 - DNA, 75 bp, synthetic construct
  source 1..75: mol_type = other DNA
atgagaatggggatacatgaaaacattgttctttttttcgataaattaaaaaactctcaagaaatgacagcatca

SEQ ID NO: 181381 - DNA, 75 bp, synthetic construct
  source 1..75: mol_type = other DNA
gcaacattttccatacgaacttgatcagcaatttgataatctaataaacaatccaccaccaggtacatgcgtcgt

SEQ ID NO: 181382 - DNA, 75 bp, synthetic construct
  source 1..75: mol_type = other DNA
attatcaccatcagcattacttctattaatgagaatggggatgcatgaaaacgttgtcctttttttcgataaatt

SEQ ID NO: 181383 - DNA, 75 bp, synthetic construct
  source 1..75: mol_type = other DNA
ggaaaagaaatagactcaatttatgatttaaatagcgctattagaaccaatgattataatgttgttaatatattg

SEQ ID NO: 181384 - DNA, 75 bp, synthetic construct
  source 1..75: mol_type = other DNA
acgtttaatgaatacataataaatttaaaagagttggccagaaagtataattttagccatggcgatctggaaaat

SEQ ID NO: 181385 - DNA, 75 bp, synthetic construct
  source 1..75: mol_type = other DNA
aaagcatggttgtcagcgatagatgactttgagaaagaatttggggtaaataaaaatgaaatacttcttagtata

SEQ ID NO: 181386 - DNA, 75 bp, synthetic construct
  source 1..75: mol_type = other DNA
caacttatgatttaaatagcgctattaaaaccaataattataatgttgttaatatattgctcgccaatataaaag

SEQ ID NO: 181387 - DNA, 75 bp, synthetic construct
  source 1..75: mol_type = other DNA
agcttaaaattatcaaccgccccttcagggactcatacaatttcagggaaagaacacagaagttgaagttccaaa

SEQ ID NO: 181388 - DNA, 75 bp, synthetic construct
  source 1..75: mol_type = other DNA
cagaacagctaaacccggcaggcttaagctacacgtatcagtatgagaaggaccgcatcaccatcaccgacagcc

SEQ ID NO: 181389 - DNA, 75 bp, synthetic construct
  source 1..75: mol_type = other DNA
tgaccgcagcaatacacaggtgcgcagctttacttacgatgataaataccggggccggatggtggcgcaccgtca

SEQ ID NO: 181390 - DNA, 75 bp, synthetic construct
  source 1..75: mol_type = other DNA
gactattagatttaatccgaagtagctgtaaaggtcaaacagcaccgctcagtgagatttgtgctttatttaatc

SEQ ID NO: 181391 - DNA, 75 bp, synthetic construct
  source 1..75: mol_type = other DNA
cttactcgtgccggagtagaccctctggatgtggcgaaaatgtatcagcaaaatccacaaggtttcacagatttt

SEQ ID NO: 181392 - DNA, 75 bp, synthetic construct
  source 1..75: mol_type = other DNA
acttcaatgttcaggacaagatggctggtcgtgagattgaccgaggcaggctggcagagacaatccgcagcaatc

SEQ ID NO: 181393 - DNA, 75 bp, synthetic construct
  source 1..75: mol_type = other DNA
agcctttattgcatctctgtgtagcgttatttcctgtatctgttttaagaattttgagtggagattcattaaaaa

SEQ ID NO: 181394 - DNA, 75 bp, synthetic construct
  source 1..75: mol_type = other DNA
ctcttgcgaaagcttactttagttcattaaatgaatatgatagtaaagtaaaagcaataaatgactcggatcttg

SEQ ID NO: 181395 - DNA, 75 bp, synthetic construct
  source 1..75: mol_type = other DNA
ggctgctgcggcagccagggagcagcgccgggcactggatgcgctgcacagccagttgacggaaatccgcgcttc

SEQ ID NO: 181396 - DNA, 75 bp, synthetic construct
  source 1..75: mol_type = other DNA
ggaaccggaatcgtattcctccaggttacacgacgccatattattcatttgagatgaatgcctcagctgtatcta

SEQ ID NO: 181397 - DNA, 75 bp, synthetic construct
  source 1..75: mol_type = other DNA
acagcctcttctgcggcggtaagaccaccgcgctggtcaataccatcgccgggctggacgacttcgaactgctca

SEQ ID NO: 181398 - DNA, 75 bp, synthetic construct
  source 1..75: mol_type = other DNA
caccgcgctggtcaataccatcgccgggctggacgacttcgaactgctcaccttccttgtcattcaggaggccgg

SEQ ID NO: 181399 - DNA, 75 bp, synthetic construct
  source 1..75: mol_type = other DNA
atgcagtcctataacagtcatgatgatgaggttggcggtaatatgtccctgacctatgatggctcttatggcacg

SEQ ID NO: 181400 - DNA, 75 bp, synthetic construct
  source 1..75: mol_type = other DNA
ggcgcttacgccgttccgtgatgccttcgccggactggcccccgtctttgatgtgatctcaaatgccgtttctca

SEQ ID NO: 181401 - DNA, 75 bp, synthetic construct
  source 1..75: mol_type = other DNA
tgaggaaatgtcgcgcgtaggcgcactgactcgcctggacaaaggcgatgaacaatttgccgccctccgcgccca

SEQ ID NO: 181402 - DNA, 75 bp, synthetic construct
  source 1..75: mol_type = other DNA
agggggttaactggagaatatcaggtccctttaaaagcaggctgattttaaaaacagattcatcaaaagacgtac

SEQ ID NO: 181403 - DNA, 75 bp, synthetic construct
  source 1..75: mol_type = other DNA
gaaccggatacagcgtaaaacgttcagctatgatgctggcacaaagcaaactccgtccctgccgtacattccgtc

SEQ ID NO: 181404 - DNA, 75 bp, synthetic construct
  source 1..75: mol_type = other DNA
caaaggatgagctggacaagtgcacggaagccgggcgtacgttcgggcagaaggtcggggagtttatcagcaatc

SEQ ID NO: 181405 - DNA, 75 bp, synthetic construct
  source 1..75: mol_type = other DNA
cgaaagtcaccgcgctggctcaggcgcaccctgaactgacaaaacaactgctgattgccggtggtgtactgctgg

SEQ ID NO: 181406 - DNA, 75 bp, synthetic construct
  source 1..75: mol_type = other DNA
atatccgaccttataactatgacttcctgatttctctggcctcgatggacagcaatatttcgttaaaaatgccag

SEQ ID NO: 181407 - DNA, 75 bp, synthetic construct
  source 1..75: mol_type = other DNA
gcttagcgaattacacgaaagcatacgtgagaaaaatgggctagacttgcaggatctacaagattggtactggaa

SEQ ID NO: 181408 - DNA, 75 bp, synthetic construct
  source 1..75: mol_type = other DNA
ttgagcatagccagagccgcagaatttgctacggttatagtaagtcacctgtgggaaaacgctatgcgcaaatat

SEQ ID NO: 181409 - DNA, 75 bp, synthetic construct
  source 1..75: mol_type = other DNA
ttttacagatatacttgatggatgctcagttggtataagcacagaggaactggtaaccagagtataccatgccaa

SEQ ID NO: 181410 - DNA, 75 bp, synthetic construct
  source 1..75: mol_type = other DNA
tgcttcagccggtgcacatacccattcgatgacatttgtttcaggtggttccagtggtgctccgggaagtggatc

SEQ ID NO: 181411 - DNA, 75 bp, synthetic construct
  source 1..75: mol_type = other DNA
atgtccttaaaatgggtatcggtggtggtgcatcgaaagcggcacagacgctcagtgactactacatcaaacgtg

SEQ ID NO: 181412 - DNA, 75 bp, synthetic construct
  source 1..75: mol_type = other DNA
gagtatgtgtacaatctccttctttcatgcctgagttggatggagaaaaaaataaaactgaattgttcgttgacg

SEQ ID NO: 181413 - DNA, 75 bp, synthetic construct
  source 1..75: mol_type = other DNA
tgctgatgcaatcaatatattacatattctcgtatctccagcacggataaaattcctggataatatttttacttg

SEQ ID NO: 181414 - DNA, 75 bp, synthetic construct
  source 1..75: mol_type = other DNA
gcaggaagaagctgcgcggcaatccaacgatggcggcagcagtcagggcttcggctacacggcgcgggcattact

SEQ ID NO: 181415 - DNA, 75 bp, synthetic construct
  source 1..75: mol_type = other DNA
taaagatgtgatgatgcagctggaagaaaagaataatgaaggtaaatctgtaataagtcaggcaaatggcaatcc

SEQ ID NO: 181416 - DNA, 75 bp, synthetic construct
  source 1..75: mol_type = other DNA
ttgttctttttttcgataaattaaaaaaatcccaagaaatgactgcatcaaaggctcttgagattcttgctgcga

SEQ ID NO: 181417 - DNA, 75 bp, synthetic construct
  source 1..75: mol_type = other DNA
acatattccattcgagcttgagcagcaatttcacaatctacaaaaaaatccaccacccggtacatgcgtcgttgc

SEQ ID NO: 181418 - DNA, 75 bp, synthetic construct
  source 1..75: mol_type = other DNA
ttatgtagggcagtctaataatacaaccattaacggggcagacagtcaattcatgacgggggtatttccaccggc

SEQ ID NO: 181419 - DNA, 75 bp, synthetic construct
  source 1..75: mol_type = other DNA
tctggctctcaggacgtagtacaaggaagtctggcaacgaacacaaccataaatggtggtcgacagtatgtttgt

SEQ ID NO: 181420 - DNA, 75 bp, synthetic construct
  source 1..75: mol_type = other DNA
aaaacgcgtcaatatgagttcaccggaatattacttacccccggaacatcaccaaagggaatggagggagagggg

SEQ ID NO: 181421 - DNA, 75 bp, synthetic construct
  source 1..75: mol_type = other DNA
cacagttaatcacgcagacacagcaggatatcagccagcgcctgcccggctcgcagccgggtgtgaatgaaacca

SEQ ID NO: 181422 - DNA, 75 bp, synthetic construct
  source 1..75: mol_type = other DNA
ggcaggattgtctgcacaggagcatgaacatctggcctggattgcacgtcagatcatcccgacagaagccgatga

SEQ ID NO: 181423 - DNA, 75 bp, synthetic construct
  source 1..75: mol_type = other DNA
cctcggagcccggtcactgtcgacatcgactcttctgcgaaaactcaacgccggagattacgctggcgctgccga

SEQ ID NO: 181424 - DNA, 75 bp, synthetic construct
  source 1..75: mol_type = other DNA
tcggctctgaaacgcagtttactgcgagtgatgccgccagtgggcaggcatttcttgctatggctggcttcacac

SEQ ID NO: 181425 - DNA, 75 bp, synthetic construct
  source 1..75: mol_type = other DNA
tgaccagaacagcccgcagtttaaggcgctgcgtgagcaggcgctaaagctcggctctgaaacgcagtttactgc

SEQ ID NO: 181426 - DNA, 75 bp, synthetic construct
  source 1..75: mol_type = other DNA
ctgaaaacaggtggtgcactggcaactggtgcggcagcggctggcggctatgctgccgggcgttttttgcagccc

SEQ ID NO: 181427 - DNA, 75 bp, synthetic construct
  source 1..75: mol_type = other DNA
gctggttggctagtgcattatttggtcaaaagcgttcattagcaaaacactttgcccgaaactggcgaacatcca

SEQ ID NO: 181428 - DNA, 75 bp, synthetic construct
  source 1..75: mol_type = other DNA
tcgttcggaacggtaatagcccctggcggtgaaggcggcgggaaagtaggagtcacaaacacgaacggtggtaat

SEQ ID NO: 181429 - DNA, 75 bp, synthetic construct
  source 1..75: mol_type = other DNA
gataacacagatgcggcatggtctgagtgggcacaggtctatacatcgaaagactccataccgggcgtaaataca

SEQ ID NO: 181430 - DNA, 75 bp, synthetic construct
  source 1..75: mol_type = other DNA
tgaccccgttgcgcgaaacctttgaacggtttggtcctgtttttgacgcaatcgggagcgggatcagccaggtgt

SEQ ID NO: 181431 - DNA, 75 bp, synthetic construct
  source 1..75: mol_type = other DNA
ctggataaatgcaccagtgctggcgaggtgttcggcaacgttcttggcggtgcgttacagcttgtcctgacgcct

SEQ ID NO: 181432 - DNA, 75 bp, synthetic construct
  source 1..75: mol_type = other DNA
gagcatggcaacggctggcggcatggatctcggcgagacggcggatattggctcaaatatcctgacgcagttcgg

SEQ ID NO: 181433 - DNA, 75 bp, synthetic construct
  source 1..75: mol_type = other DNA
ccggcgctggtccctgttgttgcggccagctcccgcccggtggcggaggctatacgatcgccagtggcatcagtt

SEQ ID NO: 181434 - DNA, 75 bp, synthetic construct
  source 1..75: mol_type = other DNA
ccatcccgcactgacgcgccagctactgattgcaggcggtgcactgctggcaatgactgcaacggttggctcgtt

SEQ ID NO: 181435 - DNA, 75 bp, synthetic construct
  source 1..75: mol_type = other DNA
taaccggatacagcgtaaggtgtttacccgtaatgagggaaaacagggaccatcgctgccgtacattccgtcagg

SEQ ID NO: 181436 - DNA, 75 bp, synthetic construct
  source 1..75: mol_type = other DNA
tattattcctgaacgaagatacaaaaaaagattttgaacaatcaagagtaaacttcatatgctccggtgtagaca

SEQ ID NO: 181437 - DNA, 75 bp, synthetic construct
  source 1..75: mol_type = other DNA
ggtaaaacgcctggctatcatgaggcagacctcagcgatgaatcgcaaattatcaacatgatggcctacgcacgg

SEQ ID NO: 181438 - DNA, 75 bp, synthetic construct
  source 1..75: mol_type = other DNA
ggcggaaccatgcctgaggagttgccgaccccgcaggtcagcatcaagcagttggaaaacagtgtaaaaattaca

SEQ ID NO: 181439 - DNA, 75 bp, synthetic construct
  source 1..75: mol_type = other DNA
ttatgcgcaaccatatcgctgtattcgaacgatacggaataaccccaaacgattgcatcactacaattcatgcgc

SEQ ID NO: 181440 - DNA, 75 bp, synthetic construct
  source 1..75: mol_type = other DNA
atggccagtatcaacaccattgtgaaacgcaagcagtacctgtggctggggattgtggttgtcggtacggtctcc

SEQ ID NO: 181441 - DNA, 75 bp, synthetic construct
  source 1..75: mol_type = other DNA
caccgactggatgacccccgatgcccgtgagcgtctgcgacagtatggcattagcccgcccgccggacacagttg

SEQ ID NO: 181442 - DNA, 75 bp, synthetic construct
  source 1..75: mol_type = other DNA
tgctgcaactcgacccggcatggaccaccgactggatgacccccgatgcccgtgagcgtctgcgacagtatggca

SEQ ID NO: 181443 - DNA, 75 bp, synthetic construct
  source 1..75: mol_type = other DNA
tatttaataaatataatggctgcattaaggaatttgagaaaacagttgcaaaacaaatctcaattcctttttata

SEQ ID NO: 181444 - DNA, 75 bp, synthetic construct
  source 1..75: mol_type = other DNA
ttggggaagatcatcctttagttgtagaactcgatcagatgacttcactcatggagtttaaaagaaaaattagaa

SEQ ID NO: 181445 - DNA, 75 bp, synthetic construct
  source 1..75: mol_type = other DNA
agtattaccgcagcggagatgagaacgatactaccagaggatttaacacaggggaaatatagaaaaatttatctg

SEQ ID NO: 181446 - DNA, 75 bp, synthetic construct
  source 1..75: mol_type = other DNA
ccatgccatcaaattaccgcctcaatggcaaaagctattgcgcttaaacttggtgccgaactgaataacgaagaa

SEQ ID NO: 181447 - DNA, 75 bp, synthetic construct
  source 1..75: mol_type = other DNA
tactggatttattactatagcaagaacatatagtggtgggtattggcattcggcaacaattagaacatccagcat

SEQ ID NO: 181448 - DNA, 75 bp, synthetic construct
  source 1..75: mol_type = other DNA
tcctgatgccgccgtggcaccgatgatggcgctggtagactcagatacgccaccgttgcggctgctgttggggga

SEQ ID NO: 181449 - DNA, 75 bp, synthetic construct
  source 1..75: mol_type = other DNA
acggctttaatactgaccagatgctgaagcagctgggcaacctgaatccgcagcagtttatgtccggcagccagg

SEQ ID NO: 181450 - DNA, 75 bp, synthetic construct
  source 1..75: mol_type = other DNA
gaatcggattcgcacccaacgcgaagcctgcggcttaacaaccgccgaactcgccaggctgctcgatctcgatga

SEQ ID NO: 181451 - DNA, 75 bp, synthetic construct
  source 1..75: mol_type = other DNA
tggtccgcacaggacaaccatatcaaccagcaggctgaccgaattgaattgctggagaagaagaatggcgagcta

SEQ ID NO: 181452 - DNA, 75 bp, synthetic construct
  source 1..75: mol_type = other DNA
atggcggggaaaatccccgcctttttcctgccggtccccggacagagcacaaaggaagtcgccgccggctccgct

SEQ ID NO: 181453 - DNA, 75 bp, synthetic construct
  source 1..75: mol_type = other DNA
ggaactctccggtacgcgcgggatcgaatccggcccagacggtttatccccgctggcgcggggaactcactaaac

SEQ ID NO: 181454 - DNA, 75 bp, synthetic construct
  source 1..75: mol_type = other DNA
tttaagccagtcacaatctaccaactttacaggatcacacaaacaacacatccattatgttaaagagcatttaat

SEQ ID NO: 181455 - DNA, 75 bp, synthetic construct
  source 1..75: mol_type = other DNA
aacaggttgcgccacgcagtcagaaaatgatcaaaaagcgtgttctgcataattttatcattcgtcgtaacggtg

SEQ ID NO: 181456 - DNA, 75 bp, synthetic construct
  source 1..75: mol_type = other DNA
taggggacgtttctcgtgtagttcaggaagatgttgctcaacaggaacagcgggccaaatcaaccacaccaaagg

SEQ ID NO: 181457 - DNA, 75 bp, synthetic construct
  source 1..75: mol_type = other DNA
gccccacgagcatggtggatgctgcgcacctttggtgtagagaaagtgtcgattctggggggggggacttgcagg

SEQ ID NO: 181458 - DNA, 75 bp, synthetic construct
  source 1..75: mol_type = other DNA
tttattgcctctattggctggctgggagcgcatatattaggtggcagtatgtatcttgcctgggcgacaggtatt

SEQ ID NO: 181459 - DNA, 75 bp, synthetic construct
  source 1..75: mol_type = other DNA
tggttattggtgtcggcgtactggccacaccatcttatcgccagcgtatttactcgggaaaagacgttccctctg

SEQ ID NO: 181460 - DNA, 75 bp, synthetic construct
  source 1..75: mol_type = other DNA
aacaccgtcttatcgccagcgtatttactcgggtaaagatgttccctctgtacgccgttcgtttgttattactgg

SEQ ID NO: 181461 - DNA, 75 bp, synthetic construct
  source 1..75: mol_type = other DNA
tgagacaggcatgagtggttataaatcatatttgataaaatattctgaaccggagttggttagcttttttgaaaa

SEQ ID NO: 181462 - DNA, 75 bp, synthetic construct
  source 1..75: mol_type = other DNA
ttcagaagtcatgagccgtatcgcggcacccatgattggtgggatgatcacggctccgctgctgtccctgttcat

SEQ ID NO: 181463 - DNA, 75 bp, synthetic construct
  source 1..75: mol_type = other DNA
cccggaattgtcccgtaaagagacgttcacaccggaaggccttgatgaagccctctatcatggtgccgtactgcg

SEQ ID NO: 181464 - DNA, 75 bp, synthetic construct
  source 1..75: mol_type = other DNA
atgagcacttttaccgacaaagaactgattaaagaaatcaaagaacgaatcggcagcttggacgtgcgagacaat

SEQ ID NO: 181465 - DNA, 75 bp, synthetic construct
  source 1..75: mol_type = other DNA
tggccccgttacgcgaaacctttgaacggtttggccctgttttcgaactagttcgtgatggcgtgattcaggtct

SEQ ID NO: 181466 - DNA, 75 bp, synthetic construct
  source 1..75: mol_type = other DNA
tatataatggtttaaatgacactgatattatttctaccaaatattcaataggcggtactggtagaacaatgacaa

SEQ ID NO: 181467 - DNA, 75 bp, synthetic construct
  source 1..75: mol_type = other DNA
tgcgtctttcaacaaaccagcagggaatgtggatggaagcactactctttggaagcctgtcctgaataaaaataa

SEQ ID NO: 181468 - DNA, 75 bp, synthetic construct
  source 1..75: mol_type = other DNA
aattaatgccgctgattggcgagctggcacaaagccttacgccggttgttcgccagttcagcgcctggctacgtg

SEQ ID NO: 181469 - DNA, 75 bp, synthetic construct
  source 1..75: mol_type = other DNA
taaagctgggcgcgaacctcatcgcctcgccgtttattcgtctggtcgatatcttcctgaaagtcagggcaagtc

SEQ ID NO: 181470 - DNA, 75 bp, synthetic construct
  source 1..75: mol_type = other DNA
gtcgcgatggacggttggacaatgttatcaaaaggactcattttacaatattttgacctatccattaatccctga

SEQ ID NO: 181471 - DNA, 75 bp, synthetic construct
  source 1..75: mol_type = other DNA
ctggcccctatgctggcgaacatggaagagtatcgccagctaaaagcctctgccatgcaagccaccagcaagaat

SEQ ID NO: 181472 - DNA, 75 bp, synthetic construct
  source 1..75: mol_type = other DNA
ctgcaaggttctctgcttgagcatcagcaaaacggtatgggtgttagcgaagctatgactcatatcgtgcaaatg

SEQ ID NO: 181473 - DNA, 75 bp, synthetic construct
  source 1..75: mol_type = other DNA
ctggttcgccagccagggggtcgatctgcaaggttctctgcttgagcatcagcaaaacggtatgggtgttagcga

SEQ ID NO: 181474 - DNA, 75 bp, synthetic construct
  source 1..75: mol_type = other DNA
cactcggtaaagtacttaatattgatgtatctgaagcaattgaaacaggaatttcaatttcagatttcaaacgtc

SEQ ID NO: 181475 - DNA, 75 bp, synthetic construct
  source 1..75: mol_type = other DNA
atctatctaaggctgtgtcagaaacgattgaatattttgcgaagagagatcctaccagacctctcactcttcctc

SEQ ID NO: 181476 - DNA, 75 bp, synthetic construct
  source 1..75: mol_type = other DNA
ttagaaatatggagaaagtatttcccctccgccgagaatatcgttggttgcgatatcaatcctgattgtgaaaaa

SEQ ID NO: 181477 - DNA, 75 bp, synthetic construct
  source 1..75: mol_type = other DNA
gtttactatcgtttaggtggttttggtgtaggctttaaaatccatctttatgcggatcaaacctttgcccccaca

SEQ ID NO: 181478 - DNA, 75 bp, synthetic construct
  source 1..75: mol_type = other DNA
ggtctggtagctggtgttcagccagatcgtacggcaattggtaacctgagcgtagctaatgttggcagcgctact

SEQ ID NO: 181479 - DNA, 75 bp, synthetic construct
  source 1..75: mol_type = other DNA
cccacttgccttatcatttattatcgccacaatcatctgtataacgataaaaaaagaagcagccgcagctttatt

SEQ ID NO: 181480 - DNA, 75 bp, synthetic construct
  source 1..75: mol_type = other DNA
aggaatttatcgccgaaaatcaggttatgccactggttgatgactttaatcatcctgtggagacggctaaaaagc

SEQ ID NO: 181481 - DNA, 75 bp, synthetic construct
  source 1..75: mol_type = other DNA
acccgttcacccttaattcattcgaaatccgccgatctgtaggggccaaatctcgcaacttggctggcgaggtga

SEQ ID NO: 181482 - DNA, 75 bp, synthetic construct
  source 1..75: mol_type = other DNA
ccgcaaaccggtggttgctgcactgagaggttgggtattgggcggtggtctggaaatgatgctggcggcggatat

SEQ ID NO: 181483 - DNA, 75 bp, synthetic construct
  source 1..75: mol_type = other DNA
ttttgtggttttatatgatcatcagactgatcctgtttatgtcattcatcaagcagtggaagagtgtaagtccgg

SEQ ID NO: 181484 - DNA, 75 bp, synthetic construct
  source 1..75: mol_type = other DNA
cccgtttgttggcattcttgctagcaggctgtgtattttccgcatcggcctactcgctggtagtcggtaatgatg

SEQ ID NO: 181485 - DNA, 75 bp, synthetic construct
  source 1..75: mol_type = other DNA
tggctggctaaacctgctgatcgacggagattatcagagctgcttgatatatggtggatgcttgatggccgtaac

SEQ ID NO: 181486 - DNA, 75 bp, synthetic construct
  source 1..75: mol_type = other DNA
agatcaccgcaccttggttgcgatgctttcacgcctctacaacaacgcaaaaataccatctgtcatatctggcag

SEQ ID NO: 181487 - DNA, 75 bp, synthetic construct
  source 1..75: mol_type = other DNA
gtgccagctcttcaggccggtgttgtgcctcaggatacgaagattggaaccatatctgtgactaatctgggaagt

SEQ ID NO: 181488 - DNA, 75 bp, synthetic construct
  source 1..75: mol_type = other DNA
aacgtaattgtcacttatgttccggaagacctgcccgatttggtgcaaatggttggccgtgccgggcgcgatggt

SEQ ID NO: 181489 - DNA, 75 bp, synthetic construct
  source 1..75: mol_type = other DNA
atgctgctgatatgatgaggaaaatcgccagtgattttgaaaaactgcttcagaatataaaaagcggacgggata

SEQ ID NO: 181490 - DNA, 75 bp, synthetic construct
  source 1..75: mol_type = other DNA
caaagctattcagacactgctgaacgttcatatcggcggcatcccgttttcgcagtttggagcgaatgctatgga

SEQ ID NO: 181491 - DNA, 75 bp, synthetic construct
  source 1..75: mol_type = other DNA
ggcatgaataaactggaagcgatgcgcaatacagatttcaaacgctacggggactcagcggagtttcgtcaattg

SEQ ID NO: 181492 - DNA, 75 bp, synthetic construct
  source 1..75: mol_type = other DNA
ggcaagcagtatgtggatgcgtcatgtcggagggcacgaacgttcaagggccggtgacggtcagctaaatactca

SEQ ID NO: 181493 - DNA, 75 bp, synthetic construct
  source 1..75: mol_type = other DNA
ggtgccgggtagtcaggtgctggcggcactgatggccgctggtgtggacaggttcataatagacgaggttcacac

SEQ ID NO: 181494 - DNA, 75 bp, synthetic construct
  source 1..75: mol_type = other DNA
ggtttagggttggggatagaaaacatgcatatttgttttggccaaaatgcccccagtatgaatttaatccaaaag

SEQ ID NO: 181495 - DNA, 75 bp, synthetic construct
  source 1..75: mol_type = other DNA
atgactaaaaccgagtttgaaaatgaaacgtggcggatgaaaggcttgctccttggagcgctaattcgccgcctt

SEQ ID NO: 181496 - DNA, 75 bp, synthetic construct
  source 1..75: mol_type = other DNA
catattgcggtcatccatcaatatatgcgtgagatgatggcaggcggcggcaaaatgatcctcggtcagacagcc

SEQ ID NO: 181497 - DNA, 75 bp, synthetic construct
  source 1..75: mol_type = other DNA
gcaggttgcatcgttactaaagatgtacctgaaggaaagattgcaattggttcaccaatgaaaattatggataaa

SEQ ID NO: 181498 - DNA, 75 bp, synthetic construct
  source 1..75: mol_type = other DNA
aagggaaaaaatttcttattgctgtggcttgtgtgtttatcgttgcggtatgcgtggtgtcgaaagccgcgttcc

SEQ ID NO: 181499 - DNA, 75 bp, synthetic construct
  source 1..75: mol_type = other DNA
tgaaagggggatggaatttttatcagtatccgttgaatccgatctcaaatatagatccattaggattagaaacac

SEQ ID NO: 181500 - DNA, 75 bp, synthetic construct
  source 1..75: mol_type = other DNA
tcaaattaactcatctggagggactccgcaaaagctgcgtaatagaccgtgaggatgaatatctagtagttccag

SEQ ID NO: 181501 - DNA, 75 bp, synthetic construct
  source 1..75: mol_type = other DNA
ggcaatggcgcgaaactggaagaaattatcgcctgtctggataatttcgatttgtgggtgaatatcgtaacccca

SEQ ID NO: 181502 - DNA, 75 bp, synthetic construct
  source 1..75: mol_type = other DNA
gaagatctgcacgccgtgctgaccgggcaagccaaaatggcggatctggtaaaagcgaagaaagccaaaattatt

SEQ ID NO: 181503 - DNA, 75 bp, synthetic construct
  source 1..75: mol_type = other DNA
ataaaaagcaagccgcagaactaataaatgcattacagctttatgtaaacggcgaatttaaaaatgatgaaattg

SEQ ID NO: 181504 - DNA, 75 bp, synthetic construct
  source 1..75: mol_type = other DNA
acaaaaagcaagctgacgaactgataagcgcattacagctttatgcaaacggcgaatttaaaaatgatgaaattg

SEQ ID NO: 181505 - DNA, 75 bp, synthetic construct
  source 1..75: mol_type = other DNA
tcctggctgaacgggagctgggttgctctgctgcaaacccacaataccctgaaccgtgccgggatccgttacatg

SEQ ID NO: 181506 - DNA, 75 bp, synthetic construct
  source 1..75: mol_type = other DNA
ggtacaaacgatggcaaaaagcgccgcccgccaggtgacaaatcagattgtgcgcggtgtgctggggagtttgct

SEQ ID NO: 181507 - DNA, 75 bp, synthetic construct
  source 1..75: mol_type = other DNA
aaaaaggacatcgttatataacgatgagctccgatcgcgatggtcgtgcgctggccttaacggacgatcgtggca

SEQ ID NO: 181508 - DNA, 75 bp, synthetic construct
  source 1..75: mol_type = other DNA
tgtggatcagtagcgagttaggattgccagacaaactggcgggtttcctgatggggacggcagctggactggaaa

SEQ ID NO: 181509 - DNA, 75 bp, synthetic construct
  source 1..75: mol_type = other DNA
actggagccagggctggcggatcgtttactggcgcaaactcaggaagcgctatcccgtcaggagatgctgggtgc

SEQ ID NO: 181510 - DNA, 75 bp, synthetic construct
  source 1..75: mol_type = other DNA
tgtacatctataaggatataatatatatctatcgattatatgaaaaatatgaagatatcccaacaagccttaatc

SEQ ID NO: 181511 - DNA, 75 bp, synthetic construct
  source 1..75: mol_type = other DNA
taagtccatcaagcttgaaaggaaagtatttgcgtcagaacgcaacgtctccatttttggtcggctttcaaaact

SEQ ID NO: 181512 - DNA, 75 bp, synthetic construct
  source 1..75: mol_type = other DNA
aattttaatcctgatacgtcgtgtaaggaacaacctctttcatggcggtaaattcaacggcgaatggtttgaacc

SEQ ID NO: 181513 - DNA, 75 bp, synthetic construct
  source 1..75: mol_type = other DNA
cagtgctcttggcggtaactcgattgttttgggtgataatgacacgggctttaaacaaaatggcgacggtaatct

SEQ ID NO: 181514 - DNA, 75 bp, synthetic construct
  source 1..75: mol_type = other DNA
aaattacaaacggcaagaaccattggtggcgtttcatttgatggctccgccaatatcaacctgccgggcgtgaat

SEQ ID NO: 181515 - DNA, 75 bp, synthetic construct
  source 1..75: mol_type = other DNA
tatttataattctatgagtggagttgctaaagcacaggttattgcagtaaaccatgcaggaataagaaaaaacca

SEQ ID NO: 181516 - DNA, 75 bp, synthetic construct
  source 1..75: mol_type = other DNA
caattctatcttcgtattcacaaaaccggctatccagccgaagccctcatctacaaaccgctaaaacaatcagag

SEQ ID NO: 181517 - DNA, 75 bp, synthetic construct
  source 1..75: mol_type = other DNA
acaattgcaggctcacaatccgccgtgccgggtccgatgggttaagtgtttttggtggtgacaaggacgataaaa

SEQ ID NO: 181518 - DNA, 75 bp, synthetic construct
  source 1..75: mol_type = other DNA
ccggacattgcgaattccctgcatgtggacggacggtttttgtaaacagagcaatatgcgttttcaccgggggtg

SEQ ID NO: 181519 - DNA, 75 bp, synthetic construct
  source 1..75: mol_type = other DNA
tgccaacatgatgacggcggacacgctgaacattatcgctcaatattcccagcaggcagctgcatcagcagcact

SEQ ID NO: 181520 - DNA, 75 bp, synthetic construct
  source 1..75: mol_type = other DNA
gcggcagaataaactgaatgcctggctggatagtccggaaatacgccaattctgcaaacttgagagcgaagatgc

SEQ ID NO: 181521 - DNA, 75 bp, synthetic construct
  source 1..75: mol_type = other DNA
gaacaaacagtccggcatatttatagaactataaatcagatgccactgccccttattttggtgaaaccggagagc

SEQ ID NO: 181522 - DNA, 75 bp, synthetic construct
  source 1..75: mol_type = other DNA
ctctctccccgatcacccataaccggattcctgttattaccaccgaacttttggcgcagctttacggcactgagc

SEQ ID NO: 181523 - DNA, 75 bp, synthetic construct
  source 1..75: mol_type = other DNA
aaaatagccgtatttttgctggccagtctaccagcctaaacattgcttttaccggcgattcgtggacagagaaaa

SEQ ID NO: 181524 - DNA, 75 bp, synthetic construct
  source 1..75: mol_type = other DNA
atatttgcatttgccttatgtcccctgcacagtgtaacgccacaggaacacccgcactgtcagaatacgataaag

SEQ ID NO: 181525 - DNA, 75 bp, synthetic construct
  source 1..75: mol_type = other DNA
tcttggacgcttggcttagcggtccgcgcagtggatggcgacaaacaactatggcactcgacaatcgatatgaac

SEQ ID NO: 181526 - DNA, 75 bp, synthetic construct
  source 1..75: mol_type = other DNA
gattatataagaaaaacatattaatatgctatgggataaatatatatcaaagaatgcagaaaaagttaaagaact

SEQ ID NO: 181527 - DNA, 75 bp, synthetic construct
  source 1..75: mol_type = other DNA
cggttctacagctccaggacgctgtaatgaattatgcctataccagagggatattaaatttcagcgatcaagatc

SEQ ID NO: 181528 - DNA, 75 bp, synthetic construct
  source 1..75: mol_type = other DNA
atcacaaagcagtgtgattcacagctaatgtgttattttgttgttaatgatgatgttctgagagaaaaactacta

SEQ ID NO: 181529 - DNA, 75 bp, synthetic construct
  source 1..75: mol_type = other DNA
ttttgtgtcgtaatcaacgccacagagcgccagataatggtgtggtgtgcgctaattcgtgcgagtgtgactttt

SEQ ID NO: 181530 - DNA, 75 bp, synthetic construct
  source 1..75: mol_type = other DNA
ggcggggcagccctcgggctggccggtattcttcgaggccggtattctcacccccgtctgggctatcgccactga

SEQ ID NO: 181531 - DNA, 75 bp, synthetic construct
  source 1..75: mol_type = other DNA
attttagttaagtcaaaactgtctagtaatctttacgggtttttagctgaattaacagtgcttattatatttggc

SEQ ID NO: 181532 - DNA, 75 bp, synthetic construct
  source 1..75: mol_type = other DNA
gatcttaagaaggcaattaaaaagtattttgaacatcacataaaaaaaattgaaaaagttcaactaagcacaata

SEQ ID NO: 181533 - DNA, 75 bp, synthetic construct
  source 1..75: mol_type = other DNA
gatccctcacgttatcagacaatattatgaaaattcacctgtgttattgactgataaacttttacataaaccaaa

SEQ ID NO: 181534 - DNA, 75 bp, synthetic construct
  source 1..75: mol_type = other DNA
ctcccgctatgctcaaagggaaaatacacgttgggagcaccacgggcttatcaggcagcactacagctatcatga

SEQ ID NO: 181535 - DNA, 75 bp, synthetic construct
  source 1..75: mol_type = other DNA
tgggacattatacgttcacactaccggaggatattatgaagggggaattgaggccgttaaatctcaatttaaaca

SEQ ID NO: 181536 - DNA, 75 bp, synthetic construct
  source 1..75: mol_type = other DNA
atctgattattgataatgcactacattttattttttgtttttcaagattaaactcaaaggtgcttatatttaatt

SEQ ID NO: 181537 - DNA, 75 bp, synthetic construct
  source 1..75: mol_type = other DNA
tatatcttttgaaattgaaggaaataagaagctaaagccaataagttatttcagtcttgaaaacaaagatattgt

SEQ ID NO: 181538 - DNA, 75 bp, synthetic construct
  source 1..75: mol_type = other DNA
ttgaatttattgattgtgttaaaaactcatttattatgagcactattacacttaaaaaagcagaagcaaatataa

SEQ ID NO: 181539 - DNA, 75 bp, synthetic construct
  source 1..75: mol_type = other DNA
tctggcatttgacatttccatgtctaaagaatgtagtggtgttgatgaacttgaatttattgattgtgttaaaaa

SEQ ID NO: 181540 - DNA, 75 bp, synthetic construct
  source 1..75: mol_type = other DNA
cttcttaacatgatggatattaaaggaaaaatcatcacaactgatgcgatgggctgccagaaagatattgcagaa

SEQ ID NO: 181541 - DNA, 75 bp, synthetic construct
  source 1..75: mol_type = other DNA
gtgttgaactgacgccgaacatggcgggacccgcttttgacgcgctggagaaatacaaaaaagacggcaccatgc

SEQ ID NO: 181542 - DNA, 75 bp, synthetic construct
  source 1..75: mol_type = other DNA
actatcaggtaaacgggacgggcgacgtgcttatcgacgtgcctaaaccgtggaatgatcccatggcgaataacc

SEQ ID NO: 181543 - DNA, 75 bp, synthetic construct
  source 1..75: mol_type = other DNA
ttgagtcgccggacaaaggcgatctcattcagaaaaccggcgggctgcgcaaaatcaggatggcgacgggcaacc

SEQ ID NO: 181544 - DNA, 75 bp, synthetic construct
  source 1..75: mol_type = other DNA
agcttagccaagcacagagagaacgactcgctcatattgatttcactttgttatttaaaggtgaagctgggcgga

SEQ ID NO: 181545 - DNA, 75 bp, synthetic construct
  source 1..75: mol_type = other DNA
cacaggatcgcccgtcgctggccattgtgtccgggcagggcggtgccgccgggcagcgtgagcgggtggcggagc

SEQ ID NO: 181546 - DNA, 75 bp, synthetic construct
  source 1..75: mol_type = other DNA
caatattcactgatggtcagcttgagagcatccgatacacattttccccggaagacgacgaaaattacaaaagac

SEQ ID NO: 181547 - DNA, 75 bp, synthetic construct
  source 1..75: mol_type = other DNA
aaaagtacggtgagctccatggtattccagtttattatgccatctacatcaggatgctgcgccggtgggcgctgg

SEQ ID NO: 181548 - DNA, 75 bp, synthetic construct
  source 1..75: mol_type = other DNA
ctaacagacgcgatggtacgcgcactttatctcgtggcggttacggccctgatcatcaatacagcagatctcgta

SEQ ID NO: 181549 - DNA, 75 bp, synthetic construct
  source 1..75: mol_type = other DNA
gtggttgaaagatggcatcaccacgccgggtggaaaactcctttcagaaagagagctgggagaactgctgggcat

SEQ ID NO: 181550 - DNA, 75 bp, synthetic construct
  source 1..75: mol_type = other DNA
tcaatatcattattacacatgagcctacattttattcttatgctgatctggagggtgacgatcttgagttttcat

SEQ ID NO: 181551 - DNA, 75 bp, synthetic construct
  source 1..75: mol_type = other DNA
agtggctttgccggaaataacgcagcatcagtagtatctgttggtgataccgataaagagcgtcagattgttaac

SEQ ID NO: 181552 - DNA, 75 bp, synthetic construct
  source 1..75: mol_type = other DNA
ctgaatgatgctggctgggagattctcagaaaagagataacagataaacggttatctgttgtcagtcttgatctc

SEQ ID NO: 181553 - DNA, 75 bp, synthetic construct
  source 1..75: mol_type = other DNA
gaacctgacagtgccattaacattaccaaacgttttgccaaaaatttgaaaatatataatcttcctggcattcaa

SEQ ID NO: 181554 - DNA, 75 bp, synthetic construct
  source 1..75: mol_type = other DNA
cgtaaagcgtaagcccgttaaggcggcatacaacacaaagaccgaagagttttattacaatgcagatggctccgc

SEQ ID NO: 181555 - DNA, 75 bp, synthetic construct
  source 1..75: mol_type = other DNA
agaacgccacgcaaacgctgagtggtttgccactacgccgggcgcaattctggttgcgactaaagctttcggact

SEQ ID NO: 181556 - DNA, 75 bp, synthetic construct
  source 1..75: mol_type = other DNA
ggcgaccgggcgcggccatatcactcgaagacgatgcacctgagtaacgaagaacgccacgcaaacgctgagtgg

SEQ ID NO: 181557 - DNA, 75 bp, synthetic construct
  source 1..75: mol_type = other DNA
gataaaattatttttggtgctgaggcgacacttattaataaaattgggacctgctggattgcctcaatggatgtt

SEQ ID NO: 181558 - DNA, 75 bp, synthetic construct
  source 1..75: mol_type = other DNA
catttattatcctgatactctttattattattgctaaagaaataatgagcacaataaggatagttcctgatgaat

SEQ ID NO: 181559 - DNA, 75 bp, synthetic construct
  source 1..75: mol_type = other DNA
tgtcaccactgcaggtgatatgaacgttatgcctgggggggcactgcgtgtcgctaaaaccactatcagcggcaa

SEQ ID NO: 181560 - DNA, 75 bp, synthetic construct
  source 1..75: mol_type = other DNA
cggcgaagtatgaaatcacggaagaagacacgcgacaggcagaggacgtgaatgccctgccggatttatccctgc

SEQ ID NO: 181561 - DNA, 75 bp, synthetic construct
  source 1..75: mol_type = other DNA
cgctggggttgtcgatggcgctcggtacgtttattgcgggtgtgctactggcggaaagtgaatatcgccatgaac

SEQ ID NO: 181562 - DNA, 75 bp, synthetic construct
  source 1..75: mol_type = other DNA
cgttgcgtgagcgatgcccgcgttttgaggatcgtgttggtggcgcggcgcagtttaaggcgatccctgatgccg

SEQ ID NO: 181563 - DNA, 75 bp, synthetic construct
  source 1..75: mol_type = other DNA
ccagtcgcaaggtcagtgagtccggcagccatactgacaataatgctgattcccgtgtggatcagttgtctgcag

SEQ ID NO: 181564 - DNA, 75 bp, synthetic construct
  source 1..75: mol_type = other DNA
ctatggtgaaagaatgaaaaatgtatgttttagattaaatgatgatgaatatgaacttgcgagagtaaatgcagc

SEQ ID NO: 181565 - DNA, 75 bp, synthetic construct
  source 1..75: mol_type = other DNA
gagccaaagccaaccagcgaatgcatgtacaaccgcaaagcggtagacgcatggattcaggctcaaaagcaacca

SEQ ID NO: 181566 - DNA, 75 bp, synthetic construct
  source 1..75: mol_type = other DNA
gtataagcacgtttcccctgaaggagagccaaagccaaccagcgaatgcatgtacaaccgcaaagcggtagacgc

SEQ ID NO: 181567 - DNA, 75 bp, synthetic construct
  source 1..75: mol_type = other DNA
gaaatatatggcgacaatgccttcggttgtgttgcctgcgcctgcgggcgcatgggccaaacataagttaactgg

SEQ ID NO: 181568 - DNA, 75 bp, synthetic construct
  source 1..75: mol_type = other DNA
acgccttccttacggcatgggcatggtacgccgactggcaggccagccaggcgctcggcgtaacgcaacaaccgg

SEQ ID NO: 181569 - DNA, 75 bp, synthetic construct
  source 1..75: mol_type = other DNA
gaattacatgatattaataatgaattatgcgattatcccgaagaaaatgcaaaaggttatcaggtaaacgccaat

SEQ ID NO: 181570 - DNA, 75 bp, synthetic construct
  source 1..75: mol_type = other DNA
caaccgataaacaaggcaaagcgtatttcacgttcctgatgcctgattcgttaacccgttggcgcattacagcca

SEQ ID NO: 181571 - DNA, 75 bp, synthetic construct
  source 1..75: mol_type = other DNA
ttgtttccgataccgtggcgcttagcaaagtgtcaggcaacgaacttctggtgtggactgctggcaaaaaacagg

SEQ ID NO: 181572 - DNA, 75 bp, synthetic construct
  source 1..75: mol_type = other DNA
tcagaacgccgggatcaaagttgccgttccccagctggatatccgggtgaaaacggacaaaacccattaccagcc

SEQ ID NO: 181573 - DNA, 75 bp, synthetic construct
  source 1..75: mol_type = other DNA
ctctggccaatacggcaatgccacagttatttgctctggcgcgggaatatgcggataactcggcgcgagaagtgg

SEQ ID NO: 181574 - DNA, 75 bp, synthetic construct
  source 1..75: mol_type = other DNA
atggcagggcaaccggtcatggttttcgtcacaccatgagtaccattctgcacgaacagggctttaattctgcct

SEQ ID NO: 181575 - DNA, 75 bp, synthetic construct
  source 1..75: mol_type = other DNA
atggtgctcaaacgtatcggttacgatggcagggcaaccggtcatggttttcgtcacaccatgagtaccattctg

SEQ ID NO: 181576 - DNA, 75 bp, synthetic construct
  source 1..75: mol_type = other DNA
gaaagaaggggattttctggacatggtcgaccagatacggcaagcactgcgcctgccgcccacagaacggcctgt

SEQ ID NO: 181577 - DNA, 75 bp, synthetic construct
  source 1..75: mol_type = other DNA
tcagagcatctatatgaaaattttggtgattcatattggtacagagatgcaacaatctcaaatcaaggatattct

SEQ ID NO: 181578 - DNA, 75 bp, synthetic construct
  source 1..75: mol_type = other DNA
agtataagtaatgaactccggagagtattatctgcaattactgcattgaatttctatcaaggcgatgttccttct

SEQ ID NO: 181579 - DNA, 75 bp, synthetic construct
  source 1..75: mol_type = other DNA
cacctggaaaagatcgcattttgggtgcgactatcgtgggggagcaagctggtgaacttatcaccgaatacgtct

SEQ ID NO: 181580 - DNA, 75 bp, synthetic construct
  source 1..75: mol_type = other DNA
aaccaacaaaccccgcgcaatacctatatctgaagaggtgctcaagctcatcaagatcaaacaatccggtgcgct

SEQ ID NO: 181581 - DNA, 75 bp, synthetic construct
  source 1..75: mol_type = other DNA
gcttacctggttccgcgtaaaggggctatttgcctagacatcagttacatgggcctgatgcacatcgcgcagcag

SEQ ID NO: 181582 - DNA, 75 bp, synthetic construct
  source 1..75: mol_type = other DNA
aacactaaaatgcattaagccactgcattcaatgggcggaactggtgaaagaagcggtccagatatatgggggaa

SEQ ID NO: 181583 - DNA, 75 bp, synthetic construct
  source 1..75: mol_type = other DNA
tcttcggctctgaccatggtggtgagcggggagcgctactgtacagcctgatcgggacgtgcaaactgaatgacg

SEQ ID NO: 181584 - DNA, 75 bp, synthetic construct
  source 1..75: mol_type = other DNA
cgatacctggcctggtctggacatagtgcccgtgtcggtgccgcgcgagatatggcccgcgccggagtttcaata

SEQ ID NO: 181585 - DNA, 75 bp, synthetic construct
  source 1..75: mol_type = other DNA
ccgctgctcagtgcaaaggtccttcccggtgaaaccgacatcgccctgcccggcccgctgccgttcattctctcc

SEQ ID NO: 181586 - DNA, 75 bp, synthetic construct
  source 1..75: mol_type = other DNA
tctgtttggtctgccaattatcatgaacccggtgatgtttatcccgtttgtactggtacaaccgattctggcagc

SEQ ID NO: 181587 - DNA, 75 bp, synthetic construct
  source 1..75: mol_type = other DNA
tcctgtccagtattgtttcgaggtttcagaaaggttgaaactagtcagttcactgacatgaaacgaagcagtttt

SEQ ID NO: 181588 - DNA, 75 bp, synthetic construct
  source 1..75: mol_type = other DNA
gctttctgtcggcataacatttggtatttttgtcttaactctactggcagcagatttaaccgccccgtatttgca

SEQ ID NO: 181589 - DNA, 75 bp, synthetic construct
  source 1..75: mol_type = other DNA
gacgggctttcagaatggcactttaaatatcgatgctggtggcaatgttactgttaatcaaggcagttttgctgg

SEQ ID NO: 181590 - DNA, 75 bp, synthetic construct
  source 1..75: mol_type = other DNA
ttactgttagtgatggtggtggcgctggccatggccttcttctttatgtacgtcattgtaaaagcggcgatggat

SEQ ID NO: 181591 - DNA, 75 bp, synthetic construct
  source 1..75: mol_type = other DNA
aaccgtgatggcctgtccgccgagttttcaacatcgacctctgcgggagttgcagagctgttgcgtggagaagtg

SEQ ID NO: 181592 - DNA, 75 bp, synthetic construct
  source 1..75: mol_type = other DNA
caatactcagaaaaaccaaaatggacactctgtttcaagcaacagagtctgtttatcttgttgcaatgtcggcaa

SEQ ID NO: 181593 - DNA, 75 bp, synthetic construct
  source 1..75: mol_type = other DNA
cagtcgtgccggatgcagactgtaaaggcgcaggcgcactgacggacgtcgctgacagcctgcttgcccgctacg

SEQ ID NO: 181594 - DNA, 75 bp, synthetic construct
  source 1..75: mol_type = other DNA
taacggcaggcttgacccggtactgtgccgcgaccacgaaatcgacctgatgatcgacattctctgccgccgccg

SEQ ID NO: 181595 - DNA, 75 bp, synthetic construct
  source 1..75: mol_type = other DNA
tgctgaaagcagtgaatgatgcaattgcggaaatgcaaaaagacggcactctgcaagctctttccgaaaaatggt

SEQ ID NO: 181596 - DNA, 75 bp, synthetic construct
  source 1..75: mol_type = other DNA
aacggcattctcagggagtgcgtattgttatacgagggtggagtgattctaatacctaccctataacttattatg

SEQ ID NO: 181597 - DNA, 75 bp, synthetic construct
  source 1..75: mol_type = other DNA
aattcgtggaggaatcgccagtcacaggggaaagaccgcgccgcagtgaaaaaccaaccttcagaacgattaatt

SEQ ID NO: 181598 - DNA, 75 bp, synthetic construct
  source 1..75: mol_type = other DNA
gacgttatcaggttgatgtcagacctcagggcgcggaagggaagcggatacggaaaattttcaccctgaagtcga

SEQ ID NO: 181599 - DNA, 75 bp, synthetic construct
  source 1..75: mol_type = other DNA
ccaaatcagggttcggtgttgttgaacgaaaagcaggtgacgctcaatattgccgcagcccagggtgatttagtg

SEQ ID NO: 181600 - DNA, 75 bp, synthetic construct
  source 1..75: mol_type = other DNA
catgaactcgctggtcgcgctctctggcgcctggcacgggcactcggttgacggctggccgatactgaaatccta

SEQ ID NO: 181601 - DNA, 75 bp, synthetic construct
  source 1..75: mol_type = other DNA
acgcaatatggcacctcacagccttcgatggtctactctggcaccacggacgcgcagggcatggcgaccgtcgtt

SEQ ID NO: 181602 - DNA, 75 bp, synthetic construct
  source 1..75: mol_type = other DNA
ctgagttaacgaacacctcaggcgttcacgttaaggatttaaatagtgaaagttggcttgtgcctactgttcagg

SEQ ID NO: 181603 - DNA, 75 bp, synthetic construct
  source 1..75: mol_type = other DNA
agttatctggttattcagaccgatgctcagggtaaagcgacgctgaatcttcacaaggatagctcgaccggtctt

SEQ ID NO: 181604 - DNA, 75 bp, synthetic construct
  source 1..75: mol_type = other DNA
tttacttactgatttgaatggttgcttccgtggaaaatgtaagcctgtttcaagcctgtacaagctcgacacacg

SEQ ID NO: 181605 - DNA, 75 bp, synthetic construct
  source 1..75: mol_type = other DNA
tgatataataattaatggagagaaacaaactttcacttcgtctttgggtgatggactaagaaatgttgaatattt

SEQ ID NO: 181606 - DNA, 75 bp, synthetic construct
  source 1..75: mol_type = other DNA
gctcctgaaaggaaaaatattttcctgatagaggatgactttgcaaaacttgtacttgaatatatcttaaaaata

SEQ ID NO: 181607 - DNA, 75 bp, synthetic construct
  source 1..75: mol_type = other DNA
ccctgaacagcgtcatccctccggcagtgcagcacctgacggtggaggtgagcgcagctgacggccagtatctgg

SEQ ID NO: 181608 - DNA, 75 bp, synthetic construct
  source 1..75: mol_type = other DNA
tattaaaacaggatttccttacacagggattaatgagtatgagttactcatattagatgagaatctttcatttat

SEQ ID NO: 181609 - DNA, 75 bp, synthetic construct
  source 1..75: mol_type = other DNA
aaccgcaccgtcgccctgcgtattccgtgcggcgaccgtcataatcaccgcgtggaatatccgtggcgggtgccg

SEQ ID NO: 181610 - DNA, 75 bp, synthetic construct
  source 1..75: mol_type = other DNA
ttgtgaaccaggcgcagtggaacagttcgcttaacgcagcgaagctgaaaaagggcgagacgttgcaggtgaaag

SEQ ID NO: 181611 - DNA, 75 bp, synthetic construct
  source 1..75: mol_type = other DNA
ttcaggtaatgaaatggtcgcgcaggtggcggtcacgaccgatcatgatgttgctattggaagccgggcgcaggc

SEQ ID NO: 181612 - DNA, 75 bp, synthetic construct
  source 1..75: mol_type = other DNA
caggcctcattgaggttgagtcagcccgatggcgctggcgttaaaacccatattacggcgagaatgcgtagtgac

SEQ ID NO: 181613 - DNA, 75 bp, synthetic construct
  source 1..75: mol_type = other DNA
atggcatcaaccgaaagaatcaatccgacgacgcatgggaagcgcatccggtgcaaataacgggaggagccaatt

SEQ ID NO: 181614 - DNA, 75 bp, synthetic construct
  source 1..75: mol_type = other DNA
caccgctattatgacccgctgcaggggcgatatatcactcaggatccgattgggctgaaagggggatggaatttt

SEQ ID NO: 181615 - DNA, 75 bp, synthetic construct
  source 1..75: mol_type = other DNA
acgcgcgataaaaaccattttattcgcgttgatgctgacgaatggcaaaaagcgatcgctgtgcttgatgcaaac

SEQ ID NO: 181616 - DNA, 75 bp, synthetic construct
  source 1..75: mol_type = other DNA
gcaccttgcctccgtctggttgaataacgggaacgtacagaatgctgccgatgactcgatttatatgagttgtct

SEQ ID NO: 181617 - DNA, 75 bp, synthetic construct
  source 1..75: mol_type = other DNA
ggcgaagcggcaccgagaaatccgggcgtgacgttgtatggcgatgtggcgagttttgatgacatgctgctggcg

SEQ ID NO: 181618 - DNA, 75 bp, synthetic construct
  source 1..75: mol_type = other DNA
ccagtattaccctggaagtggttgacccggcgcagtggaacgcgtcgttgagcgcggcgaagctgaaaagaggcg

SEQ ID NO: 181619 - DNA, 75 bp, synthetic construct
  source 1..75: mol_type = other DNA
ctgaaacgcggtgatggctatacccgcccaggtgagcgtcatacggcaggcagcagcgatggggttgtctcatcg

SEQ ID NO: 181620 - DNA, 75 bp, synthetic construct
  source 1..75: mol_type = other DNA
cctgattatcagtatattaacctcaagctggggaatactggacatgtcgcgtcggattctgcagatctcaacttc

SEQ ID NO: 181621 - DNA, 75 bp, synthetic construct
  source 1..75: mol_type = other DNA
cgtagatggttcaattacgctaacggtgacgacgaaagactgtcagggcaatctggcaggaaatattccttttat

SEQ ID NO: 181622 - DNA, 75 bp, synthetic construct
  source 1..75: mol_type = other DNA
agcgccagtatacccgtttatcagggcagcaccctgcttgaaccgacagaacctcacgatgttcaggcctttgca

SEQ ID NO: 181623 - DNA, 75 bp, synthetic construct
  source 1..75: mol_type = other DNA
tgttgatgccacagggtctgagtctatcggacgagatgcgcaggcattggatttgcccctatatttccagacacc

SEQ ID NO: 181624 - DNA, 75 bp, synthetic construct
  source 1..75: mol_type = other DNA
agcgtgatcttcttgtctgtcaggtggagttttcgctggatgcaaatcacggcgaaaccacccgtctgattctgg

SEQ ID NO: 181625 - DNA, 75 bp, synthetic construct
  source 1..75: mol_type = other DNA
ttcattctaggaatgatgtttgttttttggcttaatggggtgtctgaaggacatggtttgacgcgatctgcatat

SEQ ID NO: 181626 - DNA, 75 bp, synthetic construct
  source 1..75: mol_type = other DNA
cgcggccactaatggccaggaagcatcatttttttaaaacaggcgaaaatatcagtatatgtggacggtggttat

SEQ ID NO: 181627 - DNA, 75 bp, synthetic construct
  source 1..75: mol_type = other DNA
ggtttatagccctactgatgtatatcttacgcagcagcgtccgcgacagcatctgccgcattattcaaagcgata

SEQ ID NO: 181628 - DNA, 75 bp, synthetic construct
  source 1..75: mol_type = other DNA
ccaagagcaacgaaagttgctcgtgacccttcaaaattcagggatgaaataagcgcatatccagcttatttaggt

SEQ ID NO: 181629 - DNA, 75 bp, synthetic construct
  source 1..75: mol_type = other DNA
aaagataacaatatcaagtcattttatttaggtacgcccagtggtaattttaaagcaatagataaccacgggaag

SEQ ID NO: 181630 - DNA, 75 bp, synthetic construct
  source 1..75: mol_type = other DNA
cttcacctttgcgtgttgaggagctggcaaaccgcgtgcaaatgagcacaccctcttttcaccaacacttcaggc

SEQ ID NO: 181631 - DNA, 75 bp, synthetic construct
  source 1..75: mol_type = other DNA
tgatgccgattacaacacggactggcgaggacgatacagcgaataccgtgtccgggggcatggacgcggtggtgg

SEQ ID NO: 181632 - DNA, 75 bp, synthetic construct
  source 1..75: mol_type = other DNA
cgctggcaggttaacgacgacacggctgcacgccccttcagctcttttaccctggaaaactcagaaaccgtggcg

SEQ ID NO: 181633 - DNA, 75 bp, synthetic construct
  source 1..75: mol_type = other DNA
gatgcgctgacccgtgcggcccggcatcgtggggtgctggtgaccagtaatgctgacggcgatctggtgttcacc

SEQ ID NO: 181634 - DNA, 75 bp, synthetic construct
  source 1..75: mol_type = other DNA
accgtagatgacgagggaacattaacggttttttatctagaatctaaaatgacaagagagttcaccagtggctct

SEQ ID NO: 181635 - DNA, 75 bp, synthetic construct
  source 1..75: mol_type = other DNA
gctcatgccactaaattaaaaaatgataaaaaatcagaactgtttcagaatgcatataatatcgaacgttatttc

SEQ ID NO: 181636 - DNA, 75 bp, synthetic construct
  source 1..75: mol_type = other DNA
tgattcccagtatccagggatggatacaaagacagcaagtgattacctgccacagacaaattggccaacaactca

SEQ ID NO: 181637 - DNA, 75 bp, synthetic construct
  source 1..75: mol_type = other DNA
cccgggccggatggtggcacaccgttacgcgggaaggccggatatgcgctaccgctacgacgataccgggcgggt

SEQ ID NO: 181638 - DNA, 75 bp, synthetic construct
  source 1..75: mol_type = other DNA
ggctgccgcctgttctgttggcacgggcgttatgtaagcaggatgagatggggtttactggactgacatttacct

SEQ ID NO: 181639 - DNA, 75 bp, synthetic construct
  source 1..75: mol_type = other DNA
accctggcatctttcttatccttttgtgtttgaagccgataacgaaatctggatgttacctgaaggatataaatc

SEQ ID NO: 181640 - DNA, 75 bp, synthetic construct
  source 1..75: mol_type = other DNA
acagctgaaagagctgcgggataaacctgcaggcagaatacgcttatcggccgatgaatacgccattcagtattt

SEQ ID NO: 181641 - DNA, 75 bp, synthetic construct
  source 1..75: mol_type = other DNA
gaagagaatggcacccacactgaaaatataaataaaaatcacgttgcaaaaggtatatttaccacaaagaataca

SEQ ID NO: 181642 - DNA, 75 bp, synthetic construct
  source 1..75: mol_type = other DNA
atgttctttggcaacgatcatgtaggcgagcgcggagctctgctgtacggactaacagggaactgtcggttgaac

SEQ ID NO: 181643 - DNA, 75 bp, synthetic construct
  source 1..75: mol_type = other DNA
gaaactgccaccggtgaactggccagaacgcagcgccgcagcctggcggatgcgcttcagcagtccggcggcgaa

SEQ ID NO: 181644 - DNA, 75 bp, synthetic construct
  source 1..75: mol_type = other DNA
ggcagggcggggagagcttgaagccaatccgtttctttttgctcggggagactggccttcaatttacgaaagaag

SEQ ID NO: 181645 - DNA, 75 bp, synthetic construct
  source 1..75: mol_type = other DNA
tttggattgatttttacagtctattactttataaccaacaaaaagcgataggaaaacaaaataaaggtcatacca

SEQ ID NO: 181646 - DNA, 75 bp, synthetic construct
  source 1..75: mol_type = other DNA
caatgagaatgaaagtgttgagagtgaagagaatggcacccacactggaaatataaatgaaaatcacattgcaaa

SEQ ID NO: 181647 - DNA, 75 bp, synthetic construct
  source 1..75: mol_type = other DNA
gctggtgagcgggcttaaaggtcacaagattgaccaggcgcatatctgcatcgaagcgaccggcacctatatgga

SEQ ID NO: 181648 - DNA, 75 bp, synthetic construct
  source 1..75: mol_type = other DNA
gctatccacatcactggtggaaacaattcattaatactccatgaaggttctgtcattactggtgatgtacaggtt

SEQ ID NO: 181649 - DNA, 75 bp, synthetic construct
  source 1..75: mol_type = other DNA
cagtaaacaagcgcacgttcagctcgcggaagcctgggaggccgtgagcgatgagcaccgcgcgcagcttcttct

SEQ ID NO: 181650 - DNA, 75 bp, synthetic construct
  source 1..75: mol_type = other DNA
tacttctcgtcagagtaatttatttgatggcagcgcagagaaaacgtcaggtctggttgtgattggcgatggcaa

SEQ ID NO: 181651 - DNA, 75 bp, synthetic construct
  source 1..75: mol_type = other DNA
gaatagcagaaaaattgttcggatacttatcctggtgggaataacatttattaatgttatcgctctgcttactaa

SEQ ID NO: 181652 - DNA, 75 bp, synthetic construct
  source 1..75: mol_type = other DNA
taatacaccgtaagagctgggaaaaccggacagaagtggagctggccacactcacgtgggtggactggtataaca

SEQ ID NO: 181653 - DNA, 75 bp, synthetic construct
  source 1..75: mol_type = other DNA
ctgaacggggtgacggccggctttaagaatctgatgagtgaggtgatccagaatgccaccggggcggtggccagt

SEQ ID NO: 181654 - DNA, 75 bp, synthetic construct
  source 1..75: mol_type = other DNA
ggcaaaactgaaaacaggcggactacccctgacggccaacgtgattaaggcgctgcagcgtgacccggataatac

SEQ ID NO: 181655 - DNA, 75 bp, synthetic construct
  source 1..75: mol_type = other DNA
atgacgatgaaggtaaagactctggtgatgatggtgatgctgtcctgcagtacgccggtcatggcagacagcatt

SEQ ID NO: 181656 - DNA, 75 bp, synthetic construct
  source 1..75: mol_type = other DNA
atactgaaaaggtatttgctaaacggtggttggcaactcaggttgccgccatgatgggcagaaagctggaggaag

SEQ ID NO: 181657 - DNA, 75 bp, synthetic construct
  source 1..75: mol_type = other DNA
agcagaacgcgataattatcgtgcgatgccaacacttagtgagttttttcaccagacctatgttccgttcatcaa

SEQ ID NO: 181658 - DNA, 75 bp, synthetic construct
  source 1..75: mol_type = other DNA
aaaaaattgtgtcagtgacggttttgcttgattcggagagtaataagaaattgattgcggcagcgaagttgtcag

SEQ ID NO: 181659 - DNA, 75 bp, synthetic construct
  source 1..75: mol_type = other DNA
atgtcagaaaaaaatccagaagccgcattagaagcgaaatgggggaaaagcgcattagctatgggatggactgcc

SEQ ID NO: 181660 - DNA, 75 bp, synthetic construct
  source 1..75: mol_type = other DNA
gtggataaacctattttcctcgatccttctattttcaacaaagaagttacgtcggtcagcgaccttaaaaagatt

SEQ ID NO: 181661 - DNA, 75 bp, synthetic construct
  source 1..75: mol_type = other DNA
ctgtggataatataggggtgacaacctcacctgttcctgaagatattgtgctgaatgattttatctactggcagc

SEQ ID NO: 181662 - DNA, 75 bp, synthetic construct
  source 1..75: mol_type = other DNA
gcaactgtgcggttatagtagtacgtcctactttatctctgtgtttaaagcattttatggcatgacaccactgaa

SEQ ID NO: 181663 - DNA, 75 bp, synthetic construct
  source 1..75: mol_type = other DNA
ggcgatttccctacagccatagaaggactcgaattgttccgccgaaacgaacccgctccgccagtgagctgcctg

SEQ ID NO: 181664 - DNA, 75 bp, synthetic construct
  source 1..75: mol_type = other DNA
atgtaaattccgggattgtggtagttgatgagcgtcgacataatgttgaaacgatgcttaatcaatttacggata

SEQ ID NO: 181665 - DNA, 75 bp, synthetic construct
  source 1..75: mol_type = other DNA
gaggggcgtggataccagtggccgaaattgccggaaatatcgctacgcggatacttagtgctgtgaaatcactga

SEQ ID NO: 181666 - DNA, 75 bp, synthetic construct
  source 1..75: mol_type = other DNA
cgatggtgcttggtgatggaggctatactgggacgtagcccttgtagtttcagtaatagcgcaccgctgcggcct

SEQ ID NO: 181667 - DNA, 75 bp, synthetic construct
  source 1..75: mol_type = other DNA
cgtcgcaaatggagcaaacctagacgacggagatgaaacggatcagcctccatctgaatggaacaatacattctt

SEQ ID NO: 181668 - DNA, 75 bp, synthetic construct
  source 1..75: mol_type = other DNA
ccagatgtgattccttcttttggtcaagaaatttatcatgatttctatcaactcgcatttttctcaattttattc

SEQ ID NO: 181669 - DNA, 75 bp, synthetic construct
  source 1..75: mol_type = other DNA
atagagggtaatattattttcatcgaaactagtggagttggaagagcaaaagcattaaatttaggtgttagacac

SEQ ID NO: 181670 - DNA, 75 bp, synthetic construct
  source 1..75: mol_type = other DNA
cgccgccacgcccttttctgagcagtacgctgctggaaaaagacggtgctggccgtcgccacacgaccaatcctt

SEQ ID NO: 181671 - DNA, 75 bp, synthetic construct
  source 1..75: mol_type = other DNA
tggagatccacgactgtcgcccggaagagcaccagtgggttgaccaggtggtcaacgtgacgatgaaagcctggc

SEQ ID NO: 181672 - DNA, 75 bp, synthetic construct
  source 1..75: mol_type = other DNA
gacgatggcctatgcgcaccttgcgcctgactatctgcaaaatgccgtcgctctgaatccactaaaaggcggagt

SEQ ID NO: 181673 - DNA, 75 bp, synthetic construct
  source 1..75: mol_type = other DNA
gtgagaaaaacggcaaggcaaataacatggagggggatgtatcagtggttactgaaggttgacccgctgaaatgc

SEQ ID NO: 181674 - DNA, 75 bp, synthetic construct
  source 1..75: mol_type = other DNA
gcctgcactgccattatgggctgagcacatcggttgatgaacgtgtgtacgatgccctgacatcagcctgcctgc

SEQ ID NO: 181675 - DNA, 75 bp, synthetic construct
  source 1..75: mol_type = other DNA
gtgcgtgaaatttcaggtgtacaaatttgtaataacgagtttgcagtaaaaaatgtagagcatgttttagatcca

SEQ ID NO: 181676 - DNA, 75 bp, synthetic construct
  source 1..75: mol_type = other DNA
agcaaaattaataaaatctccacttaatagcgatcatgaacttgttatgcacgcactggatacgtatctgtgcta

SEQ ID NO: 181677 - DNA, 75 bp, synthetic construct
  source 1..75: mol_type = other DNA
aacttttaatacatacaaaacggtattgcttgatttcaataatctgtctaatgaagaggccaaccagttgcgtat

SEQ ID NO: 181678 - DNA, 75 bp, synthetic construct
  source 1..75: mol_type = other DNA
tgacctatagcgaaaaggcactgacggcgcgcagccgcatccatgtggtcgagcatatcccgggagtttcacgat

SEQ ID NO: 181679 - DNA, 75 bp, synthetic construct
  source 1..75: mol_type = other DNA
gctggcgctggtactggcaggtacaggcgtgatgttcccgtttttctcaccgttcctcggctggctggggggatt

SEQ ID NO: 181680 - DNA, 75 bp, synthetic construct
  source 1..75: mol_type = other DNA
gaattaatagatttcagcacagttggtttgagtgaaaatgataaggagataattagaaatatgattaatgagtta

SEQ ID NO: 181681 - DNA, 75 bp, synthetic construct
  source 1..75: mol_type = other DNA
atccgcctgcctgctgccggatacgggcgcccggaatgtggagagtctgctgaaccagcaactgctgccggtact

SEQ ID NO: 181682 - DNA, 75 bp, synthetic construct
  source 1..75: mol_type = other DNA
atgacctccaatctgggcagtgaccttctgatgcagcaactgagcgaaaagccggagacaacggaatcggagctg

SEQ ID NO: 181683 - DNA, 75 bp, synthetic construct
  source 1..75: mol_type = other DNA
gcctgggagacgcattttccctgaatccggggcgggaagagcttgtgcagcggcggctggttttccgggctttca

SEQ ID NO: 181684 - DNA, 75 bp, synthetic construct
  source 1..75: mol_type = other DNA
aaaaaaagagtttgataaaaagtatttgctcaaatatgttttagacgaaaaagatatagcagataacattagtct

SEQ ID NO: 181685 - DNA, 75 bp, synthetic construct
  source 1..75: mol_type = other DNA
ctccgacgctcgtgatgcgtttagtcctgagcaggtagggcaactactggtcgccgctaaagcttactctcagaa

SEQ ID NO: 181686 - DNA, 75 bp, synthetic construct
  source 1..75: mol_type = other DNA
aggccctgaaggtgctaaaagcctgtatgaggcgtatcgaagcgggagatagtcagcctctgatagattacgtcg

SEQ ID NO: 181687 - DNA, 75 bp, synthetic construct
  source 1..75: mol_type = other DNA
tgcgatggtgtttgatggtcttcgcctcatgaagaacggttatggggagcaggtaagcaaatggtttaaccggac

SEQ ID NO: 181688 - DNA, 75 bp, synthetic construct
  source 1..75: mol_type = other DNA
atagctcagggtctataacttacgaccgttacgctaaagaggtcgaggtggatagattggttaatgtgatggcag

SEQ ID NO: 181689 - DNA, 75 bp, synthetic construct
  source 1..75: mol_type = other DNA
gatagctctggtttgttgtcttaccttgagcctgagaccagcagtctaagatcgtccgtctccctatctgtattg

SEQ ID NO: 181690 - DNA, 75 bp, synthetic construct
  source 1..75: mol_type = other DNA
accgttacgctaaagaggtcgaggtagataggctggttaatgtgatggctgatgtttataaggagactgaagtaa

SEQ ID NO: 181691 - DNA, 75 bp, synthetic construct
  source 1..75: mol_type = other DNA
accagcgtaacggcgtctactattttcgtcttcgagttagacaatcaaacaatgatagaatgacctcagtttcat

SEQ ID NO: 181692 - DNA, 75 bp, synthetic construct
  source 1..75: mol_type = other DNA
attacttacgaccgttatgctaaagaggttgaggttgatagactggtcaatgtgatggctgatgtttataaggag

SEQ ID NO: 181693 - DNA, 75 bp, synthetic construct
  source 1..75: mol_type = other DNA
ggaagccagcaacattacgagaaaacaaagcttctcatgctgcgttaatcgaagtttttgattatctgggcctca

SEQ ID NO: 181694 - DNA, 75 bp, synthetic construct
  source 1..75: mol_type = other DNA
agttctaactgatcgtgacggtatggcattccattcgttcaggcatacagttgcgacacagttaaaacaacatgg

SEQ ID NO: 181695 - DNA, 75 bp, synthetic construct
  source 1..75: mol_type = other DNA
ctcacagaggccttctggtaagccctatcactattacgttaccgttttggctgctatcactggagcaagacttaa

SEQ ID NO: 181696 - DNA, 75 bp, synthetic construct
  source 1..75: mol_type = other DNA
ttcatgaggccttgggagtacttaaggcgtgtatgaagcgtatcgaaacgggagacagtaagcctcttatagatt

SEQ ID NO: 181697 - DNA, 75 bp, synthetic construct
  source 1..75: mol_type = other DNA
ttaatgtctcgagtgaaggcaaagtagattcgggaattatcactgcggggatgaaagaaacaggcacaggcaaca

SEQ ID NO: 181698 - DNA, 75 bp, synthetic construct
  source 1..75: mol_type = other DNA
actattcgcgaggggggctggttacggctgaaaatacgattatcggtggcaatgccaccggtatcggaaccctga

SEQ ID NO: 181699 - DNA, 75 bp, synthetic construct
  source 1..75: mol_type = other DNA
tcaggcgggcagtaatggccaggttgtcgttgaaaagggtggcgagtggctaataaaaaataatgattcctcaat

SEQ ID NO: 181700 - DNA, 75 bp, synthetic construct
  source 1..75: mol_type = other DNA
gtccgtggctggctgaagcaggaatgaagcgaggccggggttcctggcagattgaatttaactacaaggtcatgc

SEQ ID NO: 181701 - DNA, 75 bp, synthetic construct
  source 1..75: mol_type = other DNA
gggacagtattgagctaatttgtgggcagggagagagcgggacttgttccataaaactggagaaaacaggaaaga

SEQ ID NO: 181702 - DNA, 75 bp, synthetic construct
  source 1..75: mol_type = other DNA
attgggctgaaggggggatggaatttttatgagtatccgttgaatccggttcagtatatagacccttttggatta

SEQ ID NO: 181703 - DNA, 75 bp, synthetic construct
  source 1..75: mol_type = other DNA
tcccagtcaacgaagacatacgaaattatgcagagaaagtttggaataatcctaatatcattacaattggagcac

SEQ ID NO: 181704 - DNA, 75 bp, synthetic construct
  source 1..75: mol_type = other DNA
agcaacggaatggcgtggggagtatgacgagtgggggaatcagcttaatgaggagaacccgcatcatctgttcca

SEQ ID NO: 181705 - DNA, 75 bp, synthetic construct
  source 1..75: mol_type = other DNA
ccaccgacccggcgggaaaccggctgccggacccggagctgcacccggacagtacactcacggcgtggccggata

SEQ ID NO: 181706 - DNA, 75 bp, synthetic construct
  source 1..75: mol_type = other DNA
gtatgatcggcgatgtcagcggcatgatttgcgatggtgcgtcgaacagctgcgcgatgaaggtttcgaccagtg

SEQ ID NO: 181707 - DNA, 75 bp, synthetic construct
  source 1..75: mol_type = other DNA
tgccggacccggagctgcacccggacagcaccctcacggcgtggccggataaccgcatcaccaaagacgcgcatt

SEQ ID NO: 181708 - DNA, 75 bp, synthetic construct
  source 1..75: mol_type = other DNA
cgaccgcctgcacagagaaacggtgcgcagctttggcagcatggcaggcagtaatgccgcatacgaactgaccag

SEQ ID NO: 181709 - DNA, 75 bp, synthetic construct
  source 1..75: mol_type = other DNA
acatttacggcctgacgaaccagttcaccacctactcgctccgcgattgtggcagtcttcgaaatccacggacga

SEQ ID NO: 181710 - DNA, 75 bp, synthetic construct
  source 1..75: mol_type = other DNA
ctaaccgctctcttattaagagtaagatggaagaaatcccgctacaacagattcacgatattatatctaagttta

SEQ ID NO: 181711 - DNA, 75 bp, synthetic construct
  source 1..75: mol_type = other DNA
cgcagtatatatcgtgaactgggcgcaacgctgagttacaacatgcgtctggggaacggtatggaaattgagccg

SEQ ID NO: 181712 - DNA, 75 bp, synthetic construct
  source 1..75: mol_type = other DNA
taaaaaacacgttaatgataatatatggaatgtcaaaaatagactcctgtgagtgtaggggagtatcgagaaaaa

SEQ ID NO: 181713 - DNA, 75 bp, synthetic construct
  source 1..75: mol_type = other DNA
tggaaataatcgtcaatgccggccagtcacgcagcctctgttttgaagcgttacacgcggcacgtgccgggaact

SEQ ID NO: 181714 - DNA, 75 bp, synthetic construct
  source 1..75: mol_type = other DNA
tttccgctgaaagaattaaataatccagagcatgacagttacgcaatttgtgaaaagagtcacggcagagaagaa

SEQ ID NO: 181715 - DNA, 75 bp, synthetic construct
  source 1..75: mol_type = other DNA
ttgttaaaataatattctataattgcaagtatttttttaatttatttctcacaatttttaccttgagtttttttt

SEQ ID NO: 181716 - DNA, 75 bp, synthetic construct
  source 1..75: mol_type = other DNA
atgaaattaagacaaaacatcgaaaaagagattataaaaattaataatgttagaatacatgagtacactgtatta

SEQ ID NO: 181717 - DNA, 75 bp, synthetic construct
  source 1..75: mol_type = other DNA
ttattgtggtcagtatattaattttatgttcttgtgataaaaatgataataattgttcatcaatagacaataaga

SEQ ID NO: 181718 - DNA, 75 bp, synthetic construct
  source 1..75: mol_type = other DNA
actactcatgcttggttaaatgaccgtttccttttgccggaatcccaacagaagaacttggcagagttgaaacga

SEQ ID NO: 181719 - DNA, 75 bp, synthetic construct
  source 1..75: mol_type = other DNA
tactaatgcaaagaagtctgttgctgaaaactttaccgtggaaaaaatgacaacgaaagtgaatgaggtattgag

SEQ ID NO: 181720 - DNA, 75 bp, synthetic construct
  source 1..75: mol_type = other DNA
tatctagcttgatatatttgatttcaaaacttgagaataatgaaaaaataatagaatcaatttatatatcatctg

SEQ ID NO: 181721 - DNA, 75 bp, synthetic construct
  source 1..75: mol_type = other DNA
aagaaacaataaaaattaataatattatgattcataaatacactgtattatatacatcaaattgtattatggata

SEQ ID NO: 181722 - DNA, 75 bp, synthetic construct
  source 1..75: mol_type = other DNA
caacggatggcgaaaagcaatttcatgttggcgataagttaacggcaaactgggccattggcgatacccagggcg

SEQ ID NO: 181723 - DNA, 75 bp, synthetic construct
  source 1..75: mol_type = other DNA
atctaagagctggccagtggcaatcagagacgcaatcaaccggaacgattcagggtacagtgccgtggataaccc

SEQ ID NO: 181724 - DNA, 75 bp, synthetic construct
  source 1..75: mol_type = other DNA
atgaaacattatttaaagcgaccgatgaccaaagtcgcgctggcactggctctggcagggtactgcgcagtacct

SEQ ID NO: 181725 - DNA, 75 bp, synthetic construct
  source 1..75: mol_type = other DNA
catgtattggcgcagtccgctgggggaatctgccggataatgcccgggagataatcaccgcgttaatgcgttgtc

SEQ ID NO: 181726 - DNA, 75 bp, synthetic construct
  source 1..75: mol_type = other DNA
ctgcaggccgaatggccgggcagggaaacacttccacagccccgactgtacctggtggaggagtgcgctgaagaa

SEQ ID NO: 181727 - DNA, 75 bp, synthetic construct
  source 1..75: mol_type = other DNA
accttgacgacaacaacactgcaaccaaagcgacgctgcaatggatgagctatagcgaccaggcggggggtgatc

SEQ ID NO: 181728 - DNA, 75 bp, synthetic construct
  source 1..75: mol_type = other DNA
agatagtcgatgcactgagaagccaatatatttacgacccggaatcgggggttttcttcaacagaagaacaggcc

SEQ ID NO: 181729 - DNA, 75 bp, synthetic construct
  source 1..75: mol_type = other DNA
ctttcaggaagtcttttttcaaaattcagacaagatactattatcccggaggcattgagcaccctccagatatca

SEQ ID NO: 181730 - DNA, 75 bp, synthetic construct
  source 1..75: mol_type = other DNA
tttgtagtaccttattattatattttgggggtggaaatatatcttctgcaaaagagcttggtgaaaatatgcaga

SEQ ID NO: 181731 - DNA, 75 bp, synthetic construct
  source 1..75: mol_type = other DNA
aagcaaatggaactcaatgaagcactaaaaagttatgctaataaaaaatctattgagttagatttggtggtgagg

SEQ ID NO: 181732 - DNA, 75 bp, synthetic construct
  source 1..75: mol_type = other DNA
tcgggtcagggaagggctggaaatcacggcaatgctggtgaagccggagccggggatgccctcccagatggcagc

SEQ ID NO: 181733 - DNA, 75 bp, synthetic construct
  source 1..75: mol_type = other DNA
tccctgcacttcgtcaggtgccgttcaatatccgtgtgcatgcccaggtgtccggcggagctgccggctgggtgg

SEQ ID NO: 181734 - DNA, 75 bp, synthetic construct
  source 1..75: mol_type = other DNA
aattctccgatcatgaatatcatcttcatgtcgttgaactgcataatactggccctagcaccgcaaccagtcttg

SEQ ID NO: 181735 - DNA, 75 bp, synthetic construct
  source 1..75: mol_type = other DNA
gcagcgacgatggaaaaagggatggggtcgggtagcagcggcacattgctgcgccgccgccccctaagaacggag

SEQ ID NO: 181736 - DNA, 75 bp, synthetic construct
  source 1..75: mol_type = other DNA
atcctgactcttaacaacgattccgcggcgtatcagggtacgacggatatcgtgggggggggaaattgctttcgg

SEQ ID NO: 181737 - DNA, 75 bp, synthetic construct
  source 1..75: mol_type = other DNA
ccgcaacacaatggacaacagtgattgatcagaatcgtcgtcttcttttctataaaaccatgaacgacagtacgg

SEQ ID NO: 181738 - DNA, 75 bp, synthetic construct
  source 1..75: mol_type = other DNA
ggtgcgttgggcatgtcagaaacccaattcaacaacaacctttacgagaaaaacggttgtcgtttctttgaagtc

SEQ ID NO: 181739 - DNA, 75 bp, synthetic construct
  source 1..75: mol_type = other DNA
gtcgacgagttggcacctgagctgattaaacgtaatgctatcggatacgaaagcgcttcacagttgctgatcact

SEQ ID NO: 181740 - DNA, 75 bp, synthetic construct
  source 1..75: mol_type = other DNA
attagcgatgcggagtaccatcaataccgtagcgaggaagttggatttgaaatcccaactaattgttttgatgtg

SEQ ID NO: 181741 - DNA, 75 bp, synthetic construct
  source 1..75: mol_type = other DNA
acagtgagcgtcagcgtgtgtgatgaaaataaagactgctcccacagtgagccactgcaggcacagaaaaatgac

SEQ ID NO: 181742 - DNA, 75 bp, synthetic construct
  source 1..75: mol_type = other DNA
ctcctttaggcaaacccatatacgattcaatattgaatatgctgggcgatgataatattgttcaagttatcattg

SEQ ID NO: 181743 - DNA, 75 bp, synthetic construct
  source 1..75: mol_type = other DNA
ctgatggaccgaatgcaggagctattggaggtgctgccgcaggtgcatgggccggtggattatttggggaatatg

SEQ ID NO: 181744 - DNA, 75 bp, synthetic construct
  source 1..75: mol_type = other DNA
ggaacggttgcttcgggacagatcaatggggtgaacacgttttcgttcggggcaggctcccgtgctctgggactg

SEQ ID NO: 181745 - DNA, 75 bp, synthetic construct
  source 1..75: mol_type = other DNA
aagggcatacaaaaatggaagcaatacgctgcctgaagcgctatatctcacgcgaagtttatacattactgcgta

SEQ ID NO: 181746 - DNA, 75 bp, synthetic construct
  source 1..75: mol_type = other DNA
aaagccaatgccctatgtaaaaatggatataaagacattttaaaggaacagggatttaacaggaaagaattaacc

SEQ ID NO: 181747 - DNA, 75 bp, synthetic construct
  source 1..75: mol_type = other DNA
gaccgggtgagtgaggaaagccgccgctggctggcatcgtgcggcctgaccgtggagcagatgcaaaaccagatg

SEQ ID NO: 181748 - DNA, 75 bp, synthetic construct
  source 1..75: mol_type = other DNA
tatattgattttgtcagatgtgagtaaactgcttatggactttgttgttttagcccataaggacatatttgcaga

SEQ ID NO: 181749 - DNA, 75 bp, synthetic construct
  source 1..75: mol_type = other DNA
catattatattgcagcctatttaaaactttttattgaaaattattacgaagctgatgctttagtggatactattt

SEQ ID NO: 181750 - DNA, 75 bp, synthetic construct
  source 1..75: mol_type = other DNA
tcaacgttttttcgttgaggaatttccctctttttatacttggctttatgatcgtagctgttaacttgatctgga

SEQ ID NO: 181751 - DNA, 75 bp, synthetic construct
  source 1..75: mol_type = other DNA
atcgtccagctcttttataagtcagttaccaactaaaaaattcatatacattatgcaaatgttatggcgaaattt

SEQ ID NO: 181752 - DNA, 75 bp, synthetic construct
  source 1..75: mol_type = other DNA
ttatctttgcatgcgtaggaacaattatctctctaattacatttgcaaaatgtagaaaccgcattgcatattggg

SEQ ID NO: 181753 - DNA, 75 bp, synthetic construct
  source 1..75: mol_type = other DNA
tacgtcaccgctctggctgcgatcactggagcaagacttaacgaggtggcccaacttcaggtcaaagacgtcagg

SEQ ID NO: 181754 - DNA, 75 bp, synthetic construct
  source 1..75: mol_type = other DNA
catagctcagggtctataacttacgaccgttacgcgaaagaggtcgaggtggaaacgctgaaagaaaaattagcg

SEQ ID NO: 181755 - DNA, 75 bp, synthetic construct
  source 1..75: mol_type = other DNA
gaacgttgctgcccaaagtcctcgctgaccgtagcggcttagcttttcactcgtttagacatacagttgcgaccc

SEQ ID NO: 181756 - DNA, 75 bp, synthetic construct
  source 1..75: mol_type = other DNA
caaggtttagttataccgccgtttgtggagccacatattcacctggacaccacgcaaaccgccggacaaccgaac

SEQ ID NO: 181757 - DNA, 75 bp, synthetic construct
  source 1..75: mol_type = other DNA
ttattaacgcccggttacccggcaaagaggggctgtggcagattcatctgctggacggaaaaatcagcgccattg

SEQ ID NO: 181758 - DNA, 75 bp, synthetic construct
  source 1..75: mol_type = other DNA
ggtagatggtgcttatggttttgtattggctgactttatgtcactcgtggaagaccgtagaaagactgcgggtga

SEQ ID NO: 181759 - DNA, 75 bp, synthetic construct
  source 1..75: mol_type = other DNA
ccctgtacacgccccatgaaggatgacgaaattaatggacaatatgaatatgaaacggggcgagtgattattgaa

SEQ ID NO: 181760 - DNA, 75 bp, synthetic construct
  source 1..75: mol_type = other DNA
atgagactaataatatttactacaaacaactgaataatgggagttatgaatattatccagttctagattggctaa

SEQ ID NO: 181761 - DNA, 75 bp, synthetic construct
  source 1..75: mol_type = other DNA
accttacagaaattgaaatttatttcctttcttttatttcacagaaaacaaaaaaaatttcttatgcagcaagtt

SEQ ID NO: 181762 - DNA, 75 bp, synthetic construct
  source 1..75: mol_type = other DNA
gtggcggaactcaactttacaggaattgtgggtggcgtggatacacataaagatctgcacgttgccgctgtcgta

SEQ ID NO: 181763 - DNA, 75 bp, synthetic construct
  source 1..75: mol_type = other DNA
aagaaagatgttgcaatttttcaggagtagaggggtgttaggtgaagagttcattaatgaaagaaaactgagtga

SEQ ID NO: 181764 - DNA, 75 bp, synthetic construct
  source 1..75: mol_type = other DNA
tgatggtgtattaagatatgttaataaccaaaatattgatgaagttaactataatgaaatcagtgatgcagataa

SEQ ID NO: 181765 - DNA, 75 bp, synthetic construct
  source 1..75: mol_type = other DNA
cctcacttccagatacagacaaaattggagggattctggtaaaaaaatacctttcaggaagtcttttttcaaaat

SEQ ID NO: 181766 - DNA, 75 bp, synthetic construct
  source 1..75: mol_type = other DNA
ttcaggggataccgaatatctgttgaacaactcccgggagaagtacagtttcaaaggtaatggctggaataatgg

SEQ ID NO: 181767 - DNA, 75 bp, synthetic construct
  source 1..75: mol_type = other DNA
atgacaaataatcttccaggattactgaatgcggcgttatgtacggttatcgtactgacgctttttttctaccgc

SEQ ID NO: 181768 - DNA, 75 bp, synthetic construct
  source 1..75: mol_type = other DNA
aaaggggactatacttgtggtggccaagaccaacggggagaatcaaaaggagatggtctatgggggccaggtaaa

SEQ ID NO: 181769 - DNA, 75 bp, synthetic construct
  source 1..75: mol_type = other DNA
atggaagcaatacgctgcctgaagcgctatatctcacgcgaagtttatacattactgcgtaatcaaaacaggcag

SEQ ID NO: 181770 - DNA, 75 bp, synthetic construct
  source 1..75: mol_type = other DNA
aacctgatgtgcggcaactttgacctgaaaaccacggtgagcaaccagctgaacggggtgacggacggttttaaa

SEQ ID NO: 181771 - DNA, 75 bp, synthetic construct
  source 1..75: mol_type = other DNA
acaaggcacagctgaactgtcagaacatggcgaagcgcatgatggagttctcggacagcagcaagtggacacagg

SEQ ID NO: 181772 - DNA, 75 bp, synthetic construct
  source 1..75: mol_type = other DNA
aactgggcgacacgccgctggtggagtacacacgggatagactgcaccgggaaacggtgcgcagcttcggcaata

SEQ ID NO: 181773 - DNA, 75 bp, synthetic construct
  source 1..75: mol_type = other DNA
cgttgaaggagccgcgctgtccgtggtggccttcacggctaagatcgcctccggcctggataatctttactgggc

SEQ ID NO: 181774 - DNA, 75 bp, synthetic construct
  source 1..75: mol_type = other DNA
cttttaaatcagatgctttatcaagacgagcttgaacaggaggaaaaatataatggacgaagtcaagaaaattga

SEQ ID NO: 181775 - DNA, 75 bp, synthetic construct
  source 1..75: mol_type = other DNA
atctctgcgagtcagccaaagccggagccgtgctgaccttctggcatgaactggccataaatggctatacctcaa

SEQ ID NO: 181776 - DNA, 75 bp, synthetic construct
  source 1..75: mol_type = other DNA
agtaatggcctatccatcgagaatttgcttaaaaataatgacagatcaaaaatgcagttaaaagcagagccccaa

SEQ ID NO: 181777 - DNA, 75 bp, synthetic construct
  source 1..75: mol_type = other DNA
actggatggggccaatgttcaataaactggagtcgctttatcagctgccagctggcctgttgaaaagcgtggcga

SEQ ID NO: 181778 - DNA, 75 bp, synthetic construct
  source 1..75: mol_type = other DNA
gtgaccttaaaacgaccgttaacgatctggcgaaagcgctggcgaaactactcaatattgaccccaaatcatggt

SEQ ID NO: 181779 - DNA, 75 bp, synthetic construct
  source 1..75: mol_type = other DNA
gacacgctgaaaaacgatcacccctttgttgactatccctcccggaaaactgccgtctggacgcgaattacctag

SEQ ID NO: 181780 - DNA, 75 bp, synthetic construct
  source 1..75: mol_type = other DNA
gagccgcagatggcggcgaaggttggcgactctgtggcgcgcgctcatgggcgtaaagggtgcattgttgagcaa

SEQ ID NO: 181781 - DNA, 75 bp, synthetic construct
  source 1..75: mol_type = other DNA
ttacaactggctttccgggcacgccgggggaaggaccgttgaagggagagatgagctgcgtgagcgccatctttt

SEQ ID NO: 181782 - DNA, 75 bp, synthetic construct
  source 1..75: mol_type = other DNA
ttggattgccgggaatgccgggaacggagcaaggcgtccgctattcaatcaggaagtatgcaaccagcgaaacca

SEQ ID NO: 181783 - DNA, 75 bp, synthetic construct
  source 1..75: mol_type = other DNA
ccacaactgatggtcgaacgcctcaatgccctgactgaaaaccagcgccaggtggctgatgcacgaatcgcgatc

SEQ ID NO: 181784 - DNA, 75 bp, synthetic construct
  source 1..75: mol_type = other DNA
tctggcttaacgatacgttaattgccgaaaagggctggccggaatatcgtttcaccttgccacagtctttactaa

SEQ ID NO: 181785 - DNA, 75 bp, synthetic construct
  source 1..75: mol_type = other DNA
ttggtcaccaaaggtggccgttggctggaggctgataatactcaagccttcaagattgcggaattaatgtgcaat

SEQ ID NO: 181786 - DNA, 75 bp, synthetic construct
  source 1..75: mol_type = other DNA
ctgatgagcagtgagcctgttctggtttcgctggtctgcaccagtggtgacaggccctgttcgctggcacccggt

SEQ ID NO: 181787 - DNA, 75 bp, synthetic construct
  source 1..75: mol_type = other DNA
ccagcacaaactcctggcatatgctgaccatgattaacacagaaacaaaggaagcctggcgatggaaggaaagaa

SEQ ID NO: 181788 - DNA, 75 bp, synthetic construct
  source 1..75: mol_type = other DNA
atttgcaaccatttttgccggtatcagcgccggcggcatgtactgcccggagtgtggcacggttcactggccgga

SEQ ID NO: 181789 - DNA, 75 bp, synthetic construct
  source 1..75: mol_type = other DNA
ctgcggtattcatacaccattctgcgcccggctgtcgccggaaaaactgaatgcgctggaaaaactggaaacccg

SEQ ID NO: 181790 - DNA, 75 bp, synthetic construct
  source 1..75: mol_type = other DNA
gacagcgtacaggggcaggagcacaacacattcagggatgatgatctggtcgcgctctcccgccatggaaatcag

SEQ ID NO: 181791 - DNA, 75 bp, synthetic construct
  source 1..75: mol_type = other DNA
aatggcggatctggtaaaagcgaagaaagccaaaattattggcaatggcgcgaaactggaagaaattatcgcctg

SEQ ID NO: 181792 - DNA, 75 bp, synthetic construct
  source 1..75: mol_type = other DNA
agcatggtgcgctttatcatgaagctccaaactggtctgaaaacgtggttaccgacgatcgccttatcacggggc

SEQ ID NO: 181793 - DNA, 75 bp, synthetic construct
  source 1..75: mol_type = other DNA
tatgtgtcgtttccagccatccgattaaaggcgcatccggtgtaccaaccggttttttcctggccgagctgactc

SEQ ID NO: 181794 - DNA, 75 bp, synthetic construct
  source 1..75: mol_type = other DNA
catgcctgcacagcccgaattgttttttgagcctgaatctaatcctgagccagattctgggcctgaagaagttat

SEQ ID NO: 181795 - DNA, 75 bp, synthetic construct
  source 1..75: mol_type = other DNA
gagaaatatgcacaagtgatttttgaaaattttggtagcagaagttattattttctaacttttaatgagcctgaa

SEQ ID NO: 181796 - DNA, 75 bp, synthetic construct
  source 1..75: mol_type = other DNA
tcggcaccagaaacaaccgaagccgatgagtaaagacaacctgagcgactactttgccaaagcacgggatctggc

SEQ ID NO: 181797 - DNA, 75 bp, synthetic construct
  source 1..75: mol_type = other DNA
cagggaaaaaccggaatgcgtctggcgttaccgcttacactacgctgtgatgccattgggataacgttaaaagaa

SEQ ID NO: 181798 - DNA, 75 bp, synthetic construct
  source 1..75: mol_type = other DNA
actagcattagataaaaaagaagaagaaaaacgaagaaatgatcttaaaaaaatacagctattgaaaatcagttt

SEQ ID NO: 181799 - DNA, 75 bp, synthetic construct
  source 1..75: mol_type = other DNA
atacgtaaatggggatgatgagcatctttttcaggctgcattaacattattgaacgataaaagcataagaaacaa

SEQ ID NO: 181800 - DNA, 75 bp, synthetic construct
  source 1..75: mol_type = other DNA
ttatttttccaatgatgtgattgatgctgttatatattactcaccttctatattctttggtcctctggttaataa

SEQ ID NO: 181801 - DNA, 75 bp, synthetic construct
  source 1..75: mol_type = other DNA
tttttcaacccgactaaaagatttaaatgaaacaaacgaaagtattgaaagcattttaagcttggcagcgaataa

SEQ ID NO: 181802 - DNA, 75 bp, synthetic construct
  source 1..75: mol_type = other DNA
aatcttttagaaaatatacgcagaaaaatgctaatagcattggatgctaataataatgattatgctgagatcaag

SEQ ID NO: 181803 - DNA, 75 bp, synthetic construct
  source 1..75: mol_type = other DNA
gttatttgtcgatttaccatttacattcacgtcagagaatgatagtgatctttcagcaaagattgaatcttcaat

SEQ ID NO: 181804 - DNA, 75 bp, synthetic construct
  source 1..75: mol_type = other DNA
atggaacatatttctattatccccgattacagacaagcctggaaagtggaacataaattatcggatattctactg

SEQ ID NO: 181805 - DNA, 75 bp, synthetic construct
  source 1..75: mol_type = other DNA
tgcgtgcggcaacgcacgacgtgctggctggcctgaccgcgcgtgaagcgaaagttctgcgtatgcgtttcggta

SEQ ID NO: 181806 - DNA, 75 bp, synthetic construct
  source 1..75: mol_type = other DNA
tataatgagatgaatgttgattccttttgtcgtgttgttttattttatgcaaatttatcaaatgaaaaaaaaatg

SEQ ID NO: 181807 - DNA, 75 bp, synthetic construct
  source 1..75: mol_type = other DNA
attagtatgattgatggtataaaggtttggcgtttcaaaagtggacctttaaaggatgtaggtaaggctaaacgt

SEQ ID NO: 181808 - DNA, 75 bp, synthetic construct
  source 1..75: mol_type = other DNA
attatttgccccatagcacacgtgttggggctaaaatgtttcatgagttaggccttgaattactgagcagaggcc

SEQ ID NO: 181809 - DNA, 75 bp, synthetic construct
  source 1..75: mol_type = other DNA
tggatatgtgcacgttaatggatatgatgcagaattattgcaatcagctataaaattagctacggaagagaaatt

SEQ ID NO: 181810 - DNA, 75 bp, synthetic construct
  source 1..75: mol_type = other DNA
attagattatgaattactatcaaaagctgctgaaatacgtccaattgtagctaaaaaacactattaccaaaccgg

SEQ ID NO: 181811 - DNA, 75 bp, synthetic construct
  source 1..75: mol_type = other DNA
cttaaccgccaccgttattgttggcaaaaattgtgatgcattaaacgcacttgatcacatacgcagcgcattggg

SEQ ID NO: 181812 - DNA, 75 bp, synthetic construct
  source 1..75: mol_type = other DNA
ggatgaaatggatatcaagcgcattctaaaaacaaaggaagcacttgataacatcaggaattttattgataaaca

SEQ ID NO: 181813 - DNA, 75 bp, synthetic construct
  source 1..75: mol_type = other DNA
acaattggacctgcattttttcatgcaagaacaagagcatggacgatgaggctcacgccttaccccgaaaatcaa

SEQ ID NO: 181814 - DNA, 75 bp, synthetic construct
  source 1..75: mol_type = other DNA
tacgatgagtggggcaacctgctgaatgaagagaacccgcatcagctgcagcagcttatccgcctgccggggcag

SEQ ID NO: 181815 - DNA, 75 bp, synthetic construct
  source 1..75: mol_type = other DNA
gcgtaacgagggctacattctctcaatgatttttatttgttggcagaacggaaaacattacgttttgtccatact

SEQ ID NO: 181816 - DNA, 75 bp, synthetic construct
  source 1..75: mol_type = other DNA
aactctataaagcagtgcgcacactggcagaaaacaccgacgaatccattgtaaacattagcgccttatgccgtt

SEQ ID NO: 181817 - DNA, 75 bp, synthetic construct
  source 1..75: mol_type = other DNA
tcaaaaaaatggaagtcttatcttcaattaaaaatagaaagcctacaagagaagcatttgcattcatttttgacg

SEQ ID NO: 181818 - DNA, 75 bp, synthetic construct
  source 1..75: mol_type = other DNA
tctagatgaacataatgaaagtattgaaagtatattgagtttggccgcaaataaaccaccaagattatggtcgga

SEQ ID NO: 181819 - DNA, 75 bp, synthetic construct
  source 1..75: mol_type = other DNA
cggtgaagcttgcagaattcctcaatgatgcaagtaataccggtaatattgtagatgtaggtgacaaatacttta

SEQ ID NO: 181820 - DNA, 75 bp, synthetic construct
  source 1..75: mol_type = other DNA
gaagagcgggatttagtgttccgtgagcgtttgttgtcagtcacatcagcgatcaaaaacaaattgaagagcctg

SEQ ID NO: 181821 - DNA, 75 bp, synthetic construct
  source 1..75: mol_type = other DNA
agctgataagcggtgaaataaacacctattcaatggaaaaacgctactacaaccgcaatggcgatgttgtctggg

SEQ ID NO: 181822 - DNA, 75 bp, synthetic construct
  source 1..75: mol_type = other DNA
tttgttgaccacttcacttatactcgccagggatatgcaattgaagcaattaccgccacgattgactggataaaa

SEQ ID NO: 181823 - DNA, 75 bp, synthetic construct
  source 1..75: mol_type = other DNA
gttctgttcactctactttgcccacatcttcttcccttccgggaacacgacgactccacactacaaacagcaggt

SEQ ID NO: 181824 - DNA, 75 bp, synthetic construct
  source 1..75: mol_type = other DNA
gttctgttcactctactttgcccacatcttcttcccttccgggaacacgacgactcaactactacaaacagcagg

SEQ ID NO: 181825 - DNA, 75 bp, synthetic construct
  source 1..75: mol_type = other DNA
attgacgggcagacactggccgggtttgacgagaatgttacagacaatctctacaaactgtggaacagaatggct

SEQ ID NO: 181826 - DNA, 75 bp, synthetic construct
  source 1..75: mol_type = other DNA
tactggaaaaaactctaactcggtggccagtttttgttgaccacttcacttatactcgccagggatatgcaattg

SEQ ID NO: 181827 - DNA, 75 bp, synthetic construct
  source 1..75: mol_type = other DNA
ttattaaacgtatctgatgcgaggtccggtctgcataaagctgagtggttcgctatcgacagtaatggcgtccgt

SEQ ID NO: 181828 - DNA, 75 bp, synthetic construct
  source 1..75: mol_type = other DNA
cgacaaagcgctgctcggcacccagtcgggtgcgggattcctcggcgcggtggtgctggggctggcgattggcta

SEQ ID NO: 181829 - DNA, 75 bp, synthetic construct
  source 1..75: mol_type = other DNA
gtgccattaaatgaaggcattcaactcccggttcccccgaaaaaagacgtccaggtaccggagaaaacactcaca

SEQ ID NO: 181830 - DNA, 75 bp, synthetic construct
  source 1..75: mol_type = other DNA
cacaaatattttttgattatatgctagaactatatagttcgctgcttgaggaagccaataaacgtgtattaccta

SEQ ID NO: 181831 - DNA, 75 bp, synthetic construct
  source 1..75: mol_type = other DNA
ggggcctcttcaggtaatctggtcgagtggttcgatttctatgtctactcgttctgttcactctactttgcccac

SEQ ID NO: 181832 - DNA, 75 bp, synthetic construct
  source 1..75: mol_type = other DNA
atgaaagaaccctacaatgccaaccctaattaccctatgcatcgtattcttctcgaagagataaaccaccatctg

SEQ ID NO: 181833 - DNA, 75 bp, synthetic construct
  source 1..75: mol_type = other DNA
cgatgatgatatgccagcggtagctggaaaagcatttactgaagatgaagttgattctcagaatactgaaacacc

SEQ ID NO: 181834 - DNA, 75 bp, synthetic construct
  source 1..75: mol_type = other DNA
ccgcagcggcggatcgtgggtggttgcgtcagcatcatggatttgatgctgccggaattgcagctcaggcacggg

SEQ ID NO: 181835 - DNA, 75 bp, synthetic construct
  source 1..75: mol_type = other DNA
cgccagacgctattagcagtcaaaaacaacacgctttcgccgcgcaccggcctgcggcaactcagtgaatttatc

SEQ ID NO: 181836 - DNA, 75 bp, synthetic construct
  source 1..75: mol_type = other DNA
atccttggtgacaagacacgtatgaccgaactggctcgtgccgatgcggcgtttattcgcccggttccgtcatct

SEQ ID NO: 181837 - DNA, 75 bp, synthetic construct
  source 1..75: mol_type = other DNA
gggttctgacttgtagcgcactggaaaaacgtggaatcgatgagatctggcacgccatcatcgacttcaaaaccg

SEQ ID NO: 181838 - DNA, 75 bp, synthetic construct
  source 1..75: mol_type = other DNA
gcttcgggcaaatgacggcggttcaccgtgaggaaagcatcagcctttaccgcagttacgacaaccgtggccagt

SEQ ID NO: 181839 - DNA, 75 bp, synthetic construct
  source 1..75: mol_type = other DNA
ggtcactggtgggttaagcattgacgctattctcaatgtactggatgccactggcgaagatgaaactatctggcc

SEQ ID NO: 181840 - DNA, 75 bp, synthetic construct
  source 1..75: mol_type = other DNA
cacgtcatcaggaactaagtactcagttgctcgacgccatcatgccgttttgtggaaatgcactgcgcctgggcg

SEQ ID NO: 181841 - DNA, 75 bp, synthetic construct
  source 1..75: mol_type = other DNA
tgcagcagcttatccgcctgccggggcagcagtatgatgaggagtccggcctgtattacaaccgccaccgctatt

SEQ ID NO: 181842 - DNA, 75 bp, synthetic construct
  source 1..75: mol_type = other DNA
cggcccgctgccgttcatcctctcccgcacctacagcagttaccggacaaaaacgccgcgccggtgggggcacca

SEQ ID NO: 181843 - DNA, 75 bp, synthetic construct
  source 1..75: mol_type = other DNA
accgacatcgccctgcccgccccgctgccgttcatcctctcccgtacctacagcagttaccggacaaaaacgccc

SEQ ID NO: 181844 - DNA, 75 bp, synthetic construct
  source 1..75: mol_type = other DNA
aaaaagaattaccttccggtgtatttgtcagaaatgaaaaaatcccgtgaagccagaatgtcactgaggaagaaa

SEQ ID NO: 181845 - DNA, 75 bp, synthetic construct
  source 1..75: mol_type = other DNA
aactcggcgacacaccgctggtggagtacacccgcgaccgcctgcaccgggaaacgctgcgccgcttcggccgtt

SEQ ID NO: 181846 - DNA, 75 bp, synthetic construct
  source 1..75: mol_type = other DNA
cactatgacgaagcagaccgcctcacgcaccgcaccgtgaagggtgaaaccgcagagcggtggcggtatgacgaa

SEQ ID NO: 181847 - DNA, 75 bp, synthetic construct
  source 1..75: mol_type = other DNA
gctgctgccagaacgcacagcgatgaaaacgacaaaagaacactggtcagtgcgaatacctatgctgaccagaaa

SEQ ID NO: 181848 - DNA, 75 bp, synthetic construct
  source 1..75: mol_type = other DNA
aaatttacccggggaatacaaactgtaacgacagttcaccacactatgggggataaaatgccagatcaatccgga

SEQ ID NO: 181849 - DNA, 75 bp, synthetic construct
  source 1..75: mol_type = other DNA
ctcagtcgatgatgggccagttatggtggtaagctcccagcgcttacatgatatgttgaatcctacaaaagatac

SEQ ID NO: 181850 - DNA, 75 bp, synthetic construct
  source 1..75: mol_type = other DNA
acctgaacgtaaactacgccccgtaaaatggcttgctcttatctcatccctgctcgttatattacaactggcaat

SEQ ID NO: 181851 - DNA, 75 bp, synthetic construct
  source 1..75: mol_type = other DNA
acggattactggctacagaacgccaggcacgcaccgcaggcgatactgcaactctggctgctgccagaacgcaca

SEQ ID NO: 181852 - DNA, 75 bp, synthetic construct
  source 1..75: mol_type = other DNA
acatcacgtaataccaatatacgcctcaacatctcctgggactcatctcataacaccgcgattggtgcaggggtt

SEQ ID NO: 181853 - DNA, 75 bp, synthetic construct
  source 1..75: mol_type = other DNA
cgcgttacaaaagagacatctttttttcttgttattgataacgttgatcagatcgagtttgatgatatccagtcc

SEQ ID NO: 181854 - DNA, 75 bp, synthetic construct
  source 1..75: mol_type = other DNA
acaggagcattatttcactacccgcctgactgattcgacgattgtcgatatgaaactgcatatgccgcattgcca

SEQ ID NO: 181855 - DNA, 75 bp, synthetic construct
  source 1..75: mol_type = other DNA
cttttgcgcttcttctttctgcgtgtgatgccagccctgaacctgccaaatcgactatggctgtatcatcccaac

SEQ ID NO: 181856 - DNA, 75 bp, synthetic construct
  source 1..75: mol_type = other DNA
caatgatattgaaatccgttctggccgtaaaactggtgatgcaattaaaaatacttaatattgttaataaaaact

SEQ ID NO: 181857 - DNA, 75 bp, synthetic construct
  source 1..75: mol_type = other DNA
actgcgattttcggatggcatatagcattaaccccacacagataaccaaaatactttcaaatactcgctcaagga

SEQ ID NO: 181858 - DNA, 75 bp, synthetic construct
  source 1..75: mol_type = other DNA
tgaatgaagagaacccgcatcagctgcagcagcttatccgcctgccggggcagcagtatgatgaggagtccggcc

SEQ ID NO: 181859 - DNA, 75 bp, synthetic construct
  source 1..75: mol_type = other DNA
cagtcatagtgctgtgtttaacggtgctgggatttacgcttctggtcggagactcgctgtgtgagttcaccgtaa

SEQ ID NO: 181860 - DNA, 75 bp, synthetic construct
  source 1..75: mol_type = other DNA
ttgttgagctgccgccgccgtgggattcgtggctggatatcgtggttacgggttatccggatgggcgcgatccgg

SEQ ID NO: 181861 - DNA, 75 bp, synthetic construct
  source 1..75: mol_type = other DNA
tccgatggtctcaagctgttacatggtgatactctgattaatgatttaactaatcagaatgatattattgctgtg

SEQ ID NO: 181862 - DNA, 75 bp, synthetic construct
  source 1..75: mol_type = other DNA
atatcatgccattaaccgttttgctttttctttcaatgcttccattacatgccgacaggccagatagacaaaaag

SEQ ID NO: 181863 - DNA, 75 bp, synthetic construct
  source 1..75: mol_type = other DNA
ttctacatatgttgaacaccgtaactccccagcgtttaacgcatttgatttcgatcctattcttattgaaccacc

SEQ ID NO: 181864 - DNA, 75 bp, synthetic construct
  source 1..75: mol_type = other DNA
tggaacaagcggtgttaacaaccccggaagtacatgtctatccacgtgtgggaatatgggaagcgttatttgcgc

SEQ ID NO: 181865 - DNA, 75 bp, synthetic construct
  source 1..75: mol_type = other DNA
tgcgggcagatgcccgcatttcccggcttttttccgaggagtgtccggcgatactgtctattggcagcgagcgtc

SEQ ID NO: 181866 - DNA, 75 bp, synthetic construct
  source 1..75: mol_type = other DNA
ccggtaaatatgatgggcgcttctaagcgtattatggaaatgttcctgatgcgtaaaagtgaacaaatcgccatc

SEQ ID NO: 181867 - DNA, 75 bp, synthetic construct
  source 1..75: mol_type = other DNA
atgagagtttgcatctgattacattcgcggacattgccataaaatatctgaagcaatgcaactatgaaccatatt

SEQ ID NO: 181868 - DNA, 75 bp, synthetic construct
  source 1..75: mol_type = other DNA
catccagcgacaccactggtgaaaaagatttcgaggaattttttaccgacaaagaggtgcttgatatgaagcgct

SEQ ID NO: 181869 - DNA, 75 bp, synthetic construct
  source 1..75: mol_type = other DNA
ccgtaaagccattgatctgctggtagcgtgggggctggtggtccgccgccacggcagcggtacttacctggtgcg

SEQ ID NO: 181870 - DNA, 75 bp, synthetic construct
  source 1..75: mol_type = other DNA
atgcctgcgcctccggccattgccagccagttacggattcaaatcaacgagcagatctacttctcccgtcgcgtt

SEQ ID NO: 181871 - DNA, 75 bp, synthetic construct
  source 1..75: mol_type = other DNA
tcaacctggcggctaagacgaacagtgcgagctctggtgtttacctgaaagatgcaagaattacatccaccaatg

SEQ ID NO: 181872 - DNA, 75 bp, synthetic construct
  source 1..75: mol_type = other DNA
aatttatatcgctctgccgatggttgctttgcagcgtatccgtcattttctgtcgatgatgtcagatactacggt

SEQ ID NO: 181873 - DNA, 75 bp, synthetic construct
  source 1..75: mol_type = other DNA
gcgggcggtgtatgaccgcagcgggacgcaggttcgcgggtttacttatgatgcggagcacgccgggcggatggt

SEQ ID NO: 181874 - DNA, 75 bp, synthetic construct
  source 1..75: mol_type = other DNA
gcgataaaaatcttgtaagaagtaaagataataatcttgaagcattttatctcgcaacacctgatggacgatttg

SEQ ID NO: 181875 - DNA, 75 bp, synthetic construct
  source 1..75: mol_type = other DNA
ttgttttacttcaaaagagaataatcatagtccatctgaaatgttagtcaatgccgataaagcgttatatcaagc

SEQ ID NO: 181876 - DNA, 75 bp, synthetic construct
  source 1..75: mol_type = other DNA
cgtatcacacaccgcacagtgaacggcgaaccggcagagcagtggcggtataacgaccacggctggctgacagaa

SEQ ID NO: 181877 - DNA, 75 bp, synthetic construct
  source 1..75: mol_type = other DNA
gcagagtgaagatgaggggcttatcaccctctggcattacgatgcgtcggaccgtatcacccggcgcacggtgaa

SEQ ID NO: 181878 - DNA, 75 bp, synthetic construct
  source 1..75: mol_type = other DNA
acacgggtggctaaccaccatcagccataccagtgacggccaccgagtgtcggtccactacggctatgacgataa

SEQ ID NO: 181879 - DNA, 75 bp, synthetic construct
  source 1..75: mol_type = other DNA
agaccccaacggcgagtatgcacgtgctttggggccaacgacgaaatttaaaggtagagtatttaaggttgaggc

SEQ ID NO: 181880 - DNA, 75 bp, synthetic construct
  source 1..75: mol_type = other DNA
gaggctgcaatggaatcagaaataaaaccaaacgcaagatttattatattagacccaaatggcgagtatacacgt

SEQ ID NO: 181881 - DNA, 75 bp, synthetic construct
  source 1..75: mol_type = other DNA
ccttatcccaaacaaagggatatccaagattttggtttagtaaatctgccattccctcgaaaaaaaataagttta

SEQ ID NO: 181882 - DNA, 75 bp, synthetic construct
  source 1..75: mol_type = other DNA
agatgatgccttctggggcttaagatgctacgagcttcgcgatggcttttttcctttaaatgatgcccaaatcaa

SEQ ID NO: 181883 - DNA, 75 bp, synthetic construct
  source 1..75: mol_type = other DNA
cacttgctaacaatgctaatgtagccgtagaccctgatagattatttggtcgtcatatagcagtacttggtaata

SEQ ID NO: 181884 - DNA, 75 bp, synthetic construct
  source 1..75: mol_type = other DNA
taaaatgaaaaatttgacgaaagagcagcaacctcattctgatgaccctgacttctgggatgtttggacaagaaa

SEQ ID NO: 181885 - DNA, 75 bp, synthetic construct
  source 1..75: mol_type = other DNA
catcagcagcccgcgacagacccggagttacagctacagcgacaccggcaggctgaccggcgtccacaccacggc

SEQ ID NO: 181886 - DNA, 75 bp, synthetic construct
  source 1..75: mol_type = other DNA
ggggggggcttgggggggacgctgacttcccccggggcagctaggggtgacggggcgggcgcggtgacggggggg

SEQ ID NO: 181887 - DNA, 75 bp, synthetic construct
  source 1..75: mol_type = other DNA
cggcgatatcacggacatcaccacaccggacgggcgggagacgaaattttactataacgacgggaaccagctgac

SEQ ID NO: 181888 - DNA, 75 bp, synthetic construct
  source 1..75: mol_type = other DNA
gggaggccggagagccgctaccggtatgatgataccgggcgggtgacggagcaggtcaacccggaggggctggac

SEQ ID NO: 181889 - DNA, 75 bp, synthetic construct
  source 1..75: mol_type = other DNA
cctgacagcaacgatatcaccggacggtaaacgcagcaccatcgaatatgataaacgcgggcgtccggtgagtgt

SEQ ID NO: 181890 - DNA, 75 bp, synthetic construct
  source 1..75: mol_type = other DNA
cgaacagataagaaatatgagaataaagaagaggcaagggttattacaataattgaatcgcgtgcggcgaaaact

SEQ ID NO: 181891 - DNA, 75 bp, synthetic construct
  source 1..75: mol_type = other DNA
cgctcctgagaatcgaaacagagaatggtgaacaggcgaaggcgcggcaccgtagcctggcggaggtgttgcagg

SEQ ID NO: 181892 - DNA, 75 bp, synthetic construct
  source 1..75: mol_type = other DNA
caggggctggcgacccgtcaggagccggacggtctgccgccggtggagtggctgacgtatggcagcggttatctt

SEQ ID NO: 181893 - DNA, 75 bp, synthetic construct
  source 1..75: mol_type = other DNA
acagcagtcactgccccggactgcagccgcagtgagacacagtatgatgcgtggggaaaggctgtcagcaccacg

SEQ ID NO: 181894 - DNA, 75 bp, synthetic construct
  source 1..75: mol_type = other DNA
accattcgctaccgccgggggatcaccgctgattatgaggtggtctgcggtgacagtgtgtaccgggtgaaacgt

SEQ ID NO: 181895 - DNA, 75 bp, synthetic construct
  source 1..75: mol_type = other DNA
aacggtataaagatgaattgcgacagaagatgggaaaacctgacgttacagattcaaatttgaaaaatattatag

SEQ ID NO: 181896 - DNA, 75 bp, synthetic construct
  source 1..75: mol_type = other DNA
gattgggctgaaggggggatggaacctgtatgcgtatccactgaacccggtgcaacggctggatccgctgggatt

SEQ ID NO: 181897 - DNA, 75 bp, synthetic construct
  source 1..75: mol_type = other DNA
aagacggaaccggggtgaggcggagaataacgcgaaaccggtacggtcagcttcaggcatttacggactgttcag

SEQ ID NO: 181898 - DNA, 75 bp, synthetic construct
  source 1..75: mol_type = other DNA
gaggaaaagaaaaactggatgtccccatcaagtttttatggtgctacgccagtaacacattgatcaatcagcatg

SEQ ID NO: 181899 - DNA, 75 bp, synthetic construct
  source 1..75: mol_type = other DNA
cgcattctgtggtgcggtggtttccgtaatgctggttaagcgtattagccaacgtaagaaagagatgctggcggc

SEQ ID NO: 181900 - DNA, 75 bp, synthetic construct
  source 1..75: mol_type = other DNA
tgccagtacacctcacaggtcagggatcgcagcaaatttgcagagatatcgaaaaattatggttattttatgccg

SEQ ID NO: 181901 - DNA, 75 bp, synthetic construct
  source 1..75: mol_type = other DNA
gttttataagttcttttgcattttctgatgaggttggaggtactaaaaaaacgaagattattatcccgcctgact

SEQ ID NO: 181902 - DNA, 75 bp, synthetic construct
  source 1..75: mol_type = other DNA
gcacgtcaccgccagggctcagagcacagaacccttctgggatgagcgggtgatccgccccatcgtgagcgccac

SEQ ID NO: 181903 - DNA, 75 bp, synthetic construct
  source 1..75: mol_type = other DNA
gtggaagccgtagcgctacaacttgcggggcctattgctatggtgatgctggcagtcactggtgggctggcagta

SEQ ID NO: 181904 - DNA, 75 bp, synthetic construct
  source 1..75: mol_type = other DNA
ccaaaggcagaccacaaaaatggtttttacgtctatgggatgaagaaaaacaaacccatgaatgggagttggggc

SEQ ID NO: 181905 - DNA, 75 bp, synthetic construct
  source 1..75: mol_type = other DNA
tcgttttttacatcctgaacaagatagagcaataactcttcgagaggctgcattattacaaacttttccgagtga

SEQ ID NO: 181906 - DNA, 75 bp, synthetic construct
  source 1..75: mol_type = other DNA
gcgcaggtggcctgacagttggtcttaagatggctggctttgacgttatatcagcagtcgaaaaggagcctattg

SEQ ID NO: 181907 - DNA, 75 bp, synthetic construct
  source 1..75: mol_type = other DNA
ccgcggtgtgttcagagccggtgaaacctaccaccccggtgatacggtgacgtgggggggctcgctgtggcactg

SEQ ID NO: 181908 - DNA, 75 bp, synthetic construct
  source 1..75: mol_type = other DNA
attagaaaatttatctcaagatacgagaactgtacttacaggcttcctttctagtttattatttaaaatggttat

SEQ ID NO: 181909 - DNA, 75 bp, synthetic construct
  source 1..75: mol_type = other DNA
gatgcggatggaaacattgcgtggagcggggagtatgatgagtggggcaaccagctgaatgaagagaacccgcat

SEQ ID NO: 181910 - DNA, 75 bp, synthetic construct
  source 1..75: mol_type = other DNA
tcagggaaaaaatagcatccaaccgcagcacgttcttgcataaggcgtgtctgcggtttttcaactattcagata

SEQ ID NO: 181911 - DNA, 75 bp, synthetic construct
  source 1..75: mol_type = other DNA
agcgagtacagcaatcccagcaagttcaggattatgtaaaacgtgaactaaccgatcttgttcctcataaggtca

SEQ ID NO: 181912 - DNA, 75 bp, synthetic construct
  source 1..75: mol_type = other DNA
ggtgaggtaaaggagtataataaggggaagtctgatcgctactttggtgtgaagctcgaaggagactctaaattt

SEQ ID NO: 181913 - DNA, 75 bp, synthetic construct
  source 1..75: mol_type = other DNA
ggaaatgttccgcctcgaaattctggaggacattgcccgggataaagtcagaactctccattttgtggatgagat

SEQ ID NO: 181914 - DNA, 75 bp, synthetic construct
  source 1..75: mol_type = other DNA
ggctgggacggcgaccgcctgaccacgatacagaacgacagaacccgcatccagacgatttatcagccggggagc

SEQ ID NO: 181915 - DNA, 75 bp, synthetic construct
  source 1..75: mol_type = other DNA
acatggagcaatggaaaacgctaaggtaaaatatttgaagcatgctaacattgtttttaatgttgatattgatga

SEQ ID NO: 181916 - DNA, 75 bp, synthetic construct
  source 1..75: mol_type = other DNA
cgatacagaacgacagaacccgcatccagacgatttatcagccggggagcttcacgccactcatcagggttgaaa

SEQ ID NO: 181917 - DNA, 75 bp, synthetic construct
  source 1..75: mol_type = other DNA
gggtttgctgattcccgcaaccttaaccgccatgctggtgggaattaccgaaccgctggaatttaccttcctgtt

SEQ ID NO: 181918 - DNA, 75 bp, synthetic construct
  source 1..75: mol_type = other DNA
cgcgtctacgtattgcactgcatgacatgtcacaaacgctggatgacgaagtctttaaaaagctgggagcgcacg

SEQ ID NO: 181919 - DNA, 75 bp, synthetic construct
  source 1..75: mol_type = other DNA
gctgaaaatgcccggaatgccggtgagctgggacgatttatgtcggtggcccgtgtggcggcaggtggcggggtt

SEQ ID NO: 181920 - DNA, 75 bp, synthetic construct
  source 1..75: mol_type = other DNA
ccgcagacaccggttgaagccctggaaaaaacgccagtgctccctgcgggaaccgtattcaaaggcgacaactga

SEQ ID NO: 181921 - DNA, 75 bp, synthetic construct
  source 1..75: mol_type = other DNA
atacccggttgcgttccggacatgggcgaaggttgtccagaccagtgccaccacctggcaggaaaccgcgcagac

SEQ ID NO: 181922 - DNA, 75 bp, synthetic construct
  source 1..75: mol_type = other DNA
aaaacagccgccattgaggtactgaaaaaaacgcttatccatacggcactgcatgaagtgccgtatcagatggaa

SEQ ID NO: 181923 - DNA, 75 bp, synthetic construct
  source 1..75: mol_type = other DNA
gcgaaggttatccagaccagtgccaccacctggcaggaaacagcgcagatcggagatgccatcacccattacatc

SEQ ID NO: 181924 - DNA, 75 bp, synthetic construct
  source 1..75: mol_type = other DNA
agccgcagcgcccaggcggcgaaagagattgaaggcttgatcagtgaatcagtcaggttaattgacctgggatcg

SEQ ID NO: 181925 - DNA, 75 bp, synthetic construct
  source 1..75: mol_type = other DNA
ggcaacaggccaggcgttgaaccctgccgcacaagtggaaatgcaggagcagcagaagaaaacggcattagataa

SEQ ID NO: 181926 - DNA, 75 bp, synthetic construct
  source 1..75: mol_type = other DNA
cccctcagcagtttcagcagcagactgaatgggagtcttttcgcagtgccggtatttctgcgctggcatccccgt

SEQ ID NO: 181927 - DNA, 75 bp, synthetic construct
  source 1..75: mol_type = other DNA
gccacccggagttgctctaccgtgaattgacccgcctggcaggcagcctgctgacgttttcactggagcacgatg

SEQ ID NO: 181928 - DNA, 75 bp, synthetic construct
  source 1..75: mol_type = other DNA
cggctctgaggttgttgaagtcgttgtggcgctgccgttgctgagtgccagtggtggcaatctggataatggtca

SEQ ID NO: 181929 - DNA, 75 bp, synthetic construct
  source 1..75: mol_type = other DNA
taacgcatcatttcagattgcggatttagctacccaattgcagatgggcggtaatgcgcttcaggcgttcgctgt

SEQ ID NO: 181930 - DNA, 75 bp, synthetic construct
  source 1..75: mol_type = other DNA
gcccgtaaggcgaaacaggaagaggcggaagcacaacgcaaggccaaacagttagcagcgcagaaggagcaggct

SEQ ID NO: 181931 - DNA, 75 bp, synthetic construct
  source 1..75: mol_type = other DNA
cagatgaaagcccagggctacactgaagagcagatcgatgaatatgtgaacatggaaacggcgtaccgtgatgca

SEQ ID NO: 181932 - DNA, 75 bp, synthetic construct
  source 1..75: mol_type = other DNA
aatatacgattgatgcaaaaacagacaagctactgatcgccggacgccacgctgatgatgcgtttaaccgcattg

SEQ ID NO: 181933 - DNA, 75 bp, synthetic construct
  source 1..75: mol_type = other DNA
gcggcacaagtagaaatgcaggaacagcagaagaaagcggcgttggataaatacaggcaattgggtgttttgggt

SEQ ID NO: 181934 - DNA, 75 bp, synthetic construct
  source 1..75: mol_type = other DNA
acgattgagaatacggcgatgcggttgatgcagagagaatcaaccaggcccggcggaatgctccagggacgcaga

SEQ ID NO: 181935 - DNA, 75 bp, synthetic construct
  source 1..75: mol_type = other DNA
atatccgcctgcgcgaagaggctgacctctggctgtcggtgcgctcggatatcccggcctggcaggttgctgaga

SEQ ID NO: 181936 - DNA, 75 bp, synthetic construct
  source 1..75: mol_type = other DNA
gcaatactgtgtggagtgcagaatacgatgaatggggcaaccagctgaatgaagagaacccgtattacctgtatc

SEQ ID NO: 181937 - DNA, 75 bp, synthetic construct
  source 1..75: mol_type = other DNA
cccgatggggttgaaagggggatggaatttatatcagtatcctttaaatccactacaacaaattgaccctatggg

SEQ ID NO: 181938 - DNA, 75 bp, synthetic construct
  source 1..75: mol_type = other DNA
gcgaccaccggggcctgccgctggcgcttatcagtgaagacggcaatacggcgtggagcgcggaatatgatgaat

SEQ ID NO: 181939 - DNA, 75 bp, synthetic construct
  source 1..75: mol_type = other DNA
tttctgccaggatgaggacgacagcgaggcatggctggcatcacttgctgcttatgctgcgccggagatccgcga

SEQ ID NO: 181940 - DNA, 75 bp, synthetic construct
  source 1..75: mol_type = other DNA
atgttactggcgacccagcactctgccaccggtcaggtgacgcagtggattaaaaaacaattttcgccaaatggc

SEQ ID NO: 181941 - DNA, 75 bp, synthetic construct
  source 1..75: mol_type = other DNA
atttttttaattatattgcgatttttttttcatctcatgccgacgcagttgatgtcaatagcgtacaaaaaagca

SEQ ID NO: 181942 - DNA, 75 bp, synthetic construct
  source 1..75: mol_type = other DNA
agaacaaggacgaatttgcgataatctcctgaaacgcaattttgatgcaaaacgccctaacgagaagtgggttac

SEQ ID NO: 181943 - DNA, 75 bp, synthetic construct
  source 1..75: mol_type = other DNA
gaggacggcatctgcgaccggactttcgacctggtaacgaagccaaaggtcattacgccacagggtaaatcgcgg

SEQ ID NO: 181944 - DNA, 75 bp, synthetic construct
  source 1..75: mol_type = other DNA
gtgcattgcgcgtgccgcacgccgtcgccgcctgattgctcagggcctctacatcgacgaaatggagtccatcct

SEQ ID NO: 181945 - DNA, 75 bp, synthetic construct
  source 1..75: mol_type = other DNA
gcgtcgcgggcgtgacctgacgggatggatgtcgctgtcgcgtaaaccggaggagacgtggtacggctgggacgg

SEQ ID NO: 181946 - DNA, 75 bp, synthetic construct
  source 1..75: mol_type = other DNA
cagccataccgcctgccggggcagcagtatgatgaggagtcggggctgtactataaccgcaaccggtactatgat

SEQ ID NO: 181947 - DNA, 75 bp, synthetic construct
  source 1..75: mol_type = other DNA
ctgtcgaaagatgaacaccccatactgcacagcgatcaaggttggcaatatcagatgtcccggtggcaacgatga

SEQ ID NO: 181948 - DNA, 75 bp, synthetic construct
  source 1..75: mol_type = other DNA
gatcgataacaatgcgaccgggtttattgcatctgataaaaatctgtcactggaagtggtgaatagccttaccaa

SEQ ID NO: 181949 - DNA, 75 bp, synthetic construct
  source 1..75: mol_type = other DNA
tggtcgtctggaagacaataccgccacgggtgtgattgcgtctgacaaaaacctggatctgaacgtggataacag

SEQ ID NO: 181950 - DNA, 75 bp, synthetic construct
  source 1..75: mol_type = other DNA
gtaataggacctgacacgctatggacgtggtgggggcgaggaactaatggtaagttaaaaatggatacagtgcta

SEQ ID NO: 181951 - DNA, 75 bp, synthetic construct
  source 1..75: mol_type = other DNA
ctgacggagcagcgcggctttgatggcaggacgcaacgttaccagtatgacctgaccggaaaactcacgcagagt

SEQ ID NO: 181952 - DNA, 75 bp, synthetic construct
  source 1..75: mol_type = other DNA
atggggccgccgatgcaatgagacattgttacttgatgtgtcgaatgactaagacatttggatcaacaatagctg

SEQ ID NO: 181953 - DNA, 75 bp, synthetic construct
  source 1..75: mol_type = other DNA
ccgggacagaccagcctgtgggggctggcactcagcctgcccgcagacaccggctacccggacccgcgcggggag

SEQ ID NO: 181954 - DNA, 75 bp, synthetic construct
  source 1..75: mol_type = other DNA
tgcgcgataacacactgatactcagtgataacggcggcagaagcctgtattttgagcacctgtttcccggtgagg

SEQ ID NO: 181955 - DNA, 75 bp, synthetic construct
  source 1..75: mol_type = other DNA
aggctggtatcggagacatcgcgctgtggggacgtcatccggtatgcttatgataatccgcacagtgaattaccg

SEQ ID NO: 181956 - DNA, 75 bp, synthetic construct
  source 1..75: mol_type = other DNA
gggtgaacggcagacggtggagaacccggagacaggggagatgctgtgggagcatgagacggggcatgcgtacag

SEQ ID NO: 181957 - DNA, 75 bp, synthetic construct
  source 1..75: mol_type = other DNA
cagggttcagccggggtacgcattggtgcccccaccggcgtggcctgttcggtgtgccccggcggggtgacgtcc

SEQ ID NO: 181958 - DNA, 75 bp, synthetic construct
  source 1..75: mol_type = other DNA
cggctggtactgaccacgcaggcgcagcgggcagaagaagcccggcagcaggccatttccggcgggacggaaccg

SEQ ID NO: 181959 - DNA, 75 bp, synthetic construct
  source 1..75: mol_type = other DNA
gtggcggtataacgaccacggctggctgacagaaatcagccatctcagcgaaggccaccgggtggcggtgcatta

SEQ ID NO: 181960 - DNA, 75 bp, synthetic construct
  source 1..75: mol_type = other DNA
gagaatggcgaacaggcgaaggcgcggcaccggagcctggcggaggtgttgcaggaggacacgggtgtgacgcta

SEQ ID NO: 181961 - DNA, 75 bp, synthetic construct
  source 1..75: mol_type = other DNA
atgatgacgctggcggggaaaaatctccgccttttccagccggtccccggacagagcacaaaggatgtcgccgcc

SEQ ID NO: 181962 - DNA, 75 bp, synthetic construct
  source 1..75: mol_type = other DNA
tttacccggccatgcggggcatggccttgtgggttttcagttatgtggcctcagcgtcgtgtgcgggctgtgccg

SEQ ID NO: 181963 - DNA, 75 bp, synthetic construct
  source 1..75: mol_type = other DNA
ggtgcaggaatcagctgccgccgcagctgcgctggaagaacaggcgagtcgtttaacgcaagcggtttccgcgtt

SEQ ID NO: 181964 - DNA, 75 bp, synthetic construct
  source 1..75: mol_type = other DNA
ggcagcgcaggcacttgatgacctgggaatcacaaccaacgactacaaagaggcgatagccatacttaacgccaa

SEQ ID NO: 181965 - DNA, 75 bp, synthetic construct
  source 1..75: mol_type = other DNA
gtaatgcgcttcaggcgttcgctgtgcagggtgcgcagttattagctggctttggcacgatgggcgcggtagctg

SEQ ID NO: 181966 - DNA, 75 bp, synthetic construct
  source 1..75: mol_type = other DNA
actggcgaaaatccggaaatgatgacgctggcggggaaaaatctccgccttttccagccggtccccggacagagc

SEQ ID NO: 181967 - DNA, 75 bp, synthetic construct
  source 1..75: mol_type = other DNA
tgatcgagtaactgttaatacaaaaacaaataaagtaatggatggtaattctcgtgtatacgagttgaaaaaaag

SEQ ID NO: 181968 - DNA, 75 bp, synthetic construct
  source 1..75: mol_type = other DNA
gtactacgatccgttgcagggacgctatatcacccaggatcccattgggctgaaggggggatggaacctgtatgc

SEQ ID NO: 181969 - DNA, 75 bp, synthetic construct
  source 1..75: mol_type = other DNA
ggaggcggaatacatcccggagaggaaacttcatctttaccactgtgaccaccggggactgccgcaggcgcttat

SEQ ID NO: 181970 - DNA, 75 bp, synthetic construct
  source 1..75: mol_type = other DNA
tgtttgcgctggatatggctgccacgctggcagtgcctttcacaggtgacgggcgggatgctgcggagatcctgc

SEQ ID NO: 181971 - DNA, 75 bp, synthetic construct
  source 1..75: mol_type = other DNA
tgacctgaccggaaaactcacgcagagtgaagacgaggggcttatcaccctctggcactacgatgcgtcggaccg

SEQ ID NO: 181972 - DNA, 75 bp, synthetic construct
  source 1..75: mol_type = other DNA
cggtatatcacccaggatccgatagggttgaaggggggaataaatctatacacgtatccactggcaccaatacgt

SEQ ID NO: 181973 - DNA, 75 bp, synthetic construct
  source 1..75: mol_type = other DNA
atgacagcattatcaatgctaattaatcaaaatcaggcgtttgttgaagataaattcagtgttgggattagtaac

SEQ ID NO: 181974 - DNA, 75 bp, synthetic construct
  source 1..75: mol_type = other DNA
tgaactgaagcgtatggagatcagcaccaacgcgatgtcacgctatgcatctatagcgcgcaacatggtgcccag

SEQ ID NO: 181975 - DNA, 75 bp, synthetic construct
  source 1..75: mol_type = other DNA
gtgtgcttttcgattaagaccggtaacttcaattatgcggcccagtttccggactcacctaatctgaaaagattt

SEQ ID NO: 181976 - DNA, 75 bp, synthetic construct
  source 1..75: mol_type = other DNA
tcatttgataccagataattttcatattggtatcaatgttaattcagacaatattctggaccctgagtttgagca

SEQ ID NO: 181977 - DNA, 75 bp, synthetic construct
  source 1..75: mol_type = other DNA
ttaaccataaaagaactggctgaaaaatttctggcactgaaagaaactgaagtcgccaaaacatcactcaacaca

SEQ ID NO: 181978 - DNA, 75 bp, synthetic construct
  source 1..75: mol_type = other DNA
atagatatcctgcggttatgtgtttcttattcgttaaaacaaatagccattatcaaaggaattgattataaaaca

SEQ ID NO: 181979 - DNA, 75 bp, synthetic construct
  source 1..75: mol_type = other DNA
ttatcaggaaggaattgctgaccggttatcacacgctgaaagtcgggcagaaaacgccggttaagggccgctcag

SEQ ID NO: 181980 - DNA, 75 bp, synthetic construct
  source 1..75: mol_type = other DNA
ttcagtattgcaacattgaacgtgcatcaagattgctgggttgcgagattagcgatctcgtgaatttaggtgtta

SEQ ID NO: 181981 - DNA, 75 bp, synthetic construct
  source 1..75: mol_type = other DNA
tgggacaggaaattgaaaaccgtagctggattagcgataaaacaaaatcattcttctttaagttcatgtcagcac

SEQ ID NO: 181982 - DNA, 75 bp, synthetic construct
  source 1..75: mol_type = other DNA
agatatcgatctgaaagcaggaacaattactatcaggcgcaattatacgaaactcggtgagttcactctacctaa

SEQ ID NO: 181983 - DNA, 75 bp, synthetic construct
  source 1..75: mol_type = other DNA
tttctccagaaatatttattcctgttgcggaatcatctgatttagttgttcccttaacatctcttttgatgaaaa

SEQ ID NO: 181984 - DNA, 75 bp, synthetic construct
  source 1..75: mol_type = other DNA
agtaccttaaaatcactccagaacaaattatccaggcgataaaacatcaagagttcacaccatactttcagccca

SEQ ID NO: 181985 - DNA, 75 bp, synthetic construct
  source 1..75: mol_type = other DNA
cagaacatgggaatctgcattaaaacgagcaaaaattcgccatagaaaagcgtatcagtctcggcatacttatgc

SEQ ID NO: 181986 - DNA, 75 bp, synthetic construct
  source 1..75: mol_type = other DNA
ctttagtcgcccattttgccaccccttttgactttgccgatttaaccctgcgaatggatagcctctcggcattta

SEQ ID NO: 181987 - DNA, 75 bp, synthetic construct
  source 1..75: mol_type = other DNA
ggtcatcttcttatgcacaggaacatcgcatttgctcgttctgccccaggggtaaaaatccgcccttttgagagt

SEQ ID NO: 181988 - DNA, 75 bp, synthetic construct
  source 1..75: mol_type = other DNA
ccgaacttaaagaaaagattcagacccagctggacgccgacgatcagctgctttcgacctataaaaagattccgc

SEQ ID NO: 181989 - DNA, 75 bp, synthetic construct
  source 1..75: mol_type = other DNA
gcaaagctgacgttatcgcatcaatgcagtttcgtcgttattggaaattcaaggggcattacgactcacaatacg

SEQ ID NO: 181990 - DNA, 75 bp, synthetic construct
  source 1..75: mol_type = other DNA
catctgtcattatgcccctccgcacagggggattcatcatgcaggatttttttaacaaatgctcagccagacagg

SEQ ID NO: 181991 - DNA, 75 bp, synthetic construct
  source 1..75: mol_type = other DNA
attgcgcctgctggcgctgtatgtggagcattactgggcggtggctgcgccgcagaatatggcgcataaaaacgc

SEQ ID NO: 181992 - DNA, 75 bp, synthetic construct
  source 1..75: mol_type = other DNA
caggatgactgccgcacatgaactgggacatcttctcatgcacaggaacattgctttcgcgcgttctgctccagg

SEQ ID NO: 181993 - DNA, 75 bp, synthetic construct
  source 1..75: mol_type = other DNA
ttggttatggggcgcaggtaaaactgggaaaaatacctcttccattctttactatcgataatgttctggagcctg

SEQ ID NO: 181994 - DNA, 75 bp, synthetic construct
  source 1..75: mol_type = other DNA
aacggcgaggatcagaggctctaccaggtcaacgccgggaagttcatctacgacatgaccccgcaggagctggca

SEQ ID NO: 181995 - DNA, 75 bp, synthetic construct
  source 1..75: mol_type = other DNA
ggattacgtcgtcgcagaagcgcagcgcggcacgcttgaggcattcaataacctctcgcaacagtcgcaggtgta

SEQ ID NO: 181996 - DNA, 75 bp, synthetic construct
  source 1..75: mol_type = other DNA
atgctaccatctatttcaatcaacaataccagcgcaacttacccagaatccattaatgaaaataacaatgatgaa

SEQ ID NO: 181997 - DNA, 75 bp, synthetic construct
  source 1..75: mol_type = other DNA
agttgagaagactcatgatgatataaataatgctgaatttactgatggtggtattgatgatcgtagtgatattgg

SEQ ID NO: 181998 - DNA, 75 bp, synthetic construct
  source 1..75: mol_type = other DNA
aacaaggaaatgatcttcagcgcattaaaagaaatatatgatggagatcctggttttatcttcgataagatatca

SEQ ID NO: 181999 - DNA, 75 bp, synthetic construct
  source 1..75: mol_type = other DNA
ctggggagtctgctgtttggcctgctgacgtatctgacaaacctttatttcaagattaaagaagataagcgtaag

SEQ ID NO: 182000 - DNA, 75 bp, synthetic construct
  source 1..75: mol_type = other DNA
ctcgcgaggtggacagttacactgaaaaaatggttgaacaagccagtaaagatgagcttatggtcgttataaaat

SEQ ID NO: 182001 - DNA, 75 bp, synthetic construct
  source 1..75: mol_type = other DNA
acatgcacatttccaagatgtgtatagcctattggcaatcttccctaacaacgcacatcagtacgcgaaagatcc

SEQ ID NO: 182002 - DNA, 75 bp, synthetic construct
  source 1..75: mol_type = other DNA
gtggctacgcagcccgcctatgcgcgggttttcttttgcgcgctcgggcgcgagatgggggcagcaagtctttcg

SEQ ID NO: 182003 - DNA, 75 bp, synthetic construct
  source 1..75: mol_type = other DNA
tgagtttgaattactcattgccgatgaggaagagttaccgccagatgttaaggagtatctaaaatcactcgttga

SEQ ID NO: 182004 - DNA, 75 bp, synthetic construct
  source 1..75: mol_type = other DNA
tcaaggtaaaaacttcaaccgcctacctaaaaagtatcgctctatattagataagcatactgataaaagtaagtt

SEQ ID NO: 182005 - DNA, 75 bp, synthetic construct
  source 1..75: mol_type = other DNA
gatgtgacaaacattaaagcgtctggaaacgttacgtgcgtagcagtaaaccaatcatctgatcgcgacctgaaa

SEQ ID NO: 182006 - DNA, 75 bp, synthetic construct
  source 1..75: mol_type = other DNA
atgcattggttagatgtttttttttaaaaaaaaatgcattcaaaatacttcataatagattaaaaggtttttttg

SEQ ID NO: 182007 - DNA, 75 bp, synthetic construct
  source 1..75: mol_type = other DNA
tcaaattctatgcagaaggtgaaaccgttgtcgattctatcgcttccttctcaaaagtcgtacttacaccaaaaa

SEQ ID NO: 182008 - DNA, 75 bp, synthetic construct
  source 1..75: mol_type = other DNA
ttcctattctatgtccaaaaggtcgctgacggaagcagggtactaagggttaacggttcagtaacatgcacaaca

SEQ ID NO: 182009 - DNA, 75 bp, synthetic construct
  source 1..75: mol_type = other DNA
gatcgcttagtgcaaattacaggtgatcagactcgcctttacgctggcaacggtaaaacatatttggaagttggc

SEQ ID NO: 182010 - DNA, 75 bp, synthetic construct
  source 1..75: mol_type = other DNA
tcgagattgcccagatatttcaggaaacccatcaggttatattggctttctgcgcatcatggaaggtgctgctac

SEQ ID NO: 182011 - DNA, 75 bp, synthetic construct
  source 1..75: mol_type = other DNA
ccgccatggcatttaatgagccgcttttactggaacccgcctatgcgcgggttttcttttgcgcgctgggtaaag

SEQ ID NO: 182012 - DNA, 75 bp, synthetic construct
  source 1..75: mol_type = other DNA
cgggcgggactacggcacaggaaagcctatcagtccaggcatacttatgcctgctgggcattatcggcgggagct

SEQ ID NO: 182013 - DNA, 75 bp, synthetic construct
  source 1..75: mol_type = other DNA
atcatatcagtcgagacatacttatgcctgctggtcgctaacagctggtgctaatcctgcattcatagcaaacca

SEQ ID NO: 182014 - DNA, 75 bp, synthetic construct
  source 1..75: mol_type = other DNA
cgaaaaagatctctgaggaaattggagtcagggatatgaaaattatcaagaaatctgactcacggagtggtggca

SEQ ID NO: 182015 - DNA, 75 bp, synthetic construct
  source 1..75: mol_type = other DNA
gtgtcctgaaaaatcaggctgaaatgacaagactgggtaagcagcaccacatcaaggtgcaactacgtgaatatg

SEQ ID NO: 182016 - DNA, 75 bp, synthetic construct
  source 1..75: mol_type = other DNA
ggtctgggaaaaagagagataaccgttaaggcactttcggaaaaatggttggaccttaagaaaattgagatagga

SEQ ID NO: 182017 - DNA, 75 bp, synthetic construct
  source 1..75: mol_type = other DNA
ggaggatattgatttaaaagctaaaacaatgactatccgtcgtaattatacaaaactcggggagttcactctacc

SEQ ID NO: 182018 - DNA, 75 bp, synthetic construct
  source 1..75: mol_type = other DNA
tcagcaattcagtaggtgtaacggttggcggcggagttggggggcattttgcgtatacttatgtagtggatgttg

SEQ ID NO: 182019 - DNA, 75 bp, synthetic construct
  source 1..75: mol_type = other DNA
gcgcgtcgttaaaagagtacatcaataattttgcgcaatggttgatgtcctggcaggcaagcaagaagagagcgg

SEQ ID NO: 182020 - DNA, 75 bp, synthetic construct
  source 1..75: mol_type = other DNA
gccgcctgctactggcacaccttctgctggaacggggcggatatgtttggtgtgggggcgtttaatcgtccgtag

SEQ ID NO: 182021 - DNA, 75 bp, synthetic construct
  source 1..75: mol_type = other DNA
tacgcgacagcgacatccaccccgtcaggtcacgctcccgccgccatacccgtttcgccattcgccgtcccagcg

SEQ ID NO: 182022 - DNA, 75 bp, synthetic construct
  source 1..75: mol_type = other DNA
tgcagcttctccgccaggctgcggcgctgcgctttctcccgctcaccgttgtctgtttcgatgcggatgagcggc

SEQ ID NO: 182023 - DNA, 75 bp, synthetic construct
  source 1..75: mol_type = other DNA
gaataaaattaaagaacttcagcgcctgctaggtaagaaaacgatggtaaataaactgtttaaagaagccgttat

SEQ ID NO: 182024 - DNA, 75 bp, synthetic construct
  source 1..75: mol_type = other DNA
ttacagatacaacggtttcaattccgataactgccagttactacgtctacgatacaaacaaagttaaatctggcg

SEQ ID NO: 182025 - DNA, 75 bp, synthetic construct
  source 1..75: mol_type = other DNA
gctttctgctgctggagtgtacggagctgggtgccgaagaagaaatgggaggtcgccgtggatcagacagcattt

SEQ ID NO: 182026 - DNA, 75 bp, synthetic construct
  source 1..75: mol_type = other DNA
tgccattcaggtgatcattggtctgcatgtatcccagctgcgtgaacagctcgatagcttaattaattctcatca

SEQ ID NO: 182027 - DNA, 75 bp, synthetic construct
  source 1..75: mol_type = other DNA
gctgaaatcgttgttcccggaaggcggttttgccctgcacggtaactcaaaaatctttggtgccgtgggcatttc

SEQ ID NO: 182028 - DNA, 75 bp, synthetic construct
  source 1..75: mol_type = other DNA
tacaccttcctcgaacgtattctgatcccaaccggtttacaccacttcatctacggaccgtttatctttggtccg

SEQ ID NO: 182029 - DNA, 75 bp, synthetic construct
  source 1..75: mol_type = other DNA
aggaaacagaaagtgatatcgaacaaaaaataatttatccgtttctgactaagaaatctgttgatgggcttggca

SEQ ID NO: 182030 - DNA, 75 bp, synthetic construct
  source 1..75: mol_type = other DNA
aactaccgggtacggaaaccggcgagcctttcggctcccccacacagcccgccataaatcgcgaatgtgactgtg

SEQ ID NO: 182031 - DNA, 75 bp, synthetic construct
  source 1..75: mol_type = other DNA
ctgcgcatggcatctgtcaccggaagaagacgagatattcttccagcatccacttgaccagacagcgctgtcgct

SEQ ID NO: 182032 - DNA, 75 bp, synthetic construct
  source 1..75: mol_type = other DNA
ggggggggctttggttccgtcactattattattggtctgggcgctatgctggggcgtatgatcgaacactctggt

SEQ ID NO: 182033 - DNA, 75 bp, synthetic construct
  source 1..75: mol_type = other DNA
gggaatgtaagtcagatttacatgaaactgcacttgcctatactcggtattgtgggacagagcgcggtaaattag

SEQ ID NO: 182034 - DNA, 75 bp, synthetic construct
  source 1..75: mol_type = other DNA
taaatgagatatcacctgttgataaaaattgtgcaaattttttagaggaattttcgtttacagctctctcgaaat

SEQ ID NO: 182035 - DNA, 75 bp, synthetic construct
  source 1..75: mol_type = other DNA
cagcattatcggcgcaattatcatttccggcattgtgacggcgctgcataaccgtctgttcgataaaaaactgcc

SEQ ID NO: 182036 - DNA, 75 bp, synthetic construct
  source 1..75: mol_type = other DNA
gctttctgttgctggagtgtacagagctgggcgaatttacgcagagtcacggaggcagcaatggcgactcccttt

SEQ ID NO: 182037 - DNA, 75 bp, synthetic construct
  source 1..75: mol_type = other DNA
acagtttgaatcgctcttttgcagcactctttgatgccgggcttgaaggagattcgctgctgagtgcaataagtt

SEQ ID NO: 182038 - DNA, 75 bp, synthetic construct
  source 1..75: mol_type = other DNA
cgatttcaccattgattctggtggggctgttgaacttgttgtttacctggtggatccctgtttggtacggtgcga

SEQ ID NO: 182039 - DNA, 75 bp, synthetic construct
  source 1..75: mol_type = other DNA
aaatcagcctgcatggcgctggggcaattggcgatatggtaaacctggttgcgaataagcagtggggaaaagcac

SEQ ID NO: 182040 - DNA, 75 bp, synthetic construct
  source 1..75: mol_type = other DNA
aagaggtcattatcgacccgaatattattcccgatattgcggtggatgatgccagtgtaatgctggagatcccgg

SEQ ID NO: 182041 - DNA, 75 bp, synthetic construct
  source 1..75: mol_type = other DNA
ttcacaaactatcctgtgaacgtgacacgatggtggaatattgttccaggacagccaggatcacagagactggaa

SEQ ID NO: 182042 - DNA, 75 bp, synthetic construct
  source 1..75: mol_type = other DNA
atgccatttgctcgttatttctgcattttcataaatgttggtttaggagaagcggcgaaaagggatgtgggcacg

SEQ ID NO: 182043 - DNA, 75 bp, synthetic construct
  source 1..75: mol_type = other DNA
aggaatactggatttacgtgcagatgctttgatcagttagatggaactactgtgccaagcacaagtaacttttac

SEQ ID NO: 182044 - DNA, 75 bp, synthetic construct
  source 1..75: mol_type = other DNA
aaaccaaagatacaaaaattaaagcaatcaccctaccctcggccttttccgcaatgttagggattactgaagccg

SEQ ID NO: 182045 - DNA, 75 bp, synthetic construct
  source 1..75: mol_type = other DNA
cgcaattctggccgcgatgaacaccgcctcagaatatggcttcggtgcggttatcgccgctctgcccggttttct

SEQ ID NO: 182046 - DNA, 75 bp, synthetic construct
  source 1..75: mol_type = other DNA
ccggacggcggcgtgatgcctctcgcagctggcaaacgcattcacgggattgtggtgcgcgacatttacggcgaa

SEQ ID NO: 182047 - DNA, 75 bp, synthetic construct
  source 1..75: mol_type = other DNA
ctaatcttgggttaggaaccgttgcaacaaaaaacgtgggaaatagtgctgggcaaatacctgatatgtcttact

SEQ ID NO: 182048 - DNA, 75 bp, synthetic construct
  source 1..75: mol_type = other DNA
catgactctggcgaaaagagactgggacatgatcattcaggatctttataaagatgcgtggttactgcccaaatt

SEQ ID NO: 182049 - DNA, 75 bp, synthetic construct
  source 1..75: mol_type = other DNA
ttattgcggatgacgccacaagagagtgacaaagttgcagcctatttataccaaaaattcgagaatgacgatgat

SEQ ID NO: 182050 - DNA, 75 bp, synthetic construct
  source 1..75: mol_type = other DNA
cgtggattgcggcattgttggggacctggcttattccgcgctattccgataaaaccggcgaacggcgcaatgtcg

SEQ ID NO: 182051 - DNA, 75 bp, synthetic construct
  source 1..75: mol_type = other DNA
gcaatgatagtcattgaggatttgaaggtcagcaacatgtcaaagtcagcagcgggtacggtccgccagccgggg

SEQ ID NO: 182052 - DNA, 75 bp, synthetic construct
  source 1..75: mol_type = other DNA
aaaggcttctcaatgaactggatcacggtgacgtggatgtgaacgcggttactgagcttttaaataggtacaatc

SEQ ID NO: 182053 - DNA, 75 bp, synthetic construct
  source 1..75: mol_type = other DNA
ttacgggagcacggatgacaacaattgacatcatgaacctgttgaacgcgaatcttccggcaaataagaaacacc

SEQ ID NO: 182054 - DNA, 75 bp, synthetic construct
  source 1..75: mol_type = other DNA
tgtaaacgtgaaagtattttgaagactgatttatttccagaggacatggggctggtgctttatttcctctgtgtg

SEQ ID NO: 182055 - DNA, 75 bp, synthetic construct
  source 1..75: mol_type = other DNA
tgcccgttgttctgtccggtgccattcacctgtttaagcccctgtcgccgggggcatagacagccacaacctgcc

SEQ ID NO: 182056 - DNA, 75 bp, synthetic construct
  source 1..75: mol_type = other DNA
gttacactcagcgcattgagcgacataatctgaatctgagacaacacctggcaaggccgggacggaagtcactgt

SEQ ID NO: 182057 - DNA, 75 bp, synthetic construct
  source 1..75: mol_type = other DNA
ccagatagataccgagctgagtaatgaagcttatgcgttaggtgccggtattttctttgtggtgtatgcgcttct

SEQ ID NO: 182058 - DNA, 75 bp, synthetic construct
  source 1..75: mol_type = other DNA
cgcaaactgggggccagaacctggattggtacgacaacactgctgtggggatttctttcggcagccatggcatgg

SEQ ID NO: 182059 - DNA, 75 bp, synthetic construct
  source 1..75: mol_type = other DNA
cagcgatgcggcaggcttgctgatgctggcagcggtggcggtcatcggttcgctgattattttcactctgcgtgt

SEQ ID NO: 182060 - DNA, 75 bp, synthetic construct
  source 1..75: mol_type = other DNA
gcaatcccgctgctgaaattccccgatatgccggaactggtcgtcattgggctggcctgcgccctgggcattctg

SEQ ID NO: 182061 - DNA, 75 bp, synthetic construct
  source 1..75: mol_type = other DNA
tggggatcgacagccgtaatgatattcctgaggggattgcgacgctgggcgcttttatgggttattcccattcac

SEQ ID NO: 182062 - DNA, 75 bp, synthetic construct
  source 1..75: mol_type = other DNA
cggcgtgcttgatgttagaggtggtacggcaactaatattactcagcacgatggagccgctttaaaagtaacgac

SEQ ID NO: 182063 - DNA, 75 bp, synthetic construct
  source 1..75: mol_type = other DNA
ttaacggggttcaccgctgataaccccgaatatcatttatccaatggcatggaatcgaaatcagtcgatacccgc

SEQ ID NO: 182064 - DNA, 75 bp, synthetic construct
  source 1..75: mol_type = other DNA
gtgataaagtctgcgatcgcgatttttggccgcagattgaactctatatccgcgatattgttagtcagtttcgtg

SEQ ID NO: 182065 - DNA, 75 bp, synthetic construct
  source 1..75: mol_type = other DNA
cagtggggactggtacgcggcaaaacccagacgtggttaccctggcctgtggtgatgaaaaattccacggactac

SEQ ID NO: 182066 - DNA, 75 bp, synthetic construct
  source 1..75: mol_type = other DNA
gtaccagaggagctcatagtggactgcctttttatcgggtggatggaccgttgcagacgatgaaaataacgggta

SEQ ID NO: 182067 - DNA, 75 bp, synthetic construct
  source 1..75: mol_type = other DNA
gtataacacccgtaataatgtcaccaccgatgcgggtgccgggtttgagcagacgctgaccggaatgacagtggg

SEQ ID NO: 182068 - DNA, 75 bp, synthetic construct
  source 1..75: mol_type = other DNA
gaggctaattatgttgtgctggaaaataccggcgaactgacggtagtggctaaaacctcggcgaaaaatactacc

SEQ ID NO: 182069 - DNA, 75 bp, synthetic construct
  source 1..75: mol_type = other DNA
acggcaggcagtctgacaatgaatgtggccggtaccctgctgaacagtgcgctgatttatgcggggaataacctg

SEQ ID NO: 182070 - DNA, 75 bp, synthetic construct
  source 1..75: mol_type = other DNA
cccggaccccatcccaaatccaaagccagacccaaaacccgatccaaagccagacccaaatccaaaaccagaccc

SEQ ID NO: 182071 - DNA, 75 bp, synthetic construct
  source 1..75: mol_type = other DNA
catccagaacagcggtgccgctctccagacgagcacggctaacggtattgaaatcagcggtactcaccagtacgg

SEQ ID NO: 182072 - DNA, 75 bp, synthetic construct
  source 1..75: mol_type = other DNA
ttgtccagaaggaggctaaaacagatagcaccacttaataatggcggcgttctggaggttcaggacggtggtgag

SEQ ID NO: 182073 - DNA, 75 bp, synthetic construct
  source 1..75: mol_type = other DNA
attccacgctgactatgcctcgatcacactgaacacattgggcatcccacaactagggttgcgtgaacatgttca

SEQ ID NO: 182074 - DNA, 75 bp, synthetic construct
  source 1..75: mol_type = other DNA
acgtaataaaactggttaacagtattgataaaatcggctttatccagactacggcggtggacgacctcaatgaac

SEQ ID NO: 182075 - DNA, 75 bp, synthetic construct
  source 1..75: mol_type = other DNA
cgacactattgatgccatgggtgataaggctgcaacagaagataaaacgtttgaagcctgccgaagtgctatcac

SEQ ID NO: 182076 - DNA, 75 bp, synthetic construct
  source 1..75: mol_type = other DNA
taatgtttataaggaggaaatagtacaacttgggttagcttcactttttacaatacattcagatccaacaggctc

SEQ ID NO: 182077 - DNA, 75 bp, synthetic construct
  source 1..75: mol_type = other DNA
cggaggaaaaatatacagggatgcatcatcatcactggaaaatgttttgattttgggacttcctgctggtgcatc

SEQ ID NO: 182078 - DNA, 75 bp, synthetic construct
  source 1..75: mol_type = other DNA
atgtactcagcacatccctgggatttggtgggcaaaactctgctcttatcttttctaaatacaacaaaaggttat

SEQ ID NO: 182079 - DNA, 75 bp, synthetic construct
  source 1..75: mol_type = other DNA
ccccaatactttaagtgatcacgtaataatagaccgcgaaacaatacaatttctgattgttcttaccagccatta

SEQ ID NO: 182080 - DNA, 75 bp, synthetic construct
  source 1..75: mol_type = other DNA
gataatttccatatcactgaaatgccaatgagtcaggagcctttcttcatcattgccttcggttatgtgaaaaaa

SEQ ID NO: 182081 - DNA, 75 bp, synthetic construct
  source 1..75: mol_type = other DNA
ataaaaaatggtgagctggttgaagtgcttatcggggatgagcccgtgctcaccggatatgtggaggcactgccg

SEQ ID NO: 182082 - DNA, 75 bp, synthetic construct
  source 1..75: mol_type = other DNA
tgtgctggctaccgcggctggtcgggcctcgtcactggcctttatgggggcgtggcgcaacgatcgtcgctataa

SEQ ID NO: 182083 - DNA, 75 bp, synthetic construct
  source 1..75: mol_type = other DNA
gacccgcccagaatatctctccatttggaatgcgctacgccaggctgagcgcctgctgaatctacgtaatcatta

SEQ ID NO: 182084 - DNA, 75 bp, synthetic construct
  source 1..75: mol_type = other DNA
acatcattcggcttatttagctgttaccttaacagagaaaatatcttctatatttttatagtcggtttttctttg

SEQ ID NO: 182085 - DNA, 75 bp, synthetic construct
  source 1..75: mol_type = other DNA
agccgcagatattatcgctgcagctaatatgaagcgaagtgaaataaatactaatatagactctcttagcaagaa

SEQ ID NO: 182086 - DNA, 75 bp, synthetic construct
  source 1..75: mol_type = other DNA
atggatgaagaaagggtgttttcactcagctatgaacaactgacccggtttgcggaacaacgcatccggaaatgc

SEQ ID NO: 182087 - DNA, 75 bp, synthetic construct
  source 1..75: mol_type = other DNA
gacccggtgtacacgccggcgcgaaaaatccacctgtaccactgcgaccatcgcggcctgccgctggcccttatc

SEQ ID NO: 182088 - DNA, 75 bp, synthetic construct
  source 1..75: mol_type = other DNA
ctataaatttagggctatttaaaaactgccaagactggtctaatgattctttagaaacatgtaagatgaagtgct

SEQ ID NO: 182089 - DNA, 75 bp, synthetic construct
  source 1..75: mol_type = other DNA
aacgatatggaactatggatcacggggccataggaacagagctaatggggaatacatattacgaggcatgtaaaa

SEQ ID NO: 182090 - DNA, 75 bp, synthetic construct
  source 1..75: mol_type = other DNA
ctgccttctggtcgtgcgtataacattaccaacggcgaacatcgcactctgcgcagtatcgtgcagaaattgatc

SEQ ID NO: 182091 - DNA, 75 bp, synthetic construct
  source 1..75: mol_type = other DNA
gaatttgcccgcagcaaagccgccagcgaagaggtgatcaatatgctttcgcagaccaacccacaaacgcgcttt

SEQ ID NO: 182092 - DNA, 75 bp, synthetic construct
  source 1..75: mol_type = other DNA
tttcctgttccagcaacaggcgctttcggttcaggataaaaccactctgcaaattaagccggaaaacactatcaa

SEQ ID NO: 182093 - DNA, 75 bp, synthetic construct
  source 1..75: mol_type = other DNA
gtgttcgtgataatttccgatgccctgcgttatgaagtggcggaggagctggggaatcaaatcaataccgagaaa

SEQ ID NO: 182094 - DNA, 75 bp, synthetic construct
  source 1..75: mol_type = other DNA
aaacgcacgcaggcgctgaaaaacctggtgacagaacaggaagatgaagcctcgctggataagaaaatgattgcg

SEQ ID NO: 182095 - DNA, 75 bp, synthetic construct
  source 1..75: mol_type = other DNA
tttatgccaagaagtatttggcaaacgaaaccgactaatttaggtattttagcggcagaacatcaaggttacttc

SEQ ID NO: 182096 - DNA, 75 bp, synthetic construct
  source 1..75: mol_type = other DNA
gattaaacgtgaaatgttcgccaaactgcgcaccaaccgctttatgaaagctaaaggcagcgacagtgcggcggt

SEQ ID NO: 182097 - DNA, 75 bp, synthetic construct
  source 1..75: mol_type = other DNA
aaatatatatcgcaacaagagaaggatgtcgtcctaaaggtctataaatcagtaagtaaaataattagtggagtt

SEQ ID NO: 182098 - DNA, 75 bp, synthetic construct
  source 1..75: mol_type = other DNA
tggacgaaggtgatgcgatcaaagcgggccaggtgctgggcgaactggatcacaagccgtatgagattgccctga

SEQ ID NO: 182099 - DNA, 75 bp, synthetic construct
  source 1..75: mol_type = other DNA
atagtcattgaaatcggaggattctccataggtggtggtggcagaggacggtttggaaaaatatataccataaat

SEQ ID NO: 182100 - DNA, 75 bp, synthetic construct
  source 1..75: mol_type = other DNA
catatactgtgcgtatcgtaaaaaaaggtgctgttcccgaagaccgggaaaccctgtattgggcggtctccaact

SEQ ID NO: 182101 - DNA, 75 bp, synthetic construct
  source 1..75: mol_type = other DNA
gcttttttaactccgtgtactgtcggttatttgaccaccgctcgcttactcccgagcggctttttatctttagct

SEQ ID NO: 182102 - DNA, 75 bp, synthetic construct
  source 1..75: mol_type = other DNA
tgtcatttttagcataagcggattaaattcgtatattccttcaattatacctttttatgatttagtggatgaaag

SEQ ID NO: 182103 - DNA, 75 bp, synthetic construct
  source 1..75: mol_type = other DNA
tatataatttgtacacgagatattttttctgactccgatacagaacgttatcttagtatattagaatattataga

SEQ ID NO: 182104 - DNA, 75 bp, synthetic construct
  source 1..75: mol_type = other DNA
aatcggcgttccgtgggaagaactggaatgaaaaaaccaagttagggcagtaccgaaagatggttatgaacggtg

SEQ ID NO: 182105 - DNA, 75 bp, synthetic construct
  source 1..75: mol_type = other DNA
cccgtatctcaacgctcaagcaggttgacggctttggtattcaaaggcaggtaaacacaatcaatcagtttttac

SEQ ID NO: 182106 - DNA, 75 bp, synthetic construct
  source 1..75: mol_type = other DNA
ttatatctgggttggtcaacaggggtactactatcttagagatagaaaccggaatgacatatagtagatatatac

SEQ ID NO: 182107 - DNA, 75 bp, synthetic construct
  source 1..75: mol_type = other DNA
aaggggggacagcagtctaccattcgcctgtcgaaacgatagccgcgtttgatgatgctttcaatgcaggcaggg

SEQ ID NO: 182108 - DNA, 75 bp, synthetic construct
  source 1..75: mol_type = other DNA
aagagaattgctgccccttatttcacatgcatcaatgtatattattccagacgtcggacatctcttgcctctgga

SEQ ID NO: 182109 - DNA, 75 bp, synthetic construct
  source 1..75: mol_type = other DNA
gtttctggtaatccagatagtgacgcatgggaatactggaaaagttttttggatggtacaataggattggttgac

SEQ ID NO: 182110 - DNA, 75 bp, synthetic construct
  source 1..75: mol_type = other DNA
cagcctggaaaaacaaggtaactgcgtacacccgaaagcgttgttcacggattttgaaatcataatagacccgtc

SEQ ID NO: 182111 - DNA, 75 bp, synthetic construct
  source 1..75: mol_type = other DNA
tagttatttcttgtctctgctctgacggtgtgtttgcagagtctagcaggcagataccgtacccggaaaaaaacc

SEQ ID NO: 182112 - DNA, 75 bp, synthetic construct
  source 1..75: mol_type = other DNA
gtttactcaggaccagaacggcaccctgacggaaatccgtgtcggcccacctgatgcttatctgcctgagcccga

SEQ ID NO: 182113 - DNA, 75 bp, synthetic construct
  source 1..75: mol_type = other DNA
gactgtgcagccgaaccgacacagtttaacggacgatcgctggttcagattgcgcaggcgcttgctgcgcctttc

SEQ ID NO: 182114 - DNA, 75 bp, synthetic construct
  source 1..75: mol_type = other DNA
gatgtggtaatgccgggcatcgggctttaccgcattcaggcggaccgctcaggtgattatgccggtgcccgcgaa

SEQ ID NO: 182115 - DNA, 75 bp, synthetic construct
  source 1..75: mol_type = other DNA
agccaacttgtcgtcaaaatcggtgttgcaaaaacgggagtgaccatagattccgtttgccaagcggcccccata

SEQ ID NO: 182116 - DNA, 75 bp, synthetic construct
  source 1..75: mol_type = other DNA
gagatgaatgatgcacaagggaggatggttaaggatatgccgctgatggtgccgccaggagtgcagctgtctgta

SEQ ID NO: 182117 - DNA, 75 bp, synthetic construct
  source 1..75: mol_type = other DNA
acgagatttatcgccgtcagcgggagatgaaggaaacactggcggggctggatgacctgaacaccatcagaagtc

SEQ ID NO: 182118 - DNA, 75 bp, synthetic construct
  source 1..75: mol_type = other DNA
agcaggtaaagttgtcaatgcaacaactggatgagctacttactgcaatggttcaggcgcaggttgatcgcaatg

SEQ ID NO: 182119 - DNA, 75 bp, synthetic construct
  source 1..75: mol_type = other DNA
acgcgatttatcgccgccagcgggagatgaaggaagagctgaataatctggaggatttgggatcaattcgggcgt

SEQ ID NO: 182120 - DNA, 75 bp, synthetic construct
  source 1..75: mol_type = other DNA
atcaccaatcccggctcccgcccctggctgatgcaggcctggcttgaggatgaaaacggcgtcagggaggggcat

SEQ ID NO: 182121 - DNA, 75 bp, synthetic construct
  source 1..75: mol_type = other DNA
cctctgatggcacgttgttaacccgcgcggtagaaccgggcacggtgctcaatgaaggcggcacagtgtttaccg

SEQ ID NO: 182122 - DNA, 75 bp, synthetic construct
  source 1..75: mol_type = other DNA
aaattattgcccttgtccgcgaggccgccgctaacggtgcccggaaaagtcaggcttgtaggtgtatcggtattt

SEQ ID NO: 182123 - DNA, 75 bp, synthetic construct
  source 1..75: mol_type = other DNA
accgctattgtaattaaaaataaaaacggaaatgattacttatctctcggttactacgatcaggacgactaccac

SEQ ID NO: 182124 - DNA, 75 bp, synthetic construct
  source 1..75: mol_type = other DNA
gatttaccgtggaacccgcggtgcagcagcgttttgaaaacgcctcaaaggatagcaccgaacttacaaaaaaat

SEQ ID NO: 182125 - DNA, 75 bp, synthetic construct
  source 1..75: mol_type = other DNA
ttcctggtgctcggctatcatgatgttgaggatggcgccgccgaccagcgctacctctccgtgcgcaccagcgcg

SEQ ID NO: 182126 - DNA, 75 bp, synthetic construct
  source 1..75: mol_type = other DNA
gagctaaaagaggtcccggaaagaatgctcagcacgttgaaaacgcatttcactcaacaggatttcgacttcctg

SEQ ID NO: 182127 - DNA, 75 bp, synthetic construct
  source 1..75: mol_type = other DNA
ccgcccattatccgaagtgcttaacccacgttggaaggatattactgaaccctttcaaaatgaattcagcggtat

SEQ ID NO: 182128 - DNA, 75 bp, synthetic construct
  source 1..75: mol_type = other DNA
ttccgttggctggtgatggataagtttggtaaacaggtcgctgacgatatcgattggtccaatgcccgtgtgatt

SEQ ID NO: 182129 - DNA, 75 bp, synthetic construct
  source 1..75: mol_type = other DNA
tcataattcagcaaattcatttcatcatgccgccgtgatgcactgccttgcacacgcgccggaaaaagtccgcta

SEQ ID NO: 182130 - DNA, 75 bp, synthetic construct
  source 1..75: mol_type = other DNA
caggcagaaatggcgttaccggtacatgttgaagcatggctgaacaatagaccaccggctccggtcattgttcag

SEQ ID NO: 182131 - DNA, 75 bp, synthetic construct
  source 1..75: mol_type = other DNA
tctggggaaacgctgtcaatacatccagtgggggaagggggaaagaattacgccaaacaatactgattgtaatta

SEQ ID NO: 182132 - DNA, 75 bp, synthetic construct
  source 1..75: mol_type = other DNA
accatgggttgacatgtccatcaacaacagattgctcagatagatgtagtgattatattaatccagagcataaaa

SEQ ID NO: 182133 - DNA, 75 bp, synthetic construct
  source 1..75: mol_type = other DNA
acccggacggaacgggaaacctgaacgatatggagcacctgaaacagtcagtcagggacatcctgaccaccccgc

SEQ ID NO: 182134 - DNA, 75 bp, synthetic construct
  source 1..75: mol_type = other DNA
gcacattaagcaatccgtaaaagatattctgaccacgccggtaggtacgcgcgtgatgcgccgcgattatggctc

SEQ ID NO: 182135 - DNA, 75 bp, synthetic construct
  source 1..75: mol_type = other DNA
attacccgcatctctgaaacatcttgatgtagataacaaccaactaaccatgcttcctgaattgcctgcattgct

SEQ ID NO: 182136 - DNA, 75 bp, synthetic construct
  source 1..75: mol_type = other DNA
gtgtgtaccattgtgctgtgttggtgcgggaatgtcatgatgcccgtaaatcagtaccaaaggtgcagtactata

SEQ ID NO: 182137 - DNA, 75 bp, synthetic construct
  source 1..75: mol_type = other DNA
gcttctggaagacggcagcgttaagtccagagtgattaaccacagcccggtaacattgagcgcgcagcagattga

SEQ ID NO: 182138 - DNA, 75 bp, synthetic construct
  source 1..75: mol_type = other DNA
cgtgaccgcgttgctccggcagttaagcctatgcaaatcattgaacctgaaggtaaaaattacaccattactggc

SEQ ID NO: 182139 - DNA, 75 bp, synthetic construct
  source 1..75: mol_type = other DNA
tattgaccctagcgcacgcggtaaaaccatgttattcggtcattggtgttcggaaagcgaagtaccagatcctta

SEQ ID NO: 182140 - DNA, 75 bp, synthetic construct
  source 1..75: mol_type = other DNA
tgatacgctgtggcactgttccagctttacctcgccgtggggaacgcagcaggctttcgatctggcaaacgttcg

SEQ ID NO: 182141 - DNA, 75 bp, synthetic construct
  source 1..75: mol_type = other DNA
cagagcaacaatcagctctttatccccttaagtacattattcagattcaagctaagcagtaacattgacaatgtt

SEQ ID NO: 182142 - DNA, 75 bp, synthetic construct
  source 1..75: mol_type = other DNA
caatgatcaggcaaaaatgatagtgctcaatgagcttaagccttctggcgctatctacaactacattaacaagcg

SEQ ID NO: 182143 - DNA, 75 bp, synthetic construct
  source 1..75: mol_type = other DNA
aggccgcaatgggatgggtaaacggaggggcaggaggtggcaacacacccggtggagcatacgcgaacgctgctg

SEQ ID NO: 182144 - DNA, 75 bp, synthetic construct
  source 1..75: mol_type = other DNA
atacttagccttgatccgacctgcactatcatcctcgaagacaatcctctgtcctcacggatcagggagtctctg

SEQ ID NO: 182145 - DNA, 75 bp, synthetic construct
  source 1..75: mol_type = other DNA
gatatgattcactggcgatatgattcactggcggaactgggattttcacctcagcatgaactctcgcgtcgggcc

SEQ ID NO: 182146 - DNA, 75 bp, synthetic construct
  source 1..75: mol_type = other DNA
gttctcgaccccaccacctatgtaggtaatgctccggaacaggttgacaaaattattactcaagccaaatcctgc

SEQ ID NO: 182147 - DNA, 75 bp, synthetic construct
  source 1..75: mol_type = other DNA
tgcctgttcaggtgggtttggagaatatgtacactttggcccaactactcaggacgttatggatacaggcatggt

SEQ ID NO: 182148 - DNA, 75 bp, synthetic construct
  source 1..75: mol_type = other DNA
caagggttattacaataattgaatcgcgtgcggcgaaaactttaggtgagtgtaccagaggagctcatagtggac

SEQ ID NO: 182149 - DNA, 75 bp, synthetic construct
  source 1..75: mol_type = other DNA
agctctgaagaaactataaatatagagtatattgaaggaaccaatgttagatttaattcgaataatatggcgata

SEQ ID NO: 182150 - DNA, 75 bp, synthetic construct
  source 1..75: mol_type = other DNA
aggatgcgcaggggcgtgaaatccgttatgagtacagcgccgcaggcgacctgacagcaacgatatcaccggacg

SEQ ID NO: 182151 - DNA, 75 bp, synthetic construct
  source 1..75: mol_type = other DNA
gacccggtcgacaggctgactgaacagcgcggttttgacggccggacgcaacgttaccactatgacctgaccaga

SEQ ID NO: 182152 - DNA, 75 bp, synthetic construct
  source 1..75: mol_type = other DNA
atcttcccctgccggtccccgttctgcttcctcttctctggttttccccgacacgctgcccgccggtacaggata

SEQ ID NO: 182153 - DNA, 75 bp, synthetic construct
  source 1..75: mol_type = other DNA
aacctgccaaacagcatacgatagtgactgcggagaaatacatgagcggtgtatgatgttatgtaaaactgcaca

SEQ ID NO: 182154 - DNA, 75 bp, synthetic construct
  source 1..75: mol_type = other DNA
caccgtgagacggtgcgcagcttcggcagcagggcaggcagtaatgccgcatatgaactgaccagcacatacacc

SEQ ID NO: 182155 - DNA, 75 bp, synthetic construct
  source 1..75: mol_type = other DNA
attgatcaggttattgcagtaaagatttctggtggtgcgaattacagcataacaattaataataaaacattagta

SEQ ID NO: 182156 - DNA, 75 bp, synthetic construct
  source 1..75: mol_type = other DNA
cagttttccattaagcgactcaatgaaatggagatttatccgggagtgaccttttcagaagagttagaggggcaa

SEQ ID NO: 182157 - DNA, 75 bp, synthetic construct
  source 1..75: mol_type = other DNA
ctctggcactacgatgcgtcggaccgcatcacgcaccggacggtgaacggcgacccggcagagcagtggcagtat

SEQ ID NO: 182158 - DNA, 75 bp, synthetic construct
  source 1..75: mol_type = other DNA
gagaataacgcgaaaccggtacggtcagcttcaggcctttacggactgctcggggtacgcgacgcggtatgaata

SEQ ID NO: 182159 - DNA, 75 bp, synthetic construct
  source 1..75: mol_type = other DNA
ccgataacggtatccggctggaggcggtatggctgacacacgacccggcatacccggatgaacagccgactgcgc

SEQ ID NO: 182160 - DNA, 75 bp, synthetic construct
  source 1..75: mol_type = other DNA
acagcagttataacccgcgtgggcaactggtcagtcagagggatgcgcaggggcgggagacccgttatgagtaca

SEQ ID NO: 182161 - DNA, 75 bp, synthetic construct
  source 1..75: mol_type = other DNA
ttgcaaaccgtcaatgtcacgctggatgcgcgcaatggcgggcagggaagtttccgcctgccagaaaatgccgta

SEQ ID NO: 182162 - DNA, 75 bp, synthetic construct
  source 1..75: mol_type = other DNA
gatgagctttactctgcaaccggtgaccagcaatgagattgacagcgatgcgctgtatctcgatgaaatcacgct

SEQ ID NO: 182163 - DNA, 75 bp, synthetic construct
  source 1..75: mol_type = other DNA
gggaggtatatcactcaggatccgattgggctgaaggggggatggaatttttatcagtatccgttgaatccagtt

SEQ ID NO: 182164 - DNA, 75 bp, synthetic construct
  source 1..75: mol_type = other DNA
aggccagccaggcgatcggcgtaacgcaacaaccggaatactggcagcatatgctcgacagctacgcggagcagg

SEQ ID NO: 182165 - DNA, 75 bp, synthetic construct
  source 1..75: mol_type = other DNA
gttacgtatgaatggttgcgtctcgaagaccgcacgagccatagcggagagctaccgtcaggcggcaaatccttt

SEQ ID NO: 182166 - DNA, 75 bp, synthetic construct
  source 1..75: mol_type = other DNA
ttgaccgctgagcaatccactattgagcgcgcgctggccatgaactggctggcgaaatatatggcgacaatgcct

SEQ ID NO: 182167 - DNA, 75 bp, synthetic construct
  source 1..75: mol_type = other DNA
aggataactggcgcggttttgctggattcggttatgccgatggacaatttagcgaaggaaaagggattgttcgcg

SEQ ID NO: 182168 - DNA, 75 bp, synthetic construct
  source 1..75: mol_type = other DNA
gatgttgtcgaacgtgaaccgcaagatcccggcgttgtacgattaaaacgtgcggttgatgtacataatcttgca

SEQ ID NO: 182169 - DNA, 75 bp, synthetic construct
  source 1..75: mol_type = other DNA
aggccggttgcccagtagaaactattcgttactacgaaaaggaaggtttacttcaggcccctttacgagatattg

SEQ ID NO: 182170 - DNA, 75 bp, synthetic construct
  source 1..75: mol_type = other DNA
ttatagaatcaattcaacggggtcttggtctgacctgttaaaaaaagatagaaatggccaacggattattaacac

SEQ ID NO: 182171 - DNA, 75 bp, synthetic construct
  source 1..75: mol_type = other DNA
cgattgtatgttgtaggatccgcacgtagtgttgttcgcaggatagacagaaataattgggagaaactaaataaa

SEQ ID NO: 182172 - DNA, 75 bp, synthetic construct
  source 1..75: mol_type = other DNA
ttattcttttagtgattttgcatctatagataattcattctataattcgtggtctcataagattaaaaatagatt

SEQ ID NO: 182173 - DNA, 75 bp, synthetic construct
  source 1..75: mol_type = other DNA
gcacagcaccttttacagtagtaaacggtactacttatatcaagactgcgatgattcagcaagccagtataggca

SEQ ID NO: 182174 - DNA, 75 bp, synthetic construct
  source 1..75: mol_type = other DNA
ctgaaaagtgctttaaagcggtggcgctggcctggcacaaaaccaacaaaaaatggtcggctgattatgccgccc

SEQ ID NO: 182175 - DNA, 75 bp, synthetic construct
  source 1..75: mol_type = other DNA
ttagctgaggttgaaaactggattgaagaaaagcgcagatcggctttaaaggcagcaagacccggttttttttgg

SEQ ID NO: 182176 - DNA, 75 bp, synthetic construct
  source 1..75: mol_type = other DNA
agatccgtttgcggttccggcaggtgcgccgttacgggaagtctggctggggaaagtaccggaaaccggtaaaaa

SEQ ID NO: 182177 - DNA, 75 bp, synthetic construct
  source 1..75: mol_type = other DNA
agtacacgcgggacaggctgcaccgtgagacggcccgcagcttcggcggggaggcatatgaacttgccaccgcct

SEQ ID NO: 182178 - DNA, 75 bp, synthetic construct
  source 1..75: mol_type = other DNA
gaacaggccacggcgtacaccctcacagggcagctccggagcaggcacctgaacctcccgcagcttgaccgtgag

SEQ ID NO: 182179 - DNA, 75 bp, synthetic construct
  source 1..75: mol_type = other DNA
aaagggatcgaggaaaaaggtctgctggaggttgcgtcccgcacacggcagcacctgagtaatgtaaccaggtga

SEQ ID NO: 182180 - DNA, 75 bp, synthetic construct
  source 1..75: mol_type = other DNA
aatacggcagactgacggagaagacggaccgcatcccgacgggtgtgatacggacggacgacgagcggacccacc

SEQ ID NO: 182181 - DNA, 75 bp, synthetic construct
  source 1..75: mol_type = other DNA
cggcccgctgccgttcatcctttcccgcgcctacagcagttaccggaccaggacgcccgcgccggtgggggtgtt

SEQ ID NO: 182182 - DNA, 75 bp, synthetic construct
  source 1..75: mol_type = other DNA
cagcatgagacagagcacgcatacaacgagcaggggctggcaaaccgcgtcacgccggacagcctgccgccggtg

SEQ ID NO: 182183 - DNA, 75 bp, synthetic construct
  source 1..75: mol_type = other DNA
atgatgggagcctggcatcaggcggtgattgacagtctgaaacaaattccctgggtggaagatgccgatgagtac

SEQ ID NO: 182184 - DNA, 75 bp, synthetic construct
  source 1..75: mol_type = other DNA
ggcgacttttgatgcagtcacgacggctatggcgtctgctgcccctgctcttggagcaatggctgtggtcgctgg

SEQ ID NO: 182185 - DNA, 75 bp, synthetic construct
  source 1..75: mol_type = other DNA
accaatacgttacaccactggggttagaacgagttataagtgtatatgggcctcccgctccagaccgggcaggtg

SEQ ID NO: 182186 - DNA, 75 bp, synthetic construct
  source 1..75: mol_type = other DNA
atggtggcgcaccattatgcggggaggccggagagccgctaccggtatgatgataccggtcgggtgacggagcag

SEQ ID NO: 182187 - DNA, 75 bp, synthetic construct
  source 1..75: mol_type = other DNA
atgaaactcggcgacacaccgctggtggagtatacccgcgaccgcctgcaccgggaaacgctgcgcagcttcggc

SEQ ID NO: 182188 - DNA, 75 bp, synthetic construct
  source 1..75: mol_type = other DNA
caacgccgccggtgacctgaccgccgtcattgccccggacggcagcagaaacgggacacagtacgatgcgtgggg

SEQ ID NO: 182189 - DNA, 75 bp, synthetic construct
  source 1..75: mol_type = other DNA
caaccagttaacgtcagccaccgggactgacgggctggagttgcgccgggaatatgatgaatccggccgtctgat

SEQ ID NO: 182190 - DNA, 75 bp, synthetic construct
  source 1..75: mol_type = other DNA
tgatgtaagggttaatctatttatagatcagggagtatttggacaatattttattaagaataataaagatgtata

SEQ ID NO: 182191 - DNA, 75 bp, synthetic construct
  source 1..75: mol_type = other DNA
cgacaggtagtcagccaggaagcagtgagtccccccagccgacatccccgtcactccgtacgctgctttcactta

SEQ ID NO: 182192 - DNA, 75 bp, synthetic construct
  source 1..75: mol_type = other DNA
acggcgggaagtgcccaggtaacgcctgtgctggatggcactccgggccaggcattccagatggtgaaagatgca

SEQ ID NO: 182193 - DNA, 75 bp, synthetic construct
  source 1..75: mol_type = other DNA
ttacaaccgtcaccggtactacgatccgttgcaggggcggtatatcacccaggatccgatagggttgaaggtaag

SEQ ID NO: 182194 - DNA, 75 bp, synthetic construct
  source 1..75: mol_type = other DNA
cttcgggcggacgctggctttccaccgcgaggccgcaggcgaactggctggcgaaatcaccagggtgacggacgg

SEQ ID NO: 182195 - DNA, 75 bp, synthetic construct
  source 1..75: mol_type = other DNA
atggggtatgacgccgccgggcgcatcaccgtgctgactaacgagaacggcagccagtccacgttccggtatgac

SEQ ID NO: 182196 - DNA, 75 bp, synthetic construct
  source 1..75: mol_type = other DNA
atgtcaaataataaattatccaatttactgttaatattcatctttctgtttccgtctggagtgtgggcaggggaa

SEQ ID NO: 182197 - DNA, 75 bp, synthetic construct
  source 1..75: mol_type = other DNA
cactggataatgctggttcagactgttccagttactggagaaagataagcagcggtaataattttgagatgagcg

SEQ ID NO: 182198 - DNA, 75 bp, synthetic construct
  source 1..75: mol_type = other DNA
atttattgtgagttctgtaatacaccgcaaaaaaagaaaatgaaatatcatatgatgattgttttttgtcgtgta

SEQ ID NO: 182199 - DNA, 75 bp, synthetic construct
  source 1..75: mol_type = other DNA
gaactgaacaaaaagcgcgtggatctgacggccacgctgctgaatgccggtctggagccggtgaagccggaatat

SEQ ID NO: 182200 - DNA, 75 bp, synthetic construct
  source 1..75: mol_type = other DNA
accccgccccggtcggatgtggaaaacggcgtgtggtggtttgataacctggcgcacggtgtggtgaatatcgaa

SEQ ID NO: 182201 - DNA, 75 bp, synthetic construct
  source 1..75: mol_type = other DNA
ggggcatctggcccgtgaagggtatgaagcccagatggcgctgaccatggtgtcgatgaccaacatgattaacaa

SEQ ID NO: 182202 - DNA, 75 bp, synthetic construct
  source 1..75: mol_type = other DNA
aatcgacggaaggcgacgagcagcgtgacgtcctcggggaactggaaattaccgcccggctcatgatcacaggcg

SEQ ID NO: 182203 - DNA, 75 bp, synthetic construct
  source 1..75: mol_type = other DNA
aagggtatgaggcccagatggcgctgacgatggtgagtcttatcaactccatcaacaatattgccgagcgggatc

SEQ ID NO: 182204 - DNA, 75 bp, synthetic construct
  source 1..75: mol_type = other DNA
gcgtctgccgctgtttgcggatgcgcatcagctgctgatgatggatgaacagcgtctggcactgaatgcggatga

SEQ ID NO: 182205 - DNA, 75 bp, synthetic construct
  source 1..75: mol_type = other DNA
ttattgccaggatgaggacgacaccgcaagctggctgtccgcactgcatgactacgccgtaccggaagcacggaa

SEQ ID NO: 182206 - DNA, 75 bp, synthetic construct
  source 1..75: mol_type = other DNA
atggcattcacactgtttaaacgtcgcaatgtcaccacgccatcagaaacggagacggcaggacagggttttgta

SEQ ID NO: 182207 - DNA, 75 bp, synthetic construct
  source 1..75: mol_type = other DNA
gaagtcgcaccactcagccactggctgcggtggctgccgatgtgcttcgatcctctgcgcgatccgcgcgggttg

SEQ ID NO: 182208 - DNA, 75 bp, synthetic construct
  source 1..75: mol_type = other DNA
gtggtgggggcgctgggcggggcgggggtgcgctgtatccgtatgaacggtctgcaggtgcatggctggctgctc

SEQ ID NO: 182209 - DNA, 75 bp, synthetic construct
  source 1..75: mol_type = other DNA
tttaaatccctgacgccggaacagcgacagctcctgctgagcgccaccaaagcaccgggaaaatataccgaaggc

SEQ ID NO: 182210 - DNA, 75 bp, synthetic construct
  source 1..75: mol_type = other DNA
gcgtggaaactggcggaaagcgatgtgccttcaatagaatcggatgatgacgatcccgaagacgccgataacgag

SEQ ID NO: 182211 - DNA, 75 bp, synthetic construct
  source 1..75: mol_type = other DNA
gccgcgtccgccaggatgtgaagacggtcaaagagtatctgggcaaccggcacaagctgtaccgggcggggatca

SEQ ID NO: 182212 - DNA, 75 bp, synthetic construct
  source 1..75: mol_type = other DNA
ggctgcaccgtgagacggtgcgcagcttcggcagcatggcaggcagtaatgccgcatatgaactgaccagcacat

SEQ ID NO: 182213 - DNA, 75 bp, synthetic construct
  source 1..75: mol_type = other DNA
tggaagacggaaccggggtgaggcggagaataacgcgaaaccggtacggtcagcttcaggcgtttacggactgct

SEQ ID NO: 182214 - DNA, 75 bp, synthetic construct
  source 1..75: mol_type = other DNA
gccggacggcaggacggtgcggtatggctataacagccagcggcaggtgacgtcagtgacgtacccggacgggct

SEQ ID NO: 182215 - DNA, 75 bp, synthetic construct
  source 1..75: mol_type = other DNA
acggactgctcggggtacacgacgcggtatgagtatgaccggtacggtcaacaaatcgccgttcaccgggaagaa

SEQ ID NO: 182216 - DNA, 75 bp, synthetic construct
  source 1..75: mol_type = other DNA
tacacgtacacggcccgtggtgaactgctggcggtgtatgaccgcagcggaacacaggtgcgcgggtttacttat

SEQ ID NO: 182217 - DNA, 75 bp, synthetic construct
  source 1..75: mol_type = other DNA
ggtatccggctggaggcggtatggctgacacacgacccggcatacccggatgaacagccgactgcgccgctggcg

SEQ ID NO: 182218 - DNA, 75 bp, synthetic construct
  source 1..75: mol_type = other DNA
tatgtaatgcttttttttctttttgctatcattttcattgcttttatattgttaatgccagtaatgatccgcagc

SEQ ID NO: 182219 - DNA, 75 bp, synthetic construct
  source 1..75: mol_type = other DNA
tagcatcgccatttatttgctggctggatgcctgatttctgcaatgaccgctttattgatgaaagacaatcaacg

SEQ ID NO: 182220 - DNA, 75 bp, synthetic construct
  source 1..75: mol_type = other DNA
ccgtgctgttatcggcattgacggcgatgtgaaactcaatcgcgccctgtggattatggcagaaaacatgctcga

SEQ ID NO: 182221 - DNA, 75 bp, synthetic construct
  source 1..75: mol_type = other DNA
ggggtgacggacggcgcgggccgccgttttcacctggcgctgaccacacaggcgcagcgggcggaagccttccgt

SEQ ID NO: 182222 - DNA, 75 bp, synthetic construct
  source 1..75: mol_type = other DNA
acgagaaaaacacctcaataaaacaagaagcacggatgatataaaagaaaaattaattcaaagacacgctgtttt

SEQ ID NO: 182223 - DNA, 75 bp, synthetic construct
  source 1..75: mol_type = other DNA
gtgaggttctgtgtgaaacaaactgcttcggtattgaaacggcagccgctgaaatggatgcggttgcgtcgcaga

SEQ ID NO: 182224 - DNA, 75 bp, synthetic construct
  source 1..75: mol_type = other DNA
caatcattagctgttaactctgctacgtcgggcttacatttggctcttgaagctgttggcgtaaagccgggagac

SEQ ID NO: 182225 - DNA, 75 bp, synthetic construct
  source 1..75: mol_type = other DNA
atgttaatggtcgcgttgtaccatggaatagtagtgccgcacatatcggtattagatcactcggtacactaagct

SEQ ID NO: 182226 - DNA, 75 bp, synthetic construct
  source 1..75: mol_type = other DNA
ggcttcagtggcgtactgcaggctgatgcctacgccgggttcaacgagctctaccgcgacggccatataaaggaa

SEQ ID NO: 182227 - DNA, 75 bp, synthetic construct
  source 1..75: mol_type = other DNA
cctgatatgactccatatactcagttgctaaatcgtggaggactatgtagggggagtataactatgctgctaagt

SEQ ID NO: 182228 - DNA, 75 bp, synthetic construct
  source 1..75: mol_type = other DNA
ccagatatgactccatatactcagttgctaaatcgtggagggatatgtagggggagtataaccatgctgctaagt

SEQ ID NO: 182229 - DNA, 75 bp, synthetic construct
  source 1..75: mol_type = other DNA
aatcagtctgcaagaagtgctatcagccagcacgtctgtgattactaataacggacaaacgataactcttacgct

SEQ ID NO: 182230 - DNA, 75 bp, synthetic construct
  source 1..75: mol_type = other DNA
acagcggaattattggtgcactgcgtggaaaatatattaattgtctggtaacgaatagcagcacagctgaactat

SEQ ID NO: 182231 - DNA, 75 bp, synthetic construct
  source 1..75: mol_type = other DNA
ctgtcacggcgcatgcctcattgttagatgacgactatctcactccggccagagcatcagttaacggcaccaccc

SEQ ID NO: 182232 - DNA, 75 bp, synthetic construct
  source 1..75: mol_type = other DNA
ctccaggattcagtgaagacgatgcggtaggtaaggcactggaaacggtggccggaaaactgcgggcagtggcgt

SEQ ID NO: 182233 - DNA, 75 bp, synthetic construct
  source 1..75: mol_type = other DNA
acacaaaaacttgctttagttatggaaacatttattcatgaacgtgagcttattgtcactatgggattaaatagt

SEQ ID NO: 182234 - DNA, 75 bp, synthetic construct
  source 1..75: mol_type = other DNA
ggccgcgagccaggtgaaaaaaaatttcctgaggtcgaatttagtattgctggcgcaattgatgataatcctggt

SEQ ID NO: 182235 - DNA, 75 bp, synthetic construct
  source 1..75: mol_type = other DNA
agtcaggcgctgaaggaaattaacgatcagcgtaacgcggtgaccgtggttgtgcgggtgaatgaggataaaacc

SEQ ID NO: 182236 - DNA, 75 bp, synthetic construct
  source 1..75: mol_type = other DNA
aagtggaggtgctgattggtgatgagctggtgatcaccggctgggtggaggcgacgcccgttcgttacgatgccc

SEQ ID NO: 182237 - DNA, 75 bp, synthetic construct
  source 1..75: mol_type = other DNA
acctcgcgcggcgtcacgcccactaacgccggtctggctttttactcgcaggcacaattggcgctacgccacgcc

SEQ ID NO: 182238 - DNA, 75 bp, synthetic construct
  source 1..75: mol_type = other DNA
gaaatttcgttatatcaaagagatgggcttcgatggttttgagattgacggcaaactgctggtcaacaatctcga

SEQ ID NO: 182239 - DNA, 75 bp, synthetic construct
  source 1..75: mol_type = other DNA
acctgagccagtagtgcaacaggaaccggaaatagtctgcaatgcctgcggtcagactggcggggataactgccc

SEQ ID NO: 182240 - DNA, 75 bp, synthetic construct
  source 1..75: mol_type = other DNA
ttttgccctatcagatggcgaatataaagttaaagttgcattctttgatatttttggtgtagacggtgttaccta

SEQ ID NO: 182241 - DNA, 75 bp, synthetic construct
  source 1..75: mol_type = other DNA
atgattttcggtgttgcagcttataacaatttaggttttgttagtccaaaagtaacggtagatggtcttgtacca

SEQ ID NO: 182242 - DNA, 75 bp, synthetic construct
  source 1..75: mol_type = other DNA
aagcatacagagttatccggaacaacgcatgtattgaaaaatatttgcttttccctgaccaaacatcagaaggac

SEQ ID NO: 182243 - DNA, 75 bp, synthetic construct
  source 1..75: mol_type = other DNA
atacgcaacaaaacgagccagaaacgaaacaacctgaaccagtagtgcaacaggaaccggaaaagatctgcaccg

SEQ ID NO: 182244 - DNA, 75 bp, synthetic construct
  source 1..75: mol_type = other DNA
cagaacgaccaaaaagcggaacaaaacagcccaaatgcgttacaagacgagccagaaacgaaacaatccgaacca

SEQ ID NO: 182245 - DNA, 75 bp, synthetic construct
  source 1..75: mol_type = other DNA
ggtggtcgcgttgagtcgctggcggtggacgaaggtgatgcgattaaagcgggccaggtgctgggcgaactggat

SEQ ID NO: 182246 - DNA, 75 bp, synthetic construct
  source 1..75: mol_type = other DNA
ttttctggttgccagcacaactattgaatgcggacgttatccggttgaaattttcatgatgggcgaagaagcaaa

SEQ ID NO: 182247 - DNA, 75 bp, synthetic construct
  source 1..75: mol_type = other DNA
caccgcctgcggtaaggctggcggcggcaactgtcctgactgtggcgcggtaatgggcgacgcaacgtatcagaa

SEQ ID NO: 182248 - DNA, 75 bp, synthetic construct
  source 1..75: mol_type = other DNA
acaatgagaatgctggcagcgatccgcatcgcgattgcagtgatgaaactggcgaagtcgcagatcccgtaatcg

SEQ ID NO: 182249 - DNA, 75 bp, synthetic construct
  source 1..75: mol_type = other DNA
caaaaaaattatctgttgccatctcccgctgcgttaccgcaatggatgacaacgattatgatgaagacgacttta

SEQ ID NO: 182250 - DNA, 75 bp, synthetic construct
  source 1..75: mol_type = other DNA
ccagcctgatcacggtgaaacggtgattgaggtaatcaacaaaatactcggtcagcagcaggcgctggcttatga

SEQ ID NO: 182251 - DNA, 75 bp, synthetic construct
  source 1..75: mol_type = other DNA
gtgagcgccataatgcacttgatgacgcccgttaccaggcaaaatacgtttcagttatctggcaaaaactgatcc

SEQ ID NO: 182252 - DNA, 75 bp, synthetic construct
  source 1..75: mol_type = other DNA
ttttcttcgacccacaaacaggggaaatcgggccagtattttatatcgttatcagtctgactgacgcaatgaata

SEQ ID NO: 182253 - DNA, 75 bp, synthetic construct
  source 1..75: mol_type = other DNA
ggaacaaaacagcccaaatgcgttacaaaacgagccagaaacgaaacagcctgaaccaaaagagcaacaagaacc

SEQ ID NO: 182254 - DNA, 75 bp, synthetic construct
  source 1..75: mol_type = other DNA
cgtctgacgcaatggcagatgaacaggcaacgactgaagcaatgggacaggatacaactgaatatcgccaggaca

SEQ ID NO: 182255 - DNA, 75 bp, synthetic construct
  source 1..75: mol_type = other DNA
aaagccaatgcccagcaacatcggttggataaaatcacccacgcctgtcgactgctggaacaggaaacgcctgta

SEQ ID NO: 182256 - DNA, 75 bp, synthetic construct
  source 1..75: mol_type = other DNA
tgcgcttaactcgtgaagaggtgtttggtccggtggtaaacctggtgcgagtagcggatggagaagaggcgttac

SEQ ID NO: 182257 - DNA, 75 bp, synthetic construct
  source 1..75: mol_type = other DNA
atgtcacctgttgcacagattaaccctttggtttctcgtgcgcactgcgacaaagtgtgttcattcctcgacgat

SEQ ID NO: 182258 - DNA, 75 bp, synthetic construct
  source 1..75: mol_type = other DNA
aaatggaaggcgctgaacatccacacaaggagaatgctggcagcgctcaggatcacgccagcgatagtgaaactg

SEQ ID NO: 182259 - DNA, 75 bp, synthetic construct
  source 1..75: mol_type = other DNA
tcagcctgatcacggtgaaacggtgattgaggtaatcaacaaaatactcggtcagcagcaggcgctggcttacga

SEQ ID NO: 182260 - DNA, 75 bp, synthetic construct
  source 1..75: mol_type = other DNA
taattcaacccagcctccgactatctacacgataaatgcttattcttcatgcaggtttgacggggccaatacgag

SEQ ID NO: 182261 - DNA, 75 bp, synthetic construct
  source 1..75: mol_type = other DNA
cgtctgacgcaatggcagatgaacaggcaacggccgaagcaatggagccggatacaactgaacatcaccaggaca

SEQ ID NO: 182262 - DNA, 75 bp, synthetic construct
  source 1..75: mol_type = other DNA
gttgacggaattagcgacccgaacgatccgaaatgggtaaaggggatccagactcgcgattctgtgtaccagaac

SEQ ID NO: 182263 - DNA, 75 bp, synthetic construct
  source 1..75: mol_type = other DNA
cacagccaggttaacgccacggtggactgtgtgactgaagcggtgaatgcgctgggggattcgcctgtgacggcg

SEQ ID NO: 182264 - DNA, 75 bp, synthetic construct
  source 1..75: mol_type = other DNA
atcgcccgcttgatcgggatgtggcagacgacattcttggcagcattaatgcctatatgcgtcagcttaaaaatc

SEQ ID NO: 182265 - DNA, 75 bp, synthetic construct
  source 1..75: mol_type = other DNA
acgtatcagccacgtattgtgatcgctccaggattcagtgaagacgatgcggtaggtaaggcactggaaacggtg

SEQ ID NO: 182266 - DNA, 75 bp, synthetic construct
  source 1..75: mol_type = other DNA
ggcgctaacgctggcggcggaaatattaccgatcgtggtgaaggattcaaacatgataagacatcactcgcacga

SEQ ID NO: 182267 - DNA, 75 bp, synthetic construct
  source 1..75: mol_type = other DNA
ggggatcgaaaatacctgcatcatgccacccgtgaacaacgcaaacacattactgctcttgagatggatcaggaa

SEQ ID NO: 182268 - DNA, 75 bp, synthetic construct
  source 1..75: mol_type = other DNA
ccggtaacgcacgtttcacgcaacgaactacaggcattacacattgcacgagctgaagaactaccagccgttact

SEQ ID NO: 182269 - DNA, 75 bp, synthetic construct
  source 1..75: mol_type = other DNA
gcgcattacataacgcacaggatgaaaaacttcccgccgttaccgcgctggccatctcaaataaagcagcgcaac

SEQ ID NO: 182270 - DNA, 75 bp, synthetic construct
  source 1..75: mol_type = other DNA
gcgctaacctggtgaatggtttgctgtatatcgatctcgaacgcgtgattccggaagcgaaaaaaccgcgccgta

SEQ ID NO: 182271 - DNA, 75 bp, synthetic construct
  source 1..75: mol_type = other DNA
ttccggcacagccggttcctggctgctgggaacggcgctggatttcacggcgaaacaggaaggtcgggtcggtaa

SEQ ID NO: 182272 - DNA, 75 bp, synthetic construct
  source 1..75: mol_type = other DNA
aatggcaacgccgcaggatgtggttcagcggcgcgcgtcatttggtgggcgtgtggagctgctgcgtccgcgcgt

SEQ ID NO: 182273 - DNA, 75 bp, synthetic construct
  source 1..75: mol_type = other DNA
ttacgggttggcccggcagatgcttatctccctgagccagtcaccgccaggaagaaaaaaaatgttgaggaggat

SEQ ID NO: 182274 - DNA, 75 bp, synthetic construct
  source 1..75: mol_type = other DNA
gagtaattttagtaaagccgccgcacggctgggcgttacccgttcagcggtcagtcagggaataagacgccttga

SEQ ID NO: 182275 - DNA, 75 bp, synthetic construct
  source 1..75: mol_type = other DNA
ctactcatctctcaacccaatatcgtgctgctcgatgaacccagcgcctcgctggacgaaatggcagaagcgtat

SEQ ID NO: 182276 - DNA, 75 bp, synthetic construct
  source 1..75: mol_type = other DNA
ctacccgacgctatgggtgctgttcgccggggtgatgatggcgatcctgtttgagttctgtatgcgcatggtgcg

SEQ ID NO: 182277 - DNA, 75 bp, synthetic construct
  source 1..75: mol_type = other DNA
cagaaaaacggcctcaactacatgattcaggaagggggatttggtctttctggcggtcagcggcaaacgctgctg

SEQ ID NO: 182278 - DNA, 75 bp, synthetic construct
  source 1..75: mol_type = other DNA
tacacctggaacgacaacggcgaactcatccgcatcagcagcccgcgccagacccggagttacagctacagcacc

SEQ ID NO: 182279 - DNA, 75 bp, synthetic construct
  source 1..75: mol_type = other DNA
atgttgtatggattcgatgaaataatcgatatctttctgaatgcattaaccactccaatagcacaagaactttaa

SEQ ID NO: 182280 - DNA, 75 bp, synthetic construct
  source 1..75: mol_type = other DNA
tacgcatctttctgatgtgatcggcaagcgggcggatctgcgtatttcggatcgcgtttttggtcacgcattacg

SEQ ID NO: 182281 - DNA, 75 bp, synthetic construct
  source 1..75: mol_type = other DNA
ggacccaggaagtgcagtccatcgtctacgtggtggtgctgctggtgggctgctttatggtgatgaacggcgaca

SEQ ID NO: 182282 - DNA, 75 bp, synthetic construct
  source 1..75: mol_type = other DNA
atggcgatattatgctggcctcactggtggcgaacgtgctggcgctggcggcgatgattttctcgatgcaggttt

SEQ ID NO: 182283 - DNA, 75 bp, synthetic construct
  source 1..75: mol_type = other DNA
acgctacgcttgtcgaagccgtgcagtcgattgaagatattaagctgctgcgcgccgaacagcgttttcagaatc

SEQ ID NO: 182284 - DNA, 75 bp, synthetic construct
  source 1..75: mol_type = other DNA
ccattctcgggcgcaacggcgcgggtaaatcaacgctactgcaaatgctcgccggaatgcgtatcgcccagcagg

SEQ ID NO: 182285 - DNA, 75 bp, synthetic construct
  source 1..75: mol_type = other DNA
ctgatgaagcgcccggtggatcagccggagcacggcaaactggtgcataaagcggtgctacacggcaattatcag

SEQ ID NO: 182286 - DNA, 75 bp, synthetic construct
  source 1..75: mol_type = other DNA
cgcgaaagaggccattttgcgtgaacagggcgagcccacagcgcgacgggtggtgttgcaggagaagaataaggg

SEQ ID NO: 182287 - DNA, 75 bp, synthetic construct
  source 1..75: mol_type = other DNA
gaaagccgccgctggctggcatcgtgcggcctgccgctggcgctcatcagcacggaaggggcaacagcgtggtgc

SEQ ID NO: 182288 - DNA, 75 bp, synthetic construct
  source 1..75: mol_type = other DNA
gcagtcgcggcatcgggcgggcaactgcattactgttggcgcaagaagggtatacggtggcggttaattatcagc

SEQ ID NO: 182289 - DNA, 75 bp, synthetic construct
  source 1..75: mol_type = other DNA
tcagtaaggtcatgaatgaggtgaagacaaaagcgtcactggatagtccggtcttcaccggtacccctatgacac

SEQ ID NO: 182290 - DNA, 75 bp, synthetic construct
  source 1..75: mol_type = other DNA
tgtgacgggcgttctttaccgttgatgagttgtgtcgttccatcatcacagacagcgaatgcagatgtacatgag

SEQ ID NO: 182291 - DNA, 75 bp, synthetic construct
  source 1..75: mol_type = other DNA
atcgacttactaccggctggaaactttcctgttagaaggcagccagggcaacgacctgatggactacagcaaaga

SEQ ID NO: 182292 - DNA, 75 bp, synthetic construct
  source 1..75: mol_type = other DNA
aggaccgcatcaccatcaccgacagcctgaaccgccgtgaagtgctgcacacgcagggtgaagccgggctgaagc

SEQ ID NO: 182293 - DNA, 75 bp, synthetic construct
  source 1..75: mol_type = other DNA
atacagtaaatatataaagggattaacggctgaagagcgccatattgaagcgacgccagccagcaatgttgatta

SEQ ID NO: 182294 - DNA, 75 bp, synthetic construct
  source 1..75: mol_type = other DNA
cggactcaggcacaaaagcatcaacgacagcaatttatttaggtgaaggcctgctgggtcgagataaaaatgcac

SEQ ID NO: 182295 - DNA, 75 bp, synthetic construct
  source 1..75: mol_type = other DNA
tgttattacagatgccggttttcaggggcgatggttccaacagctccgctcccgtggctggacctatatttgccg

SEQ ID NO: 182296 - DNA, 75 bp, synthetic construct
  source 1..75: mol_type = other DNA
aaatctatgatccgattttggacgggctgcgcagtgcgatccgttatgaccggacctattttgataaaatagtgg

SEQ ID NO: 182297 - DNA, 75 bp, synthetic construct
  source 1..75: mol_type = other DNA
ccctgctgcgaccggcggtggagctgaacactgccgtggtggcggcaacggcggccggtgtctgtgtgacggccc

SEQ ID NO: 182298 - DNA, 75 bp, synthetic construct
  source 1..75: mol_type = other DNA
actgaccacaggaaagacggcagaactgctggcacctgactacctggatatgagcgatacccgtcccgtgtttga

SEQ ID NO: 182299 - DNA, 75 bp, synthetic construct
  source 1..75: mol_type = other DNA
ggtcatccgcctgaccagtgaaaacggcagccacaccaccttccgttacgatgtacttgaccggctgatacagga

SEQ ID NO: 182300 - DNA, 75 bp, synthetic construct
  source 1..75: mol_type = other DNA
gtcggccagcgtctggaaaaagatggcgttgcgctgactatcgcggacattaaggccaaaccaggaacacagttt

SEQ ID NO: 182301 - DNA, 75 bp, synthetic construct
  source 1..75: mol_type = other DNA
ggtggcgctggagcaatacctcaacgcggagaaattctacgatccgatcctcgacggcctgctctcggcggtgcg

SEQ ID NO: 182302 - DNA, 75 bp, synthetic construct
  source 1..75: mol_type = other DNA
gttgagggtatcattgcatgtcctgcaagtattatggataaggcaagaatagcaaaagcaatacagcaagaaaca

SEQ ID NO: 182303 - DNA, 75 bp, synthetic construct
  source 1..75: mol_type = other DNA
atttaccctaaagttgatattcgtaaaaaaaatgttgttgtcatgtcacatgcgttctctgactcacctcatgtt

SEQ ID NO: 182304 - DNA, 75 bp, synthetic construct
  source 1..75: mol_type = other DNA
ttcttctggacagatgcggaaaataacgatgtaccaatgagcgcagacgaactgatagcgctcagcgaggcagtc

SEQ ID NO: 182305 - DNA, 75 bp, synthetic construct
  source 1..75: mol_type = other DNA
cgctcagtgacagtgaggtggccagtgccgtgggaaactccatgtttgcagacctggtgagtgtggccggacata

SEQ ID NO: 182306 - DNA, 75 bp, synthetic construct
  source 1..75: mol_type = other DNA
aattcgttaaagccaatagactattctaaagtgggcgatatattgaataagcatagagatatttctaaggcgttt

SEQ ID NO: 182307 - DNA, 75 bp, synthetic construct
  source 1..75: mol_type = other DNA
gcaccatggaagccgcgaattacgttttcacgttcaatggtcgtagctgggattacggaaaagaaacccagtccc

SEQ ID NO: 182308 - DNA, 75 bp, synthetic construct
  source 1..75: mol_type = other DNA
cttgtttaagggcgatgatacctctcctccgagcggacgcatccttgttaacccagtggagatgaaacctaaccc

SEQ ID NO: 182309 - DNA, 75 bp, synthetic construct
  source 1..75: mol_type = other DNA
gcgggaggagttgctcaccgacatggcgcggcaactgggaatggggctgcggctggtggagttttccgctgattc

SEQ ID NO: 182310 - DNA, 75 bp, synthetic construct
  source 1..75: mol_type = other DNA
atgattctcaaaattagcaatttcattgacgcaagcaatacaaaagggcctatacgcgttgaagatacagagcat

SEQ ID NO: 182311 - DNA, 75 bp, synthetic construct
  source 1..75: mol_type = other DNA
gttctgttgcggatattcttttaaatgagtatttgaaacctttagctatgtcttcacgtgacttagctaatttga

SEQ ID NO: 182312 - DNA, 75 bp, synthetic construct
  source 1..75: mol_type = other DNA
tgaccaccggcgcgctggtcgggacgacgatcctggcttcgcgcaccatcgcgccgctgtcgcagatatccggcg

SEQ ID NO: 182313 - DNA, 75 bp, synthetic construct
  source 1..75: mol_type = other DNA
cgcttaacgtcgcggatgttgaggataaaatcgttgaactggcgctactgcgcccgctcagcgccatccctgacg

SEQ ID NO: 182314 - DNA, 75 bp, synthetic construct
  source 1..75: mol_type = other DNA
gcgggaagagttgctcaccgacatggcgcggcaactgggaatggggctacggctggtagaattttccgctgattc

SEQ ID NO: 182315 - DNA, 75 bp, synthetic construct
  source 1..75: mol_type = other DNA
aagcgtcggcatggttccagcgaacagatgtcaccgacagaatatgaaaaccagtattatcaacggctcggaagt

SEQ ID NO: 182316 - DNA, 75 bp, synthetic construct
  source 1..75: mol_type = other DNA
ccatccagaacaccatcgaagaccctgatctgactctctatctggtactggacgaagcgcacagaggtatgggtt

SEQ ID NO: 182317 - DNA, 75 bp, synthetic construct
  source 1..75: mol_type = other DNA
attatgcttacgaagacgaccttaaagacgccattaaattaattgagaatttcaactctattaaaagtggtgaca

SEQ ID NO: 182318 - DNA, 75 bp, synthetic construct
  source 1..75: mol_type = other DNA
attgctatcgcgctcgacatgcatccgtcagaaatctggccggggcgttacctcaacgccaccaccaaacgtgaa

SEQ ID NO: 182319 - DNA, 75 bp, synthetic construct
  source 1..75: mol_type = other DNA
aaatgttttttttcaggtaggggggaatccttttgccagtcagctaaaaaaaataacaggaattgaaagaaaaga

SEQ ID NO: 182320 - DNA, 75 bp, synthetic construct
  source 1..75: mol_type = other DNA
cagcgatgtggtcagtcgtcaggatgatgtcagcgaagaatggtcacaggttggcttctcatctggtctcaccct

SEQ ID NO: 182321 - DNA, 75 bp, synthetic construct
  source 1..75: mol_type = other DNA
tgaagctcagcaacttctttgtcattttattggtcttaaagatacaggctcttctcctccctcaaacatcataaa

SEQ ID NO: 182322 - DNA, 75 bp, synthetic construct
  source 1..75: mol_type = other DNA
acattttagtataaatatatcgaattcttcaaatggttgtatgggtccaccacatattgcaatttttattctctt

SEQ ID NO: 182323 - DNA, 75 bp, synthetic construct
  source 1..75: mol_type = other DNA
gtctgcaaatcaaatattactaccaatgtttgctagaatgaaagcatctaacacatttccctctaattgtttttt

SEQ ID NO: 182324 - DNA, 75 bp, synthetic construct
  source 1..75: mol_type = other DNA
atctatggtaaaaataatatatccggcttttcaattttattacctttatgtagcttttgtctattttaatagagc

SEQ ID NO: 182325 - DNA, 75 bp, synthetic construct
  source 1..75: mol_type = other DNA
atcagtccggatattgccattatcgccattgttgtcatcgtcatcattctgaacaaaaccggggtgtccgacagt

SEQ ID NO: 182326 - DNA, 75 bp, synthetic construct
  source 1..75: mol_type = other DNA
cgcaagagcggacgcaaaaagtgttggatcaagtgacggattactatctgaataacgagaaagcgaacgtagaaa

SEQ ID NO: 182327 - DNA, 75 bp, synthetic construct
  source 1..75: mol_type = other DNA
atcgatgccgccgattaccaggtgcagggacactatcagacccccgtcattcaacattgccacatggaaagtgtg

SEQ ID NO: 182328 - DNA, 75 bp, synthetic construct
  source 1..75: mol_type = other DNA
gaacgcaatgacgagatttatcgccgtcagcgagagaagaaagaagcgttagacactctggaggatttagatgcg

SEQ ID NO: 182329 - DNA, 75 bp, synthetic construct
  source 1..75: mol_type = other DNA
tgacgccggacgcgctgctcgccagtaacaatgttcacgctaacagccgagcttattttaatcatgatccaagtg

SEQ ID NO: 182330 - DNA, 75 bp, synthetic construct
  source 1..75: mol_type = other DNA
cgaatctaaagggatcagggttgtatcgttagatttgcctacgagccatcagcttttgcatgttcaggatgagtt

SEQ ID NO: 182331 - DNA, 75 bp, synthetic construct
  source 1..75: mol_type = other DNA
caatatgccagccattgttgaactgggcacggcaacgggtttcgactttgagttaattgatcaggctgggctggg

SEQ ID NO: 182332 - DNA, 75 bp, synthetic construct
  source 1..75: mol_type = other DNA
cagtctgtcggcggtgatgattcaccagctttatggcagccagttcaacgaacataaaaagctgattacgttttc

SEQ ID NO: 182333 - DNA, 75 bp, synthetic construct
  source 1..75: mol_type = other DNA
gcccgctgcgatggaaattgatgatgactttgacagcgcgtttgaacacggaaaagctgtcggctggaacgccta

SEQ ID NO: 182334 - DNA, 75 bp, synthetic construct
  source 1..75: mol_type = other DNA
gcaaacaggtgactggttgtacgatgacccaatcgatcttgccagggcgattcgcaaaggtccggatatgcctac

SEQ ID NO: 182335 - DNA, 75 bp, synthetic construct
  source 1..75: mol_type = other DNA
ggttttactccagtagactttgatatcacttatgactgtggtgatacttcaaagattaaaaactcgttgcaaatg

SEQ ID NO: 182336 - DNA, 75 bp, synthetic construct
  source 1..75: mol_type = other DNA
gtgagcgatgctgcctcactgaatgcggtgacggaagcgaaccagcaaaaacccctgctaggactgtttgctgac

SEQ ID NO: 182337 - DNA, 75 bp, synthetic construct
  source 1..75: mol_type = other DNA
ataacctggacggtttttttaacgtcggctttgggaaatataaagcgccatatttcccggaagaagagatcaggg

SEQ ID NO: 182338 - DNA, 75 bp, synthetic construct
  source 1..75: mol_type = other DNA
cgaagacggaacaggaagaagcgcagcgtcaggaggatgccagaacgttcctggatgtggccggggaatatctgg

SEQ ID NO: 182339 - DNA, 75 bp, synthetic construct
  source 1..75: mol_type = other DNA
aggctcgtttacggcttacacctttatcgcacctattctgacgcaggtgacaggggttaccggagcaacggtgag

SEQ ID NO: 182340 - DNA, 75 bp, synthetic construct
  source 1..75: mol_type = other DNA
gggggggtggtctcatggcgtccagttctcggcgctattgccgcttttggcgcgttcggattccttggactgttg

SEQ ID NO: 182341 - DNA, 75 bp, synthetic construct
  source 1..75: mol_type = other DNA
tcgcgatcatgaaccacgtcatgatttgagctgcaaatatcgcacggaaccggaaaaggcgaagttcgaagatta

SEQ ID NO: 182342 - DNA, 75 bp, synthetic construct
  source 1..75: mol_type = other DNA
acggtatccttcccgttgatccttccgggcatggcaccgtcaatatgcgcgcctggccagttaatctggtcggtg

SEQ ID NO: 182343 - DNA, 75 bp, synthetic construct
  source 1..75: mol_type = other DNA
gaatgggaagcccgtctacaggtgacttccatgatttagtcaagttatcgattcagggaaatctcaccgccccac

SEQ ID NO: 182344 - DNA, 75 bp, synthetic construct
  source 1..75: mol_type = other DNA
acaaatatagatgattatttatataactttccatttgaaccaggctatttttatgttttacgtttttttaattgg

SEQ ID NO: 182345 - DNA, 75 bp, synthetic construct
  source 1..75: mol_type = other DNA
gccacgaacgcttcagaggcggccacctcagcccgtgatgcggaggcctcaaaagacgcggcaaaatcatcagaa

SEQ ID NO: 182346 - DNA, 75 bp, synthetic construct
  source 1..75: mol_type = other DNA
gtgcagcttcctcggcaacggcggcaggaaattccgctacggcggcaaaaacgtccgagacgaaagccaggtcat

SEQ ID NO: 182347 - DNA, 75 bp, synthetic construct
  source 1..75: mol_type = other DNA
gccacgaacgcttcagaggcggctacctcagcccgcgatgcggaggcctcaaaagacgcggcaaaatcatcagaa

SEQ ID NO: 182348 - DNA, 75 bp, synthetic construct
  source 1..75: mol_type = other DNA
gccacgaatgcttcagaggcggcgacctcagcccgggatgcggaggcctcaaaagacgcggcaaaatcatcagaa

SEQ ID NO: 182349 - DNA, 75 bp, synthetic construct
  source 1..75: mol_type = other DNA
ttgtcagcagactaaaaattccttattattacggtctgggcaatcatgatatatataataattataatgattgct

SEQ ID NO: 182350 - DNA, 75 bp, synthetic construct
  source 1..75: mol_type = other DNA
aggcgtgaataatacagccacaccagaactgattgaaaccatttctctggagctaccgaaagggaatatcacacc

SEQ ID NO: 182351 - DNA, 75 bp, synthetic construct
  source 1..75: mol_type = other DNA
gccgggcatcatcataacgcaattggtgaaaaatggggtggttttcgactctcaggctcaagcgctttagggtct

SEQ ID NO: 182352 - DNA, 75 bp, synthetic construct
  source 1..75: mol_type = other DNA
aagcggttaacccgcgcattactggatatcgttgtcgccaccagcgataaaaagcgctttagttattccagtgat

SEQ ID NO: 182353 - DNA, 75 bp, synthetic construct
  source 1..75: mol_type = other DNA
gtatattcacgtatcaccagacggtaatccaaagccatccagcgaatgtatgtataacagaaaagcaatagatgc

SEQ ID NO: 182354 - DNA, 75 bp, synthetic construct
  source 1..75: mol_type = other DNA
gagttgcagagtctcttgatagaactattttagctgtcggagaggttataaaaaaatgtgaggaaattaaaaatg

SEQ ID NO: 182355 - DNA, 75 bp, synthetic construct
  source 1..75: mol_type = other DNA
ctcaacgttgcggagcgcttgcagtaacggcgaaaggggcaatgacagcgctgccatgtcgacaagaactggaat

SEQ ID NO: 182356 - DNA, 75 bp, synthetic construct
  source 1..75: mol_type = other DNA
cagagtcaataatatcaggaatgatgcctgtttttccacctggggaaccacactgaactctgcctggcagcaggt

SEQ ID NO: 182357 - DNA, 75 bp, synthetic construct
  source 1..75: mol_type = other DNA
cgaagccagtagatcacggtttccgcgataactgcgaatgctctagttgccagaccacggcccgtatttgttccg

SEQ ID NO: 182358 - DNA, 75 bp, synthetic construct
  source 1..75: mol_type = other DNA
caaaatattcatattggtgattttaatatcagtgattttcaggccgcgaataccgtaagcactgctgctgatttg

SEQ ID NO: 182359 - DNA, 75 bp, synthetic construct
  source 1..75: mol_type = other DNA
ggcggcgaaagagaaggcagctttcgatgcgcagctcgcggcggtgaccaaacgcgctgaagatgcagaggccgc

SEQ ID NO: 182360 - DNA, 75 bp, synthetic construct
  source 1..75: mol_type = other DNA
cgctgccttagagtctattggtcattatctgcgttctaagtttgggactgatatcagagctatcgttcctatgat

SEQ ID NO: 182361 - DNA, 75 bp, synthetic construct
  source 1..75: mol_type = other DNA
ttggtctgatgcagctatggcacttgtctattgttccctcgctggcggcgtattagttggcggcaactgggcgct

SEQ ID NO: 182362 - DNA, 75 bp, synthetic construct
  source 1..75: mol_type = other DNA
aacgaaacgtaccacattgaaaatgagttcatctgtcaactggatccgtccagattcgatctcatcccggagtag

SEQ ID NO: 182363 - DNA, 75 bp, synthetic construct
  source 1..75: mol_type = other DNA
aatccttctaccagacgggaaccaatatccaggtcgcaggatatcgctattctacgcaaggtttttataacttat

SEQ ID NO: 182364 - DNA, 75 bp, synthetic construct
  source 1..75: mol_type = other DNA
agaaacaaaagcaactcatgtatgctcagagctgaacaatcatcatacaacttacactcattcgagacatatcca

SEQ ID NO: 182365 - DNA, 75 bp, synthetic construct
  source 1..75: mol_type = other DNA
tgggtaaacagtccaacattggcccaattgatcctcagttcaacggtttctccacccatgccatcattgaagaat

SEQ ID NO: 182366 - DNA, 75 bp, synthetic construct
  source 1..75: mol_type = other DNA
gggacgccgcaggccgcctggcagaagtcatcacgccggaaggcaaaacgcagtatgcctatgacaaatccggca

SEQ ID NO: 182367 - DNA, 75 bp, synthetic construct
  source 1..75: mol_type = other DNA
gatcgtattatcaacgtattcagacacagtcagcaggtgctcatacccactcgctgtctggtactgcagcaagtt

SEQ ID NO: 182368 - DNA, 75 bp, synthetic construct
  source 1..75: mol_type = other DNA
tactcatggtaatggtattcgttggccaggaggcggcggttctgcgttagcattttatgatggcggtgggttcac

SEQ ID NO: 182369 - DNA, 75 bp, synthetic construct
  source 1..75: mol_type = other DNA
tgattgacacgctgaagtcagtcagaaggttgttcagtaatcaggtgaccgcctcctgcctgcgcctgtctgctg

SEQ ID NO: 182370 - DNA, 75 bp, synthetic construct
  source 1..75: mol_type = other DNA
atagctcatggtctgatatctgctagttttttttcagctctatttggtacaaaattacctgggcctggatgtgta

SEQ ID NO: 182371 - DNA, 75 bp, synthetic construct
  source 1..75: mol_type = other DNA
gtaaccggggttttgcctgtgagcagggctggaatgcagccggtcagcttaccagccagcgcgccggacttttcc

SEQ ID NO: 182372 - DNA, 75 bp, synthetic construct
  source 1..75: mol_type = other DNA
ctacaaatctggcagaagtgccgctgctggataataacggcaaatttaacggtcagtacgaattgcgtctgatgg

SEQ ID NO: 182373 - DNA, 75 bp, synthetic construct
  source 1..75: mol_type = other DNA
accggtacgcagcccgcagaaacggtgccgccggaggtgctggcacagcaggcccgggagcctgaggtgcagcgg

SEQ ID NO: 182374 - DNA, 75 bp, synthetic construct
  source 1..75: mol_type = other DNA
tcaacgacagaacaacatataaagaaatatatccatatatgcctgaaagagttatcgataacttgatgagtgaaa

SEQ ID NO: 182375 - DNA, 75 bp, synthetic construct
  source 1..75: mol_type = other DNA
atgggatcgcatcatcggcaggtgaaatcactgtttataactatgatgccatcacccgtgagtacctgtcatcaa

SEQ ID NO: 182376 - DNA, 75 bp, synthetic construct
  source 1..75: mol_type = other DNA
ctcaacaacgcgggcgggaaggtgttcagcggcggagatatgctcactgaggtggtctcgctcagcggcgcgggc

SEQ ID NO: 182377 - DNA, 75 bp, synthetic construct
  source 1..75: mol_type = other DNA
cggtgacctgaccttcaccacgccggactacagcggcagcggctggctacaggccactaacctggtgctgaacgt

SEQ ID NO: 182378 - DNA, 75 bp, synthetic construct
  source 1..75: mol_type = other DNA
aacccactgaccacggatgacggaaacgggctgcggggattcagcggtgaaggacgggtgaaaggcagcggggat

SEQ ID NO: 182379 - DNA, 75 bp, synthetic construct
  source 1..75: mol_type = other DNA
ggaagtaacagcagcacaaactttctacgttcctggtttatatgatatagaaatactaggcatgtgttttaataa

SEQ ID NO: 182380 - DNA, 75 bp, synthetic construct
  source 1..75: mol_type = other DNA
ggatctcaattgcggctgcccgtcgaaaacggttaacggtagcggcggtggggcgacgttactcaaagagcctga

SEQ ID NO: 182381 - DNA, 75 bp, synthetic construct
  source 1..75: mol_type = other DNA
cgggcagcggctctggtggtgatggtggcgacgtttatctcgctggtcgccgccggatggatttttaccgcgctg

SEQ ID NO: 182382 - DNA, 75 bp, synthetic construct
  source 1..75: mol_type = other DNA
gacgccatagcggagctattcaaagaagaggcccgcgcggaaagcgaaattaaacgagtgacacggggtgaataa

SEQ ID NO: 182383 - DNA, 75 bp, synthetic construct
  source 1..75: mol_type = other DNA
ctaatctctgtaccaaagaacgagttaataatgacagtaatgtcagtaaattaccgccagcagatatattgtttg

SEQ ID NO: 182384 - DNA, 75 bp, synthetic construct
  source 1..75: mol_type = other DNA
acctgaatttttacccttatcagcggatatactcgaagaattagaaaaacgcattgacgaacttcttggcattaa

SEQ ID NO: 182385 - DNA, 75 bp, synthetic construct
  source 1..75: mol_type = other DNA
ttaatggaagcccttttatatggtgtagcaaaaaatattgatcttttagagcaagaaactagcgctagtttaagc

SEQ ID NO: 182386 - DNA, 75 bp, synthetic construct
  source 1..75: mol_type = other DNA
gctgtttaatccggctgaatcagcaacctgtgatgcgactgttgctttcagtcgcgaggtgatttcttgctcaga

SEQ ID NO: 182387 - DNA, 75 bp, synthetic construct
  source 1..75: mol_type = other DNA
cgttcggtaatgcgcttgccgggcagacggtcagcgtgttggcgggcaacagcgcaacggttgctccgacgatga

SEQ ID NO: 182388 - DNA, 75 bp, synthetic construct
  source 1..75: mol_type = other DNA
aaaaacaatgaagcctaaagccagcgggaaaaatgccattgctttaggaagtaattccagagcagaaaaagataa

SEQ ID NO: 182389 - DNA, 75 bp, synthetic construct
  source 1..75: mol_type = other DNA
gttatatgaaacgaatcaaaaagttgcccagaatataactgaaataaataagttaagttcaggaataaaagacat

SEQ ID NO: 182390 - DNA, 75 bp, synthetic construct
  source 1..75: mol_type = other DNA
ctggtaataatattcgcgatatcgctgtttttttgggcggaggtgctaccattacgcctgatggctctttcaaag

SEQ ID NO: 182391 - DNA, 75 bp, synthetic construct
  source 1..75: mol_type = other DNA
ttcctgcaggcaaaacgttacacattcttggaagcctgcgcggcaacggcagagggcgatttgtcttacaggacg

SEQ ID NO: 182392 - DNA, 75 bp, synthetic construct
  source 1..75: mol_type = other DNA
acatgtacaacaaagccaattttatactcgaattttaaaaaagataagaaggtttcaaccaaaactattgtcaac

SEQ ID NO: 182393 - DNA, 75 bp, synthetic construct
  source 1..75: mol_type = other DNA
tcctgttttctctgttagcgattatgctaaaacagctttaacatacgagacattaaatttatcaagtgggaatgc

SEQ ID NO: 182394 - DNA, 75 bp, synthetic construct
  source 1..75: mol_type = other DNA
tgaagacgccattgctgaattgttcaaagaagaggcgcgggctgacaacgaaattaaacgagtgacgcggggtga

SEQ ID NO: 182395 - DNA, 75 bp, synthetic construct
  source 1..75: mol_type = other DNA
atgaaaaaggtattgattgcagcacttatttccggtgtgtcttttggcgtttttgcacagcagggcggtttccaa

SEQ ID NO: 182396 - DNA, 75 bp, synthetic construct
  source 1..75: mol_type = other DNA
gctttcaggtataccggctggaaatcatgacggtgtgcctgtttgtgatgattgaaatcacctgctcgcgctggg

SEQ ID NO: 182397 - DNA, 75 bp, synthetic construct
  source 1..75: mol_type = other DNA
atcaaaaaatagcgtggccctcgggagtaattctgtagcaagtgaggataacaccgtgtcagttggttcttcact

SEQ ID NO: 182398 - DNA, 75 bp, synthetic construct
  source 1..75: mol_type = other DNA
atgaacaagtatattatacagtggtgcttgactgtttttatcttctcctttagtggtgcaacatttgcggcccca

SEQ ID NO: 182399 - DNA, 75 bp, synthetic construct
  source 1..75: mol_type = other DNA
ccaaaaactatctcaatctgattgatcagattacacacacttctgtagtgcgtgactctggtgtcaaccttttag

SEQ ID NO: 182400 - DNA, 75 bp, synthetic construct
  source 1..75: mol_type = other DNA
tgtcaactgatatgggagcaacaagcgtttatggtgataaagctggcagcgtgactttttctgctgctcctgcga

SEQ ID NO: 182401 - DNA, 75 bp, synthetic construct
  source 1..75: mol_type = other DNA
gtggccgcctggcgttatgcttcgcaggattataggacattcagcgaccatctttacgaaaatgataaaataaat

SEQ ID NO: 182402 - DNA, 75 bp, synthetic construct
  source 1..75: mol_type = other DNA
cccgatggttcgccattaacctttggctatgacgtactggatctccaggaaaataatattggagtcgttggctag

SEQ ID NO: 182403 - DNA, 75 bp, synthetic construct
  source 1..75: mol_type = other DNA
actttttctgctgctcctgcaagcctcacgggggctcgccccgcgccaggaacatttaccgcgactgcaacgata

SEQ ID NO: 182404 - DNA, 75 bp, synthetic construct
  source 1..75: mol_type = other DNA
cagggaaagagctgaaatgggcgttgagcgatcaaagtgcaggtagtgcagagattttcccgacaatgaagtcag

SEQ ID NO: 182405 - DNA, 75 bp, synthetic construct
  source 1..75: mol_type = other DNA
ctttggcggcagattgccattttatggcaatatcacttcgccgtgaggggataaatggaggatatcctgcccccc

SEQ ID NO: 182406 - DNA, 75 bp, synthetic construct
  source 1..75: mol_type = other DNA
atgcattccgtattgggcactatgatgccagaaatctgcaaggctccacaccttcctgtatttcccttcctctat

SEQ ID NO: 182407 - DNA, 75 bp, synthetic construct
  source 1..75: mol_type = other DNA
cactacctctttttatgctactgaacccagtagcgataattcgatggttgtaacatcaaacccaaatgtagggat

SEQ ID NO: 182408 - DNA, 75 bp, synthetic construct
  source 1..75: mol_type = other DNA
atggttaatgccccgtttgagtatcatcctaataagcctactaccagttacgattgtggccgtatttcccctttg

SEQ ID NO: 182409 - DNA, 75 bp, synthetic construct
  source 1..75: mol_type = other DNA
tgcaattgatattctcggagtaggaatggttaatgcaccgtttgactatcagcctaataagccttctaacagtta

SEQ ID NO: 182410 - DNA, 75 bp, synthetic construct
  source 1..75: mol_type = other DNA
aacaaacgtatgggtgacctgcgtgacatcaatggcgaagccggtgcatgggcacgcatcatgagcggtaccggc

SEQ ID NO: 182411 - DNA, 75 bp, synthetic construct
  source 1..75: mol_type = other DNA
ttaaaggagaagccggtgcatgggcccgtatcatgagcggaacaggtgctgccggtggtggtttcagtgataatt

SEQ ID NO: 182412 - DNA, 75 bp, synthetic construct
  source 1..75: mol_type = other DNA
cttaacgttggtgatggtactgttattctctcccagaagcctgataataaaggcaatgtacaggctttttcccgc

SEQ ID NO: 182413 - DNA, 75 bp, synthetic construct
  source 1..75: mol_type = other DNA
ggatgtaaataataccagcgtctggcaatatgtgggaaaaaaccgtaatgaagcaatagcagtagttaagaatga

SEQ ID NO: 182414 - DNA, 75 bp, synthetic construct
  source 1..75: mol_type = other DNA
aaatattcatgccaccaactcaagtaaggtaacgctgggtagttcaagtgtttatgttgatcgtaatgacggtac

SEQ ID NO: 182415 - DNA, 75 bp, synthetic construct
  source 1..75: mol_type = other DNA
acaatctggagatagcggctcccctctctatgcctgggataaaacacaaaacagatgggtgctcgcaggtgttac

SEQ ID NO: 182416 - DNA, 75 bp, synthetic construct
  source 1..75: mol_type = other DNA
gttatagtctggatgttctgtctaacaccggcgcttatgcatctcacgggcactccatcgcttctgcggggggga

SEQ ID NO: 182417 - DNA, 75 bp, synthetic construct
  source 1..75: mol_type = other DNA
gactggagtttgagaaatccgcctttggtaagtacaacgttgataatgcagtcaacgctaacttccgttactcgt

SEQ ID NO: 182418 - DNA, 75 bp, synthetic construct
  source 1..75: mol_type = other DNA
aaagtgcctcaggccttgcatctgtggggtacaaatcatttttgagtgaggtcaacaacctgaataaacgtatgg

SEQ ID NO: 182419 - DNA, 75 bp, synthetic construct
  source 1..75: mol_type = other DNA
cttgatttttctctgcatcggttcagcaaactcatcacagaggctgcacctgctgatataaatatatccggacaa

SEQ ID NO: 182420 - DNA, 75 bp, synthetic construct
  source 1..75: mol_type = other DNA
aaatggggtataaacggggtttccggagatgaccttcataaagttggggatggaacgcttattattaatggcaca

SEQ ID NO: 182421 - DNA, 75 bp, synthetic construct
  source 1..75: mol_type = other DNA
tgaaaataaaggcgtatttacacctggtgcaaccggaattgaaataaaagacaaaaatggaaatgcagttggtac

SEQ ID NO: 182422 - DNA, 75 bp, synthetic construct
  source 1..75: mol_type = other DNA
aacgcaaaaagtcttatggcgttaatgtcgctgggaataaaaaacgggcatgaagtcagtgttatttttgatggt

SEQ ID NO: 182423 - DNA, 75 bp, synthetic construct
  source 1..75: mol_type = other DNA
tgattccggcgattgctctgggaacttttgttgctgcatttgtgccgatggccgctgtcttcccggcactggaac

SEQ ID NO: 182424 - DNA, 75 bp, synthetic construct
  source 1..75: mol_type = other DNA
atgttgaatgagcacatcttgtttaaagagttccctgacaaagagatattattagacaagttcaaagaatatcca

SEQ ID NO: 182425 - DNA, 75 bp, synthetic construct
  source 1..75: mol_type = other DNA
actcatactagggcaacaacttacttcagatgaatctccatggtcacagatcttcaagagattacagcttaaaat

SEQ ID NO: 182426 - DNA, 75 bp, synthetic construct
  source 1..75: mol_type = other DNA
tggatttagtaaacgatgcagacgagttagaagagctggtcgaagatattgccgctcgttgtgggcgcgatctac

SEQ ID NO: 182427 - DNA, 75 bp, synthetic construct
  source 1..75: mol_type = other DNA
atgctgccagatattactgttctaaaagatactgtcattaaaggtattgatctgcctcgtctattgcagacgctt

SEQ ID NO: 182428 - DNA, 75 bp, synthetic construct
  source 1..75: mol_type = other DNA
cgcgacagcaaagtggtactgattgatagcgactcctttcagattaacgctaatggcacgttgcatttatgcgaa

SEQ ID NO: 182429 - DNA, 75 bp, synthetic construct
  source 1..75: mol_type = other DNA
aggcattccaagaacggattggtaaaaaatcccaatggattgcttattatgaatacatggcaaggctagccgata

SEQ ID NO: 182430 - DNA, 75 bp, synthetic construct
  source 1..75: mol_type = other DNA
attatcaaaaatttttgtttgcatagaaaaaaatctctttttgagaaaaacaaagggttaaaaagactgtaccta

SEQ ID NO: 182431 - DNA, 75 bp, synthetic construct
  source 1..75: mol_type = other DNA
tcgagcgtgtgctatttctgtttctgaatgattttattgaacaatttccaatgatcaaccttggcgtttccatca

SEQ ID NO: 182432 - DNA, 75 bp, synthetic construct
  source 1..75: mol_type = other DNA
gctattggcggagcggaatcaatattgtgggaactccgagaaaagtcagaacaagtaggtgaaaccaagcattac

SEQ ID NO: 182433 - DNA, 75 bp, synthetic construct
  source 1..75: mol_type = other DNA
aggaattccaagaacggattggtaaaaaataccaatggattgcttattatgaatacatggcaaggctagccgata

SEQ ID NO: 182434 - DNA, 75 bp, synthetic construct
  source 1..75: mol_type = other DNA
atatagtgaagactcagcatttaggcatctaatcgattgggcatgggccagaacagataaaagctttgtttcgga

SEQ ID NO: 182435 - DNA, 75 bp, synthetic construct
  source 1..75: mol_type = other DNA
catccctgtgcgcaagcattatgttccttgcgggaatgaccgtaagcacaacggcgtttgcccactgcgacagca

SEQ ID NO: 182436 - DNA, 75 bp, synthetic construct
  source 1..75: mol_type = other DNA
tggggatactgaataccgatgatatcagtacgtctttttatgctactgaacccaatacggataactcgatggtcg

SEQ ID NO: 182437 - DNA, 75 bp, synthetic construct
  source 1..75: mol_type = other DNA
gttttgctgtttttattctctactttagtggtgcaacacttgcagccccaaaaggtatctgtacccctgataatg

SEQ ID NO: 182438 - DNA, 75 bp, synthetic construct
  source 1..75: mol_type = other DNA
ggacgtcgacgcgaaggtgagccgtggagacgtgtttaacctgttcatcaaaaagtttcagtcgcagtcgctgct

SEQ ID NO: 182439 - DNA, 75 bp, synthetic construct
  source 1..75: mol_type = other DNA
acgtttaatccgtagtgtcggtaaatcgttagccagcaaaatggtgctgagcggagaaagtatcaccgcccagca

SEQ ID NO: 182440 - DNA, 75 bp, synthetic construct
  source 1..75: mol_type = other DNA
atgagcgaactgatcgtcagccgtcagcaacaagtattgttgctgacccttaaccgtcccgccgcacgtaatgcg

SEQ ID NO: 182441 - DNA, 75 bp, synthetic construct
  source 1..75: mol_type = other DNA
tttgtggctggattatctggatgcactggagctggttgatacctccagtgcgccagatattgaatggcctacgcc

SEQ ID NO: 182442 - DNA, 75 bp, synthetic construct
  source 1..75: mol_type = other DNA
acggacgggaataattatcaggatgttatgcccgaaaacacgtctattgcttttacgcttcaagggcatgactca

SEQ ID NO: 182443 - DNA, 75 bp, synthetic construct
  source 1..75: mol_type = other DNA
gccagttgaaagcgggcggcgatacgctgctggatgcgaagaacgacatcattctcagcggggccgccaacaccc

SEQ ID NO: 182444 - DNA, 75 bp, synthetic construct
  source 1..75: mol_type = other DNA
agccagtttattttgattttaaagaaataccagctgcagatttttcatctgttgttggaagtgcggtaacaacac

SEQ ID NO: 182445 - DNA, 75 bp, synthetic construct
  source 1..75: mol_type = other DNA
tgatggtgcttatattaattggcgattagtcaccattgcattatacaaaacaatacagttctttacatttgtctt

SEQ ID NO: 182446 - DNA, 75 bp, synthetic construct
  source 1..75: mol_type = other DNA
atataatctggagaaatttattggttgtgcgaaaatatggcttaattattcatttattggaagtttagatgatac

SEQ ID NO: 182447 - DNA, 75 bp, synthetic construct
  source 1..75: mol_type = other DNA
gtctggcgcaggaaggtgtggcaccgaaagcgttcgctaaactttctaagcgcgcagtacccgcgaaagggctga

SEQ ID NO: 182448 - DNA, 75 bp, synthetic construct
  source 1..75: mol_type = other DNA
aatctatccggggaataatactatccgaagatacagatatggaagcaagggttgatttatttgaaaggataaata

SEQ ID NO: 182449 - DNA, 75 bp, synthetic construct
  source 1..75: mol_type = other DNA
ttcctttaaagctgaaattcgatctgatggcgctaacgcaataagaagattgcagggaagaattggttatattag

SEQ ID NO: 182450 - DNA, 75 bp, synthetic construct
  source 1..75: mol_type = other DNA
gctgaagtgcgttctgatggagcgaatgctaagaagaaattgctaggaagaatcgcattcgtaaccaataaatat

SEQ ID NO: 182451 - DNA, 75 bp, synthetic construct
  source 1..75: mol_type = other DNA
taaaggaagtgaacaggaaataggtttcagcaatgtcacacctgttattacagctatagacgccggagataaaac

SEQ ID NO: 182452 - DNA, 75 bp, synthetic construct
  source 1..75: mol_type = other DNA
aatgtgtttgcggaatgtgttcggaagatctccgcaagagttcgtggtgacacatctaacgcggatctcttgctc

SEQ ID NO: 182453 - DNA, 75 bp, synthetic construct
  source 1..75: mol_type = other DNA
ttgaaaaataatcatttaacatcatatgattggctaaatgcgctgaataatcttgaattgctttcacttcattcc

SEQ ID NO: 182454 - DNA, 75 bp, synthetic construct
  source 1..75: mol_type = other DNA
caagcttggcggcattccggtgaaagtttcccttagccgtgaagagtgtttcctcgcaacccgtacccgccacgc

SEQ ID NO: 182455 - DNA, 75 bp, synthetic construct
  source 1..75: mol_type = other DNA
gctgatatgcatatccgtgcaggacgactggataatgaggcatcgtttattctcgccggtggcagtatgaccctg

SEQ ID NO: 182456 - DNA, 75 bp, synthetic construct
  source 1..75: mol_type = other DNA
acaaatcttttagtgacttcgcttccgatttactcgggccgtgggcaggatatttcaccggctggacctactggt

SEQ ID NO: 182457 - DNA, 75 bp, synthetic construct
  source 1..75: mol_type = other DNA
tatcagcgagcatttacatgggaggatgaccgcaaatctaaatttttagaatcaattattataggtttacctatt

SEQ ID NO: 182458 - DNA, 75 bp, synthetic construct
  source 1..75: mol_type = other DNA
tggcaaaccgcgtcacgccggacagcctgccgccggtggagtggctgacctacggcagcggttacctggcgggca

SEQ ID NO: 182459 - DNA, 75 bp, synthetic construct
  source 1..75: mol_type = other DNA
gggttacttaatcagagtgcgcatttgttttatggcacaatcagggaaaacctaactttaggcgcacctttagcc

SEQ ID NO: 182460 - DNA, 75 bp, synthetic construct
  source 1..75: mol_type = other DNA
gtcaatgaatggtgtagccaatcgcattcggaaggatataactattgcacaagatgattacataactaacttatt

SEQ ID NO: 182461 - DNA, 75 bp, synthetic construct
  source 1..75: mol_type = other DNA
aaagtcatagatgatgatttgtttctcacagctaatcgcatgatggatcgtgtgatgttggagaagaataaacca

SEQ ID NO: 182462 - DNA, 75 bp, synthetic construct
  source 1..75: mol_type = other DNA
agggggcggtggtctggatgaccagcgttcagcactggagggatatttagataaaaatgctggattgttcgaaaa

SEQ ID NO: 182463 - DNA, 75 bp, synthetic construct
  source 1..75: mol_type = other DNA
agggggcggaggtctggatgaccaacgttcagcattggaaggttatttagacagaaactctgataaattcaataa

SEQ ID NO: 182464 - DNA, 75 bp, synthetic construct
  source 1..75: mol_type = other DNA
agaaattatcaatgctcaaactgtaagagagatacctaaatttgattttgatatggatgaagtacttgatccaat

SEQ ID NO: 182465 - DNA, 75 bp, synthetic construct
  source 1..75: mol_type = other DNA
ttacgcagagaagaaaatagttatagcgataaaataaatgaaagaaaattagcaggtaaaagagtaggtatacat

SEQ ID NO: 182466 - DNA, 75 bp, synthetic construct
  source 1..75: mol_type = other DNA
ccaagatcccacatcttcgcttcctggggaaagttaccgttgaggggtgtgatttggtgctctaccctcacctct

SEQ ID NO: 182467 - DNA, 75 bp, synthetic construct
  source 1..75: mol_type = other DNA
ttcgtctgcgccgggaaatcaagggcgagatctggcttgccctcagcgggctgctttccgtgctcctcggtgcga

SEQ ID NO: 182468 - DNA, 75 bp, synthetic construct
  source 1..75: mol_type = other DNA
ctgctctcgattatccttggtgctatcgtcttgtggatattttttacccgtccggtcgagtcattcgtggccgca

SEQ ID NO: 182469 - DNA, 75 bp, synthetic construct
  source 1..75: mol_type = other DNA
cgttgggagtacaactcaaacaacaaaaaacaactgggatacacccaggcactggaacacgtcaggttagtccat

SEQ ID NO: 182470 - DNA, 75 bp, synthetic construct
  source 1..75: mol_type = other DNA
gagtcactgatccaatgccggaagccgttatcaactttttcattgccaaattgtatttcttactacaacatagga

SEQ ID NO: 182471 - DNA, 75 bp, synthetic construct
  source 1..75: mol_type = other DNA
actcgatttagttaccgatggtttcgcctcgaagatctgcatccctgactctacgttgtcatggtattcgacagg

SEQ ID NO: 182472 - DNA, 75 bp, synthetic construct
  source 1..75: mol_type = other DNA
tcgacagcgacggggccagcgacacgcattacattcccggcgaaggcaaaatgccgctgcgggagttgatgcgcg

SEQ ID NO: 182473 - DNA, 75 bp, synthetic construct
  source 1..75: mol_type = other DNA
ttcctgacaccgatggtaaattgcccgatgccgcgatttttttgtttgaaccagaaaagttgctgcaaattgtcc

SEQ ID NO: 182474 - DNA, 75 bp, synthetic construct
  source 1..75: mol_type = other DNA
cgtgtattgatggttggggtcctgctcaagtagcaggggtttcactaccagcatatgttgcggattattctggca

SEQ ID NO: 182475 - DNA, 75 bp, synthetic construct
  source 1..75: mol_type = other DNA
ggtgatgttactcctgaattcacaaggtctttcccttcaaaagcgtaccaggaggcattgggtacccctgataac

SEQ ID NO: 182476 - DNA, 75 bp, synthetic construct
  source 1..75: mol_type = other DNA
caagcttcgggatggcgatttgcggtcgtatgctggaagcacagggctttcgcgtcgggatcatcgcccagccag

SEQ ID NO: 182477 - DNA, 75 bp, synthetic construct
  source 1..75: mol_type = other DNA
taaatggtggtagagtggtacagcgactgttctgggattttgcgggaaaagcgattgcgttgccaccggttaaag

SEQ ID NO: 182478 - DNA, 75 bp, synthetic construct
  source 1..75: mol_type = other DNA
tattgccattgtcgaagagcagcttcagcaactgcgtgaacagggtctggtgatgaatctgcaacaagacatctg

SEQ ID NO: 182479 - DNA, 75 bp, synthetic construct
  source 1..75: mol_type = other DNA
cactgtttcccaacaagataaagaggaatacactaatgccgaagaatctgcaaccggagatggaagttctcaaca

SEQ ID NO: 182480 - DNA, 75 bp, synthetic construct
  source 1..75: mol_type = other DNA
ttaataaagtacttgatccattgaatgtcgagttacgtgcaaagttacggaaagaagtaagattagtactgaaat

SEQ ID NO: 182481 - DNA, 75 bp, synthetic construct
  source 1..75: mol_type = other DNA
ggacttaaaagcaggcggcctcaaacacattaaggcactggcgcagacgtatcagatgccgattatcggttacac

SEQ ID NO: 182482 - DNA, 75 bp, synthetic construct
  source 1..75: mol_type = other DNA
tgccaacatgatgacggcggatacgctgaacattatcgctcaatatgcccagcaggcagctgcatcagcagatca

SEQ ID NO: 182483 - DNA, 75 bp, synthetic construct
  source 1..75: mol_type = other DNA
gtccgcagtggcgcagaacacagcagcctcatccgaatcggcaacggcagccgcaggttcagcagcacaggctga

SEQ ID NO: 182484 - DNA, 75 bp, synthetic construct
  source 1..75: mol_type = other DNA
ttggaaagccgagggttattgattgtacaacgtatctacaaaaagaggaaaaagctaatgccgaagaatctgcaa

SEQ ID NO: 182485 - DNA, 75 bp, synthetic construct
  source 1..75: mol_type = other DNA
ttagtcggcatgtctttggggggatttctttcccagcttgtagctctcaagtatccgaaacgtgtgaagagcttg

SEQ ID NO: 182486 - DNA, 75 bp, synthetic construct
  source 1..75: mol_type = other DNA
cgtgtacaggcagcatggaaccgtaaaaaagaactcatctctgaaggtatcaaggtatctaggcgttgccctgca

SEQ ID NO: 182487 - DNA, 75 bp, synthetic construct
  source 1..75: mol_type = other DNA
ttacgaaacattcttcgctctggtgtagatgtagtcaccctgtccgatggtgaacattacacaagtgagtctctt

SEQ ID NO: 182488 - DNA, 75 bp, synthetic construct
  source 1..75: mol_type = other DNA
agcgttttgtctatgctgccagtagctcaacttatggaacccatccaagtttacctaaggtagaagatacaattg

SEQ ID NO: 182489 - DNA, 75 bp, synthetic construct
  source 1..75: mol_type = other DNA
ataacgttgcagttggtgaccgtacgacgctcaatcaactgtttgatgtacttaaaaatacattaaaaaataata

SEQ ID NO: 182490 - DNA, 75 bp, synthetic construct
  source 1..75: mol_type = other DNA
aaaattatcgctgactttctcaacatggagccatcagagatatggccttcgcgttatcagaatctgactgttaaa

SEQ ID NO: 182491 - DNA, 75 bp, synthetic construct
  source 1..75: mol_type = other DNA
tgaatgggagaatgataattacattgcgcttgggacctcccgaaccagatagaaacattaacgttgttaatactg

SEQ ID NO: 182492 - DNA, 75 bp, synthetic construct
  source 1..75: mol_type = other DNA
atcggaaccctgaatgtgcaggatcaagactctgtcatcacgcaacctggagaatggcggcacggttcaaatgaa

SEQ ID NO: 182493 - DNA, 75 bp, synthetic construct
  source 1..75: mol_type = other DNA
tggttgggtggtatggcactggagtgcttaatattttggctggcggtaatgcttccttaaccactattactacca

SEQ ID NO: 182494 - DNA, 75 bp, synthetic construct
  source 1..75: mol_type = other DNA
gttacagaggctatacagtcgctttctgaagtcactgagaggggtttaatagatgttgatgtagtagagatttag

SEQ ID NO: 182495 - DNA, 75 bp, synthetic construct
  source 1..75: mol_type = other DNA
gattcagttctgagcgacaagccaaaggcgactcactacgcagacagtctaagatggttaatgactggcttaagg

SEQ ID NO: 182496 - DNA, 75 bp, synthetic construct
  source 1..75: mol_type = other DNA
gcgccatcctcgacggcaaaaagacgcagacgcggcgcatcatgaaggttcagccgtctgatggtttccacccaa

SEQ ID NO: 182497 - DNA, 75 bp, synthetic construct
  source 1..75: mol_type = other DNA
gctggggtgttttcacgaacttatggacttgaatctgttggactgagatattttaatgtatttggccctcgtcaa

SEQ ID NO: 182498 - DNA, 75 bp, synthetic construct
  source 1..75: mol_type = other DNA
atggcgctcataaatctggtatacttaccgttacacattggggctgattctggattcgacgggatttgcgaaacc

SEQ ID NO: 182499 - DNA, 75 bp, synthetic construct
  source 1..75: mol_type = other DNA
caggccgataaagttgccgtcacgttgacgttggtcaacgtgggggatgtggcattgtttggcctggtcattgat

SEQ ID NO: 182500 - DNA, 75 bp, synthetic construct
  source 1..75: mol_type = other DNA
ctatctccacgccgcatcgaaggtgaaagtgggcggctggcactggagggcagcatcgcctacatcgtcaaccac

SEQ ID NO: 182501 - DNA, 75 bp, synthetic construct
  source 1..75: mol_type = other DNA
ccggtggacaggctgactgaacagcgcggttttgacggccggacgcaacgttaccagtatgacctgaccggaaaa

SEQ ID NO: 182502 - DNA, 75 bp, synthetic construct
  source 1..75: mol_type = other DNA
gagcgccgggtaatcatcacggacagcctgaaccggcgggaggtgctgtacacggagggcgaaggcggcctgaag

SEQ ID NO: 182503 - DNA, 75 bp, synthetic construct
  source 1..75: mol_type = other DNA
cagaatatgaatatggcacagctccaggcggaaatcgcgaagcatttcccgtcgcgtctgggttacgttacaccg

SEQ ID NO: 182504 - DNA, 75 bp, synthetic construct
  source 1..75: mol_type = other DNA
acttgctgacgcccgacgcttaagagcggattacctttccttgttagccaacggaattgacccgcaaattcaagc

SEQ ID NO: 182505 - DNA, 75 bp, synthetic construct
  source 1..75: mol_type = other DNA
agacttccttttcagaatgtttttttagtaacacgtcatccatttcgctttagctattttatacatattaagttg

SEQ ID NO: 182506 - DNA, 75 bp, synthetic construct
  source 1..75: mol_type = other DNA
tttacaacgttgcttatggtgagagaacatcattaaacgaattagttgaatttataaaaaatgaccttggcagta

SEQ ID NO: 182507 - DNA, 75 bp, synthetic construct
  source 1..75: mol_type = other DNA
taaaagcaaaagcgttacccatgattacgcgaaagacatttggcgttcactagaaaaagatgtattccctgccat

SEQ ID NO: 182508 - DNA, 75 bp, synthetic construct
  source 1..75: mol_type = other DNA
tcgttaaaacgaacggtaagaagttatggcgtttccgttatcaacgtccagcaacaaagcagcgaacaatgatag

SEQ ID NO: 182509 - DNA, 75 bp, synthetic construct
  source 1..75: mol_type = other DNA
aaagcccgagcattggttgaagcacttgagccaatcaaagctcgtggggcactcgaaacagttcgtcgtctagtg

SEQ ID NO: 182510 - DNA, 75 bp, synthetic construct
  source 1..75: mol_type = other DNA
ttcgctcaggctggggtaccggtaatcacggctcaccacaaacttatgcagcgggttctctgggacgttttggta

SEQ ID NO: 182511 - DNA, 75 bp, synthetic construct
  source 1..75: mol_type = other DNA
aaatcagcctcgcttgctgaaatatcagcgatatctcccgtcgctgataacatcaaaaatgaaaacggtgaacag

SEQ ID NO: 182512 - DNA, 75 bp, synthetic construct
  source 1..75: mol_type = other DNA
tcttatgaaaagcggtaattgtaatacctttgttattgccaaggattgtggatataatagcctgtcgtattttat

SEQ ID NO: 182513 - DNA, 75 bp, synthetic construct
  source 1..75: mol_type = other DNA
tctggggggattttaggaactatcgggagtgctattagtaaatttattccgaatgcaaagggcggtgtttatgag

SEQ ID NO: 182514 - DNA, 75 bp, synthetic construct
  source 1..75: mol_type = other DNA
tcgctgaagttgatgtgcttattaagaaaagtgaatttggagtaaatgccatagggttttcacatccgaaagaca

SEQ ID NO: 182515 - DNA, 75 bp, synthetic construct
  source 1..75: mol_type = other DNA
tatggggattttttcatcaaaagggcgctatatttacaaagggaaaactggcattattaacgaagtgcttagaga

SEQ ID NO: 182516 - DNA, 75 bp, synthetic construct
  source 1..75: mol_type = other DNA
tttgcgccgtttagctacactggcagaacagttggttttgcctgaagggtttatccatacctatgtttatcttgg

SEQ ID NO: 182517 - DNA, 75 bp, synthetic construct
  source 1..75: mol_type = other DNA
tcgccagatgcatttgtagatgaaaatagttcggttcaggtaattcatgtatctgatcaggaatttgatcactat

SEQ ID NO: 182518 - DNA, 75 bp, synthetic construct
  source 1..75: mol_type = other DNA
cttctgttcagatagttaaagtatctaaggaggagttcgaaaattattctaatagtgaaagctggaagaataaga

SEQ ID NO: 182519 - DNA, 75 bp, synthetic construct
  source 1..75: mol_type = other DNA
taaaagacctgtggaatattatgatgtacgccatcccttatgcgctgattgctgttggggggggttctttgttgc

SEQ ID NO: 182520 - DNA, 75 bp, synthetic construct
  source 1..75: mol_type = other DNA
tgaaaatgatatactccaatattttagctactatggtattggtattttaatttttaccatcataacaaatgaata

SEQ ID NO: 182521 - DNA, 75 bp, synthetic construct
  source 1..75: mol_type = other DNA
agcaggttcgttctttgaatcagcgtccggccaacgtcgctgccgttgttcctgccgtaacgtctggcacggtga

SEQ ID NO: 182522 - DNA, 75 bp, synthetic construct
  source 1..75: mol_type = other DNA
cagaacaaccagaccgggacattgttaccagcaggtaataagcacgcatggatgtgcgccctgaataattttttt

SEQ ID NO: 182523 - DNA, 75 bp, synthetic construct
  source 1..75: mol_type = other DNA
atgctggcagggcgcgatcttaaagcggtgttcgcactcggggccggtgttgattctattttgagcaagctacag

SEQ ID NO: 182524 - DNA, 75 bp, synthetic construct
  source 1..75: mol_type = other DNA
aaaaaacatgagaaagatggcagcatcacccattatgacgacaacaatcagtcagcttttaactggcaggtgatg

SEQ ID NO: 182525 - DNA, 75 bp, synthetic construct
  source 1..75: mol_type = other DNA
atgacagaactccgttcgtccttgaaatcgacggagggtgataacagaatagcgttatcatcaggattattttta

SEQ ID NO: 182526 - DNA, 75 bp, synthetic construct
  source 1..75: mol_type = other DNA
aatgacagtagccaatacaattacggcgttaccggcggcgtggttatccatcctcatggtgtgacgctctcgcaa

SEQ ID NO: 182527 - DNA, 75 bp, synthetic construct
  source 1..75: mol_type = other DNA
cacctataagaaatcggtaaaagggcgaaaaaagaaacgttcgaaaggtcagcgcggtttaaacaaaacagacaa

SEQ ID NO: 182528 - DNA, 75 bp, synthetic construct
  source 1..75: mol_type = other DNA
atccctgcccccccgatgccagagttattattgtcacggatgctggatttcagagcacatggtttcaccatatta

SEQ ID NO: 182529 - DNA, 75 bp, synthetic construct
  source 1..75: mol_type = other DNA
ggatatagaggtttcggatgaggtaatggaaactttagcacatgctttgagagaattgagaaatgcaaaaaaaaa

SEQ ID NO: 182530 - DNA, 75 bp, synthetic construct
  source 1..75: mol_type = other DNA
cgtcttaagccatttaatctgccctgtattgtggtggacgacggcagcgatgccgccacgcaacagcaactggac

SEQ ID NO: 182531 - DNA, 75 bp, synthetic construct
  source 1..75: mol_type = other DNA
aaggagcaacgtcattcaaaatcctgtcgacaacgggggataacaggctacatggggttgctgaaatatataagt

SEQ ID NO: 182532 - DNA, 75 bp, synthetic construct
  source 1..75: mol_type = other DNA
acaacatatacgcgaggctggtaatgactccaacttattgatagtgttttatgttcagataatgcccgatgactt

SEQ ID NO: 182533 - DNA, 75 bp, synthetic construct
  source 1..75: mol_type = other DNA
gtcagccagctaaagaaagaatcatggatcttaaaaataacactgtcggtattgcttgtggcgatttttctgcca

SEQ ID NO: 182534 - DNA, 75 bp, synthetic construct
  source 1..75: mol_type = other DNA
tgcggatgcgggtaaaattattactacatttggccagtttgtcattggtgatagtctggctgtaggttttgttat

SEQ ID NO: 182535 - DNA, 75 bp, synthetic construct
  source 1..75: mol_type = other DNA
ggttttgtttgccataacattccacttgtcgcccaatcattcaacgttttgattttctttcgggccttttctaag

SEQ ID NO: 182536 - DNA, 75 bp, synthetic construct
  source 1..75: mol_type = other DNA
acgaaggacgtcggaactgcctccgggaatgtcatgcaagttggggcgggcggttttttggttagtacgcctaca

SEQ ID NO: 182537 - DNA, 75 bp, synthetic construct
  source 1..75: mol_type = other DNA
agcaggattttattcgtatactggtgatacgcatgcctatatccaggttgactatgctaccgggaatgtcagagc

SEQ ID NO: 182538 - DNA, 75 bp, synthetic construct
  source 1..75: mol_type = other DNA
attaccaccgtcagcgccattgtgttcctcgtcacgccggatacccgcgtagcgacggcttacatcctcaaccgc

SEQ ID NO: 182539 - DNA, 75 bp, synthetic construct
  source 1..75: mol_type = other DNA
agcgctgcggcacaggagctgcatcgcgttccttctgcggtcagctataccgtgcgtcagctggaagagtggctg

SEQ ID NO: 182540 - DNA, 75 bp, synthetic construct
  source 1..75: mol_type = other DNA
ttactgttatggcatataagtatatcgccagtaacaaatgcagtttgtttatgttcgaacatgataaagacagag

SEQ ID NO: 182541 - DNA, 75 bp, synthetic construct
  source 1..75: mol_type = other DNA
gcgttttaggcatgtttggctacgatcaggtgagatggaacgacaccgtgatccacggcctgctggccctgcctg

SEQ ID NO: 182542 - DNA, 75 bp, synthetic construct
  source 1..75: mol_type = other DNA
gtgcctctgttgcccgtattgcccgggaacacgatatcaatgataacctcctgttcaaatggctcagactctggc

SEQ ID NO: 182543 - DNA, 75 bp, synthetic construct
  source 1..75: mol_type = other DNA
ctgtatcgcaaagagtggttgggcgatcacaaacagatcctcgccgcgttaatcaaaaaagatgcccgagcggcg

SEQ ID NO: 182544 - DNA, 75 bp, synthetic construct
  source 1..75: mol_type = other DNA
ttcataagttatctctggcaagggataacaaaaaagatttatttgctaattatttcaaagatgttccaaattccc

SEQ ID NO: 182545 - DNA, 75 bp, synthetic construct
  source 1..75: mol_type = other DNA
tgattctattggtctcatgtctaattcagctgaaccgttagaagctgccagaagtctagttgccatgattgttgg

SEQ ID NO: 182546 - DNA, 75 bp, synthetic construct
  source 1..75: mol_type = other DNA
tttattcctacttttactgatgcagatattgatgaatacttgcaggatgaaaaacgtttttccttgcggtggatt

SEQ ID NO: 182547 - DNA, 75 bp, synthetic construct
  source 1..75: mol_type = other DNA
aacggagaaaagctcgggaggcgatggaagatacaaaacctaaagataaaaataaactacgaagcggatggacaa

SEQ ID NO: 182548 - DNA, 75 bp, synthetic construct
  source 1..75: mol_type = other DNA
ggcgcaaccgtcgtgtcccgggcatcactggtctggtattgctgacctttctggcatcagctgttgcacaggcat

SEQ ID NO: 182549 - DNA, 75 bp, synthetic construct
  source 1..75: mol_type = other DNA
accgataaaatcgaagagttaatatctcagcacgattgtgttgtattaccatcttattatagagaaggtgtacct

SEQ ID NO: 182550 - DNA, 75 bp, synthetic construct
  source 1..75: mol_type = other DNA
taaacaatatatttttaggggttttaaatggactaaatgaatataatagatttttccttgcgaatgttttagcca

SEQ ID NO: 182551 - DNA, 75 bp, synthetic construct
  source 1..75: mol_type = other DNA
ttagctttattgtactgcttgatgatctggatcgtctcgagccagcacaggcagttgaggtgataaggctagtta

SEQ ID NO: 182552 - DNA, 75 bp, synthetic construct
  source 1..75: mol_type = other DNA
agcgaacggcgcatgaaaacactgggtgaatcggtgaaaaatacgcttctcacgcccaatgaggcccgtaaacgt

SEQ ID NO: 182553 - DNA, 75 bp, synthetic construct
  source 1..75: mol_type = other DNA
atgcccgtgaggatccgttcgcgtctgccgggaaaacgtcgtcaggcacacgccaggagggcgcgtctgacggta

SEQ ID NO: 182554 - DNA, 75 bp, synthetic construct
  source 1..75: mol_type = other DNA
aaaggcgaagttcctgacccgatgaatctgttgggggaagcggagcactttatttatcctaccgttgaaagctat

SEQ ID NO: 182555 - DNA, 75 bp, synthetic construct
  source 1..75: mol_type = other DNA
gttaatctcgatcttggggctgtatattctcaaaaagataaagcatgggaatttaacactaaagaaagcaatatt

SEQ ID NO: 182556 - DNA, 75 bp, synthetic construct
  source 1..75: mol_type = other DNA
tccgatttgatatcatctcatttatatgtgcatactgcaaaatggaagatctggtaaaccgatgccgtgaatatc

SEQ ID NO: 182557 - DNA, 75 bp, synthetic construct
  source 1..75: mol_type = other DNA
gtcactaatacacggcacggaccggaaacaccagatatcaatacctactttactgagccagcgaataaacctggt

SEQ ID NO: 182558 - DNA, 75 bp, synthetic construct
  source 1..75: mol_type = other DNA
agcgtattgctatggcagctaaagcaaaagaatcagcggaaccggacgacgcagaacgtaaatttcgcagagggt

SEQ ID NO: 182559 - DNA, 75 bp, synthetic construct
  source 1..75: mol_type = other DNA
aagaaacgttggctttttttgaccaaatgcgtcaacaccaggaaattggctgcgatgtctacccttactcagcca

SEQ ID NO: 182560 - DNA, 75 bp, synthetic construct
  source 1..75: mol_type = other DNA
ttgagaggtggatggaatatgtatcagtatccgttgaatcaccatacaagtgatagacccaatggggttagatgc

SEQ ID NO: 182561 - DNA, 75 bp, synthetic construct
  source 1..75: mol_type = other DNA
atgatggcggggaaaatccccgcctttttcctgccggtcccggacagagcacaaaggaagtcgccgccggctccg

SEQ ID NO: 182562 - DNA, 75 bp, synthetic construct
  source 1..75: mol_type = other DNA
atgaaatatatttgttttaaagaactaccctattgtgatagtgatagtgatatcagtataatagaatctaagggg

SEQ ID NO: 182563 - DNA, 75 bp, synthetic construct
  source 1..75: mol_type = other DNA
catcaacgccattactgccgatgacgtgattaacgctgccgaaaaaggcgcggcgttaacgctctctggcagcac

SEQ ID NO: 182564 - DNA, 75 bp, synthetic construct
  source 1..75: mol_type = other DNA
ttgatgtctaccggaaattgtcatgggattacagaaccaataatccctgccgtctgggtaagaaaatcattattg

SEQ ID NO: 182565 - DNA, 75 bp, synthetic construct
  source 1..75: mol_type = other DNA
ccgaatctgttactcagcatcttgccgagcgcatcctgtgcggcgaactgccagcaggtagcgtgctgcctggcg

SEQ ID NO: 182566 - DNA, 75 bp, synthetic construct
  source 1..75: mol_type = other DNA
ctcgtttccggtctgatccatcacgatattttgagcggtaacgctgtctcttttgaggcgctgagctctcaggtt

SEQ ID NO: 182567 - DNA, 75 bp, synthetic construct
  source 1..75: mol_type = other DNA
gaaaaagcggctgctgaaaaggcagcagctgataagaaagcagcggcagaaaaagccgcagctgataagaaagca

SEQ ID NO: 182568 - DNA, 75 bp, synthetic construct
  source 1..75: mol_type = other DNA
gcagctgcaaaagcagcagctgaaaaagccgctgcagcaaaagcggccgcagaggcagatgatattttcggtgag

SEQ ID NO: 182569 - DNA, 75 bp, synthetic construct
  source 1..75: mol_type = other DNA
atgaaatatatttgttttaaagaactaccctattgtgatagtgatagtgatagtgatagtgatatcagtataata

SEQ ID NO: 182570 - DNA, 75 bp, synthetic construct
  source 1..75: mol_type = other DNA
gagccaccaagagcgaaactccgttcgtgctgcctacattcataaagcagaacacctcgatgagagaaagcttat

SEQ ID NO: 182571 - DNA, 75 bp, synthetic construct
  source 1..75: mol_type = other DNA
agaaaaaggcagacaagatcgagcagagcgaagctcttacttttgaatctgttgccagggactggcataaggctt

SEQ ID NO: 182572 - DNA, 75 bp, synthetic construct
  source 1..75: mol_type = other DNA
ttcagaacaacgggagctggagtgtgaacgtgccggcggcagacgtcgcggcactggcggatggcaccagctaca

SEQ ID NO: 182573 - DNA, 75 bp, synthetic construct
  source 1..75: mol_type = other DNA
caggtgacgggtgcggcggcgggcgatacggttaccgtaacgcttggcgggaaaacctacactgctaccgtgcag

SEQ ID NO: 182574 - DNA, 75 bp, synthetic construct
  source 1..75: mol_type = other DNA
accaccgctgaagcggggcagattgttacggtaacgctcaatagcccgaccgtgcagacctatcaggcaacggta

SEQ ID NO: 182575 - DNA, 75 bp, synthetic construct
  source 1..75: mol_type = other DNA
ggtggatctcactccggcggctattaccatcaacactatcgccacggacgatgtgattaacggcgcagaaaaagg

SEQ ID NO: 182576 - DNA, 75 bp, synthetic construct
  source 1..75: mol_type = other DNA
gccgaggcgggcaatccgctaaccatcagcggcagcagtaccgccgaagcggggcagacggtaaccgtcacgctt

SEQ ID NO: 182577 - DNA, 75 bp, synthetic construct
  source 1..75: mol_type = other DNA
tcaccgtcacgctaaacagtaaaacctacaccaccacgctggacgcttccggcaactggagcgtcggcgttccgc

SEQ ID NO: 182578 - DNA, 75 bp, synthetic construct
  source 1..75: mol_type = other DNA
cgacggcggatctcagcaatctgaccgccagccagtacacggtcagcgcctcggtaagcgataaagcgggtaacc

SEQ ID NO: 182579 - DNA, 75 bp, synthetic construct
  source 1..75: mol_type = other DNA
ggggtggggtatagccatggtgccggtgtggaatcaccgtggaacgcggtagctggtgtgaactggtcgttctga

SEQ ID NO: 182580 - DNA, 75 bp, synthetic construct
  source 1..75: mol_type = other DNA
atgggagagtcgttgttcgataaatcagccagcatcattttatctttctgttaactatacagaaaatagtgttca

SEQ ID NO: 182581 - DNA, 75 bp, synthetic construct
  source 1..75: mol_type = other DNA
ccgccacggtacaggcagacgggagctggagcgtcggcattccggcgacaaacgtcagcgcatggcctgcggggg

SEQ ID NO: 182582 - DNA, 75 bp, synthetic construct
  source 1..75: mol_type = other DNA
atgtggtcaatatcatcgagcacgggcaggcgctggtggtcagcggcagcagctcggggctggctgaaggcacgc

SEQ ID NO: 182583 - DNA, 75 bp, synthetic construct
  source 1..75: mol_type = other DNA
gcgacgatattcttaataatgccgagcaggccgtcgcgcagatcatctccggacaagtcagcggtgcttctccag

SEQ ID NO: 182584 - DNA, 75 bp, synthetic construct
  source 1..75: mol_type = other DNA
ctggcgccggcgctgttcttcaggcggatgcgtacgccgggttcaacgagctgtaccgcaatggacagataacgg

SEQ ID NO: 182585 - DNA, 75 bp, synthetic construct
  source 1..75: mol_type = other DNA
ttgaaaaaatggtctggactcagctttaccagcttgaactggtaaatatggagcagccaggcacagccccgcctc

SEQ ID NO: 182586 - DNA, 75 bp, synthetic construct
  source 1..75: mol_type = other DNA
atagacgaattggcgaggtttggcatagtccttgcgcctgaaactgagtgggattatgtgaacgggtgccgtttt

SEQ ID NO: 182587 - DNA, 75 bp, synthetic construct
  source 1..75: mol_type = other DNA
ccgatcttgctaccggtattgtcactatcaacatcactaagctggctgaagaactcagtccacggaatgaagatg

SEQ ID NO: 182588 - DNA, 75 bp, synthetic construct
  source 1..75: mol_type = other DNA
caacggctgagcagcgccgccaaattcttagggactacggatttgaatatgaccgacgtattcgtgaggccgaat

SEQ ID NO: 182589 - DNA, 75 bp, synthetic construct
  source 1..75: mol_type = other DNA
aatgttacccggctctttacgtggctatgctcctgctgtccggggaatagctaacagtaatgctaaagtggtgat

SEQ ID NO: 182590 - DNA, 75 bp, synthetic construct
  source 1..75: mol_type = other DNA
aggcatctcccgtggccgtggacgctcaatatcaaaggtaccggctaccgctatgccagccaggagcaggcctgc

SEQ ID NO: 182591 - DNA, 75 bp, synthetic construct
  source 1..75: mol_type = other DNA
gcagtcattgtcccttgcggcaatattgcggatatcgctaacaacggcgatgccaactactatctgatggaagcc

SEQ ID NO: 182592 - DNA, 75 bp, synthetic construct
  source 1..75: mol_type = other DNA
aggataaatcatccgaggataaaactaagggtgtttattcaaaatttaaagaaaaagttataggtaaaacattcc

SEQ ID NO: 182593 - DNA, 75 bp, synthetic construct
  source 1..75: mol_type = other DNA
tatgaatgttagctttgatacacaaaatgtcgtgagaacatcaacagaaactcgctcccgcaatatcgcgtttaa

SEQ ID NO: 182594 - DNA, 75 bp, synthetic construct
  source 1..75: mol_type = other DNA
gccggaggcaaacccgcagccgtttaccgccagaaaatcggccagcaaatccggttactctccgcatcagagacg

SEQ ID NO: 182595 - DNA, 75 bp, synthetic construct
  source 1..75: mol_type = other DNA
tgctgctaccctgtctggcgctggcacagccgctgccagaagcgtacctgcgcaccgcggagcatttccgcgtgc

SEQ ID NO: 182596 - DNA, 75 bp, synthetic construct
  source 1..75: mol_type = other DNA
taacacccatgtcgggatggctgggcctgaacaagtcagtatgcatatttatggtaatgtggtcgatcagggctg

SEQ ID NO: 182597 - DNA, 75 bp, synthetic construct
  source 1..75: mol_type = other DNA
tcatgttttacatgcgaaagctcaacaagaagggcgagagtcaatatttgatttttacaaaattagtattgctca

SEQ ID NO: 182598 - DNA, 75 bp, synthetic construct
  source 1..75: mol_type = other DNA
cgtacccgatgatcgaagattatcctctttggttgagatgtttgaataatggatataaattttcttatatggaaa

SEQ ID NO: 182599 - DNA, 75 bp, synthetic construct
  source 1..75: mol_type = other DNA
ataggcatcagggaaaagggttggagtttattatgtgaattattaaatcacgagaacatggcttcatctgcatac

SEQ ID NO: 182600 - DNA, 75 bp, synthetic construct
  source 1..75: mol_type = other DNA
aaacatttcgattatcaaccagctacacaaggtgacactgtactggcggtacaagggttaacggcgctgcatccc

SEQ ID NO: 182601 - DNA, 75 bp, synthetic construct
  source 1..75: mol_type = other DNA
gatgatcctgcaactggcgatcaaagtcagcgatgccgaactccctattacctcactcagcggcggtaaccagca

SEQ ID NO: 182602 - DNA, 75 bp, synthetic construct
  source 1..75: mol_type = other DNA
gatgaagtcatggcactggcagatcgcattctggtgatggctgatggccgtattaccgctgatctcccccggggc

SEQ ID NO: 182603 - DNA, 75 bp, synthetic construct
  source 1..75: mol_type = other DNA
aatgagttttgtgagacggggggcgccttcctgaaagccttactgagaacccagctgagactttgtagtggcaca

SEQ ID NO: 182604 - DNA, 75 bp, synthetic construct
  source 1..75: mol_type = other DNA
acgcaaaaacaatctttgaccagccgtttaccgatgacgccgttattcgcgaagatcgctacacggcagcggagt

SEQ ID NO: 182605 - DNA, 75 bp, synthetic construct
  source 1..75: mol_type = other DNA
ggccctgtccagaacgtgccaaataacaaacccgtaccccttcctttaacctttgactggaaggaggggcagaag

SEQ ID NO: 182606 - DNA, 75 bp, synthetic construct
  source 1..75: mol_type = other DNA
cgatacagatggaagagtaggcgctgtactttatgcattgctcgtttcagggcatataggcatcagggaaaaggg

SEQ ID NO: 182607 - DNA, 75 bp, synthetic construct
  source 1..75: mol_type = other DNA
gggcactccatacatacaaaatataaatgacatgtgtgagtatggagctctcatgaaaaaagaacaaaacatgtc

SEQ ID NO: 182608 - DNA, 75 bp, synthetic construct
  source 1..75: mol_type = other DNA
atgtttgatgttgatgttagattaaccgttaagcaaattgactctcgtgtgttagcaaaaataagttttacaaat

SEQ ID NO: 182609 - DNA, 75 bp, synthetic construct
  source 1..75: mol_type = other DNA
ttcacatatgacatatatcaggcaggattaaccatatatagaatgtgtgttggatatgataattttgaaagagaa

SEQ ID NO: 182610 - DNA, 75 bp, synthetic construct
  source 1..75: mol_type = other DNA
cacaaacagatcctcgccgcgttaatcaaaaaagatgcccgagcggcgaagctggcaatgtggcagcatctggag

SEQ ID NO: 182611 - DNA, 75 bp, synthetic construct
  source 1..75: mol_type = other DNA
ttcttgacgccatggaagatgtccaaccactgaaatgcgcaactgatgtccactggcatccaacgcgtaaccaac

SEQ ID NO: 182612 - DNA, 75 bp, synthetic construct
  source 1..75: mol_type = other DNA
gcagaggatactacagttttttgaaatcagcgacttgaaagttgtgacgatgatcggtgttggcgcacaaatcat

SEQ ID NO: 182613 - DNA, 75 bp, synthetic construct
  source 1..75: mol_type = other DNA
cggcaccgcgcgcagctgcaccaacggaatatttcaggagtgccgcaacagcccggcgatgaaacgaattttgat

SEQ ID NO: 182614 - DNA, 75 bp, synthetic construct
  source 1..75: mol_type = other DNA
aaaagtctgaggacgttatactgtctatagtttttgacgcagaaaattcgtctactactggttttcgtttatacg

SEQ ID NO: 182615 - DNA, 75 bp, synthetic construct
  source 1..75: mol_type = other DNA
caacactggaagctattcgttaccttgcagcgatccgctcaacccggagacaacatattgatgatgcgccaatgg

SEQ ID NO: 182616 - DNA, 75 bp, synthetic construct
  source 1..75: mol_type = other DNA
acctgcaagattctaccgcacgccagatagttcaacgcacaatggggattattccgtactcggtaaatgtgatga

SEQ ID NO: 182617 - DNA, 75 bp, synthetic construct
  source 1..75: mol_type = other DNA
accgatctctttaagattatctgtgaatatggtgttatcgagaatgaacgcatctatgaatcgcccgtcgaaggg

SEQ ID NO: 182618 - DNA, 75 bp, synthetic construct
  source 1..75: mol_type = other DNA
agggctgcaacatggggtgctggataagttacgcagcggtaaatatccgcagcaggccagcctgaatcttctacg

SEQ ID NO: 182619 - DNA, 75 bp, synthetic construct
  source 1..75: mol_type = other DNA
actgctggagcagcagacggggttaaacccgacagaaataatgaccgatacggcaggttccagcgatctgatctt

SEQ ID NO: 182620 - DNA, 75 bp, synthetic construct
  source 1..75: mol_type = other DNA
ctaacgccaggctggttgattatcagtcaactcttcttctggcacagaaatggggtggcggcgaagtggcctcag

SEQ ID NO: 182621 - DNA, 75 bp, synthetic construct
  source 1..75: mol_type = other DNA
tatcactacgctgaacggcgatacgatgcgttgcatctgtcgcggcgacagtaaagcccggaatgaaatggccag

SEQ ID NO: 182622 - DNA, 75 bp, synthetic construct
  source 1..75: mol_type = other DNA
tgtcattattgccggttatttcttttctgagcgtaatgacaggaaaatgtttctcctgagctcactggttttcct

SEQ ID NO: 182623 - DNA, 75 bp, synthetic construct
  source 1..75: mol_type = other DNA
catcaacaaaagaacaggatgctctccgagcaaaaaatcggatgaaagcctttgttgaagaaaaaggatttcggc

SEQ ID NO: 182624 - DNA, 75 bp, synthetic construct
  source 1..75: mol_type = other DNA
tggcaggtctggatgcgcagcatctgcaactgctggttcatagcggctcgagggggggggcccctattaagttgt

SEQ ID NO: 182625 - DNA, 75 bp, synthetic construct
  source 1..75: mol_type = other DNA
tgctgtggcagcatgagacgaaacacgcctacaacgaacaggggctggcaaaccgcgtcacgccggacagcctgc

SEQ ID NO: 182626 - DNA, 75 bp, synthetic construct
  source 1..75: mol_type = other DNA
cggacatcgtattgctgagaccaatagtttccgcgtgctggcgcaaaagtcctgggataaacgcggaaaattttc

SEQ ID NO: 182627 - DNA, 75 bp, synthetic construct
  source 1..75: mol_type = other DNA
gggcgcaaatgcctggtatcctcattactcctggcatagcgatggtcgctatattatttacgctggcaagatagt

SEQ ID NO: 182628 - DNA, 75 bp, synthetic construct
  source 1..75: mol_type = other DNA
attcagctgataatatcggtggtatttattatcgacccgtccaatattgtatcaacggaacctggtacacagcag

SEQ ID NO: 182629 - DNA, 75 bp, synthetic construct
  source 1..75: mol_type = other DNA
tgctggtggcgatgtttacccagcgcacgcttgagtttgctgcgtttccgaccattctgttgtttactacgttgt

SEQ ID NO: 182630 - DNA, 75 bp, synthetic construct
  source 1..75: mol_type = other DNA
taaaatagcaactgagttaattgtacttgaagctgaattcagaaatgtaccggaagaggcattgcaatggagagg

SEQ ID NO: 182631 - DNA, 75 bp, synthetic construct
  source 1..75: mol_type = other DNA
tgatccccattgagcgtaatggtgaaatcctcggctatatctgggccaatgaattaaccgaagatattcgccgct

SEQ ID NO: 182632 - DNA, 75 bp, synthetic construct
  source 1..75: mol_type = other DNA
taaataagagtgtcaacttttacattcttatcatactaataacgcgctgcatagcttgcatcttttttatggcaa

SEQ ID NO: 182633 - DNA, 75 bp, synthetic construct
  source 1..75: mol_type = other DNA
atcatttccctgatgggataatactgacagaagatggtattcttactaaggggaatgagcaatcttacattcccc

SEQ ID NO: 182634 - DNA, 75 bp, synthetic construct
  source 1..75: mol_type = other DNA
ggtgatcaccgggagcagcaccggactgacggcaggaaccgcgttaacggttgtgatcaacaacgtcacttacgc

SEQ ID NO: 182635 - DNA, 75 bp, synthetic construct
  source 1..75: mol_type = other DNA
ccgtggagaaaggcgaaacgctggtggtgagcggcagcaccagcggtgtcgaagccgggcagacagtgaccgtca

SEQ ID NO: 182636 - DNA, 75 bp, synthetic construct
  source 1..75: mol_type = other DNA
atctccggctccagcactggcggcgaagcgggtgatgtcatcaccgtcacactaaacagtaaaacctacaccacc

SEQ ID NO: 182637 - DNA, 75 bp, synthetic construct
  source 1..75: mol_type = other DNA
acacgtaccagaccaccgttcaggcggatggcacctggagcgtgaatgttccggcagcggatttaagcggattaa

SEQ ID NO: 182638 - DNA, 75 bp, synthetic construct
  source 1..75: mol_type = other DNA
ggtaagcggcatcaacagcgccggaacaacctccaccattacccatccggtcactgtcgatctgacggcggtcgc

SEQ ID NO: 182639 - DNA, 75 bp, synthetic construct
  source 1..75: mol_type = other DNA
tggtattaatttcttttggagtaaatgctgaagaatgcaggctcgacttcaacgaatccgaattcattgattcgc

SEQ ID NO: 182640 - DNA, 75 bp, synthetic construct
  source 1..75: mol_type = other DNA
ccattaacgttgtcgcgagcgacgatattattaacgctgccgaagcgggagcgggccagagcatcagcgggcagg

SEQ ID NO: 182641 - DNA, 75 bp, synthetic construct
  source 1..75: mol_type = other DNA
tcaccattaacacggtggcgggcgatgacatcattaacgccacagaacacggacaggcgcagattatcagcggct

SEQ ID NO: 182642 - DNA, 75 bp, synthetic construct
  source 1..75: mol_type = other DNA
tggttaacagcatcgaacacggtcaggcgctggtgataaccggtagcagcagcgggctggcggcgggcgcggcgc

SEQ ID NO: 182643 - DNA, 75 bp, synthetic construct
  source 1..75: mol_type = other DNA
aagcggggcagacggtaaccgtcacgcttaatggtgtgacttacagcggctccgtccaggcggacggcagctgga

SEQ ID NO: 182644 - DNA, 75 bp, synthetic construct
  source 1..75: mol_type = other DNA
taccacgctggacgcctccggcaactggagcgtcggcgttccggcagcagacgtcactgcgctgggcagcggccc

SEQ ID NO: 182645 - DNA, 75 bp, synthetic construct
  source 1..75: mol_type = other DNA
cgataccgccgcgccagtaattggtattaacaccattgctggcgatgatgtgataaacgccagcgaaaaaggggc

SEQ ID NO: 182646 - DNA, 75 bp, synthetic construct
  source 1..75: mol_type = other DNA
gcggcgttgacggtggttatcaacaatgtcacctacggcgcaacggtactcgccgatggcagctggagcgtcggc

SEQ ID NO: 182647 - DNA, 75 bp, synthetic construct
  source 1..75: mol_type = other DNA
acatgatgtgccgtttaacagcagtgtgtttatggatatggttagttgcattagccgggaacttgctcgccatga

SEQ ID NO: 182648 - DNA, 75 bp, synthetic construct
  source 1..75: mol_type = other DNA
gggccggtcaaaatgacgtgtcacccgcaccgggtgggactcagcagcagcgtggccatctatcttgagggaaag

SEQ ID NO: 182649 - DNA, 75 bp, synthetic construct
  source 1..75: mol_type = other DNA
gagtcgtgattataaataaacatcaggatgtggctaacagtccatttaagttagactggaatacaccattaaaaa

SEQ ID NO: 182650 - DNA, 75 bp, synthetic construct
  source 1..75: mol_type = other DNA
aaaaaacagcaccaataatcaaacttggtgagttcacaatgtctggtaataacgtttttgatgggttgttttcca

SEQ ID NO: 182651 - DNA, 75 bp, synthetic construct
  source 1..75: mol_type = other DNA
aagttaatgggctatttcataacacaaagatagttattgttctagatggtgatataaaaagtaatttctataagg

SEQ ID NO: 182652 - DNA, 75 bp, synthetic construct
  source 1..75: mol_type = other DNA
taccgataccaccaacagctattattactgacaatgacctgagtggagatggtgctgccatggcactgcagttga

SEQ ID NO: 182653 - DNA, 75 bp, synthetic construct
  source 1..75: mol_type = other DNA
ttgctgttactgttcctgttgctcttacatgggcttggttagatgtaaaaagaaaacgtaaaaaaagagataatg

SEQ ID NO: 182654 - DNA, 75 bp, synthetic construct
  source 1..75: mol_type = other DNA
gcttgaaaaagatatattgcactatcctagagttagaatggcaaatgacaactttcccgaaattagggggtataa

SEQ ID NO: 182655 - DNA, 75 bp, synthetic construct
  source 1..75: mol_type = other DNA
caccattaacacggtggcgggcgatgacatcatcaacgccacggaacatgctcaggcgcagattatcagcggctc

SEQ ID NO: 182656 - DNA, 75 bp, synthetic construct
  source 1..75: mol_type = other DNA
gctggatggattgatgaacaacgttatatgaaagaagtctttgatgtaacattgaaaattcagaaaagtttttca

SEQ ID NO: 182657 - DNA, 75 bp, synthetic construct
  source 1..75: mol_type = other DNA
ggagatggtccagtcacttgttgatggccgccataacgaacaatttctccgggagtttaatcatctaaatgaaaa

SEQ ID NO: 182658 - DNA, 75 bp, synthetic construct
  source 1..75: mol_type = other DNA
tggagaagatcagcaacatgatcttaaaaaattaggttgttatcataatataataatgattataaataaacaaca

SEQ ID NO: 182659 - DNA, 75 bp, synthetic construct
  source 1..75: mol_type = other DNA
tgaagccgattcaggacgatatccgtcatgcccagtggcgttgggatctggcgatcgcttcccacggcattcata

SEQ ID NO: 182660 - DNA, 75 bp, synthetic construct
  source 1..75: mol_type = other DNA
cccgctggtcaaaatcgggttcttccgtttcctacacaaccgcccaggtacaatccctcacaccgattcgccaaa

SEQ ID NO: 182661 - DNA, 75 bp, synthetic construct
  source 1..75: mol_type = other DNA
cacgtcattcggtatgagcgcatccggtggtgcaacgattaccgcgaaaggtgcggccctgcatgcagggggcat

SEQ ID NO: 182662 - DNA, 75 bp, synthetic construct
  source 1..75: mol_type = other DNA
tgctgatgctgcgatcggccaaagtatggaaatttttgatgaaattcaacagcaagaacagattaataacttcac

SEQ ID NO: 182663 - DNA, 75 bp, synthetic construct
  source 1..75: mol_type = other DNA
acgcttgcccgggaacacgcttcaaggcttgtcgaactgctcaattccgtcgtgaataatccagagggagaataa

SEQ ID NO: 182664 - DNA, 75 bp, synthetic construct
  source 1..75: mol_type = other DNA
cgttaatgctccaactctatccggatgcggagctgcgggaaagccataccattgatgtactgatgggacgtctgc

SEQ ID NO: 182665 - DNA, 75 bp, synthetic construct
  source 1..75: mol_type = other DNA
gtcaccgtcgtcgccagccggcctgttgaagagcaggtcatccccagaatggaagccatcaaagatgtccttggc

SEQ ID NO: 182666 - DNA, 75 bp, synthetic construct
  source 1..75: mol_type = other DNA
aattgcgaatctattaaaaatcagtctgaggtaatgaaagagattaaccatgtcagggaaaataaactcaatgaa

SEQ ID NO: 182667 - DNA, 75 bp, synthetic construct
  source 1..75: mol_type = other DNA
cgaacaagaggtagctcagatggtgcgtgtattacaacaccgaactgaagctttgaaatttgcttctcattctat

SEQ ID NO: 182668 - DNA, 75 bp, synthetic construct
  source 1..75: mol_type = other DNA
atccgctgcggcatattttgaccggaccgcatcatcagaggcccgcacccgtggtcacatgagccagcgggagtt

SEQ ID NO: 182669 - DNA, 75 bp, synthetic construct
  source 1..75: mol_type = other DNA
gcaatctgcgctcttctggacgccttgggtgtccaacaaacgactattgatttagtacaagatatttactcatct

SEQ ID NO: 182670 - DNA, 75 bp, synthetic construct
  source 1..75: mol_type = other DNA
gtgtgtaactgtagctaccattgccatgagcgcaatcttaattgttgttggtcttcttgctgcagttcctagtgg

SEQ ID NO: 182671 - DNA, 75 bp, synthetic construct
  source 1..75: mol_type = other DNA
cgataatctgcatcaggccaacaataattacaatgcagtcgataaaagagtgcaatcgctggaaaaaaaagtcaa

SEQ ID NO: 182672 - DNA, 75 bp, synthetic construct
  source 1..75: mol_type = other DNA
cctggaatataactaatgatgattctatctgtcacctactacattccagacagattgatgcaatagatattatcc

SEQ ID NO: 182673 - DNA, 75 bp, synthetic construct
  source 1..75: mol_type = other DNA
tgccgccttccgctgtcaaacctgagcgggcacaggagcagtcgacaaccgaaaacattctgactcttgatacaa

SEQ ID NO: 182674 - DNA, 75 bp, synthetic construct
  source 1..75: mol_type = other DNA
catagtgaacaagagtgtattgcgcgtatcgaatcggcggtaagtcaggggaaatgcatcgcctggatccggaat

SEQ ID NO: 182675 - DNA, 75 bp, synthetic construct
  source 1..75: mol_type = other DNA
ccctggctggcctgggagcatgccgttgatttctgggatgacggctggacagaggcgcagaagcgacaggtgata

SEQ ID NO: 182676 - DNA, 75 bp, synthetic construct
  source 1..75: mol_type = other DNA
gccgcagtgagtcaatgtggctcgtgcgcggtggtaaggcagcacagccggacggccatacgctggcgcggctgt

SEQ ID NO: 182677 - DNA, 75 bp, synthetic construct
  source 1..75: mol_type = other DNA
ctcaatggaacaacagtttacttttataatgatccccggaatggtaattgtcctgctcacgaatatattcctcaa

SEQ ID NO: 182678 - DNA, 75 bp, synthetic construct
  source 1..75: mol_type = other DNA
aacgtaatttatgcgctggcggcgcagggcgtggcggtgctgtttgcctccagcgacttacctgaagtcctcggc

SEQ ID NO: 182679 - DNA, 75 bp, synthetic construct
  source 1..75: mol_type = other DNA
gctggttgataattccgatattctgctttcttgtgctctggctggtctgggcattatccaggctacctatgatgc

SEQ ID NO: 182680 - DNA, 75 bp, synthetic construct
  source 1..75: mol_type = other DNA
taaaaaactaaaaactattaacctcgggcctcttcctgttttaaataattgttttagccgaacgaacatgatttt

SEQ ID NO: 182681 - DNA, 75 bp, synthetic construct
  source 1..75: mol_type = other DNA
gcagaagtctttggtcgtatggtagcggcacaaaaaggcccgaccgacttcgttgagaactacgcgaagtatctg

SEQ ID NO: 182682 - DNA, 75 bp, synthetic construct
  source 1..75: mol_type = other DNA
atatcgggatggatggcgctttttatatttcaggtgcgacgacagcacatatcgatgtggatatttttgccgggg

SEQ ID NO: 182683 - DNA, 75 bp, synthetic construct
  source 1..75: mol_type = other DNA
ccgtggcttgcgtgggaacatgccgtcgatttttgggatgacagctggacagagacacaaaagcgccaggtgatt

SEQ ID NO: 182684 - DNA, 75 bp, synthetic construct
  source 1..75: mol_type = other DNA
ccaggtgaattacgtgatattgctattaaagatctccgttttgcctgtagagatagtgtggtgaatattgaggat

SEQ ID NO: 182685 - DNA, 75 bp, synthetic construct
  source 1..75: mol_type = other DNA
gcgcttgccctccaccttatacaggtcaaagtatttctttagaaaagttgaaaaatactttagagaatgattctg

SEQ ID NO: 182686 - DNA, 75 bp, synthetic construct
  source 1..75: mol_type = other DNA
tgttcctcttgataaattcggagacgagtatgaccgcagcacctacctgtgtagccctgagcgggtagtaccaga

SEQ ID NO: 182687 - DNA, 75 bp, synthetic construct
  source 1..75: mol_type = other DNA
aataaggatgattatctgtctgaatgggcagacaaacaaaagtgggtcgacatgtggcttacagaagaagataaa

SEQ ID NO: 182688 - DNA, 75 bp, synthetic construct
  source 1..75: mol_type = other DNA
taataacggtgagtcaataacgacagcccagttagttactttgttgcaaaataacggggcattcaatacgaaagc

SEQ ID NO: 182689 - DNA, 75 bp, synthetic construct
  source 1..75: mol_type = other DNA
tatgacccgacaaaagaacatgcctattttcatggtggaataaaacccagccagcaggcttatcatgttccgatg

SEQ ID NO: 182690 - DNA, 75 bp, synthetic construct
  source 1..75: mol_type = other DNA
ttgacagtaaaacctaccccaacccaactgacggcttgcctgctgagtttcaggctaacacacaaccatcggcgg

SEQ ID NO: 182691 - DNA, 75 bp, synthetic construct
  source 1..75: mol_type = other DNA
gaggagatggtatatgagtcgcgggtgaagacattatcactctcggcgctacctcatggcggatccagcaaatca

SEQ ID NO: 182692 - DNA, 75 bp, synthetic construct
  source 1..75: mol_type = other DNA
cggtagtcaacccgcccgcaatgcgccatccgcagatacgaattgtcgtaccggtcgccaatatggatgatgtct

SEQ ID NO: 182693 - DNA, 75 bp, synthetic construct
  source 1..75: mol_type = other DNA
ggcgctatccctctggcgatttttctgcttttcgccccaaactggtctggaaccgggagaccgggatattgaccg

SEQ ID NO: 182694 - DNA, 75 bp, synthetic construct
  source 1..75: mol_type = other DNA
aagcaacaaagtcagtgccgactaaaaaaacagccctccccccaaaagctaagtctgtaaagccagcggcagaaa

SEQ ID NO: 182695 - DNA, 75 bp, synthetic construct
  source 1..75: mol_type = other DNA
aacctgaaacacctgcgcaaccggtggtcgatgaacaagcggttttcgacgaaaaaatggatgtctatatcaagt

SEQ ID NO: 182696 - DNA, 75 bp, synthetic construct
  source 1..75: mol_type = other DNA
tttgcttcacgtcgggcagtcagcatttatcccagcctccatcgggcgatggttgctgactacgactgggaaagt

SEQ ID NO: 182697 - DNA, 75 bp, synthetic construct
  source 1..75: mol_type = other DNA
tgaacctgttaatcacctcagtggatggtgataaaaccgctggcgcggcgtcagtgaatattggtgaattctacc

SEQ ID NO: 182698 - DNA, 75 bp, synthetic construct
  source 1..75: mol_type = other DNA
actggaactgtggtgccacacaacctgtaccggatgcgcctgtgccgaaagatttaccccccggaatgccggata

SEQ ID NO: 182699 - DNA, 75 bp, synthetic construct
  source 1..75: mol_type = other DNA
ggtggggatcattcgtgcgctgacggtgggtgtggcttaccagacgacggtaggcggcattatgaatacctcggt

SEQ ID NO: 182700 - DNA, 75 bp, synthetic construct
  source 1..75: mol_type = other DNA
aaaatgtcaggctaattacaagctccctgaaacagaactggataatcctgttagctatgcaactctggagtgccg

SEQ ID NO: 182701 - DNA, 75 bp, synthetic construct
  source 1..75: mol_type = other DNA
ctgcacggaagcggagtatgcccgctttggcggaactgatgtctgccctgccgtgggcgatctgccgggcggaga

SEQ ID NO: 182702 - DNA, 75 bp, synthetic construct
  source 1..75: mol_type = other DNA
acagcaccagtgacgactacggggatttttctaactttgccgcctgggccatcaagattgacggcaaaacctggc

SEQ ID NO: 182703 - DNA, 75 bp, synthetic construct
  source 1..75: mol_type = other DNA
ggtcatggtaagggcaagaatcgactgggctaccttttaatggagttgcgcgaacaattggctatagagaagtaa

SEQ ID NO: 182704 - DNA, 75 bp, synthetic construct
  source 1..75: mol_type = other DNA
aactggtcttactgatggaacggtatatgttatttacagttcgcacattaaaccgaccgccacggatgtcggcgc

SEQ ID NO: 182705 - DNA, 75 bp, synthetic construct
  source 1..75: mol_type = other DNA
gggctgctatatctgcattggtcggctcatcaccagaagctcttgataccctgaatgagcttgcagcagcacttg

SEQ ID NO: 182706 - DNA, 75 bp, synthetic construct
  source 1..75: mol_type = other DNA
tgcatacgatgccggttatagcggaaccagtatgacgggcgggaaaggcgctgcagggatttgtattatcgagga

SEQ ID NO: 182707 - DNA, 75 bp, synthetic construct
  source 1..75: mol_type = other DNA
tgacaaacaggctaccctcaagtatgccggatgggtctctgaagatttcgaggacatggtttatgcggcctttga

SEQ ID NO: 182708 - DNA, 75 bp, synthetic construct
  source 1..75: mol_type = other DNA
taacggtaatctgacgaaatttcaagggttatccatgatttctcgcagcagtgtctggtacgcccgaacagtgaa

SEQ ID NO: 182709 - DNA, 75 bp, synthetic construct
  source 1..75: mol_type = other DNA
tctgacgagtcgcttacaggtaaccaagcaatgagtaataaacataaacatgcaggtcatattatcattattaaa

SEQ ID NO: 182710 - DNA, 75 bp, synthetic construct
  source 1..75: mol_type = other DNA
gtctgtcactttatcccaacgcgtgttgtaattttatgcacgaagctgactatacaccaccggaaaatcatgatg

SEQ ID NO: 182711 - DNA, 75 bp, synthetic construct
  source 1..75: mol_type = other DNA
gtattacaaagggcgacatattggcgcaaaaggtaccgctattttttcgtttcacgccattaaaaatattacctg

SEQ ID NO: 182712 - DNA, 75 bp, synthetic construct
  source 1..75: mol_type = other DNA
cattctttccggaaaatatccgcgagagatttcgttatatcaaagagatgggcttcgatggttttgagattgacg

SEQ ID NO: 182713 - DNA, 75 bp, synthetic construct
  source 1..75: mol_type = other DNA
ggtgtatgtcaatggcactaaaaacaaagggctggaaaaccgccgcgcgcgggaactggcgtattgcatgaaagg

SEQ ID NO: 182714 - DNA, 75 bp, synthetic construct
  source 1..75: mol_type = other DNA
tcaacgtcgagcaacggctcgcagtctgtgtgccggtggatatgccaccgcgcgtctatgactcgctggtcagtt

SEQ ID NO: 182715 - DNA, 75 bp, synthetic construct
  source 1..75: mol_type = other DNA
gtgtggccgccgtgctggcgctggcggcactggtgcctgattttcgtctgcttaacacctcgcccgaggggctgg

SEQ ID NO: 182716 - DNA, 75 bp, synthetic construct
  source 1..75: mol_type = other DNA
acctgatagcgaatggaacagcgaacggatctgttcattgcccctgttcccggatatgaccaccgccgatgccga

SEQ ID NO: 182717 - DNA, 75 bp, synthetic construct
  source 1..75: mol_type = other DNA
cgggactctcattaataacggggaacagcaagtttccagcagtggtagtgctgtaggcaccaccattaatggggg

SEQ ID NO: 182718 - DNA, 75 bp, synthetic construct
  source 1..75: mol_type = other DNA
tttccagcggcggcagtgccgttgacaccaccattgaggggggactgcagactgttttcggtggcggaagtgtct

SEQ ID NO: 182719 - DNA, 75 bp, synthetic construct
  source 1..75: mol_type = other DNA
tgctaacggctttaaaagataaatatggtgtatcacaaggcatggcggtatttaatcagttgaaatggctggtaa

SEQ ID NO: 182720 - DNA, 75 bp, synthetic construct
  source 1..75: mol_type = other DNA
actgttttcggtggcggaagtgtctccgggactctcattaataccggggaacagcaagtttccagcggtggtagt

SEQ ID NO: 182721 - DNA, 75 bp, synthetic construct
  source 1..75: mol_type = other DNA
gaaaggtggaaatctgatagtggctgactctgtctggaaattatccggagactctactattaactcattagacat

SEQ ID NO: 182722 - DNA, 75 bp, synthetic construct
  source 1..75: mol_type = other DNA
gccttgtcgggaccgtgctggctattgctgccacgctgccgggttttcagcagcttcacacctccgtggagggac

SEQ ID NO: 182723 - DNA, 75 bp, synthetic construct
  source 1..75: mol_type = other DNA
cccgcaggctggttaagtgcctggtagaggatgggtttactatcgtttctggtctggccgaaggggttgacacaa

SEQ ID NO: 182724 - DNA, 75 bp, synthetic construct
  source 1..75: mol_type = other DNA
aaagctgagagatgcgcgtaacccggtagaggtcatctattatcagggctggtgggacctggtgaatacccgctc

SEQ ID NO: 182725 - DNA, 75 bp, synthetic construct
  source 1..75: mol_type = other DNA
gcagagtaaaaatatcccttgtcggctctgcacgccgcagcaagagagcggtggcaaagtgctggttatctcatg

SEQ ID NO: 182726 - DNA, 75 bp, synthetic construct
  source 1..75: mol_type = other DNA
ctcgttatgcgagtgcagatcccgaattatacccttttcttgattaccggtttatttccgtggcaatggtttgcc

SEQ ID NO: 182727 - DNA, 75 bp, synthetic construct
  source 1..75: mol_type = other DNA
aaaaggtgatacagctggttgcggacatcgaaaatcacccggtaactgaactgacacagtggctgacaaatactg

SEQ ID NO: 182728 - DNA, 75 bp, synthetic construct
  source 1..75: mol_type = other DNA
gttgcatgacatggaacaggtagaaaaatacttttctcatgtactgatgctcagtgcggaaggccaccgatgggg

SEQ ID NO: 182729 - DNA, 75 bp, synthetic construct
  source 1..75: mol_type = other DNA
tgaagatgtcaaaggcaatttgtcgaatcgtgaacaaagcatggtggtcgttcaggcacctacgctaagccagaa

SEQ ID NO: 182730 - DNA, 75 bp, synthetic construct
  source 1..75: mol_type = other DNA
tctgcgtgccggaccgggcttcataaaggggaacgggggaggagccagaggggtgtcattttcttttggtctgaa

SEQ ID NO: 182731 - DNA, 75 bp, synthetic construct
  source 1..75: mol_type = other DNA
gatgctctttatagtccgggcatgctgcatgactggcttaagaccgtagtggatttaaaaagcatacattacata

SEQ ID NO: 182732 - DNA, 75 bp, synthetic construct
  source 1..75: mol_type = other DNA
ttccagccgggactgccggatataccgtttatctcgctggaggaactgttttccgagcaagggccggagctggtg

SEQ ID NO: 182733 - DNA, 75 bp, synthetic construct
  source 1..75: mol_type = other DNA
gcagatgttggcgtggttgatgactggaaagtggtgctggaggcactggtgacaaacattgacgcagaatgccaa

SEQ ID NO: 182734 - DNA, 75 bp, synthetic construct
  source 1..75: mol_type = other DNA
caccattttaattaatgataaaggaattccagacgatattgctcttgctaatataaaaaaacgagtttatcccat

SEQ ID NO: 182735 - DNA, 75 bp, synthetic construct
  source 1..75: mol_type = other DNA
tttagcgatgagggtacgcgggcaagcattacatctggtcagccatagtgagggtcagacgatgctggtagaacg

SEQ ID NO: 182736 - DNA, 75 bp, synthetic construct
  source 1..75: mol_type = other DNA
atgagtgagattgacattaagggcgatgaaacgctggttgctctgctactgaatgccgacaaaaacgatatcgat

SEQ ID NO: 182737 - DNA, 75 bp, synthetic construct
  source 1..75: mol_type = other DNA
ttagatattcccaaaaggcatattgaattatctttatggattatagatattgataaaacagatttggaacagata

SEQ ID NO: 182738 - DNA, 75 bp, synthetic construct
  source 1..75: mol_type = other DNA
tgaaaaaaaatagccaaggggagtttgatggcaatatcccttcaagttatagcagtgtaggtcatggaactatta

SEQ ID NO: 182739 - DNA, 75 bp, synthetic construct
  source 1..75: mol_type = other DNA
tgttttctaggcacgagcagataagtactggcacagctgtcggatacgcactttctgcccttcagcagcatggtg

SEQ ID NO: 182740 - DNA, 75 bp, synthetic construct
  source 1..75: mol_type = other DNA
ggtatgtttggtgatgaatttagtgttgcaggtaaacaaattgccgcactatctaaagcgttaggcggtaattca

SEQ ID NO: 182741 - DNA, 75 bp, synthetic construct
  source 1..75: mol_type = other DNA
atgaagtatgtctttattgaaaaacatcaggctgagttcagcatcaaagcaatgtgccaagtgctccaggaagac

SEQ ID NO: 182742 - DNA, 75 bp, synthetic construct
  source 1..75: mol_type = other DNA
tgaatttcaaattggcaatcaagggacgggggaagcgattattcgcgagggggggctgattacggctgaaaatac

SEQ ID NO: 182743 - DNA, 75 bp, synthetic construct
  source 1..75: mol_type = other DNA
ccgcacagttcacggatattgtcactcagcttgccggtggtcagaatcccttccttatcatgctgcagcaggggg

SEQ ID NO: 182744 - DNA, 75 bp, synthetic construct
  source 1..75: mol_type = other DNA
aattcaaatggcaatggatttgacgcgaatatcaaacccattattgatgagagtgttaatttagatggaattgat

SEQ ID NO: 182745 - DNA, 75 bp, synthetic construct
  source 1..75: mol_type = other DNA
cccgctgctgaaacagcatcgacccagcagcgacgatgtgaaccttgaagaactttgggcgctacctccagctta

SEQ ID NO: 182746 - DNA, 75 bp, synthetic construct
  source 1..75: mol_type = other DNA
gcaactataaaaaacagtcatcagtcggctgcttttcaatgtttaccttatcattttctggtaatgctgccaact

SEQ ID NO: 182747 - DNA, 75 bp, synthetic construct
  source 1..75: mol_type = other DNA
ataatctctcttgatgaaaatggaaatccttctttcgattcgggaatacagaaaaaaatttctgagcaatacaaa

SEQ ID NO: 182748 - DNA, 75 bp, synthetic construct
  source 1..75: mol_type = other DNA
cagcgatggcatcgagattggacgaaataaagtaggaataattcatctggtcaacacattcgttaatgatcggac

SEQ ID NO: 182749 - DNA, 75 bp, synthetic construct
  source 1..75: mol_type = other DNA
gatggcacgactcgcctggagtacagcgacgtgaagattactacgctaccgccagctaaacgcgtttacggtggc

SEQ ID NO: 182750 - DNA, 75 bp, synthetic construct
  source 1..75: mol_type = other DNA
gtaatggctctcggttaatccgggattttatgcgccagaccgttgaacggcagcataatacctggttccgtgacc

SEQ ID NO: 182751 - DNA, 75 bp, synthetic construct
  source 1..75: mol_type = other DNA
taatagttggataaaatttcgcgacccggtattaaaccatgcactctggcaacgctatgtgcagaatggaaaagc

SEQ ID NO: 182752 - DNA, 75 bp, synthetic construct
  source 1..75: mol_type = other DNA
tcagcagattgctgagcaggccgtacagcgttatctgcaaatcattgaagaagtccgtagtggagcagccgatcc

SEQ ID NO: 182753 - DNA, 75 bp, synthetic construct
  source 1..75: mol_type = other DNA
tgaagatacgcccgcggaggcaacgcaggcaaatacagatgatgatgctgagcctcctgcgcaaaatcggatact

SEQ ID NO: 182754 - DNA, 75 bp, synthetic construct
  source 1..75: mol_type = other DNA
caataagtcgtcgggaagccagagctaaagcgattgccctgctggaagagatgcaaatcccggatgccgtggaag

SEQ ID NO: 182755 - DNA, 75 bp, synthetic construct
  source 1..75: mol_type = other DNA
cagtagatcttaactcttctaagtatgggtattatgagaaagttggcggtggtttttatagatatatagaatcct

SEQ ID NO: 182756 - DNA, 75 bp, synthetic construct
  source 1..75: mol_type = other DNA
atccatatcctgaggaacataaggcttctggtttctccccttttatgatgggggggctgagtggtgatattcttc

SEQ ID NO: 182757 - DNA, 75 bp, synthetic construct
  source 1..75: mol_type = other DNA
ttacctgtgcggaaggtggcctgattgttactgataatgaaaaccttgcccgccagctacggatgctgaaatttc

SEQ ID NO: 182758 - DNA, 75 bp, synthetic construct
  source 1..75: mol_type = other DNA
cgagccaataaggtggcgacacaagggaaagatgcgctgcaggagctggaaagatggcaaggcgctggaaagatg

SEQ ID NO: 182759 - DNA, 75 bp, synthetic construct
  source 1..75: mol_type = other DNA
cgctggacgtcacggtacagttgcaggtactgcgtttgcttaaacataaagcccgcgccagtggaactgcggtac

SEQ ID NO: 182760 - DNA, 75 bp, synthetic construct
  source 1..75: mol_type = other DNA
ctgcacggcgtgattaagcgtctgggagacatcaaggattacgaagagagcgagcgtgtggccgcacgtattgcc

SEQ ID NO: 182761 - DNA, 75 bp, synthetic construct
  source 1..75: mol_type = other DNA
tatcaaaggatgaatttttaagaagtatcagttcgccgaaaccggatatcggcagtgtggttatggcagcttttt

SEQ ID NO: 182762 - DNA, 75 bp, synthetic construct
  source 1..75: mol_type = other DNA
gccaggagacggcggcgctggatcggcttgactgttatgaccgcattcttgcgccggaacaggctggctttggtg

SEQ ID NO: 182763 - DNA, 75 bp, synthetic construct
  source 1..75: mol_type = other DNA
aagagctggaacacaaatcacgtcgccgcgatattctggttgatgacgaaacgttgtttgagttctacgaccagc

SEQ ID NO: 182764 - DNA, 75 bp, synthetic construct
  source 1..75: mol_type = other DNA
agacaggatggtttatcgcgggcctgatgtcgggtttacccgccagtgccgcgcccgcagagacatcatcaatgg

SEQ ID NO: 182765 - DNA, 75 bp, synthetic construct
  source 1..75: mol_type = other DNA
taggcctgataagcgtagcgcatcaggcatttgtcaccattgccggatgcggcgtgaacgccttatccggcttac

SEQ ID NO: 182766 - DNA, 75 bp, synthetic construct
  source 1..75: mol_type = other DNA
gagtggcacgagaatttgtaggcctgataagcgtagcgcatcaggcaatttggcgttggtcacaaccccatcacc

SEQ ID NO: 182767 - DNA, 75 bp, synthetic construct
  source 1..75: mol_type = other DNA
aaatgagccagaagcggaacaaaacagcccggatacgcaacaaaacgggccagaagaacaacaaccagaaccagc

SEQ ID NO: 182768 - DNA, 75 bp, synthetic construct
  source 1..75: mol_type = other DNA
aagtaaacaaaattatgcaggcagccaatatcagccagcctgacgccgaggaactgcttgcagtatcacgtggtg

SEQ ID NO: 182769 - DNA, 75 bp, synthetic construct
  source 1..75: mol_type = other DNA
tagacagataggtaatagcgttagtccgcttgtggctgaggctatgctattacctttatacgattactgtttaaa

SEQ ID NO: 182770 - DNA, 75 bp, synthetic construct
  source 1..75: mol_type = other DNA
tgccgattgttgccgcgcgcaaggtcaactacagccagatcgatccggcgttatgtcgtgaactctttattcgcc

SEQ ID NO: 182771 - DNA, 75 bp, synthetic construct
  source 1..75: mol_type = other DNA
cgcgtcttatcatgccgacaaaaccgtgctcacccgtaggccggataaggcgttcacgccgcatccggcaatatg

SEQ ID NO: 182772 - DNA, 75 bp, synthetic construct
  source 1..75: mol_type = other DNA
aactgatggtgcagcatgaagaacgcattcgtaacgggatgaaggcgtactctctgctcgagcaactgcgttctg

SEQ ID NO: 182773 - DNA, 75 bp, synthetic construct
  source 1..75: mol_type = other DNA
tggaagtggacggcctgccaccggacgcgtttgcggtggtctcctttcatctgaaccagtcactctcttcgcttt

SEQ ID NO: 182774 - DNA, 75 bp, synthetic construct
  source 1..75: mol_type = other DNA
agaggacttatagctctatagataatccaaaaaacttcttaagtaagtctactcggacacaaattaagaagacaa

SEQ ID NO: 182775 - DNA, 75 bp, synthetic construct
  source 1..75: mol_type = other DNA
acgggagtaccgttacgacagcgcgggcaatgtgtcggctgtcaccagccgggaagattacggacgggaaacccg

SEQ ID NO: 182776 - DNA, 75 bp, synthetic construct
  source 1..75: mol_type = other DNA
agtatgactatgacgccgcaggccggatggtcagccggacaaaacaccgtgacggctaccgcccggaaacagagc

SEQ ID NO: 182777 - DNA, 75 bp, synthetic construct
  source 1..75: mol_type = other DNA
aatcatgaaggccatgcggacagtaccacacagtcggcagtgtctgcagggaatatcaccatccgggatacgcag

SEQ ID NO: 182778 - DNA, 75 bp, synthetic construct
  source 1..75: mol_type = other DNA
tctgcctgataacgttgtgtcggttgctcctgacggggagtatgtaaaatgggatggcgctaagtggatccacga

SEQ ID NO: 182779 - DNA, 75 bp, synthetic construct
  source 1..75: mol_type = other DNA
acggcaggttttgtggctgttttcgatgctcaggctaataaatggtcgcgggtggaggactaccgcgggacaacc

SEQ ID NO: 182780 - DNA, 75 bp, synthetic construct
  source 1..75: mol_type = other DNA
cactggaaccattgattaattacattaatacaggagagttcatgactgcatcaagtgataagttggtggaaaaaa

SEQ ID NO: 182781 - DNA, 75 bp, synthetic construct
  source 1..75: mol_type = other DNA
acgtcaatgtagtaacatttaatctgaggttgcctaatggaccagttttatttttggtcggttgccttgtttttc

SEQ ID NO: 182782 - DNA, 75 bp, synthetic construct
  source 1..75: mol_type = other DNA
tggctggagttttgtcaatgatatagttttgttgtgtaataaaaatgttggagctatgattattgttgcttgctt

SEQ ID NO: 182783 - DNA, 75 bp, synthetic construct
  source 1..75: mol_type = other DNA
tgccgcgacggagatggctgtgaaacaggcgcaaattggcaccattgacgcgcaaatcaagcgcaatcaggcctc

SEQ ID NO: 182784 - DNA, 75 bp, synthetic construct
  source 1..75: mol_type = other DNA
gtgatcaaaggtgctttaagagctgctccaagtagaaaggttttactgacccttgatgaggcaaccaataaatta

SEQ ID NO: 182785 - DNA, 75 bp, synthetic construct
  source 1..75: mol_type = other DNA
ttgcgatccagatcccttacgcgctgggtattatcgcaacgcgttccgtggatacaccggttatcggcctgaaag

SEQ ID NO: 182786 - DNA, 75 bp, synthetic construct
  source 1..75: mol_type = other DNA
acgagcggacccaccactaccactacgacagccagcaccgtctggtgttctacacgcggatacagcacggtgagc

SEQ ID NO: 182787 - DNA, 75 bp, synthetic construct
  source 1..75: mol_type = other DNA
tcaacattatcacaggtaataatgggtcagggaaaagttcgatattagctgaaatttcaaagcaagaatacgtta

SEQ ID NO: 182788 - DNA, 75 bp, synthetic construct
  source 1..75: mol_type = other DNA
caactccttataattacattgatatcgactcgacattatccgaagtcaaaatcttattaaaaaatcattattcat

SEQ ID NO: 182789 - DNA, 75 bp, synthetic construct
  source 1..75: mol_type = other DNA
aaaatcgggaatctacacgtctaaactatcagatggttcggtaataacacttagaaacatatctacatcagaagg

SEQ ID NO: 182790 - DNA, 75 bp, synthetic construct
  source 1..75: mol_type = other DNA
atgaaactgaaaaaactccccgggtttagtttaggacttattgctctggcggtgggtaatgcatatgctgatcag

SEQ ID NO: 182791 - DNA, 75 bp, synthetic construct
  source 1..75: mol_type = other DNA
tcacccgcagacggaagcactgctctggcagcatgagaccagacatgcgtacaacgcgcagggactggcgaaccg

SEQ ID NO: 182792 - DNA, 75 bp, synthetic construct
  source 1..75: mol_type = other DNA
tatgtatcctacagtggaagagggaaaggcgattctacgttgtgcaatatcagctattcatacccgagaaaatat

SEQ ID NO: 182793 - DNA, 75 bp, synthetic construct
  source 1..75: mol_type = other DNA
aaccatattttattttagagaaaacagcgcatgcaacattgcaaataaatagaggactattacaacagttcggtg

SEQ ID NO: 182794 - DNA, 75 bp, synthetic construct
  source 1..75: mol_type = other DNA
aggtaatcactgttaatgatgggagggagatgattgagtttgtgtcatgctcttatcttggactggaaacacatg

SEQ ID NO: 182795 - DNA, 75 bp, synthetic construct
  source 1..75: mol_type = other DNA
ggtgagtttgatgaactaagaaaaatcaagtgtgagagtattgatatagagttttctgatcaaaaattcacattg

SEQ ID NO: 182796 - DNA, 75 bp, synthetic construct
  source 1..75: mol_type = other DNA
gtttctggtctgttggcgtataacccgatggcgactattatcggctcataccagaacgtgatgctctatcaccag

SEQ ID NO: 182797 - DNA, 75 bp, synthetic construct
  source 1..75: mol_type = other DNA
caacatgaaagagcgtatggcaaagatggaatcagagattaaatcacttaaagctgataacgccgcattacgaaa

SEQ ID NO: 182798 - DNA, 75 bp, synthetic construct
  source 1..75: mol_type = other DNA
ttgattcccttcagaatgaatccattgatgccggttttgttcattttccggtgagcggaatgtactccgtgccca

SEQ ID NO: 182799 - DNA, 75 bp, synthetic construct
  source 1..75: mol_type = other DNA
ccggatgattttgattatttcggcctttcttccctgtctcatcgtcagctcgcagctctggctgacgcaggggaa

SEQ ID NO: 182800 - DNA, 75 bp, synthetic construct
  source 1..75: mol_type = other DNA
aacatatacgcgaggccatcgtggcgatggaacgtaataatcagagcaattattgggaagcgttgggtaaggtag

SEQ ID NO: 182801 - DNA, 75 bp, synthetic construct
  source 1..75: mol_type = other DNA
ggtgcgcttggtctggggctgaatcattaccgcgataacgccattacctacaaagcgcaacgcgataaaaaagcc

SEQ ID NO: 182802 - DNA, 75 bp, synthetic construct
  source 1..75: mol_type = other DNA
tttttatcagcattaaaaggcgacttaatatcaaaaacttttatttttatcggatttagttttacagaccccaat

SEQ ID NO: 182803 - DNA, 75 bp, synthetic construct
  source 1..75: mol_type = other DNA
gtgctggacgggcatatcgtattaacccgcaaactggcggaagcggggcactatccggccattgatatcggccag

SEQ ID NO: 182804 - DNA, 75 bp, synthetic construct
  source 1..75: mol_type = other DNA
cagaagtcgttactgctcaggcgttttgcccggcggatgaatcacagacagaaaaactgtataggtacagtacac

SEQ ID NO: 182805 - DNA, 75 bp, synthetic construct
  source 1..75: mol_type = other DNA
ccgataaagaatggcaccgtatgcgtacaggtacggggccgcagggggctatcaaacgcgaactgttttctgaca

SEQ ID NO: 182806 - DNA, 69 bp, synthetic construct
  source 1..69: mol_type = other DNA
atgagtaataccgacgcttcaggtgagaagcgagtgacaggcaccagcgagcgacgagaacagatcatt

SEQ ID NO: 182807 - DNA, 75 bp, synthetic construct
  source 1..75: mol_type = other DNA
ggggaaaaaacaatagcggtaaacgcaggtatggaaacactcaagctgagtctgcaaagaaacatcaaagaaata

SEQ ID NO: 182808 - DNA, 75 bp, synthetic construct
  source 1..75: mol_type = other DNA
aatggcaatggctaagacatccctcgctggaaaaagagaagtctcggttatatagcatatttataaatagttgca

SEQ ID NO: 182809 - DNA, 75 bp, synthetic construct
  source 1..75: mol_type = other DNA
aatcgagggtgaacttgataaagacctgaacagtgttgaactggatgtaaaaacgctggtgatgctgccaactta

SEQ ID NO: 182810 - DNA, 75 bp, synthetic construct
  source 1..75: mol_type = other DNA
aaatttctgggggggtatcactttccgttacgcacactataaaaatgttctatcgacctgagtctatagataata

SEQ ID NO: 182811 - DNA, 75 bp, synthetic construct
  source 1..75: mol_type = other DNA
aaagcgattgagtcaattaagcaggctgattcggctgttaagttggcacacgagaagttttcagcgctggcggcg

SEQ ID NO: 182812 - DNA, 75 bp, synthetic construct
  source 1..75: mol_type = other DNA
atcaataagtctttgcgtgaagttttcgacgttacgcgcatgattctgtcagcgaaagaagagttggctaatgaa

SEQ ID NO: 182813 - DNA, 75 bp, synthetic construct
  source 1..75: mol_type = other DNA
tctgccaggtgacttcgttagatattccaaccgtaagcgtgcgcaaatcccactggggaaatgcgctaacggcga

SEQ ID NO: 182814 - DNA, 75 bp, synthetic construct
  source 1..75: mol_type = other DNA
atgcacaggattgatacgctgacagcggtaaaagataagtttggccctggcaagaacggatttactgacggaaat

SEQ ID NO: 182815 - DNA, 75 bp, synthetic construct
  source 1..75: mol_type = other DNA
cacctacgcctatccggtgaaggtaaatgggcgctacgtgatggacccgtcgccgatcccgaaattcgataaccc

SEQ ID NO: 182816 - DNA, 75 bp, synthetic construct
  source 1..75: mol_type = other DNA
attgagtcaattaagcaggctgatgcggctgttaagttggcacacgagaagttttcggcgctggcggcggagaat

SEQ ID NO: 182817 - DNA, 75 bp, synthetic construct
  source 1..75: mol_type = other DNA
ccgtctggtctgggataactggcagaaattcaacggtgaacagaagaatcctggcgattcgacggattaccttat

SEQ ID NO: 182818 - DNA, 75 bp, synthetic construct
  source 1..75: mol_type = other DNA
cccgcagattaaagccccttctggcggtttccctgtaggttcccttgccgattattttggcgttcccacaggtat

SEQ ID NO: 182819 - DNA, 75 bp, synthetic construct
  source 1..75: mol_type = other DNA
tggtaatggagttaactgatatagacccaacgggtagatatcatgactcgttaatctgggttgaatgccctcctg

SEQ ID NO: 182820 - DNA, 75 bp, synthetic construct
  source 1..75: mol_type = other DNA
gaaacaaacgctgaatatctggtgcgtaaatttgctgaagcggaggccaagatttcggctctgtccgaagaccag

SEQ ID NO: 182821 - DNA, 75 bp, synthetic construct
  source 1..75: mol_type = other DNA
ttcagggtgtttctgaatcgtttatcaaggctttgcaacatactcagacacggcatgcagatatcattaaaaaac

SEQ ID NO: 182822 - DNA, 75 bp, synthetic construct
  source 1..75: mol_type = other DNA
ctggcgattcgacggattaccttattccgcagattaaagcccctgctggcggcttccctgtaggctcccttgccg

SEQ ID NO: 182823 - DNA, 75 bp, synthetic construct
  source 1..75: mol_type = other DNA
taaagccatattattactggtgggtggtgcaattaacgaagaggcattgctgataaaaaataacctttcggatgt

SEQ ID NO: 182824 - DNA, 75 bp, synthetic construct
  source 1..75: mol_type = other DNA
gtagggtatcgggtttataaataccatcctgcaaatatgcgtggattcagcgccgatctcaaaactgttcacgca

SEQ ID NO: 182825 - DNA, 75 bp, synthetic construct
  source 1..75: mol_type = other DNA
gtgcgtggtcctgtcgccggtctgaatcattccactgtggtgccattatcactggaacttctcgaagcagatttt

SEQ ID NO: 182826 - DNA, 75 bp, synthetic construct
  source 1..75: mol_type = other DNA
aagctactcacacaggaagaatgggagaagacattcaatctggataatctgattgctccgaagttcgaacaataa

SEQ ID NO: 182827 - DNA, 75 bp, synthetic construct
  source 1..75: mol_type = other DNA
atgccgccaatgacaaaggagcaatgccagatgcaacggcaaaacaagacgaccggcgcaggccggacgatgatg

SEQ ID NO: 182828 - DNA, 75 bp, synthetic construct
  source 1..75: mol_type = other DNA
acgaagagagcgaacgtgtggctgcccgcattgctgccgcgctgggcttctacatcaagcgtggtgatgccgcca

SEQ ID NO: 182829 - DNA, 75 bp, synthetic construct
  source 1..75: mol_type = other DNA
acttttcgtaatggtcagttgcgtgccgtggcggcgggcagtcgtctgagtttttccagtacggcacgcaactat

SEQ ID NO: 182830 - DNA, 75 bp, synthetic construct
  source 1..75: mol_type = other DNA
ccaattttacaatatattacaatctggtattgcaatatcagtatatagaagtagtttatttggagatagttctat

SEQ ID NO: 182831 - DNA, 75 bp, synthetic construct
  source 1..75: mol_type = other DNA
gttgtaagaacattttacattttgatcaaaatgattgatgaatcatccgaggatgaagtgagtgaaaatattgca

SEQ ID NO: 182832 - DNA, 75 bp, synthetic construct
  source 1..75: mol_type = other DNA
gtgctgatcaaggtgaccggacccgcgcaggtgattggcgggcgctcctattgtgtcttcagctccgatgacggt

SEQ ID NO: 182833 - DNA, 75 bp, synthetic construct
  source 1..75: mol_type = other DNA
agtccctgccgcagggcgtgcatttacaggtgctggagtcggtggttgtcgcccagcgcgcctccggcgccgggc

SEQ ID NO: 182834 - DNA, 75 bp, synthetic construct
  source 1..75: mol_type = other DNA
aaaaccacactatgattcatcccatgatggcgggacacgctatgtccccgatggaagaaattgcctgtggatatt

SEQ ID NO: 182835 - DNA, 75 bp, synthetic construct
  source 1..75: mol_type = other DNA
tttattccttcaacggaagcagaatggttttttgactcatggtatgcaaaatcagcagtgattgtttataaagaa

SEQ ID NO: 182836 - DNA, 75 bp, synthetic construct
  source 1..75: mol_type = other DNA
cccaaccccaatggtttactgcggctggatatgaccgcgcaagtgcatattcagctcaccgatgtgaaaaatgtg

SEQ ID NO: 182837 - DNA, 75 bp, synthetic construct
  source 1..75: mol_type = other DNA
aaaaaatgcccggaagaacactacgtcgctttccgcgcattccgtgaagatccacaggcaaacccgttgaaaaca

SEQ ID NO: 182838 - DNA, 75 bp, synthetic construct
  source 1..75: mol_type = other DNA
gtggtttggggtgcctgttccgtcaactgtggtagccgctgtgcacttcgtctacatgttaaagataatgaagtg

SEQ ID NO: 182839 - DNA, 75 bp, synthetic construct
  source 1..75: mol_type = other DNA
agggaggcagcagatcaacttccggcatggttcccattagctatggacttagcccttgtaacaggacaacgtcgc

SEQ ID NO: 182840 - DNA, 75 bp, synthetic construct
  source 1..75: mol_type = other DNA
gctgacgctggacgtcctggctgagacagcaccaaaacttcgtgctgaccgggaaagaatcaacgccgccagaga

SEQ ID NO: 182841 - DNA, 75 bp, synthetic construct
  source 1..75: mol_type = other DNA
gatttattcgcaggcgctggctgacattgccgctacctgggaattgccagaaggcgatgtaatcgatccactgcc

SEQ ID NO: 182842 - DNA, 75 bp, synthetic construct
  source 1..75: mol_type = other DNA
ttaggttgaatgctgacaatgcccgccaggcttcacagcttgcagttgccgcttccgataaagcattaaaagggg

SEQ ID NO: 182843 - DNA, 75 bp, synthetic construct
  source 1..75: mol_type = other DNA
tgactctatatacaccggggcaggtgagatagcctcaggtagtcatgatttgtcatcccggaccgagcagcaagc

SEQ ID NO: 182844 - DNA, 75 bp, synthetic construct
  source 1..75: mol_type = other DNA
ttggcgcacgtaacgataccgatgttgagattgtcaaagggctggaagcgggcgatgaagtggtgattggtgagg

SEQ ID NO: 182845 - DNA, 75 bp, synthetic construct
  source 1..75: mol_type = other DNA
ccgggcgtgaagatgaatggctgcccattcgcccaggcaccgatggcgcactggcctgtgcgattgcctgggtac

SEQ ID NO: 182846 - DNA, 75 bp, synthetic construct
  source 1..75: mol_type = other DNA
tttccgttctcaccggtaacgtcggcataaacggcggcaactcaggtgtacgcgaaggtagctgggatctggggg

SEQ ID NO: 182847 - DNA, 75 bp, synthetic construct
  source 1..75: mol_type = other DNA
gcttaagtcgtcatttacagcaaatgcagcattcactggggatgacagtagggactgttcgacagggcgcggaag

SEQ ID NO: 182848 - DNA, 75 bp, synthetic construct
  source 1..75: mol_type = other DNA
ggtgctggcattagataaactggactttcattttctaaatatatatatcaataaaattcgccctcaagcctccca

SEQ ID NO: 182849 - DNA, 75 bp, synthetic construct
  source 1..75: mol_type = other DNA
ctctccggtaactccggatggttggataagctgtagtgatcgaatgcctgaaaagggccagaacgtgcttatttc

SEQ ID NO: 182850 - DNA, 75 bp, synthetic construct
  source 1..75: mol_type = other DNA
ggcgaatgaaatgggcgacttacatcccggggcatcctgaaccgccccgggaatcctggagactaaactccctga

SEQ ID NO: 182851 - DNA, 75 bp, synthetic construct
  source 1..75: mol_type = other DNA
catccggccgggaaattattctgggctttaacggatgaaagcaataaagagcaagcggacgttattcctgtttat

SEQ ID NO: 182852 - DNA, 75 bp, synthetic construct
  source 1..75: mol_type = other DNA
ttgatattgttttagctacatataattcaaatgggtatataaaggaacaattacaatcaatattacaacaaactt

SEQ ID NO: 182853 - DNA, 75 bp, synthetic construct
  source 1..75: mol_type = other DNA
tgggcacccgtactgcccattcgccagaacgcagctactctgtggtatcacgccaatactcccaaccgcacggct

SEQ ID NO: 182854 - DNA, 75 bp, synthetic construct
  source 1..75: mol_type = other DNA
atttcggcaccgtcaccgaggcgttagaacttgatactgccaagaatggttacatcctcctggttcaggacgcag

SEQ ID NO: 182855 - DNA, 75 bp, synthetic construct
  source 1..75: mol_type = other DNA
gcgcaaaacaatctggccgatctttatgaagacggaaaaggcgttgctcaaaacaagacactcgccgcattctgg

SEQ ID NO: 182856 - DNA, 75 bp, synthetic construct
  source 1..75: mol_type = other DNA
agctggcgaaagcgttcgtgtacgccctgaaccagtggccggcactgacgtactatgcagaggatggttgggccg

SEQ ID NO: 182857 - DNA, 75 bp, synthetic construct
  source 1..75: mol_type = other DNA
gctatcccttttcattaagtcttgatcgtaaccgtgaaggaatgcagtcctggcaattgggcgtcaactatcgtt

SEQ ID NO: 182858 - DNA, 75 bp, synthetic construct
  source 1..75: mol_type = other DNA
gaagccaaagcttcagcagcattgaaaaacccacgctcaagcgatgttactaagaccttagcgggttcagtagtt

SEQ ID NO: 182859 - DNA, 75 bp, synthetic construct
  source 1..75: mol_type = other DNA
gccgctgttacgcttcctgcaacggtttccgcacctcccgtaatacccgcagtcgtcaaatccgcattcagcact

SEQ ID NO: 182860 - DNA, 75 bp, synthetic construct
  source 1..75: mol_type = other DNA
cgaacgcttggcgatctgggcctgttaccacagtgtcatcaggctaatattaccgaagttatgacgtttattgaa

SEQ ID NO: 182861 - DNA, 75 bp, synthetic construct
  source 1..75: mol_type = other DNA
ctgctaactcgccatgttcgtcatcatggtgacgccgttgccatcgtcgtggcccgcgatgaactcacggcagaa

SEQ ID NO: 182862 - DNA, 75 bp, synthetic construct
  source 1..75: mol_type = other DNA
gcgctgaatgggagcgaaaagcattaagcaactttgaagagtgtgctgcgatggctgaacgtatcgaagagttgc

SEQ ID NO: 182863 - DNA, 75 bp, synthetic construct
  source 1..75: mol_type = other DNA
aacttttcaggatgtgcttattgatgacattaatggcagcaattatgagcaaaccgtgccgtattccattacctg

SEQ ID NO: 182864 - DNA, 75 bp, synthetic construct
  source 1..75: mol_type = other DNA
attggtgaaaacgcagaggaagatgcacgtcgtttctatcgttcagaagaaggcatcgtgctggtaacgcgcgaa

SEQ ID NO: 182865 - DNA, 75 bp, synthetic construct
  source 1..75: mol_type = other DNA
cttgccatttatatatgtaaaaagcggtttcaggaacgctgaatatatcggcataagaaactggcttgctggcat

SEQ ID NO: 182866 - DNA, 75 bp, synthetic construct
  source 1..75: mol_type = other DNA
tcgaacacaggacaatcgaataacgtcagatcccatgttttgtgtgtatcaaaagcgcgaaatcgttgttgatgc

SEQ ID NO: 182867 - DNA, 75 bp, synthetic construct
  source 1..75: mol_type = other DNA
tgtattagataaaatgaatgattatttatctttgctttatgatataaaaaaagatatttattcctataataggat

SEQ ID NO: 182868 - DNA, 75 bp, synthetic construct
  source 1..75: mol_type = other DNA
atgatcacctttcatctgggcgttatcgatatcccctacgagggcgagaacaccacgacggggagcgtagcggaa

SEQ ID NO: 182869 - DNA, 75 bp, synthetic construct
  source 1..75: mol_type = other DNA
atggggaaggcatttgatgctggccgaatcgacattatggttattactataaaaaacaagaataagaaagccttt

SEQ ID NO: 182870 - DNA, 75 bp, synthetic construct
  source 1..75: mol_type = other DNA
gtcgtcatatctttagcaacaaggattttgtcattaaattttccacgtctgtcttacagactgataaaaagaaat

SEQ ID NO: 182871 - DNA, 75 bp, synthetic construct
  source 1..75: mol_type = other DNA
aagagatgttcagcaaactggggatgcggttaggagctgagatggcaatccctttgaaggatggtgataattttg

SEQ ID NO: 182872 - DNA, 75 bp, synthetic construct
  source 1..75: mol_type = other DNA
ctggtgataacatagaagaaatcaatagtggcagcattgaaaagaacactcctctcgaccataaagaatacggca

SEQ ID NO: 182873 - DNA, 75 bp, synthetic construct
  source 1..75: mol_type = other DNA
tgcgtgctaaggcagaaaaagcaacgtgtggtgtgtggtcgctcgaatatggagagggccgatttgatggtgatg

SEQ ID NO: 182874 - DNA, 75 bp, synthetic construct
  source 1..75: mol_type = other DNA
gccttaaaatattgccaaccaaaagtgatgaaatcaaaaaatttgctaaactaaagaaccctttcaatcacatga

SEQ ID NO: 182875 - DNA, 75 bp, synthetic construct
  source 1..75: mol_type = other DNA
cttttaagtggatcttgtatcttattaaggagatagatgtggaacaaattaaaaaaataaaattttccgcagtgt

SEQ ID NO: 182876 - DNA, 75 bp, synthetic construct
  source 1..75: mol_type = other DNA
taattattccagtttttaatgcacaagaaacgatcgatcaatgtctcaatagtattatatgctgtaaatatcaga

SEQ ID NO: 182877 - DNA, 75 bp, synthetic construct
  source 1..75: mol_type = other DNA
gaatgagggcaaagacccactgcttgttcctggggtcgttaagcgcggatcagcaaatcagatggctaaatacat

SEQ ID NO: 182878 - DNA, 75 bp, synthetic construct
  source 1..75: mol_type = other DNA
ttgcgccgacaaccgaactgttcccgatgtcgaaaattaacgacgccattcagcatgtacgcgatggtaaagctc

SEQ ID NO: 182879 - DNA, 75 bp, synthetic construct
  source 1..75: mol_type = other DNA
gggagataaaaaggcagaagcaaatttggtcgtgtcgggggtgaagcatgccgctaataaaaagaaaataaagag

SEQ ID NO: 182880 - DNA, 75 bp, synthetic construct
  source 1..75: mol_type = other DNA
gaaccggtgtatcgcggcggatccgcgcctgggaactcagcgttaatgacgagatggcgctcgataacctgtttc

SEQ ID NO: 182881 - DNA, 75 bp, synthetic construct
  source 1..75: mol_type = other DNA
tgtacgcgggtactgctgcgcgacgacctgcgtgccagaggtatgaacgtggataagaaattttcccgctggctt

SEQ ID NO: 182882 - DNA, 75 bp, synthetic construct
  source 1..75: mol_type = other DNA
ccacctcccttccgctgcgcagaggctcggaagggtttaacatcagtcaggactatctggtaaagggactgatcc

SEQ ID NO: 182883 - DNA, 75 bp, synthetic construct
  source 1..75: mol_type = other DNA
cgaaaaatccacctgtaccactgcgaccatcgcggcctgccgctggcccttatcagcaaggaagggacaacagaa

SEQ ID NO: 182884 - DNA, 75 bp, synthetic construct
  source 1..75: mol_type = other DNA
tgaggtaaagccaacacaaaatattaatattcattatgttaatatggataaaaattttagaagcttttttagagc

SEQ ID NO: 182885 - DNA, 75 bp, synthetic construct
  source 1..75: mol_type = other DNA
ccacctcccttccgctgcgccggggctcggaagggtttaacaccagtcaggattatctggttaaaggactcattc

SEQ ID NO: 182886 - DNA, 75 bp, synthetic construct
  source 1..75: mol_type = other DNA
cttcagtgcccactccgccgggttacatggcgtggttcgcgtatcggcgagtgaaatcatcggcactgaggtgct

SEQ ID NO: 182887 - DNA, 75 bp, synthetic construct
  source 1..75: mol_type = other DNA
gcggtgaacgtatgcagattatcatgcctccggcctgtgagaaaaaatgtatctcattcaccatacgtaaacctt

SEQ ID NO: 182888 - DNA, 75 bp, synthetic construct
  source 1..75: mol_type = other DNA
ggtgggacttaccctagaccacagcttcatactgaaaaccatcaaaacctccatcgatattgtggtgttcttcaa

SEQ ID NO: 182889 - DNA, 75 bp, synthetic construct
  source 1..75: mol_type = other DNA
agtaaaaacacatcgatgccagaacaggacgtccataacaatgacctgcgtccggaggctggcacatacaccaca

SEQ ID NO: 182890 - DNA, 75 bp, synthetic construct
  source 1..75: mol_type = other DNA
acaaatcttctgctggataaggggaacttagttatttccggacctgatgccaccaaggatgtgggtaatatcgtt

SEQ ID NO: 182891 - DNA, 75 bp, synthetic construct
  source 1..75: mol_type = other DNA
ggtaaaaactcaccgattccggacagccataacaatgacctgcgtccagaggctggcacatacactgcaaacctc

SEQ ID NO: 182892 - DNA, 75 bp, synthetic construct
  source 1..75: mol_type = other DNA
atgaatattccacagctcactgccctgtgtctgcgttatcatggagtcttgctggatgccagcgaagaggtggtt

SEQ ID NO: 182893 - DNA, 75 bp, synthetic construct
  source 1..75: mol_type = other DNA
aagccgagcgtcagggagaagtgccgcctattgctgatgaatggtgggggacacttcagggcaaatttgacgtat

SEQ ID NO: 182894 - DNA, 75 bp, synthetic construct
  source 1..75: mol_type = other DNA
atgtcccaatccgtgttgctgccaccggggcctttcacccggagacaagcgcaagcggttactaccgcatacagc

SEQ ID NO: 182895 - DNA, 75 bp, synthetic construct
  source 1..75: mol_type = other DNA
gaaggaaatcactcaaaacccgaatgtggcaaatgagtcattgggtggtttttttaaacagttcgaaaaaatgtc

SEQ ID NO: 182896 - DNA, 75 bp, synthetic construct
  source 1..75: mol_type = other DNA
acccgacaaaccttgtggaccgggcatccggtatcgctgttacgttggcttaaagagcacgaaccggaacgctac

SEQ ID NO: 182897 - DNA, 75 bp, synthetic construct
  source 1..75: mol_type = other DNA
ccagatatcacaatgaagcggtaatgagcagaagggagataaacacttaccgctacaagagccgccgtacagcgg

SEQ ID NO: 182898 - DNA, 75 bp, synthetic construct
  source 1..75: mol_type = other DNA
ggggcagacgcaatacgtcgatgcaattaccggagaaccgaaagcaaccagtatgtggatgcgccatgaaggagg

SEQ ID NO: 182899 - DNA, 75 bp, synthetic construct
  source 1..75: mol_type = other DNA
cgcccgacgtgcgtttttatgccgagttgaaacatggagacgaatttcgtcgacgtccccgacatgatgaaaata

SEQ ID NO: 182900 - DNA, 75 bp, synthetic construct
  source 1..75: mol_type = other DNA
aaatagcattaagaaatgtgcaaaaaaatatggtttcgagccagaaccaagtaaagatctgtcatgcaaaacctc

SEQ ID NO: 182901 - DNA, 75 bp, synthetic construct
  source 1..75: mol_type = other DNA
gaacaaagcgggcactctgacggcgcttagctatccggcggatgacattaaaacgttgatgacgacggcgcgcgc

SEQ ID NO: 182902 - DNA, 75 bp, synthetic construct
  source 1..75: mol_type = other DNA
ttctcccgtgaagaaagcagcacaattcgcggcttgttctttggttactctcattctgatattggttttgatcgc

SEQ ID NO: 182903 - DNA, 75 bp, synthetic construct
  source 1..75: mol_type = other DNA
gtgatactggttgtctggagattcagggggccagtctacagtcgtcaagtgtctctcagcaccgacggtggtttt

SEQ ID NO: 182904 - DNA, 75 bp, synthetic construct
  source 1..75: mol_type = other DNA
tatctggatgaagtaaaagaatcaggttttagccatactttcagcgattcattccattatgaattgagaaagttt

SEQ ID NO: 182905 - DNA, 75 bp, synthetic construct
  source 1..75: mol_type = other DNA
atactgccaacggcgcagcaggggtaagaccggacatccaccacgttcttcaggaggtagtggatgtccggcgaa

SEQ ID NO: 182906 - DNA, 75 bp, synthetic construct
  source 1..75: mol_type = other DNA
tggctggttacggtaacaaccatagcagtacaggtgcagtacgcaccggataccattcaaaaggcagcgtaaatg

SEQ ID NO: 182907 - DNA, 75 bp, synthetic construct
  source 1..75: mol_type = other DNA
gttatgtgattcaactggggggtgatatcgcacaatgggattggggtggaactaaccgctggcatctgggggtta

SEQ ID NO: 182908 - DNA, 75 bp, synthetic construct
  source 1..75: mol_type = other DNA
gaagccgccagtgcgcaaagccagcgtaactatcagatttcggcgctggtgtttatcagcatgattattgttgcg

SEQ ID NO: 182909 - DNA, 75 bp, synthetic construct
  source 1..75: mol_type = other DNA
attatgggagaaattgctctgcgtcggaagaacaacagcgggggattgagcaggttgcacaggctgtcagccaga

SEQ ID NO: 182910 - DNA, 75 bp, synthetic construct
  source 1..75: mol_type = other DNA
ggtcgagcagagcaatcagcaacgtgcggcattagcgcaaactcgggcggtaatgttacaggccagtaccgcgct

SEQ ID NO: 182911 - DNA, 75 bp, synthetic construct
  source 1..75: mol_type = other DNA
tcctttgataaaattcagtctgaaaatatacaaacacataagaatacatactctgaggatattaaagaaatctct

SEQ ID NO: 182912 - DNA, 75 bp, synthetic construct
  source 1..75: mol_type = other DNA
aaattattgctgccaagctagcgaatttgttgggcgtgaacgaaccgattcctgactcctttgccggaatcccgc

SEQ ID NO: 182913 - DNA, 75 bp, synthetic construct
  source 1..75: mol_type = other DNA
atattacagatgcacagcgggagtggcttttacgacgacgggaatactgcatagtgcagaccacttctcatgttt

SEQ ID NO: 182914 - DNA, 75 bp, synthetic construct
  source 1..75: mol_type = other DNA
tgccaaaataccaaccaagcaaagaggcacttgataaaaaagcatttgacgaagagatgaataaaaccgcagaac

SEQ ID NO: 182915 - DNA, 75 bp, synthetic construct
  source 1..75: mol_type = other DNA
ttaacctggttggcaataactataaaccatcctccgaagtaatggaaaaaaaagcattcgataaagcaatgagcg

SEQ ID NO: 182916 - DNA, 75 bp, synthetic construct
  source 1..75: mol_type = other DNA
actcccactaaataaaacacatcatactgtagattttggcgccaatgcgtatatcattgatcatgactctccata

SEQ ID NO: 182917 - DNA, 75 bp, synthetic construct
  source 1..75: mol_type = other DNA
ggtggaagaaataccgggttttctatgaagacgccatagcggagctattcaaagaagaggcccgcgcggaaagtg

SEQ ID NO: 182918 - DNA, 75 bp, synthetic construct
  source 1..75: mol_type = other DNA
cttggttgaagtcaatgcgtgatgaagcaaagcgtcctgaaacaacaatgacgcgaatcgtggaaatcttctcct

SEQ ID NO: 182919 - DNA, 75 bp, synthetic construct
  source 1..75: mol_type = other DNA
taatattcgaagatgaaaaagaagatgtctcttttaagtgtgaatttttcgtttctcctattgcacttaatgctc

SEQ ID NO: 182920 - DNA, 75 bp, synthetic construct
  source 1..75: mol_type = other DNA
ctgacgcagccggtgatagtgccgcttccaccagctcgctgacgtattgccaggctgttctttggatcaagccgc

SEQ ID NO: 182921 - DNA, 75 bp, synthetic construct
  source 1..75: mol_type = other DNA
ctctggattgaacctttgctggcaacgatagaaaagggtaatggcaatttttccggaatacgggaaatagagaac

SEQ ID NO: 182922 - DNA, 75 bp, synthetic construct
  source 1..75: mol_type = other DNA
ctctggattgaacctttgctggctgttattgagaagggcaacaataacctggcggggatacgagagattgagaag

SEQ ID NO: 182923 - DNA, 75 bp, synthetic construct
  source 1..75: mol_type = other DNA
gctgcccgccttgctgacctggtgccggaagtattgcgtaaacctgattccgtcactcgcgaagttttcgatgaa

SEQ ID NO: 182924 - DNA, 75 bp, synthetic construct
  source 1..75: mol_type = other DNA
ataagcagcaactctatctgtacctgtgggacattttcttttcagaggatatgactcctttcttaaattatcagt

SEQ ID NO: 182925 - DNA, 75 bp, synthetic construct
  source 1..75: mol_type = other DNA
ccatcgctcaggacaacattatcagtgctgcggaacataacgcctcgctggtactgagcggcacgtcgaatgcag

SEQ ID NO: 182926 - DNA, 75 bp, synthetic construct
  source 1..75: mol_type = other DNA
cgggttcgtcgcgaaaatgactgacaaagaagcgcagaaccatacggaccgcgcctatgaccgacagcctatcgg

SEQ ID NO: 182927 - DNA, 75 bp, synthetic construct
  source 1..75: mol_type = other DNA
aggtattttaggtattttaggtattttaggtattttaggtatttatcatatccggttaacctgtctatattatac

SEQ ID NO: 182928 - DNA, 75 bp, synthetic construct
  source 1..75: mol_type = other DNA
ggcatcgtcagaaaataaaaaaagatacgacgggaatcaagcttacggcgcaatccaggaaaaagcttatggcta

SEQ ID NO: 182929 - DNA, 75 bp, synthetic construct
  source 1..75: mol_type = other DNA
ttactgagcataatgggggcatatcccgccgccgggtactgtttaagtttggtgaaccggtagaaagacctgacc

SEQ ID NO: 182930 - DNA, 75 bp, synthetic construct
  source 1..75: mol_type = other DNA
ccgggaagcttcacgccgctcatccgggtcgagacagagaacggcgagcgggaaaaagcgcagcggcgcagcctg

SEQ ID NO: 182931 - DNA, 75 bp, synthetic construct
  source 1..75: mol_type = other DNA
catcaacaatttgcgcacggtgcggcggcaaaggctacgttaaaaaccattgccagcggtgcaaggggcgcggcg

SEQ ID NO: 182932 - DNA, 75 bp, synthetic construct
  source 1..75: mol_type = other DNA
gtctccagtagagtggctgacggataatggttcatgctaccgggctaatgaaacacgccagttcgcccggatgtt

SEQ ID NO: 182933 - DNA, 75 bp, synthetic construct
  source 1..75: mol_type = other DNA
gggcagcgttcgagaacgaaccgcccgcactggactttatttggccgggcttccttgctgggacagtaggcgcgt

SEQ ID NO: 182934 - DNA, 75 bp, synthetic construct
  source 1..75: mol_type = other DNA
tcgagaacgaaccgcccacactagactttatttggccgggcttcctcgcagggacagtaggcgcgttggtggctc

SEQ ID NO: 182935 - DNA, 75 bp, synthetic construct
  source 1..75: mol_type = other DNA
tgatacaggaaaccggctttgacggccgcacacagcgttatcaccacgacctgaccggcaaacttatccgcagcg

SEQ ID NO: 182936 - DNA, 75 bp, synthetic construct
  source 1..75: mol_type = other DNA
cagcagatatgccgcttgttggctgtgttttgactttgtcactgttggttttgcttatatttatggcagcaaaag

SEQ ID NO: 182937 - DNA, 75 bp, synthetic construct
  source 1..75: mol_type = other DNA
gttagttgtcttgtttttgtttttttctatttcgcaatcttaatgacagtgggtgatgctgccaacttactgatt

SEQ ID NO: 182938 - DNA, 75 bp, synthetic construct
  source 1..75: mol_type = other DNA
ggaatggccgccggggcaataatcacagcggtggcacctgtcgcagcagtcgcaagtgttgcttacttggctttt

SEQ ID NO: 182939 - DNA, 75 bp, synthetic construct
  source 1..75: mol_type = other DNA
ccgctggcgcggggaactccacccatcttcccttatcgccgggtcgcggaacggtttatccccgctggcgcgggg

SEQ ID NO: 182940 - DNA, 75 bp, synthetic construct
  source 1..75: mol_type = other DNA
ctgatattgatggcctacgagcacttgctgtccttcttgtttttgcttatcacctcaagctatcaccttttagtg

SEQ ID NO: 182941 - DNA, 75 bp, synthetic construct
  source 1..75: mol_type = other DNA
ccccaataacgggggaaatagcgttttgatcaaaatgataatgctagtgtgcttcttccgtgccattccaggcac

SEQ ID NO: 182942 - DNA, 75 bp, synthetic construct
  source 1..75: mol_type = other DNA
tcttcaacggcttccgcgacaaagctggcaacttcgcagtgtttgacggtctgacctggaaagggttgcgtgacg

SEQ ID NO: 182943 - DNA, 75 bp, synthetic construct
  source 1..75: mol_type = other DNA
ctcctacattttctgtgaccgcgagcattccgcgcgctggcgccgaagacggcaaactgactttcactttccgcc

SEQ ID NO: 182944 - DNA, 75 bp, synthetic construct
  source 1..75: mol_type = other DNA
gcacctggggggctgccggcctgatggttaagcaggatatcaacggtcacttctctgttgtatttgcaaccactg

SEQ ID NO: 182945 - DNA, 75 bp, synthetic construct
  source 1..75: mol_type = other DNA
cgcgcagcagcgcgtttaaatatgtctcagcctccgctcagcactgatgaatcccctaatgattttggtaaaaat

SEQ ID NO: 182946 - DNA, 75 bp, synthetic construct
  source 1..75: mol_type = other DNA
ccgctatgccgacgagctgattgatgcccatctgcgcggacgctatatcctgccactggcagagataccgactgt

SEQ ID NO: 182947 - DNA, 75 bp, synthetic construct
  source 1..75: mol_type = other DNA
gcgagaagaccggtaacctcgcggtaaaccaggcgcaatggcgcgctctcgaacttgagcgaaacgccagtgctc

SEQ ID NO: 182948 - DNA, 75 bp, synthetic construct
  source 1..75: mol_type = other DNA
gtttatccccgctggcgcggggaactcgtgttgcagcggcgcaccgctgacggactcaccggtttatccccgctg

SEQ ID NO: 182949 - DNA, 75 bp, synthetic construct
  source 1..75: mol_type = other DNA
ctttagataatcgtaatgcaaggatagaatttataacaaagcctatttcaaatgttagtgcagttataaataaaa

SEQ ID NO: 182950 - DNA, 75 bp, synthetic construct
  source 1..75: mol_type = other DNA
caaagtggagagtgaatactctttttaatatgggagattatcgctctgcatatagagaaatcaacaacctattaa

SEQ ID NO: 182951 - DNA, 75 bp, synthetic construct
  source 1..75: mol_type = other DNA
cccattttgattgaacaagcggaaaaaatccaacctgatgattttagctggtttcaagtcgctattgcctacgaa

SEQ ID NO: 182952 - DNA, 75 bp, synthetic construct
  source 1..75: mol_type = other DNA
gtggtggtcaaatcgcgcctgaagctgttttaccgtccggcaggcctggaagggcagcctgagagtgcctatcac

SEQ ID NO: 182953 - DNA, 75 bp, synthetic construct
  source 1..75: mol_type = other DNA
tcgcggcggatggctacttgttcgacaacttgtttgcaggcagtgataacgagctgttatcccgtatacagggtt

SEQ ID NO: 182954 - DNA, 75 bp, synthetic construct
  source 1..75: mol_type = other DNA
tagtttcagctataaaaaaacattctaaacacattaagttgaagagagctacaataacacaaggcgaatatttat

SEQ ID NO: 182955 - DNA, 75 bp, synthetic construct
  source 1..75: mol_type = other DNA
tttctttgctaatccagtgctgactggcgcggtagataaagcgaaaaacgcaggtaaagcagtacacattatggg

SEQ ID NO: 182956 - DNA, 75 bp, synthetic construct
  source 1..75: mol_type = other DNA
gatctttatgaagacggaaaaggcgttgctcaaaacgagacactcgccgcattctggtatttgaaaagcgcacag

SEQ ID NO: 182957 - DNA, 75 bp, synthetic construct
  source 1..75: mol_type = other DNA
tatccccgctggcgcggggaactctagaaatgactaaaaacgcgaggcggcgtaatcggtttatccccgctggcg

SEQ ID NO: 182958 - DNA, 75 bp, synthetic construct
  source 1..75: mol_type = other DNA
atggttctaatacatttattggcaatgattctgataatcaatttattcttggacggtcaggtgctactatatatc

SEQ ID NO: 182959 - DNA, 75 bp, synthetic construct
  source 1..75: mol_type = other DNA
attagtgaattggacttttacaattacaaggttatttcatctcagaacacttatatatataaagtaattatccca

SEQ ID NO: 182960 - DNA, 75 bp, synthetic construct
  source 1..75: mol_type = other DNA
ttttacgaaatcaggacccatatggttttgagtgtattttttatgaagagttggagtcttggctatcacaagata

SEQ ID NO: 182961 - DNA, 75 bp, synthetic construct
  source 1..75: mol_type = other DNA
tcaactgagcacgactgacacccggtcacagaacagactggttcttacagatggtgcaggcaatgaactgaaatg

SEQ ID NO: 182962 - DNA, 75 bp, synthetic construct
  source 1..75: mol_type = other DNA
caacgaaacagagaatggagaagagcggcgcggtaatcggttgtgatgccaacggctacccgctcgatcctgcgt

SEQ ID NO: 182963 - DNA, 75 bp, synthetic construct
  source 1..75: mol_type = other DNA
tatttctccctcctggcagtatatttaaaccggttaaatctggtattatctttaaggataaagaataccctatta

SEQ ID NO: 182964 - DNA, 75 bp, synthetic construct
  source 1..75: mol_type = other DNA
tatttctcccacctggcagcatatttacagttattaagtcaggtattatactcgaggataaagaatatccgatca

SEQ ID NO: 182965 - DNA, 75 bp, synthetic construct
  source 1..75: mol_type = other DNA
ctccaccaaatttcaaaccctcgctgcaaagcgggggttttttgtctctgccttttgccgcttttgtaatacagt

SEQ ID NO: 182966 - DNA, 75 bp, synthetic construct
  source 1..75: mol_type = other DNA
taaaggaattaccgtcaatggtgccattaaagctcgtgattatggaaaaatatttagcaatactttcccgtcatt

SEQ ID NO: 182967 - DNA, 75 bp, synthetic construct
  source 1..75: mol_type = other DNA
atttacaggttccgtctatcgactggagcgattccggctacatccaacatttcatcaacgtgatcgagaagatgc

SEQ ID NO: 182968 - DNA, 75 bp, synthetic construct
  source 1..75: mol_type = other DNA
gatcaggcgaatcgttcggcgctgcagcaagcgataatcgctgttctggctgacggaggagcctggtttgcacaa

SEQ ID NO: 182969 - DNA, 75 bp, synthetic construct
  source 1..75: mol_type = other DNA
ttacgtccggtatggaataccagtgccggtgtagaacggatgagtattccaacagcattgcaaatcatcatgttg

SEQ ID NO: 182970 - DNA, 75 bp, synthetic construct
  source 1..75: mol_type = other DNA
tcttgggccagcagttgcttatctttttacggcaatatgtggaactggttatgtcgctttttccatttatcctgt

SEQ ID NO: 182971 - DNA, 75 bp, synthetic construct
  source 1..75: mol_type = other DNA
tattcggaagggggaagtgctacgacagatgccgaccgtgtaacgttgacttctgatctaaaaggcgctcgcccg

SEQ ID NO: 182972 - DNA, 75 bp, synthetic construct
  source 1..75: mol_type = other DNA
gtcgcgatttgctacctatacgccgttttttaatctcaactattttgctttagggaaggtgcgaacaagtccctg

SEQ ID NO: 182973 - DNA, 75 bp, synthetic construct
  source 1..75: mol_type = other DNA
ttcaaccccttctcagccagaagcacctaaaccgccgcagattggtatggcaaatccggcgtcggtctattgcca

SEQ ID NO: 182974 - DNA, 75 bp, synthetic construct
  source 1..75: mol_type = other DNA
aagagtgattaaggaactggttattctgtgccacggtgttattaaaacagcttcatatcattatcatcatgaaga

SEQ ID NO: 182975 - DNA, 75 bp, synthetic construct
  source 1..75: mol_type = other DNA
gctggagtcagacgtaaacgcatggattgcgtcgcaggttgccggatcgcagacaccacgcggactgtgcgacgc

SEQ ID NO: 182976 - DNA, 75 bp, synthetic construct
  source 1..75: mol_type = other DNA
gaacaggaagccaaagagcgcgaagagcgcgaaagaaaacgtcaggaacttcttcagttaatccagggtgaaggt

SEQ ID NO: 182977 - DNA, 75 bp, synthetic construct
  source 1..75: mol_type = other DNA
tctggcagcgttgtgatgagcgtcaggccagcccggtaaacgatctgcgtattatatcggatgtgagtattggcg

SEQ ID NO: 182978 - DNA, 75 bp, synthetic construct
  source 1..75: mol_type = other DNA
gacgaggagctggagagacttcttgtccgggtagaggctgagtatcagttcacacgacataccgctcacacgacc

SEQ ID NO: 182979 - DNA, 75 bp, synthetic construct
  source 1..75: mol_type = other DNA
gggatagaccagcagttttcacacaggaacgtcagttactcactccagagtcacgagaatcatctgtactttttc

SEQ ID NO: 182980 - DNA, 75 bp, synthetic construct
  source 1..75: mol_type = other DNA
agagacttcttgtccgggtagaggctgagtatcagttcacacgacataccgctcacacgacctctgaggctcgca

SEQ ID NO: 182981 - DNA, 75 bp, synthetic construct
  source 1..75: mol_type = other DNA
aaaactttcttgagacggcgggataccggaaaaatgtgttaaagcaggaagtttatctcttcagtcctgacggct

SEQ ID NO: 182982 - DNA, 75 bp, synthetic construct
  source 1..75: mol_type = other DNA
tcccccaccccagccgtaacaaactggataggaatggaggactcaaaaggaaatcagtatcgatttataaattgt

SEQ ID NO: 182983 - DNA, 75 bp, synthetic construct
  source 1..75: mol_type = other DNA
ttcacgagtcagtttttgattatgatgcccatgtgacaacatatgcctgtcgggccggtatctcagatggtgata

SEQ ID NO: 182984 - DNA, 75 bp, synthetic construct
  source 1..75: mol_type = other DNA
agggcaaggctccttccacctatccgttaagcgatgacaccatccgcctattccgtcagttcgctgccaaagacc

SEQ ID NO: 182985 - DNA, 75 bp, synthetic construct
  source 1..75: mol_type = other DNA
agatcagaagtcggggtaatgaagttctcactgaacgctggaaagcctaccatgctttaccggaagaggaaaaac

SEQ ID NO: 182986 - DNA, 75 bp, synthetic construct
  source 1..75: mol_type = other DNA
gtttatctcttcagtcctgacggctacgcacgagaaatcggcggggaaacagtgctgacaactcaccgctacaat

SEQ ID NO: 182987 - DNA, 75 bp, synthetic construct
  source 1..75: mol_type = other DNA
gggtatccggataccagattcttcatcaaaaatcaggttgttggacgtgacggtatgggcgtgcaggcaggggtg

SEQ ID NO: 182988 - DNA, 75 bp, synthetic construct
  source 1..75: mol_type = other DNA
cacactcaataacgatacctctgaactgttgccagaacttgaaggcgcgctggtcaataatgcggacatcactgg

SEQ ID NO: 182989 - DNA, 75 bp, synthetic construct
  source 1..75: mol_type = other DNA
tttttatattgcatcaattcctgccaaactattaattcaggtatgttactcattcgcagcccagtatggtaatga

SEQ ID NO: 182990 - DNA, 75 bp, synthetic construct
  source 1..75: mol_type = other DNA
ccacaattgaaatcgccaaaaatgaattaaactcatcggatataagcatctccggagtgagagctttgactatgg

SEQ ID NO: 182991 - DNA, 75 bp, synthetic construct
  source 1..75: mol_type = other DNA
gaaatgcaccggaaagccatttattctgtcctgttatcactgattcctttatttatctgtctccttatcctacta

SEQ ID NO: 182992 - DNA, 75 bp, synthetic construct
  source 1..75: mol_type = other DNA
aagaacattttctccttcatcgatatcatccatcattgccctgatgaaattacttatacacagaatattatgtcc

SEQ ID NO: 182993 - DNA, 75 bp, synthetic construct
  source 1..75: mol_type = other DNA
aactacagccagtactacaaccctacgaagtagcaggtgaaactatctatattcatcgtccaaatggcagagact

SEQ ID NO: 182994 - DNA, 75 bp, synthetic construct
  source 1..75: mol_type = other DNA
tgtaaacagtattgattttgtcattcaaaatgaaatatacgcggcaattatcaaactcgtaaatgattcaaatcc

SEQ ID NO: 182995 - DNA, 75 bp, synthetic construct
  source 1..75: mol_type = other DNA
ctgcccgcattgcgttaccagcggcgttaaaaaaccgcgtcattgcgctgagggtgaacgactacggcagaacta

SEQ ID NO: 182996 - DNA, 75 bp, synthetic construct
  source 1..75: mol_type = other DNA
ccgaactgcgcgcccaggccgaacctttgcgcctgcaagcgcgggatgcgcaggcggcgggggatcgcctctact

SEQ ID NO: 182997 - DNA, 75 bp, synthetic construct
  source 1..75: mol_type = other DNA
gctcagtaccaagtccagcgccgaagacaagcacgccattgaaaacttgatccacggcatcgagaaaaaacagct

SEQ ID NO: 182998 - DNA, 75 bp, synthetic construct
  source 1..75: mol_type = other DNA
agaaacgatgatctggcagcctgagttcacagataaaacactctccaggaaaaccggggcggttcagccgttgta

SEQ ID NO: 182999 - DNA, 75 bp, synthetic construct
  source 1..75: mol_type = other DNA
ctgcacttgaagaaatacttaggtctataactattgatgattatgaaactatccttgttggtaaaagctcagttg

SEQ ID NO: 183000 - DNA, 75 bp, synthetic construct
  source 1..75: mol_type = other DNA
atcgcggtaggcagccagtttatcgccaccttgcttacccggggcgccgcgggtcgaaaagccgacacgtcaggc

SEQ ID NO: 183001 - DNA, 75 bp, synthetic construct
  source 1..75: mol_type = other DNA
ctaccaggcagcagatagcagatgtcatcggggtaggggtgaagactatttataaatattttccggctcaatgta

SEQ ID NO: 183002 - DNA, 75 bp, synthetic construct
  source 1..75: mol_type = other DNA
agctgcgcgaaggtcgagttacgttaccgctgcgcgatcgaccggggcatacgctggtgcttggcactacccgcg

SEQ ID NO: 183003 - DNA, 75 bp, synthetic construct
  source 1..75: mol_type = other DNA
tgagtggggcaaccagcttaatgaggagaacccgcatcacctgtatcagccataccgtctgccggggcagcagca

SEQ ID NO: 183004 - DNA, 75 bp, synthetic construct
  source 1..75: mol_type = other DNA
atcatatccgacccaaatgaattggcttccaagttaaaaggtttgttgatgctcatgaacggcgcacttagcgtt

SEQ ID NO: 183005 - DNA, 75 bp, synthetic construct
  source 1..75: mol_type = other DNA
agcaacccaccgataccgacattccgaattggacaccgtggacacaagtgcgatgggaggcctggttggcgaaat

SEQ ID NO: 183006 - DNA, 75 bp, synthetic construct
  source 1..75: mol_type = other DNA
ttcctgaagatgccgataataatgatgttgaaataaagaccaagaaaaaggcagctgcatctcaaaagtctggag

SEQ ID NO: 183007 - DNA, 75 bp, synthetic construct
  source 1..75: mol_type = other DNA
atgcctaggtattctctgaaattaaatgaaggggattttaatcgttcgataggaaactggcggggacattggata

SEQ ID NO: 183008 - DNA, 75 bp, synthetic construct
  source 1..75: mol_type = other DNA
tattcgctcgaagtgttattttagttgaaggggatgcagaggaattattgattccaacattaatcaagaaggtca

SEQ ID NO: 183009 - DNA, 75 bp, synthetic construct
  source 1..75: mol_type = other DNA
tctgccctgcgtctaaaacagggagtgcgcatcctgtgctttcgccgtcgcgtgcggcatctgccgctctggacc

SEQ ID NO: 183010 - DNA, 75 bp, synthetic construct
  source 1..75: mol_type = other DNA
cggcggtggagctttacagcgccagcgcggccctgctggcggcagtatggtgcgtgacggctccgcagacgctgc

SEQ ID NO: 183011 - DNA, 75 bp, synthetic construct
  source 1..75: mol_type = other DNA
atatctgtactgtaagtagtgatatagcaacgactatcaaagatgctgtcggggatacctattctccaaaaggga

SEQ ID NO: 183012 - DNA, 75 bp, synthetic construct
  source 1..75: mol_type = other DNA
aatgctgttccgcaattacggtaaatacctggctgaatacgatggtaaaacgtctataaatgttgtgtcaagctg

SEQ ID NO: 183013 - DNA, 75 bp, synthetic construct
  source 1..75: mol_type = other DNA
aaactggatcgccagcagaaaaacaaagctgaaaacgatcaggaataacctctcgtttctgcgcagcgccataga

SEQ ID NO: 183014 - DNA, 75 bp, synthetic construct
  source 1..75: mol_type = other DNA
attaagtatgctgaacggcttctaggagaaataaaaaaccaaatcagtgatgattcattcgatttttcaaaatac

SEQ ID NO: 183015 - DNA, 75 bp, synthetic construct
  source 1..75: mol_type = other DNA
ttttgatgtttactatgatatagaatataaacttgagtggtacaaagactatttaagagaaaatggtaatgatga

SEQ ID NO: 183016 - DNA, 75 bp, synthetic construct
  source 1..75: mol_type = other DNA
ccaagccctatcattccgctaaactggtcgaaagcctcaatgactcttatgttgaaagaaatgtccaaccttatc

SEQ ID NO: 183017 - DNA, 75 bp, synthetic construct
  source 1..75: mol_type = other DNA
aaaaatatttctttattcagaaaatgaagcatgcttggcagcaggctgtttcatcacgtaaaaaagacaaaaagt

SEQ ID NO: 183018 - DNA, 75 bp, synthetic construct
  source 1..75: mol_type = other DNA
tataacagcgcacaggcggcagcgtcctcgcagactgcatcggcaaactccgcgacagcagccaaaaaatcagaa

SEQ ID NO: 183019 - DNA, 75 bp, synthetic construct
  source 1..75: mol_type = other DNA
tgataatagaaaaaactggcggagcagccaatagaatagcagctaccgcaactaaagatccggttacagggtgga

SEQ ID NO: 183020 - DNA, 75 bp, synthetic construct
  source 1..75: mol_type = other DNA
accaacgcaaagtccagccagacggcagcgaaaaccagcgaaacgaatgccaaagccagtgaaactgcggcgaaa

SEQ ID NO: 183021 - DNA, 75 bp, synthetic construct
  source 1..75: mol_type = other DNA
cgcgctaccaaagtgataagtcagaagcagaaagcagctacatggttgatccgctatcaccagcagaagttgatg

SEQ ID NO: 183022 - DNA, 75 bp, synthetic construct
  source 1..75: mol_type = other DNA
atgggcaagaaagaacaaggatcattatctctccctagaggagtaactattcgccagcataaaactggcagcacc

SEQ ID NO: 183023 - DNA, 75 bp, synthetic construct
  source 1..75: mol_type = other DNA
ctacacggcgctaaaaagcgactttatattcagcgatccgaaaactcgcgccccttgggcaaatgcggacgcgat

SEQ ID NO: 183024 - DNA, 75 bp, synthetic construct
  source 1..75: mol_type = other DNA
ctgcagatatggacgctattcacgccattgccgaacgtcatggtatcgcggtcattgaagacgccgctcatgccg

SEQ ID NO: 183025 - DNA, 75 bp, synthetic construct
  source 1..75: mol_type = other DNA
ccttaccacctgagcgaagttgccacattaaatggaaagcgaatgaaagcaatgctgaagcggactggtcagctg

SEQ ID NO: 183026 - DNA, 75 bp, synthetic construct
  source 1..75: mol_type = other DNA
gtggacgtcgtcaatgcatcagcattaccaacaatgaagttagtgccgatgagcagaaaaagcttagagagcaag

SEQ ID NO: 183027 - DNA, 75 bp, synthetic construct
  source 1..75: mol_type = other DNA
atcaccaaaccacgtgtgcaggcagctatcacaggtaagactcctgaaggtgaaccgattaaaggcgactacaag

SEQ ID NO: 183028 - DNA, 75 bp, synthetic construct
  source 1..75: mol_type = other DNA
gtctacgagacgaagcgtagtgtcagactggacgacagttcatcgtgggaagtggaagcatcgaggcatagtaca

SEQ ID NO: 183029 - DNA, 75 bp, synthetic construct
  source 1..75: mol_type = other DNA
atcggaggtaaagttagatatttctaccagaataaccaaggagccgcggcagcaaaaaatagaggagtaaaagaa

SEQ ID NO: 183030 - DNA, 75 bp, synthetic construct
  source 1..75: mol_type = other DNA
tttaattgcattagatgttattctccgttgttatgaggaaaataaatatgcaatatatgctcaaaaagtagaaaa

SEQ ID NO: 183031 - DNA, 75 bp, synthetic construct
  source 1..75: mol_type = other DNA
tgttttagctacacctctaacacctggcctgtcggcgtagaaatagcaggcgcgcgccttctgatgaatcaggat

SEQ ID NO: 183032 - DNA, 75 bp, synthetic construct
  source 1..75: mol_type = other DNA
gtcaggcgcaacaccagtgatggtagatatcgatcgcgatactctgatggtcactcctgaacaaatcgaagccgc

SEQ ID NO: 183033 - DNA, 75 bp, synthetic construct
  source 1..75: mol_type = other DNA
ctgccgttcattctctcccgcacctacagcagttaccggacaaaaacgcccgcgccggtggggagcctcggcccc

SEQ ID NO: 183034 - DNA, 75 bp, synthetic construct
  source 1..75: mol_type = other DNA
cgagagcattccgttaggagcagaactcccacaggacagacccggactgacgactatttggcctctacgttcaga

SEQ ID NO: 183035 - DNA, 75 bp, synthetic construct
  source 1..75: mol_type = other DNA
ttgcggcctattcgcaagggagataaagtccgcgttctgccagagcgtgggtctactaagaaaggtgatcaacgg

SEQ ID NO: 183036 - DNA, 75 bp, synthetic construct
  source 1..75: mol_type = other DNA
gtggatcactattgcaccgttcgtgacaatatcgataacagacgctctctggggcattgggagggcgatttagtc

SEQ ID NO: 183037 - DNA, 75 bp, synthetic construct
  source 1..75: mol_type = other DNA
tttgcctacgggtcattgatgtggaatcccgtgctggcgattgaagaaatgcaacgggcccgtctgaaaggatgg

SEQ ID NO: 183038 - DNA, 75 bp, synthetic construct
  source 1..75: mol_type = other DNA
atggcacatttgtcagggcgcatgaagcgcagctcccggcgaatatgcgctgggatgctgaaaaaatacgggcat

SEQ ID NO: 183039 - DNA, 75 bp, synthetic construct
  source 1..75: mol_type = other DNA
gtcaccggtactacgatccgttgcaggggcggtatatcaccccggacccgattgggttgagaggtggatggaata

SEQ ID NO: 183040 - DNA, 75 bp, synthetic construct
  source 1..75: mol_type = other DNA
aggaattagcctgaacgtttcccgttatgcaggaataattacgcctgaacctggtgcagtcaaggtgctttttga

SEQ ID NO: 183041 - DNA, 75 bp, synthetic construct
  source 1..75: mol_type = other DNA
ttttatctatcagtatttattgcagtcaatctctagctgataaaagtgagctggctatactcagtcctaataaat

SEQ ID NO: 183042 - DNA, 75 bp, synthetic construct
  source 1..75: mol_type = other DNA
aaggaggcgaggaacagtccgccgagatattaggtatgatctattaccagggatttgaagaaattgcagaaaact

SEQ ID NO: 183043 - DNA, 75 bp, synthetic construct
  source 1..75: mol_type = other DNA
aaaagaaaggtgaaatgttatctgatatttgtatttatgctacagcatgcggacatgcaggaattggtggtggga

SEQ ID NO: 183044 - DNA, 75 bp, synthetic construct
  source 1..75: mol_type = other DNA
tcagtcaattacgtatgacctgtacgggaaaggacacgctgtgggtaggctggctgatgtgcttaagacagcttt

SEQ ID NO: 183045 - DNA, 75 bp, synthetic construct
  source 1..75: mol_type = other DNA
aagctgattggtggtggcgtaagccagcttactgatggagatgacaataaccttactaataactcaactatatgc

SEQ ID NO: 183046 - DNA, 75 bp, synthetic construct
  source 1..75: mol_type = other DNA
gacggtggagcaactggccagacaggtggagccggaatacacaccggcgcgaaaagttcatttttaccactgcga

SEQ ID NO: 183047 - DNA, 75 bp, synthetic construct
  source 1..75: mol_type = other DNA
taatggtgttatggggctaaattccacgaagaaagtacttgataaaaataacaaaataatttattcctcagggct

SEQ ID NO: 183048 - DNA, 75 bp, synthetic construct
  source 1..75: mol_type = other DNA
ttacaagatcaagatgtttggactaaacttattcaagtttatgggagtgccaggaggttaaacgctaatacttat

SEQ ID NO: 183049 - DNA, 75 bp, synthetic construct
  source 1..75: mol_type = other DNA
gattagcccattcatttggttgtaaaccgaactataagattaagtatcatttaattttagaggaacagataaaaa

SEQ ID NO: 183050 - DNA, 75 bp, synthetic construct
  source 1..75: mol_type = other DNA
atgaaaaatataatggcaatggttcattaaatagcccatttaacactcttgaagaattatacagtctgaaaatag

SEQ ID NO: 183051 - DNA, 75 bp, synthetic construct
  source 1..75: mol_type = other DNA
aggaaagaatgtcatccgacatcaggacaaaaaaccgggtaatgactccaacttattgatagtgttttatgttca

SEQ ID NO: 183052 - DNA, 75 bp, synthetic construct
  source 1..75: mol_type = other DNA
atacttcatttcaagctgtttatgttagcggtactatcgtgtaccaagcacatataaagtttggcaataggcaaa

SEQ ID NO: 183053 - DNA, 75 bp, synthetic construct
  source 1..75: mol_type = other DNA
gcaaaatcgtcgatccaagaagtttatcaaggtaaagcatattatgataaaggaatcagtaatcttagaaacatt

SEQ ID NO: 183054 - DNA, 75 bp, synthetic construct
  source 1..75: mol_type = other DNA
tcacgcagcaaaggaactaatagcaattgatcctaagttcactgtttgtaatcattcaaagtctgaatattatta

SEQ ID NO: 183055 - DNA, 75 bp, synthetic construct
  source 1..75: mol_type = other DNA
ataaattggtgcccattagagcctgaagatacaccagtcataccggggatcttgatagctaaagttattggtcca

SEQ ID NO: 183056 - DNA, 75 bp, synthetic construct
  source 1..75: mol_type = other DNA
tggcggaagccctgaatgctattgttgaaaagtacgacctggtacgcacagaccaggataatgccagctttttcc

SEQ ID NO: 183057 - DNA, 75 bp, synthetic construct
  source 1..75: mol_type = other DNA
tgaccgcactgcaacaggtcatgccacggggtaaggcatggccgcgtgataacgacgcggatttaaaccgttttt

SEQ ID NO: 183058 - DNA, 75 bp, synthetic construct
  source 1..75: mol_type = other DNA
ctggcgacggtatccgtcgtattgggatcgatgggcgcgatccagcttgtcgactttgcccggcaaaagcgcttg

SEQ ID NO: 183059 - DNA, 75 bp, synthetic construct
  source 1..75: mol_type = other DNA
taattgatgaagttttatcttgggcacaacgatatgaatcaataagaaatatacaggatgaagaaaaaacttatt

SEQ ID NO: 183060 - DNA, 75 bp, synthetic construct
  source 1..75: mol_type = other DNA
cctgatgattttgcccggctcaattttgagcctactgattttattgataaaaatggtgatgtccagccaatgttt

SEQ ID NO: 183061 - DNA, 75 bp, synthetic construct
  source 1..75: mol_type = other DNA
gttcgccattgccattcgccattttgccccacgccccttcggcaactggcgcacagtagcgcagacaattttccg

SEQ ID NO: 183062 - DNA, 75 bp, synthetic construct
  source 1..75: mol_type = other DNA
gaatagtgatgtcaattttactatcagaagtaataacttttgtgatattgacctatttctttttcaaagaaaact

SEQ ID NO: 183063 - DNA, 75 bp, synthetic construct
  source 1..75: mol_type = other DNA
agtgggtgtaaggatgcagaaatctaataagcttgctgcaattatcgctcgttgggtcccgtggattggttgggc

SEQ ID NO: 183064 - DNA, 75 bp, synthetic construct
  source 1..75: mol_type = other DNA
ctggctactcatctacaagataactgatgaagtcctacgctttgagcgaaccggaacacattcagacctgttttg

SEQ ID NO: 183065 - DNA, 75 bp, synthetic construct
  source 1..75: mol_type = other DNA
gccagttacagagccagcacctgaacagcctggtgtatgaccgtgactacgggtggaatgacaacggcgacctgg

SEQ ID NO: 183066 - DNA, 75 bp, synthetic construct
  source 1..75: mol_type = other DNA
tgtgccttgggttattgagtttaaaaagttaatatataaatatttgccgtatgcagatgaggactttattattcg

SEQ ID NO: 183067 - DNA, 75 bp, synthetic construct
  source 1..75: mol_type = other DNA
tgatgtatcgtctttaccagtgctttggcctgtttgaaaaggatgacgaacggcgtgaagtgcgtggaaacagca

SEQ ID NO: 183068 - DNA, 75 bp, synthetic construct
  source 1..75: mol_type = other DNA
gggaatatacaataaaaggaataataaaaaaatgccgttcagaatacgatgaaagcaacattttgcaaaaagaca

SEQ ID NO: 183069 - DNA, 75 bp, synthetic construct
  source 1..75: mol_type = other DNA
aaagatttatgtcggcgtgaaaaactatttgcgggaatacattcactcatttgattttccgtacaaaggccatct

SEQ ID NO: 183070 - DNA, 75 bp, synthetic construct
  source 1..75: mol_type = other DNA
caaccgtggctgggtacaagagcgaagccgcaaggggcaaccctgggaacaagtgttgtctcaaagtatgcgcgt

SEQ ID NO: 183071 - DNA, 75 bp, synthetic construct
  source 1..75: mol_type = other DNA
aggtggcatcgcaataggtgatggtgctgttattgctgccaattccgttgttaccaaagatgtgccccatatgcc

SEQ ID NO: 183072 - DNA, 75 bp, synthetic construct
  source 1..75: mol_type = other DNA
ttaccaaagatgtgcccccatatgccatagttgcaggagttcctgcaaaaataatcagatttagatttgattcaa

SEQ ID NO: 183073 - DNA, 75 bp, synthetic construct
  source 1..75: mol_type = other DNA
aattaatagcattgaaaaatcattaattaaaatagatgccctaaccgaaaaacagttaaaacaaatcgaactcct

SEQ ID NO: 183074 - DNA, 75 bp, synthetic construct
  source 1..75: mol_type = other DNA
atgcaaaacaaaaaaatatttttaattctacaggggaaaaacctggtggaaaatgtaggttatgtgccgatggat

SEQ ID NO: 183075 - DNA, 75 bp, synthetic construct
  source 1..75: mol_type = other DNA
ctccccgactcttgccggggaaggttttaagaaccagtccggtaccgcaactgcggcttatgtagcactgaacgc

SEQ ID NO: 183076 - DNA, 75 bp, synthetic construct
  source 1..75: mol_type = other DNA
tcgagcaactcatgtccctctgcgaccaactggaacagcaatccctgaccagtctggatgcacatcagcaactgg

SEQ ID NO: 183077 - DNA, 75 bp, synthetic construct
  source 1..75: mol_type = other DNA
atgaagcggcaaccattgccggcaatatcatcgctgcaattaccgcaaagcctgccactcaggttactgccacag

SEQ ID NO: 183078 - DNA, 75 bp, synthetic construct
  source 1..75: mol_type = other DNA
gttgcatgacggtatcgccacgcactttgttgatgccggagataacgtctgtattgagcgcgaaatcaccatgta

SEQ ID NO: 183079 - DNA, 75 bp, synthetic construct
  source 1..75: mol_type = other DNA
atattcgtgtcccgctggtctggatcgatatcgataactctatggcgatgagtgccgcgccggcacagtcccgaa

SEQ ID NO: 183080 - DNA, 75 bp, synthetic construct
  source 1..75: mol_type = other DNA
cttctgcagccacagtttacggtagaacaactacgtgagctgggtattaaggtggatgaaatcccggcgctggct

SEQ ID NO: 183081 - DNA, 75 bp, synthetic construct
  source 1..75: mol_type = other DNA
agcacctcggcggcggctccctgtcccacatctccccggtgatgcgcgcgttccgcgcccgccagcgcgagcagg

SEQ ID NO: 183082 - DNA, 75 bp, synthetic construct
  source 1..75: mol_type = other DNA
atcgaggtctctgggacaggtaggcagctctcctgtgagtctggggctgaaggcttcttatgctctgaccggtca

SEQ ID NO: 183083 - DNA, 75 bp, synthetic construct
  source 1..75: mol_type = other DNA
gaatgacgaaccagctgaaaacttatttaatcggctttgcattacacgtaatctgtctttacagaaccagttgaa

SEQ ID NO: 183084 - DNA, 75 bp, synthetic construct
  source 1..75: mol_type = other DNA
atggcaaagataaggtatatgatgagagaaaagttttctcgcatgaagttcaggttttaacggatatttctgata

SEQ ID NO: 183085 - DNA, 75 bp, synthetic construct
  source 1..75: mol_type = other DNA
agcaggtttcccaccggatcaccaagcttggagagaagaaccctggattcatcatgcaccacaaggttgtggaaa

SEQ ID NO: 183086 - DNA, 75 bp, synthetic construct
  source 1..75: mol_type = other DNA
aagcactctgattaataataagaggacgccaatccaccttgacctccaatgggtattaattgataaccaaactgc

SEQ ID NO: 183087 - DNA, 75 bp, synthetic construct
  source 1..75: mol_type = other DNA
tcatggtattgctggggcatttcttgactacaatttatatgcctctcattatgcaccacatcagggcgataattc

SEQ ID NO: 183088 - DNA, 75 bp, synthetic construct
  source 1..75: mol_type = other DNA
cgactgggataagttctggccgcagggcggcccggcgcgtactgaaatgctggactggtttaactcccgaaccgg

SEQ ID NO: 183089 - DNA, 75 bp, synthetic construct
  source 1..75: mol_type = other DNA
gatggaatcaaactgtcgcagatctctaattcgataatgcatgattggtatatcgcattatatgcatcatcgttt

SEQ ID NO: 183090 - DNA, 75 bp, synthetic construct
  source 1..75: mol_type = other DNA
ttgtttttacctatacgaagtcagggatgcgctgcgcttccgcaacgaagattgttggaacaagtagccgaatac

SEQ ID NO: 183091 - DNA, 75 bp, synthetic construct
  source 1..75: mol_type = other DNA
ctgagtggaaataaaaaattaaatgtgcgttttaattcgagttatagtagtgttgttttacaggatgataatttt

SEQ ID NO: 183092 - DNA, 75 bp, synthetic construct
  source 1..75: mol_type = other DNA
atgctcgctagaaacagcgaagccccactggcggcaaccttaggggcttctatcgaaaataaccgcgaaggaaat

SEQ ID NO: 183093 - DNA, 75 bp, synthetic construct
  source 1..75: mol_type = other DNA
tcgcctgccagaacgttactccacttcttcaggttgcggagcaccgcgaagccggtcgctttacttctatcagtc

SEQ ID NO: 183094 - DNA, 75 bp, synthetic construct
  source 1..75: mol_type = other DNA
atttacttttacttatgctagcaatatgaaaatcttatccagcgagtgggtatttgatggtaaaaaagctgaaat

SEQ ID NO: 183095 - DNA, 75 bp, synthetic construct
  source 1..75: mol_type = other DNA
aatcaacgtcacgcttccctccctgctgatccgccgcatcgatcagtttgttgctgcacatcctgaatatggcag

SEQ ID NO: 183096 - DNA, 75 bp, synthetic construct
  source 1..75: mol_type = other DNA
aatcaacgtcacactcccctctctgctaatccgccgcatcgatcagtttgttgcggcgcaccccgaatacggcag

SEQ ID NO: 183097 - DNA, 75 bp, synthetic construct
  source 1..75: mol_type = other DNA
agaacgttactcctcttcttcaggttgcggagcatcgtgaagctggtcgcttcacttctatcgagcaagaatatc

SEQ ID NO: 183098 - DNA, 75 bp, synthetic construct
  source 1..75: mol_type = other DNA
tgggaatcaagtgggggctaaatccttttcactgaaagatgtaattaagttttctggcataaaagataaattagt

SEQ ID NO: 183099 - DNA, 75 bp, synthetic construct
  source 1..75: mol_type = other DNA
gaaatagcctctcccatcagaacaactctgtttgaactttcaaaagaaaattttggggcgaatagaatgttgtct

SEQ ID NO: 183100 - DNA, 75 bp, synthetic construct
  source 1..75: mol_type = other DNA
caaaatttaaaaaagatgttaatatttgggttgatgaggccatctggggacatcgtttctacaatgatcagacac

SEQ ID NO: 183101 - DNA, 75 bp, synthetic construct
  source 1..75: mol_type = other DNA
attgctgatattgggcgggaagcgaaaaaaattgggcagaaaaaacgactgcggacactgaaggacctcgataaa

SEQ ID NO: 183102 - DNA, 75 bp, synthetic construct
  source 1..75: mol_type = other DNA
cgaacaactttataatgcgctaatgcgtatccctgtattttctcattcagacaacaaaaaagtagcagaacgata

SEQ ID NO: 183103 - DNA, 75 bp, synthetic construct
  source 1..75: mol_type = other DNA
agcagcaggccgccgcgttgtatctgggtatcccgctggcggcattacaggcggtgcaggaggttgaagcccgat

SEQ ID NO: 183104 - DNA, 75 bp, synthetic construct
  source 1..75: mol_type = other DNA
gaaattatgctgagaagcgtcaccagcaacatgtagctaaggtgcatatggaatgggctaaacagattggtttgg

SEQ ID NO: 183105 - DNA, 75 bp, synthetic construct
  source 1..75: mol_type = other DNA
tatttttatccctgtcaggctgtaatgatgctttagctggatggcacaatgtaatgttttatgcttttaatgact

SEQ ID NO: 183106 - DNA, 75 bp, synthetic construct
  source 1..75: mol_type = other DNA
gcgtgggaaatgcacgcctcgccggtcacgctgcgccagtgctcgtcctttgccagggcgctggccgtgtggaac

SEQ ID NO: 183107 - DNA, 75 bp, synthetic construct
  source 1..75: mol_type = other DNA
acatcaaaggcgcgtggagttttgtctggtcaaccaacattgctcactccatctggtcggcgcgtaactcgtgca

SEQ ID NO: 183108 - DNA, 75 bp, synthetic construct
  source 1..75: mol_type = other DNA
atatccgattacgaagccttgagttttcccgactgaacttttccggtctgcctgccattcaactgcgtaatctgg

SEQ ID NO: 183109 - DNA, 75 bp, synthetic construct
  source 1..75: mol_type = other DNA
tggctatcatcggtgctgggcgagcatacatcatcaccaaagagaaaggcgaaacgcgggcgagcatatcgctac

SEQ ID NO: 183110 - DNA, 75 bp, synthetic construct
  source 1..75: mol_type = other DNA
aagcggtacaagtcgcaattgatcttgactgctattccggcggcggcgttgattcgttcaccactgggaagcaag

SEQ ID NO: 183111 - DNA, 75 bp, synthetic construct
  source 1..75: mol_type = other DNA
acccaacctgtcgtacgcgtcgaatcgggaaaaaggcaacaagttcgtttcatattacaaacgactaaaccactt

SEQ ID NO: 183112 - DNA, 75 bp, synthetic construct
  source 1..75: mol_type = other DNA
ctcaaatagatgtattgattatattaatccagagcataaaaaaacgataaaggctttacaagatgctggctatct

SEQ ID NO: 183113 - DNA, 75 bp, synthetic construct
  source 1..75: mol_type = other DNA
cgtggtgttcccggctgaactggtgcggctgctggacaggctggagggggaaatccgggcagaccgcgtgagcag

SEQ ID NO: 183114 - DNA, 75 bp, synthetic construct
  source 1..75: mol_type = other DNA
gatttcgccgtacagtgcgcattagaaaccggggcaagcctactatggcttcttacggggcaaggctctcaatat

SEQ ID NO: 183115 - DNA, 75 bp, synthetic construct
  source 1..75: mol_type = other DNA
tatgattttgctgtgtattgcgcccttgatactggggcaagcattagctggttaatcactggagaaggaccgaaa

SEQ ID NO: 183116 - DNA, 75 bp, synthetic construct
  source 1..75: mol_type = other DNA
gggacggcggacagagtacggtctgaatgtggtgtcaggcgatatcacggacatcaccacgccggacgggcggga

SEQ ID NO: 183117 - DNA, 75 bp, synthetic construct
  source 1..75: mol_type = other DNA
gacagccagcaccgtctggtgttctacacgcggatacagcacggcgaaccacaggtggagagccgctacctctat

SEQ ID NO: 183118 - DNA, 75 bp, synthetic construct
  source 1..75: mol_type = other DNA
tttatcactgtgaccaccgggggctgccgctggcgctcatcagtaccgaaggagcaacggaatggcgtggggaat

SEQ ID NO: 183119 - DNA, 75 bp, synthetic construct
  source 1..75: mol_type = other DNA
ttaccactgtgaccaccggggactgccgcaggcgctcatcagcccggaaggggaaacggcgtggtgcggggagta

SEQ ID NO: 183120 - DNA, 75 bp, synthetic construct
  source 1..75: mol_type = other DNA
agaatgaagatgtagatgagttgtgtaagaaagtgacaagttggatgtattcgcatcctggagagagaattagat

SEQ ID NO: 183121 - DNA, 75 bp, synthetic construct
  source 1..75: mol_type = other DNA
ctggacaggctggagggggaaatccgggcagaccgcgtgagcagtgaaagccgccagtggctggcacagtgcggg

SEQ ID NO: 183122 - DNA, 75 bp, synthetic construct
  source 1..75: mol_type = other DNA
acggcgacctggtgcgcatcagcggcccgcgacagacgcgggaatacggctacagcgccacgggcaggctggaga

SEQ ID NO: 183123 - DNA, 75 bp, synthetic construct
  source 1..75: mol_type = other DNA
cactttctgatggcctttggttggttgatattgagggggctaccagcatcagagaattgacgctcctacccggta

SEQ ID NO: 183124 - DNA, 75 bp, synthetic construct
  source 1..75: mol_type = other DNA
tgccgcctatcgtcgcggtcaataccaccgccggcaccgccagcgaggtcacccgccactgcgtcctgaccaaca

SEQ ID NO: 183125 - DNA, 75 bp, synthetic construct
  source 1..75: mol_type = other DNA
taaaggaaataaagtaacaaaagaaaatgatgtttatgatagtctaaatttttcaagcaaagatttaacgaattc

SEQ ID NO: 183126 - DNA, 75 bp, synthetic construct
  source 1..75: mol_type = other DNA
agggcgggctgacgcgcagtatggaatacgatgctgccggacgggtcatccgcctgaccagtgaaaacggcagcc

SEQ ID NO: 183127 - DNA, 75 bp, synthetic construct
  source 1..75: mol_type = other DNA
gacggtataccagccggggagcttcacgccgctcctgagaatcgaaacagagaatggcgaacaggcgaaggcgcg

SEQ ID NO: 183128 - DNA, 75 bp, synthetic construct
  source 1..75: mol_type = other DNA
gcctggccggcggcagtacgggaagcccgggaggatggggaccagaagatgagaatagcgcaagggatcgtatgc

SEQ ID NO: 183129 - DNA, 75 bp, synthetic construct
  source 1..75: mol_type = other DNA
tcggtccactacggctatgacgataaaggccgcctgacgggcgaacggcagacggtggagaacccggagacgggg

SEQ ID NO: 183130 - DNA, 75 bp, synthetic construct
  source 1..75: mol_type = other DNA
tgattgtggtgatattagtgctaaagatgcaaaaagcacacagaaagcctggaattgtcgtcactccagacagtc

SEQ ID NO: 183131 - DNA, 75 bp, synthetic construct
  source 1..75: mol_type = other DNA
tctttcacgtataataggaccaagtaaatttgatagtactgcagatgctgcgttagatgctttgaaagaaacgca

SEQ ID NO: 183132 - DNA, 75 bp, synthetic construct
  source 1..75: mol_type = other DNA
cataaaatggttaaggccgggtatccgtttaacttccaatgggtaagcgttgacaacttcaataaaacggattgc

SEQ ID NO: 183133 - DNA, 75 bp, synthetic construct
  source 1..75: mol_type = other DNA
tatgacgaagcagaccgcctcacgcaccgcaccgtgaatggcgaaaccgcagagcagtggcagtatgacgaacgc

SEQ ID NO: 183134 - DNA, 75 bp, synthetic construct
  source 1..75: mol_type = other DNA
ggcgaccggctgaccactatacagaacgacagtatccgcatccagacgatttatcagccggggagcttcacgcca

SEQ ID NO: 183135 - DNA, 75 bp, synthetic construct
  source 1..75: mol_type = other DNA
acaccaccgcagcgaatctggatatccgcatcccgtatgccacggacccggcgggcaaccgcctgcccgacccgg

SEQ ID NO: 183136 - DNA, 75 bp, synthetic construct
  source 1..75: mol_type = other DNA
gcaattgcttggccactcaatgccaggagtgatgtcggtgtacaaccgtagccagtacatcccggaaaaacggtt

SEQ ID NO: 183137 - DNA, 75 bp, synthetic construct
  source 1..75: mol_type = other DNA
gccagtacatcccggaaaaacggttagccttggacaaatggataaaatatttagaaaaaataaaccttttaaaat

SEQ ID NO: 183138 - DNA, 75 bp, synthetic construct
  source 1..75: mol_type = other DNA
ccggaaaaactggacgcgctgaataagtggtatgatcgcttagaacttcttgcgggtaatcatcaaaatgtggtt

SEQ ID NO: 183139 - DNA, 75 bp, synthetic construct
  source 1..75: mol_type = other DNA
atgataagcgagatcttttagttaatgaaaaaattcaagtaaaaaaggtacatatattaggggggattggattaa

SEQ ID NO: 183140 - DNA, 75 bp, synthetic construct
  source 1..75: mol_type = other DNA
ccgttaattctcatggtgtaattattaatgaaggcccgagcatgacgcggagtggctttaacgctgctaataata

SEQ ID NO: 183141 - DNA, 75 bp, synthetic construct
  source 1..75: mol_type = other DNA
ggcagatggatgtttaaaggtactggcagtggtaattcacgtggtaactatggtggaacccttggtgttggttat

SEQ ID NO: 183142 - DNA, 75 bp, synthetic construct
  source 1..75: mol_type = other DNA
tgcgctgctctccatgcagcctcttttacgttccggatatgcacgtaatgcaacggtgacggccacgataagcgg

SEQ ID NO: 183143 - DNA, 75 bp, synthetic construct
  source 1..75: mol_type = other DNA
gataattcatctgacccgcgaggctggcccggtgacaccttcagtgattatccgtgggggtcaaaactctggcta

SEQ ID NO: 183144 - DNA, 75 bp, synthetic construct
  source 1..75: mol_type = other DNA
gcgggccggttacgcccgtaacgccaccgtcacggccagaatcatcgtccctgaccgtattgcctttcaggtggt

SEQ ID NO: 183145 - DNA, 75 bp, synthetic construct
  source 1..75: mol_type = other DNA
cctctggtaaagacccaaagcaccaattggcgctaactactcaggaaacgcttaaaccggtcacggtgcaggaag

SEQ ID NO: 183146 - DNA, 75 bp, synthetic construct
  source 1..75: mol_type = other DNA
cctgtacttgcctgagaagctggacgcgctgaacaaatggtatgaccgcatagaacttcttgcgggtaatcatca

SEQ ID NO: 183147 - DNA, 75 bp, synthetic construct
  source 1..75: mol_type = other DNA
atggctggcgaacttaacaaactgagcgacaggaagttaaagggattacatggcatcccggccagtaagattgag

SEQ ID NO: 183148 - DNA, 75 bp, synthetic construct
  source 1..75: mol_type = other DNA
tgctctgcttcttacatcaacctgagctaattacccaaatggggaatgcaagtcaccaaatagctttacaacaat

SEQ ID NO: 183149 - DNA, 75 bp, synthetic construct
  source 1..75: mol_type = other DNA
gtcgggctggctttcagcaatgcgataaaggcgcatccggaaatcaatctgtatcacagcgatggcagtcatccc

SEQ ID NO: 183150 - DNA, 75 bp, synthetic construct
  source 1..75: mol_type = other DNA
gggagctgcgtgcgggagcggtgagtgcggagagtgaggcatggcttgcgcagtgcgggctgacggcggaacaga

SEQ ID NO: 183151 - DNA, 75 bp, synthetic construct
  source 1..75: mol_type = other DNA
caggcgaaggcgcggcaccggagcctggcggaggtgttgcaggaggacacgggtgtgacgctaccggcggagctg

SEQ ID NO: 183152 - DNA, 75 bp, synthetic construct
  source 1..75: mol_type = other DNA
ggcgctcatcagcccggaaggggaaacggcgtggtgcggggagtatgacgagtgggggaaccagcttaatgagga

SEQ ID NO: 183153 - DNA, 75 bp, synthetic construct
  source 1..75: mol_type = other DNA
ggataaccgcatcgcggaagatgcgcactatgtctaccgccacgatgaatacggcaggctggcggagaagacgga

SEQ ID NO: 183154 - DNA, 75 bp, synthetic construct
  source 1..75: mol_type = other DNA
gagacctcgcgcaacggtaacattacgcgctggttttatgatttttcccgcagtggcctgccctgtgcggtggaa

SEQ ID NO: 183155 - DNA, 75 bp, synthetic construct
  source 1..75: mol_type = other DNA
ggggtatcagttaccggcaggccagctggcaccggtgccggcttctccggcaatcacggctccggtggcacaacc

SEQ ID NO: 183156 - DNA, 75 bp, synthetic construct
  source 1..75: mol_type = other DNA
ctggcacccgtgccgatttctccggcaataacggccccggtggcgcaacctgctaagggaggtttcctgaaaaaa

SEQ ID NO: 183157 - DNA, 75 bp, synthetic construct
  source 1..75: mol_type = other DNA
taatggatttttgattaagccacgttcttctcatgcgttagcggaaaaaatgctctgttttttacatcaacctga

SEQ ID NO: 183158 - DNA, 75 bp, synthetic construct
  source 1..75: mol_type = other DNA
cctgccgcccgtgagctggcggcaattgtctggcggctgtactgctcgctttcgcaacttgagcaagcaccaccg

SEQ ID NO: 183159 - DNA, 75 bp, synthetic construct
  source 1..75: mol_type = other DNA
gttttcgccgtagccggtgccatacagcacggtattcgccatcacggcaaaccgtttctgtattactcggataac

SEQ ID NO: 183160 - DNA, 75 bp, synthetic construct
  source 1..75: mol_type = other DNA
ggtggaggcatatcgcggatcaccacaactgatggttgaacgccttaatgccctgaccgaaaaacagcgtcaggt

SEQ ID NO: 183161 - DNA, 75 bp, synthetic construct
  source 1..75: mol_type = other DNA
actttcggcagagcaaatgcaggcattaaggcagcccttgcctgagcgtgagcgctattcatggctcaagagcta

SEQ ID NO: 183162 - DNA, 75 bp, synthetic construct
  source 1..75: mol_type = other DNA
ccgtcacccttaacggcgcaacctacagcggtaatgtgcaggcagacggtagctggagcgtcagcgttcccactt

SEQ ID NO: 183163 - DNA, 75 bp, synthetic construct
  source 1..75: mol_type = other DNA
gtgagcgttccggcggcggatatccaggcgctgggtaatggtgatttgacggtgagcgcctcagtcaccaatgaa

SEQ ID NO: 183164 - DNA, 75 bp, synthetic construct
  source 1..75: mol_type = other DNA
acttgcaggcgctcagtgcaggcacggtcgtcgtgacggccagtgcaacagacccggcaggtaacccggtctcta

SEQ ID NO: 183165 - DNA, 75 bp, synthetic construct
  source 1..75: mol_type = other DNA
tcacctttggcggcaaaacctacacctccacggtggcggctaacggtagctggagcaccaccgttccggttgcgg

SEQ ID NO: 183166 - DNA, 75 bp, synthetic construct
  source 1..75: mol_type = other DNA
cacgaccgtcgccgtcagcatgaacagcatcaccagcgatgatgtgattaacgccgccgaaaaaggcgcggcgct

SEQ ID NO: 183167 - DNA, 75 bp, synthetic construct
  source 1..75: mol_type = other DNA
tggatctcactgttccggtattaacgatcaacaccgtctccggcgatgacattattaacgcctccgaacacggac

SEQ ID NO: 183168 - DNA, 75 bp, synthetic construct
  source 1..75: mol_type = other DNA
aactgctcaacgccagcgacgccaccggcggcaacggctcggatgtggtgaatggctttacggtaggcacatggg

SEQ ID NO: 183169 - DNA, 75 bp, synthetic construct
  source 1..75: mol_type = other DNA
accctttccactgacgatgtgattaacgccgccgagaaaggctctgatttgcagctctccggcaccacctccggc

SEQ ID NO: 183170 - DNA, 75 bp, synthetic construct
  source 1..75: mol_type = other DNA
gacctggatcacgcttaccaccaacggcacgcagtggacttacaccgatagccgcacgctgaccgacggcagcta

SEQ ID NO: 183171 - DNA, 75 bp, synthetic construct
  source 1..75: mol_type = other DNA
cgggggcgaccatccagatcaaagacagcaacggcaacaccatcgccagtacacaggtagacagcaacgggcact

SEQ ID NO: 183172 - DNA, 75 bp, synthetic construct
  source 1..75: mol_type = other DNA
tctcgccgcgccaaccattggcatcaacaccatcgccaccgatgacgtgattaacgccacggaaaaaggcgcgga

SEQ ID NO: 183173 - DNA, 75 bp, synthetic construct
  source 1..75: mol_type = other DNA
ttacggtgacgctgaacgggcaaaattacactgccaccacagatgcttccggcaactggagcaccacagtgccag

SEQ ID NO: 183174 - DNA, 75 bp, synthetic construct
  source 1..75: mol_type = other DNA
ggcggcaaaaattacaccactaccgtggaagccaacggtagctggacggtgaacgtgttacctgccgatctcgct

SEQ ID NO: 183175 - DNA, 75 bp, synthetic construct
  source 1..75: mol_type = other DNA
atggatcggttttctctgaagcgcaaagcttaattacggggactaacgttttgcatttttctgcacggtatatgg

SEQ ID NO: 183176 - DNA, 75 bp, synthetic construct
  source 1..75: mol_type = other DNA
gttgtcacactcggtcaatatcgtaccgatattttcaatgctgttggtaatacctctgcattaattccattcact

SEQ ID NO: 183177 - DNA, 75 bp, synthetic construct
  source 1..75: mol_type = other DNA
cgctggccgccgcactattcgccgctacgggtagttatgctgccgttgtagatggcggtacaattcactttgaag

SEQ ID NO: 183178 - DNA, 75 bp, synthetic construct
  source 1..75: mol_type = other DNA
atatccttaacgtgagcgaagcgggcgcggggatcaccatcagcggtaccaccacggcgcaggccgggcagacgc

SEQ ID NO: 183179 - DNA, 75 bp, synthetic construct
  source 1..75: mol_type = other DNA
ggacggcgcgggcaacgtgcaggcgagcgtcagcaatattaacggtaacagcgcccaggccgatcgcgcgtacag

SEQ ID NO: 183180 - DNA, 75 bp, synthetic construct
  source 1..75: mol_type = other DNA
cctggaagatggcgacaacagcttagatcaggcgattttaagtaaactgagcgctgagggttatgccatagaagg

SEQ ID NO: 183181 - DNA, 75 bp, synthetic construct
  source 1..75: mol_type = other DNA
tcggcgcactgaactggacctacagcgacagcgggctggtcagcggtgcctatacctacagcgcgcgagtggtgg

SEQ ID NO: 183182 - DNA, 75 bp, synthetic construct
  source 1..75: mol_type = other DNA
accaacggcacgcagtggacctacactgacagccgcacgctgaccgacggcagctatgtttatcaggtgcgggtg

SEQ ID NO: 183183 - DNA, 75 bp, synthetic construct
  source 1..75: mol_type = other DNA
aacaacacttaccagaccaccgttcaggcggatggcacctggagcgtgaacgttccggcaacggatttaagcgga

SEQ ID NO: 183184 - DNA, 75 bp, synthetic construct
  source 1..75: mol_type = other DNA
ccgccgaagcaggcagtgcgctgaccctgagcggcaccggaacgaactttgccgcaggtatagtagtgaccgtgt

SEQ ID NO: 183185 - DNA, 75 bp, synthetic construct
  source 1..75: mol_type = other DNA
tctggcactaacactgccggaaccacaaccagcattactcatccggtcacggtcgatctcgcggccgtggcgatc

SEQ ID NO: 183186 - DNA, 75 bp, synthetic construct
  source 1..75: mol_type = other DNA
gatttaagctggagcgtcagcgtgcctgcgaacgttttgcaggcgctgggcaacggagaactgaccatcagcgcc

SEQ ID NO: 183187 - DNA, 75 bp, synthetic construct
  source 1..75: mol_type = other DNA
aaagcgggcaacccggcaagcgccgaccatgcgctggcggtggatgtcaccgcgccggatctcaccattaacatc

SEQ ID NO: 183188 - DNA, 75 bp, synthetic construct
  source 1..75: mol_type = other DNA
acgccgttgaaaaaggcgaaacgctggtcgtaagcggcagcaccagcggtgtcgaagccgggcagacggtgaccg

SEQ ID NO: 183189 - DNA, 75 bp, synthetic construct
  source 1..75: mol_type = other DNA
agcggctacaccggcaacggcaaagccagctatgtcaacggcgtggcgacgctggatgcgcaggccggaaacatc

SEQ ID NO: 183190 - DNA, 75 bp, synthetic construct
  source 1..75: mol_type = other DNA
ggtgatttccggcaccagcacgggcggggaagcgggcgatgtggtgagcgttgtgctcaacggcaaaacctacac

SEQ ID NO: 183191 - DNA, 75 bp, synthetic construct
  source 1..75: mol_type = other DNA
ataccacgcttaccgttcgcggcgtgctgggcgcggcgcttggtgctaatgagttcgcgcaaatcagtaccgaca

SEQ ID NO: 183192 - DNA, 75 bp, synthetic construct
  source 1..75: mol_type = other DNA
cgcttgccaataacggctacaccctgaccgccacggtcagcgatctggcgggtaactccggcagcgccagcaaag

SEQ ID NO: 183193 - DNA, 75 bp, synthetic construct
  source 1..75: mol_type = other DNA
taaccgttgaggtagccgggcaaagcagcgccgataacccagtcagcgtcagccatccgttcaccgtcgatttaa

SEQ ID NO: 183194 - DNA, 75 bp, synthetic construct
  source 1..75: mol_type = other DNA
cagccaggccccggcgttgagcatcgatccactgaccgctgataacatcattaacgccgccgaaagcgggcagga

SEQ ID NO: 183195 - DNA, 75 bp, synthetic construct
  source 1..75: mol_type = other DNA
atttgccaggccatcggcagcgatttccccaaccggttgttgctcatcttcggcatgttgtcggttgccgtggcg

SEQ ID NO: 183196 - DNA, 75 bp, synthetic construct
  source 1..75: mol_type = other DNA
acaacattgtcagcgccgcagaacataacgccgcgctggtactgagcggtacttcgaatgctgaagccgggcaaa

SEQ ID NO: 183197 - DNA, 75 bp, synthetic construct
  source 1..75: mol_type = other DNA
agacagtaacggcaatactattgccagtactcaggtagacagcaacgggcactggagcgtctctttacccacgca

SEQ ID NO: 183198 - DNA, 75 bp, synthetic construct
  source 1..75: mol_type = other DNA
aaagctcggcgggcaacggcaacaccgccaacgtcagcaacggcacggtgacggtcaacgcggcaattgattaca

SEQ ID NO: 183199 - DNA, 75 bp, synthetic construct
  source 1..75: mol_type = other DNA
acaggtacagtggtgaccgtgttgcttaacggcaaaggctacagcgccaccattcagagcaacgggagctggagc

SEQ ID NO: 183200 - DNA, 75 bp, synthetic construct
  source 1..75: mol_type = other DNA
ccagcgtctcacgcgtggcgctggtcgatgccacgccgccggtggtgaccattaatccggtggcgaccgataatg

SEQ ID NO: 183201 - DNA, 75 bp, synthetic construct
  source 1..75: mol_type = other DNA
ggcacctggagcgtgaccgttcccgccgccaacgttgacgcgctggctgacggtaacgccacggtcaccgccagc

SEQ ID NO: 183202 - DNA, 75 bp, synthetic construct
  source 1..75: mol_type = other DNA
atgccgtgcggcacgcaggtgatcaccactgagcggctgtcagaagatttagcccgttcgctgatcccgaaaaac

SEQ ID NO: 183203 - DNA, 75 bp, synthetic construct
  source 1..75: mol_type = other DNA
acgtgcaggtgaacacggcggcagtgtcgctctcggttagcaccatcagcggcgataaccttattaacgccgccg

SEQ ID NO: 183204 - DNA, 75 bp, synthetic construct
  source 1..75: mol_type = other DNA
gttgcgggcgatgacattatcaacgccgctgaaatcgttgtggcgcagaccatcagcggtcaggtcacgggaacg

SEQ ID NO: 183205 - DNA, 75 bp, synthetic construct
  source 1..75: mol_type = other DNA
accgttagcgatgcggcaggtaacagcgatagtgagacgcacacggtcaccgtcaaccttaccgcgccgaccatt

SEQ ID NO: 183206 - DNA, 75 bp, synthetic construct
  source 1..75: mol_type = other DNA
gcggcggctataccgggctctcttccgcgctgcatctggcggaagcgggctttgacgtagtggttctcgaagcct

SEQ ID NO: 183207 - DNA, 75 bp, synthetic construct
  source 1..75: mol_type = other DNA
aagcgggtaccgcgagcaacaacggcaagttcgtcggcaccggctataacgacaccttcttcgccaccgcaggca

SEQ ID NO: 183208 - DNA, 75 bp, synthetic construct
  source 1..75: mol_type = other DNA
tgtaacctggaccacgcttaccgttaccggcacgacctggcgctataacgacagccgcacgctgaccgatggcaa

SEQ ID NO: 183209 - DNA, 75 bp, synthetic construct
  source 1..75: mol_type = other DNA
cacagcggcgggcatattcacccgctgaacctcgccattggtgaagccgatgccattcgtctcaacggcggacgt

SEQ ID NO: 183210 - DNA, 75 bp, synthetic construct
  source 1..75: mol_type = other DNA
cgccatccgcctcaacggcgggcgcgtgtatgaactttctgccgtgacgcagatccagcacaccacgcccgccgt

SEQ ID NO: 183211 - DNA, 75 bp, synthetic construct
  source 1..75: mol_type = other DNA
cggatgacgttgagcgtcttgtggtgccgaaactgctgaaaaccttcccgcagctgaagggcgtcaaaatcgact

SEQ ID NO: 183212 - DNA, 75 bp, synthetic construct
  source 1..75: mol_type = other DNA
gctgtgcctaaaggccgtcgaactggcatcacctttgcctttggctttgaagctgtcctgaccgcagccgcccgg

SEQ ID NO: 183213 - DNA, 75 bp, synthetic construct
  source 1..75: mol_type = other DNA
gacgaccggacaatactgcggctgacgctggatgagggtttcacggcgaaatccaggaaggagcgcgaagagtac

SEQ ID NO: 183214 - DNA, 75 bp, synthetic construct
  source 1..75: mol_type = other DNA
tgccgaccatctttaaacgcgaaattgcccatgccaaccggaccggaacccccctgtcagtgctgattattgacg

SEQ ID NO: 183215 - DNA, 75 bp, synthetic construct
  source 1..75: mol_type = other DNA
ggactatgtgccgaatgagtttcgcgatcgcaaagtgaacatcttcatgaagaataactatgccttcggcggcaa

SEQ ID NO: 183216 - DNA, 75 bp, synthetic construct
  source 1..75: mol_type = other DNA
gaccatttatggtgagatcctctcttacgccacttcctgcgatgctttccatgaaaccgggccagatccgcgtgc

SEQ ID NO: 183217 - DNA, 75 bp, synthetic construct
  source 1..75: mol_type = other DNA
tgacaaaattaagaatttagttaagtcattaacaaatacgacatgttctgtaatgctgatacccgacacattaac

SEQ ID NO: 183218 - DNA, 75 bp, synthetic construct
  source 1..75: mol_type = other DNA
gtcaatgacgcagttggtggatggaaaatgtacagttaataaccatgctcatattattgaaggaactcaagaggc

SEQ ID NO: 183219 - DNA, 75 bp, synthetic construct
  source 1..75: mol_type = other DNA
aagcgacacaaaccgatacgctacgtattgcggagcgtattcgcagtcgcgtcgagaaaacaaaaataaaatcgc

SEQ ID NO: 183220 - DNA, 75 bp, synthetic construct
  source 1..75: mol_type = other DNA
acaaggtcaaatcgattttcagtcgcaaacaggtcagcgatgactcccgtcttgctgatgtgcatgaggcggtga

SEQ ID NO: 183221 - DNA, 75 bp, synthetic construct
  source 1..75: mol_type = other DNA
ggaaatagatattatctataaagttctgctggattctgatttaggcagtagtttgcctttaagccaggctgattt

SEQ ID NO: 183222 - DNA, 75 bp, synthetic construct
  source 1..75: mol_type = other DNA
ctactggcagcaacatttgaaatttcacctgttcatcttaaagatgccgttattggagtttgtggaacgtggtta

SEQ ID NO: 183223 - DNA, 75 bp, synthetic construct
  source 1..75: mol_type = other DNA
atctatcgtattcctttgtcgctcataaagcctcaggacgacatattcaatatagcgtggccaccttcacattgt

SEQ ID NO: 183224 - DNA, 75 bp, synthetic construct
  source 1..75: mol_type = other DNA
cgctgaggttctcgcggaagtggtgggctacggcaagtcatgcagcaatacctacttcgacgcctcattgttgga

SEQ ID NO: 183225 - DNA, 75 bp, synthetic construct
  source 1..75: mol_type = other DNA
ggcatcaaagagcaagtggttgagcttgccatgaataatgcgggtattcgtgacaccgctagggcattacatatc

SEQ ID NO: 183226 - DNA, 75 bp, synthetic construct
  source 1..75: mol_type = other DNA
ttaaattcaagattaaaaaatggtttactagtttaggtgctagcagtagtaatacctgggatatcataaatactt

SEQ ID NO: 183227 - DNA, 75 bp, synthetic construct
  source 1..75: mol_type = other DNA
agtgtacttacaaaatgtagaaaaaaaagaaggggaaaaatggagatatgtgggtgatggcatatatgaacgtac

SEQ ID NO: 183228 - DNA, 75 bp, synthetic construct
  source 1..75: mol_type = other DNA
atgctggggaggctggagcgggaactgcggcagggcagcgtgagtgaagaaagccagcagtggcttgcgcagtgc

SEQ ID NO: 183229 - DNA, 75 bp, synthetic construct
  source 1..75: mol_type = other DNA
caggctgttgagtatttaaaacaagattcacaaatgaaagaaactatagattttttatcaagctctgaagaaact

SEQ ID NO: 183230 - DNA, 75 bp, synthetic construct
  source 1..75: mol_type = other DNA
tcacccaggacccgatagggctgagaggtgaatggaatctgtataaatatccattaaaccctgttcggtttatag

SEQ ID NO: 183231 - DNA, 75 bp, synthetic construct
  source 1..75: mol_type = other DNA
atgagcggcaatatcacgcacagcggcggcgatttcacctcaaacggcatcacagtgcatacgcataagcacggt

SEQ ID NO: 183232 - DNA, 75 bp, synthetic construct
  source 1..75: mol_type = other DNA
gggatcgacctgaaaaaagaagatccactgcggggcattcagcacggacatacaaagcgggataaacgcaggaag

SEQ ID NO: 183233 - DNA, 75 bp, synthetic construct
  source 1..75: mol_type = other DNA
acaaccaagcagtcgtgatggtatatatctgaaacggactaacgataattctaatagtggtgttttgctcaagat

SEQ ID NO: 183234 - DNA, 75 bp, synthetic construct
  source 1..75: mol_type = other DNA
gatggttcagaggcggacggttcgacggtgaacacgctgcgggcgagggtgaccgatgcattcggtaatacgctg

SEQ ID NO: 183235 - DNA, 75 bp, synthetic construct
  source 1..75: mol_type = other DNA
gcccgtacaggtgatttaaaagggatcaacgtgaaataccgttatgaattcacagaccatctgggcggcatagcc

SEQ ID NO: 183236 - DNA, 75 bp, synthetic construct
  source 1..75: mol_type = other DNA
aagggagaaaagacatacaaacaacacaaaaaaacagaggagcttattcaagccgtggaaagtgacacaaaatac

SEQ ID NO: 183237 - DNA, 75 bp, synthetic construct
  source 1..75: mol_type = other DNA
cgatgccagcgcacaggccagcgtcagcaatgttaacggcaacaacgccactactacccacgcttacagcgtcga

SEQ ID NO: 183238 - DNA, 75 bp, synthetic construct
  source 1..75: mol_type = other DNA
tcctggagtaccacggttccggcggcagatatggcagccctgcgtgatggcgatgccagcgcacaggccagcgtc

SEQ ID NO: 183239 - DNA, 75 bp, synthetic construct
  source 1..75: mol_type = other DNA
cgccacggttgccgccaatggcacctgggcgcttaacgtgcctgcggcggatcttgccgcgctcgggcagggcgc

SEQ ID NO: 183240 - DNA, 75 bp, synthetic construct
  source 1..75: mol_type = other DNA
attaacaccgtctctggcgatgatgtgattaacgccgccgaaaaaggggcagatttgaccctttccggcagcacc

SEQ ID NO: 183241 - DNA, 75 bp, synthetic construct
  source 1..75: mol_type = other DNA
agcggtaacagcgcctcggcgacccatgcgtacagcattgacgccagcgcgccgacgctcaccattaacaccatc

SEQ ID NO: 183242 - DNA, 75 bp, synthetic construct
  source 1..75: mol_type = other DNA
ccgttacgattaataatgtggaatacaccactgcggtgcaggccgatggtagctggagcgtgggcgttacagcgg

SEQ ID NO: 183243 - DNA, 75 bp, synthetic construct
  source 1..75: mol_type = other DNA
ggtgcggcggcgggcagcaccgtcaccgttgaactgggcggcaaaacttacaccgccacggtccaggctgattta

SEQ ID NO: 183244 - DNA, 75 bp, synthetic construct
  source 1..75: mol_type = other DNA
ggcagcaccagcgggattgaaagcgggcaaaccgtcaccgtcacttttggcggtaaaacctacactgcaagcgtc

SEQ ID NO: 183245 - DNA, 75 bp, synthetic construct
  source 1..75: mol_type = other DNA
gccaccgacagcgcgggcaacagcggcagcaccacccatacggtgaatgtcgaatcgctcctgcctggggtgatc

SEQ ID NO: 183246 - DNA, 75 bp, synthetic construct
  source 1..75: mol_type = other DNA
attaatccggtggcgaccgataacgtcatcaacacgccggaacacacccaggcgcaaatcatcagcggcacggtc

SEQ ID NO: 183247 - DNA, 75 bp, synthetic construct
  source 1..75: mol_type = other DNA
taccgcgctgccgggcgtcaccattaacgttgtcgcgagcgacgatattattaacgctgccgaagcgggcgcggg

SEQ ID NO: 183248 - DNA, 75 bp, synthetic construct
  source 1..75: mol_type = other DNA
gcaggatctgcccatcaccggcaccaccgacgcccagccggggcagacggtgaccgttacgcttaacgggcagac

SEQ ID NO: 183249 - DNA, 75 bp, synthetic construct
  source 1..75: mol_type = other DNA
tgggtaacggtgagttaacggttaatgcctcggtgaccaacgccgttggcaacaccggtagcggcacgcgcgata

SEQ ID NO: 183250 - DNA, 75 bp, synthetic construct
  source 1..75: mol_type = other DNA
tacttttcagagagagcacagggtaaaatacttgaagagttatcacaattctcatggcattctgggcaaaataag

SEQ ID NO: 183251 - DNA, 75 bp, synthetic construct
  source 1..75: mol_type = other DNA
ggggcatattctgaatgctggcaccctatatggccccattattcggtaccgggcgggcttgaagttcaacatggt

SEQ ID NO: 183252 - DNA, 75 bp, synthetic construct
  source 1..75: mol_type = other DNA
gagcaaatctggtgggaactgtggcttaagaaagatcaaaaccatgatcctaccttgattggcagacagcttgct

SEQ ID NO: 183253 - DNA, 75 bp, synthetic construct
  source 1..75: mol_type = other DNA
ccgcatcaacctcgaacacctgcgcggcattctgcccgacagtgtgctcaaacgttatggcgacatgaccgaagt

SEQ ID NO: 183254 - DNA, 75 bp, synthetic construct
  source 1..75: mol_type = other DNA
tggtgcaagctcaatcggtgcaactattacatcacaatctttagatcctgtaactagtgatgtagtaggtcaggc

SEQ ID NO: 183255 - DNA, 75 bp, synthetic construct
  source 1..75: mol_type = other DNA
tatcaatcacttttcaatagaattgaaaacaaacaacaattgatcgataagtcaaatttcgtattgattgatttc

SEQ ID NO: 183256 - DNA, 75 bp, synthetic construct
  source 1..75: mol_type = other DNA
gtaacacggtttccgtgaccattggcacgactacctataccaccgtgctggacgccaacggcaactggagcatcg

SEQ ID NO: 183257 - DNA, 75 bp, synthetic construct
  source 1..75: mol_type = other DNA
ggcggtggatctcaccgcgccggttatcagcatcaacaccgtttcgacggacgatcgactcaacgccgccgaaca

SEQ ID NO: 183258 - DNA, 75 bp, synthetic construct
  source 1..75: mol_type = other DNA
tcaggcgcagattatcagcggcaccgccacgggtgcggtggcgggcgaccgcctggtggtgaccatcgccgggca

SEQ ID NO: 183259 - DNA, 75 bp, synthetic construct
  source 1..75: mol_type = other DNA
cttaagggtaataaggaggatgtgctaaatattgctcggcgtttatgcgaaagaattaatggaaggctcgggaat

SEQ ID NO: 183260 - DNA, 75 bp, synthetic construct
  source 1..75: mol_type = other DNA
gcgggcaacgtcggtgccaccgacagccagaatgtggtgatcgacactaccgcgccagacccagcggtgaaaacc

SEQ ID NO: 183261 - DNA, 75 bp, synthetic construct
  source 1..75: mol_type = other DNA
aacggtggtggtcgatacgattaaccccaccgccacgccgaccattgtgtcgtacactgatgacgtcgggcagcg

SEQ ID NO: 183262 - DNA, 75 bp, synthetic construct
  source 1..75: mol_type = other DNA
tagatgccaacctgccaggtctgcgcgtcgataccgtggcaggcgatgatgtgattaacagcattgagcacactc

SEQ ID NO: 183263 - DNA, 75 bp, synthetic construct
  source 1..75: mol_type = other DNA
ggctataacgacaccttcttcgccaccgcaggcaccgacacttacgacggttccggcggctgggtgtacagctcc

SEQ ID NO: 183264 - DNA, 75 bp, synthetic construct
  source 1..75: mol_type = other DNA
tccgtgacgattggcacgaccacctataccaccgtgctggacgccaacggcaactggagcatcggcgtgcctgcc

SEQ ID NO: 183265 - DNA, 75 bp, synthetic construct
  source 1..75: mol_type = other DNA
tgaccattaccgcctcggtcaccaacgctaatggcaacaccgggagcggcacgcgggatatcaccattgatgcca

SEQ ID NO: 183266 - DNA, 75 bp, synthetic construct
  source 1..75: mol_type = other DNA
ccaccactgccgatgcatccggtaactggagcgtgaccgttccggcgtccgccgtaagcgcgctcggtgaagcca

SEQ ID NO: 183267 - DNA, 75 bp, synthetic construct
  source 1..75: mol_type = other DNA
aaattaccggcaccagtaatcaaccggtgggcaccaccattacggtgacgctgaacgggcaaaattacaccgcta

SEQ ID NO: 183268 - DNA, 75 bp, synthetic construct
  source 1..75: mol_type = other DNA
tgttggcgatacaatagatgtttgtccgagttttgttgctttgaatggtagaaataaccattatcatgtcgattt

SEQ ID NO: 183269 - DNA, 75 bp, synthetic construct
  source 1..75: mol_type = other DNA
gtaagcgggggcaggctgaaaataaagcttatgctgccgcattagcgacaagtagtgtttcgctgttacctagaa

SEQ ID NO: 183270 - DNA, 75 bp, synthetic construct
  source 1..75: mol_type = other DNA
tggctgacggtggactgcgggcagagtccgtacatgcagcgctggaaatgtaccgggatgacccaaagccaaagt

SEQ ID NO: 183271 - DNA, 75 bp, synthetic construct
  source 1..75: mol_type = other DNA
tttaagctggagcgtcagcgtaccggcgaacgttttgcaggcgctgggtaacggtgaactgaccatcagcgcctc

SEQ ID NO: 183272 - DNA, 75 bp, synthetic construct
  source 1..75: mol_type = other DNA
aacacggcttcggcgacccacgcctacagcgtcgatgccacggcaccgacgcttgccattaacaccatcgccacc

SEQ ID NO: 183273 - DNA, 75 bp, synthetic construct
  source 1..75: mol_type = other DNA
ttaagcagttcgcaggccactgacgataccacgccgctgttaaacggcgtgctctctgcgccgcttgccagcggt

SEQ ID NO: 183274 - DNA, 75 bp, synthetic construct
  source 1..75: mol_type = other DNA
cgcaccgtgaccgtcagcctcagcgcgccagtgattagcatcaacaccatcgcgggcgatgatgtgatcaacgcg

SEQ ID NO: 183275 - DNA, 75 bp, synthetic construct
  source 1..75: mol_type = other DNA
tcgcgccggaaatacgggtagccagtcactgaccgtcacggttgataccgccgcgccggtgattggcattaacag

SEQ ID NO: 183276 - DNA, 75 bp, synthetic construct
  source 1..75: mol_type = other DNA
cctgaacaactattacacgctatcttcgctcatcaaccaagggaatgggacgtttgtctgggggcagaacaccac

SEQ ID NO: 183277 - DNA, 75 bp, synthetic construct
  source 1..75: mol_type = other DNA
caccgacacggggagttcgtccactgactttatcaccagcgataccacgctcacgttgacggggtcactggggac

SEQ ID NO: 183278 - DNA, 75 bp, synthetic construct
  source 1..75: mol_type = other DNA
agtgtcagcgatcgggcaggaaacaccaccagcaacagcgcgaatttcacggtagacacctcagcacccgtggtc

SEQ ID NO: 183279 - DNA, 75 bp, synthetic construct
  source 1..75: mol_type = other DNA
aacagcccaactgtgcagacctatcaggcaacggtacaggccgacggcagctggagtattaatattccggcggca

SEQ ID NO: 183280 - DNA, 75 bp, synthetic construct
  source 1..75: mol_type = other DNA
agcagcaccgccagccataacgtgcaggtcaataccgcgctgccgggcgtcaccattaatccggtggcgacggac

SEQ ID NO: 183281 - DNA, 75 bp, synthetic construct
  source 1..75: mol_type = other DNA
gcaaaccgggcagacgctcaccgtcacgcttaacggcactaactaccagaccacggtgcagacagacggcagctg

SEQ ID NO: 183282 - DNA, 75 bp, synthetic construct
  source 1..75: mol_type = other DNA
tccggcggcggatctggcatctctgccagacggcgcggcgaacgtgcaggccagcgtcagcagcgcgagcggcaa

SEQ ID NO: 183283 - DNA, 75 bp, synthetic construct
  source 1..75: mol_type = other DNA
gggtgatgatgtagtcaatattatcgaacacgctcaggcgcaggtgattactggcagcagctccggctttgccgc

SEQ ID NO: 183284 - DNA, 75 bp, synthetic construct
  source 1..75: mol_type = other DNA
gccgctggcgagcaaaaccatcgccattgcgggcatcagcgatgacaccgggttaagcagcagcgattttgttac

SEQ ID NO: 183285 - DNA, 75 bp, synthetic construct
  source 1..75: mol_type = other DNA
ccgtcagcgccacggtcaacgacaaagcgggcaaccccggcagcgccagccataatctggcggtagacaccaccg

SEQ ID NO: 183286 - DNA, 75 bp, synthetic construct
  source 1..75: mol_type = other DNA
gcggcagatgtcacaaactggcctgcggggacggtcgatattgccgtctctggcaccaacaccgccggaacaact

SEQ ID NO: 183287 - DNA, 75 bp, synthetic construct
  source 1..75: mol_type = other DNA
cagtcatggagcgtgcaacagaacgcgccctttgtgaccggctgacacgtaagcgccgggtggcggagacaccgg

SEQ ID NO: 183288 - DNA, 75 bp, synthetic construct
  source 1..75: mol_type = other DNA
tgggtgggactcatttcgaaatttcgtcacttaattcttccgataatacgtatgcaaccgctattgtgtacaagt

SEQ ID NO: 183289 - DNA, 75 bp, synthetic construct
  source 1..75: mol_type = other DNA
gtttatagtgaagcgcaattgccaggtgttggtgatgatcgtaaacctaaaaacaatccgttgaatgctaatttt

SEQ ID NO: 183290 - DNA, 75 bp, synthetic construct
  source 1..75: mol_type = other DNA
tcgctcataagcgactgcttaatgcaagagtgcaaaaagtatgttcttcattcgaagaggcgaaagaagtaatca

SEQ ID NO: 183291 - DNA, 75 bp, synthetic construct
  source 1..75: mol_type = other DNA
caccgcgcagtttaaactggaagttgaccaggaaaaggcgcaggcattaggtgtttcactttctgacatcaatca

SEQ ID NO: 183292 - DNA, 75 bp, synthetic construct
  source 1..75: mol_type = other DNA
ggacgcttctaactctttactggaaacatggacaggatatatatgctttgctacccgcatacccgaactgcggtg

SEQ ID NO: 183293 - DNA, 75 bp, synthetic construct
  source 1..75: mol_type = other DNA
cagcgccaaccggcccatcttgatccttgatgagccgcagcgaatggagggaggcaaaacgctggattctttggc

SEQ ID NO: 183294 - DNA, 75 bp, synthetic construct
  source 1..75: mol_type = other DNA
tatttaaccagtcatttacccacatctgatacccggcaatacagaccggagaacggaagttatgctaccaatatg

SEQ ID NO: 183295 - DNA, 75 bp, synthetic construct
  source 1..75: mol_type = other DNA
tcaatattattgctgttgagggaaattctaatgctgaattttccctgaaaaaccgtgtagttgccggagcttatg

SEQ ID NO: 183296 - DNA, 75 bp, synthetic construct
  source 1..75: mol_type = other DNA
aaacatggtgacagacaagaccatccggcaactgtgcatgaaattaatgttttgtcggtgattgcaagtgaaagc

SEQ ID NO: 183297 - DNA, 75 bp, synthetic construct
  source 1..75: mol_type = other DNA
tatcgacgaagtcgccaggtaccgggactacaccgctgccgatgaaaaaggcgagtacgcaaaaatctttgaaga

SEQ ID NO: 183298 - DNA, 75 bp, synthetic construct
  source 1..75: mol_type = other DNA
cagcgcaaaccgccccatcttgatcctcgatgagccgcagcggatggaagggggcaagacgctggattcccttgc

SEQ ID NO: 183299 - DNA, 75 bp, synthetic construct
  source 1..75: mol_type = other DNA
tcactgttacgtgctcaaatgttagaaatcattaatggttttgattcttacaaatatctttatggttcgggtaaa

SEQ ID NO: 183300 - DNA, 75 bp, synthetic construct
  source 1..75: mol_type = other DNA
attgtagattatttggaatctctattactgatgatgatttgatcttacccagcaatagtggacacgcggctaagt

SEQ ID NO: 183301 - DNA, 75 bp, synthetic construct
  source 1..75: mol_type = other DNA
ccggcttgaaaacgaaaaagccgctatccaagtccagcacgaagtagttctgaaccggattagagaaatgcaaaa

SEQ ID NO: 183302 - DNA, 75 bp, synthetic construct
  source 1..75: mol_type = other DNA
acagtttcatacatggaaggagttggtgtaggattaggtaatggttgggactctatattgaaaatagataacgcc

SEQ ID NO: 183303 - DNA, 75 bp, synthetic construct
  source 1..75: mol_type = other DNA
tgggaatttgacagtcaaaggtaatatttccactttctctctttctaatccatgggttattctcggtaacgtgac

SEQ ID NO: 183304 - DNA, 75 bp, synthetic construct
  source 1..75: mol_type = other DNA
tgcgacatttgatcttgccataatccgaactctcccaaggcttaaaggaatttcagctaaggaaggtgcgaacaa

SEQ ID NO: 183305 - DNA, 75 bp, synthetic construct
  source 1..75: mol_type = other DNA
gaagattttagtactggcattactgaaagcgaagcagacaagttactatctcgcgatttagccaaaacaattatg

SEQ ID NO: 183306 - DNA, 75 bp, synthetic construct
  source 1..75: mol_type = other DNA
gcgcggttgggaaacgcatctcaccattgtgaccgaagcgctggtaccgacacctgcctttttcccgttaatcga

SEQ ID NO: 183307 - DNA, 75 bp, synthetic construct
  source 1..75: mol_type = other DNA
cgcgtcttatcaggccgcctctcatctgtataaatttcgaactacacttaactggcttctcttcactgaggtcac

SEQ ID NO: 183308 - DNA, 75 bp, synthetic construct
  source 1..75: mol_type = other DNA
tgttcatggcgtagtttgcaaagatgataattataatacagcaatgcaaaaaatctatcttacacgcaatgataa

SEQ ID NO: 183309 - DNA, 75 bp, synthetic construct
  source 1..75: mol_type = other DNA
cctataaaaatagctttcgctgaatattttaaagcaacatctggttcatcttgggcaaacaataatccaatagaa

SEQ ID NO: 183310 - DNA, 75 bp, synthetic construct
  source 1..75: mol_type = other DNA
ctctggcggatttgtattttgcaatgatccgaatggtcggatattaaaaactgattatggatgtgtgattactat

SEQ ID NO: 183311 - DNA, 75 bp, synthetic construct
  source 1..75: mol_type = other DNA
tttaaggaggaagtggaaattgattataatgaaatggataagttcatcagatcaggtgaggtcataaagggtttc

SEQ ID NO: 183312 - DNA, 75 bp, synthetic construct
  source 1..75: mol_type = other DNA
caatgttaacattaggggcatcaggatttggtaaccctacatatattggtagatggttaattattgtaaatgtgc

SEQ ID NO: 183313 - DNA, 75 bp, synthetic construct
  source 1..75: mol_type = other DNA
ccacggcctcccgcgccaccggcgatgcgcgcagccgcagccgcgccgccgttcagcggatgcaggaacgctacc

SEQ ID NO: 183314 - DNA, 75 bp, synthetic construct
  source 1..75: mol_type = other DNA
tcatcagtcaatattggtgcctttaatcttggaaatgcgctgggagcagctgctggtggtgcggtaatttccgct

SEQ ID NO: 183315 - DNA, 75 bp, synthetic construct
  source 1..75: mol_type = other DNA
gccccacctcttccggcaacctcgaatggtttaccgcacagtggggagaaatctcgtttgatgagatcaaccagg

SEQ ID NO: 183316 - DNA, 75 bp, synthetic construct
  source 1..75: mol_type = other DNA
caacaaaaataccaacgctatcagcatctcattgccgcacttcagggctttcacgcccgcatcaaggagcacata

SEQ ID NO: 183317 - DNA, 75 bp, synthetic construct
  source 1..75: mol_type = other DNA
taactactgaacatttcgaagcagtatgcgatggaacaaaaaaagcagaactgcgagtagatgaccgtaatttcc

SEQ ID NO: 183318 - DNA, 75 bp, synthetic construct
  source 1..75: mol_type = other DNA
ctatggcacggctgggatggcttacacccgctggtctgacagtgttcaggattaccgacgtgatgaattgaaacc

SEQ ID NO: 183319 - DNA, 75 bp, synthetic construct
  source 1..75: mol_type = other DNA
gcagctcagcctttatggcatggccgggatggcgcacacccgctggtctgacagtgttcaggattaccggcgtga

SEQ ID NO: 183320 - DNA, 75 bp, synthetic construct
  source 1..75: mol_type = other DNA
attcaaagcaatgtatgggatgaaagcaataataaaaatcatgactttatagcaacaccaccgatttttaaaatg

SEQ ID NO: 183321 - DNA, 75 bp, synthetic construct
  source 1..75: mol_type = other DNA
attttcgatacggatattcctgctgcgacgctcgcggagggatatatcagcgtcgatacgctggttgtcggcgcg

SEQ ID NO: 183322 - DNA, 75 bp, synthetic construct
  source 1..75: mol_type = other DNA
ggcgcttatgttgacagctgggcgctgtataactggtttgataacagcgtcagttccgataaccgttctgctgac

SEQ ID NO: 183323 - DNA, 75 bp, synthetic construct
  source 1..75: mol_type = other DNA
atgatctcatatcagggacttgttcgcaccttccctaacttatttaacccaaaatatcatgaaaaagtcgttatg

SEQ ID NO: 183324 - DNA, 75 bp, synthetic construct
  source 1..75: mol_type = other DNA
gcgaaagaggtaaaacagctgtcagaaggtaatatggtgatccgtatttatcccagcagccagatgggtaatgcg

SEQ ID NO: 183325 - DNA, 75 bp, synthetic construct
  source 1..75: mol_type = other DNA
atgtggcttatgaagacattactaacatcggggtgtactaatcaacggggagcaggtcatggcaatcatgtatat

SEQ ID NO: 183326 - DNA, 75 bp, synthetic construct
  source 1..75: mol_type = other DNA
cggtttgttaacaacagttacttgcatctcggggtatttgcggggagaaatttggttggagtattacagttcggt

SEQ ID NO: 183327 - DNA, 75 bp, synthetic construct
  source 1..75: mol_type = other DNA
gcgtacaagcaacgaatcgaaaagagaatggctggtaaaataaacgaattatttattcgttcacattcggtccaa

SEQ ID NO: 183328 - DNA, 75 bp, synthetic construct
  source 1..75: mol_type = other DNA
atgacttgatcaaaactaaaaactatccagcagtttacgaagctattaaatcattgggcgtagcagtcaaagtta

SEQ ID NO: 183329 - DNA, 75 bp, synthetic construct
  source 1..75: mol_type = other DNA
gtgcactcgcgtaaaggcaaaattatcacccgtgcgcaggtcagcgatcgtccgaacaaaggggcgatttacatg

SEQ ID NO: 183330 - DNA, 75 bp, synthetic construct
  source 1..75: mol_type = other DNA
gtatactggtaagcctgctggctattctgattatataaacaatatttatctcaatgtattacctttttatgaatt

SEQ ID NO: 183331 - DNA, 75 bp, synthetic construct
  source 1..75: mol_type = other DNA
ttatttaacccaaaatatcataaaaaagccgttatgaattacatggaatatctggtaacttgtcagttggatgaa

SEQ ID NO: 183332 - DNA, 75 bp, synthetic construct
  source 1..75: mol_type = other DNA
aaagagatgatttaagcgccattgatttttcattgctcatgaaaacgataaaagctttttcatttggtggcgatc

SEQ ID NO: 183333 - DNA, 75 bp, synthetic construct
  source 1..75: mol_type = other DNA
cagcgccgcagcctggcggagaagttacagcaggaagggagcgaagacggtcacggtgtggtgttcccggctgaa

SEQ ID NO: 183334 - DNA, 75 bp, synthetic construct
  source 1..75: mol_type = other DNA
ggtgtctcatgtgccattgaaactgccggagacgcgccggccagcaagctgttaccactggcgaaattgtgcgat

SEQ ID NO: 183335 - DNA, 75 bp, synthetic construct
  source 1..75: mol_type = other DNA
cagatagctccggctctcgcacactatgggcaagagccaacggatttacccccatccgaaaggaaaattggttaa

SEQ ID NO: 183336 - DNA, 75 bp, synthetic construct
  source 1..75: mol_type = other DNA
gcgatgacattataaacgccaccgaacacgggcaggcgctggtgatttccggttccagcactggcggagaagcgg

SEQ ID NO: 183337 - DNA, 75 bp, synthetic construct
  source 1..75: mol_type = other DNA
cgctgcctggcgtcacccttaatccggtagcgagcgacgatattatcaacgctgccgaatcgggcgtggcgcaga

SEQ ID NO: 183338 - DNA, 75 bp, synthetic construct
  source 1..75: mol_type = other DNA
aacggtcaccgtgacctttggcggcaaaacctacacggcaagcgtcgcggcgaatggttcctggagcaccacggt

SEQ ID NO: 183339 - DNA, 75 bp, synthetic construct
  source 1..75: mol_type = other DNA
cggatttaagcgggctgaccgccagcagctataccgtgactgcgacggtgagcgacaaagcgggtaacccggcaa

SEQ ID NO: 183340 - DNA, 75 bp, synthetic construct
  source 1..75: mol_type = other DNA
tccgcgcaaatcagtatcgatggcggcaccacctggcagaatctggcggtaaatggattaacctggacttatctt

SEQ ID NO: 183341 - DNA, 75 bp, synthetic construct
  source 1..75: mol_type = other DNA
ggcgatgatgtgatcaacgcgacggaacacgcccaggcgcagatcatcagcggctccgccaccggtgcggcaacc

SEQ ID NO: 183342 - DNA, 75 bp, synthetic construct
  source 1..75: mol_type = other DNA
accgtcacgctcggcggggcgacttacactgccacggtgcaggcgaatttaagctggagcgtcgatgttccggcc

SEQ ID NO: 183343 - DNA, 75 bp, synthetic construct
  source 1..75: mol_type = other DNA
tcgccataaccattaacactctctccggcgatgatgtgatcaatgccgtcgaaaaaggcgaaacgctggtggtga

SEQ ID NO: 183344 - DNA, 75 bp, synthetic construct
  source 1..75: mol_type = other DNA
ccatcattatcaataccgtcgccagcgacaatatcgtcaacgccagcgaagccgatgcgggcgtgacggtgagcg

SEQ ID NO: 183345 - DNA, 75 bp, synthetic construct
  source 1..75: mol_type = other DNA
tgcgggtcgataccgtggcgggcgatgatgtggtcaacattatcgagcacggtcaggcgctggtgattaccggca

SEQ ID NO: 183346 - DNA, 75 bp, synthetic construct
  source 1..75: mol_type = other DNA
tcataacatcaccctggcaggcgtcgcgccgcaagtggcgatagataccatcagcggtgataacgtactgaatgc

SEQ ID NO: 183347 - DNA, 75 bp, synthetic construct
  source 1..75: mol_type = other DNA
tggtgatcaccggcggcagtagcggcctgaatgcaggtgctgtgctgacggttaccatcaacagtgtggcgtatt

SEQ ID NO: 183348 - DNA, 75 bp, synthetic construct
  source 1..75: mol_type = other DNA
taccgacaacggcgcaacctgggtgaacgtgaccgttgccgcagacggtctgaactggacatatgtggacgggcg

SEQ ID NO: 183349 - DNA, 75 bp, synthetic construct
  source 1..75: mol_type = other DNA
gagtactggtattatcgcctgagtgtcttacttatcattattctgatttcttttgtcataggtgtaatgatgggg

SEQ ID NO: 183350 - DNA, 75 bp, synthetic construct
  source 1..75: mol_type = other DNA
tgtattgttttaaaaatctcacaacggttaacgggcgtgccagacgcagggagtactggtattatcgtctgagtg

SEQ ID NO: 183351 - DNA, 75 bp, synthetic construct
  source 1..75: mol_type = other DNA
ttatcggtttgccgaaagatcatcccgtcacgctaaacgttgctcaacaatatttagcgctggatgctgaaaatt

SEQ ID NO: 183352 - DNA, 75 bp, synthetic construct
  source 1..75: mol_type = other DNA
aattcactttattcttatcttctctgctacagtgagacgactccacgataccgggcgttcaggatggtggtttat

SEQ ID NO: 183353 - DNA, 75 bp, synthetic construct
  source 1..75: mol_type = other DNA
cgggttatcgacaccgccggaaatatcggcgcgaccgccagccagatagtcactgtggacaccaccgcgccgctg

SEQ ID NO: 183354 - DNA, 75 bp, synthetic construct
  source 1..75: mol_type = other DNA
atatggcggccctgcgtgatggcgatgccagcgcacaggccagcgtcagcaatgttaacggcaacagcgccacca

SEQ ID NO: 183355 - DNA, 75 bp, synthetic construct
  source 1..75: mol_type = other DNA
cctataccgccacggttgccgccaatggcacctgggcgcttaacgtgcctgcggcggatcttgccgcgctcgggc

SEQ ID NO: 183356 - DNA, 75 bp, synthetic construct
  source 1..75: mol_type = other DNA
tctgcaacagcagatgcagaaaaagggcttgctgacgacaaccgcgcaaattatcggtttgccgaaagatcatcc

SEQ ID NO: 183357 - DNA, 75 bp, synthetic construct
  source 1..75: mol_type = other DNA
ttggcagcggcccgcaaactgtcaccgccacggttaccgatgcggcaggcaacagcgacaatgagacacacacgg

SEQ ID NO: 183358 - DNA, 75 bp, synthetic construct
  source 1..75: mol_type = other DNA
ggtgaatatcacggtttcaggcgccactagcgcaggaaacccggtcaccatcacccatccggtcaccgtcgatct

SEQ ID NO: 183359 - DNA, 75 bp, synthetic construct
  source 1..75: mol_type = other DNA
tcccttacagatcgactgatagtgaaaggtgataccagtggtcaaagtgacattctttatgtcaatgaaggcggc

SEQ ID NO: 183360 - DNA, 75 bp, synthetic construct
  source 1..75: mol_type = other DNA
cgagggaattgatgatctcattccccagatagcggagttgtctgtattgcgttgcagcgatacagattctgtttc

SEQ ID NO: 183361 - DNA, 75 bp, synthetic construct
  source 1..75: mol_type = other DNA
aaatacaccattaagaaaaccggttgaattttcgcaactccaggactcattctacaagaatacactgacagatct

SEQ ID NO: 183362 - DNA, 75 bp, synthetic construct
  source 1..75: mol_type = other DNA
agagcatgttctgataactttattaacacgttgtttccgcacaggcattgctactcaacgtcatatcgcaacaga

SEQ ID NO: 183363 - DNA, 75 bp, synthetic construct
  source 1..75: mol_type = other DNA
tcggcgcgggcgcgattatttcgcgtttgcatacccacgacatggaaaaaatgggggcactggcgaaacggatgc

SEQ ID NO: 183364 - DNA, 75 bp, synthetic construct
  source 1..75: mol_type = other DNA
tgcagagaatcgtaagtaatcttgcatcactccatagcgccatcaataaactgagcggtgcagcatttgttgctg

SEQ ID NO: 183365 - DNA, 75 bp, synthetic construct
  source 1..75: mol_type = other DNA
tatcaggatctctttaccaatcaaattgagcaagaaataataacctctccagtcagcagtacgattctgggtaac

SEQ ID NO: 183366 - DNA, 75 bp, synthetic construct
  source 1..75: mol_type = other DNA
cctacgtgccatggtgaggcctgtgattacctttctatgcaggataattatggcggcaaactcctgtggggagaa

SEQ ID NO: 183367 - DNA, 75 bp, synthetic construct
  source 1..75: mol_type = other DNA
ccctacatttttctactcttttattccatgacatactccttcgcattcgctatgtagtgttcctcaggccaaatt

SEQ ID NO: 183368 - DNA, 75 bp, synthetic construct
  source 1..75: mol_type = other DNA
gataccttgcgccgctggcggtcatcgccattattgctctaattccggttcccgcagggctggagagtcatacct

SEQ ID NO: 183369 - DNA, 75 bp, synthetic construct
  source 1..75: mol_type = other DNA
tgcagagaaaacagctttaagatttagaaaggaaatgaataaagctggaagcgcagaagagatggtgcgcataat

SEQ ID NO: 183370 - DNA, 75 bp, synthetic construct
  source 1..75: mol_type = other DNA
gcgattcaaacatcagcgatctgcaagagatggctgcaagtgaaaaagcgtatgcggatgcgcaatttctcactg

SEQ ID NO: 183371 - DNA, 75 bp, synthetic construct
  source 1..75: mol_type = other DNA
tgataaagatcatgaacaaaacaagagacggtgattatcagtttagtagcataaacagtgatcaccgcccaatca

SEQ ID NO: 183372 - DNA, 75 bp, synthetic construct
  source 1..75: mol_type = other DNA
ctggtcaaccaacattgcccactccatctggtcggcgcgtaactcgtgcagcacagtgttggtggggatcgtgtt

SEQ ID NO: 183373 - DNA, 75 bp, synthetic construct
  source 1..75: mol_type = other DNA
acgttcaacgcgacgctgggcggcgataattcacccaccgataagatgaacgtgaaaggcgatacccaagggaac

SEQ ID NO: 183374 - DNA, 75 bp, synthetic construct
  source 1..75: mol_type = other DNA
aatcggctacatcgtattgctgttcatgttctgtcatctgtttggcgtgctgggggctgcatttgcttacttcgg

SEQ ID NO: 183375 - DNA, 75 bp, synthetic construct
  source 1..75: mol_type = other DNA
ttctattttcctaacgtcctgaagtatgaccctgaccaattaaggcaagaattagcttctgacagaggagcaaca

SEQ ID NO: 183376 - DNA, 75 bp, synthetic construct
  source 1..75: mol_type = other DNA
tgttaccggaacagataacgagacggacgcggctgcggcgcgtaaagcgaaggcgctgccgttcggcggcaggct

SEQ ID NO: 183377 - DNA, 75 bp, synthetic construct
  source 1..75: mol_type = other DNA
cattgatgccgtggagatgttacgcgccaacggcgagattgacgccgggcggctggatgaggaaagcggcgagtg

SEQ ID NO: 183378 - DNA, 75 bp, synthetic construct
  source 1..75: mol_type = other DNA
taccgtggccgaagtacatgcccgtattggcattcccgtagaaatcgttgagatgggttttcgtgtattgaagaa

SEQ ID NO: 183379 - DNA, 75 bp, synthetic construct
  source 1..75: mol_type = other DNA
gatgaatttatcattgttttgactgaagcttctgaaaacgaaacgttacgtaccgcagaacgtattcgcagtcgg

SEQ ID NO: 183380 - DNA, 75 bp, synthetic construct
  source 1..75: mol_type = other DNA
cagacaatactccatgccaagaatctgagtaacaaaagtctgcgagtgaagtttttattgcagatacgaaatacc

SEQ ID NO: 183381 - DNA, 75 bp, synthetic construct
  source 1..75: mol_type = other DNA
ggtttattgaaaaaactgtctctacctatttaatggaatctaataaattatgcgatagcagtgttatggataggc

SEQ ID NO: 183382 - DNA, 75 bp, synthetic construct
  source 1..75: mol_type = other DNA
atgaagacaatatggatattattttgtttgctgattacatggcttagtagtaccagtgtacaggcaagtgttacg

SEQ ID NO: 183383 - DNA, 75 bp, synthetic construct
  source 1..75: mol_type = other DNA
taatgatattttatatcatataaaatattttcatgaaaatccaagtgaaaaaaataaacttccaactaaaatgca

SEQ ID NO: 183384 - DNA, 75 bp, synthetic construct
  source 1..75: mol_type = other DNA
gggtaaaagttttggcactgttgcaaagttagcgatgaggcagccttttgtcttattcaaaggccttacatttca

SEQ ID NO: 183385 - DNA, 75 bp, synthetic construct
  source 1..75: mol_type = other DNA
cacagcgggtatgacgcggcaggaaggctaacggcgcagacggacgcggcgggacggcggacagagtacggtctg

SEQ ID NO: 183386 - DNA, 75 bp, synthetic construct
  source 1..75: mol_type = other DNA
attacaaggaaattcgagactagttgggaaaggtggtggatataacactagtccttcaaatttggataaatacgg

SEQ ID NO: 183387 - DNA, 75 bp, synthetic construct
  source 1..75: mol_type = other DNA
tttccttgtgggggatgatgcgtattcccgtgagtggctgcagaaaaatgctgctgcgctccgggcgcgtcatgc

SEQ ID NO: 183388 - DNA, 75 bp, synthetic construct
  source 1..75: mol_type = other DNA
ctttttattttcctgtatggcttctgttttcagcgagcgtcagtgctgaactgacggtgattgctgacctgggcg

SEQ ID NO: 183389 - DNA, 75 bp, synthetic construct
  source 1..75: mol_type = other DNA
catatggcgtctggaaagctgacttcagtgatactgccggatggcaggacggtacggtatggctataacagccag

SEQ ID NO: 183390 - DNA, 75 bp, synthetic construct
  source 1..75: mol_type = other DNA
ctaccactacgacagccagcaccgtctggtgttctacacgcggatacagcacggtgagcctcaggtggagagccg

SEQ ID NO: 183391 - DNA, 75 bp, synthetic construct
  source 1..75: mol_type = other DNA
aggaaacttcatctttaccactgtgaccaccgtgggctgccgctggcgcttatcagcccggaaggggaaacggcg

SEQ ID NO: 183392 - DNA, 75 bp, synthetic construct
  source 1..75: mol_type = other DNA
tgacgggcgtggtggatggctttggtcggacgctggcctttcaccgggcagcggagggtgacgtggcgggcgcgg

SEQ ID NO: 183393 - DNA, 75 bp, synthetic construct
  source 1..75: mol_type = other DNA
ttgcaggaggacacgggtgtgacgctaccggcggagctggcggtgatgctgggaaggctggagcgggagctgcgt

SEQ ID NO: 183394 - DNA, 75 bp, synthetic construct
  source 1..75: mol_type = other DNA
ctaccactacgacagccagcaccgtctggtgttctacacgcggatacagcacggtgagcctcgggtagagagccg

SEQ ID NO: 183395 - DNA, 75 bp, synthetic construct
  source 1..75: mol_type = other DNA
ctaccactacgacagccagcaccgtctggtgttctacacgcggatacagcacggtgagcctctggttgagagccg

SEQ ID NO: 183396 - DNA, 75 bp, synthetic construct
  source 1..75: mol_type = other DNA
tctggtcggggatgatgccctgtcccgtgaatggctgaaggctaatgccggtgagctggctgaacagcatgcggc

SEQ ID NO: 183397 - DNA, 75 bp, synthetic construct
  source 1..75: mol_type = other DNA
ataacggccaggcatgggaaaccccaatgggggccagcattcgcggctggtacgaactgatgattgccgagaact

SEQ ID NO: 183398 - DNA, 75 bp, synthetic construct
  source 1..75: mol_type = other DNA
gatgccagttagtcatcaacgccagggccgcgccgctacggtgtggctgaatccggtgggtcggctgagctttga

SEQ ID NO: 183399 - DNA, 75 bp, synthetic construct
  source 1..75: mol_type = other DNA
ggtccactacggctacgacgataagggccgcctgacgggcgaacggcagacggtggagaacccggagacggggga

SEQ ID NO: 183400 - DNA, 75 bp, synthetic construct
  source 1..75: mol_type = other DNA
aatgactcgtctactctcggctggcctggtggtatatcacaccggttttccatagagggttgggaagtcagcagc

SEQ ID NO: 183401 - DNA, 75 bp, synthetic construct
  source 1..75: mol_type = other DNA
atatgatagcaaactgggttaccatccggaccgtaccaaactggattgtgttgaaatatcaagcggatcactagg

SEQ ID NO: 183402 - DNA, 75 bp, synthetic construct
  source 1..75: mol_type = other DNA
atagaattgacagagatcgtttgttatcgttaatgttagattataatattgatataccaattaatcttaataata

SEQ ID NO: 183403 - DNA, 75 bp, synthetic construct
  source 1..75: mol_type = other DNA
tttggaggcgtgttttctgttattaccattatttattggattacaaatcaaggtttctttatattctttcatgac

SEQ ID NO: 183404 - DNA, 75 bp, synthetic construct
  source 1..75: mol_type = other DNA
tattcttttcgcttgatcaaataatagattctggacttgtttttatttttattgctattggcggtaatttacttg

SEQ ID NO: 183405 - DNA, 75 bp, synthetic construct
  source 1..75: mol_type = other DNA
gattcctgttattaccaccgaacttttggcgcagctttatggcaccgaaattctgaatatccaggttaacttcac

SEQ ID NO: 183406 - DNA, 75 bp, synthetic construct
  source 1..75: mol_type = other DNA
cgaaagggctgggttatgaaaaagagattagagattacgggttaaatctgttcggtatgtacggcagaaaagtaa

SEQ ID NO: 183407 - DNA, 75 bp, synthetic construct
  source 1..75: mol_type = other DNA
ggagcatcacccgcagcgagtatgatgaggcggggaggctgaaggcgcagacggatgcggcggggcggcggacgg

SEQ ID NO: 183408 - DNA, 75 bp, synthetic construct
  source 1..75: mol_type = other DNA
aggagtcggggctgtactataaccgtcaccggtactacgatccgttgcaggggcggtatatcaccccggacccga

SEQ ID NO: 183409 - DNA, 75 bp, synthetic construct
  source 1..75: mol_type = other DNA
tggcagaaaaaatagcctttctgccaatataatgcaacctttatccaataatctgggaaatgtatcattaagtgc

SEQ ID NO: 183410 - DNA, 75 bp, synthetic construct
  source 1..75: mol_type = other DNA
tgatgaacagaacttattctgtactattacttttcaacacgttatcgatgaaaaaaaacatatatatgccagtaa

SEQ ID NO: 183411 - DNA, 75 bp, synthetic construct
  source 1..75: mol_type = other DNA
ggcatcccggcctacttcactaactacgtcgatccggaacttatccgcgttctcgtaacgccgatgaaggccgca

SEQ ID NO: 183412 - DNA, 75 bp, synthetic construct
  source 1..75: mol_type = other DNA
gctgttgaatacagcaccgcctcaggcgagctggtgcaactgattgttgagcgtctgggtgagcaggacaccgct

SEQ ID NO: 183413 - DNA, 75 bp, synthetic construct
  source 1..75: mol_type = other DNA
ctggcatcggtccgctcatcgtcaatggtcgagtccgcaaagtgattgcttcacatatcggcaccaaccggaaac

SEQ ID NO: 183414 - DNA, 75 bp, synthetic construct
  source 1..75: mol_type = other DNA
ggacgaagcaagaaggaattagtgcatgacactaaaataattacggatgcattatcaaaagccatttccggaatc

SEQ ID NO: 183415 - DNA, 75 bp, synthetic construct
  source 1..75: mol_type = other DNA
agggagaaaacgagcgcaatattcaatattgagcacaatcggtcccctcgcccctctggggagagggttagggtg

SEQ ID NO: 183416 - DNA, 75 bp, synthetic construct
  source 1..75: mol_type = other DNA
tcagggccgtgagattcgcccaatccgcaaatggatccagagcggcaaaacgtttgatgcgaaactgctgataga

SEQ ID NO: 183417 - DNA, 75 bp, synthetic construct
  source 1..75: mol_type = other DNA
tagctggcaacgcattagttatactttctctgccagccaatcctatgatgaaaacggtgatgctgccaacttact

SEQ ID NO: 183418 - DNA, 75 bp, synthetic construct
  source 1..75: mol_type = other DNA
ctttatccaataatctgggaaatgtatcattaagtgcactttggcggaattactgggggcgaagtggaaatgcta

SEQ ID NO: 183419 - DNA, 75 bp, synthetic construct
  source 1..75: mol_type = other DNA
atttcggtgacggaaaagctgctcgccaatagtcagcggcagaaaaaagccctgatgcaacaattgcttactgga

SEQ ID NO: 183420 - DNA, 75 bp, synthetic construct
  source 1..75: mol_type = other DNA
tatgattacattatatagcgcaattgctttgttacttattataatatttggaggttcagtattaggttctccaga

SEQ ID NO: 183421 - DNA, 75 bp, synthetic construct
  source 1..75: mol_type = other DNA
gtgggggatataacctgaatgtgcacacatggacatcaccagaaggaataacaggtgaattctggttgcagcctc

SEQ ID NO: 183422 - DNA, 75 bp, synthetic construct
  source 1..75: mol_type = other DNA
ccggatatgctggacaatgtgctcatatttatttttaagtgggggattgcggcttccggtctggcgttttttacc

SEQ ID NO: 183423 - DNA, 75 bp, synthetic construct
  source 1..75: mol_type = other DNA
tgaatggctgctaaaaccttactctatttatcatgaaaatcttagggacggttttaaaatactgaacacctatga

SEQ ID NO: 183424 - DNA, 75 bp, synthetic construct
  source 1..75: mol_type = other DNA
aacaacagtggcagagaaaatgtttcaaatggtggtgtatcctataatgccatgataaatgccggcggaaaccag

SEQ ID NO: 183425 - DNA, 75 bp, synthetic construct
  source 1..75: mol_type = other DNA
catccggagggagtgccattagcacttctgtttatagttctggtgtacagactgtttatgccggagccactgtta

SEQ ID NO: 183426 - DNA, 75 bp, synthetic construct
  source 1..75: mol_type = other DNA
ctgcaacaaatttaagtggcggggctcagaacatctataatcttggccatgcatcaaataccgttatttttagcg

SEQ ID NO: 183427 - DNA, 75 bp, synthetic construct
  source 1..75: mol_type = other DNA
ttacgggagcatatagaaaactatcatctgttactcgctgcgttaaaagcaaaagacaaagagggatgcagacat

SEQ ID NO: 183428 - DNA, 75 bp, synthetic construct
  source 1..75: mol_type = other DNA
ccagctaacgatgcccggctggcaaaccaaacattcggatgcgttcagtattgcgggtgataaagataccgccaa

SEQ ID NO: 183429 - DNA, 75 bp, synthetic construct
  source 1..75: mol_type = other DNA
actggtacgcgcggagtcgccgccagtgagcaaacgctgatccaggtccagaaaacgttacaagaagaaaaataa

SEQ ID NO: 183430 - DNA, 75 bp, synthetic construct
  source 1..75: mol_type = other DNA
ggtacaagatcactcaagtaattcttactgaaccttcacccaacttgtatgttaaacgaatgcgctgggttgatg

SEQ ID NO: 183431 - DNA, 75 bp, synthetic construct
  source 1..75: mol_type = other DNA
aaagcagaagaaattgtcgccagcaatccagagaaatacctgctgctgcaacaattcagcaatccggcaaaccct

SEQ ID NO: 183432 - DNA, 75 bp, synthetic construct
  source 1..75: mol_type = other DNA
cggtggagatcagtgtcaccagccagacggcaggaatcagtgtggtcaccgccagcatcaacagcagcagtcaaa

SEQ ID NO: 183433 - DNA, 75 bp, synthetic construct
  source 1..75: mol_type = other DNA
gccctggacgatcccgcaatggcacaaaccgtcgccatcgaattacgcaagagcgatcgctcccggcttgcgctg

SEQ ID NO: 183434 - DNA, 75 bp, synthetic construct
  source 1..75: mol_type = other DNA
tgcatatcgtgcgtggaaatacggaacacagttcagaaagcacataccgttgtatgccctgtacgccacggatac

SEQ ID NO: 183435 - DNA, 75 bp, synthetic construct
  source 1..75: mol_type = other DNA
agttggagtcattaccaaaaagtcctgaatgaaaatacagcatccgtacgtgaattgctggtaggcgatggtaaa

SEQ ID NO: 183436 - DNA, 75 bp, synthetic construct
  source 1..75: mol_type = other DNA
aaagtcttacatcgttgagaatgtttgcagcccttggtgttttcgttagtcaccttgggttattatctcaatcat

SEQ ID NO: 183437 - DNA, 75 bp, synthetic construct
  source 1..75: mol_type = other DNA
aaacttttttgccaattatcgagcgttagccagcggtgttcagccaggtgtggcgaaagcggatgcgatatttat

SEQ ID NO: 183438 - DNA, 75 bp, synthetic construct
  source 1..75: mol_type = other DNA
gtagatttaggcagatggcctacgacacaattactgagcgctggcgataccacggcactcgtcccttttagcctg

SEQ ID NO: 183439 - DNA, 75 bp, synthetic construct
  source 1..75: mol_type = other DNA
cgccttttggcgcaaacttatatttgtcgatgttctggcgtctggaacaaggcccggcggcggcgattggtttaa

SEQ ID NO: 183440 - DNA, 75 bp, synthetic construct
  source 1..75: mol_type = other DNA
tggccgaacgcttcggtgatgagcccattgtactggccagtcttgtcagggctggcgttccgctcggcgttatgc

SEQ ID NO: 183441 - DNA, 75 bp, synthetic construct
  source 1..75: mol_type = other DNA
ttcctgtttcgcaaccaatcatcattaacgctgctggatatccggtatataacggacagattgccaagttcgtaa

SEQ ID NO: 183442 - DNA, 75 bp, synthetic construct
  source 1..75: mol_type = other DNA
ctcgttaattccaaccttaaaggcattttttcagcgccattccttgctttataacgcagccggagagaaatcctg

SEQ ID NO: 183443 - DNA, 75 bp, synthetic construct
  source 1..75: mol_type = other DNA
aaacgagctggtgattggcgtggacgacacgtttcctttttctctgcttgcgccactgattgaagctttttatca

SEQ ID NO: 183444 - DNA, 75 bp, synthetic construct
  source 1..75: mol_type = other DNA
gcgttccattcggtgcaattgtcacacacggagagaataaaaatggcagcattgtcgcggaaaatggtcaggttt

SEQ ID NO: 183445 - DNA, 75 bp, synthetic construct
  source 1..75: mol_type = other DNA
tatatattccttgcatggcatttatagttattgcctttgcttttaatggtgggatattatctaaaattcttaaaa

SEQ ID NO: 183446 - DNA, 75 bp, synthetic construct
  source 1..75: mol_type = other DNA
aaattatcttaatgaaaaagacattgcatttggttcaattcagttaaatgaaaatatattattactggaacctgg

SEQ ID NO: 183447 - DNA, 75 bp, synthetic construct
  source 1..75: mol_type = other DNA
tcaataaatttaaatttattgatcgtgatttattagcgattattgatttttcaagaaaactgattatcaattgcc

SEQ ID NO: 183448 - DNA, 75 bp, synthetic construct
  source 1..75: mol_type = other DNA
gagctagaggaattgccgtcataatggtcatgttatttcattctaatataccttgggcatctttggggtgggctg

SEQ ID NO: 183449 - DNA, 75 bp, synthetic construct
  source 1..75: mol_type = other DNA
ccgccagttcaatcactgtcaccttacatccgcgctgcgtggcgctggcagccagttccagaccaatagttccgg

SEQ ID NO: 183450 - DNA, 75 bp, synthetic construct
  source 1..75: mol_type = other DNA
atttggtttaatctgcaaaacggcgtgcttatcggtgcggtaacgctgaatcaggggcgtgagattcgcccaatc

SEQ ID NO: 183451 - DNA, 75 bp, synthetic construct
  source 1..75: mol_type = other DNA
ttacgatagtcggtcatggggccaaaaatgaatattacaaagatatcgcctcgaattctacttctatccatttta

SEQ ID NO: 183452 - DNA, 75 bp, synthetic construct
  source 1..75: mol_type = other DNA
actgacgcgaaggattggacacgagccttttttacatcagcttgaatcactctggcaggccgactttttgccgac

SEQ ID NO: 183453 - DNA, 75 bp, synthetic construct
  source 1..75: mol_type = other DNA
atcgaggataaagactctggttttagtaactatattaaacgatttcttataaatagatcgcttagaatattcccg

SEQ ID NO: 183454 - DNA, 75 bp, synthetic construct
  source 1..75: mol_type = other DNA
aaatacgtaatgttgaagaggcattaaaaacgtatgaaaagtaccaagctgaaattaacaaaaaaattaatgcaa

SEQ ID NO: 183455 - DNA, 75 bp, synthetic construct
  source 1..75: mol_type = other DNA
aggcacggtccccgaagaccgggaaacactttactgggctgtctccaactcccttcccggcggcgaacgcagtga

SEQ ID NO: 183456 - DNA, 75 bp, synthetic construct
  source 1..75: mol_type = other DNA
agaagattgaaaaatggaaaggggtcatttggaaaaacgtctctcccgagccgatcattgatttcttatcggaat

SEQ ID NO: 183457 - DNA, 75 bp, synthetic construct
  source 1..75: mol_type = other DNA
acgcagcgtatttttcatgccgatcccggacgcaatgaagggcgagaggagcccgtcattcctggtggcgtagta

SEQ ID NO: 183458 - DNA, 75 bp, synthetic construct
  source 1..75: mol_type = other DNA
tacggatggcagcgcgggtgttaatggcgaaaccgccgcaggccgttaaccggggtgatctcggctggttgacca

SEQ ID NO: 183459 - DNA, 75 bp, synthetic construct
  source 1..75: mol_type = other DNA
tatttccactctctctgagcgaaaccagactgaagtgtctggccgccaaaaacagcggcagggagagtgcaaatg

SEQ ID NO: 183460 - DNA, 75 bp, synthetic construct
  source 1..75: mol_type = other DNA
gaatcgctggaaaaagattttgaatttgttgcctgctcatcggatcgctatttaactgctgagatttttttcacc

SEQ ID NO: 183461 - DNA, 75 bp, synthetic construct
  source 1..75: mol_type = other DNA
gtttttattacgatcccctgtcaaataaagttctgcgctcactcagagagattgccctggagtgcggacttgcaa

SEQ ID NO: 183462 - DNA, 75 bp, synthetic construct
  source 1..75: mol_type = other DNA
gcaagattatttaaccttttctctgcagcggtttatcttactaacggtggattgaactttattctggaaactctt

SEQ ID NO: 183463 - DNA, 75 bp, synthetic construct
  source 1..75: mol_type = other DNA
ttgctggcatgttatgcttcacaactaaatgcttttgccatttcactgactgtcaaaagtgcgctggcattttta

SEQ ID NO: 183464 - DNA, 75 bp, synthetic construct
  source 1..75: mol_type = other DNA
aaccccggtatggccactgataacgagttagcaaggaaaattctggcagataacagcctttctgattggcattgg

SEQ ID NO: 183465 - DNA, 75 bp, synthetic construct
  source 1..75: mol_type = other DNA
aaaacaatgctgttattaatatcatttggttgtctgcagatagtctaattagaatgggattaggctttcttgtat

SEQ ID NO: 183466 - DNA, 75 bp, synthetic construct
  source 1..75: mol_type = other DNA
cagaattcttcaataatacactccattcaaatcaatacgaaattaaagatgcgagcaaagaaaaaataaaggata

SEQ ID NO: 183467 - DNA, 75 bp, synthetic construct
  source 1..75: mol_type = other DNA
tcttgccattgactgctggcgatttaatgatcagagaatagatgcttatatagtaaataacctgggcactggacc

SEQ ID NO: 183468 - DNA, 75 bp, synthetic construct
  source 1..75: mol_type = other DNA
ggcttcccttttactttcattctcatatggtagtgcatcagctgatatcatagcaacagcacgaagagttaatga

SEQ ID NO: 183469 - DNA, 75 bp, synthetic construct
  source 1..75: mol_type = other DNA
aatttggaaaatgcatataaagcaaagaacgatgctcgcttaaaacccttggcttcccttttactttcattctca

SEQ ID NO: 183470 - DNA, 75 bp, synthetic construct
  source 1..75: mol_type = other DNA
atataaatgacaacgatctaattaacgaagatattattaagttcatttatgtcctattaggtactgagttagaaa

SEQ ID NO: 183471 - DNA, 75 bp, synthetic construct
  source 1..75: mol_type = other DNA
aaacccggcgataagatctgggaatctgacgatattaaaattcccgtctattgtgacaacaataccaacggcaac

SEQ ID NO: 183472 - DNA, 75 bp, synthetic construct
  source 1..75: mol_type = other DNA
tgaataaaggtgttattaataacaaaacccttctcttcattttttctgatgatataaagtggtgcagggaaaata

SEQ ID NO: 183473 - DNA, 75 bp, synthetic construct
  source 1..75: mol_type = other DNA
tgatccagatattgatactaaaagtataaataaaaaaatcgtcggttattttcaaactgaaaaatattttaagga

SEQ ID NO: 183474 - DNA, 75 bp, synthetic construct
  source 1..75: mol_type = other DNA
tgagacggtgcgcagcttcggcagcagggcaggcagtaatgccgcatatgaactgaccagcacatacacccccgc

SEQ ID NO: 183475 - DNA, 75 bp, synthetic construct
  source 1..75: mol_type = other DNA
tcgcaagccgcgccggtacaggcgcaaccgcgccagtctaaaccggcttctactcagcagccgtaccaggatctg

SEQ ID NO: 183476 - DNA, 75 bp, synthetic construct
  source 1..75: mol_type = other DNA
tttgcccgcactgctggctttgcggtgtcgctggacggcgccggcatacgtaccaccggcgttgtgcgttgcgat

SEQ ID NO: 183477 - DNA, 75 bp, synthetic construct
  source 1..75: mol_type = other DNA
acagtcggcattggttttgtcggtatttatgccattttcgatattctgaccagcaatgtcgggccagcggcctag

SEQ ID NO: 183478 - DNA, 75 bp, synthetic construct
  source 1..75: mol_type = other DNA
cggatggcctttttgcgttggtgcaaaaaaatgccggatgcgacgctggcgcgtctgctccagcctactcttgct

SEQ ID NO: 183479 - DNA, 75 bp, synthetic construct
  source 1..75: mol_type = other DNA
tatgctgatctacgaaaaaacctatacggctgaactttcgtccattcccggcacccccatcgaagcgggtccctt

SEQ ID NO: 183480 - DNA, 75 bp, synthetic construct
  source 1..75: mol_type = other DNA
tcgagatgatcagcaatacgctggcgatgggctggaactcgccgctaaccaccgtactggcgttactggcctgtg

SEQ ID NO: 183481 - DNA, 75 bp, synthetic construct
  source 1..75: mol_type = other DNA
tatcgcgatatccacaaactgtttaaacgccaggaagttgcgccgacatcttcaggtctgatgttccgcctgatg

SEQ ID NO: 183482 - DNA, 75 bp, synthetic construct
  source 1..75: mol_type = other DNA
ttttgcgttggtgaaaaaaatgccggatgcgacgctggcgcgtctgctccagcctactcttgcttatccgtcctg

SEQ ID NO: 183483 - DNA, 75 bp, synthetic construct
  source 1..75: mol_type = other DNA
gcaatgatgtacggtgaaacccgcaacatgaccgttttggctaatgatcattttgcaaataaaacccaaaacttt

SEQ ID NO: 183484 - DNA, 75 bp, synthetic construct
  source 1..75: mol_type = other DNA
tattagatttaaaaaaatatgctgaagatatgtataactggaggcatatagctgctatgtatgaatctatttatt

SEQ ID NO: 183485 - DNA, 75 bp, synthetic construct
  source 1..75: mol_type = other DNA
ctcaaagagaaacatcaggagcaaccacattcggaaaatatgacttccaatatcattgggcgttatgcagaataa

SEQ ID NO: 183486 - DNA, 75 bp, synthetic construct
  source 1..75: mol_type = other DNA
gggcgtcgctacattggtattgaacagatggattacatcaacgacataacggtaccacgcctgcaaaaagtcatc

SEQ ID NO: 183487 - DNA, 75 bp, synthetic construct
  source 1..75: mol_type = other DNA
atccgcgctgtttacggtacggatatagacggaatttttatttttgattttgataatttatgcaaatttcttaaa

SEQ ID NO: 183488 - DNA, 75 bp, synthetic construct
  source 1..75: mol_type = other DNA
agaggtaattcagtatgtaaatgaatacaaggatagcggtaagagctggaaatacactcaaatactcttagattt

SEQ ID NO: 183489 - DNA, 75 bp, synthetic construct
  source 1..75: mol_type = other DNA
ctcctgtgagatttagcggtactggatttcagggagaaaaattaggagacgtgttatcgcgtgttttgaaacagg

SEQ ID NO: 183490 - DNA, 75 bp, synthetic construct
  source 1..75: mol_type = other DNA
cggggcatggtatctggggcctgctgcgtcagcaggtaaagttcttggtggcgggcttcttggactggcggccaa

SEQ ID NO: 183491 - DNA, 75 bp, synthetic construct
  source 1..75: mol_type = other DNA
ggtaacggtgccggtatcagcgtctttgccagcgttaatgcggcaaaaggcaaggacaacggcaacggtaccgac

SEQ ID NO: 183492 - DNA, 75 bp, synthetic construct
  source 1..75: mol_type = other DNA
tgattgttactgttattacagggagtggaatagttacccctagcgccctggcaggaaccacgtcagcatccttaa

SEQ ID NO: 183493 - DNA, 75 bp, synthetic construct
  source 1..75: mol_type = other DNA
gaactgaaggcaacgaaagacgcaattaatttcacaacagagttcctgaaatcagtttcagaaaaatatggtgca

SEQ ID NO: 183494 - DNA, 75 bp, synthetic construct
  source 1..75: mol_type = other DNA
ttaagcgcagctatttagcctcacagaatttacaaacatactgttatcattttgaaggcagatttggtcttatac

SEQ ID NO: 183495 - DNA, 75 bp, synthetic construct
  source 1..75: mol_type = other DNA
tataaaaactataatatagtgtgtgatgctcttcgatcgattatggatttgggaaggtatatttatgataatgag

SEQ ID NO: 183496 - DNA, 75 bp, synthetic construct
  source 1..75: mol_type = other DNA
ttacaggggcaactggacgtcaaggttgaagaagaggacgggcaagtcacgcaatggcaagttgcatctaatagt

SEQ ID NO: 183497 - DNA, 75 bp, synthetic construct
  source 1..75: mol_type = other DNA
aagttggtacgacaacatctgaggacaacgcttttgagttttgatgaatacctgcaagttcaggaggttattaca

SEQ ID NO: 183498 - DNA, 75 bp, synthetic construct
  source 1..75: mol_type = other DNA
aagatcgtgggcgagattgtttattcaaccaccacgcttattcctgagaactatctggatatttcttttgaagct

SEQ ID NO: 183499 - DNA, 75 bp, synthetic construct
  source 1..75: mol_type = other DNA
aaagaccaaaatggttattttctcggttctgttattatcgtaaagaatggggaaaagcatgatgttattgacgga

SEQ ID NO: 183500 - DNA, 75 bp, synthetic construct
  source 1..75: mol_type = other DNA
ggtgtggcggtacgctggtgagtgacggatacagcgtgtacaaatctctggcggataatcaccccggcatcacat

SEQ ID NO: 183501 - DNA, 75 bp, synthetic construct
  source 1..75: mol_type = other DNA
cggtaaatcctgctccggctggctgtgtgcttacgtcagcggtgaaagaagcggtccgccggtcgtctgttttga

SEQ ID NO: 183502 - DNA, 75 bp, synthetic construct
  source 1..75: mol_type = other DNA
gcacattggaaaggccatccagtggtgggacttgttggtgacgagttgcataataaaagaagggttcgctggcat

SEQ ID NO: 183503 - DNA, 75 bp, synthetic construct
  source 1..75: mol_type = other DNA
gttttattatatttctgtagatagttgtaaaaaaatcactgcattacatgaacaaaaacttcgtctatcttttaa

SEQ ID NO: 183504 - DNA, 75 bp, synthetic construct
  source 1..75: mol_type = other DNA
tgatggaattaaaggccaatataaagatgtaaatgagatcgaagatgtaagtgaactaccttccgataagcttat

SEQ ID NO: 183505 - DNA, 75 bp, synthetic construct
  source 1..75: mol_type = other DNA
ccttcattaccgaaaatctgccgtctgacgccatgcagttcttcatgagcagtcaggaagacgcgcaacttatcc

SEQ ID NO: 183506 - DNA, 75 bp, synthetic construct
  source 1..75: mol_type = other DNA
aattgccgcggggcagggaaaagaagtcataaaaaccttatttaatgagctaagtgtgattttgccgcaaaagta

SEQ ID NO: 183507 - DNA, 75 bp, synthetic construct
  source 1..75: mol_type = other DNA
aattgccgcggggcagggaaaagaagtcataaaaaccttatttaatgagctaagtgtgattttgggtgatgctgc

SEQ ID NO: 183508 - DNA, 75 bp, synthetic construct
  source 1..75: mol_type = other DNA
caaagttcacaggatactagaaatgctgtatttggtttggtaagtgaattacgaccattccgtaatagattatca

SEQ ID NO: 183509 - DNA, 75 bp, synthetic construct
  source 1..75: mol_type = other DNA
aagcccttcatcaaacctttagtgaaattattccagagatggataaggcgctaaacaaacagctcttagaagttc

SEQ ID NO: 183510 - DNA, 75 bp, synthetic construct
  source 1..75: mol_type = other DNA
cgcgtctggtcccgccagcaactgatggatagcgtgtgggaagatgcgcaggacacctacgatcgcaccgttgat

SEQ ID NO: 183511 - DNA, 75 bp, synthetic construct
  source 1..75: mol_type = other DNA
tttccatgggggaaaccatccatatgggcaacgcagaggcgctgaattttacgctgcagtctgatgatgagctgg

SEQ ID NO: 183512 - DNA, 75 bp, synthetic construct
  source 1..75: mol_type = other DNA
ggtgatgaagaagcgctgtcgaaaggcgtctataacacctatatcgaagataacctgcgctactcgcaaaacgcg

SEQ ID NO: 183513 - DNA, 75 bp, synthetic construct
  source 1..75: mol_type = other DNA
ctgcctcagtacgctcctaaatattttgctgaacgagaccaaagggcattgacgttgattgagaaaatcatgcta

SEQ ID NO: 183514 - DNA, 75 bp, synthetic construct
  source 1..75: mol_type = other DNA
gtggggctataacgacgacgttcaggactacacctacgatcctgaaaaagcgaaagccttgctgaaagaagcggg

SEQ ID NO: 183515 - DNA, 75 bp, synthetic construct
  source 1..75: mol_type = other DNA
aaaatggggatgacgccggagcagattaagcaggctaccgggctttccgatgacgaactgaagaaaatcactcac

SEQ ID NO: 183516 - DNA, 75 bp, synthetic construct
  source 1..75: mol_type = other DNA
tcgcagaacgtcttgagcaaaaaggtcgccaggaaggcaggatggaaggacgcatggaaggacgcatggaaggac

SEQ ID NO: 183517 - DNA, 75 bp, synthetic construct
  source 1..75: mol_type = other DNA
ccgtcatccgtattggtcattttgaattgaatgaacccgcggcgcagatcagctggtttgacacgccattaacgc

SEQ ID NO: 183518 - DNA, 75 bp, synthetic construct
  source 1..75: mol_type = other DNA
acagcgaaagaaaatcgcctgtcacaaagtcaattcagatgccaggtatgtggatatacagcgaacgccgatgta

SEQ ID NO: 183519 - DNA, 75 bp, synthetic construct
  source 1..75: mol_type = other DNA
tcaggttaaggttgcattctatggcgttacagatggtaaagatccacaggtgtttaaagcaggtgaaggggtaaa

SEQ ID NO: 183520 - DNA, 75 bp, synthetic construct
  source 1..75: mol_type = other DNA
tttataaagtgggcggggataagacttatcacactgataacctggccagacccactcaggttgaagcaactctta

SEQ ID NO: 183521 - DNA, 75 bp, synthetic construct
  source 1..75: mol_type = other DNA
attatagctcattacccattaggagttgacgcaggcaaacaaaaattcgtacaggccattagagagcttcctgac

SEQ ID NO: 183522 - DNA, 75 bp, synthetic construct
  source 1..75: mol_type = other DNA
tatcgggcaactctccggtaactccggatagttggataagctgtagtgagcgaatgccggacgacaggcaggagg

SEQ ID NO: 183523 - DNA, 75 bp, synthetic construct
  source 1..75: mol_type = other DNA
atctggcctacaaagtccagcagattcaatatattacaggtactgccaggcctgataagcgtagcgcatcaggca

SEQ ID NO: 183524 - DNA, 75 bp, synthetic construct
  source 1..75: mol_type = other DNA
cgctaaagtcgatcacgcgttccggggtgatttccagaatgcgggtcgccagggagcttacgaactcacggtcgt

SEQ ID NO: 183525 - DNA, 75 bp, synthetic construct
  source 1..75: mol_type = other DNA
ccttcccactaagacaaatgtggttaaaaaaaacctgcagttatgcagcgccggatggttctattgacaaatcgg

SEQ ID NO: 183526 - DNA, 75 bp, synthetic construct
  source 1..75: mol_type = other DNA
aatccttgctgtcgcagcattgggagcagtgacaggtgggatggggaaatcaggtacttcaacggtaactaaaaa

SEQ ID NO: 183527 - DNA, 75 bp, synthetic construct
  source 1..75: mol_type = other DNA
atacagcgagattgcgcacaaactcggtgtttccatcagctccgtgaaaaaatacgtggcgaaagccgtcgagca

SEQ ID NO: 183528 - DNA, 75 bp, synthetic construct
  source 1..75: mol_type = other DNA
ataaccttgattattcactcgctaaatccagagagttaaaaaatgatcagttggttgcctgggtttctgaaatta

SEQ ID NO: 183529 - DNA, 75 bp, synthetic construct
  source 1..75: mol_type = other DNA
caactgaatattagtattccgcaagcctggctggcgtggcactcagaaaactgggctccccctctacatggaaag

SEQ ID NO: 183530 - DNA, 75 bp, synthetic construct
  source 1..75: mol_type = other DNA
cgaaagagatcaagttatggctggatattagtacttaccgcaaatttgaagacctctcattgatacagttctacc

SEQ ID NO: 183531 - DNA, 75 bp, synthetic construct
  source 1..75: mol_type = other DNA
agatgtggttgccattaccgcctatgcgcaattctggttccctgggctttctgactgggttgcttcgttatccgt

SEQ ID NO: 183532 - DNA, 75 bp, synthetic construct
  source 1..75: mol_type = other DNA
tgatgagtctgacgttgacggacaatcggggctttgaagcagaccagcttgatctggagctggacgacgctgacg

SEQ ID NO: 183533 - DNA, 75 bp, synthetic construct
  source 1..75: mol_type = other DNA
gttgcgtcactctcgctacaactggcggaagggcgggcagatctctacacggaaatgccagtgaaagtcagtggc

SEQ ID NO: 183534 - DNA, 75 bp, synthetic construct
  source 1..75: mol_type = other DNA
ggaaatgcctgtgaaggtcagtggttttaaacagccgatagatgatgtggaatggaccattacgactctgacgca

SEQ ID NO: 183535 - DNA, 75 bp, synthetic construct
  source 1..75: mol_type = other DNA
acctgcgaaccaataacggctggtgggcaaggctgcagtcctggtttgtcggcgggcgtttagtcaccccaaatc

SEQ ID NO: 183536 - DNA, 75 bp, synthetic construct
  source 1..75: mol_type = other DNA
gccaacagatatcaggaattaatgacgcagagtctggctgaaagttatcgtgtgctaagaccaggacactggatg

SEQ ID NO: 183537 - DNA, 75 bp, synthetic construct
  source 1..75: mol_type = other DNA
gtcatggcctgactaacataaagcatttttatactgccagaaatctggcggcgatgagccagttgtggaaagcga

SEQ ID NO: 183538 - DNA, 75 bp, synthetic construct
  source 1..75: mol_type = other DNA
gcttatcttgatacgtgggcacagtacggctggtttgacaaccatgtgaaaggtgatggactgccgggcgagtcc

SEQ ID NO: 183539 - DNA, 75 bp, synthetic construct
  source 1..75: mol_type = other DNA
tccggaggtactattgttgctacattagacggaagtcgaatcatcaacaacggtactctcattttgtcaggcagt

SEQ ID NO: 183540 - DNA, 75 bp, synthetic construct
  source 1..75: mol_type = other DNA
atgttaccttctgtttacaaaaagaaaaacaagaaacacttcggaagttccccctcccgtttaacgcttttgtca

SEQ ID NO: 183541 - DNA, 75 bp, synthetic construct
  source 1..75: mol_type = other DNA
gctggcagaccgtggagcttataccggcgtaattgccagctggctgcatacgcgggaaccggtaaaaaaagaagc

SEQ ID NO: 183542 - DNA, 75 bp, synthetic construct
  source 1..75: mol_type = other DNA
caaaaactgcattttgttttcatgcccagggtgtgtaacggaaaacaaaaaccttattactcggtaagcagtttg

SEQ ID NO: 183543 - DNA, 75 bp, synthetic construct
  source 1..75: mol_type = other DNA
gtgggggaatgtcggtgtgcaactaggtgataaaggctatagcgatactcagggcatgctgggtgtgaaatatag

SEQ ID NO: 183544 - DNA, 75 bp, synthetic construct
  source 1..75: mol_type = other DNA
attcatgctgagcacaatctcgacggcctgctgaggggcgattcggcatcccgcgcagcctttatgaaggcaatg

SEQ ID NO: 183545 - DNA, 75 bp, synthetic construct
  source 1..75: mol_type = other DNA
ggtctcttagacttagggctaactccaacaattggtcgtgaaacagctcgctatcatggcgggacaatgacagtg

SEQ ID NO: 183546 - DNA, 75 bp, synthetic construct
  source 1..75: mol_type = other DNA
ttacgcgtagccttgaaaatcaggaactaatcaaactgcgtgactggctccttcctattcttatgaacggacagg

SEQ ID NO: 183547 - DNA, 75 bp, synthetic construct
  source 1..75: mol_type = other DNA
caaatattaataatttgaatcaagatattcttggtaatatcatgattccacactattcaataggcattcagaaat

SEQ ID NO: 183548 - DNA, 75 bp, synthetic construct
  source 1..75: mol_type = other DNA
atgatctggcagcctgagttcacagataaaacactctccaggaaaaccggggcggttcagtttctgtttttcatt

SEQ ID NO: 183549 - DNA, 75 bp, synthetic construct
  source 1..75: mol_type = other DNA
atgactacattattcagaaaagaatatccgcgaaagagcagagcaacggaattcctgtttctcattctgtttatc

SEQ ID NO: 183550 - DNA, 75 bp, synthetic construct
  source 1..75: mol_type = other DNA
aagtgcatcgcctattctctcattgtatgccattggaaatggtttactggcagtatcagctttcccatattatct

SEQ ID NO: 183551 - DNA, 75 bp, synthetic construct
  source 1..75: mol_type = other DNA
agccagccattatgaaaatgataaagatgtggtgagagaactactgtcgctgagcagaaataatgctgtctgctc

SEQ ID NO: 183552 - DNA, 75 bp, synthetic construct
  source 1..75: mol_type = other DNA
gtaataagtcaggcaaatggcaatcctgtacttaaagaactattctggaaagcagtagacgaatttaactttccg

SEQ ID NO: 183553 - DNA, 75 bp, synthetic construct
  source 1..75: mol_type = other DNA
aatcgcaatatccgacatgctcccggaatgaaaaatgaacaccttaaagatttaacaaaagggaaagacgagaaa

SEQ ID NO: 183554 - DNA, 75 bp, synthetic construct
  source 1..75: mol_type = other DNA
ttttgaagatttgattaacaatgccacacaaaaaaaacagattgatctcaaaaccaagaatgtatctctagggct

SEQ ID NO: 183555 - DNA, 75 bp, synthetic construct
  source 1..75: mol_type = other DNA
cggtgatgatctggtaaataaaagtatccgcgaatatttcgatggcagcgacgagtttaatcgccgcttggatga

SEQ ID NO: 183556 - DNA, 75 bp, synthetic construct
  source 1..75: mol_type = other DNA
aactggcacaagaaattattagcatgaaccagccactgattgaccgtattgtcacggctgaagtcgataaaatta

SEQ ID NO: 183557 - DNA, 75 bp, synthetic construct
  source 1..75: mol_type = other DNA
gcactggtagtgaaattcagcggggtatccaggccgcgacggccgcgcttcagggactggtgggtggtaatttag

SEQ ID NO: 183558 - DNA, 75 bp, synthetic construct
  source 1..75: mol_type = other DNA
atactacaatgaaattaatactttgaatgaaatagagaaaaacttaataagaaaggaaaatgaaattgaattata

SEQ ID NO: 183559 - DNA, 75 bp, synthetic construct
  source 1..75: mol_type = other DNA
gtttaaatattccgttaagtggattacttaaactggcagtaaaaaaagaaaaacattcgctaaacgtggattctg

SEQ ID NO: 183560 - DNA, 75 bp, synthetic construct
  source 1..75: mol_type = other DNA
tggctgagcttgaggaagccaatatcaattttgacttagaaaaagcagctaactatccatcagtttcattatctt

SEQ ID NO: 183561 - DNA, 75 bp, synthetic construct
  source 1..75: mol_type = other DNA
gaatatcatatccctcaaaatatgtttggatttattgattcaagtacaataaaattatgtaaaagaaatagtata

SEQ ID NO: 183562 - DNA, 75 bp, synthetic construct
  source 1..75: mol_type = other DNA
ggctattattgaattagaacatagtggggggttatatcctgaacttctagacacagcatttgagataacattata

SEQ ID NO: 183563 - DNA, 75 bp, synthetic construct
  source 1..75: mol_type = other DNA
atgaagattatatttatattattagctatgattttcctttataattcatccgcatttgcgtacgtttgtcctctt

SEQ ID NO: 183564 - DNA, 75 bp, synthetic construct
  source 1..75: mol_type = other DNA
aggtcatggcttcagcgtcaatgcgtccgtcaataacctgtttgatacgaaatatgcctacagcgaagggtttat

SEQ ID NO: 183565 - DNA, 75 bp, synthetic construct
  source 1..75: mol_type = other DNA
gatgcacgcgcttattgatatttctgttattgctgacatggcgcataagcacgccaccagtgaaacagaatatgc

SEQ ID NO: 183566 - DNA, 75 bp, synthetic construct
  source 1..75: mol_type = other DNA
tctttttgatatgcaagatccagaaattcccgcgctttcgcactatgtccctgcctttgaagggccagaagataa

SEQ ID NO: 183567 - DNA, 75 bp, synthetic construct
  source 1..75: mol_type = other DNA
attaacgcactaaatgaaatagaaagagagttaataaaaaaggaaaatgaaattgaattatataaaatgcatatg

SEQ ID NO: 183568 - DNA, 75 bp, synthetic construct
  source 1..75: mol_type = other DNA
gataacaactactctttcttgcctgatttttctgtttctacagggcaatcagcatataataaatcaggttttaaa

SEQ ID NO: 183569 - DNA, 75 bp, synthetic construct
  source 1..75: mol_type = other DNA
ggcccacttaccttcaacacttgcaattggaacaggcgaaataatcgatagtgactcctcgccaaattcaccacg

SEQ ID NO: 183570 - DNA, 75 bp, synthetic construct
  source 1..75: mol_type = other DNA
aaactcatctcaattaaacattgataaaagaaagttagacctagagaaaataaaaacagactccttaaacaaact

SEQ ID NO: 183571 - DNA, 75 bp, synthetic construct
  source 1..75: mol_type = other DNA
agcggataacgtcaacggtgtgtattaccgaccgctgcaaaaactgattaatggcacctggtataacgtagcgag

SEQ ID NO: 183572 - DNA, 75 bp, synthetic construct
  source 1..75: mol_type = other DNA
tagccaggattacccttacccgcaatgtcctggctttatcccgatcggggggactttattgcctggtcggcagaa

SEQ ID NO: 183573 - DNA, 75 bp, synthetic construct
  source 1..75: mol_type = other DNA
atgtcctggctttatcccgatcggggagactttattgctgtggtcggcagaatgcaggatatcaacgccgttcgt

SEQ ID NO: 183574 - DNA, 75 bp, synthetic construct
  source 1..75: mol_type = other DNA
ttaagttactggtataaagttcgttcttttgaacataatcttagcattaatccagaacgacgagatgaaataatt

SEQ ID NO: 183575 - DNA, 75 bp, synthetic construct
  source 1..75: mol_type = other DNA
actagctctaaagcagatgaaagaaatagctgatttttttcgggaaaccgaaccaagcagtcctgtcccttatct

SEQ ID NO: 183576 - DNA, 75 bp, synthetic construct
  source 1..75: mol_type = other DNA
agttggatactattcaacaacgtcttaagcaggcttcagatgcacgagctcaggaagtcgccggtagcgaagtgc

SEQ ID NO: 183577 - DNA, 75 bp, synthetic construct
  source 1..75: mol_type = other DNA
ccagaaataagtcacaaaacctttataaaaagtattatttatgatgttttaagttcaattacagcgatacttcat

SEQ ID NO: 183578 - DNA, 75 bp, synthetic construct
  source 1..75: mol_type = other DNA
ttagaaaagacgtgaaagaatttatcacaatgataaaatcatttcaggtcgatattcgcaccgaaaacaatctta

SEQ ID NO: 183579 - DNA, 75 bp, synthetic construct
  source 1..75: mol_type = other DNA
acaggaatattgcggtgtactgttccgcaagaaaaagaaattaataaagccatcatttatcctgtactttcttta

SEQ ID NO: 183580 - DNA, 75 bp, synthetic construct
  source 1..75: mol_type = other DNA
tcgtaacccgcaagccattcaaaataacccgcaaccacccccaaataacccgcaaacacatcaggaaaatggggc

SEQ ID NO: 183581 - DNA, 75 bp, synthetic construct
  source 1..75: mol_type = other DNA
gaacgaatggatgccggtggtgggttacgtaagcttcagcgaggcagctcacgccataacggactatatcgttgg

SEQ ID NO: 183582 - DNA, 75 bp, synthetic construct
  source 1..75: mol_type = other DNA
tggtaataagggggcgtattatcgcatgaaactcgaagcctccccagttacagtttcctcaaatggtataaattt

SEQ ID NO: 183583 - DNA, 75 bp, synthetic construct
  source 1..75: mol_type = other DNA
ggaggttaatggacgaattgagatattagatgggacccgacgccgtgccgcctgcatatttaataacgttaaatt

SEQ ID NO: 183584 - DNA, 75 bp, synthetic construct
  source 1..75: mol_type = other DNA
gttactcaacgattgttacccataccattagttgcggtaagagcccgaagaattgcatttgaaaacccatataga

SEQ ID NO: 183585 - DNA, 75 bp, synthetic construct
  source 1..75: mol_type = other DNA
ggaaaaaacagtctatacactgttaaaagaaggtctgtccgatgatttcacagtgattcatagtctcccgtggtt

SEQ ID NO: 183586 - DNA, 75 bp, synthetic construct
  source 1..75: mol_type = other DNA
tcgttgtcggactatcaatttttgttgaaactgtctgaaaaggcaaccaacaaaaaaatgtcagtggaagagttt

SEQ ID NO: 183587 - DNA, 75 bp, synthetic construct
  source 1..75: mol_type = other DNA
caagtatgacaaaagaagagatcgctcaggctgaaagcatctctccggcaaaagtaacacgcgcatttcaggcgg

SEQ ID NO: 183588 - DNA, 75 bp, synthetic construct
  source 1..75: mol_type = other DNA
caagcaaacatccgtaacagaactgatggaaaaagttcaacatcggttgaagaccatgccagattatccggcaat

SEQ ID NO: 183589 - DNA, 75 bp, synthetic construct
  source 1..75: mol_type = other DNA
gctgataacatcacaggtaaagctatttatcagcaagcgcgttgtctgctacacaaggatgcgattaccgcgctg

SEQ ID NO: 183590 - DNA, 75 bp, synthetic construct
  source 1..75: mol_type = other DNA
tcggctgtatcgcgacacctttgaaaatacgctaatgatgtacaactcgctggctgatttgaaaaataaaaaagg

SEQ ID NO: 183591 - DNA, 75 bp, synthetic construct
  source 1..75: mol_type = other DNA
gtcctacaccaaaaaagaagcaatgcgtatcaaaattgcttacatcaacgcatttaactggatgtacgccatgct

SEQ ID NO: 183592 - DNA, 75 bp, synthetic construct
  source 1..75: mol_type = other DNA
tctcgcgtgatcaaccagggaattgataaatattgtgctgaaaatagcagaaacatttccagtgaagtacggcaa

SEQ ID NO: 183593 - DNA, 75 bp, synthetic construct
  source 1..75: mol_type = other DNA
caatgggtcagaggactatcaagttatccactaatacgctgaacaaccgaattttgacctccgtcgcccgacaaa

SEQ ID NO: 183594 - DNA, 75 bp, synthetic construct
  source 1..75: mol_type = other DNA
cttccgtcccgcccgccgctcagcgcaatcggctgttgctgaatgcgataatgactggtggcggttttgtcggta

SEQ ID NO: 183595 - DNA, 75 bp, synthetic construct
  source 1..75: mol_type = other DNA
actgcacaactggtgacgctgtttgccctgtcgaacctatggatggcccgccgacatttgctggcaagcgcagga

SEQ ID NO: 183596 - DNA, 75 bp, synthetic construct
  source 1..75: mol_type = other DNA
cgctttgaaatcgaagagagtcagcagagcggcacgccggtgatcgacgcgacggtgaagttaggccggctgtcg

SEQ ID NO: 183597 - DNA, 75 bp, synthetic construct
  source 1..75: mol_type = other DNA
cgatgcatccgaagctgagatgattctggataattttaaactggcactttctggaatcaatattcctattaaaga

SEQ ID NO: 183598 - DNA, 75 bp, synthetic construct
  source 1..75: mol_type = other DNA
tgaatggcgatagtgataatatggggcaaaatataatgtcccagttattaagtaattcttttgtcattattgtga

SEQ ID NO: 183599 - DNA, 75 bp, synthetic construct
  source 1..75: mol_type = other DNA
aagatggcgtgcgcaaaacgccggaatgggcagaaaaaattacccacgttccggcacaaactattcgtcaactgg

SEQ ID NO: 183600 - DNA, 75 bp, synthetic construct
  source 1..75: mol_type = other DNA
gtatctcatgggatgaggcgacgaccttaattgccgataacctgaaaaggatcacgcaacaatatggcccagctt

SEQ ID NO: 183601 - DNA, 75 bp, synthetic construct
  source 1..75: mol_type = other DNA
ggctatcacggcgacccggcagatcttcgacagcggcgacgtttcggtaccgattaagtcctggcagctctacgt

SEQ ID NO: 183602 - DNA, 75 bp, synthetic construct
  source 1..75: mol_type = other DNA
tgacaaaccggtcactaacagtgccccggcaattccggaagaccgaccgatgacatgggacaacagtccggtcca

SEQ ID NO: 183603 - DNA, 75 bp, synthetic construct
  source 1..75: mol_type = other DNA
atgcatttcatcggcagcggtggcgctaaaacattctggcgaaacaaaaatataaatgcggacgccacggtgttc

SEQ ID NO: 183604 - DNA, 75 bp, synthetic construct
  source 1..75: mol_type = other DNA
cgtaatgttactgtgaatggtaatttcttcggtaaccagaaagtcactggcggatggaatacatgcactggaggg

SEQ ID NO: 183605 - DNA, 75 bp, synthetic construct
  source 1..75: mol_type = other DNA
ggaactatttatattttatctaataaatgtgcttttttcactttaaatgagcttaaacgccaagagcggctttct

SEQ ID NO: 183606 - DNA, 75 bp, synthetic construct
  source 1..75: mol_type = other DNA
gttgattctttaatgtttgtcaaaaatgctgaattctctatgcccgaaaaaatgaggcgcttacatcggttagta

SEQ ID NO: 183607 - DNA, 75 bp, synthetic construct
  source 1..75: mol_type = other DNA
actattcaatgacaagtgaagattacctcgaaatagagaggtctgttaatagtattgatattaacgaagtaaatc

SEQ ID NO: 183608 - DNA, 75 bp, synthetic construct
  source 1..75: mol_type = other DNA
tgatgtatttgccacagcaggatatgaagcggttgctggcctggtcgaccatcactcaacttggctggatgttct

SEQ ID NO: 183609 - DNA, 75 bp, synthetic construct
  source 1..75: mol_type = other DNA
ggcgggcaaccggctgccggacccggagctgcacccggacagtacactcacagtgtggccggataaccgcatcgc

SEQ ID NO: 183610 - DNA, 75 bp, synthetic construct
  source 1..75: mol_type = other DNA
atattccaggtgctgagccggaacaatatgcacaggctacgaaacgaggagaacggaataacaatccgggaaacc

SEQ ID NO: 183611 - DNA, 75 bp, synthetic construct
  source 1..75: mol_type = other DNA
aatgtgcctggaaaaacattaatagatattgctgatgcaaaatcttctgaagattatagcgtcctgtgtaactgt

SEQ ID NO: 183612 - DNA, 75 bp, synthetic construct
  source 1..75: mol_type = other DNA
caccctgccgttgccaggcgtgggtttctgcgtggccgcgctggcgattactggcgtgccgccgttcaacggctt

SEQ ID NO: 183613 - DNA, 75 bp, synthetic construct
  source 1..75: mol_type = other DNA
agcgttgcttatcactcatatcggttcgttggggttgtatcttgccgccgccacgctgtttttgcagaccggaac

SEQ ID NO: 183614 - DNA, 75 bp, synthetic construct
  source 1..75: mol_type = other DNA
tctcgcttgaccctaccgcaggtcatgagcagcagggaacgcggccggtgctgattgtcacgccggctgctttta

SEQ ID NO: 183615 - DNA, 75 bp, synthetic construct
  source 1..75: mol_type = other DNA
gcctattcctacgttaactctcctgataatcccgatctggagttttacctggtgaccgtgcccgatggaaaatta

SEQ ID NO: 183616 - DNA, 75 bp, synthetic construct
  source 1..75: mol_type = other DNA
gccggagcgtctgctggtctggtcacccggacagcgggatatcatcaaaacggtggcactggtgctgatggtact

SEQ ID NO: 183617 - DNA, 75 bp, synthetic construct
  source 1..75: mol_type = other DNA
aggtgcgctttatcgacagcgatagcgtccagccgacgctggcagaactgacggcgcatccgctgccgcgttcat

SEQ ID NO: 183618 - DNA, 75 bp, synthetic construct
  source 1..75: mol_type = other DNA
cggggcgaccatccagattaaagacagcaatggtgacaccatcgccagtactcaggtcggtagcgatggacgctg

SEQ ID NO: 183619 - DNA, 75 bp, synthetic construct
  source 1..75: mol_type = other DNA
aaccgaagtggtgggtaagcacggtatgtgggagatgccgggcgtaccggtggaggccttttccggacgctcaca

SEQ ID NO: 183620 - DNA, 75 bp, synthetic construct
  source 1..75: mol_type = other DNA
gtgaaagactttacagaaaacataaagatgcaaacaaaggcattgggagcttcacgcggcgaaatcatgcggtta

SEQ ID NO: 183621 - DNA, 75 bp, synthetic construct
  source 1..75: mol_type = other DNA
ccacctgtgcgccgctttatatggccagcaaacccggatttacgcatctgcccatttgttccggtaatcagtatt

SEQ ID NO: 183622 - DNA, 75 bp, synthetic construct
  source 1..75: mol_type = other DNA
tcctgaaattgttaatctgaaccgccccggttttcctggagagtgttttatctgtgaactcaggctgccagatca

SEQ ID NO: 183623 - DNA, 75 bp, synthetic construct
  source 1..75: mol_type = other DNA
acgctacatatcgcttacacctggtggcgtcaggccatcaagtacgtgcgcatctcccccgagtgggttaagggg

SEQ ID NO: 183624 - DNA, 75 bp, synthetic construct
  source 1..75: mol_type = other DNA
aaaagatatcagcagtgataaggcagtaatcgctgcgtgcagtaacggacaggcagccagcgcagcttgtgccgg

SEQ ID NO: 183625 - DNA, 75 bp, synthetic construct
  source 1..75: mol_type = other DNA
cagtaataaggaggttattgctgcctgcggtaatggtaatgcgggtagttcagcgtgtgccagcgcaagactgaa

SEQ ID NO: 183626 - DNA, 75 bp, synthetic construct
  source 1..75: mol_type = other DNA
ttaaacgccattcgtaatgctgcaaaattacccgtggatattattagccaaaaaacgtttgaattattctatagc

SEQ ID NO: 183627 - DNA, 75 bp, synthetic construct
  source 1..75: mol_type = other DNA
actgatggtgaaattatagcaatagatggaaagaccataagaggctcctttgataagggaaaagaaaaggagcaa

SEQ ID NO: 183628 - DNA, 75 bp, synthetic construct
  source 1..75: mol_type = other DNA
tcatacggcagatggggtaacgggcatgggttcgagtgaagtcaccattgcaagccccggtacgctcgacattct

SEQ ID NO: 183629 - DNA, 75 bp, synthetic construct
  source 1..75: mol_type = other DNA
accagctgcgccatcggattaagtcgatggtggggatctctaccgatgtgatgatcgttaactgtggcagtatcc

SEQ ID NO: 183630 - DNA, 75 bp, synthetic construct
  source 1..75: mol_type = other DNA
aaccaatacaaagcttgacccgattgaaaccgcgtctgttgatgagttacaggcgttgcaaacacagcgtctgaa

SEQ ID NO: 183631 - DNA, 75 bp, synthetic construct
  source 1..75: mol_type = other DNA
atgcgcatatagacactgaaaaagactctgactgggtaaacagaatgatgtctgttgatccagaaagaaatttcc

SEQ ID NO: 183632 - DNA, 75 bp, synthetic construct
  source 1..75: mol_type = other DNA
aatgtcgcgaaatctgggaatcgctctatgagtttactcagccatattcttttaaacatggtgaagcaaaagatg

SEQ ID NO: 183633 - DNA, 75 bp, synthetic construct
  source 1..75: mol_type = other DNA
actccttaaaactgagtatatgcaacccgctcgctataccctcaccaaggacgacttcctaagtgatatagtgcc

SEQ ID NO: 183634 - DNA, 75 bp, synthetic construct
  source 1..75: mol_type = other DNA
aggctcttggtttggaagtgcgaaaggggtttcgacgctggtccacttctgagcttgaagagaagaaggcttatc

SEQ ID NO: 183635 - DNA, 75 bp, synthetic construct
  source 1..75: mol_type = other DNA
ttgacgtcaaaccacaacatctttacaccataaaagcacattacaaaaagctatatttagctggaatttgggggt

SEQ ID NO: 183636 - DNA, 75 bp, synthetic construct
  source 1..75: mol_type = other DNA
tcgccatctgtctgatttttttgccgctaaaagcggcgctggcgctgaactgctattttggtaccgcaaacggcg

SEQ ID NO: 183637 - DNA, 75 bp, synthetic construct
  source 1..75: mol_type = other DNA
cttgcgcgggcatactctcaaatttgccaagcgcagcttaatggtgcgacgaggatgaaggtggttagtactggc

SEQ ID NO: 183638 - DNA, 75 bp, synthetic construct
  source 1..75: mol_type = other DNA
tgtcgatattgttgatggtcgttttgatgccgggatacgcctgggtgaaattgtcgataaagatatggttgcagt

SEQ ID NO: 183639 - DNA, 75 bp, synthetic construct
  source 1..75: mol_type = other DNA
aaaaagacgttagctctttgtatgacacgtaaaagcgaaacttatcaccactggagtgtttttactacaagggag

SEQ ID NO: 183640 - DNA, 75 bp, synthetic construct
  source 1..75: mol_type = other DNA
caccactgacggcattgccacaaaaatccgtattgatgccggagtggcaccacttgactggcgcgggctggtgcg

SEQ ID NO: 183641 - DNA, 75 bp, synthetic construct
  source 1..75: mol_type = other DNA
ggaggaaaggttaaatatccgtctcttaacccgaactacccgtagcgtggcccccacggaagcaggggagagaat

SEQ ID NO: 183642 - DNA, 75 bp, synthetic construct
  source 1..75: mol_type = other DNA
tgtcgatattgttgagggtcgttttgatgccgggatacgcctgggtgaaattgtagataatgatatggttgcagt

SEQ ID NO: 183643 - DNA, 75 bp, synthetic construct
  source 1..75: mol_type = other DNA
tgtcgatattgttgacggtcgttttgatgccgggatacgcctgggtgaaattgttgataacgatatggttgcagt

SEQ ID NO: 183644 - DNA, 75 bp, synthetic construct
  source 1..75: mol_type = other DNA
cgcaaagaggggttgagctacccagcactcacaggcagacatggcagaaatatttggggcgtgatattggtgacg

SEQ ID NO: 183645 - DNA, 75 bp, synthetic construct
  source 1..75: mol_type = other DNA
ccagcatatctcaattatctcctgcgggtatacaggttttacaaaatgctgccagacaaagtggtgaaataagtg

SEQ ID NO: 183646 - DNA, 75 bp, synthetic construct
  source 1..75: mol_type = other DNA
aattatttctgacctgcccgataacattatgtgtacctgaaagtggcatatttatgagggcctctcagggctcta

SEQ ID NO: 183647 - DNA, 75 bp, synthetic construct
  source 1..75: mol_type = other DNA
taacgaagtataaaggcgtattcatagaacatacggaaatcaatgatgaaccattagaggctacttttgtgatag

SEQ ID NO: 183648 - DNA, 75 bp, synthetic construct
  source 1..75: mol_type = other DNA
tttacggcagtgataataacgtgacgctggatggaaagttagactggccccctgaatcaccagacaaccaatatc

SEQ ID NO: 183649 - DNA, 75 bp, synthetic construct
  source 1..75: mol_type = other DNA
acaagggcaccatgaccgtcaccgatccggagtccatcggtatccagattgacggcgaccaggccatcgtcaata

SEQ ID NO: 183650 - DNA, 75 bp, synthetic construct
  source 1..75: mol_type = other DNA
attcaggacggcgatctggatgtcagcggcggcggtcacggtattgatatcaccggcgacagcgcaacggtggat

SEQ ID NO: 183651 - DNA, 75 bp, synthetic construct
  source 1..75: mol_type = other DNA
aaatgttagatgataaagattacgtttataactggaatgatttttataacttgcgttatagcaaacgtggaaaat

SEQ ID NO: 183652 - DNA, 75 bp, synthetic construct
  source 1..75: mol_type = other DNA
atgagcgcaaaaggttactgcaatgataatgcctgcgtggaaagcttctttctttcgctgaaagtgaaatgtatc

SEQ ID NO: 183653 - DNA, 75 bp, synthetic construct
  source 1..75: mol_type = other DNA
tctttcgctgaaagtgaaatgtatccatggagaacactttatctaccgggaaataatatggactactgatcgaat

SEQ ID NO: 183654 - DNA, 75 bp, synthetic construct
  source 1..75: mol_type = other DNA
tattgcccataagtatggttattcttcttcatcccatttttctgcagaagtaaaaagccgattaggaaaaacacc

SEQ ID NO: 183655 - DNA, 75 bp, synthetic construct
  source 1..75: mol_type = other DNA
caatgagtgttttgcttcaaggacagaagttaactctgctggacccagaattgtggttcttaagatacaatgaaa

SEQ ID NO: 183656 - DNA, 75 bp, synthetic construct
  source 1..75: mol_type = other DNA
tgacgagcgtggtgcttactgccgttttgtcgcacagcagatgaccttctccacttcgggctgtgacgatgccaa

SEQ ID NO: 183657 - DNA, 75 bp, synthetic construct
  source 1..75: mol_type = other DNA
tccttctggtcggggggggggcacccgcggtgccggtgatggtattcgcgtggatgtgcgggcggtggatacaca

SEQ ID NO: 183658 - DNA, 75 bp, synthetic construct
  source 1..75: mol_type = other DNA
catataaaattaaaaacaaaatctaatggtgacttacccgaatatgcacaattattggtgtctgcatatgctgag

SEQ ID NO: 183659 - DNA, 75 bp, synthetic construct
  source 1..75: mol_type = other DNA
ttatttatgtggattattttgcttggcggtgtatatactgcgggtttaaaaaaacatctggccattgatttgttg

SEQ ID NO: 183660 - DNA, 75 bp, synthetic construct
  source 1..75: mol_type = other DNA
gtatatgatgccgtttacaacaaagcttataaaattgaagttacagttctcaatattggcaggcgtgatgctgta

SEQ ID NO: 183661 - DNA, 75 bp, synthetic construct
  source 1..75: mol_type = other DNA
tgaaaaagaaggcattgcaattaaagaaaaacaaaggaaagtattcattgtggaaaattttgacctgatcatttc

SEQ ID NO: 183662 - DNA, 75 bp, synthetic construct
  source 1..75: mol_type = other DNA
atttagttcaacatttagtggcatcgagtttacatttgaccactacataacgttgttcacggatacgccatatat

SEQ ID NO: 183663 - DNA, 75 bp, synthetic construct
  source 1..75: mol_type = other DNA
ttcaacgaatctctggggacgggatctttatcgcataatggaatttcttatgaaatgcatgggaaaaaaaataat

SEQ ID NO: 183664 - DNA, 75 bp, synthetic construct
  source 1..75: mol_type = other DNA
aactcttgattcagatgtggatcaaggtgccggttatctccagttcaatgggcatttttctgttgcctcacctga

SEQ ID NO: 183665 - DNA, 75 bp, synthetic construct
  source 1..75: mol_type = other DNA
ataacagcccccaaagctacagttagcatgaataatgcgatctggcatctaaatagccagtcatcaattaatcgt

SEQ ID NO: 183666 - DNA, 75 bp, synthetic construct
  source 1..75: mol_type = other DNA
aattaccaccaggatatacttgtgcagaaccctatttattcccagacattaataaactcgatgggccagcaacag

SEQ ID NO: 183667 - DNA, 75 bp, synthetic construct
  source 1..75: mol_type = other DNA
ctgcatctaccggacaaaaatgccctgaaagtgggatttggaaagtggtcggaaccccttcaactacagcaccga

SEQ ID NO: 183668 - DNA, 75 bp, synthetic construct
  source 1..75: mol_type = other DNA
agttaatggttcagatccagtatcgttaacgcaaaatgactgggaaagacgtgactacactattgatagtttata

SEQ ID NO: 183669 - DNA, 75 bp, synthetic construct
  source 1..75: mol_type = other DNA
atgtattaccgtgttgcggtaatggcgtgtgcgattactgccctcggagatgtgccaaaggaagaaatcacggcg

SEQ ID NO: 183670 - DNA, 75 bp, synthetic construct
  source 1..75: mol_type = other DNA
gtttcatcgcagggcgaagccggagatactgagttcctgaaggaagtcaaaggagcttaccaggcacagttacag

SEQ ID NO: 183671 - DNA, 75 bp, synthetic construct
  source 1..75: mol_type = other DNA
ctcagacgctgcacagttttattcaggctgtatttcgtcagatgggtagcgaggaacaagaagcgaaattagttg

SEQ ID NO: 183672 - DNA, 75 bp, synthetic construct
  source 1..75: mol_type = other DNA
atgaaccgacaagatataaacgcattaaagaattttgattttctggcgcgcagttttgcccgtatgtacgctttg

SEQ ID NO: 183673 - DNA, 75 bp, synthetic construct
  source 1..75: mol_type = other DNA
tctgtggacagccatatgctcaatggcgaagggatatcaatgaggctgacagggaccactgagtccggaataccg

SEQ ID NO: 183674 - DNA, 75 bp, synthetic construct
  source 1..75: mol_type = other DNA
cagcgattaccgtagacaatttaaaaactgttttgcggaacaagaaatcctatctgaatttcctcaaccggtaag

SEQ ID NO: 183675 - DNA, 75 bp, synthetic construct
  source 1..75: mol_type = other DNA
atatattttaccactatgttactttcctttttggtactccttgcatatggtttatggtctaaatcctcgttggaa

SEQ ID NO: 183676 - DNA, 75 bp, synthetic construct
  source 1..75: mol_type = other DNA
cgttctctgcatatgagatcggcgtaagcgcaacagaatatcttcctgtgagtgaatatccgaccggacgtcgca

SEQ ID NO: 183677 - DNA, 75 bp, synthetic construct
  source 1..75: mol_type = other DNA
gagcaagcccggctatgaggatgcgctcggcacccccgcccatcccctcaccagcctgtttccccacgtagtgcc

SEQ ID NO: 183678 - DNA, 75 bp, synthetic construct
  source 1..75: mol_type = other DNA
gagctgctccttaacgagctgaatgatgatgatttcgatctcatcgatgctcagattgaagccattaaaaaaaag

SEQ ID NO: 183679 - DNA, 75 bp, synthetic construct
  source 1..75: mol_type = other DNA
aattataaatattgaacttccttatttgttgtctgaaatagaaggttctctactatctctattactacaaggata

SEQ ID NO: 183680 - DNA, 75 bp, synthetic construct
  source 1..75: mol_type = other DNA
atcgaaagggagtgtttacattttattaaagtttttgggaaggaacggataaggctggtcttacagttttcaact

SEQ ID NO: 183681 - DNA, 75 bp, synthetic construct
  source 1..75: mol_type = other DNA
ggaacatcttataaatgaacggaacattctgatgcaacaagaattaccagaaaaatctctgcaaaacaaagtttt

SEQ ID NO: 183682 - DNA, 75 bp, synthetic construct
  source 1..75: mol_type = other DNA
ctgttgaccctgttgaccccgttgaccctgttgaccccgttgaccctgttgaccccgttgaccccgttgaccccg

SEQ ID NO: 183683 - DNA, 75 bp, synthetic construct
  source 1..75: mol_type = other DNA
cggtggccaccgataacgggcttattccccgcgtggccgacgcgctcaaagatattcatatcagccatatcgatc

SEQ ID NO: 183684 - DNA, 75 bp, synthetic construct
  source 1..75: mol_type = other DNA
ttgtgtgcggcgtgagcagcagcggcccgccgcggcagatcgagatttatgctaccgctgcccccatgaatgcgg

SEQ ID NO: 183685 - DNA, 75 bp, synthetic construct
  source 1..75: mol_type = other DNA
acaagtgggacagctcgctctggcagacactggtgccgcatctcgattttgcctttgcctccgcaccgcaagaag

SEQ ID NO: 183686 - DNA, 75 bp, synthetic construct
  source 1..75: mol_type = other DNA
gtggttgatgaagatgtttgtatcggctgccgctactgccacatggcttgtccgtacggcgcgccacagtacaat

SEQ ID NO: 183687 - DNA, 75 bp, synthetic construct
  source 1..75: mol_type = other DNA
gtaaaacttacgtttacagaaataagcaaaatagcttctatcagccgatctttggtaaatgaaggtctcaaattg

SEQ ID NO: 183688 - DNA, 75 bp, synthetic construct
  source 1..75: mol_type = other DNA
gctgttaaagatgaagcaagcaaatggatcttttttgaggcgacaattaaggcacttgatacagaaaatatgata

SEQ ID NO: 183689 - DNA, 75 bp, synthetic construct
  source 1..75: mol_type = other DNA
tggaatggtctttattttagaatccatacaattgtcttataatatatgcccgttattttctcaatgttctttccg

SEQ ID NO: 183690 - DNA, 75 bp, synthetic construct
  source 1..75: mol_type = other DNA
atccttctgatttatttttcgcctgtgttgtcgtccggggtcatgagcctgacgtttccggcggcggtggctgag

SEQ ID NO: 183691 - DNA, 75 bp, synthetic construct
  source 1..75: mol_type = other DNA
tcagaaaacacgaagctgggataatctcacgctgggtgatctggtgaaaactgttgccacggaaaacggactgaa

SEQ ID NO: 183692 - DNA, 75 bp, synthetic construct
  source 1..75: mol_type = other DNA
gaaaccattgccacgaccgtccgggaattctgcccggcgtatcgggtgacagctgaagggcgggatatcacgcgg

SEQ ID NO: 183693 - DNA, 75 bp, synthetic construct
  source 1..75: mol_type = other DNA
cgttatcgactccagccaccagttgcgggcggattggccagcgttggtgactcgcgctcgttccctgaccgaggg

SEQ ID NO: 183694 - DNA, 75 bp, synthetic construct
  source 1..75: mol_type = other DNA
atgaaaaacttgcaggattcgctgaagacccaggaagtggtcgctcaggagcaaaaagagctgcgtattcgtcaa

SEQ ID NO: 183695 - DNA, 75 bp, synthetic construct
  source 1..75: mol_type = other DNA
ctcaaatcttaggtatggggtcttctggagaacgtaccgttagagggtgggaatctggcgaacatcagcctacac

SEQ ID NO: 183696 - DNA, 75 bp, synthetic construct
  source 1..75: mol_type = other DNA
ggcattgtggaaattaccggagaaaacatcagggttgatgtttatcaggggcaaaatggtcaatcaatcactctt

SEQ ID NO: 183697 - DNA, 75 bp, synthetic construct
  source 1..75: mol_type = other DNA
ccgtgtgatttctctgctggtaccgacgatttccggggtgcatgacctgacagagacttcacggtggattcaaac

SEQ ID NO: 183698 - DNA, 75 bp, synthetic construct
  source 1..75: mol_type = other DNA
ataaactattttcttggccaaaagctcctaaagaaaaaactcgcttaggtgatatccttctttcaagaaaagaat

SEQ ID NO: 183699 - DNA, 75 bp, synthetic construct
  source 1..75: mol_type = other DNA
tgtttgcgtaaaagtcatagaagctgtagcaggaaatatgattgccgctctgaatagagcaacagatctgattga

SEQ ID NO: 183700 - DNA, 75 bp, synthetic construct
  source 1..75: mol_type = other DNA
atctgaatgggataaattcgctcaaaaaacctattttgctaattatggcgaaatgcctgatggtgatatcacaca

SEQ ID NO: 183701 - DNA, 75 bp, synthetic construct
  source 1..75: mol_type = other DNA
gcagtgtgaatatcagtgaaactggcaacgtggccgagttgattttacagtcaatcgttacacatccagagaaaa

SEQ ID NO: 183702 - DNA, 75 bp, synthetic construct
  source 1..75: mol_type = other DNA
ctggccgcgcgtatcgccactcgtatcggacgtggtgaagcgaagtatctggtattagggaccggcaccggcacc

SEQ ID NO: 183703 - DNA, 75 bp, synthetic construct
  source 1..75: mol_type = other DNA
gactcgtccgttggtgttctcatcaaactactatcagactcgtcaaaacctgctggatatcgacaatcttgacgt

SEQ ID NO: 183704 - DNA, 75 bp, synthetic construct
  source 1..75: mol_type = other DNA
tacggcagcgatcttattgttaccatcgaagaatccgatggctcaaagcggacattctcgcaacctttctcatcc

SEQ ID NO: 183705 - DNA, 75 bp, synthetic construct
  source 1..75: mol_type = other DNA
taataccaacgccaaagtcactattacgcaaggtggctataagatttatgaaacgactgtgccgccaggcgcttt

SEQ ID NO: 183706 - DNA, 75 bp, synthetic construct
  source 1..75: mol_type = other DNA
ataatgctgacgaagaagaggctttttgggagatattagagagcaatgctcattgttctgtaattaatgatattt

SEQ ID NO: 183707 - DNA, 75 bp, synthetic construct
  source 1..75: mol_type = other DNA
tttcctgatgaactgccaccgcagagcgtatttactgaaggtgccgctacgcaggtaacggttaaccgctatgaa

SEQ ID NO: 183708 - DNA, 75 bp, synthetic construct
  source 1..75: mol_type = other DNA
atcctcatggcgtgacgctctcgcaatatctgggcaacgcttttgcgcttatcgatgctaacggagcatctggcg

SEQ ID NO: 183709 - DNA, 75 bp, synthetic construct
  source 1..75: mol_type = other DNA
ccttcagtgccggatacagctacggtaatgacagcagccaatacaattacggcgttaccggcggcgtggttatcc

SEQ ID NO: 183710 - DNA, 75 bp, synthetic construct
  source 1..75: mol_type = other DNA
atttgccaccaaatgctagggcagcttttgattatggccttcgcaatatttatcttaggaaaaatgctaccttat

SEQ ID NO: 183711 - DNA, 75 bp, synthetic construct
  source 1..75: mol_type = other DNA
gcctgtcagccagcgcgccggacttttcccggcagaagccacatggggcgggctgctcccctcactggtacggga

SEQ ID NO: 183712 - DNA, 75 bp, synthetic construct
  source 1..75: mol_type = other DNA
gagtcggtttaacgacctccaaaaacaactaagaaggtcatttatactggctcccatatctctcagcagtaacac

SEQ ID NO: 183713 - DNA, 75 bp, synthetic construct
  source 1..75: mol_type = other DNA
ttggggcaataacgagaaaaacaggaatatctctgttggggtttccggccagcaatggggaattggttacagcct

SEQ ID NO: 183714 - DNA, 75 bp, synthetic construct
  source 1..75: mol_type = other DNA
gggacatgcgagcattcagcagacgatggcctatgcgcaccttgcgcctgactacctgcaaaatgccgtcgcact

SEQ ID NO: 183715 - DNA, 75 bp, synthetic construct
  source 1..75: mol_type = other DNA
acgatggcttatgcacatctggcccctgattatcttcagaacgccataatgctgaatccactgaaaggagggata

SEQ ID NO: 183716 - DNA, 75 bp, synthetic construct
  source 1..75: mol_type = other DNA
acttaccaggaaaaccgtctctcggtagatactacgcagctgcccgataacgtcgatcttgagcaaacaacacag

SEQ ID NO: 183717 - DNA, 75 bp, synthetic construct
  source 1..75: mol_type = other DNA
tgcgcttatcgatgctaatggggcttctggcgtgaggatacaaaactatccggggattgctactgatccctttgg

SEQ ID NO: 183718 - DNA, 75 bp, synthetic construct
  source 1..75: mol_type = other DNA
ggtcgcctgagctatagcctggaacaaagtctggatgacgataacaaccataacagtagcgtgaacgccagttac

SEQ ID NO: 183719 - DNA, 75 bp, synthetic construct
  source 1..75: mol_type = other DNA
gaccgcttgacatggattcaatagggggcgcagcaggtaattctaaagtttactctatttggaccaagattttcg

SEQ ID NO: 183720 - DNA, 75 bp, synthetic construct
  source 1..75: mol_type = other DNA
tatcgatcacatcttcaaacgtgccggttacaatcccgccgaagttcgtgaccgtgatgcgctcatccaggcgct

SEQ ID NO: 183721 - DNA, 75 bp, synthetic construct
  source 1..75: mol_type = other DNA
atgactaacgctttcgcatggccttggaacgcaccgcgtccagctgttggcccgtacatctatgaaccgaaaaaa

SEQ ID NO: 183722 - DNA, 75 bp, synthetic construct
  source 1..75: mol_type = other DNA
taaataaaggtgggatcagtcagggtgaactgacaggtggcggaaacctgaatgttacagggggaacgctggcta

SEQ ID NO: 183723 - DNA, 75 bp, synthetic construct
  source 1..75: mol_type = other DNA
tactgttggtgtcgcttttggtctgttcggtaccgtgctggtatacgccaacgccgccagcgttatgccgcaggc

SEQ ID NO: 183724 - DNA, 75 bp, synthetic construct
  source 1..75: mol_type = other DNA
catccgccagggcggtgttttgatcccgcgagaaaactatgtcgtccgtctggcctatcagccagctgatgaaat

SEQ ID NO: 183725 - DNA, 75 bp, synthetic construct
  source 1..75: mol_type = other DNA
gagtggcaggaacagcgccgtaaaaaccgggattttttcaaaagtcatgaactggtagacgaagacggcaacgtt

SEQ ID NO: 183726 - DNA, 75 bp, synthetic construct
  source 1..75: mol_type = other DNA
tttttttgagtttctaggggtatttccgttggcgctgactgaagcacgtctggcggtcttatggagtgggtatgg

SEQ ID NO: 183727 - DNA, 75 bp, synthetic construct
  source 1..75: mol_type = other DNA
atcatatctaacagtggatgaaagaatagtaaaactggcagatgggtttacgtatggaactaagggtagagatgg

SEQ ID NO: 183728 - DNA, 75 bp, synthetic construct
  source 1..75: mol_type = other DNA
aaaataaaaaaagacttgaagtgcaagtcacctaaaagtaacctagatttcaaggtgacttgcaccaaaaaaaca

SEQ ID NO: 183729 - DNA, 75 bp, synthetic construct
  source 1..75: mol_type = other DNA
ttgttaaaagccagcttgcagattcatcgttccatcaccagtactatattcaagggaaaattgctattcaacatt

SEQ ID NO: 183730 - DNA, 75 bp, synthetic construct
  source 1..75: mol_type = other DNA
atgttagctcgttcagggaaggtaaccgtgaaggttactggcaactcaagcaccgcccatgttgctagctttatc

SEQ ID NO: 183731 - DNA, 75 bp, synthetic construct
  source 1..75: mol_type = other DNA
aaacatttgcattcgatattgcctctgcgtgcgcgcgtgctaatggtaaacgtaaaccttctgttcttcgtcgca

SEQ ID NO: 183732 - DNA, 75 bp, synthetic construct
  source 1..75: mol_type = other DNA
gcttgcgctttctcggtttttttgggccacaaaagccacccgctacagtgaccttcggtactggcctcaatgtca

SEQ ID NO: 183733 - DNA, 75 bp, synthetic construct
  source 1..75: mol_type = other DNA
gagcaggcggcagtgcatatggccgatggtctggcgcgcgcgaccggggaagtcggcgtcgtgctggtaacgtcg

SEQ ID NO: 183734 - DNA, 75 bp, synthetic construct
  source 1..75: mol_type = other DNA
ttttattgcgcatgatgcagcaggtaatcctgttgtcgggctggtgctctcgacgcgtcacgaaggtgttcagga

SEQ ID NO: 183735 - DNA, 75 bp, synthetic construct
  source 1..75: mol_type = other DNA
gcgtctacggcacatctcaccttgctacatgcactttttgatacggtctccgcaggcgagacaaccagtctgtat

SEQ ID NO: 183736 - DNA, 75 bp, synthetic construct
  source 1..75: mol_type = other DNA
gatggaaacggcaacccgttagccaatgaggcggtgacattcacgctaccggcagacgtgagcgcaagcttcact

SEQ ID NO: 183737 - DNA, 75 bp, synthetic construct
  source 1..75: mol_type = other DNA
tttcaaaaatggaaaaagaaaaaaacagcatttatggcaattcagtttatggaaagacatgaggatgaaacaaga

SEQ ID NO: 183738 - DNA, 75 bp, synthetic construct
  source 1..75: mol_type = other DNA
tacgccaaagactacacaacgcaggatttcaagtcgagcaaatagtattgacaggaaaagaagtaattattcatc

SEQ ID NO: 183739 - DNA, 75 bp, synthetic construct
  source 1..75: mol_type = other DNA
acaggaaaagaagtaattattcatctgtcatcacctttaataaatgaagaagaaaatatttttaaagatgcaata

SEQ ID NO: 183740 - DNA, 75 bp, synthetic construct
  source 1..75: mol_type = other DNA
aacggctggtctcttcagggcgcatttgactatgtggatgaagcttttgacgtatggcgggcacgatctcgtcat

SEQ ID NO: 183741 - DNA, 75 bp, synthetic construct
  source 1..75: mol_type = other DNA
gataaagacgatcggcaaagtaatcctcatgccataaccgctggacttaactatacccccttcccgctgatgacc

SEQ ID NO: 183742 - DNA, 75 bp, synthetic construct
  source 1..75: mol_type = other DNA
attctaactgatttagttgggcgattgctattatgtccatcatacataggttattatatatttcatattttaatc

SEQ ID NO: 183743 - DNA, 75 bp, synthetic construct
  source 1..75: mol_type = other DNA
attgatttatctttttgttattataggtatagctgataacattcgcgtcccaggaatgacattaatagcggctaa

SEQ ID NO: 183744 - DNA, 75 bp, synthetic construct
  source 1..75: mol_type = other DNA
tatcgccgccaccaacagtgatttaagtaccttaaaggcaacggttgaggatggcagtggtaacctgatcgaagg

SEQ ID NO: 183745 - DNA, 75 bp, synthetic construct
  source 1..75: mol_type = other DNA
tacatgtgccatgatctgccgctattttgagtcagtatattttgaagatgaatccggggaaactttctttacgcc

SEQ ID NO: 183746 - DNA, 75 bp, synthetic construct
  source 1..75: mol_type = other DNA
ttgggcggtcaaaagatgagtttcagcctctggcccgggcagaagatctccaggtcgctggcgggacggcaatcg

SEQ ID NO: 183747 - DNA, 75 bp, synthetic construct
  source 1..75: mol_type = other DNA
atgttattggcgttgtaaatgatgagactgtagacggcagccaaagagtagatgaacgaggtacaacaaataacg

SEQ ID NO: 183748 - DNA, 75 bp, synthetic construct
  source 1..75: mol_type = other DNA
cctggggcatgcaacaattcagcagacaatggcttacgctcatcttgctccagattatcttcagaatgcagtgat

SEQ ID NO: 183749 - DNA, 75 bp, synthetic construct
  source 1..75: mol_type = other DNA
ttatgacttcagatatgataaaaataaaggtgtggtaaaggtttcgagatttgttcttctaaataagaatgatga

SEQ ID NO: 183750 - DNA, 75 bp, synthetic construct
  source 1..75: mol_type = other DNA
tcctgatgagtttgatacggaagtgtttgtaagaacgtggttaggtgatctttttgatcaagatggcaatatatt

SEQ ID NO: 183751 - DNA, 75 bp, synthetic construct
  source 1..75: mol_type = other DNA
cgcgcaggcagtttcagggggcggaagaaggtgcatttcagtaaggccgaagacgaggccagggcagcactaaat

SEQ ID NO: 183752 - DNA, 75 bp, synthetic construct
  source 1..75: mol_type = other DNA
ccctagctatgtatacgaaatccgtgtgaagagttggtgggtgaacgccggcgatgctttcatgatatacagcct

SEQ ID NO: 183753 - DNA, 75 bp, synthetic construct
  source 1..75: mol_type = other DNA
actgttacaggcggcggagagggtatcgcaacgctgatccctgtattgaatggtgttcatcaagctggtctgagt

SEQ ID NO: 183754 - DNA, 75 bp, synthetic construct
  source 1..75: mol_type = other DNA
cgccgacacccgttccggagaaacgcatcacgccttctacggctgccgtactcaatatggcagcaacattaccgt

SEQ ID NO: 183755 - DNA, 75 bp, synthetic construct
  source 1..75: mol_type = other DNA
ccgaatccaaatccaaacccgaacccgaacccgaacccgaacccgaacccgaacccgaacccgaacccgaaccca

SEQ ID NO: 183756 - DNA, 75 bp, synthetic construct
  source 1..75: mol_type = other DNA
cccaaacccaaatccaaacccaaatccgaatccaaatccaaacccgaacccgaacccgaacccgaacccgaaccc

SEQ ID NO: 183757 - DNA, 75 bp, synthetic construct
  source 1..75: mol_type = other DNA
tgaatgcgtttgccatttcactgacggtaaaaagcctcctggcattatttatcctgctgatttacttttcacctg

SEQ ID NO: 183758 - DNA, 75 bp, synthetic construct
  source 1..75: mol_type = other DNA
gggacatcattcagtcggatagtcacagacgtacgtatgaaaaaagcaattggtttgatgaggtgcgggatggat

SEQ ID NO: 183759 - DNA, 75 bp, synthetic construct
  source 1..75: mol_type = other DNA
aggcttctttcggtttgcgatgaatcaggcaacgccgatcttggttctgttgttcgtgtatgtctggcgactggg

SEQ ID NO: 183760 - DNA, 75 bp, synthetic construct
  source 1..75: mol_type = other DNA
gctcgtttcagaatttgaccgcaatatgtttgctgtttaccggaagcgtcggttatcaggtgaatggagtgctaa

SEQ ID NO: 183761 - DNA, 75 bp, synthetic construct
  source 1..75: mol_type = other DNA
cctacccggtgcgctgtttgtgccaaacgggctactcaacgtgttccgtcgggaagccattgagatgctggataa

SEQ ID NO: 183762 - DNA, 75 bp, synthetic construct
  source 1..75: mol_type = other DNA
gtgctaaccacgctgttctattttattggtgcagagttacggctggttcacgaactttctcttttctggccaata

SEQ ID NO: 183763 - DNA, 75 bp, synthetic construct
  source 1..75: mol_type = other DNA
gtgatgcgcttcgctggataggtattgataccgatcttgggcgtaaaaataccgttcagggaacgcctgaaattg

SEQ ID NO: 183764 - DNA, 75 bp, synthetic construct
  source 1..75: mol_type = other DNA
agttagtcaaatatcaggacaaaatacctgaactcaacaaagagtttttatcgcgagcttctcagaatgactcgt

SEQ ID NO: 183765 - DNA, 75 bp, synthetic construct
  source 1..75: mol_type = other DNA
cctcaagcggcttgaggcgatatttgaaaagtatcgcaatggtctgatgattggccctgccggaactccgatgaa

SEQ ID NO: 183766 - DNA, 75 bp, synthetic construct
  source 1..75: mol_type = other DNA
ccttgaggctgcggtaacgctcaatccattagatcgtatttacaccaaaaatagtggcgataaaaacgcactata

SEQ ID NO: 183767 - DNA, 75 bp, synthetic construct
  source 1..75: mol_type = other DNA
aaatacttctgggaaatggctttcaggtgcattatccccgctatatgaatattgaggacattactctctgggatg

SEQ ID NO: 183768 - DNA, 75 bp, synthetic construct
  source 1..75: mol_type = other DNA
tctcacccataatcaattaactgatattgttgcaggtaataaaaatgaactcttactgctggatctatcccataa

SEQ ID NO: 183769 - DNA, 75 bp, synthetic construct
  source 1..75: mol_type = other DNA
gtactttggcagataaatacagccccggactgaacgctgccagttatgaagtttataataaatttataattaacc

SEQ ID NO: 183770 - DNA, 75 bp, synthetic construct
  source 1..75: mol_type = other DNA
ccggagcgcgtgtttggctatgtgcacccaaaatggcggactccggcactgaacgtcattatggtcgggattgtc

SEQ ID NO: 183771 - DNA, 75 bp, synthetic construct
  source 1..75: mol_type = other DNA
gatcccgattattaccggggcgacgattgtctgtttctccttcctcggtttcgatgcggtgaccacgctttcgga

SEQ ID NO: 183772 - DNA, 75 bp, synthetic construct
  source 1..75: mol_type = other DNA
atctcacgccgatgaccgtatttgatacttttggtattgtctccggcattagcgacggtcacgttccggcgtcct

SEQ ID NO: 183773 - DNA, 75 bp, synthetic construct
  source 1..75: mol_type = other DNA
gcggcgcatatttgtggtatctgatccgccgctatcgcaaagtgccgttgtatgaaggtgacagaacaccagtga

SEQ ID NO: 183774 - DNA, 75 bp, synthetic construct
  source 1..75: mol_type = other DNA
cagccgctttaaagacccggacgccgcactgcctgaaattgcactctacgtcggcggtaagctgttccagtcgat

SEQ ID NO: 183775 - DNA, 75 bp, synthetic construct
  source 1..75: mol_type = other DNA
ctggttcgccagtttccggaggccggttcggcctatacctacgcgcaaaagtcgattaacccgcacgtcggattt

SEQ ID NO: 183776 - DNA, 75 bp, synthetic construct
  source 1..75: mol_type = other DNA
gccagtgaagaaccttcgaacgttgcatttcgaggactgaacgagacaaaaggaagttatcctgtaatcagctgg

SEQ ID NO: 183777 - DNA, 75 bp, synthetic construct
  source 1..75: mol_type = other DNA
tccgatgattgagatcaacgggaactgcaaaatcatcggtgtagttgtcgatgcaaaaatagcaaaccttccata

SEQ ID NO: 183778 - DNA, 75 bp, synthetic construct
  source 1..75: mol_type = other DNA
gccggtccggtattaatggagtttgccaccatggtgggcgggcgtggcgaaatcaaaaaagaggtggatttcccg

SEQ ID NO: 183779 - DNA, 75 bp, synthetic construct
  source 1..75: mol_type = other DNA
cccggggaccggcgggcgagaagggggacacaggtccacagggtgccacaggggcacagggaccagccggggcaa

SEQ ID NO: 183780 - DNA, 75 bp, synthetic construct
  source 1..75: mol_type = other DNA
gatacgggagccgcaggtccggcaggacctcaggggccaaagggagacacgggagctacaggtccggaaggtccg

SEQ ID NO: 183781 - DNA, 75 bp, synthetic construct
  source 1..75: mol_type = other DNA
gggatatggcaccgggctcagccattgccggctcatcactgtctgcatgttgcctttcggatggaactcctctga

SEQ ID NO: 183782 - DNA, 75 bp, synthetic construct
  source 1..75: mol_type = other DNA
agaaattgcctggcggcaggatgctgttgacgcagggatggcgacagaagcagaaatcactgtgctggctgaatg

SEQ ID NO: 183783 - DNA, 75 bp, synthetic construct
  source 1..75: mol_type = other DNA
tttcctgtcaaagaatcttctgaccaaagagcagcgccagaaaaaccgtgaaaaccttaaccgcttcgtcggctc

SEQ ID NO: 183784 - DNA, 75 bp, synthetic construct
  source 1..75: mol_type = other DNA
tggtgcctttgctgcctcagtgcatgaaggttgagcggctggacagcggcgaactgcgttatacctacactgaga

SEQ ID NO: 183785 - DNA, 75 bp, synthetic construct
  source 1..75: mol_type = other DNA
tgtcagagatatttccacacacgcagggtaaatccagcgaatactggtcatggtggagcaggggtttcgatctgc

SEQ ID NO: 183786 - DNA, 75 bp, synthetic construct
  source 1..75: mol_type = other DNA
ttactgagcacccggtggagaagccaacaacgaatagcgcgtcgggtttcatcgccgatcatgcgtataagcgcc

SEQ ID NO: 183787 - DNA, 75 bp, synthetic construct
  source 1..75: mol_type = other DNA
tttgtggtgctgacctctgcggcgtcttccgctaacagcggtgtcttctctaccagccgtatgctgtttggcctg

SEQ ID NO: 183788 - DNA, 75 bp, synthetic construct
  source 1..75: mol_type = other DNA
tcaggatttggggctggagattgattatttcgaacccgggcgggtcaggacgctgtttaacaccggcgtggcaga

SEQ ID NO: 183789 - DNA, 75 bp, synthetic construct
  source 1..75: mol_type = other DNA
atgctgaattcatcgccagtgaatagggctatggaaagaggtgctgttcattcgaatagacctgatttacctcct

SEQ ID NO: 183790 - DNA, 75 bp, synthetic construct
  source 1..75: mol_type = other DNA
agtcagcttctcaaaatcaagggatacagagaccatttcagttggctgctgctgaatcaggatgtgaagcgatcc

SEQ ID NO: 183791 - DNA, 75 bp, synthetic construct
  source 1..75: mol_type = other DNA
gatattatgcaggcgccctaacccggaaatgacaccttcccgtttcatgctgatgattgtggccagcatttgtct

SEQ ID NO: 183792 - DNA, 75 bp, synthetic construct
  source 1..75: mol_type = other DNA
cgccacaggaacagccgcagcgggccacagcggagcgggaagaaatgcaggaacccaaccacacggcggagcctg

SEQ ID NO: 183793 - DNA, 75 bp, synthetic construct
  source 1..75: mol_type = other DNA
gcagccagctgaacggtgtcctggtgaaacaggatggcgcggcgaacattggcgagatgaaagtgggtgtggagg

SEQ ID NO: 183794 - DNA, 75 bp, synthetic construct
  source 1..75: mol_type = other DNA
tgcctggcaacaggcgctgcttcagctggatcttgatcccaaaactgacgtgtacgtgctggcgcttcccgcctc

SEQ ID NO: 183795 - DNA, 75 bp, synthetic construct
  source 1..75: mol_type = other DNA
ggatgaatccaccatgcgccgcatctgtaccgtgaagaaaatcagcagcaacgagtttaagcagcttgtttccgc

SEQ ID NO: 183796 - DNA, 75 bp, synthetic construct
  source 1..75: mol_type = other DNA
gaaaagtatcgcaacgggctgatgattggccctgccggtacgcctcttaaaataccttcaaatacaggtccggga

SEQ ID NO: 183797 - DNA, 75 bp, synthetic construct
  source 1..75: mol_type = other DNA
atgtcagattatgtccaacatttggggtgcagttcaaaacgccttatccgacctacaaaaatcacgccaaatcag

SEQ ID NO: 183798 - DNA, 75 bp, synthetic construct
  source 1..75: mol_type = other DNA
tgaaaacctgcctgtattcctgaaaaaggttgcagcgctggcaaaggaatatcagggaactggtcttacccagag

SEQ ID NO: 183799 - DNA, 75 bp, synthetic construct
  source 1..75: mol_type = other DNA
ggcttaatcctgataaaaacgcgactgaaaacctgcctgtattcctgaaaaaggttgcagcgctggcaaaggaat

SEQ ID NO: 183800 - DNA, 75 bp, synthetic construct
  source 1..75: mol_type = other DNA
aagcaaaaggttttttatccgtaccccgtgcagagaagaacgacaaagagcgtgattttggtacgttgcacgtaa

SEQ ID NO: 183801 - DNA, 75 bp, synthetic construct
  source 1..75: mol_type = other DNA
aataaattaccgtgggaagtttcacctgccttttttagagcagaagtgttacatcgtttcaaggcggatccagaa

SEQ ID NO: 183802 - DNA, 75 bp, synthetic construct
  source 1..75: mol_type = other DNA
cttggactagcgatttatgcattaacaagggtaaatgaatggattaaaaacaaaaaatcagaaaaggctttcgag

SEQ ID NO: 183803 - DNA, 75 bp, synthetic construct
  source 1..75: mol_type = other DNA
gcgctgattggcaccggcaccctatttaatgacagttgcagcctgaacattagcggcagcgatgaagagcaggcg

SEQ ID NO: 183804 - DNA, 75 bp, synthetic construct
  source 1..75: mol_type = other DNA
cagccgccttttttgcgggtcctcctggtggggtgggcctgaacacggggcgggcggcgcggaaagaagcgcatt

SEQ ID NO: 183805 - DNA, 75 bp, synthetic construct
  source 1..75: mol_type = other DNA
ttgtcgttgttgcgtgggctggtgggtaaagtgcctgaagacacgcttagaactgtttacaagggtattgaaacc

SEQ ID NO: 183806 - DNA, 75 bp, synthetic construct
  source 1..75: mol_type = other DNA
ctctacgaaccgaagtacgcggacatgcttctacagaaaaaaagaagaaagcgatattagaagcgcgtaccgatc

SEQ ID NO: 183807 - DNA, 75 bp, synthetic construct
  source 1..75: mol_type = other DNA
gaatttgaacttgatcgtgtattgacagatatttatgctcctcagttaattatttttttaccagataaaccaaat

SEQ ID NO: 183808 - DNA, 75 bp, synthetic construct
  source 1..75: mol_type = other DNA
ctagtcgatatacaaatgctcaaatcattggtaagggagccttttataaatttaaaaactctgagattgaattaa

SEQ ID NO: 183809 - DNA, 75 bp, synthetic construct
  source 1..75: mol_type = other DNA
accattcgctgcgcagccaaaagtaaataatcccatagagaaatacaaacggaaagatgcattttgtttcgcagg

SEQ ID NO: 183810 - DNA, 75 bp, synthetic construct
  source 1..75: mol_type = other DNA
cgggtgacattcctaccccgttgatggcggaatactatcgccaacgtgccagtgccggtttgattattagtgaag

SEQ ID NO: 183811 - DNA, 75 bp, synthetic construct
  source 1..75: mol_type = other DNA
ccagtagggatattgtacgagcgattgatgcttccgtttccctgtttaataaatttatcgatttgccagccgtgc

SEQ ID NO: 183812 - DNA, 75 bp, synthetic construct
  source 1..75: mol_type = other DNA
attgggcgcttaagtacactgcacattatcaatggtgacacccaccgggataaagtgatagttgagagtccctgg

SEQ ID NO: 183813 - DNA, 75 bp, synthetic construct
  source 1..75: mol_type = other DNA
ctttagtgcgatttacaaggaatggtacgagcacaagaagcaagtctggtcagtaggctatgcaactgaacttgc

SEQ ID NO: 183814 - DNA, 75 bp, synthetic construct
  source 1..75: mol_type = other DNA
ggttgctgaaagcaactttaaagatatcgccaatcattccagcgaatgtttttcttaccgttgttatgccgcccc

SEQ ID NO: 183815 - DNA, 75 bp, synthetic construct
  source 1..75: mol_type = other DNA
gcggggggatttaaatctgacatgtttttttcattataaagatggacagtggcgagttatttcttattttttctg

SEQ ID NO: 183816 - DNA, 75 bp, synthetic construct
  source 1..75: mol_type = other DNA
tcgaatccgcgtggcgtggaaaaaatgatctatggggtagtaaagttggccatatgagccaagaggttgtcagta

SEQ ID NO: 183817 - DNA, 75 bp, synthetic construct
  source 1..75: mol_type = other DNA
ttccttaatgtcagaagctgctcgtagcatggtgaaacataaatcctgcagtaaagatattattcaaaaggaatt

SEQ ID NO: 183818 - DNA, 75 bp, synthetic construct
  source 1..75: mol_type = other DNA
acaaagcacttgcaacattttcaggaagtatcgtatcgctcattgccaccaaggttttacgctatacagccctaa

SEQ ID NO: 183819 - DNA, 75 bp, synthetic construct
  source 1..75: mol_type = other DNA
attgtcggaaatcaaaagagaccgcaaggattagcatatgattcctccaatggtaagtttattgtcgcatatgat

SEQ ID NO: 183820 - DNA, 75 bp, synthetic construct
  source 1..75: mol_type = other DNA
agtctcctgagatcctgcgtcgttatgcaaatggtcttttggaagaggcatataaactggcatctgagatattta

SEQ ID NO: 183821 - DNA, 75 bp, synthetic construct
  source 1..75: mol_type = other DNA
atgtttatagatgctctggaatctgataaatcagaaataaaaatggttgattatactcagcaacaaaaaattggg

SEQ ID NO: 183822 - DNA, 75 bp, synthetic construct
  source 1..75: mol_type = other DNA
atacacttgggaaattattttcacagtcatttccattgtttagtgaagcatataatgaagcgtgctcgcgtgttt

SEQ ID NO: 183823 - DNA, 75 bp, synthetic construct
  source 1..75: mol_type = other DNA
tcgctgctgcaggcgtggattgatgatggcgatacgtcgttaccaccagaaaaattcaggttcctttcatgttaa

SEQ ID NO: 183824 - DNA, 75 bp, synthetic construct
  source 1..75: mol_type = other DNA
gcaaagcaaaggtaactcagggagagctggccgcgctgattgatagctctcagggggccgttagccactacgaaa

SEQ ID NO: 183825 - DNA, 75 bp, synthetic construct
  source 1..75: mol_type = other DNA
tgaaagcaaaagtgacccagggggagctggcagcgttgatcgctagctctcaaggggccgttagccactacgaaa

SEQ ID NO: 183826 - DNA, 75 bp, synthetic construct
  source 1..75: mol_type = other DNA
agcagcaagtgatggcttaaaacttattggcaattgtgcttccatttctaatttacgcaatatagaaccaacaaa

SEQ ID NO: 183827 - DNA, 75 bp, synthetic construct
  source 1..75: mol_type = other DNA
tggtacgacgaaagtgtttgaaagccagaatctgacggataaacagatccacaattacgtacaacagctggcagg

SEQ ID NO: 183828 - DNA, 75 bp, synthetic construct
  source 1..75: mol_type = other DNA
gaaaaactggtacactaaaactcacgtaatagctagccctacggttgatacaatacattcgtacatggcgatttt

SEQ ID NO: 183829 - DNA, 75 bp, synthetic construct
  source 1..75: mol_type = other DNA
atggaatacgtggcctttggtgatgagagtggtacgacaggaagtgaccgctgttacggcattggtttgctgtgt

SEQ ID NO: 183830 - DNA, 75 bp, synthetic construct
  source 1..75: mol_type = other DNA
actggggctgtgaactctgggtacttgaagtaccttaatccacgactggagctatcagtggctaaagagctagcc

SEQ ID NO: 183831 - DNA, 75 bp, synthetic construct
  source 1..75: mol_type = other DNA
acgatgaggtgacaggcattgttgctaacaacatgctggctagggctgggatgaagaagctggttaagtctgtga

SEQ ID NO: 183832 - DNA, 75 bp, synthetic construct
  source 1..75: mol_type = other DNA
acaaaatatccaccccaaacactcgcgcaggccacactattacccgcatagctaagctaagcgatgcgggtgtca

SEQ ID NO: 183833 - DNA, 75 bp, synthetic construct
  source 1..75: mol_type = other DNA
cctacgccagccagtttagcctggcggtggactggaaccatgacggcctgatggatatcgcccgtatcgcccaga

SEQ ID NO: 183834 - DNA, 75 bp, synthetic construct
  source 1..75: mol_type = other DNA
cgatttcgatggtgacggcgatatggatctcttcctgcccgccagccagggaagagctaactacggctcgctgtt

SEQ ID NO: 183835 - DNA, 75 bp, synthetic construct
  source 1..75: mol_type = other DNA
agtcaatttgttagccagttatacgtattaaataatttaaagaaagaatacgtaaaaaaaaagaagcgaatgcat

SEQ ID NO: 183836 - DNA, 75 bp, synthetic construct
  source 1..75: mol_type = other DNA
atggcactttcagataccaaaatacgcacacttactcccagaaaccgcccctggcaacttgccgatcatgacggg

SEQ ID NO: 183837 - DNA, 75 bp, synthetic construct
  source 1..75: mol_type = other DNA
tggttgattgaattaggtaaaaaacatctgatagggaaaaataaagataacctaagtgcatatgtaaatacattt

SEQ ID NO: 183838 - DNA, 75 bp, synthetic construct
  source 1..75: mol_type = other DNA
ccgcaggcccggcggggccacagggaccgaaaggagatacaggagccgcaggtccggcagggccacagggaccaa

SEQ ID NO: 183839 - DNA, 75 bp, synthetic construct
  source 1..75: mol_type = other DNA
ggatacaggagccacaggtccggcaggaccgcagggaccgaaaggggatacgggagctgcaggcccggcggggcc

SEQ ID NO: 183840 - DNA, 75 bp, synthetic construct
  source 1..75: mol_type = other DNA
gcaacgggtccgcagggacagaagggagacaagggtgatacaggcccacaggggccaaagggggataaaggagac

SEQ ID NO: 183841 - DNA, 75 bp, synthetic construct
  source 1..75: mol_type = other DNA
gacgctgtatcagagcggcaacaactacgccacaagctccattgccgattacgaccgtaacggcacgggcgatct

SEQ ID NO: 183842 - DNA, 75 bp, synthetic construct
  source 1..75: mol_type = other DNA
accgccagcaaaaccaccgcctgggggttgacctacggcctcgactcgcacgggatgtggacggtgctggcaaac

SEQ ID NO: 183843 - DNA, 75 bp, synthetic construct
  source 1..75: mol_type = other DNA
gattcaggaatggaatacatttcaggcaaacagagataccgcgattcactgacgtcagcctccggcagtatgaaa

SEQ ID NO: 183844 - DNA, 75 bp, synthetic construct
  source 1..75: mol_type = other DNA
cacctgcgcgcctatttggcttcgagccgcacgattttaatagcgaggctgtttataacacttttttcaaacctg

SEQ ID NO: 183845 - DNA, 75 bp, synthetic construct
  source 1..75: mol_type = other DNA
gcaatctggtcatattggagagacggctgtagtaactgaccaattccatggggcaaattgccatgctttgatcgt

SEQ ID NO: 183846 - DNA, 75 bp, synthetic construct
  source 1..75: mol_type = other DNA
attcctctacggaactaactccttcctcgcttctgaagggcgggagaatatctcggtttcccgtggcgatgttcg

SEQ ID NO: 183847 - DNA, 75 bp, synthetic construct
  source 1..75: mol_type = other DNA
cggtgacggaaaagctgctcgccaatagtcagcagcagaaaaaagccctgatgcagcaattacttaccgggaaga

SEQ ID NO: 183848 - DNA, 75 bp, synthetic construct
  source 1..75: mol_type = other DNA
ttgtctggagattcagggggccagtctacctggcatattgctgccaatattcagtttccaccaaattttgatgag

SEQ ID NO: 183849 - DNA, 75 bp, synthetic construct
  source 1..75: mol_type = other DNA
aatagatctctatgtaatgatatggaatactctggtattgtctgtaaagatactaatggaaaatattttgcatct

SEQ ID NO: 183850 - DNA, 75 bp, synthetic construct
  source 1..75: mol_type = other DNA
gcagttgcggtaacggaaaagcttctcgtcaacagccagcagcagaaaaaagccctgatgcagcaattgcttacc

SEQ ID NO: 183851 - DNA, 75 bp, synthetic construct
  source 1..75: mol_type = other DNA
gcggcggcaaatcgatatggattaatgagttcgggaactggggatgagatgggcgcctctgtctctgattatttt

SEQ ID NO: 183852 - DNA, 75 bp, synthetic construct
  source 1..75: mol_type = other DNA
tttcaaaaatagttatatagaaaagaagacagtacaactcatggaatatatagaaaagaatcgaattaatgacga

SEQ ID NO: 183853 - DNA, 75 bp, synthetic construct
  source 1..75: mol_type = other DNA
atggtgcaattatttgcatgtattctgttattttcgttgttcatgtcagaaattatatttaatgataatattata

SEQ ID NO: 183854 - DNA, 75 bp, synthetic construct
  source 1..75: mol_type = other DNA
aaataaaagcagttttgaaaaggtttcgctaaagtttcctcattttgaagaacaacaaaaaatcgctgacgtcct

SEQ ID NO: 183855 - DNA, 75 bp, synthetic construct
  source 1..75: mol_type = other DNA
tgaaaaagaaattcgcgcatttgcagagaaagccccgcgggcaacgtttatctgcgcgagctttgatgaaacgct

SEQ ID NO: 183856 - DNA, 75 bp, synthetic construct
  source 1..75: mol_type = other DNA
gcgtatccgctgaatccagtgcaacacgttgatccattagggcttagtactatgataataggtaacggccccgtt

SEQ ID NO: 183857 - DNA, 75 bp, synthetic construct
  source 1..75: mol_type = other DNA
aaacggttgtcgtttctttgaagtcaccgagttggaagcgatggaagacatttccaacacgtcattcgttgctga

SEQ ID NO: 183858 - DNA, 75 bp, synthetic construct
  source 1..75: mol_type = other DNA
gccgtggttgagcagaaggcagttaaaaacgtcgccgttcgcgatgaactggaagtgatggtcaaatgcccggaa

SEQ ID NO: 183859 - DNA, 75 bp, synthetic construct
  source 1..75: mol_type = other DNA
accacacagcagccttccccgcaaagaggatggcgaatattacagcccggcagcgtatcgccggaaactgataaa

SEQ ID NO: 183860 - DNA, 75 bp, synthetic construct
  source 1..75: mol_type = other DNA
tgcctgcccgctgaagcgcagaaggttttacgtaagcgcctgactcatcaggttctggaagatgcgcaactgccc

SEQ ID NO: 183861 - DNA, 75 bp, synthetic construct
  source 1..75: mol_type = other DNA
aacagcagcaggagaaacgcgccagaggccgcattgcacgggccacgcagaaaatcgaagaggctaaacgcgagc

SEQ ID NO: 183862 - DNA, 75 bp, synthetic construct
  source 1..75: mol_type = other DNA
tgttcagaccggaagtgacgcgcaaaacatttcgcggggaaattcagttattcaacaatatttattactcatatg

SEQ ID NO: 183863 - DNA, 75 bp, synthetic construct
  source 1..75: mol_type = other DNA
ctggtcactatccctgtcggagaacgtgatagccgttgctgatgcgttacgttacggcatggcgcagcacgggat

SEQ ID NO: 183864 - DNA, 75 bp, synthetic construct
  source 1..75: mol_type = other DNA
tggagccctcatccacatatactgtgcgtatcgtaaaaaaaggtgctgttcccgaagaccgggaaaccctgtatt

SEQ ID NO: 183865 - DNA, 75 bp, synthetic construct
  source 1..75: mol_type = other DNA
aaaagcgtgacggtggatgtcagtgcaggtgctggcagccggattaaatatggcgtcgtgaacgattatggggcg

SEQ ID NO: 183866 - DNA, 75 bp, synthetic construct
  source 1..75: mol_type = other DNA
ttaaggtgccacttatttaccggcctgcagcgttggataatttcaggcaggagccggagaaactggaatggacat

SEQ ID NO: 183867 - DNA, 75 bp, synthetic construct
  source 1..75: mol_type = other DNA
cgattgcgccctaccccagccagccggtggtacgcccatcgtggaacgatccggtgcaaatcaaacaactgctgg

SEQ ID NO: 183868 - DNA, 75 bp, synthetic construct
  source 1..75: mol_type = other DNA
attatggctggggctgagtagcagctacagcgcagagttactggccggagcaggattcgactggttgttgatcga

SEQ ID NO: 183869 - DNA, 75 bp, synthetic construct
  source 1..75: mol_type = other DNA
caacaaatcatcaggatacagagttgcaacgtcttgcacttgagtcagttggctgtgagcgaatttatgaagaat

SEQ ID NO: 183870 - DNA, 75 bp, synthetic construct
  source 1..75: mol_type = other DNA
cagccctgccaccgggaatacattccggccagaagtaacgctggttatggatgcgggacaacgctttattgtggg

SEQ ID NO: 183871 - DNA, 75 bp, synthetic construct
  source 1..75: mol_type = other DNA
attgtgatgaaatggctacaacgggttgccaagtgaacatcagagttggcaatgaagaacctattgtcacttatg

SEQ ID NO: 183872 - DNA, 75 bp, synthetic construct
  source 1..75: mol_type = other DNA
tagggaatatctatgccagcgaatcactgtttgcggcggggatccatccggatcggctggcgtcatcactgtcgc

SEQ ID NO: 183873 - DNA, 75 bp, synthetic construct
  source 1..75: mol_type = other DNA
atttttccatttggttgaatgtcaggattctaactttgaaaggttttgtgttcaagttggtgatgttgatggaca

SEQ ID NO: 183874 - DNA, 75 bp, synthetic construct
  source 1..75: mol_type = other DNA
tattgaccagtcagcggagcgtgtccgtgaccagttgtcggtgatggccagccccaacggtaacctggatgaagt

SEQ ID NO: 183875 - DNA, 75 bp, synthetic construct
  source 1..75: mol_type = other DNA
ggaaagggctgtttaaacagctgaaagaggccggtgtggtacagcgcgcagagagctttaatgtggccaacctga

SEQ ID NO: 183876 - DNA, 75 bp, synthetic construct
  source 1..75: mol_type = other DNA
cgtatccgtgacccgcataaagatgaaaagatggcagcaatccataaagcactggacgaatgctgcgcagagcat

SEQ ID NO: 183877 - DNA, 75 bp, synthetic construct
  source 1..75: mol_type = other DNA
ctggcattggagggctaccaacacgtgaacacaatgtcagggcgcgtctagatcgtgtaattgaaaataaacctg

SEQ ID NO: 183878 - DNA, 75 bp, synthetic construct
  source 1..75: mol_type = other DNA
ccgcgcccgaacaaaggatgcacagacagccatcatccgggctatgaataaacattttccacgatcttacaattt

SEQ ID NO: 183879 - DNA, 75 bp, synthetic construct
  source 1..75: mol_type = other DNA
cagttcacgcagtaagacgggtgttaagcagcgtcccggtgattgttaaagagcgtttccgctccaccggttcag

SEQ ID NO: 183880 - DNA, 75 bp, synthetic construct
  source 1..75: mol_type = other DNA
gtggagcagcagtaacattcattgaagattgtttgttacccctcaaagaggctggagttagcaaggagcgtgtat

SEQ ID NO: 183881 - DNA, 75 bp, synthetic construct
  source 1..75: mol_type = other DNA
tgttcaggccggaagtgacgcgcaaaacatttcgcggggaaattcagttattcaacaatatttattactcgtatg

SEQ ID NO: 183882 - DNA, 75 bp, synthetic construct
  source 1..75: mol_type = other DNA
cggccagaagtgacgctggttatggatgcggggcagcgctttgttgtgggctggtcactgtccctgtcggaaaac

SEQ ID NO: 183883 - DNA, 75 bp, synthetic construct
  source 1..75: mol_type = other DNA
aactaaaagcagtgccagtcaaacagaatggcgtgacgctgacaggcgcgcagtttaacgccagcatgacaatgg

SEQ ID NO: 183884 - DNA, 75 bp, synthetic construct
  source 1..75: mol_type = other DNA
tgctcaaacagcgtcagcgacgacctgcgaatgcagcttcagtccaccaccaccacaattaatggtgaaacggtg

SEQ ID NO: 183885 - DNA, 75 bp, synthetic construct
  source 1..75: mol_type = other DNA
cgcgccgccgctgagagcgcccgagctgcgctggaatcagcaaaagcccaggtttcggcttctaaagccgctata

SEQ ID NO: 183886 - DNA, 75 bp, synthetic construct
  source 1..75: mol_type = other DNA
gaaaatcgacactgaaaaatcgtcggtctttgattatcgcggttttaatgggcgaattggcgatagcgatatcca

SEQ ID NO: 183887 - DNA, 75 bp, synthetic construct
  source 1..75: mol_type = other DNA
gttactggcactgatctcaccttccgaaggggaggctaatcagtgtcggacgattttgtcgcagatgaagaagtg

SEQ ID NO: 183888 - DNA, 75 bp, synthetic construct
  source 1..75: mol_type = other DNA
cggggttgctggtattcagtctctgtagtttcccggttatggctggcagtaaatccttggagttaactctgcgcg

SEQ ID NO: 183889 - DNA, 75 bp, synthetic construct
  source 1..75: mol_type = other DNA
cgctgaatatgctttatatcgacccgcaaaacagcagccagattattgctgaacaggtgatccctgaaaacgagg

SEQ ID NO: 183890 - DNA, 75 bp, synthetic construct
  source 1..75: mol_type = other DNA
atgccaaatggtttccgtccgtggagaaagaggctaaggagtggggggaactgcgtcagcggctgggctccggtc

SEQ ID NO: 183891 - DNA, 75 bp, synthetic construct
  source 1..75: mol_type = other DNA
gtttccgctgccggaggggatgaatctgcccctgaccctgcgccattaccgggtgtttatctcgtactgttctcc

SEQ ID NO: 183892 - DNA, 75 bp, synthetic construct
  source 1..75: mol_type = other DNA
caggctgaactggactccgttgccaaacgtcatacccgttcccgctcgctcgcccatagtggggctatttctgcg

SEQ ID NO: 183893 - DNA, 75 bp, synthetic construct
  source 1..75: mol_type = other DNA
ccgctgagagcgcccgagctgcgctggaatcagcgaaagcccaggtttcggcttctaaagcggctatagaagcag

SEQ ID NO: 183894 - DNA, 75 bp, synthetic construct
  source 1..75: mol_type = other DNA
atggataagagtaaacgccatctggcgtggtgggttgtcggggttctggcggttgctaccgtcgtggcatggtgg

SEQ ID NO: 183895 - DNA, 75 bp, synthetic construct
  source 1..75: mol_type = other DNA
ctgctgaagaatacccggaactggcgaaggcttatccgacaaataaagtgcctgatttatgcggtgaatttattc

SEQ ID NO: 183896 - DNA, 75 bp, synthetic construct
  source 1..75: mol_type = other DNA
atggtgcgcctgccacgctggacacactgaaagaaattgccgcagccattaacaatgacccgaaattcagcacca

SEQ ID NO: 183897 - DNA, 75 bp, synthetic construct
  source 1..75: mol_type = other DNA
cggctggcgtagctgggtgccgtggcctcatgtacacgcacaagacatcattctcggcaacccgccggatattcc

SEQ ID NO: 183898 - DNA, 75 bp, synthetic construct
  source 1..75: mol_type = other DNA
gagtcagtgggcgcggcagcaacgcgcagtagtgacgaggtagcatgttacggccgatattttgtaatagggtac

SEQ ID NO: 183899 - DNA, 75 bp, synthetic construct
  source 1..75: mol_type = other DNA
atactcgcgtcgcttttgatggcgttgtgaatgacccaatgaagatgggcggtgtcgatttacggcttaaatttt

SEQ ID NO: 183900 - DNA, 75 bp, synthetic construct
  source 1..75: mol_type = other DNA
cgggcaacttcaggcgattgaaaatgcaggcggcaccgaaacacgcccacgtaacattgcattcaactttttagt

SEQ ID NO: 183901 - DNA, 75 bp, synthetic construct
  source 1..75: mol_type = other DNA
ttccctttgcttttcctactgcctgtagatcatttttattgacagaagcttctgccgcagggccaaccaaatata

SEQ ID NO: 183902 - DNA, 75 bp, synthetic construct
  source 1..75: mol_type = other DNA
tgtagctggtcttctcgcataccttggtttgggagatacaagcggatacgtgggacgctgggtgaatacccgggt

SEQ ID NO: 183903 - DNA, 75 bp, synthetic construct
  source 1..75: mol_type = other DNA
ttggtttgggagaaggctctgcattacctgttggtgtccctgttccgtggccttcagctacgccgccaacaggct

SEQ ID NO: 183904 - DNA, 75 bp, synthetic construct
  source 1..75: mol_type = other DNA
cgctgactaatttgagtggaaaggatgtaactggtcttctcacataccttggtttgggagaagcggctaaaagaa

SEQ ID NO: 183905 - DNA, 75 bp, synthetic construct
  source 1..75: mol_type = other DNA
cgcttaccaatttgagtggaaaggatgtagctggtcttctcgcataccttggtttgggagatatcagtgccgcag

SEQ ID NO: 183906 - DNA, 75 bp, synthetic construct
  source 1..75: mol_type = other DNA
gggcctaattgggtcaaaactgtaggtggaatgattattcaaaagggatcgttgggatttggtattggttcaaat

SEQ ID NO: 183907 - DNA, 75 bp, synthetic construct
  source 1..75: mol_type = other DNA
ctttcccccggtcgtttacaacaacgaactattccatctcaattaactggaatgatatcggtactgtaacaactg

SEQ ID NO: 183908 - DNA, 75 bp, synthetic construct
  source 1..75: mol_type = other DNA
ggctagcgaaggcttgaccattgaacagtatcgggcaatgcgctcggcttacagagagaataaagaagatgatga

SEQ ID NO: 183909 - DNA, 75 bp, synthetic construct
  source 1..75: mol_type = other DNA
atggcgtgcctgtctgctggagcaagggcttggcgatctgctgggtggcttgagtaagcaggtgctgacaatctt

SEQ ID NO: 183910 - DNA, 75 bp, synthetic construct
  source 1..75: mol_type = other DNA
ggccagtgaaggtctgaccctagagcgttaccgagcaatgcacccggcttacagagaggataaagaagatgatag

SEQ ID NO: 183911 - DNA, 75 bp, synthetic construct
  source 1..75: mol_type = other DNA
gaagaagctctgggcgaaaaagcaccgtacaacggtcgtaaagagatcaaaggccaggagactgactttatctga

SEQ ID NO: 183912 - DNA, 75 bp, synthetic construct
  source 1..75: mol_type = other DNA
caaccggtgaaggggtaaccagcgcgcgtacgtttgtccgtctgcgtcgctgtgtattagtcgatgcgtttcgca

SEQ ID NO: 183913 - DNA, 75 bp, synthetic construct
  source 1..75: mol_type = other DNA
aaccaaacagaaagccttaccactaacaataaaagaggtaggaggactgtattttatcgcataaaaaaacattta

SEQ ID NO: 183914 - DNA, 75 bp, synthetic construct
  source 1..75: mol_type = other DNA
caaatctttattcatggatgtatgtatcaggaagaggtaacccttcgactccggaatcagtaagtgagcttaatc

SEQ ID NO: 183915 - DNA, 75 bp, synthetic construct
  source 1..75: mol_type = other DNA
attctgcgtggttcctgttcgacacctcccgctcggtcaagccgctgatcttccagcagcgtaagaaaccggttt

SEQ ID NO: 183916 - DNA, 75 bp, synthetic construct
  source 1..75: mol_type = other DNA
ttggcgacaaggtggttaaagcgctcgccgcgttcaactacaccatccgcaacaaagactgggaagcgacggtag

SEQ ID NO: 183917 - DNA, 75 bp, synthetic construct
  source 1..75: mol_type = other DNA
aacagcattatctcatgatatgaaactcattcttgccgatcgtttttatttcaagaccagtaatccttgtgaaac

SEQ ID NO: 183918 - DNA, 75 bp, synthetic construct
  source 1..75: mol_type = other DNA
tcactctattgtattgcgccagttcatcagcaaaaactggatcccctcccgcaagcactataactttcatcgcac

SEQ ID NO: 183919 - DNA, 75 bp, synthetic construct
  source 1..75: mol_type = other DNA
ctgtgcgttacgccgcggtactgacggtcatcaacgcgctggtcgatttcgtcgcgcgttttccgaatccgcatc

SEQ ID NO: 183920 - DNA, 75 bp, synthetic construct
  source 1..75: mol_type = other DNA
ctcgtagtgccattattcgcctgaacgcggcgaatgccctttttatctatcagccgtttatgcacgatcagcggg

SEQ ID NO: 183921 - DNA, 75 bp, synthetic construct
  source 1..75: mol_type = other DNA
tgctcacccaggatgacaccgtcaacctcagcaagtttatctcccgtgagcagcctctcccacggcagcctacca

SEQ ID NO: 183922 - DNA, 75 bp, synthetic construct
  source 1..75: mol_type = other DNA
cattggctcccactgtgaaatcgttttgcactctttgcaggatttaaaatgttcagccattcgtattgctaacgg

SEQ ID NO: 183923 - DNA, 75 bp, synthetic construct
  source 1..75: mol_type = other DNA
ggtcagcttcacattacgcgaaagacgaagcgtaccggaaaaacgccaggcacgcgccacccccgccagcagccg

SEQ ID NO: 183924 - DNA, 75 bp, synthetic construct
  source 1..75: mol_type = other DNA
cagtaagtcaaaatgtgagcagggataatgtaaatatcactctgacgcgtaaggagtttcagttgctttggctat

SEQ ID NO: 183925 - DNA, 75 bp, synthetic construct
  source 1..75: mol_type = other DNA
atcacgccctgaattcaacattagaaatcagcgggttaagaatggactctgtcaaccaaagtgtaagtagaaaca

SEQ ID NO: 183926 - DNA, 75 bp, synthetic construct
  source 1..75: mol_type = other DNA
ccatgacaatcaagggtgagcaggcgaaaaaacagcttattgctgcggcgctagcgcagtttggcgagtatggaa

SEQ ID NO: 183927 - DNA, 75 bp, synthetic construct
  source 1..75: mol_type = other DNA
tgaccgaatgttggcgggaggcgaatcgcttgctgaaaccagggggcattttggcatttaccttccatcacagcg

SEQ ID NO: 183928 - DNA, 75 bp, synthetic construct
  source 1..75: mol_type = other DNA
acctgaagaacgcaaagactacacatacgaaggcccagaagtcatttacaccttctgggctaagcacggcccatg

SEQ ID NO: 183929 - DNA, 75 bp, synthetic construct
  source 1..75: mol_type = other DNA
tcgatataatgtcacattaaatattggcttaacgtccagcaatgtatggccgggattttccctcgataccgccac

SEQ ID NO: 183930 - DNA, 75 bp, synthetic construct
  source 1..75: mol_type = other DNA
cgctggcgtggcgacggcgatcctgatctttaccaaaggcggtcagacggacgaggtctggttctacgatctaca

SEQ ID NO: 183931 - DNA, 75 bp, synthetic construct
  source 1..75: mol_type = other DNA
actatcgtgccgcagggcgtgctgtttggctccagtaaggcgcaccagtcacttcgcaaaacgctggtggaagat

SEQ ID NO: 183932 - DNA, 75 bp, synthetic construct
  source 1..75: mol_type = other DNA
taacccgaacctcgatcccgcgtggtttggcggggtgatggcgatcatcaacaacattaccatgctggcgattgt

SEQ ID NO: 183933 - DNA, 75 bp, synthetic construct
  source 1..75: mol_type = other DNA
aaatcatccgggcgtcgttacagggggccagtatcaccacacaggcggtggatgcacaggcctttatcgatattg

SEQ ID NO: 183934 - DNA, 75 bp, synthetic construct
  source 1..75: mol_type = other DNA
actggcccattctgtgggcgctgttaatgacagcaataaacctgcttcagttgattctggcgaagacgtacgtca

SEQ ID NO: 183935 - DNA, 75 bp, synthetic construct
  source 1..75: mol_type = other DNA
caaacacagaaggtattgccggaggccggtttgccaaaaggcatttatcagctttccgaggcgcagcaggcatcc

SEQ ID NO: 183936 - DNA, 75 bp, synthetic construct
  source 1..75: mol_type = other DNA
cagcgcgcagagagctttaatgtggccaacctgatgccgttagtggcggataaccccctgacaccggcaggtctg

SEQ ID NO: 183937 - DNA, 75 bp, synthetic construct
  source 1..75: mol_type = other DNA
ggagtggggggaactgcgtcagcggctgggctccggtcagtcctccgtggtgtcctacttcctcaacatcacagc

SEQ ID NO: 183938 - DNA, 75 bp, synthetic construct
  source 1..75: mol_type = other DNA
tggaagaccaggtgaaaactcacagcgaagccaacctgaagtacatggacctggagaaaaagtcgaagacctcct

SEQ ID NO: 183939 - DNA, 75 bp, synthetic construct
  source 1..75: mol_type = other DNA
cgtactgttctccctcgaagaaaaaaagccgggccgacattctggaaatggaaaatctggtgaaaatcatccgtg

SEQ ID NO: 183940 - DNA, 75 bp, synthetic construct
  source 1..75: mol_type = other DNA
ctcctggtcaggtgaacaggcagaacggtttaacgccattacccgggcctattacatgaaagccgcagaaacact

SEQ ID NO: 183941 - DNA, 75 bp, synthetic construct
  source 1..75: mol_type = other DNA
aaaaatcgtaaagttggtgagtttattcaaaaaggttaccgcacctgtcgccgtcataccggtgcctatatcacc

SEQ ID NO: 183942 - DNA, 75 bp, synthetic construct
  source 1..75: mol_type = other DNA
cagcaacgatttcggggtgaacatgaagccggaaggctcaatgaaaatctgtgtgctgaatggttcacgccaggt

SEQ ID NO: 183943 - DNA, 75 bp, synthetic construct
  source 1..75: mol_type = other DNA
atatccttcaggatgaaacctttcaaggattcgaatcattacgtactgccggacacgaaaaacggaaaaagagta

SEQ ID NO: 183944 - DNA, 75 bp, synthetic construct
  source 1..75: mol_type = other DNA
tatctctcaccgttcaggcgaaactgaagacgctaccatcgctgacctggctgttggtactgctgcaggccagat

SEQ ID NO: 183945 - DNA, 75 bp, synthetic construct
  source 1..75: mol_type = other DNA
tccgcaactggaagcgctgataagcttcgcccgcaccggcgacggcactgttgcaaagttagcgatgaggcagcc

SEQ ID NO: 183946 - DNA, 75 bp, synthetic construct
  source 1..75: mol_type = other DNA
actgttgaaagagcattttcagcagcctgaaaaaaaacgccgcgatgagcagcagtttgcggcgttttacgatta

SEQ ID NO: 183947 - DNA, 75 bp, synthetic construct
  source 1..75: mol_type = other DNA
tgggaaattgtcactacgcagtttggctataacgatgccactaaatcgttacaaaccgcagaaggaatattaaaa

SEQ ID NO: 183948 - DNA, 75 bp, synthetic construct
  source 1..75: mol_type = other DNA
gaagcgagagcaaaggagtatgccttgtcggtatttgctgcggtacgtggcgaggactgtcgtaaaaacgggcat

SEQ ID NO: 183949 - DNA, 75 bp, synthetic construct
  source 1..75: mol_type = other DNA
tgttgctgccgggttatgtgaatggaacgaaccgttgccggaaaagcgccccgtaattttagaggcgcaggatgt

SEQ ID NO: 183950 - DNA, 75 bp, synthetic construct
  source 1..75: mol_type = other DNA
caacccgccctttaaaaaagtgccggcttacttgtttcatcccggactgacttatctgaaagggcggtttgggga

SEQ ID NO: 183951 - DNA, 75 bp, synthetic construct
  source 1..75: mol_type = other DNA
atggttgaaagagcatcttcagcagcctgaaaaaaaacgccgcgatgagcagtttgctgcgttttacgattattg

SEQ ID NO: 183952 - DNA, 75 bp, synthetic construct
  source 1..75: mol_type = other DNA
gattatcacactgcgttcgccgctgtatgtgcgtgggacgtttaaaaatccgcaggctggggtgaaagccggacc

SEQ ID NO: 183953 - DNA, 75 bp, synthetic construct
  source 1..75: mol_type = other DNA
atgacgacgaagacaccagcccgatcgcaagcaaaaactcgcaaaaaagacaaaaacaaaaattctccccgcacc

SEQ ID NO: 183954 - DNA, 75 bp, synthetic construct
  source 1..75: mol_type = other DNA
aggcatccggcaaggatgtcaagcgtccgcaactggaagcgctgataagctggcactgttgcaaagttagcgatg

SEQ ID NO: 183955 - DNA, 75 bp, synthetic construct
  source 1..75: mol_type = other DNA
gagttttacgaagctgaggcgaaaaaacaggcgaagcagtttttcatggatgcggctctcggattacgcgaaggg

SEQ ID NO: 183956 - DNA, 75 bp, synthetic construct
  source 1..75: mol_type = other DNA
gaacgtatcctggcacccgcgccagcgcaaccatgattggcgacgatgaaaccaactggggcacaaaatcgctgg

SEQ ID NO: 183957 - DNA, 75 bp, synthetic construct
  source 1..75: mol_type = other DNA
aatccctgagaatacagtttggcgagcgggtaaaagaactgcgcattgccaccggattgagccaagaggcctttg

SEQ ID NO: 183958 - DNA, 75 bp, synthetic construct
  source 1..75: mol_type = other DNA
gctatggtacaaacggtatgtttacttatgctgatggagcttttacgggtatagatcgtgaaagcggagacggta

SEQ ID NO: 183959 - DNA, 75 bp, synthetic construct
  source 1..75: mol_type = other DNA
cgccgagcactggggcgacggcaccacctcatcgtcggacggccagaacttccgcaccggcagcaaggccgagag

SEQ ID NO: 183960 - DNA, 75 bp, synthetic construct
  source 1..75: mol_type = other DNA
gccggacgccatcatcaccgagtcaggcttgaagatcacgccgctcgacgcggcggtacccgacaccgcccaagc

SEQ ID NO: 183961 - DNA, 75 bp, synthetic construct
  source 1..75: mol_type = other DNA
ttgaagtatggcgtgcactggtgcagcatccgcaggcattggcaatgtcgctcttcaaatttgaaatgtcagcag

SEQ ID NO: 183962 - DNA, 75 bp, synthetic construct
  source 1..75: mol_type = other DNA
tcagcagcagttccaggcatccggcaaggcgatcaatgccaaggtgcggctgttcgggcgcatcggccaggcgct

SEQ ID NO: 183963 - DNA, 75 bp, synthetic construct
  source 1..75: mol_type = other DNA
ccgttcccgccattgctgagactggtcgccaaccagctcaaggtcggcatcgaaagctgggacgagtacgggcag

SEQ ID NO: 183964 - DNA, 75 bp, synthetic construct
  source 1..75: mol_type = other DNA
aacatcaagcacgtccgcgcccattgggacgaaatcctgcggctggccacctcgatcaaggggtctgacgctcag

SEQ ID NO: 183965 - DNA, 75 bp, synthetic construct
  source 1..75: mol_type = other DNA
cgtctattcctgaatcttgtgtccacgggtggtatcaggagcttttacgtgagcacagtgaagctcgctggcctg

SEQ ID NO: 183966 - DNA, 75 bp, synthetic construct
  source 1..75: mol_type = other DNA
ggaaagcggcagcgacccctatgccgccatcgaggcggtgattccctgggacgagttcaccgagagcgtcagcga

SEQ ID NO: 183967 - DNA, 75 bp, synthetic construct
  source 1..75: mol_type = other DNA
aagttaacgcgatggcgcttgccggtgatttgcccgatgtagatatctcagataaaggcgtaaaaatcactccac

SEQ ID NO: 183968 - DNA, 75 bp, synthetic construct
  source 1..75: mol_type = other DNA
aaatggaaagcgtgcaagctgggtttgtcatccagatgagacatttattggtgtaccaaaagtcatttctacact

SEQ ID NO: 183969 - DNA, 75 bp, synthetic construct
  source 1..75: mol_type = other DNA
tcatcgttgatgcagatcaatggctgttacagggacaggcttcttgcagtgtgcgaagcagcgatgttctgattg

SEQ ID NO: 183970 - DNA, 75 bp, synthetic construct
  source 1..75: mol_type = other DNA
gatgccccgtaattgctcaggtaggaatgttgcgcccggaaaaagggcacgaatttatgttgaatttactgttcc

SEQ ID NO: 183971 - DNA, 75 bp, synthetic construct
  source 1..75: mol_type = other DNA
tgttcgggcgcatcggccaggcgctgatcgaggccaagcaagcgggccgcgatccgttcgccgccatcgaggccg

SEQ ID NO: 183972 - DNA, 75 bp, synthetic construct
  source 1..75: mol_type = other DNA
aacagcaaccagacctgtattgttcgttattactataacatcaccacattctgtccggatacggatgaggatgcg

SEQ ID NO: 183973 - DNA, 75 bp, synthetic construct
  source 1..75: mol_type = other DNA
gcaagctgccgcgtaagacgccgatttcgttccacctggtgtccagcaagctgattggcgatcagctggatcgcg

SEQ ID NO: 183974 - DNA, 75 bp, synthetic construct
  source 1..75: mol_type = other DNA
cctccattgaaatcaaggaagccgcaggtaaggccgacagcagcgatatttatcagaacctgataacgcttgccc

SEQ ID NO: 183975 - DNA, 75 bp, synthetic construct
  source 1..75: mol_type = other DNA
acgttgtttgaaccgggtgaaatggtccgtgttaatgatggtccgttcgctgacttcaacggcgttgttgaagaa

SEQ ID NO: 183976 - DNA, 75 bp, synthetic construct
  source 1..75: mol_type = other DNA
cgtggagaaagaggcgaaggagtggggggaactgcgtcagcggctgggctccggtcagtcctctgtcgtgtccta

SEQ ID NO: 183977 - DNA, 75 bp, synthetic construct
  source 1..75: mol_type = other DNA
gaacaacccggacatgttcatgctgtggatggggggcgataacctgtccaacctgctcagtccggatctgaccat

SEQ ID NO: 183978 - DNA, 75 bp, synthetic construct
  source 1..75: mol_type = other DNA
gcgttgcgcgagctggggcgcatcgagcgcacgctgttcattttggattggctgcaaagcgtggagctgcgccgc

SEQ ID NO: 183979 - DNA, 75 bp, synthetic construct
  source 1..75: mol_type = other DNA
cccgcgccagaacggcttggccgtggcgttgcgcgagctggggcgcatcgagcgcacgctgttcattttggattg

SEQ ID NO: 183980 - DNA, 75 bp, synthetic construct
  source 1..75: mol_type = other DNA
caccaagctctacatcccgaagggcgacgccgcctatgacgcgctgaaacccatgatcggcggcacgctcaacat

SEQ ID NO: 183981 - DNA, 75 bp, synthetic construct
  source 1..75: mol_type = other DNA
actcacccgcgcgggactgcgcctgaccccgcagtacttcatgcgggagtaccagctgcaggagggggatattga

SEQ ID NO: 183982 - DNA, 75 bp, synthetic construct
  source 1..75: mol_type = other DNA
atggcaaaaggtatctgggtttcacccgatgaatttgttgctttttctgagcctcagaaatcactgaccgcgcag

SEQ ID NO: 183983 - DNA, 75 bp, synthetic construct
  source 1..75: mol_type = other DNA
gtggattacgagaaatctcgtctgaaggtgtctgtttctatcttcggtcgtgcgaccccggtggagctggacttc

SEQ ID NO: 183984 - DNA, 75 bp, synthetic construct
  source 1..75: mol_type = other DNA
catactcccgccacggtcggaagctggttgtcccgctggtctggtgttgttgaggagcatgatctggaaacgatt

SEQ ID NO: 183985 - DNA, 75 bp, synthetic construct
  source 1..75: mol_type = other DNA
atgtcagagcccctcgatctcaatcaattagcgcaaaaaattaaacagtgggggctggaactgggctttcagcag

SEQ ID NO: 183986 - DNA, 75 bp, synthetic construct
  source 1..75: mol_type = other DNA
agttagcgcaaaatattaaacagtgggggctggaactgggctttcagcaggtaggtattaccgataccgatctca

SEQ ID NO: 183987 - DNA, 75 bp, synthetic construct
  source 1..75: mol_type = other DNA
ccttgaaagccataacgtgaagtgtgaagccatacgtgtcgatccatacacgcaaaaacggttcaccttctttag

SEQ ID NO: 183988 - DNA, 75 bp, synthetic construct
  source 1..75: mol_type = other DNA
gttctgacgatggcctttgctgttggtcatatttctggtggtcattttaacccggcggtcactattggtttatag

SEQ ID NO: 183989 - DNA, 75 bp, synthetic construct
  source 1..75: mol_type = other DNA
atccgcataccggattttcccagcctcagtatatccgccgtcagatgctggctgctggatcaaaacatgccatcc

SEQ ID NO: 183990 - DNA, 75 bp, synthetic construct
  source 1..75: mol_type = other DNA
gttgttgatcagttccgtgaacacgaaggtgaaatcatcaccggcgtggtgaaaaaagtaaaccgcgataacatc

SEQ ID NO: 183991 - DNA, 75 bp, synthetic construct
  source 1..75: mol_type = other DNA
gcgtctgattagcgcgatgagtgaagtgcgtaatctggtggagcctgctatcgcccgctgggctgcagagcgcgc

SEQ ID NO: 183992 - DNA, 75 bp, synthetic construct
  source 1..75: mol_type = other DNA
atgcagatcctgtttaacgatcaaccgatgcagtgcgccgccggacaaacggttcacgagctgctggagcagctc

SEQ ID NO: 183993 - DNA, 75 bp, synthetic construct
  source 1..75: mol_type = other DNA
cattctcgactgcgaagattcggtcgcggcggttgatgcggaagataaaatcctgctgtaccgcaacctgctggg

SEQ ID NO: 183994 - DNA, 75 bp, synthetic construct
  source 1..75: mol_type = other DNA
ttcaaaagtgccggatattcacaacgtggcgctgatggaagaccgtgcaacgctgcgcatctccagccagcatat

SEQ ID NO: 183995 - DNA, 75 bp, synthetic construct
  source 1..75: mol_type = other DNA
cagttgaaaaatggcacggaaaccacgttacgtaccccggcgcagtttgtcggttatcgtggtgatgccgctgcg

SEQ ID NO: 183996 - DNA, 75 bp, synthetic construct
  source 1..75: mol_type = other DNA
atgatattgatacggcagtggcgcaccttgagagccataatgtgaaatgtgaagcgatacgtgtcgacccgtata

SEQ ID NO: 183997 - DNA, 75 bp, synthetic construct
  source 1..75: mol_type = other DNA
gctggggctcactgtacgatgcgttatacggcagcgacatcatcccgcaggaaggggcgatggtcagcggctacg

SEQ ID NO: 183998 - DNA, 75 bp, synthetic construct
  source 1..75: mol_type = other DNA
agatctgctgtttatcaggaaagatttactgaccggggaaaagggaagcaggaaaaccagcacgtcccgaaaagg

SEQ ID NO: 183999 - DNA, 75 bp, synthetic construct
  source 1..75: mol_type = other DNA
tcctttgcattggaagatatgtggatatcaaaacagaactaccacatgcaagcggaaggtataagttaacctccg

SEQ ID NO: 184000 - DNA, 75 bp, synthetic construct
  source 1..75: mol_type = other DNA
tccgcgcccattgggatgaaatcctgcggatggccacctcgatcaagcagggcacggcgacggcctcgctgatgc

SEQ ID NO: 184001 - DNA, 75 bp, synthetic construct
  source 1..75: mol_type = other DNA
ggtcatgccttcccggaatgaagcatttggcatggcaattgtggaagctaccgtctgtggggtgccggtaatggc

SEQ ID NO: 184002 - DNA, 75 bp, synthetic construct
  source 1..75: mol_type = other DNA
gtctgaaagcgaaaatcgactatatggggatgaacgattgtgtgctgatgtgcggattattgtcgcctgtggcac

SEQ ID NO: 184003 - DNA, 75 bp, synthetic construct
  source 1..75: mol_type = other DNA
gctgtcgtttgataagagtaacgatggcgaaacgccggaaggtatcggctttgcgattcctttccagttagcaac

SEQ ID NO: 184004 - DNA, 75 bp, synthetic construct
  source 1..75: mol_type = other DNA
cattacccagggcattatcagtgccacaggtcgaatcggcctgaacccgaccgggcggcaaaacttcctgcaaac

SEQ ID NO: 184005 - DNA, 75 bp, synthetic construct
  source 1..75: mol_type = other DNA
gttcgccgcgccgcgccagcggtggttaacgtttacaaccgtggtttgaacaccaactctcacaaccagcttgag

SEQ ID NO: 184006 - DNA, 75 bp, synthetic construct
  source 1..75: mol_type = other DNA
caaaattatggataaactgatccgtgatggccgagtgatccgtggctacattggcattggtgggcgcgagatcgc

SEQ ID NO: 184007 - DNA, 75 bp, synthetic construct
  source 1..75: mol_type = other DNA
gacaatggatcaggttgcggaaatccgaccaggctcggtgatcccggttgtagtgatgcgtgatgataaacagtt

SEQ ID NO: 184008 - DNA, 75 bp, synthetic construct
  source 1..75: mol_type = other DNA
caccaataaacacgtgatcaacgacgccgatcagatcatcgtcgccttacaggatggacgtgtttttgaagcgtt

SEQ ID NO: 184009 - DNA, 75 bp, synthetic construct
  source 1..75: mol_type = other DNA
ctgaaaaacgcccgggataacgaccagtatgccgagtccccgaccatccgcagccgtctggatgaaatgatagtg

SEQ ID NO: 184010 - DNA, 75 bp, synthetic construct
  source 1..75: mol_type = other DNA
agcacgctgttcttccgcgaagacccggccatcggcgaggccgttacagccgcgttccgtgccgaagggatcaag

SEQ ID NO: 184011 - DNA, 75 bp, synthetic construct
  source 1..75: mol_type = other DNA
caccagtagcccgaacatctacgcggccggcgactgcaccgaccagccgcagttcgtctatgtggcggcagcggc

SEQ ID NO: 184012 - DNA, 75 bp, synthetic construct
  source 1..75: mol_type = other DNA
ggtgaaaacccacagcgaagccaacctgaagtacatggacctggagaaaaagtcgaagacctcctatgccaaatg

SEQ ID NO: 184013 - DNA, 75 bp, synthetic construct
  source 1..75: mol_type = other DNA
ctcgaagaaaaaaagccgggccgacattctggaaatggaaaacctggtgaaaatcatccgggcgtcgttacaggg

SEQ ID NO: 184014 - DNA, 75 bp, synthetic construct
  source 1..75: mol_type = other DNA
cagagagctttaatgtggccaacctgatgccgttagtggcggataaccccctgacaccggcaggcctgctggcac

SEQ ID NO: 184015 - DNA, 75 bp, synthetic construct
  source 1..75: mol_type = other DNA
ggcgaagtgcgcaaattatttgaactgtatatgtcgcctggcggtgtgactgagctaatccacttttttatcgcc

SEQ ID NO: 184016 - DNA, 75 bp, synthetic construct
  source 1..75: mol_type = other DNA
tcgctacctgggttaatggcaatgaaagcgggcagctgattgaaacctgcgccgggctgctggataacgacgaac

SEQ ID NO: 184017 - DNA, 75 bp, synthetic construct
  source 1..75: mol_type = other DNA
taaaaccggcgagatacgcgatggtaagacggtattattacttaattatttgcaagcatcgcatttaatggactg

SEQ ID NO: 184018 - DNA, 75 bp, synthetic construct
  source 1..75: mol_type = other DNA
ctgaaagacactccgtactggacttccactgaagcgctggtcagcgagacgattcctaagcgcctggccgtgatt

SEQ ID NO: 184019 - DNA, 75 bp, synthetic construct
  source 1..75: mol_type = other DNA
cgtctgctggacttcaaaaatcacaaggtcggtgaatttattgagaaaggttaccgtaccgcccgccgtcatacc

SEQ ID NO: 184020 - DNA, 75 bp, synthetic construct
  source 1..75: mol_type = other DNA
tcaaacagagtgcgaaggagttcgcgaaatacaaccagctgtacccgttcagaaagctatctgtgtgtcatgaaa

SEQ ID NO: 184021 - DNA, 75 bp, synthetic construct
  source 1..75: mol_type = other DNA
cctatgccaaatggtttccgtccgtggagaaagaggcgaaggagtggggggaactgcgccagcggctgggctccg

SEQ ID NO: 184022 - DNA, 75 bp, synthetic construct
  source 1..75: mol_type = other DNA
gaagccgcattctttcagtggatctggctggaagatcagcttaacgccggtaacctgccggaaggcagcgaccag

SEQ ID NO: 184023 - DNA, 75 bp, synthetic construct
  source 1..75: mol_type = other DNA
cgccgatacgccaacgtcactatacgaggcggcgttctttcagtggatctggctggaagatcagcttaacgccgg

SEQ ID NO: 184024 - DNA, 75 bp, synthetic construct
  source 1..75: mol_type = other DNA
ttacatacagaagacggttccgcaattgaggttggtctggcgtcatcccaacaaaataaacatacagaactggca

SEQ ID NO: 184025 - DNA, 75 bp, synthetic construct
  source 1..75: mol_type = other DNA
tcgaagttactggatttagacagcttcaggtcaatgatgtcagggaatggctacatctacattccatgcattgcg

SEQ ID NO: 184026 - DNA, 75 bp, synthetic construct
  source 1..75: mol_type = other DNA
tctgaaagacgatgctgataatactcatcgtttgctcacccttagcagccggaatggagtaaaaacgctgcaggt

SEQ ID NO: 184027 - DNA, 75 bp, synthetic construct
  source 1..75: mol_type = other DNA
gatgttttccaccaagctggaagatgctggcgtacgctggctggaaccggcgtggaagagcattatctccaacaa

SEQ ID NO: 184028 - DNA, 75 bp, synthetic construct
  source 1..75: mol_type = other DNA
acatgtcgacactggaaatcgccggtgcgctgaaagagatgagagaggatgtgccaccggataacgttccgcccg

SEQ ID NO: 184029 - DNA, 75 bp, synthetic construct
  source 1..75: mol_type = other DNA
ctgaccttggttgtatcctcggtggttacctgccgccgctgttccagcgttggtttggcgtgaacctgatcgttt

SEQ ID NO: 184030 - DNA, 75 bp, synthetic construct
  source 1..75: mol_type = other DNA
ggcatgcgtacaagcgtggaacacatctacgccgcaggcgactgcaccgaccagccgcagttcgtctatgtggcg

SEQ ID NO: 184031 - DNA, 75 bp, synthetic construct
  source 1..75: mol_type = other DNA
agcgggcacactaccaggccatgcccctgctggctgaaatgtccgccctgctgggacagccatccatccgggatg

SEQ ID NO: 184032 - DNA, 75 bp, synthetic construct
  source 1..75: mol_type = other DNA
acgaagctgtacgatgagctgcacaacgcacgcggcattgatgtcatcctccggtcgctggaaacgaacgacagg

SEQ ID NO: 184033 - DNA, 75 bp, synthetic construct
  source 1..75: mol_type = other DNA
cgcacttatcaacacactgattcatgccctgtctgccgacagggaaggtcagcttgtcagactgatggaaacggc

SEQ ID NO: 184034 - DNA, 75 bp, synthetic construct
  source 1..75: mol_type = other DNA
cgccgatacgccaacctcactatacgaggcggcgttctttcagtggatctggctggaagatcagcttaacgcggg

SEQ ID NO: 184035 - DNA, 75 bp, synthetic construct
  source 1..75: mol_type = other DNA
ggggatgaatctgcccctgaccctgcgccattaccgggtgtttatctcgtactgttctccttcgaagaaaaaaag

SEQ ID NO: 184036 - DNA, 75 bp, synthetic construct
  source 1..75: mol_type = other DNA
gcttccttaccgaaggcggcgtcccgttcaccatgactcgtgtcaacatcatcaaaggcctgggaccggtactgc

SEQ ID NO: 184037 - DNA, 75 bp, synthetic construct
  source 1..75: mol_type = other DNA
cccgcacgagatgtaccgcgtaccgtataagctggacccctatcaggatctgaactatcagtgtgtcgatgacag

SEQ ID NO: 184038 - DNA, 75 bp, synthetic construct
  source 1..75: mol_type = other DNA
gcctgaaagtggtggaaaaagtgatcgccagcgacgagctgatgaccaaattccgcattccaaaacacacctgga

SEQ ID NO: 184039 - DNA, 75 bp, synthetic construct
  source 1..75: mol_type = other DNA
aagtcgcaccgggttttgaagatcgcctctatctggttaatacccacacctttaccgcccaaggttccgatctcc

SEQ ID NO: 184040 - DNA, 75 bp, synthetic construct
  source 1..75: mol_type = other DNA
cgaaggatgtgcatgacatcctcaacaaacgcaccaactcaacctggccaaccacctggtttgcaccgcgcctca

SEQ ID NO: 184041 - DNA, 75 bp, synthetic construct
  source 1..75: mol_type = other DNA
tcccggtatgtatgcacaacgttgaagagaccaaagtgtatcgtccttctgcctgggctgcgcacggcatggata

SEQ ID NO: 184042 - DNA, 75 bp, synthetic construct
  source 1..75: mol_type = other DNA
caacaacagccagaaagcatttaagcgatatcttattcgggacatggaaaagctggcgcgcttggttgagcgtct

SEQ ID NO: 184043 - DNA, 75 bp, synthetic construct
  source 1..75: mol_type = other DNA
gcctgggctgcgcacggcatggatattgaaggccaggattaccgcgcttgccagaactacggcccgttgtacaag

SEQ ID NO: 184044 - DNA, 75 bp, synthetic construct
  source 1..75: mol_type = other DNA
catcggccacgttggcgcagactttatcactctcgcctccatgctgcgtatcccggtatgtatgcacaacgttga

SEQ ID NO: 184045 - DNA, 75 bp, synthetic construct
  source 1..75: mol_type = other DNA
ggcagaacacggcatcatccatttgatcaactccggttctgctgcgctggacggttcctgtaaacaacgcgacag

SEQ ID NO: 184046 - DNA, 75 bp, synthetic construct
  source 1..75: mol_type = other DNA
cttcggttcggccaaagagcagtggttctcctcttttatgctgcaggtggaagcgaactgctcctggcaccgcct

SEQ ID NO: 184047 - DNA, 75 bp, synthetic construct
  source 1..75: mol_type = other DNA
accggatctctggagactgccatctttgccagggtcattaaagaagggtattcagggctacgcattgagctttct

SEQ ID NO: 184048 - DNA, 75 bp, synthetic construct
  source 1..75: mol_type = other DNA
gaactgcgtcagcggctgggctccggtcagtcctccgtggtgtcctacttcctcaacatcacagcattctgcaag

SEQ ID NO: 184049 - DNA, 75 bp, synthetic construct
  source 1..75: mol_type = other DNA
aaacggcctgcaaagttggcaacaatgtgatgctgcgatggtgcgcaattttgctgtacgcagtcgtcgtaaggg

SEQ ID NO: 184050 - DNA, 75 bp, synthetic construct
  source 1..75: mol_type = other DNA
aagataaaattctctccgataactatttcactctgcacaatattacctacgagctcacgcgcaaagagggtgacg

SEQ ID NO: 184051 - DNA, 75 bp, synthetic construct
  source 1..75: mol_type = other DNA
ttatccgccataaacgtgaagtttacgatcgcggtaatggtgcgacgatcctcctgtacaacgcgaagaaaaaga

SEQ ID NO: 184052 - DNA, 75 bp, synthetic construct
  source 1..75: mol_type = other DNA
ctgcgccacccaattcatctcctgccaggacagcgttgccgcattaggtatgcgcgtgctgggtaatccgtacgg

SEQ ID NO: 184053 - DNA, 75 bp, synthetic construct
  source 1..75: mol_type = other DNA
gtgatggaggccgaggatcaggtggcgacgcagggggaagctacgcgcaagtatctcgaccgggaaaaaaaagcg

SEQ ID NO: 184054 - DNA, 75 bp, synthetic construct
  source 1..75: mol_type = other DNA
atactttcaagaagaacggcatagacctgttttccccgacctatatgcagttccgtaactggatagcgatgatcc

SEQ ID NO: 184055 - DNA, 75 bp, synthetic construct
  source 1..75: mol_type = other DNA
ttctcctccttcatgctgtcggtggaggcgcattcatcgtggcaccggttgtttgtcgatccactcagccgcgcc

SEQ ID NO: 184056 - DNA, 75 bp, synthetic construct
  source 1..75: mol_type = other DNA
ggatcaccaaccggctggatgagattatcgaactgctcgggaagtactgctcctgggggatttacggcaactatt

SEQ ID NO: 184057 - DNA, 75 bp, synthetic construct
  source 1..75: mol_type = other DNA
acatggatatccatgacgccgtataccaactggcacaacgtaacttccctgatgagatgcgcgaactggaagcgc

SEQ ID NO: 184058 - DNA, 75 bp, synthetic construct
  source 1..75: mol_type = other DNA
tttatccaccagtgccgggaacagaacatggatatccatgacgccgtataccaactggcacaacgtaacttccct

SEQ ID NO: 184059 - DNA, 75 bp, synthetic construct
  source 1..75: mol_type = other DNA
tctcaccgcaccagatggcagtagcgcatatgttcgttttgctgatttcgccacacaagacgcaccaaccgaagt

SEQ ID NO: 184060 - DNA, 75 bp, synthetic construct
  source 1..75: mol_type = other DNA
gaggacggcacaaaacgttttgccaaaaatgctcgcaaagagggatgtttccatgtcattggcgggctggatgcg

SEQ ID NO: 184061 - DNA, 75 bp, synthetic construct
  source 1..75: mol_type = other DNA
cagcccggatgaactgaaaagcgctctggatgcgcttggcccagaaccgggagataatgaggctgttttccttgg

SEQ ID NO: 184062 - DNA, 75 bp, synthetic construct
  source 1..75: mol_type = other DNA
ccggtggcgcacctgttaggccgtaaatttgaacacgggaaaacagattgctactcgctttttcgtgacgcctat

SEQ ID NO: 184063 - DNA, 75 bp, synthetic construct
  source 1..75: mol_type = other DNA
gttatgccgccgcgcatccgtttgaagaagtttgcggactggtaatagataacgaatatttttacccgtgcgcta

SEQ ID NO: 184064 - DNA, 75 bp, synthetic construct
  source 1..75: mol_type = other DNA
ccgttcaaaggcgctgacccatgccacgcgatgatttacctgggcgataacactgttttgcatcatgacaatgcc

SEQ ID NO: 184065 - DNA, 75 bp, synthetic construct
  source 1..75: mol_type = other DNA
aaacagagcagcggatcaaagagcatcaggaggtgatggccgaggtacaacgtctgacaaatccgcagactgtag

SEQ ID NO: 184066 - DNA, 75 bp, synthetic construct
  source 1..75: mol_type = other DNA
gaaagaagcctatcccgataagccaattattattgccggtgatgatgatatttcacagtcctgcaaaatgaaggt

SEQ ID NO: 184067 - DNA, 75 bp, synthetic construct
  source 1..75: mol_type = other DNA
gggtgaggtgcataacgaggtgcgccgggaaatcagggattctgatttacggcagctggctgcaaccctgaaccg

SEQ ID NO: 184068 - DNA, 75 bp, synthetic construct
  source 1..75: mol_type = other DNA
cctattacagccgtggcactggtgagcagggcgaagaaactattcgggttaattacgaagacagtaatggaaata

SEQ ID NO: 184069 - DNA, 75 bp, synthetic construct
  source 1..75: mol_type = other DNA
accatgagtcctctgcaaagcgtgttgaaaagcagctcgccaaactcaatgaacctcagcagcaaactgcttacc

SEQ ID NO: 184070 - DNA, 75 bp, synthetic construct
  source 1..75: mol_type = other DNA
gggtgacaagaaaggggagaagtcaggtttttatatcatccacactgacggtcatcctgcaggctttatgcagaa

SEQ ID NO: 184071 - DNA, 75 bp, synthetic construct
  source 1..75: mol_type = other DNA
aggaagtgaacaaggaagccgtcctggcggagccggatgcggtgaaagggattgccggtattaaggtgaataaag

SEQ ID NO: 184072 - DNA, 75 bp, synthetic construct
  source 1..75: mol_type = other DNA
aggccgcagccgaggctgcaccgcagacccgcgaagaggtcagccgcgatatccgcaccctgggcgatattcagc

SEQ ID NO: 184073 - DNA, 75 bp, synthetic construct
  source 1..75: mol_type = other DNA
gcaccgcagacccgcgaagaagtcagccgcgatatccgtaccctgggcgatattcagcgagaggcgctgcggctg

SEQ ID NO: 184074 - DNA, 75 bp, synthetic construct
  source 1..75: mol_type = other DNA
acgacaaagctcgtcttgcgcagtggatggcgtatatcaaagcggtaaaagcgctggatttaagcgccgttactg

SEQ ID NO: 184075 - DNA, 75 bp, synthetic construct
  source 1..75: mol_type = other DNA
cgaacggcggcaaaaccaaaacagccaatctgaccaccggaacggtgtcatggcggctgggaacgccatcatgca

SEQ ID NO: 184076 - DNA, 75 bp, synthetic construct
  source 1..75: mol_type = other DNA
gattgaaatgctgcgccgtatgggccttgagcgcttcatccgcacgaaagaggaagtgaataagcaagctgtcct

SEQ ID NO: 184077 - DNA, 75 bp, synthetic construct
  source 1..75: mol_type = other DNA
ggcggagccggatgcggtgaaaggcattgccggtataaaggtgaataaaggcgctgaaagtttttatgtcgagcc

SEQ ID NO: 184078 - DNA, 75 bp, synthetic construct
  source 1..75: mol_type = other DNA
ccattaccgcatcatcattgatgacgccgctgaagtcgctcgtcagatgaaaaaatcgatgccgctggtgaaaga

SEQ ID NO: 184079 - DNA, 75 bp, synthetic construct
  source 1..75: mol_type = other DNA
cgagaatatggctaatctgaagctttacccggatcaacccgttgaagtgctagctgccgacctgcgccgtgcgtt

SEQ ID NO: 184080 - DNA, 75 bp, synthetic construct
  source 1..75: mol_type = other DNA
aaagaagtcggtattcgcgccattgaagagtttggtccttataaaatcaacggcgataaagagattatgcgtcgt

SEQ ID NO: 184081 - DNA, 75 bp, synthetic construct
  source 1..75: mol_type = other DNA
ggcaaatccataacaccgttcgttttccaaacctgaatctcgacaattccgtccacattactaatctggtctttt

SEQ ID NO: 184082 - DNA, 75 bp, synthetic construct
  source 1..75: mol_type = other DNA
gcgaacaaaaatcaggtattgccattaatcctcaccggaccgaaagagagcgccgattacttccgcgtactggac

SEQ ID NO: 184083 - DNA, 75 bp, synthetic construct
  source 1..75: mol_type = other DNA
aacccgctggtcaacgaattgatcatcatgccggatatcgaaaaacgtctggaagcgtttgtccgtatcgctcac

SEQ ID NO: 184084 - DNA, 75 bp, synthetic construct
  source 1..75: mol_type = other DNA
gaattggtatatggctttatcaccgctccgataatccacgagagttaattccggggagaaaagacgatggtaacg

SEQ ID NO: 184085 - DNA, 75 bp, synthetic construct
  source 1..75: mol_type = other DNA
atgtcagcccagctaaccagtgagtctttaaatcagtggcttagtatgggttctctggctgcggtaatcgcaggt

SEQ ID NO: 184086 - DNA, 75 bp, synthetic construct
  source 1..75: mol_type = other DNA
ctacaaaccaactgcatcaatccttatcggcgtagccagcctgatcccaactatcacgcaggattcattcgagaa

SEQ ID NO: 184087 - DNA, 75 bp, synthetic construct
  source 1..75: mol_type = other DNA
gtccctccggaggttgctttaggggctttggctggggcggtaatttttgttacctctgcagtagagtaccccatc

SEQ ID NO: 184088 - DNA, 75 bp, synthetic construct
  source 1..75: mol_type = other DNA
gccgtaccgtttatctccaccacccactacagcctgctggcggcgctgaaacactggggtattaaacccgggcaa

SEQ ID NO: 184089 - DNA, 75 bp, synthetic construct
  source 1..75: mol_type = other DNA
ggcaaccttggttccagcccgttagcggttgcagccagccaacaggtgccgattgaagtcttcttgctggcgtca

SEQ ID NO: 184090 - DNA, 75 bp, synthetic construct
  source 1..75: mol_type = other DNA
agggattgttttctctgctggcgcattcgtgtcagcaattgtcgctgtgcgtattggtatatggctctaccaccg

SEQ ID NO: 184091 - DNA, 75 bp, synthetic construct
  source 1..75: mol_type = other DNA
ctataaatcagggtcttagcatgagcgcgctgatgtctgtgttcgctggagtaccgccagaggtggctttaggag

SEQ ID NO: 184092 - DNA, 75 bp, synthetic construct
  source 1..75: mol_type = other DNA
cgctgaatcaggggcttagcctgagcgcgctaatgtctgtggtcgctggcgtgccgcctgaagtggctttagggg

SEQ ID NO: 184093 - DNA, 75 bp, synthetic construct
  source 1..75: mol_type = other DNA
gcattggcatatggctgtatcaccgttctgaaaatccgcgcgacttgatcccggggagaaaagacgatggtaacg

SEQ ID NO: 184094 - DNA, 75 bp, synthetic construct
  source 1..75: mol_type = other DNA
tacctcggcagttgagtacccaataaaacggcggctgatcctggctattctcagcttcctctgcggagttctctt

SEQ ID NO: 184095 - DNA, 75 bp, synthetic construct
  source 1..75: mol_type = other DNA
cagcaacattcctcatcggctttgcatcctctttccctggcatcaccacagatatgtttgagaaaggggttgcgt

SEQ ID NO: 184096 - DNA, 75 bp, synthetic construct
  source 1..75: mol_type = other DNA
atcggcatagccagcctgatccctaccatcacgcaggactcttttgaaaaagggattgttttctctgctggcgca

SEQ ID NO: 184097 - DNA, 75 bp, synthetic construct
  source 1..75: mol_type = other DNA
agaacattgttttctcacccacggtgacatgccaaccctcaccatcgatatttttagaaaaatctggtcgttacg

SEQ ID NO: 184098 - DNA, 75 bp, synthetic construct
  source 1..75: mol_type = other DNA
gtggcgctgcatcatcgcgatccggcgctgttctgcgcgaaccccgacaatctgaacgaattacgcctgcgtgat

SEQ ID NO: 184099 - DNA, 75 bp, synthetic construct
  source 1..75: mol_type = other DNA
tggcgatgaatgcagtcataacaggaatacaatatacgttactagactggacccctgaatctccagacaaccaat

SEQ ID NO: 184100 - DNA, 75 bp, synthetic construct
  source 1..75: mol_type = other DNA
ggggctgaacgtggcgatctgattgcccagtccgatctggccgctgacattgaagaaaaggatacccaccttttt

SEQ ID NO: 184101 - DNA, 75 bp, synthetic construct
  source 1..75: mol_type = other DNA
agaaaatgcagaaataattttagatattgatactccggacgactttattacagcgaagaaaaggtatactgaaat

SEQ ID NO: 184102 - DNA, 75 bp, synthetic construct
  source 1..75: mol_type = other DNA
aatccagattatgagcagggcttactgacctcggtgaaggctgctgctcccgaagtgcaaaccgaacattgcttt

SEQ ID NO: 184103 - DNA, 75 bp, synthetic construct
  source 1..75: mol_type = other DNA
gtcactcggttctgtcgcacatgttgccccgctttacatggcgcagccagaaccgtcgaaggaggagaaaggacg

SEQ ID NO: 184104 - DNA, 75 bp, synthetic construct
  source 1..75: mol_type = other DNA
ggcatctggctctatcaccgttccgataatccacgcgagttaattccggggagaaaagacgatggtaacgcatga

SEQ ID NO: 184105 - DNA, 75 bp, synthetic construct
  source 1..75: mol_type = other DNA
atcggcatagccagcctgatccctacaatcacacaggattctttcgagaaagggattgttttctctgccggtgca

SEQ ID NO: 184106 - DNA, 75 bp, synthetic construct
  source 1..75: mol_type = other DNA
ggcgcgacggggcttgtcagaacgcttatctggccgttcattttcaaaaactattccgtgcgcgatctggctgaa

SEQ ID NO: 184107 - DNA, 75 bp, synthetic construct
  source 1..75: mol_type = other DNA
cgcgagatccccagcgattttcagatgggcgataccatcacgcttaatctgaaacgcccgtcgtttaaagacgcc

SEQ ID NO: 184108 - DNA, 75 bp, synthetic construct
  source 1..75: mol_type = other DNA
atggaaataacaaaaaataaaaatgcaactataaaaaaacagtcatcaccaggctgcttttcaatgtttacttta

SEQ ID NO: 184109 - DNA, 75 bp, synthetic construct
  source 1..75: mol_type = other DNA
gtcgtggataagagtaaaaccgtaagcgatgttactgcgggtacattttcagcaccagcaactttctctgtgaca

SEQ ID NO: 184110 - DNA, 75 bp, synthetic construct
  source 1..75: mol_type = other DNA
tctgacgccgcagcagcaaacggcagaactgaccggatcggtgaacaaagcgatcatcgacaccgcgcagttttt

SEQ ID NO: 184111 - DNA, 75 bp, synthetic construct
  source 1..75: mol_type = other DNA
gcgagcgtggactggcgtaagtttgacagcggagccagcatcgtgcgggcgctggcttcaggcgatgtgcaaatc

SEQ ID NO: 184112 - DNA, 75 bp, synthetic construct
  source 1..75: mol_type = other DNA
cgattacccaatgagtgcggtgttggtggtcgcaaaagataaaaccgttacagatgtcaccgcgggtaatttcac

SEQ ID NO: 184113 - DNA, 75 bp, synthetic construct
  source 1..75: mol_type = other DNA
cggctccacggctagcgataaagcaagtgctgttgcagttgaagtgtggagtacaagcactccagcagttggtag

SEQ ID NO: 184114 - DNA, 75 bp, synthetic construct
  source 1..75: mol_type = other DNA
tgccacacaattcagttgcgttacccagtcgatcaggaagtgcctattgccacagccacggggaacacagttgta

SEQ ID NO: 184115 - DNA, 75 bp, synthetic construct
  source 1..75: mol_type = other DNA
agggctgatccgcaaactgctggatgtgcagagctttgacagccacgctgcgcaatcgctggctcgtaacccgaa

SEQ ID NO: 184116 - DNA, 75 bp, synthetic construct
  source 1..75: mol_type = other DNA
atcgtcaaagttgatcgcgttggcgatgccgcaaaaatcggcgcaggcgcgacccgtatgaccactaacccgcgc

SEQ ID NO: 184117 - DNA, 75 bp, synthetic construct
  source 1..75: mol_type = other DNA
ggaaatatgctgctgcaccacctgtacggacatctgagccagcgcgtgccgtatggtggctactggcaggaaagg

SEQ ID NO: 184118 - DNA, 75 bp, synthetic construct
  source 1..75: mol_type = other DNA
gcgagcgtggactggcgtaagtttgacagcggggccagcatcgtgcgggcactggcgtcgggcgacgtacaaatc

SEQ ID NO: 184119 - DNA, 75 bp, synthetic construct
  source 1..75: mol_type = other DNA
gctgaaacagccggaaaacatcagcaaactggcgcgtttaagcggcgtgccggaaggtgacgttccggggctggt

SEQ ID NO: 184120 - DNA, 75 bp, synthetic construct
  source 1..75: mol_type = other DNA
ttgaattcaccgaccgcgtcgttgccgtcgtgcgttaccgcgatggctcagtgattgatgttgtacatcaggtga

SEQ ID NO: 184121 - DNA, 75 bp, synthetic construct
  source 1..75: mol_type = other DNA
gattatccgtaagtatgattcttgctgcatcccagttagtcgcgccatcctatgcggctaccgacagtatcggtc

SEQ ID NO: 184122 - DNA, 75 bp, synthetic construct
  source 1..75: mol_type = other DNA
aagcgagccacatgcgagggaactgctaaggaaggtgcgaataagcaggtcatttcttcccaagctgactcgctg

SEQ ID NO: 184123 - DNA, 75 bp, synthetic construct
  source 1..75: mol_type = other DNA
tattatatcgccgggctgattccacttttcccgacctttgcgctcatcgcgcattatattgttgccagcgaacgc

SEQ ID NO: 184124 - DNA, 75 bp, synthetic construct
  source 1..75: mol_type = other DNA
gcttgcccgccgcttttgttggttctgttgcatgctgggggataagcgtatgggtgttgattatatgctggatta

SEQ ID NO: 184125 - DNA, 75 bp, synthetic construct
  source 1..75: mol_type = other DNA
gaaagagcattgcacatgatgaactgcggctatcgtgccggagggcatattttccggggagagggatatacgtgg

SEQ ID NO: 184126 - DNA, 75 bp, synthetic construct
  source 1..75: mol_type = other DNA
ggaataagccgtattgacgggattcaggaagataatgtgacctgggcattgcattctgcctgcctggatgaaaaa

SEQ ID NO: 184127 - DNA, 75 bp, synthetic construct
  source 1..75: mol_type = other DNA
cgctacaaccacgccagacgcgaagaagcgaaacgccatgccttatgctggtgggcagattacgttatgcaggca

SEQ ID NO: 184128 - DNA, 75 bp, synthetic construct
  source 1..75: mol_type = other DNA
ttcagatcgagttgttcggtaactggacgctggacgacgcccgcgactggcatcgtattggcgtgcggcaggcca

SEQ ID NO: 184129 - DNA, 75 bp, synthetic construct
  source 1..75: mol_type = other DNA
agggcttggcgcagtgaaagccttgcgcgaacagtgcccggacaaaatcatcgttgccgactggaaggtcgccga

SEQ ID NO: 184130 - DNA, 75 bp, synthetic construct
  source 1..75: mol_type = other DNA
gttgataaagataaaactgtcagcgacgttaccgctggcacattttctgcaccagcaacatttaccgtgacttac

SEQ ID NO: 184131 - DNA, 75 bp, synthetic construct
  source 1..75: mol_type = other DNA
tttccaccaaagctaaatacttcgctgagaaacctgaactttttgaaaagtatcgtgatgagagattaatccgct

SEQ ID NO: 184132 - DNA, 75 bp, synthetic construct
  source 1..75: mol_type = other DNA
gataatattgaaaacacatcaaaattggtaagaaaagaaaatgacagaaggattgtttcatttgataaaaaatta

SEQ ID NO: 184133 - DNA, 75 bp, synthetic construct
  source 1..75: mol_type = other DNA
cgcgggtgaaacgctcgcgcaacaggcatttggcgcaggcgctaactggatgaccatcatctgcgccgcgccgct

SEQ ID NO: 184134 - DNA, 75 bp, synthetic construct
  source 1..75: mol_type = other DNA
atgctttaagcgttataccggaagattttcacaccagggaatatctggagagctctcgtacccccgatgcgtata

SEQ ID NO: 184135 - DNA, 75 bp, synthetic construct
  source 1..75: mol_type = other DNA
tctggctacccctgaatttttcgccattttggcctcagccgtggacggattttatcggtccaataagcgcacagc

SEQ ID NO: 184136 - DNA, 75 bp, synthetic construct
  source 1..75: mol_type = other DNA
taaaactgctagcgattaacggtattgcaccgactgcggaaaatattcgcaacggcaaatatccctatatcgtcg

SEQ ID NO: 184137 - DNA, 75 bp, synthetic construct
  source 1..75: mol_type = other DNA
gtgcggattcgtgatgccgaagggcgaattgcggcagaaggggcgttgccttatccacctggcgtgctttgcgtg

SEQ ID NO: 184138 - DNA, 75 bp, synthetic construct
  source 1..75: mol_type = other DNA
agtaaagaaatcatggagcttgctgttcggcgcgtatgccagccaacattaacgcttcatcgcagaggacactag

SEQ ID NO: 184139 - DNA, 75 bp, synthetic construct
  source 1..75: mol_type = other DNA
actgcaagcgttgcggctgcagtctcaccatgcttaaacatagcgtttttggtgcaaattcattaaaggctgaat

SEQ ID NO: 184140 - DNA, 75 bp, synthetic construct
  source 1..75: mol_type = other DNA
atctggcttatcatctgcgtcaggatattccggccctctcacaatttgatgctgaacgctgctttcggatcttct

SEQ ID NO: 184141 - DNA, 75 bp, synthetic construct
  source 1..75: mol_type = other DNA
atgtgcaagcggtgggtattcagaccaatgcctcgtttaatttatctgcgttaattgcgacttttcaacatcatc

SEQ ID NO: 184142 - DNA, 75 bp, synthetic construct
  source 1..75: mol_type = other DNA
aagaggaaattaataaagaggcaattcttgcatcaccgaatgaagttaagggaattgcagggatatccattaaat

SEQ ID NO: 184143 - DNA, 75 bp, synthetic construct
  source 1..75: mol_type = other DNA
tacgcgaaaatattgatatcagggcctggcgacccgataaactcaataatcgactgacgccgctgcgtggcaaac

SEQ ID NO: 184144 - DNA, 75 bp, synthetic construct
  source 1..75: mol_type = other DNA
gagggaatgattaaagtcgttgccgaataccgtaatacaaacaacgcaataggttacaccttccgttattacgca

SEQ ID NO: 184145 - DNA, 75 bp, synthetic construct
  source 1..75: mol_type = other DNA
ttaattccctgaccgaacaacaagtgcgtgacatcttcagtggtgcaattaccaactggcgcacggttggcggta

SEQ ID NO: 184146 - DNA, 75 bp, synthetic construct
  source 1..75: mol_type = other DNA
ggattttcgccggagctgcaaggtgtttatagcgaaaccgatgcggatggcgtgaaacggttgtacggttatgtg

SEQ ID NO: 184147 - DNA, 75 bp, synthetic construct
  source 1..75: mol_type = other DNA
tggctgacggtggcctgcgggcagagtccgtacatgcagcgctggaaatgtaccgggatgacctcaaagccaaag

SEQ ID NO: 184148 - DNA, 75 bp, synthetic construct
  source 1..75: mol_type = other DNA
gcggcgcgacggtgaatatcgtctatcccgacgtctattcgtcccgggtatataacaccaccgactattccctcg

SEQ ID NO: 184149 - DNA, 75 bp, synthetic construct
  source 1..75: mol_type = other DNA
cggacgctacgtcaacttaaaattcctgtactgctgatagcccatcggccggaaaccatagcatctgcagatcgg

SEQ ID NO: 184150 - DNA, 75 bp, synthetic construct
  source 1..75: mol_type = other DNA
ttatggcggatactggcaggagcgcacgatgaagatcgttcgctataaagatgtaatggcaggtgaaacatgcag

SEQ ID NO: 184151 - DNA, 75 bp, synthetic construct
  source 1..75: mol_type = other DNA
ccgactcaggaaggggacctcgtcatcatgcaggtgcaggctgataagtggaatcatgccgggattttactggag

SEQ ID NO: 184152 - DNA, 75 bp, synthetic construct
  source 1..75: mol_type = other DNA
gtccgtacatgcagcgctggaaatgtaccgggatgacctcaaagccaaagtagcccggcagaagctgagcccgga

SEQ ID NO: 184153 - DNA, 75 bp, synthetic construct
  source 1..75: mol_type = other DNA
ggttacacccttgccgacatcagaagcacactgaaggaagccggttatgaggtgggcgaaaagacactgagggat

SEQ ID NO: 184154 - DNA, 75 bp, synthetic construct
  source 1..75: mol_type = other DNA
attgatgcaaaaaccagctttgaaatgggcgaagtactgatgaatcccctaatgatttttatcaaaatcattaag

SEQ ID NO: 184155 - DNA, 75 bp, synthetic construct
  source 1..75: mol_type = other DNA
cctcatatcaggaaggttctgttttcatcgatgacatgggatctgctcttatttgtgataaatttaaatgctatt

SEQ ID NO: 184156 - DNA, 75 bp, synthetic construct
  source 1..75: mol_type = other DNA
gttctgtatctggcagacggctgctttatggagctgaggcacaagcgcaccattgatgatgggctgaacaaaaat

SEQ ID NO: 184157 - DNA, 75 bp, synthetic construct
  source 1..75: mol_type = other DNA
ctatacagccctgaaatgactctgatagcggtactggcagcggtcatctatggtgtactgagagcgctgtggtat

SEQ ID NO: 184158 - DNA, 75 bp, synthetic construct
  source 1..75: mol_type = other DNA
ggttacacccttgccgatatcagaagcacactgaaggaagccggatatgaggtgggggaaaagacactgagggat

SEQ ID NO: 184159 - DNA, 75 bp, synthetic construct
  source 1..75: mol_type = other DNA
cctgtttggcacaaattaaacaatatcccttcaaattccgtggtgatttatccggaaataattaatggcaatcct

SEQ ID NO: 184160 - DNA, 75 bp, synthetic construct
  source 1..75: mol_type = other DNA
cggagaaatacgccgctacgacagacaacagaacataatctgtggcgagtgccggaagagtgaagttatgctgcg

SEQ ID NO: 184161 - DNA, 75 bp, synthetic construct
  source 1..75: mol_type = other DNA
atcgccaacgtattcttgacgccgtacctgccgggcacgatttcaccccattgatgacctgttatttaacagatt

SEQ ID NO: 184162 - DNA, 75 bp, synthetic construct
  source 1..75: mol_type = other DNA
gctgcaaaactttacccggcaaacgcaaccactaactccagccacggcgtgacgtcagttgacgcaatcatgccg

SEQ ID NO: 184163 - DNA, 75 bp, synthetic construct
  source 1..75: mol_type = other DNA
ttattttcggaaaaacagccgagataacggaacaatatgtaaaaaaaggcacattgctgtacattcgcgggaaac

SEQ ID NO: 184164 - DNA, 75 bp, synthetic construct
  source 1..75: mol_type = other DNA
tcggcggagaaatacggcgctgtgaaaggcggcaaaaaagggaatatcacgctttacagctttgacgggcgttac

SEQ ID NO: 184165 - DNA, 75 bp, synthetic construct
  source 1..75: mol_type = other DNA
atgagcagaattgaacgtggtggctctaatgcgtctctggatgcgattgaggtgctggctaacgctctgagcgtt

SEQ ID NO: 184166 - DNA, 75 bp, synthetic construct
  source 1..75: mol_type = other DNA
cggttcctaatttaaataacgcatctcaagattgtgtgggaaaaaatttaggccagtttggtagcgatggttatc

SEQ ID NO: 184167 - DNA, 75 bp, synthetic construct
  source 1..75: mol_type = other DNA
ttgttggaagcatgttgtttacggccaataatgttatggctgcagattgggaaccctgtacatcgacttcaggtg

SEQ ID NO: 184168 - DNA, 75 bp, synthetic construct
  source 1..75: mol_type = other DNA
tagcggaaaggaattaatcgacgagctcatttctgagctggttgagttcgtcaaaaagcagaaaccagttaatgc

SEQ ID NO: 184169 - DNA, 75 bp, synthetic construct
  source 1..75: mol_type = other DNA
atggcagtactacggcgacccactgggctatccccggataattgccgccaatccgcacgtggccattacgccggt

SEQ ID NO: 184170 - DNA, 75 bp, synthetic construct
  source 1..75: mol_type = other DNA
tagatgcagcggctggaccattagaacaatactttgcgaaggctcttgcaaactacaaaaacagaggcaccgttt

SEQ ID NO: 184171 - DNA, 75 bp, synthetic construct
  source 1..75: mol_type = other DNA
gccatctactgacggcagcggccttcgatacaatgaatctggcactaaataagactggcaatatagccgataatg

SEQ ID NO: 184172 - DNA, 75 bp, synthetic construct
  source 1..75: mol_type = other DNA
gttgctggcgcgcaggagaagacagcgctgctcaaaggcaaaaaaacggcaatcgataaaatttatccgcgacat

SEQ ID NO: 184173 - DNA, 75 bp, synthetic construct
  source 1..75: mol_type = other DNA
tttattgtcatcaatctccattccatttaaagcgcgtcaggcctggtataatgcaacgaaagcagcagttaataa

SEQ ID NO: 184174 - DNA, 75 bp, synthetic construct
  source 1..75: mol_type = other DNA
cctcaattgccgaccagctccctgtcttacaacgcctgcatctctggctgctgagcctgctttatcttgccacct

SEQ ID NO: 184175 - DNA, 75 bp, synthetic construct
  source 1..75: mol_type = other DNA
ccataacgcgcccgataatggcatgggaaaagcttactgaagccttcattaccgacagattttccggagaacgtg

SEQ ID NO: 184176 - DNA, 75 bp, synthetic construct
  source 1..75: mol_type = other DNA
tgagccttggcagttgttgacgttcgactcatccgaagataacgatccggaactgttggttccatatgctgccga

SEQ ID NO: 184177 - DNA, 75 bp, synthetic construct
  source 1..75: mol_type = other DNA
acagccacaacagccacaacagccacaacagccacaacagccacaacagccacaacagccacaacagccagtgtc

SEQ ID NO: 184178 - DNA, 75 bp, synthetic construct
  source 1..75: mol_type = other DNA
aacgacccggaactgttggttccatacgcggccgatggttcctgttttcaccccggtttggcgagcacccgtgat

SEQ ID NO: 184179 - DNA, 75 bp, synthetic construct
  source 1..75: mol_type = other DNA
ccgtgtctgcaaccgcacccaatttgcaccaggaaaaaatgtcgagcaggtcgaggaaaaattgctgaaagtggt

SEQ ID NO: 184180 - DNA, 75 bp, synthetic construct
  source 1..75: mol_type = other DNA
cactgatgtcagcgttaataaagcaacagcgaagctctacccggtagccaatacgcctgccgcgatgctcgaact

SEQ ID NO: 184181 - DNA, 75 bp, synthetic construct
  source 1..75: mol_type = other DNA
tagcccgattgtacgtgaccggatcgttaaacgttatcatgctaaatccagacaaccgtttgatttaaggagaag

SEQ ID NO: 184182 - DNA, 75 bp, synthetic construct
  source 1..75: mol_type = other DNA
aatatcacctctgatgccgtatttaacttcttcgataatctgttacccgatagcccgattgtacgtgaccggatc

SEQ ID NO: 184183 - DNA, 75 bp, synthetic construct
  source 1..75: mol_type = other DNA
acttcttcgataacctgttacccaatagcccgattgtacgtgaccggatcgttaaacgttatcatgctaaatcca

SEQ ID NO: 184184 - DNA, 75 bp, synthetic construct
  source 1..75: mol_type = other DNA
tcctcactcgcctgcgtgagaacaatcctcatcccacaaccgaacttaatttcagttcaccttttgagctgttga

SEQ ID NO: 184185 - DNA, 75 bp, synthetic construct
  source 1..75: mol_type = other DNA
tgacgctgcgaatcctggtcgatggcccgccgccgtgctccgtgaagggaagcgcggtggaatttggcaatgtgg

SEQ ID NO: 184186 - DNA, 75 bp, synthetic construct
  source 1..75: mol_type = other DNA
cggcaggatggtgtaccgtcgtgcagtcgcgggactgaatgtggcagggctgaagaaaaacgcgcgggatatcag

SEQ ID NO: 184187 - DNA, 75 bp, synthetic construct
  source 1..75: mol_type = other DNA
tattgaagataatcaaaggacccaggaatgggtaacccaggggctttccgaagcgggttatgtcattgatgccgt

SEQ ID NO: 184188 - DNA, 75 bp, synthetic construct
  source 1..75: mol_type = other DNA
aacccctttttagctggaaagccctgggttgggcactgctctacttttggtttttctctactctgctacaggcca

SEQ ID NO: 184189 - DNA, 75 bp, synthetic construct
  source 1..75: mol_type = other DNA
atgagtgaagattatttgaaaatgtttacaggtgttgttctgttaatatttgtcattattggttatttctttaca

SEQ ID NO: 184190 - DNA, 75 bp, synthetic construct
  source 1..75: mol_type = other DNA
ttggcgagcgggtgaaagagctgcgaatagccaccggaatgagccaggaagcctttgccgatctatgcgggtttg

SEQ ID NO: 184191 - DNA, 75 bp, synthetic construct
  source 1..75: mol_type = other DNA
tcaggcaattattggtaatgcgcgggcgtacctgcaaatggaacagaacggcgaaccgtttgccgactttgtctg

SEQ ID NO: 184192 - DNA, 75 bp, synthetic construct
  source 1..75: mol_type = other DNA
caggaagcagtggcgaaagtgtgctatgcacaaatggtgaaacagttcctgagtcgtgacccgttcgaatgcgtg

SEQ ID NO: 184193 - DNA, 75 bp, synthetic construct
  source 1..75: mol_type = other DNA
aataaagatctccaacaggttgaaaagctgatcagcggtgaaataaacacctattcggtaatgactccaacttat

SEQ ID NO: 184194 - DNA, 75 bp, synthetic construct
  source 1..75: mol_type = other DNA
atgagttttgaggatagcgaaaaaacgtccagggtaaccttacagaagtattacaattttgtaatgaaccaggct

SEQ ID NO: 184195 - DNA, 75 bp, synthetic construct
  source 1..75: mol_type = other DNA
ccaggccattattggcaatgcgcgcgcatacctgcaaatggaacagaacggcgaaccatttgccgactttgtctg

SEQ ID NO: 184196 - DNA, 75 bp, synthetic construct
  source 1..75: mol_type = other DNA
aggacccactttatattgcctaccacgataatgagtggggcgtgcctgaaaccgacagtaaaaaactgttcgaaa

SEQ ID NO: 184197 - DNA, 75 bp, synthetic construct
  source 1..75: mol_type = other DNA
gggttgggcactgctctacttttggtttttctctactctgctacaggccattatttacatcagtggttatagtgg

SEQ ID NO: 184198 - DNA, 75 bp, synthetic construct
  source 1..75: mol_type = other DNA
atcctatcggttttttaattaaaagggataaaagcatttggcttttcggtagttatagcggttttactgataata

SEQ ID NO: 184199 - DNA, 75 bp, synthetic construct
  source 1..75: mol_type = other DNA
tttatctgtattatgttgtcatcggtatggtccggagtgatgtggttttttataagggggcttatgacaggctaa

SEQ ID NO: 184200 - DNA, 75 bp, synthetic construct
  source 1..75: mol_type = other DNA
gcttcgacaggttcagaagaatatttatctgtattgtgttgtcatcagtatggtccggagtgatgtggtttttta

SEQ ID NO: 184201 - DNA, 75 bp, synthetic construct
  source 1..75: mol_type = other DNA
attacgccaccagcgtaaaacaggcagtaactgccttgttattaagctcaataaaggcggcattaacacggtcga

SEQ ID NO: 184202 - DNA, 75 bp, synthetic construct
  source 1..75: mol_type = other DNA
atggataatttaatcaacacctaccgacgcagaattttaaaggcagcgttattacgccaccagcgtaaaacaggc

SEQ ID NO: 184203 - DNA, 75 bp, synthetic construct
  source 1..75: mol_type = other DNA
gccattattgctgatccacctaggatatctaatctcttatcaagagcctatcacaaagtgaataatgataagaat

SEQ ID NO: 184204 - DNA, 75 bp, synthetic construct
  source 1..75: mol_type = other DNA
tgatcatcgttcatctgctgggtacacatatcaaatacaagtaccgttacccggaagatcagggcaagtttgatg

SEQ ID NO: 184205 - DNA, 75 bp, synthetic construct
  source 1..75: mol_type = other DNA
gggttgggcactgctctacttttggtttttctctaccctgttacaggccattatttacatcagcggctacagcgg

SEQ ID NO: 184206 - DNA, 75 bp, synthetic construct
  source 1..75: mol_type = other DNA
tctgataaaggacttcagagcaactgcgccggacggctttctgctttatttttcagaccatggtgaagaagtata

SEQ ID NO: 184207 - DNA, 75 bp, synthetic construct
  source 1..75: mol_type = other DNA
tgttattaatatcgcgtgtttatatgtgcttaccgccagtctctggtttctgtgtggtgcaattatgagtcaggg

SEQ ID NO: 184208 - DNA, 75 bp, synthetic construct
  source 1..75: mol_type = other DNA
accgtgttcaataatgtcgtggcatcacgtccgtacaccattgaaatgctgcaacaggcgctgacctttgccaac

SEQ ID NO: 184209 - DNA, 75 bp, synthetic construct
  source 1..75: mol_type = other DNA
taccaacggcgttcgcgactcgctgttgtttagttcgctgtggttgatcccggtattcctcttcccaaggcggat

SEQ ID NO: 184210 - DNA, 75 bp, synthetic construct
  source 1..75: mol_type = other DNA
gccgcaatcagcgccgcagcaggcaccgaccgtaccgctctcagaaaccaccagccaggtgctggcggcgcgcca

SEQ ID NO: 184211 - DNA, 75 bp, synthetic construct
  source 1..75: mol_type = other DNA
cattgagcgcgacccgtgggcggcacaggtgagtcaactttcgctaccaaaactggtcgaacaggtggcgttaaa

SEQ ID NO: 184212 - DNA, 75 bp, synthetic construct
  source 1..75: mol_type = other DNA
gacgaagtgcatatgctgtcgcgtcacagctttaacgcactgttaaaaacccttgaagagccgccggagcacgtt

SEQ ID NO: 184213 - DNA, 75 bp, synthetic construct
  source 1..75: mol_type = other DNA
tgacgagcaggatgcgtggcaacaatacaaaaccgaacacaactgcagattaattgagtcccgcgatgaggataa

SEQ ID NO: 184214 - DNA, 75 bp, synthetic construct
  source 1..75: mol_type = other DNA
accgattattttcaaattaaggtatggggcaaagcagcagaaagcgcgattaaacaccttggaaaaggctctcag

SEQ ID NO: 184215 - DNA, 75 bp, synthetic construct
  source 1..75: mol_type = other DNA
gacgcgacacctgatgaagtttatgacgaagctaaagatattttctttaactactgcaattacgcataccacgaa

SEQ ID NO: 184216 - DNA, 75 bp, synthetic construct
  source 1..75: mol_type = other DNA
gacaccgttactgacagccagtgacaggctgacggtggaaggcaaaatcaccggcaacggtggcatggccatcag

SEQ ID NO: 184217 - DNA, 75 bp, synthetic construct
  source 1..75: mol_type = other DNA
tgagcatgaatgtgatatttttcgcgtgaaatgcaaacgctatgaggttgaggcagaggaaagcgccgcattcac

SEQ ID NO: 184218 - DNA, 75 bp, synthetic construct
  source 1..75: mol_type = other DNA
ctgtataccgatgaaggcgcgaaaatcgtactgaaacgcgggcgggttgttgaaacggactgtgacgtttaccgg

SEQ ID NO: 184219 - DNA, 75 bp, synthetic construct
  source 1..75: mol_type = other DNA
gcaaagaattaccgtatgcgccggaccgccgcatgggcgttgagatgacgctgctgcgcgcgctggcgttccatc

SEQ ID NO: 184220 - DNA, 75 bp, synthetic construct
  source 1..75: mol_type = other DNA
atgcgaaagttcaaaataattattgaaacgggaatagccggtggagattttgaggatgtattcgaagtggacgat

SEQ ID NO: 184221 - DNA, 75 bp, synthetic construct
  source 1..75: mol_type = other DNA
atgcgaaagtttaaaataattattgaaacggaaatagccggtggagatttcgaggatgaattcgaagtggatgat

SEQ ID NO: 184222 - DNA, 75 bp, synthetic construct
  source 1..75: mol_type = other DNA
taattgagtcccgcgacagagataataacgggccggcacgggacgcatggatatgtgatgatggcgcggtttact

SEQ ID NO: 184223 - DNA, 75 bp, synthetic construct
  source 1..75: mol_type = other DNA
attttccggagaacgtggtgacggcagttgaaagcaatgtgttgaggttgcatggacggttaagccgagaatacg

SEQ ID NO: 184224 - DNA, 75 bp, synthetic construct
  source 1..75: mol_type = other DNA
tgcatgaaatcctgagtgactttgccagaatgattccagcagcactggataacgtgaagacttcattaccgacag

SEQ ID NO: 184225 - DNA, 75 bp, synthetic construct
  source 1..75: mol_type = other DNA
attggcgcaacggacggtcatgcaaaaaacttctccgtatttattcaggctggcggcagttatcgactcacgcca

SEQ ID NO: 184226 - DNA, 75 bp, synthetic construct
  source 1..75: mol_type = other DNA
aattcacctaattacgaggacattgcagtagttgaattgcagctctgtattagcctgacagtgacagaatgcgac

SEQ ID NO: 184227 - DNA, 75 bp, synthetic construct
  source 1..75: mol_type = other DNA
gccagaatgattccggcagcactggataacgtgaagacttcattaccgacagattttccggagaacgtggtgacg

SEQ ID NO: 184228 - DNA, 75 bp, synthetic construct
  source 1..75: mol_type = other DNA
gtggttgattggcgcaacagatggccatgcaaatacttctccgtatttattcaggctggcggcagttatcggctc

SEQ ID NO: 184229 - DNA, 75 bp, synthetic construct
  source 1..75: mol_type = other DNA
ggttggtgggtaagtgaccaatatagtacttcatggctaaatacaaagcttgatgaagatgttgttatcttttgc

SEQ ID NO: 184230 - DNA, 75 bp, synthetic construct
  source 1..75: mol_type = other DNA
ggtatcattgttattagttacctgtggttggtgggtaagtgaccaatatagtacttcatggctaaatacaaagct

SEQ ID NO: 184231 - DNA, 75 bp, synthetic construct
  source 1..75: mol_type = other DNA
acatgctgctcagcgctctgctgttctttttctttgtgacctggtcctcatcaagttcactgctctcaatctggc

SEQ ID NO: 184232 - DNA, 75 bp, synthetic construct
  source 1..75: mol_type = other DNA
gccgctgatgataccgccaacatcacgcaacaaccggacgcaaatgtagatattgactggcagggacaggcattt

SEQ ID NO: 184233 - DNA, 75 bp, synthetic construct
  source 1..75: mol_type = other DNA
gcaactgttgttggctgatggtaaacacagcgccgaagaagagcgccaggcgattcagtatctgctggatctacg

SEQ ID NO: 184234 - DNA, 75 bp, synthetic construct
  source 1..75: mol_type = other DNA
ggagttggtttaacagggcttgttttggctattatttactgcaagttgatggataacaaaaattcacaagtaata

SEQ ID NO: 184235 - DNA, 75 bp, synthetic construct
  source 1..75: mol_type = other DNA
atccgttacctgcaggggattgagcataacggtgagcccttcaccatccgtgactggatgcgtggtgtgcgtatt

SEQ ID NO: 184236 - DNA, 75 bp, synthetic construct
  source 1..75: mol_type = other DNA
tccggctaaaatttacggcgcagctgccgctgatgataccgtcaacatcacgcaacaaccggacgcaaatgtaga

SEQ ID NO: 184237 - DNA, 75 bp, synthetic construct
  source 1..75: mol_type = other DNA
ccctgaaatatcaggcacgtccgaaggttgccccggagtttattccgcgtgaaatcaacccggaaatggagagcc

SEQ ID NO: 184238 - DNA, 75 bp, synthetic construct
  source 1..75: mol_type = other DNA
aaaggacggcgtttttgccaatttcgttgaccaggcgcgagtcagtcagtttatggagaaagtgcatcatatacg

SEQ ID NO: 184239 - DNA, 75 bp, synthetic construct
  source 1..75: mol_type = other DNA
cagaggccgccgtgtatctgggcaatcgcgatatctgttctattgctaaatcgacagtatttaacggtgatgctg

SEQ ID NO: 184240 - DNA, 75 bp, synthetic construct
  source 1..75: mol_type = other DNA
ggacggaaaaagcggtcatcgccatgtgccatctacgtgcattgcccggcgacccgagttttgatgcgcagttgg

SEQ ID NO: 184241 - DNA, 75 bp, synthetic construct
  source 1..75: mol_type = other DNA
acgtcagattctgaacgatgattacaccgtatattgcggtcagttgctgaagcaggaactgattattgccggttg

SEQ ID NO: 184242 - DNA, 75 bp, synthetic construct
  source 1..75: mol_type = other DNA
ttccaatttcgaaaacaatcctgacaataccacgctcacgacattttttaagattttacagtcgcttgaactctc

SEQ ID NO: 184243 - DNA, 75 bp, synthetic construct
  source 1..75: mol_type = other DNA
aacaccacactaacgacattttttaagatattacagtcacttaatctctcgatgacgctatgcgacacgaaaaat

SEQ ID NO: 184244 - DNA, 75 bp, synthetic construct
  source 1..75: mol_type = other DNA
gcacaaacaggaaatgtaaatcttgtatctacaggtgctatgggctttatggctgggtttttgggggctttattg

SEQ ID NO: 184245 - DNA, 75 bp, synthetic construct
  source 1..75: mol_type = other DNA
tgttgagcttgaagccgtgcagaagacatcagcggcacgaatcgaagctatagaccgcactcacaaaatgttcca

SEQ ID NO: 184246 - DNA, 75 bp, synthetic construct
  source 1..75: mol_type = other DNA
acggcaaaaccttccggatgaacgcggctcaggtactgcatgataaatacatgatctggtgcggtgagcagctat

SEQ ID NO: 184247 - DNA, 75 bp, synthetic construct
  source 1..75: mol_type = other DNA
aatggagcaattccgccctaatctggtggtttccggcgcgtcagcctgggaagaagatcgctggaaagtgattcg

SEQ ID NO: 184248 - DNA, 75 bp, synthetic construct
  source 1..75: mol_type = other DNA
cttatgcttccctggctgggtgttttgttagtctcattagtcggtggtgagtactggtggatagtcattattccc

SEQ ID NO: 184249 - DNA, 75 bp, synthetic construct
  source 1..75: mol_type = other DNA
gtggagtggtttttaacgccgcaggggcagagtttggtggaagatgtgggctatgtgccgatggataaaacgttg

SEQ ID NO: 184250 - DNA, 75 bp, synthetic construct
  source 1..75: mol_type = other DNA
atctggcagattatcaatttcgccagatgggatcgggctggttggcaaaccttatgctttcctggcagggtgttt

SEQ ID NO: 184251 - DNA, 75 bp, synthetic construct
  source 1..75: mol_type = other DNA
ggtcgtgattatgatccggatgtactgcagcaggcggtgaatgatgcggttgcgaatattccggtaccggcggac

SEQ ID NO: 184252 - DNA, 75 bp, synthetic construct
  source 1..75: mol_type = other DNA
atgatcaaactgaagacgccaaactctatggagattgccgggcaacctgctgttatcacctacgtgccggagctg

SEQ ID NO: 184253 - DNA, 75 bp, synthetic construct
  source 1..75: mol_type = other DNA
aacggcaaatatccgtatatcgtcgatgcctttatggtaacgcgggaaaatactacgtcagaaacacaaaaactg

SEQ ID NO: 184254 - DNA, 75 bp, synthetic construct
  source 1..75: mol_type = other DNA
gttgataaactcaactttaatataaagcaggttggtagaaggatattagaaataaataaggatctaaattatgaa

SEQ ID NO: 184255 - DNA, 75 bp, synthetic construct
  source 1..75: mol_type = other DNA
gctctttggtctgctattatgggtaaaaataagctggcagacgtttataaacggctgtatttactggtggtgtac

SEQ ID NO: 184256 - DNA, 75 bp, synthetic construct
  source 1..75: mol_type = other DNA
tctcgttggtctgctattatgggtaaaaataagctggcagacgtttataaacggctgtatttactggtggtgtac

SEQ ID NO: 184257 - DNA, 75 bp, synthetic construct
  source 1..75: mol_type = other DNA
ttcgctgagattaattgatcaggctattgattcggtctgccaaagtagaggtggttatttattcgagtcgataaa

SEQ ID NO: 184258 - DNA, 75 bp, synthetic construct
  source 1..75: mol_type = other DNA
gaaagaagtagtatcagtaatttttcatatgttgcttcttttgatgaaatacaagaaaatgattttaatttaaat

SEQ ID NO: 184259 - DNA, 75 bp, synthetic construct
  source 1..75: mol_type = other DNA
gtatagagttaaatcacgaagtacgtagagatatatctatacagtttagagtaaacaaagcagagtttgaatatt

SEQ ID NO: 184260 - DNA, 75 bp, synthetic construct
  source 1..75: mol_type = other DNA
gcgggaacaatgggcgcaacatatcgtgcaggatggcgaccagatcctgctttttcaagttattgcagggggttg

SEQ ID NO: 184261 - DNA, 75 bp, synthetic construct
  source 1..75: mol_type = other DNA
gtattcgtacctggatattgcgcaatttaccaatgggaattgcacacggtacaggtatcggtattggtctgttcc

SEQ ID NO: 184262 - DNA, 75 bp, synthetic construct
  source 1..75: mol_type = other DNA
tatcccgctggtgccagtgccattcttaatgccattcgtacgctgattaccttacgcacgcgcagcttatgggta

SEQ ID NO: 184263 - DNA, 75 bp, synthetic construct
  source 1..75: mol_type = other DNA
tctggcggatgcagcaaagagggattgatccgtttaaagtggagaaaaccccttccgccgtagacgaaaggggct

SEQ ID NO: 184264 - DNA, 75 bp, synthetic construct
  source 1..75: mol_type = other DNA
tggcgaagatggaaaatctctgattttcagcctggatattatgggcgcgctccagccaaccgtacttccaagtgt

SEQ ID NO: 184265 - DNA, 75 bp, synthetic construct
  source 1..75: mol_type = other DNA
gtctttgcgcgcgaatggcacaaactgaatatcggtaccgttatcattaccgtcgctctggtcgcgttttacgcg

SEQ ID NO: 184266 - DNA, 75 bp, synthetic construct
  source 1..75: mol_type = other DNA
ttgcgccatttccttgacagcatttaccgcattcagcctggtacttgggcaacaaattagcgttccggtagcact

SEQ ID NO: 184267 - DNA, 75 bp, synthetic construct
  source 1..75: mol_type = other DNA
tttcgagttaggtaatgactggacggcaaatttaggcggggcagggaatcttgcaatcagcgccagcgtgttccg

SEQ ID NO: 184268 - DNA, 75 bp, synthetic construct
  source 1..75: mol_type = other DNA
gacgggatgcgtatcgggtcgactcttagctatttaaaccaggcgcaaagccagcagggaaccccggtaatggtc

SEQ ID NO: 184269 - DNA, 75 bp, synthetic construct
  source 1..75: mol_type = other DNA
gatgcagatgatgtcagcgacaacaatgtcgatgtcagcgatctctattaccgctatgattttttacgccgttat

SEQ ID NO: 184270 - DNA, 75 bp, synthetic construct
  source 1..75: mol_type = other DNA
tctgggcagggtcgattggcggcacaatgattgagggcagttttctgttgatgaatggcctgaacattattcgtt

SEQ ID NO: 184271 - DNA, 75 bp, synthetic construct
  source 1..75: mol_type = other DNA
taatcagcgagtcagcttgggaagaaatgacctgcttattcgcaccttccctagtaccgtttaccaaaacaggcg

SEQ ID NO: 184272 - DNA, 75 bp, synthetic construct
  source 1..75: mol_type = other DNA
ggtagaaataatcttcaatgatgaggaaagttcagcaacgctctttctcaatccgcaatggagttctgcatttga

SEQ ID NO: 184273 - DNA, 75 bp, synthetic construct
  source 1..75: mol_type = other DNA
ccgtcgccggtcaggcgaatctgctggataaagacaaccaaataatcaacggtggcaaagccctgaccagtgact

SEQ ID NO: 184274 - DNA, 75 bp, synthetic construct
  source 1..75: mol_type = other DNA
atgaatatgatgaccgtgccgtttcacggcaactctctttatgtagttaaccataatggcgagccatacgttccc

SEQ ID NO: 184275 - DNA, 75 bp, synthetic construct
  source 1..75: mol_type = other DNA
ctatagcagaaaaatgcggttattcaagcaggtcctactttatttctgtatttcaccgctattatggcttcccgc

SEQ ID NO: 184276 - DNA, 75 bp, synthetic construct
  source 1..75: mol_type = other DNA
acatctctataaaaatgatttagaaaaagtgaaggctcttcagaaagaggggttcatgagcaccctaccagtcat

SEQ ID NO: 184277 - DNA, 75 bp, synthetic construct
  source 1..75: mol_type = other DNA
ctcagccgaatcttcctgctctaacgtccaccatacaggcgataaaaagaatatcgccctacccgacagatacgc

SEQ ID NO: 184278 - DNA, 75 bp, synthetic construct
  source 1..75: mol_type = other DNA
gctgaatgagtggaaacaggttaaagccgcgcatgtatcaaaaatccgtacgctggtaaatgaagcgaatatgct

SEQ ID NO: 184279 - DNA, 75 bp, synthetic construct
  source 1..75: mol_type = other DNA
gccgcgcatgtatcaaaaatccgcacattgataaacgaagcgaatctgctgattgattttgtcctggctgataca

SEQ ID NO: 184280 - DNA, 75 bp, synthetic construct
  source 1..75: mol_type = other DNA
tgccactaccagaacgccgcaggagtcgaacagtgaataaagcagagttatttcagaaaatatcggctctcgcga

SEQ ID NO: 184281 - DNA, 75 bp, synthetic construct
  source 1..75: mol_type = other DNA
gaaggcttaccggttgcgctcggcgcgtttacctccttcccggtgctgatgagcttgctgggattagcggtgatt

SEQ ID NO: 184282 - DNA, 75 bp, synthetic construct
  source 1..75: mol_type = other DNA
ttgcgccatttccttaacggcatttaccgcattcagtctggtgctcgggcaacaaattagcgttccggtagcact

SEQ ID NO: 184283 - DNA, 75 bp, synthetic construct
  source 1..75: mol_type = other DNA
ggattctagtagtccgatcagtcgtggcatttcttcaatatttaatcatgtccatcatgagatttccgctgttaa

SEQ ID NO: 184284 - DNA, 75 bp, synthetic construct
  source 1..75: mol_type = other DNA
tcatacaatatagacatgggatagttcatcactttgagttggataggaccttaaatcgggatggatatattcata

SEQ ID NO: 184285 - DNA, 75 bp, synthetic construct
  source 1..75: mol_type = other DNA
tatcaaaaattcgcacgttgataaacgaagcgaatctgctgattggttttgtcctggctgatacaggcaaaggaa

SEQ ID NO: 184286 - DNA, 75 bp, synthetic construct
  source 1..75: mol_type = other DNA
gacggacgtcacgcgctcgccgggatgtatggtcaacctgggaatgacgatcccggagctggggaaaaccggaca

SEQ ID NO: 184287 - DNA, 75 bp, synthetic construct
  source 1..75: mol_type = other DNA
cgtccccaatcctgcccaaagaacgctggcgttatcagatggtgaatatgtatccggacagcggacagtgccacc

SEQ ID NO: 184288 - DNA, 75 bp, synthetic construct
  source 1..75: mol_type = other DNA
gtgccacccgttcgggcgcagcgtgacccgctgggaaaccgggaaaaatccgcccaacacaaagaaaaacttcgg

SEQ ID NO: 184289 - DNA, 75 bp, synthetic construct
  source 1..75: mol_type = other DNA
tcctgttcctctgcacgcccgtcgcggtttcagcggcgtccacgaatgctggtgacggccgctgggttaatccca

SEQ ID NO: 184290 - DNA, 75 bp, synthetic construct
  source 1..75: mol_type = other DNA
ctgacctccattctgaacccggaggcggtcatttttgccaaccccatcgcgcagggcgcatgtgcggccgacgcg

SEQ ID NO: 184291 - DNA, 75 bp, synthetic construct
  source 1..75: mol_type = other DNA
gcccgctgcagtcttccctgctggtcagtgaacgcatggcgttcaagctgcaccgtcagggcatgataatgaaca

SEQ ID NO: 184292 - DNA, 75 bp, synthetic construct
  source 1..75: mol_type = other DNA
ctggatgtatacgcgcggggataaaatttacggcggttataccattgatcctttattggtcacctatccaaaaga

SEQ ID NO: 184293 - DNA, 75 bp, synthetic construct
  source 1..75: mol_type = other DNA
cgtggaaataaccaacaggtgttgctggagcaattagaaaatcagggaattcgtatcccttattcttgccgcgcg

SEQ ID NO: 184294 - DNA, 75 bp, synthetic construct
  source 1..75: mol_type = other DNA
ccatcgggcagaacacggcagtctgttacgaatatccgtccccaatccttcccaaagaacgctggcgttaccaga

SEQ ID NO: 184295 - DNA, 75 bp, synthetic construct
  source 1..75: mol_type = other DNA
atttttaaacgtatcggactggccatcgggtactgggagccgatggccctgacggatgtcacccgttctccgggg

SEQ ID NO: 184296 - DNA, 75 bp, synthetic construct
  source 1..75: mol_type = other DNA
gtgaatctggggggctttaatatcaatatcgggaatgtcggcagcggcagtggtggtcaggaaagccgcgctaaa

SEQ ID NO: 184297 - DNA, 75 bp, synthetic construct
  source 1..75: mol_type = other DNA
cgctgatgttgttatgcctgactgggacggccagggccgcttcggctgaatgtgaaggcaattttgtcaatccaa

SEQ ID NO: 184298 - DNA, 75 bp, synthetic construct
  source 1..75: mol_type = other DNA
cattgaattcgctgacggtgcaataaatataaccacgcctaacccactaaatatcaaatgctcatcgttaaatat

SEQ ID NO: 184299 - DNA, 75 bp, synthetic construct
  source 1..75: mol_type = other DNA
atccgcaatggaattcagctttcgatgcgaagtcattatatttaaatccagacaaaaatactgttaacgctttta

SEQ ID NO: 184300 - DNA, 75 bp, synthetic construct
  source 1..75: mol_type = other DNA
agccacgcaagcaccttaaaatcaccatcatacactaaatcagtaagttggcagcattaccggaatttcaacggt

SEQ ID NO: 184301 - DNA, 75 bp, synthetic construct
  source 1..75: mol_type = other DNA
tgtttgatctgattaaaacgcacttcgcctcactgatggagagccgttacctggcgctttcatttgagattgcag

SEQ ID NO: 184302 - DNA, 75 bp, synthetic construct
  source 1..75: mol_type = other DNA
tatcgcgaagtgtctgccagctttaactacaactatatcggtcgtttattactgccggcagcggtgaaaaaattc

SEQ ID NO: 184303 - DNA, 75 bp, synthetic construct
  source 1..75: mol_type = other DNA
gttagcccgccacggcgaattagcatgtggttttgttcgtactgactcagggtgtggctttcttaataccgatac

SEQ ID NO: 184304 - DNA, 75 bp, synthetic construct
  source 1..75: mol_type = other DNA
atccccaatggagttcttcgttaaattcaaaatcgctatatttaaatccagatagaaacgcgattaatgcattta

SEQ ID NO: 184305 - DNA, 75 bp, synthetic construct
  source 1..75: mol_type = other DNA
tcacggatatctgctggagctgcatcttccctctctcgttgggcagcacaaaagtgagccagggaaaggtgccgg

SEQ ID NO: 184306 - DNA, 75 bp, synthetic construct
  source 1..75: mol_type = other DNA
ctgaccaccattctcaatccggaagctgtcatctttgccaatccgatagcacagggggcctgtgcagcagatgcc

SEQ ID NO: 184307 - DNA, 75 bp, synthetic construct
  source 1..75: mol_type = other DNA
gggtgaggcaccagatttagttgttgatgctcttcctttgcttaccagaacagaccgtacaggaaaaatgatttc

SEQ ID NO: 184308 - DNA, 75 bp, synthetic construct
  source 1..75: mol_type = other DNA
ccgggcacactggatcgatacctggcaaatggctgatggcaagcacgattacgcctttgtgcatatgacgctaaa

SEQ ID NO: 184309 - DNA, 75 bp, synthetic construct
  source 1..75: mol_type = other DNA
actcatgtattatacccggattggagggagcggttgaataaacttaatacgatcagtagccaggaaaagattaca

SEQ ID NO: 184310 - DNA, 75 bp, synthetic construct
  source 1..75: mol_type = other DNA
gcagtgccatccgttcggacgcagtgtgatgcgctgggagacgggaaaaatccgcccaacactaagaaaaacttc

SEQ ID NO: 184311 - DNA, 75 bp, synthetic construct
  source 1..75: mol_type = other DNA
ttgaccaagagggttcaccggattttccccgatgctgatgtccgggttaaaccgatgatgacgctgccggcgatc

SEQ ID NO: 184312 - DNA, 75 bp, synthetic construct
  source 1..75: mol_type = other DNA
cgcaactggacagtggcaagctcgactgcgtgatcctcgcgctggtgaaagaaagcgaagcattcattgaagtgc

SEQ ID NO: 184313 - DNA, 75 bp, synthetic construct
  source 1..75: mol_type = other DNA
ctgcgtgatcctcgcgctggtaaaagagagcgaagcattcattgaagtgccgttgtttgatgagccaatgctgct

SEQ ID NO: 184314 - DNA, 75 bp, synthetic construct
  source 1..75: mol_type = other DNA
cattccgtccgacagcgaactggcggagcgggtgaaagaacaggtggcatctgccctgcagcagtcttcaggcaa

SEQ ID NO: 184315 - DNA, 75 bp, synthetic construct
  source 1..75: mol_type = other DNA
atgctctctcctgccgactttggcccgaaactgctggaagtgatcaaagagcatttcccgcaggatgtgaagtaa

SEQ ID NO: 184316 - DNA, 75 bp, synthetic construct
  source 1..75: mol_type = other DNA
ccgtaaggccgcagccggcttcagtaactgctgtaaggatggcggctggggtcaggatgtggggctggcgaagtg

SEQ ID NO: 184317 - DNA, 75 bp, synthetic construct
  source 1..75: mol_type = other DNA
gtgcctggtttgaagattacgcttttgcagcaaccgatggatggccctgccaacctgcgtcattttgatcgtcaa

SEQ ID NO: 184318 - DNA, 75 bp, synthetic construct
  source 1..75: mol_type = other DNA
gaagcggcggtttcatcgctatcgcaagataacgtcgtgggctggatggccgcaaaagcacaacagtgtaatgcg

SEQ ID NO: 184319 - DNA, 75 bp, synthetic construct
  source 1..75: mol_type = other DNA
attgtcgggatctgcacagccattttcgttgccagcgtattgtggataagttcgttagccgccagtcgtattacc

SEQ ID NO: 184320 - DNA, 75 bp, synthetic construct
  source 1..75: mol_type = other DNA
gtgtcatgttcttattgcggcttcacatccacatatacagctcacacagttgttcgttgggcaagagataaagga

SEQ ID NO: 184321 - DNA, 75 bp, synthetic construct
  source 1..75: mol_type = other DNA
ttagcgtgctgaaactgcaacttttcgtctatggctatatgggattgatgtctggtgctgcgggtgtagtgcagt

SEQ ID NO: 184322 - DNA, 75 bp, synthetic construct
  source 1..75: mol_type = other DNA
tggtctgccgctgatcgccatgattacggtggtgctgctaacagcgtttatcatgaatttcaccagtgtagggcg

SEQ ID NO: 184323 - DNA, 75 bp, synthetic construct
  source 1..75: mol_type = other DNA
ttacaccgtttacagcgactgctgggcctggaaggacacttatctgagtcaggaagcggataatggcagttgtga

SEQ ID NO: 184324 - DNA, 75 bp, synthetic construct
  source 1..75: mol_type = other DNA
cctgcgcgaactggcactgcgccgtactgccgatcgcgtagatgagcaaatgcgcgcctggcgaggtcgtcctgg

SEQ ID NO: 184325 - DNA, 75 bp, synthetic construct
  source 1..75: mol_type = other DNA
atgagacaaagtattacggtggcgtgactgccggcggggatggtgggctgaagaataacggcaccacggaatggg

SEQ ID NO: 184326 - DNA, 75 bp, synthetic construct
  source 1..75: mol_type = other DNA
ggcaggcagtgaagtatattcaacttcagcgtcaaaatacgaaaacaacctggcgtggagtcttggggtcggtgt

SEQ ID NO: 184327 - DNA, 75 bp, synthetic construct
  source 1..75: mol_type = other DNA
agaaaatcccggacagtggcgttctgacgcagaaagtgaaagagcagattgctgaccagctgaaacaggcaggac

SEQ ID NO: 184328 - DNA, 75 bp, synthetic construct
  source 1..75: mol_type = other DNA
ccctggctaaagcaaaatcaaacaaactgactgaaccgccccggaaatcctggagactaaactccctgagaaaga

SEQ ID NO: 184329 - DNA, 75 bp, synthetic construct
  source 1..75: mol_type = other DNA
cgtatcgggtttggcagcgccaaaagtcctgactgccgtggaataaccgtggatgaactgcagcgtattaagttc

SEQ ID NO: 184330 - DNA, 75 bp, synthetic construct
  source 1..75: mol_type = other DNA
tttatgtcgggacctactgctcgaagaaagtgctcggcgtctgtctgcagaagaaaaaagcctactgtcagtttg

SEQ ID NO: 184331 - DNA, 75 bp, synthetic construct
  source 1..75: mol_type = other DNA
cttcttaaactcccgttatacctttctgaactctacttttaatgtggggctgacaaacggacaaagcggcacttt

SEQ ID NO: 184332 - DNA, 75 bp, synthetic construct
  source 1..75: mol_type = other DNA
gacatcggaggtgattatgaatcggccgaaggaccctatttccatggatgcccccttcctcagtggcgggttcga

SEQ ID NO: 184333 - DNA, 75 bp, synthetic construct
  source 1..75: mol_type = other DNA
caacgatcaggaattcgatcttaccgggtgttttgtgactctcgaagcctggggggatgtttccagtgaacgtgc

SEQ ID NO: 184334 - DNA, 75 bp, synthetic construct
  source 1..75: mol_type = other DNA
aagctcaactatgcagtggtcagctggtttgtgcaaacggtgaatgtgatgccattgaaaacaatacgtctgatg

SEQ ID NO: 184335 - DNA, 75 bp, synthetic construct
  source 1..75: mol_type = other DNA
cagggaagtcagtgtacggaagccggaggaaacaggacgattaatatcgacgggaaaacctataccgtttacagc

SEQ ID NO: 184336 - DNA, 75 bp, synthetic construct
  source 1..75: mol_type = other DNA
cgaagagtggaactggcgcagcgatatccactcaagcaaagacggcacgcttctggaacgcaccataacggtgac

SEQ ID NO: 184337 - DNA, 75 bp, synthetic construct
  source 1..75: mol_type = other DNA
gaaatgccatcgagcggatgcgtaatgagacgctggcgctgtggatcgcagataaccagcttaagtcgcaagata

SEQ ID NO: 184338 - DNA, 75 bp, synthetic construct
  source 1..75: mol_type = other DNA
atcaccatcaatctttgcatctggtattccagtagtagacgttacagcgatagctaaaacagttgaagaagggct

SEQ ID NO: 184339 - DNA, 75 bp, synthetic construct
  source 1..75: mol_type = other DNA
agcaatgaatatatgggtaaaccccgggacgcttatctctggcaagttaccgcatgttttagaagactatggtga

SEQ ID NO: 184340 - DNA, 75 bp, synthetic construct
  source 1..75: mol_type = other DNA
tataagttctatgcatttgttatttgttttaataacggcttgtctattcttttttatagggtgttacgtgggtta

SEQ ID NO: 184341 - DNA, 75 bp, synthetic construct
  source 1..75: mol_type = other DNA
acacggtaaatagctgcgcggttggcgaatacaaaagcgagttgagcggtgcggatatcatcatcgcttctaccc

SEQ ID NO: 184342 - DNA, 75 bp, synthetic construct
  source 1..75: mol_type = other DNA
gttcagtcaggttgtaagttcttcctggatacgtgattatacgagaggtgagttcagaacaatatcaaccctgga

SEQ ID NO: 184343 - DNA, 75 bp, synthetic construct
  source 1..75: mol_type = other DNA
gccggatgtctttacgaattatataaataaaaatgacgtactggcgtggggaagcggatttctttcccggtttct

SEQ ID NO: 184344 - DNA, 75 bp, synthetic construct
  source 1..75: mol_type = other DNA
aggaaaaaaacactgagactgtcagatgaagcaatagccgactggcaggaaaatcatgccgtaattcaaagaatg

SEQ ID NO: 184345 - DNA, 75 bp, synthetic construct
  source 1..75: mol_type = other DNA
tctttgctggaataattaccgtaacatcaccatcaatctttgcatctggtattccagtagtagacgttacagcga

SEQ ID NO: 184346 - DNA, 75 bp, synthetic construct
  source 1..75: mol_type = other DNA
ctgaaagttatatgaaaacaagactttcagatctaagtgaccactcaaaagaaaacgtgaactctttaagagata

SEQ ID NO: 184347 - DNA, 75 bp, synthetic construct
  source 1..75: mol_type = other DNA
agttcgtaacaataccaaccctggtggagtttcataaaaagattaacgggtttctgtcaagccatagcattaatt

SEQ ID NO: 184348 - DNA, 75 bp, synthetic construct
  source 1..75: mol_type = other DNA
acattcatagattctttacctgttgaggtaaaaagagatgctcgatatttatcaaagttcgttgctggtgcggct

SEQ ID NO: 184349 - DNA, 75 bp, synthetic construct
  source 1..75: mol_type = other DNA
atggggccccaaatgattacatacactacacgggacggtgaccgtctcgatcagatctgccttgcggtctacggg

SEQ ID NO: 184350 - DNA, 75 bp, synthetic construct
  source 1..75: mol_type = other DNA
ctacaggcattttgtataaggttgatggcgaatacgtttattactttcacaaccaggcgcgtgagtggcgattgt

SEQ ID NO: 184351 - DNA, 75 bp, synthetic construct
  source 1..75: mol_type = other DNA
tatactcattgcactgggctttaacccactaaaagcagcgattgcgtcactggttgctaatacagtccctacagc

SEQ ID NO: 184352 - DNA, 75 bp, synthetic construct
  source 1..75: mol_type = other DNA
ttgctatggcaaacgcaaagataagctaatcaaaagcgtggtcttcggttcgctgctggcgctggtgatttatct

SEQ ID NO: 184353 - DNA, 75 bp, synthetic construct
  source 1..75: mol_type = other DNA
atattcccagcctgattatttgctatggcaaacgcaaagataagctaatcaaaagcgtggttttcggttcgctgc

SEQ ID NO: 184354 - DNA, 75 bp, synthetic construct
  source 1..75: mol_type = other DNA
gcggcaatctcattccggcgattgttatcctctttggtataactgtgattttatgctggttcggtaacgtcttta

SEQ ID NO: 184355 - DNA, 75 bp, synthetic construct
  source 1..75: mol_type = other DNA
ccattcgcggcgtatttctgatcacgttgatttgcggcatttccacgctggttccgcaatattttgtcgccatcc

SEQ ID NO: 184356 - DNA, 75 bp, synthetic construct
  source 1..75: mol_type = other DNA
tcttgaggcggcagccggttacggtacagctgtagcaatccccattggtatactgattgcactgggctttaaccc

SEQ ID NO: 184357 - DNA, 75 bp, synthetic construct
  source 1..75: mol_type = other DNA
gccatttacagctataacctgatgaatgcgacaaaaagcatggatattctgagaaatgttctggcgagcgttagt

SEQ ID NO: 184358 - DNA, 75 bp, synthetic construct
  source 1..75: mol_type = other DNA
gccgatagtgattgtcatacttgcggccatttacagctataacctgatgaatgcgacaaaaagcatgaacattct

SEQ ID NO: 184359 - DNA, 75 bp, synthetic construct
  source 1..75: mol_type = other DNA
tgtcagtacggtaaaacagctcaaaaactccattattgctatttctgcaattgtcgctatggcaacggtaatgga

SEQ ID NO: 184360 - DNA, 75 bp, synthetic construct
  source 1..75: mol_type = other DNA
ctgtaaaaagtgcagtatctcaggttgcttcgtcactcagcttccctctgactgacggcaacaatctgtctatga

SEQ ID NO: 184361 - DNA, 75 bp, synthetic construct
  source 1..75: mol_type = other DNA
ccatacaggattcgccaaccgaagtgtggggcaatcattttaccgcgcgaattgcgccagatgcgatcaacaaat

SEQ ID NO: 184362 - DNA, 75 bp, synthetic construct
  source 1..75: mol_type = other DNA
aaattcgctaaaggctctaacgtatatcagaacatctacggggctgcttccagcacctttgaactgattaatacc

SEQ ID NO: 184363 - DNA, 75 bp, synthetic construct
  source 1..75: mol_type = other DNA
atattatggagaaagcacaaagccaggcggctgctgtagagcgtatcgtagtattctgtaagcctgcggcattca

SEQ ID NO: 184364 - DNA, 75 bp, synthetic construct
  source 1..75: mol_type = other DNA
acaccacgtagcgtatcagcgcactaaagagagcgtattggctgcttctttgttctctggcaagacacatacccc

SEQ ID NO: 184365 - DNA, 75 bp, synthetic construct
  source 1..75: mol_type = other DNA
aagtttgctaaaggctctaatgtatatcagaacatctacggggctgcttccagcacctttgaactgattaatgcc

SEQ ID NO: 184366 - DNA, 75 bp, synthetic construct
  source 1..75: mol_type = other DNA
actaacattgatgttgttaaactggtagatccgctacaccttgcacatatgaccgcagacgctgtagcggttccg

SEQ ID NO: 184367 - DNA, 75 bp, synthetic construct
  source 1..75: mol_type = other DNA
agtgcacgtagtgaccgagaatagccagatggtggtaaaccacggtgtaggcttctccgttcaaatcactgttaa

SEQ ID NO: 184368 - DNA, 75 bp, synthetic construct
  source 1..75: mol_type = other DNA
aagacagcctatgaccttgctaacgggaaatataccgctcaggacgccacgacggcacgaaaaggaatagtccaa

SEQ ID NO: 184369 - DNA, 75 bp, synthetic construct
  source 1..75: mol_type = other DNA
gccacagtggattacgtggataacaaactgaaagagcatgaacagtcacgacgtcacccggatgcctcgctgacc

SEQ ID NO: 184370 - DNA, 75 bp, synthetic construct
  source 1..75: mol_type = other DNA
ttgcgctggcaaattttcctggggatattctttggctatgcggcttactatttggttcgtaagaactttgcgctt

SEQ ID NO: 184371 - DNA, 75 bp, synthetic construct
  source 1..75: mol_type = other DNA
atgattctaggtaatgattacgttgatttagctcctttgttctctgcgcatagcactagaaactatctgctttct

SEQ ID NO: 184372 - DNA, 75 bp, synthetic construct
  source 1..75: mol_type = other DNA
gacaccgaaagcagtgaaagcagctaatgacaatgcgaatggtcgggtaccttctgcccgtaaggtgaatggtaa

SEQ ID NO: 184373 - DNA, 75 bp, synthetic construct
  source 1..75: mol_type = other DNA
cgatcagagtattgagattggtgcaaaccagaatctggataattacaaaacgccggggctgtaccatcagcctgc

SEQ ID NO: 184374 - DNA, 75 bp, synthetic construct
  source 1..75: mol_type = other DNA
ttatttcacgcctgctgtcggaagtgggtatctggttccgcttcgccactgacgcgcggctgaaaattgaggtta

SEQ ID NO: 184375 - DNA, 75 bp, synthetic construct
  source 1..75: mol_type = other DNA
gttcacctcaacaggcaggtatatctgaacttgttttgcgtgcaggtaatggtaatccgaaggggattactggtg

SEQ ID NO: 184376 - DNA, 75 bp, synthetic construct
  source 1..75: mol_type = other DNA
tatgaccttgctaacgggaaatataccgcacaggacgccaccacagcacgaaaaggccttgtccagctcagtagc

SEQ ID NO: 184377 - DNA, 75 bp, synthetic construct
  source 1..75: mol_type = other DNA
caggctggtatatctgaacttgttcttcgtgcggggaatagaaatccaaaaggtcttactggtgcgttatggcga

SEQ ID NO: 184378 - DNA, 75 bp, synthetic construct
  source 1..75: mol_type = other DNA
cattatgtggttatggggtatcacggacatacagcgaccgttcatgcaaccgggaatacagaaaacaccgttaaa

SEQ ID NO: 184379 - DNA, 75 bp, synthetic construct
  source 1..75: mol_type = other DNA
atttgattacgggacaaaaacaaccagttcatttgactacggtacaaaaacaacgaataccacaggggcgcatgc

SEQ ID NO: 184380 - DNA, 75 bp, synthetic construct
  source 1..75: mol_type = other DNA
acacagtagcaataggtgcgcatacacatacgctcgctattggttcgcacacacaccattaccattgccgcttat

SEQ ID NO: 184381 - DNA, 75 bp, synthetic construct
  source 1..75: mol_type = other DNA
gtaccgatctgtggggtgcagtacgggcaaagaaaggcatctttatcagcgccgatgcgcaggacaaggcgcagg

SEQ ID NO: 184382 - DNA, 75 bp, synthetic construct
  source 1..75: mol_type = other DNA
ttgaccgcgatacgtggaaaccgggttatgaaagcctgtgggtacgccagtcgcgcccgtatgcgggagacacct

SEQ ID NO: 184383 - DNA, 75 bp, synthetic construct
  source 1..75: mol_type = other DNA
atgatgaatattcctgccctaaactttgaccactcacaccacaagctcaaaattcgcggcctgaaaagcccggtg

SEQ ID NO: 184384 - DNA, 75 bp, synthetic construct
  source 1..75: mol_type = other DNA
caaatgacgcggcgcgtaaaacgccacaatagcgttcccctttcctttgccgatggctatccctatctgctcgct

SEQ ID NO: 184385 - DNA, 75 bp, synthetic construct
  source 1..75: mol_type = other DNA
atggatatcccgactctgaatttcgaccactcacaccacaagctcaaaattcgcggcctgaaaagcccggcggat

SEQ ID NO: 184386 - DNA, 75 bp, synthetic construct
  source 1..75: mol_type = other DNA
gaggaaggcaacccggaccgaccttatattgcaggcgtaaaacacgactcggcacacactgaccatgtgaccatt

SEQ ID NO: 184387 - DNA, 75 bp, synthetic construct
  source 1..75: mol_type = other DNA
ggtggagcaaggattccagccatcgcaggcggcaggggtgatgtttgccctgcaaatgggtgcggcaagcgggac

SEQ ID NO: 184388 - DNA, 75 bp, synthetic construct
  source 1..75: mol_type = other DNA
ccgcgattacggcagcctggttgcagcaagtctggggcaggaatggagtggatttggtcagtcgttgtttgtgca

SEQ ID NO: 184389 - DNA, 75 bp, synthetic construct
  source 1..75: mol_type = other DNA
gccgcgctctggccgctgtatgcgaaaaataacgcacagctgatgagggatgccacagcagacagcctcaggcag

SEQ ID NO: 184390 - DNA, 75 bp, synthetic construct
  source 1..75: mol_type = other DNA
atatctacgcggaatatgttgctaagcaccacattgctttccagcgtactaaagaaagcgtgctggctgcttccc

SEQ ID NO: 184391 - DNA, 75 bp, synthetic construct
  source 1..75: mol_type = other DNA
tgttgatcaactggctaccgctgcttttggtggagcaaggattccagccatcgcaggcggcaggggtgatgtttg

SEQ ID NO: 184392 - DNA, 75 bp, synthetic construct
  source 1..75: mol_type = other DNA
aacaggtgggcaaagcgttttgtatgcattggctccgttgttttacagttcgcagatccgcgcaaccggcgtggg

SEQ ID NO: 184393 - DNA, 75 bp, synthetic construct
  source 1..75: mol_type = other DNA
cgttgtttttactcggctggctgacggagaaggctttcgacttcgccggtaaatccgggttgtatttccagtggg

SEQ ID NO: 184394 - DNA, 75 bp, synthetic construct
  source 1..75: mol_type = other DNA
ctcagtgtactcaggcaactgactgaaaacgtcttatcctttacggaaaatcaggaaggcgatttttcgcggttt

SEQ ID NO: 184395 - DNA, 75 bp, synthetic construct
  source 1..75: mol_type = other DNA
caaactcggcaacaccctgtccaacgatcaactccccgcagaaaaattcgattacatgctctctaacccaccttt

SEQ ID NO: 184396 - DNA, 75 bp, synthetic construct
  source 1..75: mol_type = other DNA
agacaggcagcggatacaacaaaaccactggctgaacgcctgcacagccagcttgtgctccagcagaccattgcc

SEQ ID NO: 184397 - DNA, 75 bp, synthetic construct
  source 1..75: mol_type = other DNA
acgctaccggtgcccggcaggacgcgaaagcggccgcaacgggggtcatcttcggaccggaaggtaccgtgaaag

SEQ ID NO: 184398 - DNA, 75 bp, synthetic construct
  source 1..75: mol_type = other DNA
cattcaggtgatgagtatttcagccctcccgacggatggcgaacgggatgccctcctgcgttaccgtcagaaagc

SEQ ID NO: 184399 - DNA, 75 bp, synthetic construct
  source 1..75: mol_type = other DNA
cgatgactgcaaccatcgacgcatcaagcaccacgccttctatggtgttccagcaattcgatcagatgcatacag

SEQ ID NO: 184400 - DNA, 75 bp, synthetic construct
  source 1..75: mol_type = other DNA
ttcgccacaggtcgcgccagcgccgcagcctgtgcattcagcaccgcaatcggcacaacaggctttccagcctgc

SEQ ID NO: 184401 - DNA, 75 bp, synthetic construct
  source 1..75: mol_type = other DNA
tatcccttattcttgccgcgcgggcatttgtggaagttgccgtgttcagcttttagaaggcgaagtcacgccgct

SEQ ID NO: 184402 - DNA, 75 bp, synthetic construct
  source 1..75: mol_type = other DNA
tatcaactggcaagggcgggcatttcgcggtaataaccaacaggtactgctggaacaattagaaaatcaagggat

SEQ ID NO: 184403 - DNA, 75 bp, synthetic construct
  source 1..75: mol_type = other DNA
cccaaccagcgcagcaggctttccaggttgcggaacccgtagcggcaccgcagcctgaacctgtaaatgaaccgg

SEQ ID NO: 184404 - DNA, 75 bp, synthetic construct
  source 1..75: mol_type = other DNA
cggcctacccgccgcagcctgaacagcctgttgcttcgcaggtacagtcagctccgcagccgacacagccagcgc

SEQ ID NO: 184405 - DNA, 75 bp, synthetic construct
  source 1..75: mol_type = other DNA
gaagcgcaaagaagcggtgattatcatgaacgtcgcggcgcatcacggtagcgagctaaacggtgaactgcttct

SEQ ID NO: 184406 - DNA, 75 bp, synthetic construct
  source 1..75: mol_type = other DNA
taccgcttgagatctatgcgtttactaataccgtggtgtggctggaatatgaaagcattcaggctgatatattcg

SEQ ID NO: 184407 - DNA, 75 bp, synthetic construct
  source 1..75: mol_type = other DNA
accacatatttgccatcgtcgaagagtttggtctgcgacttcatcagtcaccaaccagcaatgatattcgctccc

SEQ ID NO: 184408 - DNA, 75 bp, synthetic construct
  source 1..75: mol_type = other DNA
ggggatcaaactgatcggcgcgattctggtcggcatattaatgatctcactgctgattggtcagtcaccggcaat

SEQ ID NO: 184409 - DNA, 75 bp, synthetic construct
  source 1..75: mol_type = other DNA
tttatgcgtgataacgactttgacacaccggtgatggtgatgtgttaccacggcaatagcagcaaaggtgcggcg

SEQ ID NO: 184410 - DNA, 75 bp, synthetic construct
  source 1..75: mol_type = other DNA
gggttacatctcataaagtagctgtttcccagcttgtcgaaagcaacgaatctctgttcaacaaagaaacctctc

SEQ ID NO: 184411 - DNA, 75 bp, synthetic construct
  source 1..75: mol_type = other DNA
accatatatttgctatcgtcgaagagtttggtctgcgacttcatcagtcaccaaccagcaacgatattcgctctc

SEQ ID NO: 184412 - DNA, 75 bp, synthetic construct
  source 1..75: mol_type = other DNA
ctccacccaacagtattcctatatcatcgcagcctattctgctgcttatacggtcatgcaaccggtagcgggcta

SEQ ID NO: 184413 - DNA, 75 bp, synthetic construct
  source 1..75: mol_type = other DNA
tcagtctctgctggcttggcagtatgcagccgaaaaggctggggtatctggtgaccagatggccgatatctttaa

SEQ ID NO: 184414 - DNA, 75 bp, synthetic construct
  source 1..75: mol_type = other DNA
gttcagtgggaaattcagtaccgtgtttacggttcgggttcaggatggacaagcaaaactgggtcttacaatcag

SEQ ID NO: 184415 - DNA, 75 bp, synthetic construct
  source 1..75: mol_type = other DNA
catggtgcgcgcccgtgtggcttccggtgcctatgcttcagaaagcgaggtcattcgtgaaggacttcgcgcact

SEQ ID NO: 184416 - DNA, 75 bp, synthetic construct
  source 1..75: mol_type = other DNA
ggaccgtgttgcagaacaaaccggcgattgaggtgcgcaggaaacacataacgatcccgcaccgcaacattaacg

SEQ ID NO: 184417 - DNA, 75 bp, synthetic construct
  source 1..75: mol_type = other DNA
gctgttcgcagttctggcagtatttgacctgttaggtgcgctggttatctggaccgtgttgcagaacaaaccggc

SEQ ID NO: 184418 - DNA, 75 bp, synthetic construct
  source 1..75: mol_type = other DNA
tgttggtgtttcctcactccgtcgcggtgtggctgaagctattgaagctgttgctcacggtgatgagagcacttc

SEQ ID NO: 184419 - DNA, 75 bp, synthetic construct
  source 1..75: mol_type = other DNA
gtcaggttggcggcacgctggcggaaaacctggttggtgagaacaacgatattaccgttgtcgatactaatggtg

SEQ ID NO: 184420 - DNA, 75 bp, synthetic construct
  source 1..75: mol_type = other DNA
atgaaggtcgtggcgactatgattctcatcattaccacagccatgagaactacatcgcgacgaaccggaaaggaa

SEQ ID NO: 184421 - DNA, 75 bp, synthetic construct
  source 1..75: mol_type = other DNA
gtgaaaatagaagattacgatcttgatggtgttcttgaccaggacagggcttatcagataggtatgcgacgactg

SEQ ID NO: 184422 - DNA, 75 bp, synthetic construct
  source 1..75: mol_type = other DNA
cgttggtgtttcctcattacgccgcggtgtagctgaagctattgaagccgttgctcacggggatgaaagtacttc

SEQ ID NO: 184423 - DNA, 75 bp, synthetic construct
  source 1..75: mol_type = other DNA
tatcggtgcagggctggcgcgtcgtctggaaaaagattacagcgtcaaactcatcgaacgtaatcagcagcgcgc

SEQ ID NO: 184424 - DNA, 75 bp, synthetic construct
  source 1..75: mol_type = other DNA
ttttgcttgccagtgcgctgctcacgggctgtaacaccgctcgcggttttggtgaagacattaaacatctcggta

SEQ ID NO: 184425 - DNA, 75 bp, synthetic construct
  source 1..75: mol_type = other DNA
ggcggtgacaaccatcatgaccatcctgagccactcggcggtggcggggcgagaatagcctgcggcatcattcca

SEQ ID NO: 184426 - DNA, 75 bp, synthetic construct
  source 1..75: mol_type = other DNA
gcctgtttgttttcgcaccaatgacctgggcgcaggttgcagaaattgttgcggtaatgggtaatgccagcgttg

SEQ ID NO: 184427 - DNA, 75 bp, synthetic construct
  source 1..75: mol_type = other DNA
atgaaaaaatttgctttactggcggggctgttcgtcttcgcaccaatgacctgggctcaggactataatattaag

SEQ ID NO: 184428 - DNA, 75 bp, synthetic construct
  source 1..75: mol_type = other DNA
cctcagtgcggctgctgatccctcctgtgagggccggtttgttaacccgatcaccgatgtgtgctggcgctgcat

SEQ ID NO: 184429 - DNA, 75 bp, synthetic construct
  source 1..75: mol_type = other DNA
agctcaaagaaaaaggactgatatggcttttgccaccatactgttggtcacaccgtcagatagcccggaagctga

SEQ ID NO: 184430 - DNA, 75 bp, synthetic construct
  source 1..75: mol_type = other DNA
atggacacctgggcgacctccctgcgctgttcgtgacgcatgacggaaaagcgaactacccggtcctggcccgag

SEQ ID NO: 184431 - DNA, 75 bp, synthetic construct
  source 1..75: mol_type = other DNA
ggcgcgctgaatccggtagtcctgccaagcgtgctggcgctggtgatgacggcggtttttgatgctaccgggact

SEQ ID NO: 184432 - DNA, 75 bp, synthetic construct
  source 1..75: mol_type = other DNA
ggtttccggcgaatggcgcaagttgaacatcggtacggtcgttattgccgtggcgctggtgaccttctatgcggg

SEQ ID NO: 184433 - DNA, 75 bp, synthetic construct
  source 1..75: mol_type = other DNA
ctgagctgggattacaaaaccaaatcctcctgtaaatttggcagtaaaattatcgtcaccaatctggtaagataa

SEQ ID NO: 184434 - DNA, 75 bp, synthetic construct
  source 1..75: mol_type = other DNA
agtgccaaagtggtagaaaaactgaatcaggtttgtgctaaagatccgcaaatgctgttaattaccgcaattgat

SEQ ID NO: 184435 - DNA, 75 bp, synthetic construct
  source 1..75: mol_type = other DNA
attttgttgatgcgatggcgggtctggtaacagcagtattcatcgtactgacctgtaacatcgtaacgggtatta

SEQ ID NO: 184436 - DNA, 75 bp, synthetic construct
  source 1..75: mol_type = other DNA
ttctccggcgtttttgccatgccttcattgagtgatgagaacggcaattcgctaattggcagcctggacattatg

SEQ ID NO: 184437 - DNA, 75 bp, synthetic construct
  source 1..75: mol_type = other DNA
gcgcttgaggtattgcagaaaatcaccaacgcagggatggggtattttctgctgtctgatgggctggcgtctgcc

SEQ ID NO: 184438 - DNA, 75 bp, synthetic construct
  source 1..75: mol_type = other DNA
catggcgctgaccgtgcgcacagggaatcgcctggcggccatgtccgatcgccggataagcgtcacgccaacccg

SEQ ID NO: 184439 - DNA, 75 bp, synthetic construct
  source 1..75: mol_type = other DNA
caatatgagatccggatgcgccgcactgaaccggttaaggggggcagtacccgcgaccaggtattctggcaggcg

SEQ ID NO: 184440 - DNA, 75 bp, synthetic construct
  source 1..75: mol_type = other DNA
gaattgaatcaatttaacatatgttatgatcgtctgactacaagtaaggaaaaaaaagagatatccataatacga

SEQ ID NO: 184441 - DNA, 75 bp, synthetic construct
  source 1..75: mol_type = other DNA
cgaagtaaacttcttcttcccaaacgggatttgtgggtataacaaaaaagggaacaaacaataccgtgaggtaaa

SEQ ID NO: 184442 - DNA, 75 bp, synthetic construct
  source 1..75: mol_type = other DNA
gagatggatgcgctctgctatgagttcatggatcgcatagtgctggccgatgacatcccgggcagccagactctt

SEQ ID NO: 184443 - DNA, 75 bp, synthetic construct
  source 1..75: mol_type = other DNA
aaatctgaatatatgattgaggaacgaataacatcaatcagtgatataatcaaaaccatattacttagcttcctc

SEQ ID NO: 184444 - DNA, 75 bp, synthetic construct
  source 1..75: mol_type = other DNA
aacctctgctcaaaaattaaaagagctgaatgatgatgccgacgcacttgctaaggggtacaccatcattcaacc

SEQ ID NO: 184445 - DNA, 75 bp, synthetic construct
  source 1..75: mol_type = other DNA
cggttaaggcggtgaatgataatgcgaatggtcgcgtcccgtctgagcgaaacgttaacggacacccgctgacgg

SEQ ID NO: 184446 - DNA, 75 bp, synthetic construct
  source 1..75: mol_type = other DNA
ggcgctgaccgtgcgcacagggaatcgcctggcggccatgtccgatcgccggattagcgttacaccaacccggat

SEQ ID NO: 184447 - DNA, 75 bp, synthetic construct
  source 1..75: mol_type = other DNA
acgattgagcggttaactgtgacaacaggctctggcggtgaaaccatcacgacgccggatccatcgtggcctggc

SEQ ID NO: 184448 - DNA, 75 bp, synthetic construct
  source 1..75: mol_type = other DNA
ctggtcgtgtccggaaactccatcacgttggttgatgtatcgtcgtctggcgatgaggagatcccgccgtcgtgg

SEQ ID NO: 184449 - DNA, 75 bp, synthetic construct
  source 1..75: mol_type = other DNA
ggggctgctggcggctatcaccgaggggctcactggctccggcctggtcgcacgggacaacggcggtaccgtact

SEQ ID NO: 184450 - DNA, 75 bp, synthetic construct
  source 1..75: mol_type = other DNA
gacgattacgatggtgttgacgtaacctatatcaacggctcgacctgggcagaagagacggtgcaatgccgtctg

SEQ ID NO: 184451 - DNA, 75 bp, synthetic construct
  source 1..75: mol_type = other DNA
ttaacggtgtcgttgacagcacctggtcaggctttatgacccgtaccgtcgtggattttgccgcgtctggtatta

SEQ ID NO: 184452 - DNA, 75 bp, synthetic construct
  source 1..75: mol_type = other DNA
ggcttcccggtgaaccactcgaaacgcatgagcatggtgtaaccagtatccgcacctggctggtggaaaatgttg

SEQ ID NO: 184453 - DNA, 75 bp, synthetic construct
  source 1..75: mol_type = other DNA
ctgaagtacgcatggacaaatgcgtagaagcgttcaaaacccaaatcagcaaaatacgcacgggtcgtgcttctc

SEQ ID NO: 184454 - DNA, 75 bp, synthetic construct
  source 1..75: mol_type = other DNA
gtctatttgcgttaccaggatggaaaagcatcacggctgtttgaagcatcacccacaggtgacaactatcaggta

SEQ ID NO: 184455 - DNA, 75 bp, synthetic construct
  source 1..75: mol_type = other DNA
aggcaatcctgatcacgcatatcagattggtatgcgccgactcagaaaataccagctgcagcgcatgacgcataa

SEQ ID NO: 184456 - DNA, 75 bp, synthetic construct
  source 1..75: mol_type = other DNA
gagtatgcgctgaaaaacgtcaacgggttaggtttcactgagcggatcaccctcagctctccggggctggtagag

SEQ ID NO: 184457 - DNA, 75 bp, synthetic construct
  source 1..75: mol_type = other DNA
cgaccacctacgatttttcgaccagctccagcacgttcacgatcacctggcagggggttacctacccggtgtcgc

SEQ ID NO: 184458 - DNA, 75 bp, synthetic construct
  source 1..75: mol_type = other DNA
ggcacaacggcaacagtggcgcgcctggttaatgggtccgttgatgagccgtggccaggattcaccgccaggacg

SEQ ID NO: 184459 - DNA, 75 bp, synthetic construct
  source 1..75: mol_type = other DNA
atccgctatcaggatggctctgcatccgggctgatggtggcgagcagggtgggcgattttcagctgtcagtcccg

SEQ ID NO: 184460 - DNA, 75 bp, synthetic construct
  source 1..75: mol_type = other DNA
tcaccgtcacggagccgctggactggtctttcgaaaacccccgcgcgctgatccgctatcaggatggctctgcat

SEQ ID NO: 184461 - DNA, 75 bp, synthetic construct
  source 1..75: mol_type = other DNA
ggcttcccggtgaacctctcgaaacgcatgagcatggcgtaaccagccttcgaaactggctggcggtgaatgttg

SEQ ID NO: 184462 - DNA, 75 bp, synthetic construct
  source 1..75: mol_type = other DNA
ctctttcggctacgggctaatggtaacaccgttacagttagcgcgagtctacgcaactatcggcagctacggcat

SEQ ID NO: 184463 - DNA, 75 bp, synthetic construct
  source 1..75: mol_type = other DNA
ggctgacccgaaagaagtgcatgacgctggcggtatcagcgtcggtgaccgctggaaggcgctggctaacgcgct

SEQ ID NO: 184464 - DNA, 75 bp, synthetic construct
  source 1..75: mol_type = other DNA
ataatccttggttaattaatttgcaccagaatacacgtcgcatgccgtatgagcgttttgagtctactgcctcga

SEQ ID NO: 184465 - DNA, 75 bp, synthetic construct
  source 1..75: mol_type = other DNA
gtatttttggatgagatatccaatgtcaacgccgacggcgaagaaggcaatcccttgaagctggcagaacagaga

SEQ ID NO: 184466 - DNA, 75 bp, synthetic construct
  source 1..75: mol_type = other DNA
cattaaaaccggtaccgcgaaaaaggtcgggccggacggtcgctatatcaataaatatattgcttataccgcagg

SEQ ID NO: 184467 - DNA, 75 bp, synthetic construct
  source 1..75: mol_type = other DNA
gctaacagcccgtcatacaacccaaacaatctgagtggcacgccgaaagaggcgatgcgtaaccgtaccatcacc

SEQ ID NO: 184468 - DNA, 75 bp, synthetic construct
  source 1..75: mol_type = other DNA
ctgagaagtacggctaccaggctggtctcaaccgccttcagcgtttcctgaccaaaattcagtacgactggagcc

SEQ ID NO: 184469 - DNA, 75 bp, synthetic construct
  source 1..75: mol_type = other DNA
cgggcgtggacttccaacctggacaaattcttctacgcgtcaatgcgctacagatctaaagcgttctccactgcg

SEQ ID NO: 184470 - DNA, 75 bp, synthetic construct
  source 1..75: mol_type = other DNA
aaaaagaagctggttgaagtacttgagtcaccccggattgaagcaaacaagctccgtggtatgcctgattgttac

SEQ ID NO: 184471 - DNA, 75 bp, synthetic construct
  source 1..75: mol_type = other DNA
agagctgggtaggccgcattctgactggacgtggacttccgacctggactaattcttcaacccgtcagtgctcaa

SEQ ID NO: 184472 - DNA, 75 bp, synthetic construct
  source 1..75: mol_type = other DNA
cgctgacggtgagtttactccaacgactgctgctcagtatcttcttcgttatggcgcggtccgaatttcaaaagg

SEQ ID NO: 184473 - DNA, 75 bp, synthetic construct
  source 1..75: mol_type = other DNA
aacgccccggcatccgttcgaagcagggtatgcctgatgctgggctccagggatgatgaaagtgcccgaagggcc

SEQ ID NO: 184474 - DNA, 75 bp, synthetic construct
  source 1..75: mol_type = other DNA
agagaaattcgcgcaacggtgctacaacgtacccatcttactgttggtgtggggatcgcccagaccaaaacgttg

SEQ ID NO: 184475 - DNA, 75 bp, synthetic construct
  source 1..75: mol_type = other DNA
tgtctttaaagaccgccactggatcaactgtgggcaggcaggcccgctgggctggaccattccggcggcgctggg

SEQ ID NO: 184476 - DNA, 75 bp, synthetic construct
  source 1..75: mol_type = other DNA
cgcgcagcgatcaactactggcgatggtcgggccgggattaatgctttgggcaccgcgagagtatgaactgttcc

SEQ ID NO: 184477 - DNA, 75 bp, synthetic construct
  source 1..75: mol_type = other DNA
ctgtcggcgagtgttaacgtagtcggttcttatacttacaccgatgcggaatacaccaccgatactacctataaa

SEQ ID NO: 184478 - DNA, 75 bp, synthetic construct
  source 1..75: mol_type = other DNA
gattgtctctgatgctaaagctgccctgacgttactggttgaagtcgctcaggagatgcaaaaagcgggtcgtct

SEQ ID NO: 184479 - DNA, 75 bp, synthetic construct
  source 1..75: mol_type = other DNA
gcaactcgctttcgagaatatcaactccagtgaagtgaatggctacggtgttgaccacgtaaaagtagcggaagg

SEQ ID NO: 184480 - DNA, 75 bp, synthetic construct
  source 1..75: mol_type = other DNA
ctgatccgaaacgcaatgtggtggcgatttctggcgactttgacttccagttcctgattgaagagttagctgttg

SEQ ID NO: 184481 - DNA, 75 bp, synthetic construct
  source 1..75: mol_type = other DNA
gcttcgcattattcctatgtctctcttttcggtatatcttcgttagatagattaaaatattccatttttgaaaat

SEQ ID NO: 184482 - DNA, 75 bp, synthetic construct
  source 1..75: mol_type = other DNA
caggtacggacccgcgtatttccatcaacgtgctggagtctgccggactggaagtgagccatgtgctggatgagc

SEQ ID NO: 184483 - DNA, 75 bp, synthetic construct
  source 1..75: mol_type = other DNA
actggaagtaagtcatgcgcttgacgaaccgacggcagtggcggatttgctgcaactggataacgccggtgtcgt

SEQ ID NO: 184484 - DNA, 75 bp, synthetic construct
  source 1..75: mol_type = other DNA
gcacagccagcaaagtatggtcgatacatttcgcgccagccttttcgataatcaggatatcactgtagcggatca

SEQ ID NO: 184485 - DNA, 75 bp, synthetic construct
  source 1..75: mol_type = other DNA
ggccagcgcccctgcagctgccgaaccggaggaaaccgcgccggtggccagcgcccctgcagctgctgaaccggt

SEQ ID NO: 184486 - DNA, 75 bp, synthetic construct
  source 1..75: mol_type = other DNA
gaaatagagttatttgatctggataatttttatctttttagaccaatcaaagatgcagaaatcattgagaaattt

SEQ ID NO: 184487 - DNA, 75 bp, synthetic construct
  source 1..75: mol_type = other DNA
atggatctcgccaaaaaaggtgtggtagcagatttgattggcgcaggcgcaatcatcagaaccgcgttctgcggc

SEQ ID NO: 184488 - DNA, 75 bp, synthetic construct
  source 1..75: mol_type = other DNA
gacaatatcgtcctgaaagtgtgctcgaagatcctcgacgaagtgaccaccaccgacgaactgattccttccggt

SEQ ID NO: 184489 - DNA, 75 bp, synthetic construct
  source 1..75: mol_type = other DNA
tggacgtgatgaggttgaacgtgcgacgcggcggaaagtcaagattgcaaaaggatggggctggcttgcatgtgt

SEQ ID NO: 184490 - DNA, 75 bp, synthetic construct
  source 1..75: mol_type = other DNA
gcgaggccagcaacccgacaggaaccggagcctggtatcttcgtcatatcggttttctcggctcgcagccgccag

SEQ ID NO: 184491 - DNA, 75 bp, synthetic construct
  source 1..75: mol_type = other DNA
gtgtctgccgctttctacaggccgggagaagcgcgtaacccggccggaactggtgcctggtatcttcgccatatt

SEQ ID NO: 184492 - DNA, 75 bp, synthetic construct
  source 1..75: mol_type = other DNA
tgaaaccaccggactgataagtaaaaacggcagacttttcgcgctggttaagcctgataacaggttgctggatat

SEQ ID NO: 184493 - DNA, 75 bp, synthetic construct
  source 1..75: mol_type = other DNA
ctattgccctggtaaatcgcactattgagccattattgcaggaatatctgcattccggagagcgccgggtgatgg

SEQ ID NO: 184494 - DNA, 75 bp, synthetic construct
  source 1..75: mol_type = other DNA
catgacggcgaacgcgatcacccgactatagccctggtaaaccgcgctattgagccattattgcagaaatatctg

SEQ ID NO: 184495 - DNA, 75 bp, synthetic construct
  source 1..75: mol_type = other DNA
taccagcgtgatgtcagagaagtcgcgctggcacccgagctcaaccctgaccatttgcgtaaatggatacggttg

SEQ ID NO: 184496 - DNA, 75 bp, synthetic construct
  source 1..75: mol_type = other DNA
tcaaatcgcctgaccgatgggatacctactgcttcactatgctggtggactatgtgcctgctaatgaagatattg

SEQ ID NO: 184497 - DNA, 75 bp, synthetic construct
  source 1..75: mol_type = other DNA
gtgcgtcgtggtgcgaacccggtacgtattcggtggggaaaacccatgtttgcgaacaaagacagggagcgattt

SEQ ID NO: 184498 - DNA, 75 bp, synthetic construct
  source 1..75: mol_type = other DNA
agtgattgaagattcactggcggattacccaggccctctggcaggaatgctttcagtaatgcagcaggaagcggg

SEQ ID NO: 184499 - DNA, 75 bp, synthetic construct
  source 1..75: mol_type = other DNA
caccttttaatcaagggtgtgagcgaagcctgcaacgtctcctattccgaagcactcaccctcactacgcctttt

SEQ ID NO: 184500 - DNA, 75 bp, synthetic construct
  source 1..75: mol_type = other DNA
ctgaagccatccgaaataccaacactgctcggatataccgctagcctggttgataaaaaatggttgcgactggca

SEQ ID NO: 184501 - DNA, 75 bp, synthetic construct
  source 1..75: mol_type = other DNA
tgatgatgaaattgaaaatgtacataaaccgctactgcgtatgctggcggccttacaggcggtaaacccgcagcg

SEQ ID NO: 184502 - DNA, 75 bp, synthetic construct
  source 1..75: mol_type = other DNA
ccgcagtacgatcgacaaaagcatgatcctgttgaagatgcgttgcacgttaccgcaccactcgtcatcgtcgaa

SEQ ID NO: 184503 - DNA, 75 bp, synthetic construct
  source 1..75: mol_type = other DNA
atttctgttggaaaagagaacgctcggaagtatatagcgaggcggtcaaacgcattctctgaaccaaagcatgac

SEQ ID NO: 184504 - DNA, 75 bp, synthetic construct
  source 1..75: mol_type = other DNA
tgaacatgacctgattacccaacagtacgaacaaagtaataaacaaaagttttatgtaccttgccctcactgtaa

SEQ ID NO: 184505 - DNA, 75 bp, synthetic construct
  source 1..75: mol_type = other DNA
cattaatttacgacaaatatagtgatgaaatctcactgactttgctgtctaatgctattaacaaaaaattaatta

SEQ ID NO: 184506 - DNA, 75 bp, synthetic construct
  source 1..75: mol_type = other DNA
attcagacgctcccgatggatggttttcaccattacaatagctggctggatgcgcatcaattgcgccccttcaaa

SEQ ID NO: 184507 - DNA, 75 bp, synthetic construct
  source 1..75: mol_type = other DNA
ccttacagacggtaaatccgcagcggcgtacggtggtttttctttgcgctccaccggggacgggaaaatcgaccc

SEQ ID NO: 184508 - DNA, 75 bp, synthetic construct
  source 1..75: mol_type = other DNA
ggagttggcatctttctgcgatttttctatttttattcatgcacctgctcaaattctgcgggagcgcttgattag

SEQ ID NO: 184509 - DNA, 75 bp, synthetic construct
  source 1..75: mol_type = other DNA
gctttttatgaacgtaccgacgggccgaatgttcgtcgggtgctggaacagagtcggcctgcaaatttgacctta

SEQ ID NO: 184510 - DNA, 75 bp, synthetic construct
  source 1..75: mol_type = other DNA
atggctacaccgcttattcgtgtcatgaacggacacatctacagagtaccagatcgtcgtaagcgtaaaccggag

SEQ ID NO: 184511 - DNA, 75 bp, synthetic construct
  source 1..75: mol_type = other DNA
ccttacagacggtaaatccgcagcggcgtaccgtggtttttctttgcgctccgccggggacgggtaaatctaccc

SEQ ID NO: 184512 - DNA, 75 bp, synthetic construct
  source 1..75: mol_type = other DNA
tcggttgtttaaagcgactaccggaatgacgccgaaagcctggcaacaggcctggcgcgctcgccgtttgcgcga

SEQ ID NO: 184513 - DNA, 75 bp, synthetic construct
  source 1..75: mol_type = other DNA
acttctggaacaggaaacgcctgtaacgctggaagccttagccgaccatgtggcgatgagtccgttccatctgca

SEQ ID NO: 184514 - DNA, 75 bp, synthetic construct
  source 1..75: mol_type = other DNA
gatcaattgattgccgtttctcagcacaccttgcgcgtggtagcgctggcaccagaaaaagaaggggcattgcag

SEQ ID NO: 184515 - DNA, 75 bp, synthetic construct
  source 1..75: mol_type = other DNA
tcatcttcagcagtgggtacagcggaacgaatggaatacgggactcactgttattcagttgtctgtggttgatcc

SEQ ID NO: 184516 - DNA, 75 bp, synthetic construct
  source 1..75: mol_type = other DNA
aataattcactgaaagacacactgagtgctctagcttccagaatggagccagcggccccatggcagtttatttcc

SEQ ID NO: 184517 - DNA, 75 bp, synthetic construct
  source 1..75: mol_type = other DNA
ctttcaggttaccgctggggcgcgtcgcgcaaagcgcaactgctgcgccgcgaagctgagaatgaggagaggtaa

SEQ ID NO: 184518 - DNA, 75 bp, synthetic construct
  source 1..75: mol_type = other DNA
cgaggaagccgtggcggcgctgcgccaggccgaacagtccgtggcggcggccgaagcccaggtcgccctgaagca

SEQ ID NO: 184519 - DNA, 75 bp, synthetic construct
  source 1..75: mol_type = other DNA
accgagatagacatcgcgaccaagctggcaggccgcatcgacagcatccttgcccaggaaggggacttcgtggaa

SEQ ID NO: 184520 - DNA, 75 bp, synthetic construct
  source 1..75: mol_type = other DNA
aacgtcatacccgttcccgctcgctcgcccatcgtggggctatttctgcgcaacagttggatgacgaccgcgccg

SEQ ID NO: 184521 - DNA, 75 bp, synthetic construct
  source 1..75: mol_type = other DNA
cggcgttgtccgtaccgcgtccggtggactggcgggcagtacgctgtctgttgatgcggctgttcgcaatatggt

SEQ ID NO: 184522 - DNA, 75 bp, synthetic construct
  source 1..75: mol_type = other DNA
gcggcgatgtcgctgtgctgttgctgtgcgaaagagaggatcgtgctgatcaccgacgcgatgcaggccgccggg

SEQ ID NO: 184523 - DNA, 75 bp, synthetic construct
  source 1..75: mol_type = other DNA
tcgcgagcttgaaattgccgagctggatcaattgattgccgtttctcagcacaccttacgcgtggtagcgctggc

SEQ ID NO: 184524 - DNA, 75 bp, synthetic construct
  source 1..75: mol_type = other DNA
gctgtggacgtcggaaaaatggcaagcgactcatccgcgtgatttctcgcaggatgttgatcgtaaatacagcct

SEQ ID NO: 184525 - DNA, 75 bp, synthetic construct
  source 1..75: mol_type = other DNA
cgctggcggcactgcgtagcaaaccagctcacgaattgaaagaggttggcgatcagtggcggacaccggatctgc

SEQ ID NO: 184526 - DNA, 75 bp, synthetic construct
  source 1..75: mol_type = other DNA
cgcgctggtacaagattgggcggaaatgctggaatcaatcggcggggccgcattcggtaatccaccatatagccg

SEQ ID NO: 184527 - DNA, 75 bp, synthetic construct
  source 1..75: mol_type = other DNA
tgatgcgcggtacggtcggcgggatcagcaaaatgaatgaaaccatcagtctgacccgtaacgtactggtcgcca

SEQ ID NO: 184528 - DNA, 75 bp, synthetic construct
  source 1..75: mol_type = other DNA
gaatctgcctctcaaaatgcttgaccagacggccatcaagcgcgagctggcgaacatcggcaagaccgagcagga

SEQ ID NO: 184529 - DNA, 75 bp, synthetic construct
  source 1..75: mol_type = other DNA
atgattgaaagcaaatactgccgcgcgctggctgaactgcgttcaaaaccagcccatgagttgaaagaggtcggc

SEQ ID NO: 184530 - DNA, 75 bp, synthetic construct
  source 1..75: mol_type = other DNA
actacgcagcagcccagcgcgagaagggcggtcgctatgtattcctgataaaagccgcgccgagtgaaacgtggt

SEQ ID NO: 184531 - DNA, 75 bp, synthetic construct
  source 1..75: mol_type = other DNA
cgctgattgatagcgggaaaacggtgcatttaattggcggctgcgatgtggctatggagctggacgcacgacggg

SEQ ID NO: 184532 - DNA, 75 bp, synthetic construct
  source 1..75: mol_type = other DNA
cgatgaaacgatcctcgccagtgggatcgtgccgcgcgttccgcctatcgacgggatcgatcatccgaaggtatt

SEQ ID NO: 184533 - DNA, 75 bp, synthetic construct
  source 1..75: mol_type = other DNA
gtgacgctgaaactcaatcacaccgtgacggcggatcagttacaggcgttcgatgaaacgatcctcgccagtggg

SEQ ID NO: 184534 - DNA, 75 bp, synthetic construct
  source 1..75: mol_type = other DNA
aggagcagcgactggaagccatcgcgcaaatcaaagaggcccaaagcgccgtcgccgccgcgcaggctttgctgg

SEQ ID NO: 184535 - DNA, 75 bp, synthetic construct
  source 1..75: mol_type = other DNA
tacagggatatagatatgaggcgaagggtaatggcattgtgctactacctgagcgcgtggtgttcactaaagaga

SEQ ID NO: 184536 - DNA, 75 bp, synthetic construct
  source 1..75: mol_type = other DNA
gaaacttctctaaagctggcctttaagctgaccgacgagggcagggggcgtgcaggagagatataccgcaaaagg

SEQ ID NO: 184537 - DNA, 75 bp, synthetic construct
  source 1..75: mol_type = other DNA
acgtctggcaaaagagcgtgaagaattagcggttattaacgatcagtttggtgcgccaacaggtgctgaactgct

SEQ ID NO: 184538 - DNA, 75 bp, synthetic construct
  source 1..75: mol_type = other DNA
atgctcgggatgtgctgctatatggccttctttttggcatcttgcagaccaataacatcattatcgcttatgttt

SEQ ID NO: 184539 - DNA, 75 bp, synthetic construct
  source 1..75: mol_type = other DNA
gttatgcggctgaacatgccaccgatgaacaaatcgatttgctggcaaaagcactggaaatcaacagtcaatctc

SEQ ID NO: 184540 - DNA, 75 bp, synthetic construct
  source 1..75: mol_type = other DNA
cattattccacggactatgtgttcgacggagccggcagccattatcgccgggaagatgaagcaaccggcccgctg

SEQ ID NO: 184541 - DNA, 75 bp, synthetic construct
  source 1..75: mol_type = other DNA
cggtactaccacttggtttgactacgcccggttggtgtttgacaaagccagagacgcaggagttgaactggcagt

SEQ ID NO: 184542 - DNA, 75 bp, synthetic construct
  source 1..75: mol_type = other DNA
caggggaacacggtgcggcactctgctcacgtcaccttatctttcgtaccagttgggtttatgctgcgcgcggtg

SEQ ID NO: 184543 - DNA, 75 bp, synthetic construct
  source 1..75: mol_type = other DNA
gtgcatttgatatggattactgcgtacaactcgcgttcgaaaatattaactccagtgatgtgaacggttacggcg

SEQ ID NO: 184544 - DNA, 75 bp, synthetic construct
  source 1..75: mol_type = other DNA
tggttgaagtggcgcaggaaatgcaaaaagcagggcgtctgccatgccgtaaagagtgggttgctgagtgccagc

SEQ ID NO: 184545 - DNA, 75 bp, synthetic construct
  source 1..75: mol_type = other DNA
cggcaatgtatgtgctggagaaagaaggtatcaccaccgccttcggcgttccgggagcagcaatcaatccgttct

SEQ ID NO: 184546 - DNA, 75 bp, synthetic construct
  source 1..75: mol_type = other DNA
ccgctggcgcgtaaaaaactctccgaaatggtggaagaagagctggaacagatgatccgccgtcgtgaatttggc

SEQ ID NO: 184547 - DNA, 75 bp, synthetic construct
  source 1..75: mol_type = other DNA
cgttatccagatttttataacgaagaaatattcagggaggtaatcgaagagagcgagtcaacatttaaagaactt

SEQ ID NO: 184548 - DNA, 75 bp, synthetic construct
  source 1..75: mol_type = other DNA
gccgttggcgcgcagttcaacattccgtacatccatgtgctggtgaataacgcctatctcggcctgattcgtcag

SEQ ID NO: 184549 - DNA, 75 bp, synthetic construct
  source 1..75: mol_type = other DNA
tacgcccgctatgtgtttgaggtggcgagggcgcacggtgcagagctggcgatccaggaagtgaagggcattccg

SEQ ID NO: 184550 - DNA, 75 bp, synthetic construct
  source 1..75: mol_type = other DNA
ggagacggatgcaaccgcaccgctaaatgtttacggtgaaaccaagttagctggagaaaaagcattacaagagca

SEQ ID NO: 184551 - DNA, 75 bp, synthetic construct
  source 1..75: mol_type = other DNA
atcgtcgccgcataacggttgcagcactgcggcggatgaaacgaaaaacaggaagtaacctcctcactgtaaagc

SEQ ID NO: 184552 - DNA, 75 bp, synthetic construct
  source 1..75: mol_type = other DNA
gaagcaacgcaagggatcgtaatgaacatcctgcgtcgcaagatgcctgccgagaagattaacgaaaatctcgtt

SEQ ID NO: 184553 - DNA, 75 bp, synthetic construct
  source 1..75: mol_type = other DNA
ggctgattgtacagcacatgccattcgtgtcgcactgaataaaccggatgtcgcaggcttgtaccatttggtagc

SEQ ID NO: 184554 - DNA, 75 bp, synthetic construct
  source 1..75: mol_type = other DNA
atgaatatccttcttttcggcaaaacagggcaggtggggtgggaactgcagcgttctctggctcccctgggtaat

SEQ ID NO: 184555 - DNA, 75 bp, synthetic construct
  source 1..75: mol_type = other DNA
agaaaaattcggcctgatgttattgttaatgcagcagcccataccgcagtagataaagctgagtcagaaccagag

SEQ ID NO: 184556 - DNA, 75 bp, synthetic construct
  source 1..75: mol_type = other DNA
acaacagcctatcctacaccagctcgtcgtccacataactctcgccttaatacagaaaaatttcagcagaacttt

SEQ ID NO: 184557 - DNA, 75 bp, synthetic construct
  source 1..75: mol_type = other DNA
cgggtgaactggccctgcaacagtattgtgaaaagcatctgattttccgtaccagttgggtttatgccgggaaag

SEQ ID NO: 184558 - DNA, 75 bp, synthetic construct
  source 1..75: mol_type = other DNA
atgacggttcctacctatgacaaatttattgaacctgttctgcgttatctggcgacaaaaccggaaggtgcagcc

SEQ ID NO: 184559 - DNA, 75 bp, synthetic construct
  source 1..75: mol_type = other DNA
gtaagctatccggctgtgaccatcttgttatacacgatggtgatacctttttactgtgccggcctgaccggcgac

SEQ ID NO: 184560 - DNA, 75 bp, synthetic construct
  source 1..75: mol_type = other DNA
cattgcccagaccgagttcaatgctgaatttgaaccgctgctggacgatctgctgactattccggtggctgaaaa

SEQ ID NO: 184561 - DNA, 75 bp, synthetic construct
  source 1..75: mol_type = other DNA
ctgattattgtggtgattttagtaatcctgaaggtgtggctgaaaccgtcaaaaaaattcgccctgatgttattg

SEQ ID NO: 184562 - DNA, 75 bp, synthetic construct
  source 1..75: mol_type = other DNA
ttatcgctggcagacgcagaagacttttatgaccgtaccgacgggccgaatgttcgccgggtgctggaagagagt

SEQ ID NO: 184563 - DNA, 75 bp, synthetic construct
  source 1..75: mol_type = other DNA
tatatcgcagataaaatgaacgccgcgtttcctgaactcaactggcagatcccgcaatccacttatctggcctgg

SEQ ID NO: 184564 - DNA, 75 bp, synthetic construct
  source 1..75: mol_type = other DNA
tatcgagcaagaaaaggtcgcgatcatgccggggtatacctacggtgaagaaggtcgtggttttgtccgtctcaa

SEQ ID NO: 184565 - DNA, 75 bp, synthetic construct
  source 1..75: mol_type = other DNA
cgaaaccagaatgtaaaattatgctcctgtgtagcccgcagaaccccacgggcaaagtctggacttgcgatgaac

SEQ ID NO: 184566 - DNA, 75 bp, synthetic construct
  source 1..75: mol_type = other DNA
cgagtaaaaggcaaccatcctcatatataaatggaatacctttttatagtgttgcgacaatgaatagcagatcta

SEQ ID NO: 184567 - DNA, 75 bp, synthetic construct
  source 1..75: mol_type = other DNA
ccgtcgaatggtctgtcggtggcctgcctgatgtggcgctgtgggcgcagtacgccgcgccgggtgctgacgctg

SEQ ID NO: 184568 - DNA, 75 bp, synthetic construct
  source 1..75: mol_type = other DNA
ggcaatgaacagctttatctgttcggttgatcgaccgttctcattcatggggcgcattaacgaggatgtgaatac

SEQ ID NO: 184569 - DNA, 75 bp, synthetic construct
  source 1..75: mol_type = other DNA
tcgccagacttaccggcgcatattccctgacaatgggagctgcggcggcacttggatcggctatggtcgtgccgc

SEQ ID NO: 184570 - DNA, 75 bp, synthetic construct
  source 1..75: mol_type = other DNA
agacgccaacggtggataactcggcactgatcaaacagatccaacagttgttgcagcaagaaccgttgttcagcg

SEQ ID NO: 184571 - DNA, 75 bp, synthetic construct
  source 1..75: mol_type = other DNA
ggtgatgttcattttagcggcgtctattccattccgcctgatattagcggcgtcattggtgaagtagatttgagc

SEQ ID NO: 184572 - DNA, 75 bp, synthetic construct
  source 1..75: mol_type = other DNA
accggcagtgagaaactggtccgcgcggcggcgcggttggcctcgcgcctgggcagtgtctggcacgcggtgtat

SEQ ID NO: 184573 - DNA, 75 bp, synthetic construct
  source 1..75: mol_type = other DNA
gcccgtctaccgttaacctggtgcgacgaacaagggcaaccggtctaccttcatcgtggtcgacttttaagttat

SEQ ID NO: 184574 - DNA, 75 bp, synthetic construct
  source 1..75: mol_type = other DNA
ctcggccttgatgacgatgcactgtcaatggagtggtcactcgggggcttcccggattcggttatctgggagttt

SEQ ID NO: 184575 - DNA, 75 bp, synthetic construct
  source 1..75: mol_type = other DNA
gaacggcagcacgaaacgcattcagaaggcgcagacagcagtcagtgacgcagagaaggagatgttcatcaacaa

SEQ ID NO: 184576 - DNA, 75 bp, synthetic construct
  source 1..75: mol_type = other DNA
acgcattgctgaatatggtttcgttgaaaatcaggactatatgattatttcccaagttcgggaaaaaataggcag

SEQ ID NO: 184577 - DNA, 75 bp, synthetic construct
  source 1..75: mol_type = other DNA
tggacgcgagcggggatgaaggcaaccccctgaagctagcagaacagcgtacaaaggcttttagtaatcccctta

SEQ ID NO: 184578 - DNA, 75 bp, synthetic construct
  source 1..75: mol_type = other DNA
tcggtatcggattactggctattttattctggtacattcaaatacatcgtcctaagaaaaaacttaaatcaccgg

SEQ ID NO: 184579 - DNA, 75 bp, synthetic construct
  source 1..75: mol_type = other DNA
ccatacgcactcaggtacccggtgtcagcacactttccggtgccgtaccgaaaccgtccggtatcgctcagcttg

SEQ ID NO: 184580 - DNA, 75 bp, synthetic construct
  source 1..75: mol_type = other DNA
atcgcgctggtttttcatcagcattattgtgtcccggataccgaactgacccggttacgtacggcaatgaaagcc

SEQ ID NO: 184581 - DNA, 75 bp, synthetic construct
  source 1..75: mol_type = other DNA
atggctttaccacgcaaattaaaacacctcaacctgtttaacgacgggaacaactggcaggggatcgttgagtcg

SEQ ID NO: 184582 - DNA, 75 bp, synthetic construct
  source 1..75: mol_type = other DNA
cccggattcggttatctgggaactttacgctgcaactggtgtggatgccgtgccgattcgttttgcaggctctta

SEQ ID NO: 184583 - DNA, 75 bp, synthetic construct
  source 1..75: mol_type = other DNA
acacagaattttccattggtggtactgaactgctgctgtttaagcagatgggcaaagccactgtggatggcatcc

SEQ ID NO: 184584 - DNA, 75 bp, synthetic construct
  source 1..75: mol_type = other DNA
cattcctgaatttgtatgaaaacagaaaaagcttcattgtttttactatttttttgattatcagtttcactggta

SEQ ID NO: 184585 - DNA, 75 bp, synthetic construct
  source 1..75: mol_type = other DNA
attagtaaaacagataccgttttttatagatcacaaggacatttttaggggcgcgtcatatgccattttggtttt

SEQ ID NO: 184586 - DNA, 75 bp, synthetic construct
  source 1..75: mol_type = other DNA
gtggccgtcgaggtggtcatgcgtggacgtcagaaagaaatcgacaccggcgagggcaaacagggagaagacacc

SEQ ID NO: 184587 - DNA, 75 bp, synthetic construct
  source 1..75: mol_type = other DNA
atccatcaaacccgtcttcctctgctccgatgcgcatcgagtggaggatatcggtagccgttatacttgggtaaa

SEQ ID NO: 184588 - DNA, 75 bp, synthetic construct
  source 1..75: mol_type = other DNA
ttttatttccggcagaatgaactggaaacaatcagggaagaaattgcccgtcagggtcttaatatcaccgtgctg

SEQ ID NO: 184589 - DNA, 75 bp, synthetic construct
  source 1..75: mol_type = other DNA
attcgaagctggcgcagatagtccagcagcaggggcgtaacgggcagttgcgtatcgggtttggcagtgcgaagc

SEQ ID NO: 184590 - DNA, 75 bp, synthetic construct
  source 1..75: mol_type = other DNA
acctttctgaagctgaggcgaaggcgttatcaggccgtagtgccgccgtcgcctcgatgaagctttcacgtgtgc

SEQ ID NO: 184591 - DNA, 75 bp, synthetic construct
  source 1..75: mol_type = other DNA
cgattttataagcacatctttgaaatgaacaaccttctgacccagatgaaccgccccggtaatcctggagactac

SEQ ID NO: 184592 - DNA, 75 bp, synthetic construct
  source 1..75: mol_type = other DNA
atgtgcaactcaaataccttctgccaaagattaccaacctcccgatgattatcgaactggttaccggcaataaga

SEQ ID NO: 184593 - DNA, 75 bp, synthetic construct
  source 1..75: mol_type = other DNA
gtcaggatgtgggtctggcgaagtgcaacagcgaagaaaaggcgctgggaaaggcaaaggacaacaaactgacgg

SEQ ID NO: 184594 - DNA, 75 bp, synthetic construct
  source 1..75: mol_type = other DNA
accgccactggatcaactgtgggcaggcaggcccgttgggctggacgattccggctgcgctgggggtttgtgctg

SEQ ID NO: 184595 - DNA, 75 bp, synthetic construct
  source 1..75: mol_type = other DNA
gtgacgataccgcactcacagttccggttcagtatgaacgggctgaaactggtgttcagtgtcacggctccggta

SEQ ID NO: 184596 - DNA, 75 bp, synthetic construct
  source 1..75: mol_type = other DNA
atttacaccagtacagaaaacactgactgccggtgtggcttttacgtcatctcaccccgtccgggtcgggaatac

SEQ ID NO: 184597 - DNA, 75 bp, synthetic construct
  source 1..75: mol_type = other DNA
tgttcgaagaaagtgctgggtgtctgtctggagaaaaaacgcagctactgtcagaaacctgatgaaagaaaaagt

SEQ ID NO: 184598 - DNA, 75 bp, synthetic construct
  source 1..75: mol_type = other DNA
aaaaatgacggcaccacggaatgggcgaccggtgaaaccggaaaaaccatcacagagtccttcatgaacaagccg

SEQ ID NO: 184599 - DNA, 75 bp, synthetic construct
  source 1..75: mol_type = other DNA
atttacaaaatggtgggtcgcccgagcaatcaacaggggcgtttagtcgttgttgacttacaaggtttgagtgat

SEQ ID NO: 184600 - DNA, 75 bp, synthetic construct
  source 1..75: mol_type = other DNA
atcatgggtgaggatggaaaacgctggcatccgtgccgttcacaagatgaattgctggcggaactatcaacgaat

SEQ ID NO: 184601 - DNA, 75 bp, synthetic construct
  source 1..75: mol_type = other DNA
ggggcggatggtcaggaaaacggggaaggcgctggcgcagatatcggtaactggaatttgcaggagtttcagtaa

SEQ ID NO: 184602 - DNA, 75 bp, synthetic construct
  source 1..75: mol_type = other DNA
tttactggctggcctctcaactcaaaagcaggggcaatcatggctatcgaagctgtttccgcaactgttccgcta

SEQ ID NO: 184603 - DNA, 75 bp, synthetic construct
  source 1..75: mol_type = other DNA
gacactccatcccggcggctgcaaagtctccgccgatgaaggcgatctcgacgccagtgtcgccactcgctggca

SEQ ID NO: 184604 - DNA, 75 bp, synthetic construct
  source 1..75: mol_type = other DNA
ttcaggggcagggtacaggcagtattcagggctttaagccacaggagagtatccccggctataacgcgaatccgg

SEQ ID NO: 184605 - DNA, 75 bp, synthetic construct
  source 1..75: mol_type = other DNA
agcggaaagtgaagtggtttatcagtttcgttacagaggggagagttattcagtatctgaagatgatttgctctg

SEQ ID NO: 184606 - DNA, 75 bp, synthetic construct
  source 1..75: mol_type = other DNA
tgcaggtgacacaggggcaggtactgaccggcagtggctgtactgctaacggtaactgtctttctggcgggaacg

SEQ ID NO: 184607 - DNA, 75 bp, synthetic construct
  source 1..75: mol_type = other DNA
aaaggtgctggggggctgcctgcagaaaaagcgcagctactgccagtttgattcgaagctggcgcagatagtcca

SEQ ID NO: 184608 - DNA, 75 bp, synthetic construct
  source 1..75: mol_type = other DNA
gtaaatttggtgttggatttggcattgtgagccagcgtccatcgaaattagattcagatgtgacctctcagtgca

SEQ ID NO: 184609 - DNA, 75 bp, synthetic construct
  source 1..75: mol_type = other DNA
tttactggctggcctgaccaccaaaaaacagggggaatcatggctatcgaagctgtttccgcgaatgttccgcta

SEQ ID NO: 184610 - DNA, 75 bp, synthetic construct
  source 1..75: mol_type = other DNA
atcgggaaaaataacgccgtctgtaatgaatatccgtccccaatcctgcccaaagaacgctggcgttatcagatg

SEQ ID NO: 184611 - DNA, 75 bp, synthetic construct
  source 1..75: mol_type = other DNA
tgctggcggcgattgaatctccgctgggcattacccgcgcagtggaaatcgctcacgcttccgagcgtttgatcg

SEQ ID NO: 184612 - DNA, 75 bp, synthetic construct
  source 1..75: mol_type = other DNA
gtaaacttgggtatccttcaatttatctgttttctaaaagaagctccctgaaaataaaacgacataatactaagt

SEQ ID NO: 184613 - DNA, 75 bp, synthetic construct
  source 1..75: mol_type = other DNA
atatcgcggcgaacagcaacgatgacgcatcactgcctccgccggagcaggataaacgctgggaaccgccatctc

SEQ ID NO: 184614 - DNA, 75 bp, synthetic construct
  source 1..75: mol_type = other DNA
atgaatatatttgaacaaactccaccaaaccgcagacgttatggtcttgctgcattcattgggctgattgctggc

SEQ ID NO: 184615 - DNA, 75 bp, synthetic construct
  source 1..75: mol_type = other DNA
ctatcagatccgctggaattaaagagaagaatttcgatgaagcaaatatacatgcttcgcaacgaagcaatcaga

SEQ ID NO: 184616 - DNA, 75 bp, synthetic construct
  source 1..75: mol_type = other DNA
ttatgggcgcggataaagtccgcaacaaagttaccgggtttatcgaaaaccgaatcggagggatgaaaggtggag

SEQ ID NO: 184617 - DNA, 75 bp, synthetic construct
  source 1..75: mol_type = other DNA
tccgcgaagtgctggatacagacgtgccggacagtgaatgcgtttttgccgtagtgctgacccgtggggatgtgc

SEQ ID NO: 184618 - DNA, 75 bp, synthetic construct
  source 1..75: mol_type = other DNA
gacgggcaacaactgaaaggtgtagaagccgtgatcgataaagatctggcctccgcgctgctcgccagtcagtta

SEQ ID NO: 184619 - DNA, 75 bp, synthetic construct
  source 1..75: mol_type = other DNA
ttttcacaaatctgttcgctaaaatcgccgcggcctgcgcatctgaccgatttgatctggaaacccgtcaacgtc

SEQ ID NO: 184620 - DNA, 75 bp, synthetic construct
  source 1..75: mol_type = other DNA
ttgttgattttcctgtagcaaagaacattatcttccatcccgaaatgttgcctcgccatgagaacggaatgcgga

SEQ ID NO: 184621 - DNA, 75 bp, synthetic construct
  source 1..75: mol_type = other DNA
gcgacgcttatccagacgcgtcaccgcatacccgaaacgccgctgaccgaagatcagatagttatcttccaggtg

SEQ ID NO: 184622 - DNA, 75 bp, synthetic construct
  source 1..75: mol_type = other DNA
ggataatagagattatgcgccgcgacttacgtaatcgcattactcatgagccggatccggaagtcgcaattcggt

SEQ ID NO: 184623 - DNA, 75 bp, synthetic construct
  source 1..75: mol_type = other DNA
cgaagcgctgggcgcgtggctggtgcactactccaccgactacgtcttcaacggcagcggcgaaaagccgtgggt

SEQ ID NO: 184624 - DNA, 75 bp, synthetic construct
  source 1..75: mol_type = other DNA
gaccgccaaagcgtggctttataaccaggataaggccaatctgacaattaacggagagctatccgttgggcaagg

SEQ ID NO: 184625 - DNA, 75 bp, synthetic construct
  source 1..75: mol_type = other DNA
caactgtacttcagaatagtatgtactacttcctagctaatgatccaagtaacatgatcttcgcaggtgctactg

SEQ ID NO: 184626 - DNA, 75 bp, synthetic construct
  source 1..75: mol_type = other DNA
ggatgttgccggtcttctcgcataccttggtttgggagaaggctcagcgttacccattggtgtgcctgttccgtg

SEQ ID NO: 184627 - DNA, 75 bp, synthetic construct
  source 1..75: mol_type = other DNA
acagactggttgataaatacacattcagaagagtgcagaaacataacatgtgaacagaatatcacaagtgttaaa

SEQ ID NO: 184628 - DNA, 75 bp, synthetic construct
  source 1..75: mol_type = other DNA
tctttatgatgaagatggcattttgattgctgtcgccaactgcccggaaacctacaagccgttactggccgaggg

SEQ ID NO: 184629 - DNA, 75 bp, synthetic construct
  source 1..75: mol_type = other DNA
tcagtctgggtacagcagcaacaaaaaatgtgggtacaggtgctggacaaataccggatatgtctagttttacga

SEQ ID NO: 184630 - DNA, 75 bp, synthetic construct
  source 1..75: mol_type = other DNA
gtggtcgccgtcgtatccccgatgcagatactgcaagattagaatgcccaaaatgtaataatgtaatcaccgaag

SEQ ID NO: 184631 - DNA, 75 bp, synthetic construct
  source 1..75: mol_type = other DNA
ctgaacagcaatgtacctgagtcccttaggcccctggctgattacattcagatgcgtctggccaagctgaccatg

SEQ ID NO: 184632 - DNA, 75 bp, synthetic construct
  source 1..75: mol_type = other DNA
attggctatgactcaggtgcagaatcgcaatacgaaagcgatgtagatgccatccgcgctgctggagtcaaagtg

SEQ ID NO: 184633 - DNA, 75 bp, synthetic construct
  source 1..75: mol_type = other DNA
gttaataccggaagtatgacagtcacggctgatggtacatcgctcatcggcggcagctttgtgctttataacgaa

SEQ ID NO: 184634 - DNA, 75 bp, synthetic construct
  source 1..75: mol_type = other DNA
caccaccacaaacactgaaaggacagcgcaaaaagatagcgcatgagcatgaatcagaaagattcgccccctgtt

SEQ ID NO: 184635 - DNA, 75 bp, synthetic construct
  source 1..75: mol_type = other DNA
acgcacgcaagcggccagatttcagatggccttatgccgtgcgtacagtcgtaagaagcccggggcgaatgcccg

SEQ ID NO: 184636 - DNA, 75 bp, synthetic construct
  source 1..75: mol_type = other DNA
gatgcgtctggccaagctgaccatggtcccgatgtcgggaaccatcatgaaagccgcactggaagacagcatcag

SEQ ID NO: 184637 - DNA, 75 bp, synthetic construct
  source 1..75: mol_type = other DNA
ggggattgctgtgccgcgcgtgcgcctgatcctcttcaccactgcggcgctgatcaccgccaccatcgtcagcat

SEQ ID NO: 184638 - DNA, 75 bp, synthetic construct
  source 1..75: mol_type = other DNA
ggtgaggatgtggcggtgaccgctgcggttgccacccgcctgatggcagagccgaatctgattgtccgggaagcg

SEQ ID NO: 184639 - DNA, 75 bp, synthetic construct
  source 1..75: mol_type = other DNA
tccgtaacggcgtcaactatgcgaaacaggcgcagtctgtactccagaccaccatcagtgccgttcgggtggcgc

SEQ ID NO: 184640 - DNA, 75 bp, synthetic construct
  source 1..75: mol_type = other DNA
gaggattgttggataggttattgaggcgtgagtatcgaatggaaggaagggcagtggctctggaaaggcaattaa

SEQ ID NO: 184641 - DNA, 75 bp, synthetic construct
  source 1..75: mol_type = other DNA
atgcgtctgaacgatcgtgcaggtgaaacgcgctatatcgatcctgtaactgaacaggagcgttcaagccgattt

SEQ ID NO: 184642 - DNA, 75 bp, synthetic construct
  source 1..75: mol_type = other DNA
ttgtcaatctctgagaatacggtcaatttccatcagaaaaacatgcagaaaaaaatcaatgcaccgaataagacc

SEQ ID NO: 184643 - DNA, 75 bp, synthetic construct
  source 1..75: mol_type = other DNA
tttgttgaaatgaactggatccataacagtaaagattttgctgtctcaatgaacggtgtgaaagtcgaacaagat

SEQ ID NO: 184644 - DNA, 75 bp, synthetic construct
  source 1..75: mol_type = other DNA
atgggtgattatttaaaagcaccgccgccgccgcgaacaaaagagcaagttttaagagaagcccgtgatcaaatc

SEQ ID NO: 184645 - DNA, 75 bp, synthetic construct
  source 1..75: mol_type = other DNA
aacaaaagagcaagtattaaaagaagcccgtgatcaaatcgatcatgggctttttttatgcggcacggcagcgga

SEQ ID NO: 184646 - DNA, 75 bp, synthetic construct
  source 1..75: mol_type = other DNA
caatacgcacgaagctcccgggtgtcggggcggtctccggtgccattccttcaccttcaggggtggcgcagttca

SEQ ID NO: 184647 - DNA, 75 bp, synthetic construct
  source 1..75: mol_type = other DNA
gtgaaaggggatgaattagcctatgaatcctatagcgcgaaaggtgcaaccgtctcgctggaagcgggttacggt

SEQ ID NO: 184648 - DNA, 75 bp, synthetic construct
  source 1..75: mol_type = other DNA
gctcaactccgccagcaccacgttcacccggatgtcgccggggttaagcactatggcagccaaaatactggcgag

SEQ ID NO: 184649 - DNA, 75 bp, synthetic construct
  source 1..75: mol_type = other DNA
aaaaagcccgccagttgaagaaaaagcaggcttataaaccggatcctgaggcgtcatttagctggtcagcaaata

SEQ ID NO: 184650 - DNA, 75 bp, synthetic construct
  source 1..75: mol_type = other DNA
gttcacgagctgagtatgggatcgtaaaacgattgttagcagctttaaaaaatgatcaggatatagagcttacaa

SEQ ID NO: 184651 - DNA, 75 bp, synthetic construct
  source 1..75: mol_type = other DNA
actcacattctccattcaatgagtgtttgcctcaattcgtttggtgattttttttcaaataacacatatgatgcg

SEQ ID NO: 184652 - DNA, 75 bp, synthetic construct
  source 1..75: mol_type = other DNA
acaacgccaacaacaactcggctggactctgatggaggatgccgggcgcggatggcggcgtacggttccctctcc

SEQ ID NO: 184653 - DNA, 75 bp, synthetic construct
  source 1..75: mol_type = other DNA
actgaaggcgtgctgcctggtccgctcaatgtgccgcgtcgtgccgtagcgctgcgtcgtcagctggtttccagc

SEQ ID NO: 184654 - DNA, 75 bp, synthetic construct
  source 1..75: mol_type = other DNA
aaaacaatcgagaatgatggtttcttaattgaaaaattaattgatttgcagctgaaaaataaaaccaacgcagat

SEQ ID NO: 184655 - DNA, 75 bp, synthetic construct
  source 1..75: mol_type = other DNA
gcctcaacagagcaatatcgtaaaagaataattcaaatgggggagtgcccgaatagtgtagttaatataggagca

SEQ ID NO: 184656 - DNA, 75 bp, synthetic construct
  source 1..75: mol_type = other DNA
gtggtttgttcggaatttgtcacggatgcctttgccaaagccgggcatccacttacactggcgcaatcgggctgg

SEQ ID NO: 184657 - DNA, 75 bp, synthetic construct
  source 1..75: mol_type = other DNA
acagagattattacggataatcagcttgatgggcagacgcgcaaaacgctggcgtccttgtcgacgcgtttaatc

SEQ ID NO: 184658 - DNA, 75 bp, synthetic construct
  source 1..75: mol_type = other DNA
agcactcacttatcctcaatcgcgaggccggttctttcttctttttaggcgaattgctggtcgatattccgctgc

SEQ ID NO: 184659 - DNA, 75 bp, synthetic construct
  source 1..75: mol_type = other DNA
atggttaagcctctggctgttgtcgcggttggcggcaatgcgctcatccaagacgatcagcacaatagtatcccc

SEQ ID NO: 184660 - DNA, 75 bp, synthetic construct
  source 1..75: mol_type = other DNA
gagacaaaaagtcgtggttttgttcggaatttgtcacggatgcctttgccaaagccgggcatccacttacactgg

SEQ ID NO: 184661 - DNA, 75 bp, synthetic construct
  source 1..75: mol_type = other DNA
ctgcgtttaagccagaaacgcagttacagtatgttgggcacctgaagccagggatttatatcaaggcgggtcgct

SEQ ID NO: 184662 - DNA, 75 bp, synthetic construct
  source 1..75: mol_type = other DNA
gtgttaagggcaaggtttgttacattaacataagccctgatggtagttatgctcgggttttgactgctccatgtc

SEQ ID NO: 184663 - DNA, 75 bp, synthetic construct
  source 1..75: mol_type = other DNA
actggtttacaaattactgactgcagaacaggagtatgaagcgacaggaagagaagaaacactcagggcggttat

SEQ ID NO: 184664 - DNA, 75 bp, synthetic construct
  source 1..75: mol_type = other DNA
accgaacgccgcgatctcgggcttgatgatggctctttctggcctgtactggaaggtatcccggcaacagagatg

SEQ ID NO: 184665 - DNA, 75 bp, synthetic construct
  source 1..75: mol_type = other DNA
ttctggtcgattctcgtcgcgtcaccgctgccggtgctgtggatgacgctgggttacggcttgcgcgaggcgtgg

SEQ ID NO: 184666 - DNA, 75 bp, synthetic construct
  source 1..75: mol_type = other DNA
atcggacgaccctatctgccccgttcagccacggaacagcgtaaaagtgaactgcttgaacagcgtgccgagccg

SEQ ID NO: 184667 - DNA, 75 bp, synthetic construct
  source 1..75: mol_type = other DNA
gccgcgcatccgatatctggcgcgaagtggcctcgctgtttcgcccgcctggccggttaccagtagcggaagcca

SEQ ID NO: 184668 - DNA, 75 bp, synthetic construct
  source 1..75: mol_type = other DNA
aacagaaggaagaaagggactttcaaatcagaagagcatccagagatggattaactgccgcttgccgggcttgcc

SEQ ID NO: 184669 - DNA, 75 bp, synthetic construct
  source 1..75: mol_type = other DNA
tcctgttactggtgatttatcacgttatccgccgctggatgctgatccaacgccgcaggttggcgtttgaccggg

SEQ ID NO: 184670 - DNA, 75 bp, synthetic construct
  source 1..75: mol_type = other DNA
ccacgcccacggtatcgatatgccattccctcctttccagatgcgtctggaaagtctgaacggtaaacaaacggg

SEQ ID NO: 184671 - DNA, 75 bp, synthetic construct
  source 1..75: mol_type = other DNA
accgagcagtttatcaactggtcgctctctgactcagtcacacgcgtggtgttgacgattccggctcctgccgat

SEQ ID NO: 184672 - DNA, 75 bp, synthetic construct
  source 1..75: mol_type = other DNA
taaccgcgaactatcggcggcgctgaatcaacaggcgcagcggatggatctcgttgcctcgcaacagcgtcaggc

SEQ ID NO: 184673 - DNA, 75 bp, synthetic construct
  source 1..75: mol_type = other DNA
gtgtttatcatcaccacgcagctggtgcgcaacctgcccgcgctgctggaactggcgattttgcagcacctggat

SEQ ID NO: 184674 - DNA, 75 bp, synthetic construct
  source 1..75: mol_type = other DNA
tgctgtggatgacgctgggttacggcttgcgcgaggcgtggccttatccgctggcggtcgcgattggcgatggcg

SEQ ID NO: 184675 - DNA, 75 bp, synthetic construct
  source 1..75: mol_type = other DNA
tcggacactcgaacgcgacgatcacgtataaccgatacgggaaggggattgctgttaggatgctagtcgagttga

SEQ ID NO: 184676 - DNA, 75 bp, synthetic construct
  source 1..75: mol_type = other DNA
ggctattactgcccctcttcacattttcatcctgggcagcggaacaaaatcccgctgtccatatcgcccccgcag

SEQ ID NO: 184677 - DNA, 75 bp, synthetic construct
  source 1..75: mol_type = other DNA
tagtttaagaagagcccaacaactagctgatgcaaagggtttttctttagacgaaatcgttgactacgcaatacg

SEQ ID NO: 184678 - DNA, 75 bp, synthetic construct
  source 1..75: mol_type = other DNA
agaacgatggggctgaagatgccggacggctccgtgtataccgccgacccgggcttcggatttaatcccggtcgg

SEQ ID NO: 184679 - DNA, 75 bp, synthetic construct
  source 1..75: mol_type = other DNA
ggttactactgccactcttcaccgcttcatcctgggcagtggagcaaaattccgctgtccatattgctcccgccg

SEQ ID NO: 184680 - DNA, 75 bp, synthetic construct
  source 1..75: mol_type = other DNA
gcccccggtagtgcgatgacacatctggcaataaccggcatggtggatggcaaaagcgttaactggaaggagtta

SEQ ID NO: 184681 - DNA, 75 bp, synthetic construct
  source 1..75: mol_type = other DNA
gccttattttgagcgcgtggcagtgatggaccttcacacccgcccgaaacacgccgccctgaacggttttaccgc

SEQ ID NO: 184682 - DNA, 75 bp, synthetic construct
  source 1..75: mol_type = other DNA
cctatgagagagagcgaaactaagccgataagtattgaggttaatggcggcaggaatgagcggtcagcattcgcg

SEQ ID NO: 184683 - DNA, 75 bp, synthetic construct
  source 1..75: mol_type = other DNA
aaatgtgtctggctgagggatgggcagagtatcgaccgtaaaggtcaggtaagtggtgatggccgtcgttcccgt

SEQ ID NO: 184684 - DNA, 75 bp, synthetic construct
  source 1..75: mol_type = other DNA
aatacgattaccgcagcgcccgccagtatgtcaccggcaccctgaccgggccggattttgcccggggactggcga

SEQ ID NO: 184685 - DNA, 75 bp, synthetic construct
  source 1..75: mol_type = other DNA
ggcctgacggtgcagagcagcgaggggcgactggttgaggttgaacaggaatatggccagccgggccagaccatc

SEQ ID NO: 184686 - DNA, 75 bp, synthetic construct
  source 1..75: mol_type = other DNA
ggcctgacggtgcagagcagcgaggggcggctggttgaggttgagcaggaatatggccagccgggccagaccatc

SEQ ID NO: 184687 - DNA, 75 bp, synthetic construct
  source 1..75: mol_type = other DNA
tacggggctgaaacggggctatcgtctggaagatctggttgtgatgcatgagccgctggcgcgaatgtgggtgtg

SEQ ID NO: 184688 - DNA, 75 bp, synthetic construct
  source 1..75: mol_type = other DNA
tgagaaaaacagcgatgcaaatcaggtggagagggatgtatcagcagttactgaaggttgacccgctaaagtgca

SEQ ID NO: 184689 - DNA, 75 bp, synthetic construct
  source 1..75: mol_type = other DNA
tggtgctgttcatcaccggactgttgccacacaaaaaaggtctgcttccggtgtaaaagtcgctcctgcccgcac

SEQ ID NO: 184690 - DNA, 75 bp, synthetic construct
  source 1..75: mol_type = other DNA
atgagtggagatgagttcatggaaaggttctcctggcatgtagcagataaggggttccgtatggtgaggtactac

SEQ ID NO: 184691 - DNA, 75 bp, synthetic construct
  source 1..75: mol_type = other DNA
tcagacagatgtggagccggggatattcacggtgatccacacatgggggcgtgaccagcagtggcatccgcatat

SEQ ID NO: 184692 - DNA, 75 bp, synthetic construct
  source 1..75: mol_type = other DNA
ttcagcagggtaaccgctggcttaactggctggagaagcagccggaaggctcagtgcgtccggtagtcattgaat

SEQ ID NO: 184693 - DNA, 75 bp, synthetic construct
  source 1..75: mol_type = other DNA
tcccgactgtccgtggcagcatattgtgttcacacttccctgccagtactggtccctggtgttccacaaccggag

SEQ ID NO: 184694 - DNA, 75 bp, synthetic construct
  source 1..75: mol_type = other DNA
tgccaatgagccgtctggagcactatgctggtcaggatgaaattggtctgcgttacaacagtcaccggacaaaac

SEQ ID NO: 184695 - DNA, 75 bp, synthetic construct
  source 1..75: mol_type = other DNA
tggtgctgttcgtcaccggactgttgccacaccaaaaaggtctgcttccggtgtaaaagccgctcctgtccgcac

SEQ ID NO: 184696 - DNA, 75 bp, synthetic construct
  source 1..75: mol_type = other DNA
gatgtgatactggaaatctgccatcaggcagatgtggagccggggatattcacggtgatccacacatgggggcgt

SEQ ID NO: 184697 - DNA, 75 bp, synthetic construct
  source 1..75: mol_type = other DNA
cggaaatatccggacctggtgataccggatgcgctggcagcagaaggaagcagtaaacgggactggaatcgcttc

SEQ ID NO: 184698 - DNA, 75 bp, synthetic construct
  source 1..75: mol_type = other DNA
atccacacatggggacgagaccagcagtggcatccgcacatacacctgtcgacaacagccggcggtgtgacgtca

SEQ ID NO: 184699 - DNA, 75 bp, synthetic construct
  source 1..75: mol_type = other DNA
ttcagcagggaaaccgctggcttaactggctggagaaacaaccggaagggccagtccgtccggtggtaattgaat

SEQ ID NO: 184700 - DNA, 75 bp, synthetic construct
  source 1..75: mol_type = other DNA
cgtcacagcccggaggtcagtaagcgtctcagtccttcccgtaatgacaacaacgtccacgataaaatgtttctt

SEQ ID NO: 184701 - DNA, 75 bp, synthetic construct
  source 1..75: mol_type = other DNA
agccggttaccagtagcggaagccatcaggcgttatatgcgggtaccacggggagccaatacttccggtccgtgg

SEQ ID NO: 184702 - DNA, 75 bp, synthetic construct
  source 1..75: mol_type = other DNA
acccacaccggaaccggtatccacgcctgttaaaaaacaaaaacggaagaaaacagtaactgacgatgttaaccc

SEQ ID NO: 184703 - DNA, 75 bp, synthetic construct
  source 1..75: mol_type = other DNA
caccgctatctgttctggacctctgacgtgcgcccgatgaccatcgcctggccgctggaaatcgcccaggatctg

SEQ ID NO: 184704 - DNA, 75 bp, synthetic construct
  source 1..75: mol_type = other DNA
gaacggcttgtttatcgctcattttggctggccgcgcgaacgtgtttcccgtgggatgcgctactacctgatgag

SEQ ID NO: 184705 - DNA, 75 bp, synthetic construct
  source 1..75: mol_type = other DNA
ggtagcgtgacgaaaattaacacccgcgccaccaccatcagcgactgggaccgtaaagagataatcgtgccgaac

SEQ ID NO: 184706 - DNA, 75 bp, synthetic construct
  source 1..75: mol_type = other DNA
tcagtgcgtccggtagtcattgagtctgtgacaaaaatcatggcctgcgggaccacgctgatggggtacacacag

SEQ ID NO: 184707 - DNA, 75 bp, synthetic construct
  source 1..75: mol_type = other DNA
tgtacgtcataacggagacggtgagaaaaacggcgatgcaaatcaggtggagagggatgtatcagcggttactga

SEQ ID NO: 184708 - DNA, 75 bp, synthetic construct
  source 1..75: mol_type = other DNA
gccatcaggcagatgtggagccggggatattcacggtgatccacacatgggggcgtgaccagcagtggcatccgc

SEQ ID NO: 184709 - DNA, 75 bp, synthetic construct
  source 1..75: mol_type = other DNA
ccttatgttgtggagccgatgaattgcctggcatcacgcgaatatgatgctgtcatttttgttggccctgcccga

SEQ ID NO: 184710 - DNA, 75 bp, synthetic construct
  source 1..75: mol_type = other DNA
agatatgaaacgtgaactgaatggtcgcggcgtctggttgcgtgaaggtgagcagattgacagagaagggaatgt

SEQ ID NO: 184711 - DNA, 75 bp, synthetic construct
  source 1..75: mol_type = other DNA
acgtcataacggagacggtgagaaaaacggcgatgcaaatcaggtggagagggatgtatcagaggttaccgactg

SEQ ID NO: 184712 - DNA, 75 bp, synthetic construct
  source 1..75: mol_type = other DNA
ccgaggcgctggtcattctgcatgggtacgagaaaattcagtggcctgatgcgccggagtgggcgtgccgggaaa

SEQ ID NO: 184713 - DNA, 75 bp, synthetic construct
  source 1..75: mol_type = other DNA
tggttgagagttcgcccgggcgggatatcaccgacaccaaatggcgctgtggtggcgcacatgaggcaccgccaa

SEQ ID NO: 184714 - DNA, 75 bp, synthetic construct
  source 1..75: mol_type = other DNA
gccgcgcatccgatatctggcgcgaggtggcctcgctgtttcgcccacccagccggctgccagtagcggaagcca

SEQ ID NO: 184715 - DNA, 75 bp, synthetic construct
  source 1..75: mol_type = other DNA
agacacacagaacaggctcagtgtgaatactctgatggtgaatacgtattatgacttcagaaacagcagtgcatt

SEQ ID NO: 184716 - DNA, 75 bp, synthetic construct
  source 1..75: mol_type = other DNA
aagctggtgcttcggttgtgactcagactgaccagcgcttttgtcaggactttggggacgatgtttataagtata

SEQ ID NO: 184717 - DNA, 75 bp, synthetic construct
  source 1..75: mol_type = other DNA
cgcttgctgtggtgggcatgttttcaggccaggccctggctgatagaggcaaaacaggcttttatatgaccggta

SEQ ID NO: 184718 - DNA, 75 bp, synthetic construct
  source 1..75: mol_type = other DNA
cggctttccatgaaaacttcggtgaaggcgatcgctgtgatttagatactacttatcgtttcaacagccgtatcg

SEQ ID NO: 184719 - DNA, 75 bp, synthetic construct
  source 1..75: mol_type = other DNA
gcgtctgcacggcaccgaatggggtgagacgcagcgttttcaccgccatcttgatgctcactggcggcgctggag

SEQ ID NO: 184720 - DNA, 75 bp, synthetic construct
  source 1..75: mol_type = other DNA
attcgtgtaatgccaacacaggttgcgatagacagttttaaaagtttaggtataaacccttcacctatggcttat

SEQ ID NO: 184721 - DNA, 75 bp, synthetic construct
  source 1..75: mol_type = other DNA
tgagtcttcaccacttaatccggcgcaggctcgtgcagttgtcaatggcgagcattcgttattagtacttgctgg

SEQ ID NO: 184722 - DNA, 75 bp, synthetic construct
  source 1..75: mol_type = other DNA
gagacgcagcgtttttaccatcatcttgatgctcactggcggcggtggagtagcgagatgagcgaaattgcatct

SEQ ID NO: 184723 - DNA, 75 bp, synthetic construct
  source 1..75: mol_type = other DNA
aactgccgtgaggcgtggcgtaaatgtcaggcctggttgaaagatattgaaagcgctcggttgcagcataatcag

SEQ ID NO: 184724 - DNA, 75 bp, synthetic construct
  source 1..75: mol_type = other DNA
ggcaggcagtgaagtttattcagcttcagcgtcaaaatacgaaaacaacctggcatggagcctgggtgccggtgt

SEQ ID NO: 184725 - DNA, 75 bp, synthetic construct
  source 1..75: mol_type = other DNA
agcatataaatattactgacctgcacggtcgggatctgattagtgaagttgatatattgggtaatgaaataacac

SEQ ID NO: 184726 - DNA, 75 bp, synthetic construct
  source 1..75: mol_type = other DNA
tgttcagtaaacgtatcaagttgatggccccgttattaaaagcctggaaaggtgcgctgaaggcagaaaacgctg

SEQ ID NO: 184727 - DNA, 75 bp, synthetic construct
  source 1..75: mol_type = other DNA
gttacaaggacgagtggggcgataaatataaatcagaggctgatgttaaaagtcatgacatcatgtttggtgtga

SEQ ID NO: 184728 - DNA, 75 bp, synthetic construct
  source 1..75: mol_type = other DNA
gctgcagaaactggttgatgaaaaacacggtcaggtggtttctgtcggtaaaattgcagacatctacgccaactg

SEQ ID NO: 184729 - DNA, 75 bp, synthetic construct
  source 1..75: mol_type = other DNA
caagagctgctggataaactggttgaacgcgctaatctgccgggttacctcggtaactgccactcttccggtacg

SEQ ID NO: 184730 - DNA, 75 bp, synthetic construct
  source 1..75: mol_type = other DNA
attttaccatcgacacggttaattcatccgtaatgtgtattcaaagaagcaacgcggatggtaattgtctgacag

SEQ ID NO: 184731 - DNA, 75 bp, synthetic construct
  source 1..75: mol_type = other DNA
ctccctgtcttacaaggatgcagaaggggataaatataaatcagaggctgacgttaaaagtcgcgacatcatgtt

SEQ ID NO: 184732 - DNA, 75 bp, synthetic construct
  source 1..75: mol_type = other DNA
cgcttgctatggcgggcgtattttcagcccaggctcaggctgataggggtaaaacaggcttttatgtgaccggta

SEQ ID NO: 184733 - DNA, 75 bp, synthetic construct
  source 1..75: mol_type = other DNA
ctccctgtcttacagggatgcagaaggggataaatataaatcagaggctgacgttaaaagtcacgacatcatgtt

SEQ ID NO: 184734 - DNA, 75 bp, synthetic construct
  source 1..75: mol_type = other DNA
agaacaggctcagtgtgaataccctgatggtgaacacgtattatgatttcagaaacagcagtgcattcacgccat

SEQ ID NO: 184735 - DNA, 75 bp, synthetic construct
  source 1..75: mol_type = other DNA
ctggctgaaagatattgaaggcagtcggttacagcataatcaggtgtataccgaaaccatgctcaccgaatatgc

SEQ ID NO: 184736 - DNA, 75 bp, synthetic construct
  source 1..75: mol_type = other DNA
cagcaaaaaagtaccgacagtcagcaagctggaaaatgacaccgcggctcgtcatgaactctttattgctgagtg

SEQ ID NO: 184737 - DNA, 75 bp, synthetic construct
  source 1..75: mol_type = other DNA
gtttctggctaacggtacacccggaacatggttttacaccgatgatgcagccgtcacaaaagagtggctgcgggc

SEQ ID NO: 184738 - DNA, 75 bp, synthetic construct
  source 1..75: mol_type = other DNA
gtttctggcgaacggtacacccggcacatggttttacaccgatgacgcagccgtcacaaaagagtggctgcgggc

SEQ ID NO: 184739 - DNA, 75 bp, synthetic construct
  source 1..75: mol_type = other DNA
gatggttgttccggcgggtctggttaacaactggcaccgcgagctgaatgaagttttcaatttgaattttgaagt

SEQ ID NO: 184740 - DNA, 75 bp, synthetic construct
  source 1..75: mol_type = other DNA
gtcgtggcgaactgaaccgggctttgatggttgttccggcgggtctggttaacaactggcaccgcgagctgaatg

SEQ ID NO: 184741 - DNA, 75 bp, synthetic construct
  source 1..75: mol_type = other DNA
gctaccccatcaggtagtgctgactcatagggttgcctgcgcgagcccgcgtcgttttctgattgccgatgaagt

SEQ ID NO: 184742 - DNA, 75 bp, synthetic construct
  source 1..75: mol_type = other DNA
caccgatgcccgttgtatccgtgaaatgtatgaagcgccattacaggcgctcaatattctgtccagatacccgca

SEQ ID NO: 184743 - DNA, 75 bp, synthetic construct
  source 1..75: mol_type = other DNA
atgagtatagtggttgcacgcttggctggaggtttaggaaatcagatgtttcagtatgcgaaaggttatgctgag

SEQ ID NO: 184744 - DNA, 75 bp, synthetic construct
  source 1..75: mol_type = other DNA
aagcggtagcaaaagtggaagagcatattgccgatgcgctggagaaaggcgcgcgcgtggtttgcggcggtaaag

SEQ ID NO: 184745 - DNA, 75 bp, synthetic construct
  source 1..75: mol_type = other DNA
ggcgcgcgcgtggtttgcggcggtaaagcacacgaacgtggcggcaacttcttccagccgaccattctggtggac

SEQ ID NO: 184746 - DNA, 75 bp, synthetic construct
  source 1..75: mol_type = other DNA
acgcatttatggcgacaccattcccggtcatcaggccgataaacgcctgattgttatcaagcagccgattggcgt

SEQ ID NO: 184747 - DNA, 75 bp, synthetic construct
  source 1..75: mol_type = other DNA
gactttgcttttaatgaggcgaaagaacagattcgcattgagttcgatttaggtcatgaccgtctttctgacctt

SEQ ID NO: 184748 - DNA, 75 bp, synthetic construct
  source 1..75: mol_type = other DNA
gggaactgattatttttgtcgggccacagcagaacgtcgttgttcttcctgcagactcttttcctgaaggtgcga

SEQ ID NO: 184749 - DNA, 75 bp, synthetic construct
  source 1..75: mol_type = other DNA
gtaaagatggctgcacccgacatggatatcgttatccgttgggcaaacaaaattcaacaggcagcgcggaatgtt

SEQ ID NO: 184750 - DNA, 75 bp, synthetic construct
  source 1..75: mol_type = other DNA
atggaagaaaataatacgagtacagataaaaacaccctgacagcccttattgattatgaaaactgtggcagcctg

SEQ ID NO: 184751 - DNA, 75 bp, synthetic construct
  source 1..75: mol_type = other DNA
caggagggtgaactgacaaaaattcagcaagccgtacaacctgttatagaaaaacataaaaaaacggtcggtaaa

SEQ ID NO: 184752 - DNA, 75 bp, synthetic construct
  source 1..75: mol_type = other DNA
tcgttcaaagtctaagtttagggatattattagcaagttgtagccttttttctacaacccttaacgcggaagtca

SEQ ID NO: 184753 - DNA, 75 bp, synthetic construct
  source 1..75: mol_type = other DNA
ttaaacgagcaattacaggaaatgtgtgaagctatagggggtactcaggctgagatgcttgctggaacagataaa

SEQ ID NO: 184754 - DNA, 75 bp, synthetic construct
  source 1..75: mol_type = other DNA
tagaacttggtgataagtcaataatagattttatttctaaggttactgataacgttaaatcctattggagtcgat

SEQ ID NO: 184755 - DNA, 75 bp, synthetic construct
  source 1..75: mol_type = other DNA
tacgaagaaattgaatttagcaatgggaagatgatattaaagttaaaacgtaaaaaaatgagtctgcaactgaca

SEQ ID NO: 184756 - DNA, 75 bp, synthetic construct
  source 1..75: mol_type = other DNA
ttataaccttgttttgggtgacaccattgaaggtcgcattttcctgctgctggatgaaaaactggaggaaattgc

SEQ ID NO: 184757 - DNA, 75 bp, synthetic construct
  source 1..75: mol_type = other DNA
gatcttgcccgtgttttatgtgaacaaggttggagtgaagattcagcacataagctagttatagagtatgatttt

SEQ ID NO: 184758 - DNA, 75 bp, synthetic construct
  source 1..75: mol_type = other DNA
taatacaataatcacggatttttataactcgtgcttaaaaccagttgcacttgagttaaaaattgatattaaaat

SEQ ID NO: 184759 - DNA, 75 bp, synthetic construct
  source 1..75: mol_type = other DNA
tttaaaaggtcaggtgataacattttacctgatgctggtctaagcattttccagaaagaaaatgatatttggtat

SEQ ID NO: 184760 - DNA, 75 bp, synthetic construct
  source 1..75: mol_type = other DNA
cagtcaccgtacaaaacgggaagaatacctgttgatgagtggagatgagttcatggaaaggttctcctggcatgt

SEQ ID NO: 184761 - DNA, 75 bp, synthetic construct
  source 1..75: mol_type = other DNA
atggatattgaagaactgacaaaaaaggtgaaagaaagagctgctaagcgaactgatgaagagcggttcaaacta

SEQ ID NO: 184762 - DNA, 75 bp, synthetic construct
  source 1..75: mol_type = other DNA
atgctcatggattaccgtcaagatccacgattgtgactgatgcaacgattaatttctattttgatgaaagctggg

SEQ ID NO: 184763 - DNA, 75 bp, synthetic construct
  source 1..75: mol_type = other DNA
atccgtttggcgatatcaaatctgatggcacggtgaaaacggctctcgaaaaccttggtttgggagaaggttctg

SEQ ID NO: 184764 - DNA, 75 bp, synthetic construct
  source 1..75: mol_type = other DNA
ttttcataaacgttggtttgggagaagcggcaaaacttggcgctgctgtaggggtaacgggtaataccgggagaa

SEQ ID NO: 184765 - DNA, 75 bp, synthetic construct
  source 1..75: mol_type = other DNA
atcaactggggcagttgatttgagttctacagccgcatatagcttagcggtgggccgatcatactatacgacggt

SEQ ID NO: 184766 - DNA, 75 bp, synthetic construct
  source 1..75: mol_type = other DNA
gtggctgggatgacgggcgtggagtggatagcggtcgtactttattaacgaatcaagagcatgcagtaatttctc

SEQ ID NO: 184767 - DNA, 75 bp, synthetic construct
  source 1..75: mol_type = other DNA
ccgcgacatgcatattcatctcgacaaaaccttttacggcgggccgtggcgctcgctcaatcgcccggcaggcac

SEQ ID NO: 184768 - DNA, 75 bp, synthetic construct
  source 1..75: mol_type = other DNA
aaaactgattgatttattgcagtcgaaaggcactaccattgcccgcagccactgcaatatcgaaccggtttccgg

SEQ ID NO: 184769 - DNA, 75 bp, synthetic construct
  source 1..75: mol_type = other DNA
gatggcgcgatggaaaaatccctcgataccatgtttcagattgcgctggactacgacaaaggtgtcgatattcac

SEQ ID NO: 184770 - DNA, 75 bp, synthetic construct
  source 1..75: mol_type = other DNA
gacaatgaatggtgttacttcttatttcggtgtccgtccacgcaacatcgcatttaactacattgtgagggctgc

SEQ ID NO: 184771 - DNA, 75 bp, synthetic construct
  source 1..75: mol_type = other DNA
aggtgctccagctattggcgttccgttcttctggccctccgcggcaatgccaaatactgtaatcgacagctggtc

SEQ ID NO: 184772 - DNA, 75 bp, synthetic construct
  source 1..75: mol_type = other DNA
ctgcacgaaaccactccggcgggcgtggcggccatcaattatatggttgaaacggtagagaaaacgccgcaactg

SEQ ID NO: 184773 - DNA, 75 bp, synthetic construct
  source 1..75: mol_type = other DNA
atgccatttgctcgttatttctacattttcataaacgttggtttgggagaaggctctgcattacctgttggtgtg

SEQ ID NO: 184774 - DNA, 75 bp, synthetic construct
  source 1..75: mol_type = other DNA
ttgcttaccgcgcttcgtgctctgctgttaagccgcaagaatccgtttggtgatatcaaatcggatggcacggtg

SEQ ID NO: 184775 - DNA, 75 bp, synthetic construct
  source 1..75: mol_type = other DNA
ctgaaatgcaacggagcagctttttctgctgaagaatacccagaactggcaaaggcttacccgacaaataaattg

SEQ ID NO: 184776 - DNA, 75 bp, synthetic construct
  source 1..75: mol_type = other DNA
tacccgacaaataaattgcctgatttacgcggtgagtttattcgtggctgggatgatggaagagggattgatact

SEQ ID NO: 184777 - DNA, 75 bp, synthetic construct
  source 1..75: mol_type = other DNA
ctgttggggtgcctgttccgtggccttcagccacaccgccaacaggctggctgaaatgcaatggtgcggattttt

SEQ ID NO: 184778 - DNA, 75 bp, synthetic construct
  source 1..75: mol_type = other DNA
acggatgcgggacaccgggcatattcgggatttacatcatcatatggcgggagtgaaacccgtccacgaaatatt

SEQ ID NO: 184779 - DNA, 75 bp, synthetic construct
  source 1..75: mol_type = other DNA
aatggtgcgcctttttctgcagaagaatacccggaactggcaaaggcttatccgacaaataaattgcctgattta

SEQ ID NO: 184780 - DNA, 75 bp, synthetic construct
  source 1..75: mol_type = other DNA
tattcggtcatgggacgcgtgggataacacggtattggtgccaaatgacagagggggggatagtctgttgtcgac

SEQ ID NO: 184781 - DNA, 75 bp, synthetic construct
  source 1..75: mol_type = other DNA
ctctgcattttcttaaacgttggtttgggagaaggctctgcattaccggttggggtgcctgttccgtggccttca

SEQ ID NO: 184782 - DNA, 75 bp, synthetic construct
  source 1..75: mol_type = other DNA
tggtgcggctttttctgctgaagaatacccggaactggcaaaggcttacccgacaaataaattgcctgatttacg

SEQ ID NO: 184783 - DNA, 75 bp, synthetic construct
  source 1..75: mol_type = other DNA
aaaatcggaattaaatacatcaatagtaacattcaaatattattattgttatttatagtttgttattttgcgcac

SEQ ID NO: 184784 - DNA, 75 bp, synthetic construct
  source 1..75: mol_type = other DNA
caggcggaaccctgattccatcaccaacgctacatacacgagggagtattggtaacacaggcgggagcgaaacac

SEQ ID NO: 184785 - DNA, 75 bp, synthetic construct
  source 1..75: mol_type = other DNA
ccatgcacactatatggaattatggacaggggacggactcgccgcaggaagtgcacgggaaggacgtaaacccag

SEQ ID NO: 184786 - DNA, 75 bp, synthetic construct
  source 1..75: mol_type = other DNA
tctgcgctgcccgttggtgtgcccgttccatggccctcagccacgctgccaacggggtggctgaaatgtaacggc

SEQ ID NO: 184787 - DNA, 75 bp, synthetic construct
  source 1..75: mol_type = other DNA
tgatgccccgcgcgccgcttatgaagtcagcaatctggagctggcaatcatcaacctgaccatgaccaacatccg

SEQ ID NO: 184788 - DNA, 75 bp, synthetic construct
  source 1..75: mol_type = other DNA
gaacgttccgccgaagcagaagcccgcgccaccaaaatggtgtctgaagccatcgcctccggtgatattcaggcg

SEQ ID NO: 184789 - DNA, 75 bp, synthetic construct
  source 1..75: mol_type = other DNA
aacaacttgacgctatgcaaaatgttacgggttctctgattgataacactatggggtcagcttcctcagcatctg

SEQ ID NO: 184790 - DNA, 75 bp, synthetic construct
  source 1..75: mol_type = other DNA
ggggaccggtgaggtgatgcgtatcgaagcgccgatggatgatggtttgaagcgttgtttgcaaaaactgcgtaa

SEQ ID NO: 184791 - DNA, 75 bp, synthetic construct
  source 1..75: mol_type = other DNA
gtgaggtgatgcgtatcgaagcgccgatggatgatggtctgaagcgttgtttgcagaaactgcgtaatgcgcgtt

SEQ ID NO: 184792 - DNA, 75 bp, synthetic construct
  source 1..75: mol_type = other DNA
ggtttgggagaaggctcagcattacccgttggcgtacctgttccgtggccttcagccacaccgccgacaggctgg

SEQ ID NO: 184793 - DNA, 75 bp, synthetic construct
  source 1..75: mol_type = other DNA
ggctctcgaaaaccttggtttgggagaaggttcagcattacccgttggcgtgcctgttccgtggccttccgccac

SEQ ID NO: 184794 - DNA, 75 bp, synthetic construct
  source 1..75: mol_type = other DNA
tacgtggtgagtttattcgtggctgggatgatgggcgcggcgttgattcaaggcgtgcggtgctgtcaacacaag

SEQ ID NO: 184795 - DNA, 75 bp, synthetic construct
  source 1..75: mol_type = other DNA
atgcttatctttatcccgattctcatttttgtcgcgctggtcattgtcggcgcgggtgtcaaaatcgtaccgcag

SEQ ID NO: 184796 - DNA, 75 bp, synthetic construct
  source 1..75: mol_type = other DNA
aactggcaaaggtttatccgacaaataaattgcctgatttacgcggcgaattcattcgtgggtgggatgatgggc

SEQ ID NO: 184797 - DNA, 75 bp, synthetic construct
  source 1..75: mol_type = other DNA
aacaggctggctgaaatgcaatggtgcgcctttttctgccgaagagtatccggaactggcaaaagtttatccgac

SEQ ID NO: 184798 - DNA, 75 bp, synthetic construct
  source 1..75: mol_type = other DNA
actggtaatgcatttagttactatggtgtgacacttgatttatccaggagtgcaagaacatcagcagaaacaagg

SEQ ID NO: 184799 - DNA, 75 bp, synthetic construct
  source 1..75: mol_type = other DNA
gccgagaaccgcaacgttccataaagggcaactggtgtggggaagtgggcaggttgatgcgcatttgaaacgcct

SEQ ID NO: 184800 - DNA, 75 bp, synthetic construct
  source 1..75: mol_type = other DNA
tcgcctcgacggtaccgattggcacgctacatatgccgctcaaacagctgcatgacaaaggcgtaaaagtcatga

SEQ ID NO: 184801 - DNA, 75 bp, synthetic construct
  source 1..75: mol_type = other DNA
aacggtagagaaaacgccgcagctgaagggcaagcagaccatcagtcacgccttcgcgctggcaacgctcaacga

SEQ ID NO: 184802 - DNA, 75 bp, synthetic construct
  source 1..75: mol_type = other DNA
gagcagaaaatgctgccggagctgcaaccgtacactcaggagcgggcagaaaaactgattgatttattgcagtcg

SEQ ID NO: 184803 - DNA, 75 bp, synthetic construct
  source 1..75: mol_type = other DNA
cgaaaatggcgtggcggtgcagacccgcacggcgcgccagaccgtggagattcagaacggcaaaattgtcgcgct

SEQ ID NO: 184804 - DNA, 75 bp, synthetic construct
  source 1..75: mol_type = other DNA
aatttctatcgcctcgacggtgccgattggcacgctgcatatgccgctcaaacagttgcacgacaaaggcgtaaa

SEQ ID NO: 184805 - DNA, 75 bp, synthetic construct
  source 1..75: mol_type = other DNA
tgagtccctctacaaacaatagttatttctccttaaccagaagtatggtgacagaaagagcagacggcgctgttt

SEQ ID NO: 184806 - DNA, 75 bp, synthetic construct
  source 1..75: mol_type = other DNA
cgcggtgaatttattcgtggctgggatgatgggcgtagtgcggatgcggggagaacaatattatcagctcagggc

SEQ ID NO: 184807 - DNA, 75 bp, synthetic construct
  source 1..75: mol_type = other DNA
gatgggcgtggggtggattcctctcgtggtttgttgacatctcaagaccatttatttgcttctcatgggcactgg

SEQ ID NO: 184808 - DNA, 75 bp, synthetic construct
  source 1..75: mol_type = other DNA
cgtagtgttaaacgttatggtgaaattagtggaaatgtaggtacagaaactcgtcctcgtaacatcgcttttaat

SEQ ID NO: 184809 - DNA, 75 bp, synthetic construct
  source 1..75: mol_type = other DNA
cgccaacaggctggctgaaatgcaacggtgcagcattttcttctgaaatgtatcccaaactggcaaaggcctacc

SEQ ID NO: 184810 - DNA, 75 bp, synthetic construct
  source 1..75: mol_type = other DNA
tatcctagtctggcattgccgaatttacgcggtgagttcatccgtggctgggatgacgggcgcggtattgacgcg

SEQ ID NO: 184811 - DNA, 75 bp, synthetic construct
  source 1..75: mol_type = other DNA
acaaaaatatgactggtgggcttatgtatcagctcgtccgcgtaatattgcatttaattacatcgtaagagcggc

SEQ ID NO: 184812 - DNA, 75 bp, synthetic construct
  source 1..75: mol_type = other DNA
atgccagttagctgttacctctgcattttcttaaacgttggtttgggagaaggctcagcattacctgttggggtg

SEQ ID NO: 184813 - DNA, 75 bp, synthetic construct
  source 1..75: mol_type = other DNA
cgtagtgtaaaacgttttggtgaaattagtggaaatgtaggtacagaaactcgtcctcgtaacatcgcttttaat

SEQ ID NO: 184814 - DNA, 75 bp, synthetic construct
  source 1..75: mol_type = other DNA
gatgctggaaaagcaccgtcatattgttgttgccaatgatggttacgacacaaaagatgaatgggaactggctac

SEQ ID NO: 184815 - DNA, 75 bp, synthetic construct
  source 1..75: mol_type = other DNA
gtggcaccgctgcggcttttaatgtaccaggcggcaccgaaacacgcccacgtaacattgcattcaactttttag

SEQ ID NO: 184816 - DNA, 75 bp, synthetic construct
  source 1..75: mol_type = other DNA
gatttacgcggtgagtttatccgtggatgggacgacgggcgcaaagttgatacaggacgtaagttgctgtccgca

SEQ ID NO: 184817 - DNA, 75 bp, synthetic construct
  source 1..75: mol_type = other DNA
atttcgacattgggtctggtcattcaatcaataactatgaccaaattgtttctaaccaaccaggattttcccgtt

SEQ ID NO: 184818 - DNA, 75 bp, synthetic construct
  source 1..75: mol_type = other DNA
cccgacaaataaattgcctgatttacgcggtgagtttattaggggctgggatgacgggcgtggtattgatgctgt

SEQ ID NO: 184819 - DNA, 75 bp, synthetic construct
  source 1..75: mol_type = other DNA
gaggatatattgcaagcctgacgccgggtgctgatagcccacttgattttgatgattattctgtatcttctaatc

SEQ ID NO: 184820 - DNA, 75 bp, synthetic construct
  source 1..75: mol_type = other DNA
ttgggagaaggttcggcattacccgttggcgtgcctgttccgtggccttccgccactccgccaacaggctggctg

SEQ ID NO: 184821 - DNA, 75 bp, synthetic construct
  source 1..75: mol_type = other DNA
aggttcagcattacctgttggtgcgcctgttccgtggccttcagagacacctccaacaggctggctgaaatgcaa

SEQ ID NO: 184822 - DNA, 75 bp, synthetic construct
  source 1..75: mol_type = other DNA
aaaataacaaacgaacagcaacgggtctaagtaccagtattgtcggcgcaactgaaacccgcccccgtaacattg

SEQ ID NO: 184823 - DNA, 75 bp, synthetic construct
  source 1..75: mol_type = other DNA
cttctgattctggcgtttttacaaccagcgtcatcggagatgcttcatctgattcaattaaaggtggttatgcaa

SEQ ID NO: 184824 - DNA, 75 bp, synthetic construct
  source 1..75: mol_type = other DNA
gaccacactgacgggctacacgcagtggtgttgttcatcaccggactgttgccacacaaaaaaggtctgcttccg

SEQ ID NO: 184825 - DNA, 75 bp, synthetic construct
  source 1..75: mol_type = other DNA
gtatggtgaggtactacggtttcctgagtccgtcgaaacggcggttactggaagaggtggtgtacggcctagcgg

SEQ ID NO: 184826 - DNA, 75 bp, synthetic construct
  source 1..75: mol_type = other DNA
taccgccgtggctggaatatcaacgtatcccgggtgatggataatgccacccatgtggcggtgtactcaggctct

SEQ ID NO: 184827 - DNA, 75 bp, synthetic construct
  source 1..75: mol_type = other DNA
tccagggtgatggataacgccacacatgtggcggtgtacttcggctcttacctgaaaaagccaccggtgccgatg

SEQ ID NO: 184828 - DNA, 75 bp, synthetic construct
  source 1..75: mol_type = other DNA
tggcatgtggcggataaggggttccgtatggtgaggtactacggttttctgagtccggcgaaacggcggttactg

SEQ ID NO: 184829 - DNA, 75 bp, synthetic construct
  source 1..75: mol_type = other DNA
cggggctgaagcggggttaccgactggcagagctggtcctgatgcatgagcgactggcacgacagcaggtgtgcg

SEQ ID NO: 184830 - DNA, 75 bp, synthetic construct
  source 1..75: mol_type = other DNA
tagaatatatcctttatacatttttgcagttattgcagaaatgttagttcagtattataacggtgctggtgttcc

SEQ ID NO: 184831 - DNA, 75 bp, synthetic construct
  source 1..75: mol_type = other DNA
tggcatgtagcagataaggggttccgtatggtgaggtactacggtttcctgagtccggtgaagcgccggttactg

SEQ ID NO: 184832 - DNA, 75 bp, synthetic construct
  source 1..75: mol_type = other DNA
ctgttggtgtgcctgttccgtggccttccgccactccgccgacaggctggctgaaatgcaatggtgcggcttttt

SEQ ID NO: 184833 - DNA, 75 bp, synthetic construct
  source 1..75: mol_type = other DNA
gaactggtgatgccggatgcgctggcagcagaaggaagcagtaaacgggaatggaatcgcttcctggacacgcat

SEQ ID NO: 184834 - DNA, 75 bp, synthetic construct
  source 1..75: mol_type = other DNA
cacggtgatccacacatgggggcgtaaccagcagtggcatccgcatatccatttatcgacaactgccggtggtgt

SEQ ID NO: 184835 - DNA, 75 bp, synthetic construct
  source 1..75: mol_type = other DNA
gagtccggtgaagcgccggttactggaagatgttgtgtacgtcataacggagacggtgagaaagagggcgatgca

SEQ ID NO: 184836 - DNA, 75 bp, synthetic construct
  source 1..75: mol_type = other DNA
tgctgccagaaggccagtttaaataccacgtcgattttgaacatctgcatattggcgaagagaccgggatgattt

SEQ ID NO: 184837 - DNA, 75 bp, synthetic construct
  source 1..75: mol_type = other DNA
ggacgccgtgccgatggtcgggtcaaaaaagtgctgttcccgctggcaccggaatacattggctacgctgacgcc

SEQ ID NO: 184838 - DNA, 75 bp, synthetic construct
  source 1..75: mol_type = other DNA
ccgccagtaccctgaaatgggccgggccatccgtattgttggcctatatcatcgccgggctgttcgtctttttca

SEQ ID NO: 184839 - DNA, 75 bp, synthetic construct
  source 1..75: mol_type = other DNA
ccgggtatcatcttcagtgaagcgcgcccgctatggaatccgaatatcgtgctgtgcatgagtctttccaagctg

SEQ ID NO: 184840 - DNA, 75 bp, synthetic construct
  source 1..75: mol_type = other DNA
attggcgaagaaaccgggatgatttgcgtctcccggccgacgaatccaacaggcaatgtgattactgacgaagag

SEQ ID NO: 184841 - DNA, 75 bp, synthetic construct
  source 1..75: mol_type = other DNA
tgccggacgccgtgccgatggacggatcaaaaaagtgctgttcccgctggctccggaatacattggctacgcgga

SEQ ID NO: 184842 - DNA, 75 bp, synthetic construct
  source 1..75: mol_type = other DNA
gacaaataaattgcctgatttacgtggtgagtttattcgtggctgggatgacggtcgttcagtagatactggtcg

SEQ ID NO: 184843 - DNA, 75 bp, synthetic construct
  source 1..75: mol_type = other DNA
atggttataaaaaaggttggtttgggagaaggctcagcgttacccgttggtgtgcctgttccgtggccttcagcc

SEQ ID NO: 184844 - DNA, 75 bp, synthetic construct
  source 1..75: mol_type = other DNA
cctgttccgtggccttcagccacaccaccaacaggctggctgaaatgcaacggtgcacctttttctgccgaagag

SEQ ID NO: 184845 - DNA, 75 bp, synthetic construct
  source 1..75: mol_type = other DNA
ccgttggtgtacccgttccgtggcccttagaaacaccgccaacgggatggctgaaatgcaacggagcagcatttt

SEQ ID NO: 184846 - DNA, 75 bp, synthetic construct
  source 1..75: mol_type = other DNA
agaaggttcggcattacccgttggtgtgcctgttccgtggccttccgccactccgccaacaggctggctgaaatg

SEQ ID NO: 184847 - DNA, 75 bp, synthetic construct
  source 1..75: mol_type = other DNA
cattagtggatgtcaggtttaatacctacccttctgattctggcgtttttacaaccagcgtcatcggagatgctt

SEQ ID NO: 184848 - DNA, 75 bp, synthetic construct
  source 1..75: mol_type = other DNA
atcaatgtatgcgcatgaactacgtaccagagccggagaaaattgaggcgggtgtgaagattctggcggaagaga

SEQ ID NO: 184849 - DNA, 75 bp, synthetic construct
  source 1..75: mol_type = other DNA
ttatggcaatactggcgcctacttcgctcaaccaacccagggaatgcaaaatgcgatgggcgaagcatttgctca

SEQ ID NO: 184850 - DNA, 75 bp, synthetic construct
  source 1..75: mol_type = other DNA
cgctgctgatgatggtgctgggggtatttgcactgttacagctcatgtccggcagtctgtttttttcttcgctgc

SEQ ID NO: 184851 - DNA, 75 bp, synthetic construct
  source 1..75: mol_type = other DNA
cgacaaataaagtgcctgatttacgcggtgaatttattcgtggctgggatgatggtcgagggatagatagtggcc

SEQ ID NO: 184852 - DNA, 75 bp, synthetic construct
  source 1..75: mol_type = other DNA
atgccagttagtcattatctctgcattttcataaacgttggtttgggagaaggctctgcattacctgttggtgtg

SEQ ID NO: 184853 - DNA, 75 bp, synthetic construct
  source 1..75: mol_type = other DNA
cagaagattaccgcttttcccagtggcaactggcgattatcgcgctggtggtggtattaattttgctggtggcgt

SEQ ID NO: 184854 - DNA, 75 bp, synthetic construct
  source 1..75: mol_type = other DNA
atcaatgtatgcgcatgaactacgtgccggagccggagaaaattgaggcgggtgtgaagattctggcggaagaga

SEQ ID NO: 184855 - DNA, 75 bp, synthetic construct
  source 1..75: mol_type = other DNA
tgaaagcgcgcggcgtgctaatggtaccggggcacaatttcttcccaggtctggataaaccgtggccgcacacgc

SEQ ID NO: 184856 - DNA, 75 bp, synthetic construct
  source 1..75: mol_type = other DNA
aatttacccgccactccggcattacgctgttgatggaagatctgaacgacggtttacgcacgcctggcgcgatta

SEQ ID NO: 184857 - DNA, 75 bp, synthetic construct
  source 1..75: mol_type = other DNA
gccaacggggtggctgaaatgcaatggtgcagcattttcttctgaaaagtacccaaatctggcaaaggtttaccc

SEQ ID NO: 184858 - DNA, 75 bp, synthetic construct
  source 1..75: mol_type = other DNA
tcatcttcagcgaagcgcgcccgctgtggaatccgaatatcgtactgtgcatgagtctttccaagctgggtctac

SEQ ID NO: 184859 - DNA, 75 bp, synthetic construct
  source 1..75: mol_type = other DNA
attggcgaagaaaccgggatgatttgcgtctcccgaccgacgaatccaacaggcaatgtgattactgacgaagaa

SEQ ID NO: 184860 - DNA, 75 bp, synthetic construct
  source 1..75: mol_type = other DNA
gccagcctgactaactcgaagatccagggcaaatatcgccactctttctggagtgaaatctacgaaacagtgctg

SEQ ID NO: 184861 - DNA, 75 bp, synthetic construct
  source 1..75: mol_type = other DNA
tctggtggcgttacacctctacgctgaactgggacgatccggtcagcctggtgtgcgggcttattctgctcttcg

SEQ ID NO: 184862 - DNA, 75 bp, synthetic construct
  source 1..75: mol_type = other DNA
tgctggcaatgactgcaacggttggctcgttgtcgctggctattggtgtgcttgctggtccgctggcaaaactgc

SEQ ID NO: 184863 - DNA, 75 bp, synthetic construct
  source 1..75: mol_type = other DNA
cctggcctggatttttattccgctggagcacccgcgctggcagcgtattcgcgcagaacataaaaacctgtatcc

SEQ ID NO: 184864 - DNA, 75 bp, synthetic construct
  source 1..75: mol_type = other DNA
tacttccaggtcgtatggccgttgaatcgtcagccagtgccgttgccgaaagatatgtcgctgtggccgtcggtg

SEQ ID NO: 184865 - DNA, 75 bp, synthetic construct
  source 1..75: mol_type = other DNA
tacgtcttcccgacccaggtggcgcgcgtgatgggtaatgaagttgggctgaaattaatgccgctcaccacccag

SEQ ID NO: 184866 - DNA, 75 bp, synthetic construct
  source 1..75: mol_type = other DNA
tggcggagagctgaaacgccacggcatttccctgacaggcagcgataacaccattcagcaggccatcagacgcac

SEQ ID NO: 184867 - DNA, 75 bp, synthetic construct
  source 1..75: mol_type = other DNA
gcgatcgggttcggcaaagagatgtcccgcgttcaggcactgacgcgaatcgacaaaaacagcccgcagtttaag

SEQ ID NO: 184868 - DNA, 75 bp, synthetic construct
  source 1..75: mol_type = other DNA
actctgtacagaagctagatatatttgtcctgtgcaacaaattatagatacccccctgttacgcaaactcaacca

SEQ ID NO: 184869 - DNA, 75 bp, synthetic construct
  source 1..75: mol_type = other DNA
ggaaagctggccaccctgcgtcttggttttgacattcttacccggtcaatgaatgtcgtccgggtgttgcctgcg

SEQ ID NO: 184870 - DNA, 75 bp, synthetic construct
  source 1..75: mol_type = other DNA
gataaacccaaagacaacaaaccgctcacagacagcaataccggtacgctacgcagactcagcaaaattgctgat

SEQ ID NO: 184871 - DNA, 75 bp, synthetic construct
  source 1..75: mol_type = other DNA
acgcagtggctcacgcgggtggtatcaaaggtgacggcgctggcgcaggcccatccggcactgacgcgccagcta

SEQ ID NO: 184872 - DNA, 75 bp, synthetic construct
  source 1..75: mol_type = other DNA
acggtggtttggggatcaagatcaacggtcaggcgcagattctggaagggcagaaagtgaatctgctgcttaaac

SEQ ID NO: 184873 - DNA, 75 bp, synthetic construct
  source 1..75: mol_type = other DNA
gctggccccggaaaacaccctggcggcaatcgacgtcggggcaaaatacggtcataagatgatcgaatttgacgc

SEQ ID NO: 184874 - DNA, 75 bp, synthetic construct
  source 1..75: mol_type = other DNA
cgctgattctggcgctgatttgcgtcacccagccgtttaacccgctgtcgcagtttatcttcctgatgttgctgt

SEQ ID NO: 184875 - DNA, 75 bp, synthetic construct
  source 1..75: mol_type = other DNA
accaactcgaagattcagggtaaatatcgccactcgttctggagtgaaatctacgaaacagtgctggcgtggtat

SEQ ID NO: 184876 - DNA, 75 bp, synthetic construct
  source 1..75: mol_type = other DNA
accccagcgagcggcagagttgctgcgctggggcgtggattgcatctgtactgatgcgattgacgtgatcgggcc

SEQ ID NO: 184877 - DNA, 75 bp, synthetic construct
  source 1..75: mol_type = other DNA
tcgtcgcacatcgtggcggcggtaagctggccccggaaaacaccctggcggcaatcgacgtcggggcaaaatacg

SEQ ID NO: 184878 - DNA, 75 bp, synthetic construct
  source 1..75: mol_type = other DNA
caccactggcactggtccattaacgggcaaaatggtatcgctggcggcgcgcgaactgtgggctggtatgacgcc

SEQ ID NO: 184879 - DNA, 75 bp, synthetic construct
  source 1..75: mol_type = other DNA
tcagcgtattcgctgggcgcgcgggatggtgcaaatcttccgtctcgataacccgctcaccggtaaagggctgaa

SEQ ID NO: 184880 - DNA, 75 bp, synthetic construct
  source 1..75: mol_type = other DNA
gctggatgaaattggcggcattgctgtcgaaaccgtgactgaagatgcgcatacttctctgcgtttgcaccgtcg

SEQ ID NO: 184881 - DNA, 75 bp, synthetic construct
  source 1..75: mol_type = other DNA
gtagaggaagagtatgtcgattgggtgatctcgagaccgtacatcttcctcgtgctgctcaacctggttggtgtc

SEQ ID NO: 184882 - DNA, 75 bp, synthetic construct
  source 1..75: mol_type = other DNA
gttggggtgaaatatatcgcccgaacaactcatgaacacgctaaagccggaaatatcaacaacgcactgaaatat

SEQ ID NO: 184883 - DNA, 75 bp, synthetic construct
  source 1..75: mol_type = other DNA
gctggaaagtctgctggatattctgaagctcggcttccgtggctaccgccatctggcggaatttgcgccttcttc

SEQ ID NO: 184884 - DNA, 75 bp, synthetic construct
  source 1..75: mol_type = other DNA
ccgctggacccggtccgttatctcattcaaacatgctggttactgatcggtgcatcgcgcaaagaaacgccgaaa

SEQ ID NO: 184885 - DNA, 75 bp, synthetic construct
  source 1..75: mol_type = other DNA
acccgcgctcgtgaagcgttgcgcggtcacgcagcgcagttgagtcagtacaaccaggtgctggcttcgctgaaa

SEQ ID NO: 184886 - DNA, 75 bp, synthetic construct
  source 1..75: mol_type = other DNA
actgtgtcatctgccggacttaaccgccgacagcgccgccgaatggctggaaaccttccaggcgaaagagctgga

SEQ ID NO: 184887 - DNA, 75 bp, synthetic construct
  source 1..75: mol_type = other DNA
gaaatgccattcagtgcagtctattacagcgaccgtgcggtaagtacgcgcatccgggcttttatcgatttcctt

SEQ ID NO: 184888 - DNA, 75 bp, synthetic construct
  source 1..75: mol_type = other DNA
aaagtcttccagaataccgaacacgttcacgtagtcggcctgcgcggctttgcgcctcagcttcctgaaacgctt

SEQ ID NO: 184889 - DNA, 75 bp, synthetic construct
  source 1..75: mol_type = other DNA
gcgccggtttggctggcagcgcaaaacagtctcaaccagttgagcgagcagtgcggtgaagagtttacctccagc

SEQ ID NO: 184890 - DNA, 75 bp, synthetic construct
  source 1..75: mol_type = other DNA
agctgcagatccgtctggaagagcaaaacgaagtggtggcagaagccatcgaacgccaggaagagaacgaggctc

SEQ ID NO: 184891 - DNA, 75 bp, synthetic construct
  source 1..75: mol_type = other DNA
gttgatgtgattaaccagttgaaggtacagaacgctcagatcgctgccggacagttgggcggaacgccagcgtta

SEQ ID NO: 184892 - DNA, 75 bp, synthetic construct
  source 1..75: mol_type = other DNA
tgccgctgcgcgtccgtttatcactcaccataacgcgctggatctcgacatgtacctgcgtatcgcgccggaact

SEQ ID NO: 184893 - DNA, 75 bp, synthetic construct
  source 1..75: mol_type = other DNA
atatccggcagaagtttctcctctggcgcgtcgtaacgacgttaacccggaaatcacagaccgctttgagttctt

SEQ ID NO: 184894 - DNA, 75 bp, synthetic construct
  source 1..75: mol_type = other DNA
tgccgttgattaagcctttccgtgaacgctatccggaagtcactttgtcgctagtctcctccgaaacgattatta

SEQ ID NO: 184895 - DNA, 75 bp, synthetic construct
  source 1..75: mol_type = other DNA
tacgggaagccagaaactatcgacgatttaaagcaacatgtttgcctgggattcactgaacccgcttccctcaat

SEQ ID NO: 184896 - DNA, 75 bp, synthetic construct
  source 1..75: mol_type = other DNA
gactgaggcattaaagtcatcagccaggaagggaaagaaagctaatatggatgtgctttctcagttgttagttga

SEQ ID NO: 184897 - DNA, 75 bp, synthetic construct
  source 1..75: mol_type = other DNA
aacgagctgaaagacaaactcgaagcgatggaaggcgtgcagtttaagcagttcaactccatcaccgattaccat

SEQ ID NO: 184898 - DNA, 75 bp, synthetic construct
  source 1..75: mol_type = other DNA
gtcagcaggaaaagatcgaacgctacgaagcggatctcgatgagttgcaggtacgcctggaagagcaaaacgaag

SEQ ID NO: 184899 - DNA, 75 bp, synthetic construct
  source 1..75: mol_type = other DNA
gggcagcgcacgccgcagaccatcggtgaagaactgctggattaccgcaactatctggaaatggaagttgaggtt

SEQ ID NO: 184900 - DNA, 75 bp, synthetic construct
  source 1..75: mol_type = other DNA
ctgcaaacgtcagggcaagaattttgatatcgacgagctggaagccctgcatcaggaactcgaagcacgtatagc

SEQ ID NO: 184901 - DNA, 75 bp, synthetic construct
  source 1..75: mol_type = other DNA
atgaagatatggtgaatctggcgctatggctgaaaaagcatcgcttccgcctcgaccaggtgcagaacttctatc

SEQ ID NO: 184902 - DNA, 75 bp, synthetic construct
  source 1..75: mol_type = other DNA
tcggcggtattgaggccagcctgcgccgtaccgcgcactatgattactggtccgataccgtgcgccgttccgtgt

SEQ ID NO: 184903 - DNA, 75 bp, synthetic construct
  source 1..75: mol_type = other DNA
gcgtgccgcatccggcctatggcaatgctcgtattccggcttacgaaatgatccgtttctctgtcaacattatgc

SEQ ID NO: 184904 - DNA, 75 bp, synthetic construct
  source 1..75: mol_type = other DNA
cgctgatgatttgcgttccatgtcggataaggcgttaggtgcgctgcgtctggcggtagcggataacgaacatct

SEQ ID NO: 184905 - DNA, 75 bp, synthetic construct
  source 1..75: mol_type = other DNA
aacgagctgaaagacaagctcgaggcgatggaaggcgtgcagtttaagcagttcaactccattaccgattaccac

SEQ ID NO: 184906 - DNA, 75 bp, synthetic construct
  source 1..75: mol_type = other DNA
tttgctacgctctcctttgatgtacaaaaaacccagcgtctgcatcaggcatttagccgctttatcggcagccat

SEQ ID NO: 184907 - DNA, 75 bp, synthetic construct
  source 1..75: mol_type = other DNA
tcgccgggcgcgatcgtaaagtcgatatcaaaccgtttgcgattcagggcttgccgatgtcggtgttgccgacgc

SEQ ID NO: 184908 - DNA, 75 bp, synthetic construct
  source 1..75: mol_type = other DNA
ccattaacggtccgctggcgcgtaacgaagcgtgggatgttgctcgtgaactgctgcgcgaaggggtcgaacaac

SEQ ID NO: 184909 - DNA, 75 bp, synthetic construct
  source 1..75: mol_type = other DNA
actgagcaataaccgttcacgccgcaaccaactggaaaaagcgcttaccttctgcgaagcggagatggacaacct

SEQ ID NO: 184910 - DNA, 75 bp, synthetic construct
  source 1..75: mol_type = other DNA
tggcgggagctactatcagcctaccaataattgcggctgtagggtttgtcgcaggtaaggcaattttctctgata

SEQ ID NO: 184911 - DNA, 75 bp, synthetic construct
  source 1..75: mol_type = other DNA
tttctcattggcatctctacaggtatggctggagctactatcagtttgccagtaatcactgctgttgggtttgtc

SEQ ID NO: 184912 - DNA, 75 bp, synthetic construct
  source 1..75: mol_type = other DNA
tggggttcacgtctgtacaggctgtttagcaacggtgttatatggcacttatcccggctggtatgctgctgttgt

SEQ ID NO: 184913 - DNA, 75 bp, synthetic construct
  source 1..75: mol_type = other DNA
acacctttcctaatgaacatccggaagcctttattttgattacgtcagcggaaaaatttattgtagatggcaact

SEQ ID NO: 184914 - DNA, 75 bp, synthetic construct
  source 1..75: mol_type = other DNA
tgagcaggaggagtttgatttttacaggcaaatttatcatgtaacaggtggagagcaccaggtggaagccttgat

SEQ ID NO: 184915 - DNA, 75 bp, synthetic construct
  source 1..75: mol_type = other DNA
ttgtagatggcaactgcattcaactgattggtattggtaatgagcagggagagtttgatttttacaggcaaattt

SEQ ID NO: 184916 - DNA, 75 bp, synthetic construct
  source 1..75: mol_type = other DNA
tttaatccaaatgttgcgctggcactactggatgaacgggaaagaaaccagcaatacataaaatcccgcgacaag

SEQ ID NO: 184917 - DNA, 75 bp, synthetic construct
  source 1..75: mol_type = other DNA
tggcgcttcacaagtggttttgggaacaaagtgaagccgagcgcgccgccgccaacattggtgtgaaggggaagt

SEQ ID NO: 184918 - DNA, 75 bp, synthetic construct
  source 1..75: mol_type = other DNA
aagcgatgattgcttcgctggagaaatcaccgcccgttcgcgtgcccgggaccgcggtgtatatgtcgcgtgcaa

SEQ ID NO: 184919 - DNA, 75 bp, synthetic construct
  source 1..75: mol_type = other DNA
aatcattgcggcggttgggtttattgcaggtaaggcaattttctctgataatgttgtgttcaggagaagaatgta

SEQ ID NO: 184920 - DNA, 75 bp, synthetic construct
  source 1..75: mol_type = other DNA
aataattgctattgtggcttttatagctggtaaggcgatcttctctgataatgttgtgttcaggaggaggatgta

SEQ ID NO: 184921 - DNA, 75 bp, synthetic construct
  source 1..75: mol_type = other DNA
aacacactgtttggccctggcgaattaccggacgaatctgagaaagatgctcaggcctactttaatcgcaaatat

SEQ ID NO: 184922 - DNA, 75 bp, synthetic construct
  source 1..75: mol_type = other DNA
gtaacgatttcatagatgagctcacgccagagctttatgctaatactcaggaggttttgctagagagggatattc

SEQ ID NO: 184923 - DNA, 75 bp, synthetic construct
  source 1..75: mol_type = other DNA
tgattcagcctaccttgattacggaatatccggcagaagtatccccgctggcgcgtcgtaacgatgttaacccgg

SEQ ID NO: 184924 - DNA, 75 bp, synthetic construct
  source 1..75: mol_type = other DNA
cgaaatatactgactggagtaaacgcgatgatattaaagcgaaactgaaagttgaacttattctgcttctacaca

SEQ ID NO: 184925 - DNA, 75 bp, synthetic construct
  source 1..75: mol_type = other DNA
ggcggatgatgcgcggcaaatgctgcgggagcgtttcccttccacatcccgctggtatctgggggagtgggaatc

SEQ ID NO: 184926 - DNA, 75 bp, synthetic construct
  source 1..75: mol_type = other DNA
cctttgtaacgttgcaggatgtcggtggccgtattcaactgtacgttgcaagagatagcctgccagaaggtgttt

SEQ ID NO: 184927 - DNA, 75 bp, synthetic construct
  source 1..75: mol_type = other DNA
tgattcagcctaccttgattacggaatatccggcagaagtgtccccgctggcgcggcgtaatgatgttaacccgg

SEQ ID NO: 184928 - DNA, 75 bp, synthetic construct
  source 1..75: mol_type = other DNA
tgattcagcctaccttgattacggaatatccggcagaagtttccccgctggcgcggcgtaaagatgttaacccgg

SEQ ID NO: 184929 - DNA, 75 bp, synthetic construct
  source 1..75: mol_type = other DNA
actcttgctggcaaccgcgtccgcaaaactggttgagcatacgcaaaatgatgcttactggggagatggcggtaa

SEQ ID NO: 184930 - DNA, 75 bp, synthetic construct
  source 1..75: mol_type = other DNA
aagattaccatgcaagtgtgacctacttccgcaatgattaccagaataagatcgtggccggggataacgttatcg

SEQ ID NO: 184931 - DNA, 75 bp, synthetic construct
  source 1..75: mol_type = other DNA
ggcgttgtctcgtggaaattaaatccgcagcagattctcgatttcgaagccggatatagccgccaggggaatatc

SEQ ID NO: 184932 - DNA, 75 bp, synthetic construct
  source 1..75: mol_type = other DNA
ggtgaaagcgcgctggatgagtggattgcggattgtgaagaggacggcattgccccttttcgtgaagaagaagag

SEQ ID NO: 184933 - DNA, 75 bp, synthetic construct
  source 1..75: mol_type = other DNA
gcgcctcgggcacacgcggtaataaccgccagatcgatattcgtggtatggggccggaaaacaccttaattttaa

SEQ ID NO: 184934 - DNA, 75 bp, synthetic construct
  source 1..75: mol_type = other DNA
gcaggtattaaaacagcagccgggcgtgtcggttattaccagcgaggatattaaaaagacccctccggtaaacga

SEQ ID NO: 184935 - DNA, 75 bp, synthetic construct
  source 1..75: mol_type = other DNA
ctcaccgagaaatatgcacaaattaaagacattgtcggcaaacgtgatttgtgggtggcatcttcctgctcgctg

SEQ ID NO: 184936 - DNA, 75 bp, synthetic construct
  source 1..75: mol_type = other DNA
gccaggtgaaactgctgctgactacctattttgaaggcgtaacgccaaatctcgacacgattactgcgctgcctg

SEQ ID NO: 184937 - DNA, 75 bp, synthetic construct
  source 1..75: mol_type = other DNA
atggtgccggagttcgttaaagggcagcaattcaaactgacctggacgcagttgctggatgaagtggatgaggcg

SEQ ID NO: 184938 - DNA, 75 bp, synthetic construct
  source 1..75: mol_type = other DNA
gaagccaccgattgttattggtgacgttagccgcccggcaccgattaccgtggagtgggcgaagtatgcgcaatc

SEQ ID NO: 184939 - DNA, 75 bp, synthetic construct
  source 1..75: mol_type = other DNA
cattcactcgccaaacgtaccgagcgtagaatggattgaagccctgctgaagaaagcggcaaaacgcattccggc

SEQ ID NO: 184940 - DNA, 75 bp, synthetic construct
  source 1..75: mol_type = other DNA
cagacgtcatcaccatcgaaacctcgcgttccgacatggagttgctggagtcgtttgaagagtttgattatccga

SEQ ID NO: 184941 - DNA, 75 bp, synthetic construct
  source 1..75: mol_type = other DNA
ccacgattggttccttcccgcaaaccacggaaattcgtaccctgcgtctggatttcaaaaagggtaatctcgacg

SEQ ID NO: 184942 - DNA, 75 bp, synthetic construct
  source 1..75: mol_type = other DNA
tgtcagccgtgaaaccatcgccaaacaaattgcgctggcgctgcgtgatgaagtggccgatctggaagccgctgg

SEQ ID NO: 184943 - DNA, 75 bp, synthetic construct
  source 1..75: mol_type = other DNA
tgaacgacattctgccggtttatcagcaaatgctggcagaactggcgaaacgcggcatcgagtgggtacagattg

SEQ ID NO: 184944 - DNA, 75 bp, synthetic construct
  source 1..75: mol_type = other DNA
ctgcacaagcgcctgccttctgactggttgctgtctgcgggtctgatcaatggtcgtaacgtctggcgcgccgat

SEQ ID NO: 184945 - DNA, 75 bp, synthetic construct
  source 1..75: mol_type = other DNA
cgcggcattgagtgggtgcagatcgacgaacctgcgctggtactggaattgccgcaggcgtggctggacgcgtac

SEQ ID NO: 184946 - DNA, 75 bp, synthetic construct
  source 1..75: mol_type = other DNA
atactttggcgagcatctcgacggttttgtctttacgcaaaacggttgggtacagagctacggttcccgctgcgt

SEQ ID NO: 184947 - DNA, 75 bp, synthetic construct
  source 1..75: mol_type = other DNA
gggattggcatcgaccgtatggtaatgctgttcaccaacagctataccatccgcgacgttattctgttcccggcg

SEQ ID NO: 184948 - DNA, 75 bp, synthetic construct
  source 1..75: mol_type = other DNA
attgacgaaaagcttatggagcttcacaagtggttttgggaacaaagtgaagccgagcgcactgctggtattcgc

SEQ ID NO: 184949 - DNA, 75 bp, synthetic construct
  source 1..75: mol_type = other DNA
atggagcttcacaagtggttttgggaacaaagtgaagccgagcgcgccgctggcattcgcatcaaaggagagtga

SEQ ID NO: 184950 - DNA, 75 bp, synthetic construct
  source 1..75: mol_type = other DNA
cacatctgattcagcctaccttgattactgaatatccggcagaagtgtctccgctggcccgccgtaatgaggtta

SEQ ID NO: 184951 - DNA, 75 bp, synthetic construct
  source 1..75: mol_type = other DNA
ttatcgtgatgaccacctggaagagcgagcgtttccgcttgctgcggcggatgcatgaacatggcaactctctgg

SEQ ID NO: 184952 - DNA, 75 bp, synthetic construct
  source 1..75: mol_type = other DNA
cgaatctgagaaagatgctcaggcctactttaatcgcaaatatgcaccgattgacgaaaagcttatggcgcttca

SEQ ID NO: 184953 - DNA, 75 bp, synthetic construct
  source 1..75: mol_type = other DNA
atgaccaaaattaactatcagtcactgcgtgaagcggcagaaaaagcaacgtgtggtgagtggtcgctcgaatat

SEQ ID NO: 184954 - DNA, 75 bp, synthetic construct
  source 1..75: mol_type = other DNA
agtcgccgttgctggccgcatgatgacccgccgtattatgggtaaagcgtctttcgttaccctgcaggacgttgg

SEQ ID NO: 184955 - DNA, 75 bp, synthetic construct
  source 1..75: mol_type = other DNA
tcaaaaaatgggacctcggcgacatcctcggcgcgaaaggtaaactgttcaaaaccaaaaccggcgaactgtcta

SEQ ID NO: 184956 - DNA, 75 bp, synthetic construct
  source 1..75: mol_type = other DNA
acgcggattacaaagatctgatcgaactgaccgaatcgctgttccgcactctggctcaggatattctcggtaaga

SEQ ID NO: 184957 - DNA, 75 bp, synthetic construct
  source 1..75: mol_type = other DNA
cacatctgattcagcctaccttcattactgaatatccggcagaagtttccccgctggcccgccgtaatgaggtta

SEQ ID NO: 184958 - DNA, 75 bp, synthetic construct
  source 1..75: mol_type = other DNA
cacatctgattcagcctacctttattactgaatatccggcagaagtctccccgctggcccgccgtaatgaggtta

SEQ ID NO: 184959 - DNA, 75 bp, synthetic construct
  source 1..75: mol_type = other DNA
acacctttaaagtgcgctcgcagatcctctctggcattcgccagttcatggtgaatcgcggctttatggaagttg

SEQ ID NO: 184960 - DNA, 75 bp, synthetic construct
  source 1..75: mol_type = other DNA
gatcctcaccgctgaccacggttgtgatccgacctggaccggtactgaccatacccgtgaacacattccggtact

SEQ ID NO: 184961 - DNA, 75 bp, synthetic construct
  source 1..75: mol_type = other DNA
aaagatcgggcgcgtgaagccttccgcgaggaaatgacgctacacggtaaagggcagacccggctgccgcaggga

SEQ ID NO: 184962 - DNA, 75 bp, synthetic construct
  source 1..75: mol_type = other DNA
ggtattcactccccctgctggcgcaatctctgaatctggccgggatgacattttctgccggttcgctgctgctac

SEQ ID NO: 184963 - DNA, 75 bp, synthetic construct
  source 1..75: mol_type = other DNA
attccatttcaattgttgaacaaggaaatattttaacctttggtattattcctgattatgcagaaaccggttacg

SEQ ID NO: 184964 - DNA, 75 bp, synthetic construct
  source 1..75: mol_type = other DNA
aaccggaacgccgcgtgacctgcgtcagtcgtactggctggcatggtcaggtttacgtcctgcaggatgaggtca

SEQ ID NO: 184965 - DNA, 75 bp, synthetic construct
  source 1..75: mol_type = other DNA
cggtctggtactgtgcggggaaggccgcacgcaactgccgcacgggttccgtcttacccaggaatatctctggta

SEQ ID NO: 184966 - DNA, 75 bp, synthetic construct
  source 1..75: mol_type = other DNA
cgctgctgacgctggttggcgtgagtggcggcggctatcacctgaaaggggaatcgacggacggtaaaaccacga

SEQ ID NO: 184967 - DNA, 75 bp, synthetic construct
  source 1..75: mol_type = other DNA
ctttgtgaagatattcgccgggaaggtattcaatgcgatgaaaacagcctggcacaatctttccagtggcggcaa

SEQ ID NO: 184968 - DNA, 75 bp, synthetic construct
  source 1..75: mol_type = other DNA
tggagcagcgctcaatgccgggcaagttttcgcccgccgctgtgcattacatattgctcatcagaaaagccagga

SEQ ID NO: 184969 - DNA, 75 bp, synthetic construct
  source 1..75: mol_type = other DNA
gcgacggcgtgatttacccggacgccttaggcctgccggaaaatgacattgccgaccacagcgaactgcaatggc

SEQ ID NO: 184970 - DNA, 75 bp, synthetic construct
  source 1..75: mol_type = other DNA
ttcaaaaaaatctgaagttcaggatgttaaacaaattgtccaaatgctcaaaaagcaagaacgttctgaatatct

SEQ ID NO: 184971 - DNA, 75 bp, synthetic construct
  source 1..75: mol_type = other DNA
caatgaaatcggtgtttctggcggctcgctggcggcattgacttcacccttaacctcaacaactcccgtcgccga

SEQ ID NO: 184972 - DNA, 75 bp, synthetic construct
  source 1..75: mol_type = other DNA
ttatcatttgatgcccccttggttattactaatgacaatcatcgctttattgtagcagagcagttaaggcagatg

SEQ ID NO: 184973 - DNA, 75 bp, synthetic construct
  source 1..75: mol_type = other DNA
cagtcgtactggctggcatggtcaggtttacgtcctgcaggatgaggtcagcggtgaaggtgcagagggtgtcat

SEQ ID NO: 184974 - DNA, 75 bp, synthetic construct
  source 1..75: mol_type = other DNA
tggaagcagacggtctgttagccatctgtattcagcatgagatggatcacctggtcggcaaactgtttatggatt

SEQ ID NO: 184975 - DNA, 75 bp, synthetic construct
  source 1..75: mol_type = other DNA
acattgggtcagatgtttcagttaatcacgattgacaacaataccgcctcgctgcagctgcgttatacaccgggt

SEQ ID NO: 184976 - DNA, 75 bp, synthetic construct
  source 1..75: mol_type = other DNA
tcaattttgatgtgaagttaccgcttaatgtcgtcacagaaaccgcaaaacagcttaatttatctgaaggaatgg

SEQ ID NO: 184977 - DNA, 75 bp, synthetic construct
  source 1..75: mol_type = other DNA
ttctggcggcctatctcggtacggggatggggttcgcagtgtggatgaacggtgcgccgtggacgggtgcacacg

SEQ ID NO: 184978 - DNA, 75 bp, synthetic construct
  source 1..75: mol_type = other DNA
gtttgatggaaacgccgcatcgtattgccaaaatgtatgtcgatgaaattttctccggtctggattacgccaatt

SEQ ID NO: 184979 - DNA, 75 bp, synthetic construct
  source 1..75: mol_type = other DNA
gccacggcagaagattatgagcgtgttatcgcctggtgtcatgaacacggttatctcgatgacagccgctttgtt

SEQ ID NO: 184980 - DNA, 75 bp, synthetic construct
  source 1..75: mol_type = other DNA
aggctgctgagaataaaagccaagggctaccgcaaccgggagcgctttaagctgggagtgatgttccactatggg

SEQ ID NO: 184981 - DNA, 75 bp, synthetic construct
  source 1..75: mol_type = other DNA
tgaggatcttccgccgcagattcgtcagccagtctgtaatgctggcgaggtaaaaacatcccctgtcggagagcg

SEQ ID NO: 184982 - DNA, 75 bp, synthetic construct
  source 1..75: mol_type = other DNA
atgaggtcagcggtgaaggtgcagagggtgtcattctccagaccacttccgtgcaggggcgtgatttccgcgtgt

SEQ ID NO: 184983 - DNA, 75 bp, synthetic construct
  source 1..75: mol_type = other DNA
attatatcaatgtcaatctgacctacgaacttgataagttaacaaaagggaatcagcaactcggtagtggtgagt

SEQ ID NO: 184984 - DNA, 75 bp, synthetic construct
  source 1..75: mol_type = other DNA
cggcttggttgttcagcccggagtagaattcgatcacagtcatgtgattcattatgaatcctctaaagcgactaa

SEQ ID NO: 184985 - DNA, 75 bp, synthetic construct
  source 1..75: mol_type = other DNA
tggaattcttaaaccagagcctcgtctattaattattgataagattcaggatgttcttcgtgattatgcctatgg

SEQ ID NO: 184986 - DNA, 75 bp, synthetic construct
  source 1..75: mol_type = other DNA
ggaattccaagagaacggctgaagttagcctctggtgtatttaatttaacacgtaatcttgggggcgcgattggt

SEQ ID NO: 184987 - DNA, 75 bp, synthetic construct
  source 1..75: mol_type = other DNA
tgacattccgttctcaggatctggaccagacgcgtaatacgctcggacaactggcgctggcatttgccggggctt

SEQ ID NO: 184988 - DNA, 75 bp, synthetic construct
  source 1..75: mol_type = other DNA
ccagatcaacaattacgctaaacaaatcgccagcctgaacgatcaaatctcacgcctgacaggtgtgggggcagg

SEQ ID NO: 184989 - DNA, 75 bp, synthetic construct
  source 1..75: mol_type = other DNA
cagccagcaatttcatgcgttgtgccgaagccgtcggaacgcgcattacagacattccggtagacctcaacacgc

SEQ ID NO: 184990 - DNA, 75 bp, synthetic construct
  source 1..75: mol_type = other DNA
agaagcttacaatggcacagatttacgtgttacgacggatggcatccggcacggtctatgatatctctggcaatt

SEQ ID NO: 184991 - DNA, 75 bp, synthetic construct
  source 1..75: mol_type = other DNA
accgacaaatccgaactggatatcggctgcgagcatcgccttgaacaatgcatgaccgcgctgaaagaaacactc

SEQ ID NO: 184992 - DNA, 75 bp, synthetic construct
  source 1..75: mol_type = other DNA
agcgggctgaccggcaacaagctggttaaattcctgattgaccggctcaagccggaagaacgtcaattcgcgctg

SEQ ID NO: 184993 - DNA, 75 bp, synthetic construct
  source 1..75: mol_type = other DNA
cattccgttagtccaagcgcgctgaacgggcaggggagggttaaagagctaattgatgccattccacccgaggag

SEQ ID NO: 184994 - DNA, 75 bp, synthetic construct
  source 1..75: mol_type = other DNA
gtcatccggtaaagataccccgtctggtcactgggaaatcgccggtgtcccggttctgtttgagtggggatattt

SEQ ID NO: 184995 - DNA, 75 bp, synthetic construct
  source 1..75: mol_type = other DNA
cactggttcagggaagtacggcgcggcaactggcggcagttccttccagcgctgacccttctcgtacgactgtcg

SEQ ID NO: 184996 - DNA, 75 bp, synthetic construct
  source 1..75: mol_type = other DNA
gatttctttgctatcggtaagcccgcggttctgcaaaacactaaaaacaaaggtgacgttgcgatcggtgccacg

SEQ ID NO: 184997 - DNA, 75 bp, synthetic construct
  source 1..75: mol_type = other DNA
catacgcttgtcccaagcggtctggataacggtgtactgaaattactgatagaacgtatgcgcccggaagaaaag

SEQ ID NO: 184998 - DNA, 75 bp, synthetic construct
  source 1..75: mol_type = other DNA
agcattctctgttagtgctggcaggtgcaggaagcggaaaaacgtcggtgctggtggcccgtgcaggctggttgc

SEQ ID NO: 184999 - DNA, 75 bp, synthetic construct
  source 1..75: mol_type = other DNA
tcttatatcgatcgacgtgtcagaacgtctttcgatgttgtgatgtatatggagaaaacagaaatcttggatatt

SEQ ID NO: 185000 - DNA, 75 bp, synthetic construct
  source 1..75: mol_type = other DNA
gccactcggctatgtcatcaacgtcacggagtggtgggagaccagcgacccgcccggcacattccggcttgatat

SEQ ID NO: 185001 - DNA, 75 bp, synthetic construct
  source 1..75: mol_type = other DNA
cagccagcaatttcatgcgttgtgccgaagccgtcggaacacgcattacagacattccggtagacctcaacacac

SEQ ID NO: 185002 - DNA, 75 bp, synthetic construct
  source 1..75: mol_type = other DNA
tgcaatggcctgttcagccctccgtatctgttgcggaaaccagcgatttaggccaggccggacgtagcgcccagt

SEQ ID NO: 185003 - DNA, 75 bp, synthetic construct
  source 1..75: mol_type = other DNA
ttcgtgaagatctctattatcgtctggcggttattcctattaccatgccgccgctgcgtgaacgtctgaacgata

SEQ ID NO: 185004 - DNA, 75 bp, synthetic construct
  source 1..75: mol_type = other DNA
ggagaaaacagaaatcttggatattacgtatgagccagaggtgcaactggcattactgaatggtgccagcatgga

SEQ ID NO: 185005 - DNA, 75 bp, synthetic construct
  source 1..75: mol_type = other DNA
gcacctgctgccttatctcgcctgggcattttccgttgaccgctgggatcgcaactggccggaagagacaaaacg

SEQ ID NO: 185006 - DNA, 75 bp, synthetic construct
  source 1..75: mol_type = other DNA
ccggaacattcaaggttgatgttggcacgctggacagtggtgtgaccgaggaaatgtatctggaaatggaacggc

SEQ ID NO: 185007 - DNA, 75 bp, synthetic construct
  source 1..75: mol_type = other DNA
aggctttgtcggcgttgccgttgccggttaaccgactggaagaattcgataactgccgtgaggcgtggcgtaaat

SEQ ID NO: 185008 - DNA, 75 bp, synthetic construct
  source 1..75: mol_type = other DNA
tgccgggtgatcaccgataaatcagaactggacatcggctgcgagcatcgccttgaacaatgcatgaccgcactg

SEQ ID NO: 185009 - DNA, 75 bp, synthetic construct
  source 1..75: mol_type = other DNA
acaccgaaggcagtctcgccgggcagcaggaagggcgcaaacagtttgttgaggcggcgcagccgctggaagcca

SEQ ID NO: 185010 - DNA, 75 bp, synthetic construct
  source 1..75: mol_type = other DNA
aactggatatcggctgcgagcatcgcctggaacagtgcatgaccgcactgaaagaaaccctaacgccggagtctc

SEQ ID NO: 185011 - DNA, 75 bp, synthetic construct
  source 1..75: mol_type = other DNA
cacttttccattctgaaagttggcccagcgctgaccttcgccctgcgtgaagcactgttttcactggcagcgatt

SEQ ID NO: 185012 - DNA, 75 bp, synthetic construct
  source 1..75: mol_type = other DNA
attctgaaagttggcccggcgctgaccttcgccctgcgtgaagcccttttttctctggcggcgattgaagaagaa

SEQ ID NO: 185013 - DNA, 75 bp, synthetic construct
  source 1..75: mol_type = other DNA
cagccaacgccacgggaactcattatcaaccatattcaggacatcctggcgcagtaccacgccgcctgtgcaggc

SEQ ID NO: 185014 - DNA, 75 bp, synthetic construct
  source 1..75: mol_type = other DNA
aaatcggcattggtccctccagctctcatactgtcgggccaatgaaagcaggcaaacaattctcggacgacttga

SEQ ID NO: 185015 - DNA, 75 bp, synthetic construct
  source 1..75: mol_type = other DNA
agcaggatagcgcaccggttgaagttccttatccgtacagttcagcagccgatctgcaaaaacattgtcaggaaa

SEQ ID NO: 185016 - DNA, 75 bp, synthetic construct
  source 1..75: mol_type = other DNA
cgacaacctttctctgcatgaaaacggtatgcgcattaccgcactggcgggcgataaagtcgtttacagccagac

SEQ ID NO: 185017 - DNA, 75 bp, synthetic construct
  source 1..75: mol_type = other DNA
tcaggtgctggaaaacgtgatgctcgaccgcccggaatactggcaaagccactaccacggtgacggcaacgcgcg

SEQ ID NO: 185018 - DNA, 75 bp, synthetic construct
  source 1..75: mol_type = other DNA
tctggtgtatgtcattggcaccgaagtaccggtacctggcggcgcgcatgaaaccttaagcgagctggcggtcac

SEQ ID NO: 185019 - DNA, 75 bp, synthetic construct
  source 1..75: mol_type = other DNA
acatgaaagaccgcaaggggcgtctggtgccggttgaccaggtgtctgactatgaccttgcgatggactctttcg

SEQ ID NO: 185020 - DNA, 75 bp, synthetic construct
  source 1..75: mol_type = other DNA
cgctcatctggtccgcaatctggcggatgcgcctattccgctgccgctcatcagccagtatctgccgctgcaata

SEQ ID NO: 185021 - DNA, 75 bp, synthetic construct
  source 1..75: mol_type = other DNA
aattcaccttgattgcagcatgtcctgtcaggacgatccggttcccttaactgatgacatcgtggctgaacgcgc

SEQ ID NO: 185022 - DNA, 75 bp, synthetic construct
  source 1..75: mol_type = other DNA
aagagggcaaaacaaatgggatttatgccgtttgttccgcacacccgctggtgctggaagctgcaatccgctacg

SEQ ID NO: 185023 - DNA, 75 bp, synthetic construct
  source 1..75: mol_type = other DNA
agcaaagaagagctggaacagcacctggcgaacgtctgggaagtcatgcgtggcggtattgagcgcggtatttcc

SEQ ID NO: 185024 - DNA, 75 bp, synthetic construct
  source 1..75: mol_type = other DNA
gctggcaaccggcgcgaatgctctcgataccgcgaaagccattaaggcaaaactggcggaattacagccattctt

SEQ ID NO: 185025 - DNA, 75 bp, synthetic construct
  source 1..75: mol_type = other DNA
tgaacccgttgcgtgaaacctttgaacggtttggccctgtttttgacgcaatcggaagcgggatcagccaggtgt

SEQ ID NO: 185026 - DNA, 75 bp, synthetic construct
  source 1..75: mol_type = other DNA
atggggacctgaaaaatctcgacagcgcatgggaaggtcttcgtattcgcatcagtgatctggttgacggtccgc

SEQ ID NO: 185027 - DNA, 75 bp, synthetic construct
  source 1..75: mol_type = other DNA
ccgtgaaaccttcgcggatatcggccagactctggcaaaatattttggtacttctgatatggaatatggcaaagc

SEQ ID NO: 185028 - DNA, 75 bp, synthetic construct
  source 1..75: mol_type = other DNA
gctaacgatgtttgggatggtacttgccatcggacttcttgttgatgatgcgatagtcgttgtggagaacgtcga

SEQ ID NO: 185029 - DNA, 75 bp, synthetic construct
  source 1..75: mol_type = other DNA
ccccaccattgcggtccccgtggtgttgttagggacgtttgccatcctcgccgcttttgttactccatcaacaca

SEQ ID NO: 185030 - DNA, 75 bp, synthetic construct
  source 1..75: mol_type = other DNA
atggaccgggtcggtgacacactcaccgcagcgtttacccgtaccaacactgaccttcgcgcactgggcgaaacc

SEQ ID NO: 185031 - DNA, 75 bp, synthetic construct
  source 1..75: mol_type = other DNA
gcgcaagcccggcgcaggtatgcatcgcggcggaaatcgccatggagcacaacctcggtctgacgtgtgacccgg

SEQ ID NO: 185032 - DNA, 75 bp, synthetic construct
  source 1..75: mol_type = other DNA
gtgaaagcggtgaacgccgcgcggatggcactgcgccgtaccagcgaaccgcgcgtctgcctcgataaagttatc

SEQ ID NO: 185033 - DNA, 75 bp, synthetic construct
  source 1..75: mol_type = other DNA
tctaacgatgaatcccgcaacacctttaaagtgcgctcgcagatcctctctggtattcgccagttcatggtgaac

SEQ ID NO: 185034 - DNA, 75 bp, synthetic construct
  source 1..75: mol_type = other DNA
ggaattggtatcgaccgtatggtaatgctgttcaccaacagccataccatccgcgacgttattctgttcccggcg

SEQ ID NO: 185035 - DNA, 75 bp, synthetic construct
  source 1..75: mol_type = other DNA
gatgtgctggccgatctttataaagccacccgcaaatacggggaagttgaccgggtatcgttctttaaggacatt

SEQ ID NO: 185036 - DNA, 75 bp, synthetic construct
  source 1..75: mol_type = other DNA
aattgaaaccattgcccgccagattggcgcggggatgagtaccgtcagaacggctatcgcacggctggaagcaga

SEQ ID NO: 185037 - DNA, 75 bp, synthetic construct
  source 1..75: mol_type = other DNA
agcatgggcaaacgaaattcgcctgatgtgtgtgcaggatggtcgtactcacaaacaaatctgcgagatgtacag

SEQ ID NO: 185038 - DNA, 75 bp, synthetic construct
  source 1..75: mol_type = other DNA
gtacgtacaccgaaaaacgcgaggacccgtacttcaaagccagttacgacaacgtggactacagccagatcccgg

SEQ ID NO: 185039 - DNA, 75 bp, synthetic construct
  source 1..75: mol_type = other DNA
gtaaaattgatgacgcagcagcggaaaaactcagtaaaacaacaacggcaaccccgctcccaaaagacccgaccc

SEQ ID NO: 185040 - DNA, 75 bp, synthetic construct
  source 1..75: mol_type = other DNA
actacagaaagcggcattttctcacctgtcagcttctgacacatcaaaatctgatgcgtcaaaatctgatgcgtc

SEQ ID NO: 185041 - DNA, 75 bp, synthetic construct
  source 1..75: mol_type = other DNA
gcaaaattgatgacgcagcagccgaaaagctcagtaaaacagcgcaggcaactccgctcccaaaagacccgaccc

SEQ ID NO: 185042 - DNA, 75 bp, synthetic construct
  source 1..75: mol_type = other DNA
tctgtggcgggaagtgctggatggcggtgatgcgggtgacgagaccctgtcggtggtggcgaaaacccgccgtaa

SEQ ID NO: 185043 - DNA, 75 bp, synthetic construct
  source 1..75: mol_type = other DNA
catccccgctggtatcacgccttaattaccacgctacaggatgtggacatgctgatctatgtccacggcgcgaat

SEQ ID NO: 185044 - DNA, 75 bp, synthetic construct
  source 1..75: mol_type = other DNA
gatggggttcgcagtgtggatgaacggtgcgccgtggacgggtgcacacggtgtggcagggggggggggtcatat

SEQ ID NO: 185045 - DNA, 75 bp, synthetic construct
  source 1..75: mol_type = other DNA
atgattaattatctgaccgctaaagacgcagcagaatatcttggtgtctgtctatcacgcttctatcagttaaag

SEQ ID NO: 185046 - DNA, 75 bp, synthetic construct
  source 1..75: mol_type = other DNA
ggacgcaagcgccgggtgtggcttgcctccagccttgatcaatttgccgacagatttctggggggacgaaaatga

SEQ ID NO: 185047 - DNA, 75 bp, synthetic construct
  source 1..75: mol_type = other DNA
gtgctggccgtctatggtccggtacatgcccggttgctgcgtcaggcactggaactgatcaccgatgctgagtcg

SEQ ID NO: 185048 - DNA, 75 bp, synthetic construct
  source 1..75: mol_type = other DNA
cgccagggtaaccgcaatgcgtcgaatgtttatcagcttaacgttgcgaagcttcaggctgcggcattttctcaa

SEQ ID NO: 185049 - DNA, 75 bp, synthetic construct
  source 1..75: mol_type = other DNA
ctgaaaacaggtggtgcgctggcaattggtgcggcagcggctggcggctatgctgccgggcgttttttgcagcct

SEQ ID NO: 185050 - DNA, 75 bp, synthetic construct
  source 1..75: mol_type = other DNA
tgcattaatacttaatctcacatgttttgtgagatgtttttatcatcattatcatccttggttgtggtcaatgat

SEQ ID NO: 185051 - DNA, 75 bp, synthetic construct
  source 1..75: mol_type = other DNA
gcaaccgttttgtctggcaggggcgtgagtatcaactgcaaccgaatgttgagtgggatgcgcactatctacacg

SEQ ID NO: 185052 - DNA, 75 bp, synthetic construct
  source 1..75: mol_type = other DNA
ccaggtttccttcttcaaggacatcgccggagaagaggcgttcgttggtttgcagacgcttgttgcggcggctgg

SEQ ID NO: 185053 - DNA, 75 bp, synthetic construct
  source 1..75: mol_type = other DNA
caatgactgcaacggttggctcgttgtcgctggctattggtgtgcttgctggcccgctggcaaaactgcgtcttg

SEQ ID NO: 185054 - DNA, 75 bp, synthetic construct
  source 1..75: mol_type = other DNA
acagttcaacctgacagccgatcaaatggaccgggttggcgatacgctgacagcagcattcacccggaccaatac

SEQ ID NO: 185055 - DNA, 75 bp, synthetic construct
  source 1..75: mol_type = other DNA
tccttccaaacattcacgtaaaatctgttgtgcgtgtttagattggagtgaacgccgtttccatttaggtgggta

SEQ ID NO: 185056 - DNA, 75 bp, synthetic construct
  source 1..75: mol_type = other DNA
tctggagtatgtcattggtaccgaagtgccggtacctggcggcgcgcatgaaaccttaagcgagctggcggtcac

SEQ ID NO: 185057 - DNA, 75 bp, synthetic construct
  source 1..75: mol_type = other DNA
cttgattgcagcatgtcctgtcaggacgatccgattcccttaaccgatggcatcgtggccgaacgcgccgctcgt

SEQ ID NO: 185058 - DNA, 75 bp, synthetic construct
  source 1..75: mol_type = other DNA
aaccggacacgcagacggctgaacaggagtttttaactcgccatcctgatgcggttgtattcagccctaaaaagc

SEQ ID NO: 185059 - DNA, 75 bp, synthetic construct
  source 1..75: mol_type = other DNA
ggatccgtcagtaaaatcaaaacatgatccgtcagataaaaaaccttctcgtccggacgcttcgcaaccggacac

SEQ ID NO: 185060 - DNA, 75 bp, synthetic construct
  source 1..75: mol_type = other DNA
gttatatctggtgagcggcgggtataaggtcatcagaaattatgtccgccgaaaaattgatgatgcagcggctga

SEQ ID NO: 185061 - DNA, 75 bp, synthetic construct
  source 1..75: mol_type = other DNA
tcaaatcggatggcacagtgaaaacggctctcgaaaaccttggtttgggagaaggttcggcattacccgttggtg

SEQ ID NO: 185062 - DNA, 75 bp, synthetic construct
  source 1..75: mol_type = other DNA
aagccgaaggcaccggattggggctggcggtcgtacataatattgttgaacaacacggtggtacaattcaggtcg

SEQ ID NO: 185063 - DNA, 75 bp, synthetic construct
  source 1..75: mol_type = other DNA
actcaggtcctgttgaatctctatctcaatgccattcaggctattggtcagcatggcgtgattagcgttgtggca

SEQ ID NO: 185064 - DNA, 75 bp, synthetic construct
  source 1..75: mol_type = other DNA
accgcgtattaataccgttgaatctccgtttgctgaatattcttcacttgatgaattattccaggaaacctataa

SEQ ID NO: 185065 - DNA, 75 bp, synthetic construct
  source 1..75: mol_type = other DNA
ggcgattggtcagcatggcgtgattagcgtgacggccagcgaaagcggcgcgggcgtgaaaatcagcgttaccga

SEQ ID NO: 185066 - DNA, 75 bp, synthetic construct
  source 1..75: mol_type = other DNA
acaatatgccgcgctgtaacggcaaagctgtgccacaggcagaagcacaacaggctattttcatcgccgttgacg

SEQ ID NO: 185067 - DNA, 75 bp, synthetic construct
  source 1..75: mol_type = other DNA
tgcttgggaaaacggaaactacgcctgcacttgaggtctatcgtttgttccagccaatgtcagcgccctggcggc

SEQ ID NO: 185068 - DNA, 75 bp, synthetic construct
  source 1..75: mol_type = other DNA
aaggactgcttgcggaaggcgtactgggtgaagttgcttactttgaatctcactttgaccgttttcgcccacagg

SEQ ID NO: 185069 - DNA, 75 bp, synthetic construct
  source 1..75: mol_type = other DNA
ccgcgttttggatatccgaatattaatgattcctctgaagcactggaattaatcgcctctggttgccatctggtt

SEQ ID NO: 185070 - DNA, 75 bp, synthetic construct
  source 1..75: mol_type = other DNA
cattgaactggagcgatctggtggtcggcactatttgcggggggtctgatggcaccagtggtatcacgggcaatc

SEQ ID NO: 185071 - DNA, 75 bp, synthetic construct
  source 1..75: mol_type = other DNA
tcaagtctattattgataaattaagcctggcaggtaagagcggcgaaggtctttattttatcgataaagaactct

SEQ ID NO: 185072 - DNA, 75 bp, synthetic construct
  source 1..75: mol_type = other DNA
atgacgtcactctctcgtccgcgcgtggagtttatctccaccattttgcagaccgtactcaatcttggcctgttg

SEQ ID NO: 185073 - DNA, 75 bp, synthetic construct
  source 1..75: mol_type = other DNA
tgattgggtacggttatgcgagtaaaaccttccatgcgcccctgattgcgggcacgcccgggctggagctggcag

SEQ ID NO: 185074 - DNA, 75 bp, synthetic construct
  source 1..75: mol_type = other DNA
atggttaagcgcgatcctccccgtggtcattgttggctggtggggctgtttgcggtgacagtgattcgcgattat

SEQ ID NO: 185075 - DNA, 75 bp, synthetic construct
  source 1..75: mol_type = other DNA
agcggcgaaacgaaatgtgggaacaggggaaaatcagataccggacatggcctcttttgccagtggtgatggatg

SEQ ID NO: 185076 - DNA, 75 bp, synthetic construct
  source 1..75: mol_type = other DNA
ggtacacgacaacaaggacatcagtaaccttaaaagtatcagccggaaatggtttgtatggaactatgattatcg

SEQ ID NO: 185077 - DNA, 75 bp, synthetic construct
  source 1..75: mol_type = other DNA
ggctagcttcacgtcggggccaggctggatgaaatttccggatggtacaatcatacagtttggcgtcagtattgc

SEQ ID NO: 185078 - DNA, 75 bp, synthetic construct
  source 1..75: mol_type = other DNA
aagccgttgccgcgcaaatgccggatctgattttaattagcgcaaccggcggggattcggcgctggcgctgtacg

SEQ ID NO: 185079 - DNA, 75 bp, synthetic construct
  source 1..75: mol_type = other DNA
agcgaaagaacgcaaactgcaacgtctctatatcggcgaaccgaacgccgaagcagtagccgcacaaatgccgga

SEQ ID NO: 185080 - DNA, 75 bp, synthetic construct
  source 1..75: mol_type = other DNA
gtgagactcgccccgctctatcgcaatgctcttttcttaacaggacttttgctttcaggaatagccgcagtgcag

SEQ ID NO: 185081 - DNA, 75 bp, synthetic construct
  source 1..75: mol_type = other DNA
gggcatcttgcggcaggcgttgcccacgaaatccgtaacccactttcctcgattaaagggctggcgaaatacttt

SEQ ID NO: 185082 - DNA, 75 bp, synthetic construct
  source 1..75: mol_type = other DNA
gcgcaaagagaagctggtggcactggggcatcttgcggcaggcgttgcccacgaaatccgtaacccactttcctc

SEQ ID NO: 185083 - DNA, 75 bp, synthetic construct
  source 1..75: mol_type = other DNA
cgctggggcatctggcggcaggcgtcgcccacgaaatccgtaacccactttcctcgattaaagggctggcgaaat

SEQ ID NO: 185084 - DNA, 75 bp, synthetic construct
  source 1..75: mol_type = other DNA
ggctctcgaaaaccttggtttgggagaagcggcaaaacggaatgtaggtaacgggcaaaaccaaattccggatat

SEQ ID NO: 185085 - DNA, 75 bp, synthetic construct
  source 1..75: mol_type = other DNA
accctgattatcctcttcgccctggcgacggtactgctggcaagcgtgttgtcattcttctggtatcgccgatat

SEQ ID NO: 185086 - DNA, 75 bp, synthetic construct
  source 1..75: mol_type = other DNA
gaaaaaggtaatgtgcttattcgcgctctggagtcgggaagtcgcgtagggatggggatgcgaatgcaccatatt

SEQ ID NO: 185087 - DNA, 75 bp, synthetic construct
  source 1..75: mol_type = other DNA
atgcagcaccggcaggataacttactggcaaacagaacgttgttgcccggtatggcttccggtcagtacgtattc

SEQ ID NO: 185088 - DNA, 75 bp, synthetic construct
  source 1..75: mol_type = other DNA
atgaataaactattatcctactatcagaaagaactgttttttcttaaaaaacaaggtattgagtttgcaaaaaaa

SEQ ID NO: 185089 - DNA, 75 bp, synthetic construct
  source 1..75: mol_type = other DNA
taattgagttatgctcaggggattctgttaggattaacgtaacattaaaaaatagtgccggaaagtatgaaatag

SEQ ID NO: 185090 - DNA, 75 bp, synthetic construct
  source 1..75: mol_type = other DNA
aatctgcggtgttcaagaatcctacgtttaacgtacccaaacaaacgcttgatgaacttgtgccgattgatagca

SEQ ID NO: 185091 - DNA, 75 bp, synthetic construct
  source 1..75: mol_type = other DNA
taaggaggaggttttaagagcgatatctgcatctactgctaccacgctacgtagattgtatggttctgcggagta

SEQ ID NO: 185092 - DNA, 75 bp, synthetic construct
  source 1..75: mol_type = other DNA
caggggattattgctcttgtttctgcggtaatcattcatgccataatatatactcaatgtaagaaaagaagttgt

SEQ ID NO: 185093 - DNA, 75 bp, synthetic construct
  source 1..75: mol_type = other DNA
gagtcggtacagattgaaatatcgcccggtgaccgtgagggatggtcggtggtgacactgacggcatcgccggaa

SEQ ID NO: 185094 - DNA, 75 bp, synthetic construct
  source 1..75: mol_type = other DNA
gacactgacggcatcgccggaatggcctgtcacagggagcgtgggcatcgacaacagcggacagaagaataccgg

SEQ ID NO: 185095 - DNA, 75 bp, synthetic construct
  source 1..75: mol_type = other DNA
atattgagcaggggatggagcagattaatcgtctgcgtacggagccggtacagattgaaatatcgcccggtgacc

SEQ ID NO: 185096 - DNA, 75 bp, synthetic construct
  source 1..75: mol_type = other DNA
atgattactgtcattgaacatgaggagcacactcgtcgtgtatggccgatgagagcaggaaagttaacatggctg

SEQ ID NO: 185097 - DNA, 75 bp, synthetic construct
  source 1..75: mol_type = other DNA
cagtttcagacaatatattctctaactatagtgcctgcgactattaatgaagcaaagatttactatgataatttg

SEQ ID NO: 185098 - DNA, 75 bp, synthetic construct
  source 1..75: mol_type = other DNA
ggggctcggccgccgggctcagtaccgccagtggccacgtttccagctcgttcaccgttgggctgcctctcgttt

SEQ ID NO: 185099 - DNA, 75 bp, synthetic construct
  source 1..75: mol_type = other DNA
tcgacaacagcggacagaagaataccggtacggggcagttaaatggtgtcctttcctttaataatcctctggggc

SEQ ID NO: 185100 - DNA, 75 bp, synthetic construct
  source 1..75: mol_type = other DNA
gcagagcgctgaatatcagtaccggaacggtaaaagcgcatctggaatccctgtatcgccgtctggaagtgaaaa

SEQ ID NO: 185101 - DNA, 75 bp, synthetic construct
  source 1..75: mol_type = other DNA
agagaaacgcgacaaatattatgcgcccacagtgtattgataaattatttatcggtaatgtaaatgactgtcatc

SEQ ID NO: 185102 - DNA, 75 bp, synthetic construct
  source 1..75: mol_type = other DNA
tttcagaactgatggttcacacctgaatgctgttggagcaaaaaaaatcggggaagagtatttgaaaaactacgc

SEQ ID NO: 185103 - DNA, 75 bp, synthetic construct
  source 1..75: mol_type = other DNA
gcgcgcggctagttcgcaggcacgtgatgccatcgaagtggcaatgacaaaagccgaacgttattacagtttgat

SEQ ID NO: 185104 - DNA, 75 bp, synthetic construct
  source 1..75: mol_type = other DNA
gtcgaccaggtattcgtaatactgtgcaggtaatctttatggtggagtgtgccagccatgtcgctaaaaagattg

SEQ ID NO: 185105 - DNA, 75 bp, synthetic construct
  source 1..75: mol_type = other DNA
gtgaaaatccttaaatcacagatcccggtagataaaggtaaagtctaccgcttcggaggtgacgaatttgcggtg

SEQ ID NO: 185106 - DNA, 75 bp, synthetic construct
  source 1..75: mol_type = other DNA
cgcctggtttggtcgcgtactcggctggccgctggaacaacttgccgcccggcatccggaactgaaagaacaaat

SEQ ID NO: 185107 - DNA, 75 bp, synthetic construct
  source 1..75: mol_type = other DNA
gtgctggcgctgcgcccggagtttgccgaaaacccgaacgcgatgttcgtattgtggaaagaccacactgcggtt

SEQ ID NO: 185108 - DNA, 75 bp, synthetic construct
  source 1..75: mol_type = other DNA
cgtcatcatccacgtgactacattgagtcaatggaagcggcgctaaaaactgtgcttgcagagcttaacgccgaa

SEQ ID NO: 185109 - DNA, 75 bp, synthetic construct
  source 1..75: mol_type = other DNA
gataacgctaatcgatcctaacgatgtactttgccacaaaggggaatgtgatgccatcgtggatgggaagatcat

SEQ ID NO: 185110 - DNA, 75 bp, synthetic construct
  source 1..75: mol_type = other DNA
caacggcggctatctcggttctaagcgtcggtgccaccaccggtgtaaaaaacagaaagctggtcgaacaattgc

SEQ ID NO: 185111 - DNA, 75 bp, synthetic construct
  source 1..75: mol_type = other DNA
gtcagtcggcatttggcgatatctatgcctggtttggtcgcgtactcggctggccgctggaccaacttgccgccc

SEQ ID NO: 185112 - DNA, 75 bp, synthetic construct
  source 1..75: mol_type = other DNA
tttcgctgcgggcttacatgcgctgaaaggtcaccgagtggtcggcggaatgcgtgcgtctatttataacgccat

SEQ ID NO: 185113 - DNA, 75 bp, synthetic construct
  source 1..75: mol_type = other DNA
gaggaagccgagaaggattttcgcgatcttcttaacgtcccctccaactacaaggtattgttctgccatggcggt

SEQ ID NO: 185114 - DNA, 75 bp, synthetic construct
  source 1..75: mol_type = other DNA
atgaaacccagtgccgggacgctgcgcggtgtcagtctggctgcggtcgcaaactccgaagttgatgcactaatt

SEQ ID NO: 185115 - DNA, 75 bp, synthetic construct
  source 1..75: mol_type = other DNA
aagagggctacgacccggcattcagtactgcggttaacgttgcctctgccccgacgggtttgcttattccaccaa

SEQ ID NO: 185116 - DNA, 75 bp, synthetic construct
  source 1..75: mol_type = other DNA
gaggaagccgagaaggattttcgcgatcttcttaacgtcccctccaattacaaagtattattctgtcacggcggc

SEQ ID NO: 185117 - DNA, 75 bp, synthetic construct
  source 1..75: mol_type = other DNA
acgattccatgttcaacacgccgccgacatttgcctggtacttatctggcctggtcttcaaatggctgaaagcga

SEQ ID NO: 185118 - DNA, 75 bp, synthetic construct
  source 1..75: mol_type = other DNA
cctgtaagcgggtatcgtgatgaagaagagaggctggcctcattaatctcggagcgagtaaaagaagttgcggct

SEQ ID NO: 185119 - DNA, 75 bp, synthetic construct
  source 1..75: mol_type = other DNA
ggtcaagcgtgcaaaagagggcctggaagagcgtctggcctttttattccctgacgaggaagaacgtcttaagcg

SEQ ID NO: 185120 - DNA, 75 bp, synthetic construct
  source 1..75: mol_type = other DNA
gatggggaacgtgaaacgttaggtctgtacctgacgggacaccctatcaatcagtatttaaaagagattgagcgt

SEQ ID NO: 185121 - DNA, 75 bp, synthetic construct
  source 1..75: mol_type = other DNA
ggatatcgtgacgatgcagaacgactcgctgatgagcagtcagatcttgttaagaagatggtgtttgatacgctg

SEQ ID NO: 185122 - DNA, 75 bp, synthetic construct
  source 1..75: mol_type = other DNA
agcgtatggcagaacaacaatctgatatggttaagaaaatggtttttgagacgctcaaagagctatataaaaaag

SEQ ID NO: 185123 - DNA, 75 bp, synthetic construct
  source 1..75: mol_type = other DNA
acgacaaggcccacctgatgcagtggatggcgtatatcaaagaggtgaaggctctgaatttaagtcatgtgagtg

SEQ ID NO: 185124 - DNA, 75 bp, synthetic construct
  source 1..75: mol_type = other DNA
ttttattttgtctggcaacattatgaatcatggaggaatagcgcgacgattaatcaactttgccagaattcttgg

SEQ ID NO: 185125 - DNA, 75 bp, synthetic construct
  source 1..75: mol_type = other DNA
tgaaagggctgcacaccagcctgacgctgacgattgcctcgctgattgtggcgctaattctggcgttgattttta

SEQ ID NO: 185126 - DNA, 75 bp, synthetic construct
  source 1..75: mol_type = other DNA
atgcttgagtatttacccgaactaatgaaagggctgcataccagcctgacgctgaccgttgcctcgctgattgtg

SEQ ID NO: 185127 - DNA, 75 bp, synthetic construct
  source 1..75: mol_type = other DNA
cgtggtacacagatgaatataaaaaattatttgcgttacctgatgaatctgaactgcagcagaaggacgccgagg

SEQ ID NO: 185128 - DNA, 75 bp, synthetic construct
  source 1..75: mol_type = other DNA
gcagcttaaagatcagcttgaagagagcgcgaagttggaagcgcagattaaggcgaatctgggggggctgggtta

SEQ ID NO: 185129 - DNA, 75 bp, synthetic construct
  source 1..75: mol_type = other DNA
ctttgcgtggatgcagcacatgatccaccacctcgcgccaaaaggttcgatggcgctgctgctggcgaacggttc

SEQ ID NO: 185130 - DNA, 75 bp, synthetic construct
  source 1..75: mol_type = other DNA
gcagcttaaagaccagctagcagagagtgcaaaactggaagcgcagattaaggcaaatctgggggggctgggtta

SEQ ID NO: 185131 - DNA, 75 bp, synthetic construct
  source 1..75: mol_type = other DNA
atgcttgagaagttagagttaaccaaaaatgcacaattttatatttccaaaggaaatgaaccactacctccaata

SEQ ID NO: 185132 - DNA, 75 bp, synthetic construct
  source 1..75: mol_type = other DNA
gcgctggccggtaaggtggtcggtttttgtcgccgaactcggtgcagtgacgtttccaaaaaatctctcggtcga

SEQ ID NO: 185133 - DNA, 75 bp, synthetic construct
  source 1..75: mol_type = other DNA
aacgctgacgttcccttcctgattctcgatttgcttaacactatttctgacaatccaataatcatcctgcttatt

SEQ ID NO: 185134 - DNA, 75 bp, synthetic construct
  source 1..75: mol_type = other DNA
gaaggctctgtgaagggctacgcgggtgacaccgccaccaccagtgaaatcaaagccaaactgctggcggacgat

SEQ ID NO: 185135 - DNA, 75 bp, synthetic construct
  source 1..75: mol_type = other DNA
aacgcttaaggacttgcgtcctgccattatctgagcatccgtatttatacccgccaagcgacagagttccgggtt

SEQ ID NO: 185136 - DNA, 75 bp, synthetic construct
  source 1..75: mol_type = other DNA
aacatgacggtatcggacaaagcaataaggcagcgatcttatgaagctccggatttaaagggcactttctctact

SEQ ID NO: 185137 - DNA, 75 bp, synthetic construct
  source 1..75: mol_type = other DNA
cgacggacgcgaaatccagcgtgaatggtttactgatctgctgacgcccgttaagtcgacctctgccgaactgca

SEQ ID NO: 185138 - DNA, 75 bp, synthetic construct
  source 1..75: mol_type = other DNA
accaatgcagatattcctgagttaatcaatgagctcattacccgcgtttcggataacaaatgggtcattctgttt

SEQ ID NO: 185139 - DNA, 75 bp, synthetic construct
  source 1..75: mol_type = other DNA
atgaccattccgaaaacggatattgccgtcattaaaggcgcgtgggtcgatggaatgggaagcccgtctacaggt

SEQ ID NO: 185140 - DNA, 75 bp, synthetic construct
  source 1..75: mol_type = other DNA
gcggtactgcgcggtggactggccgccgcaggcacggtgctgcgagtactggcatctggtccactggcgatgctg

SEQ ID NO: 185141 - DNA, 75 bp, synthetic construct
  source 1..75: mol_type = other DNA
gcccgttaagtcgacctctgccgaactgcagagcgcagcggcaatggggcgacgattcggggaggcactggcgga

SEQ ID NO: 185142 - DNA, 75 bp, synthetic construct
  source 1..75: mol_type = other DNA
accacttaagcctgtgtttcagtggattggcgacaaagtgcaggcgttgtggggctggtttactgatctgctgac

SEQ ID NO: 185143 - DNA, 75 bp, synthetic construct
  source 1..75: mol_type = other DNA
aataattaatgaatccgatgcggatattgtaaatattcattggattgctggagaaacaatatcatttaaagacct

SEQ ID NO: 185144 - DNA, 75 bp, synthetic construct
  source 1..75: mol_type = other DNA
atggaactcagaaacgtcacgcgttattaccctgaagatatgccttatggtgaaaatattcagtatttccgtagt

SEQ ID NO: 185145 - DNA, 75 bp, synthetic construct
  source 1..75: mol_type = other DNA
tgacggtaaaagagggcggcccgcggatgattgttaccgggtattccagcggcatggttgagtgtcgctggtatg

SEQ ID NO: 185146 - DNA, 75 bp, synthetic construct
  source 1..75: mol_type = other DNA
atgcgctggcggagctgatccaactgttaggtgcaggcaaaatcaacgagttctttgatcagccgacccagggat

SEQ ID NO: 185147 - DNA, 75 bp, synthetic construct
  source 1..75: mol_type = other DNA
acccggattacgcaacggctgtcgacaaaatggttcgcgtgaaagatatctttatgcctgttgagaacaatgcca

SEQ ID NO: 185148 - DNA, 75 bp, synthetic construct
  source 1..75: mol_type = other DNA
gacgcccgttaagtcgacctctgccgaactgcagagcgcagcggcaatggggcgacgattcggggaggcactggc

SEQ ID NO: 185149 - DNA, 75 bp, synthetic construct
  source 1..75: mol_type = other DNA
atctcaaaagcgtatcagcgcgggtacggtgccgccgggccgatcatcgatcgcgactggcttatcgaattaaat

SEQ ID NO: 185150 - DNA, 75 bp, synthetic construct
  source 1..75: mol_type = other DNA
tgacggtgctggcggcgaacaataccggctatcagaatctgacgttgctgatctcaaaagcgtatcagcgcgggt

SEQ ID NO: 185151 - DNA, 75 bp, synthetic construct
  source 1..75: mol_type = other DNA
ggccgtggctccggtgcgggttcactggtggcctacgcgctgaaaatcaccgacctcgatccgctggaatttgac

SEQ ID NO: 185152 - DNA, 75 bp, synthetic construct
  source 1..75: mol_type = other DNA
ctggtgaagttcgacttccttggtttgcgtacgctcaccatcatcaactgggcgctggagatgatcaataagcgg

SEQ ID NO: 185153 - DNA, 75 bp, synthetic construct
  source 1..75: mol_type = other DNA
tgaaggtccgattgaggcgatcatcgaagcccgtaataaaggcggctatttccgtgaactgtttgatctctgcgc

SEQ ID NO: 185154 - DNA, 75 bp, synthetic construct
  source 1..75: mol_type = other DNA
cgggcgaagaatggcgagccgccgctggatatcgccgcgatcccgctggatgataagaaaagcttcgacatgctg

SEQ ID NO: 185155 - DNA, 75 bp, synthetic construct
  source 1..75: mol_type = other DNA
ggagaaaaggctccgcaacgcgtcaatatggttcagttccatcaatcttatagctatgaggattttatacagggc

SEQ ID NO: 185156 - DNA, 75 bp, synthetic construct
  source 1..75: mol_type = other DNA
gtttgcctccatgctggacaacataatcaacgactataaattaatatttaattctggcaagagtgttattccacc

SEQ ID NO: 185157 - DNA, 75 bp, synthetic construct
  source 1..75: mol_type = other DNA
tttcctggttgctggataaactcggcattgtcagtaaagaggctgcaaaggcgaaactgccggaaagcgtgacgc

SEQ ID NO: 185158 - DNA, 75 bp, synthetic construct
  source 1..75: mol_type = other DNA
tacggatttaacaaatcgcactctgcggcctatgctttggtgtcatatcaaacgttatggctgaaagcgcactat

SEQ ID NO: 185159 - DNA, 75 bp, synthetic construct
  source 1..75: mol_type = other DNA
gctccaggtcgcaggtaaacattagcgccaatacttatggctctgcatttttcgatattcgtaacctgagtctgt

SEQ ID NO: 185160 - DNA, 75 bp, synthetic construct
  source 1..75: mol_type = other DNA
caagagtcaaaactggaatatttctgcgtctgtaaataacgttgggtattcaacaagccagcgattaagcgcaaa

SEQ ID NO: 185161 - DNA, 75 bp, synthetic construct
  source 1..75: mol_type = other DNA
cttttatcccgtgcgttgtctgtcccctgttgtgatatgttccggcgcggctctccgtggatatgctatctctcc

SEQ ID NO: 185162 - DNA, 75 bp, synthetic construct
  source 1..75: mol_type = other DNA
acgccaacgccagcgaaatcgccgtcagttgcgtcaccgcgccggacggcaatcacacggtctatatccgtgata

SEQ ID NO: 185163 - DNA, 75 bp, synthetic construct
  source 1..75: mol_type = other DNA
tgaatgatgcttatcggcagttacgcgagctgttaactactttccgcctgacgctgcagcaggcggatctcccct

SEQ ID NO: 185164 - DNA, 75 bp, synthetic construct
  source 1..75: mol_type = other DNA
acttgcaaagtggcagtccacaactcaatgcacatcgccagttgtttcagcaggcactgcattcaccggtattaa

SEQ ID NO: 185165 - DNA, 75 bp, synthetic construct
  source 1..75: mol_type = other DNA
tctccagtttattccggtggtggagtatgacgcccagcgtgagctgttgccctggtcagtgacgggggaagatta

SEQ ID NO: 185166 - DNA, 75 bp, synthetic construct
  source 1..75: mol_type = other DNA
tactcatcagccagactggggatctatccaaattcagtatcgtggacgcaagattgacagggaaaaactgctgcg

SEQ ID NO: 185167 - DNA, 75 bp, synthetic construct
  source 1..75: mol_type = other DNA
ttttatcagtgcaatgataaacatcatatctgtttttacaaaaaatactctcttccggggtaaaacgctttcttc

SEQ ID NO: 185168 - DNA, 75 bp, synthetic construct
  source 1..75: mol_type = other DNA
tcagaatggtgcccgaatgcccattctttatcctggtgagaaaatcacgacggttaacgcggcgcggccctacag

SEQ ID NO: 185169 - DNA, 75 bp, synthetic construct
  source 1..75: mol_type = other DNA
tacattgagtcaccctatgaccctgcgatggttcagtctgccctgggcgagacctatgacgagtcggagttaggc

SEQ ID NO: 185170 - DNA, 75 bp, synthetic construct
  source 1..75: mol_type = other DNA
ctgctgttaaaactgcttccgtgtctctggttgttgataacaccaaaccactgaccatgtcttctcgtcagatcg

SEQ ID NO: 185171 - DNA, 75 bp, synthetic construct
  source 1..75: mol_type = other DNA
gcagagatgaccggcaaccgggcatttgatgcagactgggcggatgagtacgggcgctgtgtggaggcacactgg

SEQ ID NO: 185172 - DNA, 75 bp, synthetic construct
  source 1..75: mol_type = other DNA
cggtcagtaacttcaaggagttcgagggcacggtgctcaggaatattgccgccgcgctggggctgtccacccagc

SEQ ID NO: 185173 - DNA, 75 bp, synthetic construct
  source 1..75: mol_type = other DNA
aattctgaatgctatcttcgccgcgtatattgagtctccatacgatcccgaaatgatccagtccgcgctggggga

SEQ ID NO: 185174 - DNA, 75 bp, synthetic construct
  source 1..75: mol_type = other DNA
ttgccaccgttgtccatggtgctttgcctgccagggggggtgtccgaagcatcgactacacgatcggttgaacca

SEQ ID NO: 185175 - DNA, 75 bp, synthetic construct
  source 1..75: mol_type = other DNA
cggcgcaaagttaatcgatattcgtgatgctgatgaatatcttcgtgaacatattcctgaagcagatctggctcc

SEQ ID NO: 185176 - DNA, 75 bp, synthetic construct
  source 1..75: mol_type = other DNA
aagcggctttgttggtgccgggttactgtttgcaggaattagcggtttttgtgggatggcaaggttgttagataa

SEQ ID NO: 185177 - DNA, 75 bp, synthetic construct
  source 1..75: mol_type = other DNA
gaggagagtgaggcgctggagccggagtcacgctatatcgaaatcccggtggtttacggtggcgcaggcgggccg

SEQ ID NO: 185178 - DNA, 75 bp, synthetic construct
  source 1..75: mol_type = other DNA
cttcttatcagtattactggtaacgccattcagtactggcactcaacgaatgtggagcgcgaatatttcgctaca

SEQ ID NO: 185179 - DNA, 75 bp, synthetic construct
  source 1..75: mol_type = other DNA
ctcccggcaaaattacgtagcgagcaaattatattccactgtcaggcgggaaaacgaaccagtaataatgcgcaa

SEQ ID NO: 185180 - DNA, 75 bp, synthetic construct
  source 1..75: mol_type = other DNA
ccctgaatagtggtttcttcttattaagtggctttgttggggctggattaatgtttgctggaatcagcggttttt

SEQ ID NO: 185181 - DNA, 75 bp, synthetic construct
  source 1..75: mol_type = other DNA
tatttatcaggcagtcaattgagcacggtttacccgcagcgaaaatagaagtccatgcctttgagggagtgggga

SEQ ID NO: 185182 - DNA, 75 bp, synthetic construct
  source 1..75: mol_type = other DNA
ggcagacatacgaatcgacttcagcgattacgatgtcagcgatatcgaacgcgatctcgacagggttgaatccct

SEQ ID NO: 185183 - DNA, 75 bp, synthetic construct
  source 1..75: mol_type = other DNA
attaatcagcgtagctgtatctcgcgtcgcagttgaattacgtacccgtgtcgaatcgtggccaccacggttaaa

SEQ ID NO: 185184 - DNA, 75 bp, synthetic construct
  source 1..75: mol_type = other DNA
gggggggggggggggggggggggggagcccccgccggtgacgctggctagccagaaacggatctggcgactggcg

SEQ ID NO: 185185 - DNA, 75 bp, synthetic construct
  source 1..75: mol_type = other DNA
taggtgaaacggcggtagtactggaactggaaccgccggtgacgctggctagccagaaacggatctggcgactgg

SEQ ID NO: 185186 - DNA, 75 bp, synthetic construct
  source 1..75: mol_type = other DNA
gtgcaacgagcgcgttgttatctgataggtgaaacggcggtagtgctggaactggaaccgccggtgacgctggct

SEQ ID NO: 185187 - DNA, 75 bp, synthetic construct
  source 1..75: mol_type = other DNA
gagattattcaaagcgatcgtccaggagaaaatattcttttgtttaaacgtgcgcttggtgtgactaccggcatt

SEQ ID NO: 185188 - DNA, 75 bp, synthetic construct
  source 1..75: mol_type = other DNA
ataaataccctgctgccatttgcctggctctgggattttttctaagcattgtaatttctgtaatgttttgccttg

SEQ ID NO: 185189 - DNA, 75 bp, synthetic construct
  source 1..75: mol_type = other DNA
aacacacaggcgacaggcattatatgttgtatctgcgttagtatttctttttttggctttaacctatccatcagg

SEQ ID NO: 185190 - DNA, 75 bp, synthetic construct
  source 1..75: mol_type = other DNA
ttggctgtggtggcgatcgcgataaaggtaagcgtccactgatgggcgcaattgccgaagagtttgctgacgtgg

SEQ ID NO: 185191 - DNA, 75 bp, synthetic construct
  source 1..75: mol_type = other DNA
atcatcaacgatattctggcgggaatgttagatgccggacatgccaaagtgatggaaggccgtgctgaagcggtg

SEQ ID NO: 185192 - DNA, 75 bp, synthetic construct
  source 1..75: mol_type = other DNA
ctatcgtaatggacgatgccgatcttgaactggcagtcaaagccatcgttgattcacgcgtcattaatagtgggc

SEQ ID NO: 185193 - DNA, 75 bp, synthetic construct
  source 1..75: mol_type = other DNA
cggtgccggtatcgcgctggcaatcccgctggccgctgcgggtcaggtgctgaccatcatcgttcgtaccatcac

SEQ ID NO: 185194 - DNA, 75 bp, synthetic construct
  source 1..75: mol_type = other DNA
ctcatgtagtagtgttggggggagtgttagttcttgtagcaatatttttcgtgggaatgattgtgttcgctggta

SEQ ID NO: 185195 - DNA, 75 bp, synthetic construct
  source 1..75: mol_type = other DNA
gttgcaggctgtgtttggttattttgatgatctgctgaatattcgtgatgagagtaaaactctatcacctccatc

SEQ ID NO: 185196 - DNA, 75 bp, synthetic construct
  source 1..75: mol_type = other DNA
gcaacgtctgcgtgaactggcccccgccagtaaactggttgcggtggtgaaagcgaacgcctacggtcacggtct

SEQ ID NO: 185197 - DNA, 75 bp, synthetic construct
  source 1..75: mol_type = other DNA
ggcgaaggtctgcccgtagagcgtatcgcagaaatgacgaaagtgagtgcttacgaacttatcacgcgcctgaca

SEQ ID NO: 185198 - DNA, 75 bp, synthetic construct
  source 1..75: mol_type = other DNA
ccgctggccgctgcgggtcaggtgctgaccatcatcgttcgtaccatcaccgttgctttccagcacgctgcggat

SEQ ID NO: 185199 - DNA, 75 bp, synthetic construct
  source 1..75: mol_type = other DNA
gcaaaactgccggacgcggttgcggtatcaatggaagatcatattaattcaaactgtcatggtcgttggttgaaa

SEQ ID NO: 185200 - DNA, 75 bp, synthetic construct
  source 1..75: mol_type = other DNA
cttcctaagccgaacaacactattctgattcaaaataaagcggctgaacgtctccgccagaatgttggatcactg

SEQ ID NO: 185201 - DNA, 75 bp, synthetic construct
  source 1..75: mol_type = other DNA
agaagaaaaggccgcaactttgaaattgccacagccgaataactcacgagcaatcgtcaataatactgctttgct

SEQ ID NO: 185202 - DNA, 75 bp, synthetic construct
  source 1..75: mol_type = other DNA
attcgcgtgatgtacaaagaattgggtatcccgcaggagtccaattttggtcttgtggagaaaatcaatggctta

SEQ ID NO: 185203 - DNA, 75 bp, synthetic construct
  source 1..75: mol_type = other DNA
tgcttcctcctggttatatgttcgctcgtatgtcggcacacggtcagatcgagttcactgctgatgctatcccgc

SEQ ID NO: 185204 - DNA, 75 bp, synthetic construct
  source 1..75: mol_type = other DNA
cgctgactcttgttactggttacgatgttaagcgtcgaatgattgttattcaggaatggaaacgactgaaagaag

SEQ ID NO: 185205 - DNA, 75 bp, synthetic construct
  source 1..75: mol_type = other DNA
aaacgttaaagctgatattgttaagatgtttaaagcacttgaattagatgcgctgaaatctcagcgtatctattt

SEQ ID NO: 185206 - DNA, 75 bp, synthetic construct
  source 1..75: mol_type = other DNA
aaggcgtcgttatcacgacgctggcccgttatttgttgggtgaaaaatgcggtaataggttgaaaaccatagatg

SEQ ID NO: 185207 - DNA, 75 bp, synthetic construct
  source 1..75: mol_type = other DNA
gcagcaaatccggcgcaggtggctggcgatttccatgcgcaaattgatgccatctggggaggcgcgcgtgcgtaa

SEQ ID NO: 185208 - DNA, 75 bp, synthetic construct
  source 1..75: mol_type = other DNA
cgatgttaagcgtcgaatggttgttattcaggaatggaaacgactgaaagaagaaaatgaaaaactgcgttctca

SEQ ID NO: 185209 - DNA, 75 bp, synthetic construct
  source 1..75: mol_type = other DNA
aaggtgtcgtcatcacgacgctggcccgttatttgttgggtgaaaaatgcggtaatcgcctgaaaacgattgatg

SEQ ID NO: 185210 - DNA, 75 bp, synthetic construct
  source 1..75: mol_type = other DNA
ctgcgtgccgttgtagataaacacgccctgcttgcccatcaacaacgggtggtgagtggggaacaggaaccgagt

SEQ ID NO: 185211 - DNA, 75 bp, synthetic construct
  source 1..75: mol_type = other DNA
atgcgtcgaacgtttatcaaaaaagaaggcgtcgttatcacgacgctggcccgttatttgttgggtgaaaagtgc

SEQ ID NO: 185212 - DNA, 75 bp, synthetic construct
  source 1..75: mol_type = other DNA
ttcaatttgaatatttcagaaatagaaaataatatagtatcacttcttgaacgctcagacaggaaagttgtcata

SEQ ID NO: 185213 - DNA, 75 bp, synthetic construct
  source 1..75: mol_type = other DNA
atggctattcgcaatataaagagatcgatctcagcggcggcatcgcctctggaactggtgctggtgctgttttct

SEQ ID NO: 185214 - DNA, 75 bp, synthetic construct
  source 1..75: mol_type = other DNA
atgtaccaagtacaggacggctattcgcaatataaagagatcgatctcgcggcgcgtaccgcggcggcatcgcct

SEQ ID NO: 185215 - DNA, 75 bp, synthetic construct
  source 1..75: mol_type = other DNA
tgtttttgctgcgggattcctgatgcgcccaataggcggttggctatttggccgcatagccgataaacatggtcg

SEQ ID NO: 185216 - DNA, 75 bp, synthetic construct
  source 1..75: mol_type = other DNA
ttaatagcactaccgtgccgcagaccaactatattcctgggttgattgcggtggtcggttgcgacggcactggta

SEQ ID NO: 185217 - DNA, 75 bp, synthetic construct
  source 1..75: mol_type = other DNA
atggatgcactacaaacacaaactgttaatagtacaaccgcgccgcagcccaactacattccggggctgattgcg

SEQ ID NO: 185218 - DNA, 75 bp, synthetic construct
  source 1..75: mol_type = other DNA
gcacgaatctgaattatcacgacgagttaaacaattaatcagagcagcaaagaaacaactggaggcgttatgcgc

SEQ ID NO: 185219 - DNA, 75 bp, synthetic construct
  source 1..75: mol_type = other DNA
agaatattcttctctttaaacgtgcgcttggcgtgaccaccggtattctgccgtggaatttcccgttcttcctga

SEQ ID NO: 185220 - DNA, 75 bp, synthetic construct
  source 1..75: mol_type = other DNA
cgttcttcctcattgcccgcaaaatggctcccgctcttttgaccggtaataccatcgtcattaaacccagtgaat

SEQ ID NO: 185221 - DNA, 75 bp, synthetic construct
  source 1..75: mol_type = other DNA
tgctatctgtcgtcgtatctgacgggtgagtcgcccaacaccgtgggcgcgtgttctccggcccgtttcgtgcgc

SEQ ID NO: 185222 - DNA, 75 bp, synthetic construct
  source 1..75: mol_type = other DNA
atgatatgcgcgttcaggaagagttaagtcgtatcaatactgctgaaaaatttatttctcagcggaacatgaata

SEQ ID NO: 185223 - DNA, 75 bp, synthetic construct
  source 1..75: mol_type = other DNA
agacaaatggcaagattctgaactggagatggcaattgataaaggaggtttactccttaacattgattttgatcc

SEQ ID NO: 185224 - DNA, 75 bp, synthetic construct
  source 1..75: mol_type = other DNA
acacgcgctttaaaagaagctggatctttgaaaggattatggcgcaatcgccgagcattcatcatggttctcggt

SEQ ID NO: 185225 - DNA, 75 bp, synthetic construct
  source 1..75: mol_type = other DNA
ggaaaccacacgtaaaattatcaccaatctgacggaaggcgcatcccgcaagcagcttcgtgatgccgaggcgct

SEQ ID NO: 185226 - DNA, 75 bp, synthetic construct
  source 1..75: mol_type = other DNA
gcagttgagcagcttcaggtctgggggcagcgcaacaatattccggtgattgcccagcataccggcgcggactcc

SEQ ID NO: 185227 - DNA, 75 bp, synthetic construct
  source 1..75: mol_type = other DNA
cactggataaattcacgaagaaatacaaattgtgtattcaccctgaaacaggcgtgatttattcgatggcggaag

SEQ ID NO: 185228 - DNA, 75 bp, synthetic construct
  source 1..75: mol_type = other DNA
tgacgaaaacgtctcttttatcccgtgcgttgtctgtcccctgttgtgatatgttccggcgcggttctccgtgga

SEQ ID NO: 185229 - DNA, 75 bp, synthetic construct
  source 1..75: mol_type = other DNA
ggagcagtatatctccggtaataacggcggttatctgcggaatgagctgtcctggtctctgttctccctgccata

SEQ ID NO: 185230 - DNA, 75 bp, synthetic construct
  source 1..75: mol_type = other DNA
gaagccgttggcttaaccggcatcacgctaacgaaactggacggcacggcgaaaggcggggtaattttctcggtg

SEQ ID NO: 185231 - DNA, 75 bp, synthetic construct
  source 1..75: mol_type = other DNA
tatatggatttgacaataaaggaaaagaaaaattgacaaaagcacacgagagaatagcggcatttagctttggca

SEQ ID NO: 185232 - DNA, 75 bp, synthetic construct
  source 1..75: mol_type = other DNA
tccgggccaggtgaaatgtactgtaagccgtgatgtatactctgctgacggtactgtaaaactgattgataaagg

SEQ ID NO: 185233 - DNA, 75 bp, synthetic construct
  source 1..75: mol_type = other DNA
atgagaaaagacagagaggaaaatttagattacctcgatgaagaagataccagcatcgaggatgagcgtcagggc

SEQ ID NO: 185234 - DNA, 75 bp, synthetic construct
  source 1..75: mol_type = other DNA
gactgaccagcggtatagcgttcagtgttcaggccgcgaatgttgatgaatacattactcaactccccgccggtg

SEQ ID NO: 185235 - DNA, 75 bp, synthetic construct
  source 1..75: mol_type = other DNA
gcctgccacaacgttctgagccgctcccgttggcttttgccgtgcaggatggtgccagctatgccggggcaattc

SEQ ID NO: 185236 - DNA, 75 bp, synthetic construct
  source 1..75: mol_type = other DNA
atgattactgagttaagtgaaagagaatacaaggagttggcagacgctgcagagggacagactcttgatgctatt

SEQ ID NO: 185237 - DNA, 75 bp, synthetic construct
  source 1..75: mol_type = other DNA
gctccctggcctatgactggtgaagtgaatcgtcgcaatgtgattaacccctacctggaaaaattacagggactg

SEQ ID NO: 185238 - DNA, 75 bp, synthetic construct
  source 1..75: mol_type = other DNA
gaggaaattatctatccggggatgcactctgatgtcggtggtggctatcccgttcgcgatcaggggaagtcctgt

SEQ ID NO: 185239 - DNA, 75 bp, synthetic construct
  source 1..75: mol_type = other DNA
cttcagcaaattaaggctatgggagacggactctatccacaattttttattgattcactgggaacgggaacgcga

SEQ ID NO: 185240 - DNA, 75 bp, synthetic construct
  source 1..75: mol_type = other DNA
tgaaaaatttagctcgctttatggcgtcccagcaaaacctattccattagatgggaaaatgtggctacgaggtcc

SEQ ID NO: 185241 - DNA, 75 bp, synthetic construct
  source 1..75: mol_type = other DNA
aagggtaataaagttccagatggaatagatctgatttttacagaaaaggccaaaaactgtaatgtttttattgat

SEQ ID NO: 185242 - DNA, 75 bp, synthetic construct
  source 1..75: mol_type = other DNA
atctcaatggctaatgacagtgattacggcctgacctcatcaaatctatacccaaaatctgaacgtcgcgatgaa

SEQ ID NO: 185243 - DNA, 75 bp, synthetic construct
  source 1..75: mol_type = other DNA
agccaggcactggcgaccgcattcaacctggattttgtgcactatcgttcacagatctcctccctgtctccgcgt

SEQ ID NO: 185244 - DNA, 75 bp, synthetic construct
  source 1..75: mol_type = other DNA
ggaaatactgaagagcacaatcagggctatgaagcagtcagaacagcgggcaaataatgtccctgcgctgataaa

SEQ ID NO: 185245 - DNA, 75 bp, synthetic construct
  source 1..75: mol_type = other DNA
tcagaatgatgcaatggcctttggcagccaggcactggcgaccgcattcaacctggattttgtgcactatcgttc

SEQ ID NO: 185246 - DNA, 75 bp, synthetic construct
  source 1..75: mol_type = other DNA
ttgctaattcattaacaaaacgcttcaacatctggcgacaaacgctgctgaacaccactttgcagggcacagaag

SEQ ID NO: 185247 - DNA, 75 bp, synthetic construct
  source 1..75: mol_type = other DNA
tatccggtgtatctgattaatggcgatgatgaagcaaaagaatatcagcaaattaaggctatgggagacggactc

SEQ ID NO: 185248 - DNA, 75 bp, synthetic construct
  source 1..75: mol_type = other DNA
atgtccagcgaaataagtggtctggcttttccgtgttatgcccccccggtgttccctgaagatgggcgattaata

SEQ ID NO: 185249 - DNA, 75 bp, synthetic construct
  source 1..75: mol_type = other DNA
gcagaatatgcgataagtcgggatgcattaacaatcatcaatgatcaatttagctttcagcttccggatgacgag

SEQ ID NO: 185250 - DNA, 75 bp, synthetic construct
  source 1..75: mol_type = other DNA
ggaatggtgtggtttatcaaaccagtgatgtgaagtatgtgattgccaacaacaacttgtgggccagcccgttgg

SEQ ID NO: 185251 - DNA, 75 bp, synthetic construct
  source 1..75: mol_type = other DNA
aatcgctgatgctggtgactgcgcttaacacccacattggttatgacaaagccgccgagatcgccaaaaaagcgc

SEQ ID NO: 185252 - DNA, 75 bp, synthetic construct
  source 1..75: mol_type = other DNA
cgcagccacaatatcagcagccgcaacaaccggttgcgccacagcagcaatatcagcagccgcaacagccggttg

SEQ ID NO: 185253 - DNA, 75 bp, synthetic construct
  source 1..75: mol_type = other DNA
gtggtaaaccctgctacagaggctgtcatttcccgcattcccgatggtcaggccgaggatgcccgtaaggcaatc

SEQ ID NO: 185254 - DNA, 75 bp, synthetic construct
  source 1..75: mol_type = other DNA
atggctacgatgagatggttaaagtgctggccaatgtctggagtcaggaagccgctgctattgcacaagagatta

SEQ ID NO: 185255 - DNA, 75 bp, synthetic construct
  source 1..75: mol_type = other DNA
taatcgcctgttatgggtagagcaggtcgctgttcctgactatctggcggggaatggtgtggtttatcaaaccag

SEQ ID NO: 185256 - DNA, 75 bp, synthetic construct
  source 1..75: mol_type = other DNA
tgtggccctggttatttgcctgattaccttttttgtcacgacctggattctggggcatcagggtaaacagcagag

SEQ ID NO: 185257 - DNA, 75 bp, synthetic construct
  source 1..75: mol_type = other DNA
gctaacctggtggaagagaaaatcgagaaaacggcgatttccatccgtgctgtgctgacaaactacgtgaaagcc

SEQ ID NO: 185258 - DNA, 75 bp, synthetic construct
  source 1..75: mol_type = other DNA
tcatgaaattgaaagatatctgtacgcaacttttaaatatgattctcttctggaaaagaaactatatctttctat

SEQ ID NO: 185259 - DNA, 75 bp, synthetic construct
  source 1..75: mol_type = other DNA
caaataaaaaatcgccgatatatcagataaaacagatatatattaaagaagatacaaaagcgcagttaatggaat

SEQ ID NO: 185260 - DNA, 75 bp, synthetic construct
  source 1..75: mol_type = other DNA
ttgacgtcatgaacacccgtgcttttttccgtccccgagccataagattgccgagtttgctgccggtgagattgg

SEQ ID NO: 185261 - DNA, 75 bp, synthetic construct
  source 1..75: mol_type = other DNA
gttatgtgtttggtatccagtcctatgcccagctggaagatatctacggtgagaaagcggctgccacgctgtttg

SEQ ID NO: 185262 - DNA, 75 bp, synthetic construct
  source 1..75: mol_type = other DNA
atgactgaattaaccaaagagcaattaatcgaagaagctaaattaaaaatagcgattgcgaaatgccatcccaat

SEQ ID NO: 185263 - DNA, 75 bp, synthetic construct
  source 1..75: mol_type = other DNA
agagaaatcagcccaaaagacagtaaaggaaaggttatccctgaactcgaagtgacggtctcccgtctttcacgc

SEQ ID NO: 185264 - DNA, 75 bp, synthetic construct
  source 1..75: mol_type = other DNA
acgttcgtcggtcgcaaatatgctttccggccggaaaaacaacgcctcctcgatgccatctggccggttctggtc

SEQ ID NO: 185265 - DNA, 75 bp, synthetic construct
  source 1..75: mol_type = other DNA
gaagagttgagaaaaatagccaagaaggattccagaaatatacccaagactgctgcgcttaaaattgaagaggct

SEQ ID NO: 185266 - DNA, 75 bp, synthetic construct
  source 1..75: mol_type = other DNA
acaggccgaactatgaaattcaggccttattcactgccccaccagtcccggttacatcagaagaactggttaaag

SEQ ID NO: 185267 - DNA, 75 bp, synthetic construct
  source 1..75: mol_type = other DNA
tacgtgaaaaaagacgttacggactctcagggtaaaacgtgggttggtgactggaaatacgtaccgacaaaagaa

SEQ ID NO: 185268 - DNA, 75 bp, synthetic construct
  source 1..75: mol_type = other DNA
aacaggttaagcgtgaaaatccgccagtcgaaaccggagcatggaaagacgctgttgactgggtgctcaaagagg

SEQ ID NO: 185269 - DNA, 75 bp, synthetic construct
  source 1..75: mol_type = other DNA
catcaacgcggggtatttcacggtgaaagaagtggtgctggatgatgaagatggctaccagatacggttgacgcc

SEQ ID NO: 185270 - DNA, 75 bp, synthetic construct
  source 1..75: mol_type = other DNA
atgggcattctttgaaaaactggaagacagctacttccggcaaaaagaacagcaaccggtcgcaatcccccaaac

SEQ ID NO: 185271 - DNA, 75 bp, synthetic construct
  source 1..75: mol_type = other DNA
acgtatgccggtcgcaaatatgctttccgtccggaaaaacaacgcctcctcgatgccgtctggccggttctggtc

SEQ ID NO: 185272 - DNA, 75 bp, synthetic construct
  source 1..75: mol_type = other DNA
cagaagcggcttcgtgaaagtgaaatccgccagcagctcatccgggaaggtgtactgcgtgaggacgaagatatt

SEQ ID NO: 185273 - DNA, 75 bp, synthetic construct
  source 1..75: mol_type = other DNA
agtcccggtgacatcagaaggactggttaaagccgtgcgcttttatgaacaggtaaagcgtgagaatccaccagt

SEQ ID NO: 185274 - DNA, 75 bp, synthetic construct
  source 1..75: mol_type = other DNA
ctggtaacagagagtttaaatccttcctgtcatctcttgactgggaggaggatgaagacctccagaataaactgt

SEQ ID NO: 185275 - DNA, 75 bp, synthetic construct
  source 1..75: mol_type = other DNA
atgaaagatttaactttgaagtttcatgacaaactgcagtttaaggccttcctgtcatctcttggctgggtggat

SEQ ID NO: 185276 - DNA, 75 bp, synthetic construct
  source 1..75: mol_type = other DNA
atgaaagatttaactttgaagtttcatgacaaactgcagtttaaggccttcctgtcatctcttggctgggaggag

SEQ ID NO: 185277 - DNA, 75 bp, synthetic construct
  source 1..75: mol_type = other DNA
atgaaagatttaactttgaagtttcatgacaaactgcagtttaaggccttcctgtcatctcttgcctgggcggaa

SEQ ID NO: 185278 - DNA, 75 bp, synthetic construct
  source 1..75: mol_type = other DNA
cttttctcatgatggcagcatgattttttttgattcagttttttctggaaaacgcaagttatgctatttacagtt

SEQ ID NO: 185279 - DNA, 75 bp, synthetic construct
  source 1..75: mol_type = other DNA
aagggtactttgttaatatccgtcttcttgacgatggatttgatgattccgtgttccgtgagtgggtggttacac

SEQ ID NO: 185280 - DNA, 75 bp, synthetic construct
  source 1..75: mol_type = other DNA
atgaaagatttaactttgaagtttcatgacaaactgcagtttaaggccttcctgtcatctcttggctggggggaa

SEQ ID NO: 185281 - DNA, 75 bp, synthetic construct
  source 1..75: mol_type = other DNA
gttctgcaaggtccggttaccgaagatgttccagcttccgtgttgcagctgcatccttcgctgatggtaatcgct

SEQ ID NO: 185282 - DNA, 75 bp, synthetic construct
  source 1..75: mol_type = other DNA
tacgagagcacttcggtaaaccagtgattattaacagtggcaaccgttgcccgactcataacaagaatgtaggcg

SEQ ID NO: 185283 - DNA, 75 bp, synthetic construct
  source 1..75: mol_type = other DNA
gatgacttgtttgatgtttctgtattctctgattatgtcgtggagctggaaacaccgcttcgggaatggagctga

SEQ ID NO: 185284 - DNA, 75 bp, synthetic construct
  source 1..75: mol_type = other DNA
atgaaagatttaactttgaagtttcatgacaaactgcagtttaaggccttcctgtcatctcttgcctgggaggac

SEQ ID NO: 185285 - DNA, 75 bp, synthetic construct
  source 1..75: mol_type = other DNA
atgaaagatttaactttgaagtttcatgacaaactgcagtttaaggccttcctgtcatctcttgactgggaggaa

SEQ ID NO: 185286 - DNA, 75 bp, synthetic construct
  source 1..75: mol_type = other DNA
aagatttaactttgaagtttcatgacaaactgcagtttaaggccttcctgtcatctcttgactgggaggaggatg

SEQ ID NO: 185287 - DNA, 75 bp, synthetic construct
  source 1..75: mol_type = other DNA
atgcaggttgcctggctaaatgaccagcagccattattgtcggtatttgtcgctgatggcgcaggcagcgtctcg

SEQ ID NO: 185288 - DNA, 75 bp, synthetic construct
  source 1..75: mol_type = other DNA
taaggcgctgagcgggcagctcgggcacgcctacaaccgtctggtgaaaaaggacccggtgaccggcgagcagag

SEQ ID NO: 185289 - DNA, 75 bp, synthetic construct
  source 1..75: mol_type = other DNA
atgaagcctactggtgcacgccggaacgcttacagcagctggccatcagggagctgtatcagcttgaactgacgc

SEQ ID NO: 185290 - DNA, 75 bp, synthetic construct
  source 1..75: mol_type = other DNA
gcgactttttgccgaggcggaagccaaagaattagctgttcgcgattttgcctgcacgtttctgggattgatttc

SEQ ID NO: 185291 - DNA, 75 bp, synthetic construct
  source 1..75: mol_type = other DNA
gccgctcacgccgatggtgggtgaatatgccaatatgacgcatttcattagcgatgaagatgctgtttccagact

SEQ ID NO: 185292 - DNA, 75 bp, synthetic construct
  source 1..75: mol_type = other DNA
atgcaggttgcctggctaaatgaccagcagccattattgacgttatttgtcgccgatggcgcaggtagcgtctcg

SEQ ID NO: 185293 - DNA, 75 bp, synthetic construct
  source 1..75: mol_type = other DNA
tttcgtcgaaaggtcgcctgactggctacaaattctacgaagcggtgatgagctctcacgcgcgtctgacctaca

SEQ ID NO: 185294 - DNA, 75 bp, synthetic construct
  source 1..75: mol_type = other DNA
ccatcggcgaaaacgcagaaaatagctgcagcgaccaaagcaaagcgtgcggcgaagaaaaaagtggcagagtga

SEQ ID NO: 185295 - DNA, 75 bp, synthetic construct
  source 1..75: mol_type = other DNA
taaccgtggtacgtcggtgtacttcccgtcgcaggttatcccgatgctgccggaagtgctctctaacggcctgtg

SEQ ID NO: 185296 - DNA, 75 bp, synthetic construct
  source 1..75: mol_type = other DNA
ctgccggctggcagatgctgggcgtggatatgattaaactccacgaacaacaacagaagcggttgcgtgaaagtg

SEQ ID NO: 185297 - DNA, 75 bp, synthetic construct
  source 1..75: mol_type = other DNA
ctgccggctggcagatgctgggcgtggatatgattaaacttcatgaacaacaacagaagcgattgcgtgaaagtg

SEQ ID NO: 185298 - DNA, 75 bp, synthetic construct
  source 1..75: mol_type = other DNA
accaaaccaaaatgcgaaaatccgtcgtggtttcgccccgcacgctataaggcgctgagcgggcaactcgggcat

SEQ ID NO: 185299 - DNA, 75 bp, synthetic construct
  source 1..75: mol_type = other DNA
cagatattgtgctggcaattcgccaccgtattagtgcccgtgcacaagctgaagaactggcggttcgtgattttt

SEQ ID NO: 185300 - DNA, 75 bp, synthetic construct
  source 1..75: mol_type = other DNA
gatataccgggcgttattgccaactacttcatgatcaccaaacaactttaccggagaaaggacaaacacgcggtt

SEQ ID NO: 185301 - DNA, 75 bp, synthetic construct
  source 1..75: mol_type = other DNA
aaaaccagcacctgttgcttcagcaacgccagcaccagccgtgaatgtcatccccaccaccggagacacaatcga

SEQ ID NO: 185302 - DNA, 75 bp, synthetic construct
  source 1..75: mol_type = other DNA
aaatttgcgggtagctttaaactactcacaaaatccagtctcccccaaagcgcgctctctcatcctctggacaga

SEQ ID NO: 185303 - DNA, 75 bp, synthetic construct
  source 1..75: mol_type = other DNA
cagaaggcccaccagctaaatcaacaactggtggccgcagcccccaaggtcgattttgccgaccgggtatcagta

SEQ ID NO: 185304 - DNA, 75 bp, synthetic construct
  source 1..75: mol_type = other DNA
aaaaattaatacacctttagttcaggaatcagaactggtggttgttcaaagtcagccggatgaaattcccgttct

SEQ ID NO: 185305 - DNA, 75 bp, synthetic construct
  source 1..75: mol_type = other DNA
gtaaacactactttcttttaactggttcaaaattaaaggaatttaagaacagagttacttttagtaactctgttg

SEQ ID NO: 185306 - DNA, 75 bp, synthetic construct
  source 1..75: mol_type = other DNA
atgcaggttgcctggctaaatgaccagcagccattactggtgatgttccttgctgatggcgcaggtagcgtctcg

SEQ ID NO: 185307 - DNA, 75 bp, synthetic construct
  source 1..75: mol_type = other DNA
ccgtcaatgaagcgatggcttatatgtcgcaaaaagtgcagggtggggaattggggcttaatgatgtcctcgcaa

SEQ ID NO: 185308 - DNA, 75 bp, synthetic construct
  source 1..75: mol_type = other DNA
gggtgaatatgccaacatgacgcacttcattaccgacgaagatgccgtttccagactggaaactttcaccagcac

SEQ ID NO: 185309 - DNA, 75 bp, synthetic construct
  source 1..75: mol_type = other DNA
ctacgcctggctgccgagttagcagaacagaaaatgcagttggaacaacagctggtggccgcagcccctaaagtc

SEQ ID NO: 185310 - DNA, 75 bp, synthetic construct
  source 1..75: mol_type = other DNA
atgaagcctactggtgcacgccggaacgcctgcagcagctggccatcagggagctgtaccagcttgaactgacgc

SEQ ID NO: 185311 - DNA, 75 bp, synthetic construct
  source 1..75: mol_type = other DNA
agcagccattattgacggtatttgtcgctgatggcgcaggcagcgtttcgcagggtggcgaaggtgcgacgcttg

SEQ ID NO: 185312 - DNA, 75 bp, synthetic construct
  source 1..75: mol_type = other DNA
aaccagcgtcatcggagatgcttcatctgattcaattaaaggtggttatgcaaagcgagtaacatttgatgcttc

SEQ ID NO: 185313 - DNA, 75 bp, synthetic construct
  source 1..75: mol_type = other DNA
ctaatccaaatggatattttgtcgggaatcagagaacaacagcatatgggataaatgaaacccgtccacggaata

SEQ ID NO: 185314 - DNA, 75 bp, synthetic construct
  source 1..75: mol_type = other DNA
cggcggcgatgattacccgtaaagccggtccggcgctggcggcaggctgcacgatggtgctgaagcctgccagtc

SEQ ID NO: 185315 - DNA, 75 bp, synthetic construct
  source 1..75: mol_type = other DNA
aaattgcctgatttacgaggtgaatttattcgtggctgggatgatgggcgcggtattgatgcaggacgtgcttta

SEQ ID NO: 185316 - DNA, 75 bp, synthetic construct
  source 1..75: mol_type = other DNA
atgccatttgctcgttatttctgcattttcataaacgttggtttgggggaaggctctgcattgcctgttggtgta

SEQ ID NO: 185317 - DNA, 75 bp, synthetic construct
  source 1..75: mol_type = other DNA
ctatcagaagcgggtatgcgaagggtatcactgtcagaccccgtagcattgcacttaattacattgtgagggcag

SEQ ID NO: 185318 - DNA, 75 bp, synthetic construct
  source 1..75: mol_type = other DNA
ggcgcgctggcctcgaaattccgcaatgccgggcaaacctgcgtctgcgctaaccgcttgtatgtgcaggacggc

SEQ ID NO: 185319 - DNA, 75 bp, synthetic construct
  source 1..75: mol_type = other DNA
gtgtatgaccgctttgccgaaaaattgcagcaggcggtgagcaaactgcacatcggcgacgggctggagaaaggc

SEQ ID NO: 185320 - DNA, 75 bp, synthetic construct
  source 1..75: mol_type = other DNA
agacaccgttctctgcgctggcgctggcggagctggcgatccgcgcgggcgttccggctggcgtatttaacgtcg

SEQ ID NO: 185321 - DNA, 75 bp, synthetic construct
  source 1..75: mol_type = other DNA
cgaccgaaattggccgtcagttaatggaacagtgcgcgaaagacatcaaaaaaagtgtcgctggagctgggcggc

SEQ ID NO: 185322 - DNA, 75 bp, synthetic construct
  source 1..75: mol_type = other DNA
gtggtttgccgaagaaggtaaacgcatttatggcgacactatccccggtcatcaggccgataagcgcctgattgt

SEQ ID NO: 185323 - DNA, 75 bp, synthetic construct
  source 1..75: mol_type = other DNA
acttcttccagccgaccattctggtggacgttccggctaacgccaaagtgtcgaaagaagagacgtttggccccc

SEQ ID NO: 185324 - DNA, 75 bp, synthetic construct
  source 1..75: mol_type = other DNA
atccgtggctgggatgatggacgtggcttggatgctgggcgtgccttgctaagtcttcaggatgactcctttgaa

SEQ ID NO: 185325 - DNA, 75 bp, synthetic construct
  source 1..75: mol_type = other DNA
gcttcaagaattgttccaactgcaaacgaaaaccgtccacgaaatattgcatttaactttatcgtgagggctgca

SEQ ID NO: 185326 - DNA, 75 bp, synthetic construct
  source 1..75: mol_type = other DNA
gtgatatcaaatcggatggcacggtgaaaacggctctcgaaaaccttggtttgggagaaggttcagcattacctg

SEQ ID NO: 185327 - DNA, 75 bp, synthetic construct
  source 1..75: mol_type = other DNA
tctgattcaattaaaggtggttatgcaaagcgagtaacatttgatgcttccagagttgttccaactgcaaacgaa

SEQ ID NO: 185328 - DNA, 75 bp, synthetic construct
  source 1..75: mol_type = other DNA
tacgcggtgagtttattcgtggctgggatgatggacgcggtgtggatacggggagggcaatattatcatctcagg

SEQ ID NO: 185329 - DNA, 75 bp, synthetic construct
  source 1..75: mol_type = other DNA
tgagttcaagactgtaaacgccgaaaattattcaatatgggaatcagtagactcttttaagggggcagtggtgcc

SEQ ID NO: 185330 - DNA, 75 bp, synthetic construct
  source 1..75: mol_type = other DNA
tgtgcctgttccgtggccttcagctacaccaccgacaggctggttgaaatgcaatggtgcagctttttctgctga

SEQ ID NO: 185331 - DNA, 75 bp, synthetic construct
  source 1..75: mol_type = other DNA
ttctacggtatcggttggtggttctgaaacccggccgcgcaacgtcgcatttaactatatcgtgagggcagcctg

SEQ ID NO: 185332 - DNA, 75 bp, synthetic construct
  source 1..75: mol_type = other DNA
tgcctgttccgtggccttcagccactccgccaacaggctggctgaaatgcaatggtgcggctttttctgctgaag

SEQ ID NO: 185333 - DNA, 75 bp, synthetic construct
  source 1..75: mol_type = other DNA
gggagaaggctcagcattacccgttggcgtacctgttccgtggccttcagccacaccgccgacaggctggctgaa

SEQ ID NO: 185334 - DNA, 75 bp, synthetic construct
  source 1..75: mol_type = other DNA
ctgctgatagaatgttaatattatttttaatttttacgttttcttataaatttctattggcaacttcaaataaaa

SEQ ID NO: 185335 - DNA, 75 bp, synthetic construct
  source 1..75: mol_type = other DNA
gcagcacgcgctttattgagcattcaaaccgggatgttggaaaaacaccgccatattgttgtagctaacgatgga

SEQ ID NO: 185336 - DNA, 75 bp, synthetic construct
  source 1..75: mol_type = other DNA
agggatgctggaaaaacaccgccatattgttgttgccaatgatggttacgacacaaaagatgaatgggaactggc

SEQ ID NO: 185337 - DNA, 75 bp, synthetic construct
  source 1..75: mol_type = other DNA
aatagtatatctgcggcaaataagtttgcgtcaacatcatcaccgtatgtttctataattacacatgatatacag

SEQ ID NO: 185338 - DNA, 75 bp, synthetic construct
  source 1..75: mol_type = other DNA
ttggcgtcgagggagcggttgttctatccggacgtgccaaaaataaacaggacgtagggaaagccacactgatcg

SEQ ID NO: 185339 - DNA, 75 bp, synthetic construct
  source 1..75: mol_type = other DNA
atgaccgtaacgctctgggcctttattggcgtcgagggagcggttgttctatccggacgtgccaaaaataaacag

SEQ ID NO: 185340 - DNA, 75 bp, synthetic construct
  source 1..75: mol_type = other DNA
cttaattttattttcacacccgggaatggccctatccggtaaagaaacagaagaggccgtagcaaatggaagatt

SEQ ID NO: 185341 - DNA, 75 bp, synthetic construct
  source 1..75: mol_type = other DNA
atggaatttaaaggtactaggaaaaattggcgagaagccaattttgcaggcttaattttattttcacacccggga

SEQ ID NO: 185342 - DNA, 75 bp, synthetic construct
  source 1..75: mol_type = other DNA
atgcgatgcataatttatttttaatcattcttagaaataaaaaaacagatgaactattatccgaaaaagaaaaaa

SEQ ID NO: 185343 - DNA, 75 bp, synthetic construct
  source 1..75: mol_type = other DNA
cccataaggcgtccagccgcatgacatttgctaacggtgcggtaagatcggctttgtggttgagtggtaaggaaa

SEQ ID NO: 185344 - DNA, 75 bp, synthetic construct
  source 1..75: mol_type = other DNA
actctccaggaaaaccggggcggttcagaatgtgctgtggaactggatcctgttccgtaaattttcctctccgga

SEQ ID NO: 185345 - DNA, 75 bp, synthetic construct
  source 1..75: mol_type = other DNA
cgcttttataaaatggggtacggtacggcgcttgtttatgcgcgtaatagtagtggtgcttttgctgcattttca

SEQ ID NO: 185346 - DNA, 75 bp, synthetic construct
  source 1..75: mol_type = other DNA
tggcggtgtactcaccggcagccatgttgttcgtaagctctcctttaccggttcaacagaagtcggacgcatttt

SEQ ID NO: 185347 - DNA, 75 bp, synthetic construct
  source 1..75: mol_type = other DNA
gtgttatcgtgcaaagcagcctcgatgcggtaaaagatgatttcgatgtatttatcgattttacccgccaggaag

SEQ ID NO: 185348 - DNA, 75 bp, synthetic construct
  source 1..75: mol_type = other DNA
ccaccgtccgcgccggagacattgtgggcgagcatactgcgatgtttgccgatattggtgagcgtctggagatta

SEQ ID NO: 185349 - DNA, 75 bp, synthetic construct
  source 1..75: mol_type = other DNA
ggaaaatccggtttctggcgaacggtacacccggcacatggttttacaccgatgacgcagccgtcacaaaagagt

SEQ ID NO: 185350 - DNA, 75 bp, synthetic construct
  source 1..75: mol_type = other DNA
ggtaaagcgcaggcactgaaaaatgtgctgcaaggtccggttaccgaagatgttccagcttccgtgttgcagctg

SEQ ID NO: 185351 - DNA, 75 bp, synthetic construct
  source 1..75: mol_type = other DNA
cgccaacaggctggctgaaatgcaacggtgcggctttttctgctgaagaatacccggaactggcaaaggcttatc

SEQ ID NO: 185352 - DNA, 75 bp, synthetic construct
  source 1..75: mol_type = other DNA
atgaatgatggcagacagacgcctccgccccccgaggcatggaaaatccggtttctggctaacggtacacccggc

SEQ ID NO: 185353 - DNA, 75 bp, synthetic construct
  source 1..75: mol_type = other DNA
aatacccggaactggcaaaggcttatccaacaaataaattacctgatttacgcggtgagtttattcgtggctggg

SEQ ID NO: 185354 - DNA, 75 bp, synthetic construct
  source 1..75: mol_type = other DNA
ttatcctgtgctggcgaaagtgtttccttcgctggtattacctgaagcccgcggtgatttcattcgtatctggga

SEQ ID NO: 185355 - DNA, 75 bp, synthetic construct
  source 1..75: mol_type = other DNA
tggtgcacctgttccgtggccttcagagacacctccaacaggctggctgaaatgcaacggggcggctttttctgc

SEQ ID NO: 185356 - DNA, 75 bp, synthetic construct
  source 1..75: mol_type = other DNA
ctttttctctcacgtctctgtgggccgggaaatattcagattcgtaccattggctatggcgagagctatatcaac

SEQ ID NO: 185357 - DNA, 75 bp, synthetic construct
  source 1..75: mol_type = other DNA
aggctggctgcgcgccgctggcattgtggcaggcggcaacgcaaaacgtcttgccgacagattcgctgttaccgc

SEQ ID NO: 185358 - DNA, 75 bp, synthetic construct
  source 1..75: mol_type = other DNA
atggcgggtgcgcagacgtcacggcgaacagttgctggaagacaaactggaggctggctgcgcaccgctggcgtt

SEQ ID NO: 185359 - DNA, 75 bp, synthetic construct
  source 1..75: mol_type = other DNA
acgctaaatattgcagcgtctgctgcaccagctctactaactaatgcaatttgtcattactataacattcctgtt

SEQ ID NO: 185360 - DNA, 75 bp, synthetic construct
  source 1..75: mol_type = other DNA
ttctactggaactgcctggcaccgaacgccggtggcgaaccgactggtgaactggctgacgctatcgccgcttct

SEQ ID NO: 185361 - DNA, 75 bp, synthetic construct
  source 1..75: mol_type = other DNA
tcactgacgcgtggcttcgcgcgcacccggatgatgtggaggttatccctctctgccggatacagccccgccagt

SEQ ID NO: 185362 - DNA, 75 bp, synthetic construct
  source 1..75: mol_type = other DNA
aagccgaaagcggcgaagaaagacgcgagaaaagcgaaaaagccatcggtgaaaacgcagaaaatagctgcagcg

SEQ ID NO: 185363 - DNA, 75 bp, synthetic construct
  source 1..75: mol_type = other DNA
cgaaagatagcaataaaacagttaaagaaactgctaatcagattatcaatgcaaatgccgtagaaacaggaaata

SEQ ID NO: 185364 - DNA, 75 bp, synthetic construct
  source 1..75: mol_type = other DNA
taaagagacagccaatcagattatcaatgcaaatgccgtagaaacaggaaataaagcggcacagacaattgatgc

SEQ ID NO: 185365 - DNA, 75 bp, synthetic construct
  source 1..75: mol_type = other DNA
aaaaaggttttcagtgatgcaattgatagtgcaattgatttcattaagaaccctgggaaatacattaaagaggct

SEQ ID NO: 185366 - DNA, 75 bp, synthetic construct
  source 1..75: mol_type = other DNA
tggtacgagtaacagtgatgcggcaactgttgggcagttaaaccggaaagttggtgtagtttatgatgatgttaa

SEQ ID NO: 185367 - DNA, 75 bp, synthetic construct
  source 1..75: mol_type = other DNA
tacagccctgggaagcgttgcatttgttgattacacggctacatatggcacggcagcaggtaaccgagccaaagt

SEQ ID NO: 185368 - DNA, 75 bp, synthetic construct
  source 1..75: mol_type = other DNA
gcaacggaccgaagcagccgaacacgctcgcgaaatgttcggtcaaaaaggcggtgcgcaaaaaagccaaaacca

SEQ ID NO: 185369 - DNA, 75 bp, synthetic construct
  source 1..75: mol_type = other DNA
cccgggcggagttaacttcagcacaatctcgtatagagcaggcaagctctgcgcactggccagtagttactgcta

SEQ ID NO: 185370 - DNA, 75 bp, synthetic construct
  source 1..75: mol_type = other DNA
caggctcgttctgcacactggccggttgtcacggcaacgggaagtaaactcctttcacagagtcaccgttattcc

SEQ ID NO: 185371 - DNA, 75 bp, synthetic construct
  source 1..75: mol_type = other DNA
atgcacgatcctatagtaatggaagctagggcggagttagtttctgcacaatcccgtatagaacaggcaagctct

SEQ ID NO: 185372 - DNA, 75 bp, synthetic construct
  source 1..75: mol_type = other DNA
gctgctgttaacggcaatcctctggttgctgtttgtcgaagcgttacaggtgccattgcctgtcggcacattttt

SEQ ID NO: 185373 - DNA, 75 bp, synthetic construct
  source 1..75: mol_type = other DNA
attaaggaaaacggcaacaggaattgcggcaaccgcgttttatattgtggcgatgagctactgcggttatctcat

SEQ ID NO: 185374 - DNA, 75 bp, synthetic construct
  source 1..75: mol_type = other DNA
tacgctgggaaaactgtccacctggacaaaaaatccggtaaccgaaagtgatcttgaaaatcctttttcccggat

SEQ ID NO: 185375 - DNA, 75 bp, synthetic construct
  source 1..75: mol_type = other DNA
ccatacacttcatgacccggcgctgaaagattttgcaaggactgctgagggtaaaaaaaatgaacaaaatggaaa

SEQ ID NO: 185376 - DNA, 75 bp, synthetic construct
  source 1..75: mol_type = other DNA
ccttaaatcacagatcccggtagataaaggtaaagtctaccgcttcggcggtgacgaatttgcggtgatttatac

SEQ ID NO: 185377 - DNA, 75 bp, synthetic construct
  source 1..75: mol_type = other DNA
atgtcaaaaaactctacagtatgtataactcggcatttctggatgatctgaccaaggcaatgggcagaaaatctt

SEQ ID NO: 185378 - DNA, 75 bp, synthetic construct
  source 1..75: mol_type = other DNA
tgattttaaaaaaaggtcagaaaaagaaactaccttaaatttttttcaacgacataaaacattacaacccaatgg

SEQ ID NO: 185379 - DNA, 75 bp, synthetic construct
  source 1..75: mol_type = other DNA
aaatagtgttgctttaggggcgagagcgcacactacccgtgataatgaagtttatatcggctacgtagaagaagc

SEQ ID NO: 185380 - DNA, 75 bp, synthetic construct
  source 1..75: mol_type = other DNA
gtactcgtccctcagatgctgcaaccgttcgtcaggttgaccgtgtaaaagacagtgttgagcaactggctcagg

SEQ ID NO: 185381 - DNA, 75 bp, synthetic construct
  source 1..75: mol_type = other DNA
gtcacttttcaaatttgattcagaaggtaatgtgaccgttaaaggtaagggtatcacccatacacttcatgaccc

SEQ ID NO: 185382 - DNA, 75 bp, synthetic construct
  source 1..75: mol_type = other DNA
atgacaatcacggatctggtactgattctgttcatcgccgcactacttgcctttgcgatatacgatcagttcatc

SEQ ID NO: 185383 - DNA, 75 bp, synthetic construct
  source 1..75: mol_type = other DNA
tggtcgcatcgatagcgttatcttcgtcggattgattgtcattcttatctataacaacgtcacgaatcatggtgc

SEQ ID NO: 185384 - DNA, 75 bp, synthetic construct
  source 1..75: mol_type = other DNA
gcagaaggtgcgactaaaactatcgccgtcaatgacggtctcgttgctctgtctggcagaacagaccgtattgat

SEQ ID NO: 185385 - DNA, 75 bp, synthetic construct
  source 1..75: mol_type = other DNA
gatatagaagggaaaagtacctatggcattcgttattatagtgcaaaaggctatggggaaagtataaagtgggtt

SEQ ID NO: 185386 - DNA, 75 bp, synthetic construct
  source 1..75: mol_type = other DNA
ggcgcgttggcggggcgcaggtatcccgtagcgaacgtatccaggcggtagcgcgtatgcttgaggaacatatcg

SEQ ID NO: 185387 - DNA, 75 bp, synthetic construct
  source 1..75: mol_type = other DNA
ctcattcctgtggattttgcccggattgccgaaggatatggctgtaaaagctatcgcgtcaccagcattggacaa

SEQ ID NO: 185388 - DNA, 75 bp, synthetic construct
  source 1..75: mol_type = other DNA
ggagtctgagtttgttcaggccgaagcccgcaggctgatggtccggcagcagataaatacccgcacccgagtgct

SEQ ID NO: 185389 - DNA, 75 bp, synthetic construct
  source 1..75: mol_type = other DNA
acgagttttaccacaaagcgaccggatgccgtcattttgcagaaaatacgcgccgccggctgctgctcgacacca

SEQ ID NO: 185390 - DNA, 75 bp, synthetic construct
  source 1..75: mol_type = other DNA
gcaggtaaaaaaactgcaccagacaaagcggatgtgggtcgtcggagaaaacgagttttaccacaaagaaaccgg

SEQ ID NO: 185391 - DNA, 75 bp, synthetic construct
  source 1..75: mol_type = other DNA
ataatctcggtgagcgttttgcttcaggcaatgataccggctgggaaaacttccccgcgtttagcgtcgcagtga

SEQ ID NO: 185392 - DNA, 75 bp, synthetic construct
  source 1..75: mol_type = other DNA
gttcttgagcgtagccttgccagacatgatgccattctgaatgacctgaacaccatcagtattcatgatcccggg

SEQ ID NO: 185393 - DNA, 75 bp, synthetic construct
  source 1..75: mol_type = other DNA
atgttcgccgctctgaatcagaggcggaatattaccactataaggttgaacagaccggtgaggaaaccattcgtt

SEQ ID NO: 185394 - DNA, 75 bp, synthetic construct
  source 1..75: mol_type = other DNA
gcaactgaaagatcagctggaagagagtgcgaagctagaagcgcagattaaggcgagtctgggagggctgggtta

SEQ ID NO: 185395 - DNA, 75 bp, synthetic construct
  source 1..75: mol_type = other DNA
gcacgccgccgcagggcaacgccaacttcgcatggatgcagcacatgatccaccacctggcgccgaaaggctcga

SEQ ID NO: 185396 - DNA, 75 bp, synthetic construct
  source 1..75: mol_type = other DNA
gcacgccaccgcagggcaatgccaactttgcatggatgcagcacatgatccaccacctagcaccgaaaggctcga

SEQ ID NO: 185397 - DNA, 75 bp, synthetic construct
  source 1..75: mol_type = other DNA
tgttgacgaaagataaatctggaggtaatggtaaagcgcatcgtaagggtgaggtgctgtttattgatgcccgac

SEQ ID NO: 185398 - DNA, 75 bp, synthetic construct
  source 1..75: mol_type = other DNA
ctggggaaagacgatagcggcaaagatatcgtcatgacgtcagtatcgaagctgattgatatcgctctggatact

SEQ ID NO: 185399 - DNA, 75 bp, synthetic construct
  source 1..75: mol_type = other DNA
gcccgtcagcaggaactgacgaccttgttccgcgatgtcggcaattccgacaacatctatgcaatatcgcgcgat

SEQ ID NO: 185400 - DNA, 75 bp, synthetic construct
  source 1..75: mol_type = other DNA
tcatcgctattcctgtgaccgagctttatacggtgcaggaagaggataaaaccgtggagcggaaacgaagtttta

SEQ ID NO: 185401 - DNA, 75 bp, synthetic construct
  source 1..75: mol_type = other DNA
ctttacccgaaggggactggcgcaagcagaacctgaagctgaatgtggcgctgaatttaagcggtaccggcgatc

SEQ ID NO: 185402 - DNA, 75 bp, synthetic construct
  source 1..75: mol_type = other DNA
tttctgtggtgccgacgggacgtaatagcgagatgaccttaaccagcaactggccgcaccccagttttttaggcg

SEQ ID NO: 185403 - DNA, 75 bp, synthetic construct
  source 1..75: mol_type = other DNA
caaatatcaccttaggcaagccgtttatcgtgattagcgttggtgatgcgcgtggcattggcgtggtgaaagcgc

SEQ ID NO: 185404 - DNA, 75 bp, synthetic construct
  source 1..75: mol_type = other DNA
aatgctggattatctgtattcccagggaatgctcctgaaatggagcggagtgaatctttctgatgaagaagaaaa

SEQ ID NO: 185405 - DNA, 75 bp, synthetic construct
  source 1..75: mol_type = other DNA
acaataaatccggtaaccgaagccgatcttgaaaatcctttttctctgatgacagagtccaggttgttaactgat

SEQ ID NO: 185406 - DNA, 75 bp, synthetic construct
  source 1..75: mol_type = other DNA
tgccctcgcttctccacttcctgccctcctgagagatgctctcattcatgatccatcagtgatggagacaagggc

SEQ ID NO: 185407 - DNA, 75 bp, synthetic construct
  source 1..75: mol_type = other DNA
gtggggactgctcaactctgccgatagcgcgctgttgttgggaaccagtgtgctggtggtggcgctggccggcat

SEQ ID NO: 185408 - DNA, 75 bp, synthetic construct
  source 1..75: mol_type = other DNA
gctttctgaacataccggttttaccgtggcatggataatcgccagtctgattggggcgttaatgaacggtattta

SEQ ID NO: 185409 - DNA, 75 bp, synthetic construct
  source 1..75: mol_type = other DNA
atggttgatggcaatcagaacgtggaagaacgcaagatagggatttataccggtcaggtctggcacagtgattta

SEQ ID NO: 185410 - DNA, 75 bp, synthetic construct
  source 1..75: mol_type = other DNA
agatagctaccctgtttggcgctgtattactgttgttgattccattaatgctgattcggcaggtgatcgtcgaac

SEQ ID NO: 185411 - DNA, 75 bp, synthetic construct
  source 1..75: mol_type = other DNA
gatggttgatggcaatcagaacgtggaagaacgcaagatagggatttataccggtcaggtctggcacagtgattt

SEQ ID NO: 185412 - DNA, 75 bp, synthetic construct
  source 1..75: mol_type = other DNA
cgtggtattggtgtggtgaaagcgcctgaagttaacggaacagcgctgaccattgaacccggtaccgggttagag

SEQ ID NO: 185413 - DNA, 75 bp, synthetic construct
  source 1..75: mol_type = other DNA
ggttattttttttgcgctgccgggagtgaaggacgcgaacgattatctcggaagcgcgttattgcgggtttaatg

SEQ ID NO: 185414 - DNA, 75 bp, synthetic construct
  source 1..75: mol_type = other DNA
ggtatgcaggtgcattttttaataagaaaaaagctacggcacctcatatttttgaaggagtcaactacaatgata

SEQ ID NO: 185415 - DNA, 75 bp, synthetic construct
  source 1..75: mol_type = other DNA
gctcactaataatgatctgttttttcaacaggaagatactatcagcaaaatgattagtgttgctgagggacgaca

SEQ ID NO: 185416 - DNA, 75 bp, synthetic construct
  source 1..75: mol_type = other DNA
caatggcgaagcgctggaggaatacgttaaacctatcggcggcggttatttttttgcgctgccgggggtgaagga

SEQ ID NO: 185417 - DNA, 75 bp, synthetic construct
  source 1..75: mol_type = other DNA
cagtctgatgctacgccgtggctacagctattcgctgggagtcaccaattcagggcaactggatatggggctact

SEQ ID NO: 185418 - DNA, 75 bp, synthetic construct
  source 1..75: mol_type = other DNA
ggaatacgttaaacctatcggcggcggttatttttttgcgctgccgggagtgaaggacgcgaacgattatctcgg

SEQ ID NO: 185419 - DNA, 75 bp, synthetic construct
  source 1..75: mol_type = other DNA
acaaccgggtttaatgcatgcctgcgggcatgacggtcacaccacaatattattgggagccgcgcgttatcttgc

SEQ ID NO: 185420 - DNA, 75 bp, synthetic construct
  source 1..75: mol_type = other DNA
ttgaggaagagctgcgcgagatccgccatcagattcatgaaaatcctgaactgggattgcgagagtttaaaacca

SEQ ID NO: 185421 - DNA, 75 bp, synthetic construct
  source 1..75: mol_type = other DNA
gggcatgacgggcataccacaatattgctgggtgccgcgcgctatcttgccgaaacccgccgctttaacggcacg

SEQ ID NO: 185422 - DNA, 75 bp, synthetic construct
  source 1..75: mol_type = other DNA
gcatgcataacatgcccggtctgccggtgggtaagttttatttccagcctggggcgctgatggcgtcaatggatc

SEQ ID NO: 185423 - DNA, 75 bp, synthetic construct
  source 1..75: mol_type = other DNA
gtatgcacaatatgccgggtctgccggttggcaagttttactttcagccaggggcgctgatggcgtcaatggatc

SEQ ID NO: 185424 - DNA, 75 bp, synthetic construct
  source 1..75: mol_type = other DNA
aaagcgattgattcggttgtggttgccgcgcatatcaccaccgcattgcaaagtatagtggcgcgcaatgttgat

SEQ ID NO: 185425 - DNA, 75 bp, synthetic construct
  source 1..75: mol_type = other DNA
gggtacgctttcgccggatgcgcgcaatgagaaacagcctttttatggcgaacatcaggcggggattgtgacgcc

SEQ ID NO: 185426 - DNA, 75 bp, synthetic construct
  source 1..75: mol_type = other DNA
cgcagctctatattcgtcctaacgaacagaatttgtcccgttcgctgtttttagccactggcgatgtattgccgc

SEQ ID NO: 185427 - DNA, 75 bp, synthetic construct
  source 1..75: mol_type = other DNA
aaaaccttttacggcggaccgtggcgctcactcaatcgccctgcaggcaccaccatccaggacatgattaagctc

SEQ ID NO: 185428 - DNA, 75 bp, synthetic construct
  source 1..75: mol_type = other DNA
tgttgaaagccaggcacaggccgaagaggcagtgaaagtggcgaaaggcgttgaaggcgtgacctccgtcagcga

SEQ ID NO: 185429 - DNA, 75 bp, synthetic construct
  source 1..75: mol_type = other DNA
tcctgtctttaataccattgtcatcaatggcagcagactgctttgatatggctggcagggattacaaaattgatc

SEQ ID NO: 185430 - DNA, 75 bp, synthetic construct
  source 1..75: mol_type = other DNA
tcctgtttttacttatgatattccacggcggaaaacatttttattagctcttctttccttgcctctaataaatgg

SEQ ID NO: 185431 - DNA, 75 bp, synthetic construct
  source 1..75: mol_type = other DNA
gcgcgagaacaagcagcatccggacgccacgctgccgcactatgacgctggcggtaagctgatgttgcccaccac

SEQ ID NO: 185432 - DNA, 75 bp, synthetic construct
  source 1..75: mol_type = other DNA
gaggagatggcgcgcttcgcctggcaggtggcgtgcaaaacatttggtgaagatcgggctgagtttggcatcaaa

SEQ ID NO: 185433 - DNA, 75 bp, synthetic construct
  source 1..75: mol_type = other DNA
gtttgtctgctaccaacacgatctggaaaagggcttcctgacagtacaaaaaaggttgaatggcgaggcgctgga

SEQ ID NO: 185434 - DNA, 75 bp, synthetic construct
  source 1..75: mol_type = other DNA
ctggacagccatatccggctggcgaatccccgcacgacggagagcgagtctagtctgatgctgcgtcgtggctac

SEQ ID NO: 185435 - DNA, 75 bp, synthetic construct
  source 1..75: mol_type = other DNA
attgctcgcatttcgtaaaccgatcatcggattggatgcgccctacttcaacacactccgttcaggggtaacgtg

SEQ ID NO: 185436 - DNA, 75 bp, synthetic construct
  source 1..75: mol_type = other DNA
aggtttcagtctggcaaaaaccggctgggtggcggcgattcctttccttgcggcggcagtcgggatgtggatcaa

SEQ ID NO: 185437 - DNA, 75 bp, synthetic construct
  source 1..75: mol_type = other DNA
aatctggcgctggttatcgcagcctgtgtgaccttcactggcgcactgtgttacttctttatcgtcaaagatcgc

SEQ ID NO: 185438 - DNA, 75 bp, synthetic construct
  source 1..75: mol_type = other DNA
atggaaagccggatttatccggcgatgagtgcgatcccggcactgtcaggcctgattaccacgatggttacgcag

SEQ ID NO: 185439 - DNA, 75 bp, synthetic construct
  source 1..75: mol_type = other DNA
tctgttgactggcaggtggtggccaatggtgatgtcagcgttgaactgcgtgatgcggatcaacaggtggttgca

SEQ ID NO: 185440 - DNA, 75 bp, synthetic construct
  source 1..75: mol_type = other DNA
agtgaagggcgaacagttcctgattaaccacaaaccgttctactttactggctttggtcgtcatgaagatgcgga

SEQ ID NO: 185441 - DNA, 75 bp, synthetic construct
  source 1..75: mol_type = other DNA
gctgaactagagaataaatacggtcttccagaaggcactctttacgcgattgctgcaactgaatctggtggtaat

SEQ ID NO: 185442 - DNA, 75 bp, synthetic construct
  source 1..75: mol_type = other DNA
caccagatggaaagttaagtggtggcgcactcgggatgttccagttcacgagtattgctcgtaaagagacaggga

SEQ ID NO: 185443 - DNA, 75 bp, synthetic construct
  source 1..75: mol_type = other DNA
tccacggtcggcattgatattggtttaaaagatttgttcgtcaccgataccggttttaaaactggcaatcctcga

SEQ ID NO: 185444 - DNA, 75 bp, synthetic construct
  source 1..75: mol_type = other DNA
cagaaggtactgcgttaggggcaaaggcaacagtaacaaataaaaacagtgttgcattaggagctaattcacgca

SEQ ID NO: 185445 - DNA, 75 bp, synthetic construct
  source 1..75: mol_type = other DNA
atacccgccttgtggttgaagcgaaaaagtctcgtgaatatacagactccagaacgacagttggtgttaactccg

SEQ ID NO: 185446 - DNA, 75 bp, synthetic construct
  source 1..75: mol_type = other DNA
ctgttgttggtggaatactgtggggtgtcagttcttgggctcagagttttgagactgtagattttcgtggtgacg

SEQ ID NO: 185447 - DNA, 75 bp, synthetic construct
  source 1..75: mol_type = other DNA
gaaaaccgcagcagggaggcaaacaatgaatcaacaactctcctggcgcaccatcgtcggctacagcctcggtga

SEQ ID NO: 185448 - DNA, 75 bp, synthetic construct
  source 1..75: mol_type = other DNA
tgaacatggcatcgtggtgattgatgaaactgcagctgtcggctttaacctctctttaggcattggtttcgaagc

SEQ ID NO: 185449 - DNA, 75 bp, synthetic construct
  source 1..75: mol_type = other DNA
aacggtaagcatcaggttgatgaggaggaggtccgccggatcttcaataaagttaataatctatcaaatactatt

SEQ ID NO: 185450 - DNA, 75 bp, synthetic construct
  source 1..75: mol_type = other DNA
ttagaaacggtcaaactcgctcgtgatttgaaaggggaacgcgttgcaacggttgacccagtatctcgcagtgtg

SEQ ID NO: 185451 - DNA, 75 bp, synthetic construct
  source 1..75: mol_type = other DNA
actatatacatcatgaatataatattgaaacttcattagattttagttctcctttgccagagccggagcgagagc

SEQ ID NO: 185452 - DNA, 75 bp, synthetic construct
  source 1..75: mol_type = other DNA
actataaacagcatgaatataatattgaaacttcattagattttagttctcctttgccagagccggagcgagagc

SEQ ID NO: 185453 - DNA, 75 bp, synthetic construct
  source 1..75: mol_type = other DNA
acaatagacatcatgaatataatattgaaacttcattagattttagttctcctttgccagagccggagcgagagc

SEQ ID NO: 185454 - DNA, 75 bp, synthetic construct
  source 1..75: mol_type = other DNA
acgatatacaacatgaatataatattgaaacttcattagattttagttctcctttgccagagccggagcgagagc

SEQ ID NO: 185455 - DNA, 75 bp, synthetic construct
  source 1..75: mol_type = other DNA
acgataaacatcatgaatataatattgaaacttcattagattttagttctcctttgccagagccggagcgagagc

SEQ ID NO: 185456 - DNA, 75 bp, synthetic construct
  source 1..75: mol_type = other DNA
actatagacaacatgaatataatattgaaacttcattagattttagttctcctttgccagagccggagcgagagc

SEQ ID NO: 185457 - DNA, 75 bp, synthetic construct
  source 1..75: mol_type = other DNA
gagtggatggctccgttgctgaaataccgcgacctgctagcattcactacagatcccgcaaataaggatacattt

SEQ ID NO: 185458 - DNA, 75 bp, synthetic construct
  source 1..75: mol_type = other DNA
ttcagagaatttattgtgcggataagcgtccgtgggtaattggctatagcggtggaaaagattcttccgccgtga

SEQ ID NO: 185459 - DNA, 75 bp, synthetic construct
  source 1..75: mol_type = other DNA
cgggcaggttattagtgaccttggcggttccggtgccaagccgacaatgcagttggctgataataccgtttcact

SEQ ID NO: 185460 - DNA, 75 bp, synthetic construct
  source 1..75: mol_type = other DNA
acaatatacagcatgaatataatattgaaacttcattagattttagttctcctttgccagagccggagcgagagc

SEQ ID NO: 185461 - DNA, 75 bp, synthetic construct
  source 1..75: mol_type = other DNA
agccagagccagagccagagccagagccagagccagagccagagccagagccagagccagagccagagccagagc

SEQ ID NO: 185462 - DNA, 75 bp, synthetic construct
  source 1..75: mol_type = other DNA
gacaaacttggcaccattttaaaacaggattggggtagtctcgaagagattcagcaacagcaggcagcgctacaa

SEQ ID NO: 185463 - DNA, 75 bp, synthetic construct
  source 1..75: mol_type = other DNA
atgtcatcaactaatttcagtcagatcgctgccttcctgtggtctgtcgccgacctgttacgcggcgattttaaa

SEQ ID NO: 185464 - DNA, 75 bp, synthetic construct
  source 1..75: mol_type = other DNA
atgggattccgggaagttgctaagttactcggtatcaaagaaaccgatttccggctgtttgaaccgccccgggtt

SEQ ID NO: 185465 - DNA, 75 bp, synthetic construct
  source 1..75: mol_type = other DNA
atgaataataaatttattataatattaactatatattttttaccattaacaaccttagctgaaaggacacctaat

SEQ ID NO: 185466 - DNA, 75 bp, synthetic construct
  source 1..75: mol_type = other DNA
atgatgaatctcctcagcagcagatgcagtatttaccatcctggtgttgatagcacccgtattggtttgttgggg

SEQ ID NO: 185467 - DNA, 75 bp, synthetic construct
  source 1..75: mol_type = other DNA
cagagatagacccacaagggttaaatccgttaattcttagtgttgtagcactgatgagttgcggtttgttttcat

SEQ ID NO: 185468 - DNA, 75 bp, synthetic construct
  source 1..75: mol_type = other DNA
ggagtccggcctgtattacaaccgccaccgctattatgacccgctgaaggggcggtatatcactcaggatccgat

SEQ ID NO: 185469 - DNA, 75 bp, synthetic construct
  source 1..75: mol_type = other DNA
cggagacctgaaaaaggcggtcgatcgcacttatgccgaaatgggtatggatggtgctggtgatgaaatatggcg

SEQ ID NO: 185470 - DNA, 75 bp, synthetic construct
  source 1..75: mol_type = other DNA
caggattaccagcgcacgcagtatgaagtgtatgactaccccggacgtttcaagggggcccacgggcagaacttt

SEQ ID NO: 185471 - DNA, 75 bp, synthetic construct
  source 1..75: mol_type = other DNA
gtcccggcggctatggtaaggggctttggctacccacagggagcggcaaaaaggtactgtcgctgaccgggcgcg

SEQ ID NO: 185472 - DNA, 75 bp, synthetic construct
  source 1..75: mol_type = other DNA
cagctctgaaggaatacggatttcgtattgaaatagccggatatgatgcaatcaggttgcatatacagagcagaa

SEQ ID NO: 185473 - DNA, 75 bp, synthetic construct
  source 1..75: mol_type = other DNA
atgaggtattttctctttatatttataacaattccccttatctctggaggtcatatgagtaatgatagcgaaaag

SEQ ID NO: 185474 - DNA, 75 bp, synthetic construct
  source 1..75: mol_type = other DNA
aaattatcaatttagaatcaacggctatgaccatcatcttaaggactcggttctcgaatcaatgaaatcatattt

SEQ ID NO: 185475 - DNA, 75 bp, synthetic construct
  source 1..75: mol_type = other DNA
tcagggaactatcgacttcgttcctctttggtaactactagtaacaacgtttctttaagtgatattggtcttcag

SEQ ID NO: 185476 - DNA, 75 bp, synthetic construct
  source 1..75: mol_type = other DNA
tagtgaatttatgcaccagtgaacatctgcgtaagcgtcgtctcagcaccgtctggcagatcctgaaattcctga

SEQ ID NO: 185477 - DNA, 75 bp, synthetic construct
  source 1..75: mol_type = other DNA
aggatttaattaatttctttaaggttgatgaaaaaaagatacatgttattcataatggtgtatcggaagattata

SEQ ID NO: 185478 - DNA, 75 bp, synthetic construct
  source 1..75: mol_type = other DNA
aacgctaatgaattaaaaaataaaggattagcgcaatctaataaattttcatgggggaagtgtttctccgaaaca

SEQ ID NO: 185479 - DNA, 75 bp, synthetic construct
  source 1..75: mol_type = other DNA
ttaaaaaaattagggataaataatattcatgagtttaatgccagaatcttagaaagatatagagaagttaaagct

SEQ ID NO: 185480 - DNA, 75 bp, synthetic construct
  source 1..75: mol_type = other DNA
atgaacaccagagaaaacaaccttaaagcccttcatgccccccgcaaaatcaacctgcgtgaggaagccggactg

SEQ ID NO: 185481 - DNA, 75 bp, synthetic construct
  source 1..75: mol_type = other DNA
tggcttttccgggctgaaatcactgaatttgcaggtcttcgtgatgattgcagctatcatcgcaatcatgctgtt

SEQ ID NO: 185482 - DNA, 75 bp, synthetic construct
  source 1..75: mol_type = other DNA
ccggcaaaacggcgggccagaaatccctgctattcctttttgccactcggatatgacgtttagagacttgcccca

SEQ ID NO: 185483 - DNA, 75 bp, synthetic construct
  source 1..75: mol_type = other DNA
atctgcctgtaggttttcagcaaattgtggaccggacaggtggaaatgacatgaagtttgatgtcagacaacata

SEQ ID NO: 185484 - DNA, 75 bp, synthetic construct
  source 1..75: mol_type = other DNA
tacaactacattaaatgatgcgcataatattggtcaaaatatgtttggtggtagtaatgagtattatatatatgt

SEQ ID NO: 185485 - DNA, 75 bp, synthetic construct
  source 1..75: mol_type = other DNA
actgatttgagagtaattagtataatcacatgtcattcaataataaatggcctttctaacaaaaaattgtctgat

SEQ ID NO: 185486 - DNA, 75 bp, synthetic construct
  source 1..75: mol_type = other DNA
tcatctgatatgcatgaggttgttggctggaagatggttctccagcaggccaataatcgcgccgcccagcttcgc

SEQ ID NO: 185487 - DNA, 75 bp, synthetic construct
  source 1..75: mol_type = other DNA
gcttcaatatgcaaaaaaaatctataagatctatacagatttaaatataaaagaacgtcctaaggctttaacaaa

SEQ ID NO: 185488 - DNA, 75 bp, synthetic construct
  source 1..75: mol_type = other DNA
atgaaatggttatttctttctgtcgtgatttttccgttatctttcacccttccggctgaagctaccgccacaaac

SEQ ID NO: 185489 - DNA, 75 bp, synthetic construct
  source 1..75: mol_type = other DNA
cggcgacagcagcggcaattcttgcctccaaagatcccgcaaaaacctggcaacaatataaagcctctggtggca

SEQ ID NO: 185490 - DNA, 75 bp, synthetic construct
  source 1..75: mol_type = other DNA
atggaggcgcttaaggctgcaactacccatgactatgaagtgtatagctttgctaaaaaattattcccagatgaa

SEQ ID NO: 185491 - DNA, 75 bp, synthetic construct
  source 1..75: mol_type = other DNA
tccggaggtttgagaactatttcttctattgggtatcttttgtctattcttgattatgcaatagatcataatgtt

SEQ ID NO: 185492 - DNA, 75 bp, synthetic construct
  source 1..75: mol_type = other DNA
atggatgatggaaaaggattcatcactttatctggaacgcttgataacgggaataatgagtcattggagataagc

SEQ ID NO: 185493 - DNA, 75 bp, synthetic construct
  source 1..75: mol_type = other DNA
agccaggggataccgcaatcgggagcactttaagctgggcgtgatgttccactacgggaaactgaatatggcgtt

SEQ ID NO: 185494 - DNA, 75 bp, synthetic construct
  source 1..75: mol_type = other DNA
catcatgccatgtatggtcattggcagtgctgggagccagagaaaatcacccactggatgccgctgccagcagcg

SEQ ID NO: 185495 - DNA, 75 bp, synthetic construct
  source 1..75: mol_type = other DNA
atgaaggaatttctgatccagaaaaatatgaaaacatctataatgcactcatagaaataaccaattatgcgcaga

SEQ ID NO: 185496 - DNA, 75 bp, synthetic construct
  source 1..75: mol_type = other DNA
aagcaaaaaaaatagtcgagtcgataaactatataacaatcgaagattctggttgtggaatggatttagcgacac

SEQ ID NO: 185497 - DNA, 75 bp, synthetic construct
  source 1..75: mol_type = other DNA
ttatgaaaaatataaaacagctaacaatgtgtatttcaatatcattggtacgttaagtgacagtgaattaaataa

SEQ ID NO: 185498 - DNA, 75 bp, synthetic construct
  source 1..75: mol_type = other DNA
attgcacaatgaaagaattgccccgttactttattcgtaccccttataatggggtgttagccagccagacccggc

SEQ ID NO: 185499 - DNA, 75 bp, synthetic construct
  source 1..75: mol_type = other DNA
agaaggcgaagcagtttttcatggatattgctgccgggttatgtgaagggaacgaaccgttgccggaaaagcgcc

SEQ ID NO: 185500 - DNA, 75 bp, synthetic construct
  source 1..75: mol_type = other DNA
atgactgactgggctaaatatacgtatactaaagaagttttcaaatatatatataacgtactagacactgacata

SEQ ID NO: 185501 - DNA, 75 bp, synthetic construct
  source 1..75: mol_type = other DNA
cgccacactgtatactcgccatgacgatcataaaacccactatggtactggtgtcatgggagtcgtctcagatga

SEQ ID NO: 185502 - DNA, 75 bp, synthetic construct
  source 1..75: mol_type = other DNA
ccatacctaccgctatgcctttgtcagcagcccggcgttccttaagcgactcgaccttcatctgacgcctccccc

SEQ ID NO: 185503 - DNA, 75 bp, synthetic construct
  source 1..75: mol_type = other DNA
cgcagctttatacccagaccgaaagcggaacgttttataccttccggcaagccgacagctacgccatgacaatca

SEQ ID NO: 185504 - DNA, 75 bp, synthetic construct
  source 1..75: mol_type = other DNA
cattgtctaatagatgaaattaactctggtgatgaagatagacaaaaagcattaatagataataatatcactaat

SEQ ID NO: 185505 - DNA, 75 bp, synthetic construct
  source 1..75: mol_type = other DNA
atcaagaaaactcctaactgaagcgatcgatgccaaagaagaaatagttaaacaccttgaaaaacttaacaccat

SEQ ID NO: 185506 - DNA, 75 bp, synthetic construct
  source 1..75: mol_type = other DNA
gcgcaaaaggatgtgcgcaaaactgcgcaaagccagatgccgcatgtagtagtggttgaagcctctacgccagtt

SEQ ID NO: 185507 - DNA, 75 bp, synthetic construct
  source 1..75: mol_type = other DNA
cacccggacagtaccctcacggcgtggccggataaccgcatcgcagaggatgcgcactatgtttaccactatgat

SEQ ID NO: 185508 - DNA, 75 bp, synthetic construct
  source 1..75: mol_type = other DNA
atgaccgcatttgtaatcgcaatcgtgatcactatcattgcagcatggttaatcatcaagaactttcagcctcag

SEQ ID NO: 185509 - DNA, 75 bp, synthetic construct
  source 1..75: mol_type = other DNA
cagaagcagacagggaaaatatctttgactatattgcgcaaaacacccccctggcagcaattgagctggatgaag

SEQ ID NO: 185510 - DNA, 75 bp, synthetic construct
  source 1..75: mol_type = other DNA
gcttgtctatcaagtggagggcgatacgctctcggtactgcgtgttttacataccgctctgcaatggccgccagc

SEQ ID NO: 185511 - DNA, 75 bp, synthetic construct
  source 1..75: mol_type = other DNA
gttgcggcatttttctctttctccggcatggcgcctgctatcgccactaaatttggcgaaagcgctgtacatatg

SEQ ID NO: 185512 - DNA, 75 bp, synthetic construct
  source 1..75: mol_type = other DNA
actgttcgttaaacgcgacttccgtgcctgctgtaaaggtgtacaggtattttttaaaggaatgggcgggatgtt

SEQ ID NO: 185513 - DNA, 75 bp, synthetic construct
  source 1..75: mol_type = other DNA
gcacagttgctgcacgtcgcgatttccagcgccgccgggctggcgatgatgttattagtgacgttcttcccggtg

SEQ ID NO: 185514 - DNA, 75 bp, synthetic construct
  source 1..75: mol_type = other DNA
gaaaggttgaccggagcagggcgacgccccgcagcgccgcgaggagcggtgaactgttccgggacaacctgaact

SEQ ID NO: 185515 - DNA, 75 bp, synthetic construct
  source 1..75: mol_type = other DNA
ggacacgccggagcgagcggaccattgccaagaaaacgtacgtgaaagatactgggaaatgaacccggtgaaaga

SEQ ID NO: 185516 - DNA, 75 bp, synthetic construct
  source 1..75: mol_type = other DNA
aatggtataatattgctggtaacggttatgttaatttattaaaacttgttgccgttccactcatattcatttcta

SEQ ID NO: 185517 - DNA, 75 bp, synthetic construct
  source 1..75: mol_type = other DNA
tcgagttcaccaactactaccagcgctgcattcacgcctgtgaccttgatgcggaacctgaagatgagggctgga

SEQ ID NO: 185518 - DNA, 75 bp, synthetic construct
  source 1..75: mol_type = other DNA
taatctttgtgactattttaaatcgcgaggttttactaaaataagatatgaaccaaataggagtgatacgctatt

SEQ ID NO: 185519 - DNA, 75 bp, synthetic construct
  source 1..75: mol_type = other DNA
cgcctggtcgctggggcttaaaaaataccctgcggtggtgttcgatgatcgggaagtggtgtacggcaccaccga

SEQ ID NO: 185520 - DNA, 75 bp, synthetic construct
  source 1..75: mol_type = other DNA
tgcatgacgggagcgtcgatctcgctgttaccgcatctatgcctgatgaccgtctgtacggctatgcacatctac

SEQ ID NO: 185521 - DNA, 75 bp, synthetic construct
  source 1..75: mol_type = other DNA
atatcgccccgactaaccatctttatctggtctggaacaaaaggacggctaataacagccggaccgcctacgttc

SEQ ID NO: 185522 - DNA, 75 bp, synthetic construct
  source 1..75: mol_type = other DNA
gtaccgccacctcttcgataccttcatcgctgaagattacggagaatatggtgcatccgggaggattcgaacctc

SEQ ID NO: 185523 - DNA, 75 bp, synthetic construct
  source 1..75: mol_type = other DNA
ggttttggcaaatcagggtctgctgacataaataccggtggtattaaatccagtataaagatttcatttgtatat

SEQ ID NO: 185524 - DNA, 75 bp, synthetic construct
  source 1..75: mol_type = other DNA
gttttctgggagtactgtaaataatcagttgtggcgcaatatagactttaatgacgataataatgccggaaaagc

SEQ ID NO: 185525 - DNA, 75 bp, synthetic construct
  source 1..75: mol_type = other DNA
cgttaagctcgatcaggaaaacagccgtatttttctgccgaaacttggctggatgcgctaccggaatagccgtca

SEQ ID NO: 185526 - DNA, 75 bp, synthetic construct
  source 1..75: mol_type = other DNA
gcagcgcttgataaacgcataacaaacaacaccagtgcgataactaaaaatctgcaggtggttaacagtaataaa

SEQ ID NO: 185527 - DNA, 75 bp, synthetic construct
  source 1..75: mol_type = other DNA
gacagccaatacacagacagcagaagaacataagctgcttatttcggagaacagcaaacaaatcagtaccaacac

SEQ ID NO: 185528 - DNA, 75 bp, synthetic construct
  source 1..75: mol_type = other DNA
atcgactgcttaacggctggcaactatcaaaactgcatacttttgaagtggcagccaggcatcagtccttcgccc

SEQ ID NO: 185529 - DNA, 75 bp, synthetic construct
  source 1..75: mol_type = other DNA
atgctgggaaggctggagcgggagctgcggcagggcagcgtgagtgaagaaagccagcagtggcttgcgcagtgc

SEQ ID NO: 185530 - DNA, 75 bp, synthetic construct
  source 1..75: mol_type = other DNA
gatccgttggttacacctgtttataccattagttttggtggccgggttgaagtgccgcaaaactgcgaattaaat

SEQ ID NO: 185531 - DNA, 75 bp, synthetic construct
  source 1..75: mol_type = other DNA
atgtttaccgtgtatgtgacatcaacgccttacgatccgttggttacacctgtttataccattagttttggtggc

SEQ ID NO: 185532 - DNA, 75 bp, synthetic construct
  source 1..75: mol_type = other DNA
tcggtttactttatcagtaccaaaattttccgcgatcgtggtatggggccaaccattatcgtatcgcctttgctg

SEQ ID NO: 185533 - DNA, 75 bp, synthetic construct
  source 1..75: mol_type = other DNA
ctgtgatgaacatggccgcgtgcgggtgaaatttaactgggaccgctataacccgtcaaaccaggacagttcatg

SEQ ID NO: 185534 - DNA, 75 bp, synthetic construct
  source 1..75: mol_type = other DNA
acagcattgaacacatcctgcgtgacaagttgtcaccgtatgacaccgaagagatgcttgaggctatgcgtattt

SEQ ID NO: 185535 - DNA, 75 bp, synthetic construct
  source 1..75: mol_type = other DNA
tcatgcaacaggtgtactgatgtcggggatagaagataacgacatccatgattttttccgtgattctgcatttcc

SEQ ID NO: 185536 - DNA, 75 bp, synthetic construct
  source 1..75: mol_type = other DNA
tgaatcagcaggggatatctgcactggcatattacagtggcgtaacgcatcctaattttgttaattatgcaggga

SEQ ID NO: 185537 - DNA, 75 bp, synthetic construct
  source 1..75: mol_type = other DNA
cattagaagatgcagacggattgtcacttgagaagttagagaaagaagcaaacctgccgcaaaagcgaatagagc

SEQ ID NO: 185538 - DNA, 75 bp, synthetic construct
  source 1..75: mol_type = other DNA
tctgggtattaaccttgatggtcagaaagagctgctgggtatgtggctggcctaaaatgaaggcgcaaagttctg

SEQ ID NO: 185539 - DNA, 75 bp, synthetic construct
  source 1..75: mol_type = other DNA
cataagatattcttggcctgatgataagtcattaacctcatcgatctattctgctgaagaagcccagactgatga

SEQ ID NO: 185540 - DNA, 75 bp, synthetic construct
  source 1..75: mol_type = other DNA
gccgggcgtaacgtcattaccgccgcaaagcctaagcgtcgtggtggccgtaatgtgttttatgtggggtcaaaa

SEQ ID NO: 185541 - DNA, 75 bp, synthetic construct
  source 1..75: mol_type = other DNA
ctattttataatgttgttgggcttttttccggataaggatagccccgctgcatcaatgccgttaatgactgcgtt

SEQ ID NO: 185542 - DNA, 75 bp, synthetic construct
  source 1..75: mol_type = other DNA
ctgctgggccattttggctggcgacttcaggtgctgctccagcgactggtttatctctggcacggaagccgggct

SEQ ID NO: 185543 - DNA, 75 bp, synthetic construct
  source 1..75: mol_type = other DNA
ctgaactgaaaaaccgcggtctgaacgatatcctcatcgcctgtgtggatggcctgaaaggcttcccggatgcca

SEQ ID NO: 185544 - DNA, 75 bp, synthetic construct
  source 1..75: mol_type = other DNA
ccgcaaatcgacaaggggcgcacgaaggaccagaacgcaacggctgtgaacgcccgccgccatggcgattttgcc

SEQ ID NO: 185545 - DNA, 75 bp, synthetic construct
  source 1..75: mol_type = other DNA
aaccagctgattcaggaaagccgtgcgggcaaaaaagattacagcattcacaccatcacgctggatgacgcctgc

SEQ ID NO: 185546 - DNA, 75 bp, synthetic construct
  source 1..75: mol_type = other DNA
aaaccccagccaccgatgctttcctggctgaagtgcgtgcgcagggtgtgaaatcgctatccaatgccgttcagt

SEQ ID NO: 185547 - DNA, 75 bp, synthetic construct
  source 1..75: mol_type = other DNA
cccgcgcgggatatcccggttctgcgttttgaagccccggacgattttgaatcgctgacaccacaaatgcgccac

SEQ ID NO: 185548 - DNA, 75 bp, synthetic construct
  source 1..75: mol_type = other DNA
atttaaaaccgcttttagaggcgttaaattcccgttcccgcttcagcttcggggaagactttgcccgcaccggag

SEQ ID NO: 185549 - DNA, 75 bp, synthetic construct
  source 1..75: mol_type = other DNA
ctttaaccagctggcagatgctgatgtgtatgagcagacattctgggatcgggataaaaaagaagaaattctgac

SEQ ID NO: 185550 - DNA, 75 bp, synthetic construct
  source 1..75: mol_type = other DNA
tccaccgccataaactaccagaaagcgctgggtaatccggcggggacgctgggcgctatccgcgattcccagatg

SEQ ID NO: 185551 - DNA, 75 bp, synthetic construct
  source 1..75: mol_type = other DNA
atacattaccgattcttctaggcatttcatcaaatgatcgctatgaacttgaggccaaactccgtacagcacagc

SEQ ID NO: 185552 - DNA, 75 bp, synthetic construct
  source 1..75: mol_type = other DNA
gctttcagcttatcgtgacagagcacgcaaatcttcgcgaccagtggttccaggattctttaaccgagcttcctt

SEQ ID NO: 185553 - DNA, 75 bp, synthetic construct
  source 1..75: mol_type = other DNA
ttatataatcatttttcacgttgtggggtaacgtggcaatgtctggggacttataacgcgggttttgcaatggaa

SEQ ID NO: 185554 - DNA, 75 bp, synthetic construct
  source 1..75: mol_type = other DNA
aggggaagggcgtgtaatacttgctcaggttccatttgcatccgagtctgaaatcgcagaacttgcaaacattat

SEQ ID NO: 185555 - DNA, 75 bp, synthetic construct
  source 1..75: mol_type = other DNA
ttggattattagatacactcgataatcttcgtcgaagagttagtgacgatgaattggtagagaaaaaattatcta

SEQ ID NO: 185556 - DNA, 75 bp, synthetic construct
  source 1..75: mol_type = other DNA
agaatcggaactgacgaagtaattaatgttttgcgttctgcaatgcaatgggttccgtcccccctacctgaagac

SEQ ID NO: 185557 - DNA, 75 bp, synthetic construct
  source 1..75: mol_type = other DNA
tttcggtgtcagtcgtcgtggtgctgtctgttgtactgacgaatcaggttcagatgttttactggacctgggcca

SEQ ID NO: 185558 - DNA, 75 bp, synthetic construct
  source 1..75: mol_type = other DNA
agtgagtgatatcggtaataaaaccgcgacgttgaaaaccagtagcaccacgcaaggtaatgtggtgacgcagct

SEQ ID NO: 185559 - DNA, 75 bp, synthetic construct
  source 1..75: mol_type = other DNA
ggaagcaatgatgacccgcatgtatggggctggctcaagggtgttaggcgcttctttgaagatggaaccgttaaa

SEQ ID NO: 185560 - DNA, 75 bp, synthetic construct
  source 1..75: mol_type = other DNA
gcagataaaccagatgcatattcccatgttaaaaaaacgtggaataataaaagatgaacgagatttgttagataa

SEQ ID NO: 185561 - DNA, 75 bp, synthetic construct
  source 1..75: mol_type = other DNA
aagatgaacgagatttgttagataatccctgcctgaacattaaaataggaaccgagattttatataagcattttt

SEQ ID NO: 185562 - DNA, 75 bp, synthetic construct
  source 1..75: mol_type = other DNA
cgatcgacttcagaaataacacgtttaactatccggaataccagcgggttcgtttcctgctgatggtgctcgggg

SEQ ID NO: 185563 - DNA, 75 bp, synthetic construct
  source 1..75: mol_type = other DNA
gatgctgtccgtgcaggcggtcgtgttgtggctgtcggtctaccgccggagtctatgagcctggatatcccacgt

SEQ ID NO: 185564 - DNA, 75 bp, synthetic construct
  source 1..75: mol_type = other DNA
gcaggctcttgttgaggaatacaacgagatagctagccgtgtcggcatggatgagttcaatgtcatacttagtgg

SEQ ID NO: 185565 - DNA, 75 bp, synthetic construct
  source 1..75: mol_type = other DNA
gatgccatccataaggtttttgatgagttcatggctgctaattcagaattgcaggctcttgttgaggaatacaac

SEQ ID NO: 185566 - DNA, 75 bp, synthetic construct
  source 1..75: mol_type = other DNA
gacattaacattaagaatagccagctcaccatgcagggacatgctacatctcatgctgtttttagagagggtggg

SEQ ID NO: 185567 - DNA, 75 bp, synthetic construct
  source 1..75: mol_type = other DNA
ggccggaatttgttattcatctcttgccattttaccctcctttttaagctatgcggaaagttatttcaacccggc

SEQ ID NO: 185568 - DNA, 75 bp, synthetic construct
  source 1..75: mol_type = other DNA
taatcatggggttttggtggttcccactaaatgtgggttgttgccgggtgggttttgggattccttttctttttt

SEQ ID NO: 185569 - DNA, 75 bp, synthetic construct
  source 1..75: mol_type = other DNA
gtattttataaaagcattttcttcttattatggaataacaccaaaacagttttcttcttattataagaaacgata

SEQ ID NO: 185570 - DNA, 75 bp, synthetic construct
  source 1..75: mol_type = other DNA
aagcgacaaagacttagcagtaactttacccactgttgccacttcatctctaaaagacaatgctgctacgtcagg

SEQ ID NO: 185571 - DNA, 75 bp, synthetic construct
  source 1..75: mol_type = other DNA
cactgggaataagcactttcatggctggcgtggttgcttcgttttttatcccagcgttccgtatcaagaaaaaat

SEQ ID NO: 185572 - DNA, 75 bp, synthetic construct
  source 1..75: mol_type = other DNA
agacgccagtgcagcttattctccacgtgccagtggtttcggattgctgtggcgaacttctctgcggttaaatca

SEQ ID NO: 185573 - DNA, 75 bp, synthetic construct
  source 1..75: mol_type = other DNA
ggcaataatctgacactgggacaaacccaggctgggctggataagatagcgaaaggtgatatgccggacagcatc

SEQ ID NO: 185574 - DNA, 75 bp, synthetic construct
  source 1..75: mol_type = other DNA
aaccagacaaatcacaacccccggtaaaacaacagcaaacgctcaatcgctatggctccgcgtcaaaactgtcaa

SEQ ID NO: 185575 - DNA, 75 bp, synthetic construct
  source 1..75: mol_type = other DNA
atggccctgaagtgtcctgaatgtgggacggtcgctcacgccagaaccagtgcctatgaagctccatcggttaaa

SEQ ID NO: 185576 - DNA, 75 bp, synthetic construct
  source 1..75: mol_type = other DNA
gccggctttttacatcagcacctcgaaccgggcgaaatagcaggccgcctcggcggggatgagtttgccgccctg

SEQ ID NO: 185577 - DNA, 75 bp, synthetic construct
  source 1..75: mol_type = other DNA
atattttaaattcattgggattatggatgcgtgatacatggataatagggaatggaaaaaatgctcacgaggcgt

SEQ ID NO: 185578 - DNA, 75 bp, synthetic construct
  source 1..75: mol_type = other DNA
tggcaggttagtgggcgaagcgatgttgattatgagacaagagtatatctggatgcttggtatgttaagaactgg

SEQ ID NO: 185579 - DNA, 75 bp, synthetic construct
  source 1..75: mol_type = other DNA
tgaacaaagtgatattcgcaacaaatggttacgcgagttcatgattaaagggtatcgttacgtttcggtaatacc

SEQ ID NO: 185580 - DNA, 75 bp, synthetic construct
  source 1..75: mol_type = other DNA
aagaaattcatggctcagaaccttcatgatgaagggatttaggtatgtttcaatcatacccacattgcgtggggt

SEQ ID NO: 185581 - DNA, 75 bp, synthetic construct
  source 1..75: mol_type = other DNA
atgaagtaatgatttttcgtgttcaacataatttggcaaaagcttcatcaagaatattaaaacgaatttttgatt

SEQ ID NO: 185582 - DNA, 75 bp, synthetic construct
  source 1..75: mol_type = other DNA
gggttatggcaagtaagtggtcgtagtgatgttgattacgaaacccgagtatatcttgatacttggtatgtcaaa

SEQ ID NO: 185583 - DNA, 75 bp, synthetic construct
  source 1..75: mol_type = other DNA
agcatataaattactaaaccattgggttttaaaaccaatctcaaaagatttaaattcctacagcaacatgaagtt

SEQ ID NO: 185584 - DNA, 75 bp, synthetic construct
  source 1..75: mol_type = other DNA
ctccagatttattatcagtctcgcttcggcgggcttttttcatatctgcgccacgttcggtgcatatcaaccata

SEQ ID NO: 185585 - DNA, 75 bp, synthetic construct
  source 1..75: mol_type = other DNA
ccttttactgctacgccgccagtatcgcgtattgatgccaaacgtgggcaaacaatcaaattaatgtacacagcc

SEQ ID NO: 185586 - DNA, 75 bp, synthetic construct
  source 1..75: mol_type = other DNA
atgaagcgttttttatttattctgattgcaaatattttctttttctcttgtggttcatatggaggtgaaatctcc

SEQ ID NO: 185587 - DNA, 75 bp, synthetic construct
  source 1..75: mol_type = other DNA
aagcaagtacgatcttaacggctcatttacatggctaactcaaaaacaacgaactacgctagagaaaattctggc

SEQ ID NO: 185588 - DNA, 75 bp, synthetic construct
  source 1..75: mol_type = other DNA
caaaaggccctcgagattttcaatgggattgtatatttattcctgatggcgaaagtgagacttttgctgagatgg

SEQ ID NO: 185589 - DNA, 75 bp, synthetic construct
  source 1..75: mol_type = other DNA
gtgcccgttattgccattatcgccattgttgtcatcgtcatcattctgaacaaaaccggggtgtccgacagcctc

SEQ ID NO: 185590 - DNA, 75 bp, synthetic construct
  source 1..75: mol_type = other DNA
catcattattattttcgaggctaaggtgcttaaaatcaaatagaacagagataaaaccaggttcaatatgtgatg

SEQ ID NO: 185591 - DNA, 75 bp, synthetic construct
  source 1..75: mol_type = other DNA
tctaaaatagaaccatacatatataaagctaaaatagacgatgttgatatcgatttagttgttggcttctataaa

SEQ ID NO: 185592 - DNA, 75 bp, synthetic construct
  source 1..75: mol_type = other DNA
aaaccaataaatcacaattctggttagttctgaaacaaatcctctctaccggcaaacgctggcgaatcaaaatat

SEQ ID NO: 185593 - DNA, 75 bp, synthetic construct
  source 1..75: mol_type = other DNA
aattatcttcttaataataagaaagctactgacaatgaaattaatgacatcaaaattaacctgtctaatattctt

SEQ ID NO: 185594 - DNA, 75 bp, synthetic construct
  source 1..75: mol_type = other DNA
agacttttttaaaattgccatatattaatgatgtaaaaattctggagtggtgttttaatcaaagtatgcaatatt

SEQ ID NO: 185595 - DNA, 75 bp, synthetic construct
  source 1..75: mol_type = other DNA
gtacatctgaaacactggccgcaacaccgaaagcggtaaaggctgcatatgacctggctaacgggaaatataccg

SEQ ID NO: 185596 - DNA, 75 bp, synthetic construct
  source 1..75: mol_type = other DNA
tatgacccgctgcgggggaggtatatcactcaggatccgattgggctgaaggggggatggaatttttatcagtat

SEQ ID NO: 185597 - DNA, 75 bp, synthetic construct
  source 1..75: mol_type = other DNA
aaaccgcagagcggtggcggtatgacgaacgcggctggctgacagacatcagccatatcagcgaagggcaccggg

SEQ ID NO: 185598 - DNA, 75 bp, synthetic construct
  source 1..75: mol_type = other DNA
atgttatcgccgcctgccctgcgggcggcgatacagggagaacgcttaatcatgaacgaaacgctgaatgcactg

SEQ ID NO: 185599 - DNA, 75 bp, synthetic construct
  source 1..75: mol_type = other DNA
aggtaactttgccggtctggggacgaagcactacggaacccactcctggtatgccggagcggaaacgggttaccg

SEQ ID NO: 185600 - DNA, 75 bp, synthetic construct
  source 1..75: mol_type = other DNA
acggcgcagtgtccgggaaaacattccgctggaaagacggtgagatggacctgagtatgaagaacaaggatttca

SEQ ID NO: 185601 - DNA, 75 bp, synthetic construct
  source 1..75: mol_type = other DNA
gttcactgcaggaacgcagcagattggtttcagtaatgtcacgccggtaatcagcacagaaaaaacggatgatgc

SEQ ID NO: 185602 - DNA, 75 bp, synthetic construct
  source 1..75: mol_type = other DNA
accctggatactttccagttttatctggaaaaacaggggtgggctcttgtaaaccggagcgcaattaaaaatatg

SEQ ID NO: 185603 - DNA, 75 bp, synthetic construct
  source 1..75: mol_type = other DNA
tgtaccaaatcaccaaaaacggcttcgttttcctggtgatgggcttcacgggcaaaaaagccgccgcattcaaag

SEQ ID NO: 185604 - DNA, 75 bp, synthetic construct
  source 1..75: mol_type = other DNA
aggtatataccgaactgtatccgaaatctttacataatcgttttgaagaactccaaaagagcagaaacaagacct

SEQ ID NO: 185605 - DNA, 75 bp, synthetic construct
  source 1..75: mol_type = other DNA
tatggcgcagctggcggcgcactattccccgcgtagatggcattcgcaagcctgccacacctttattaccaggca

SEQ ID NO: 185606 - DNA, 75 bp, synthetic construct
  source 1..75: mol_type = other DNA
tgctctttgctgacggagggctgctttatgactatttcccgtatttcactccgctaaaggacaaattgggtattg

SEQ ID NO: 185607 - DNA, 75 bp, synthetic construct
  source 1..75: mol_type = other DNA
taccgagaaaatataattgtatttatactataaagtcagaatttgaagaaaaaaatagtgaatattacacccggt

SEQ ID NO: 185608 - DNA, 75 bp, synthetic construct
  source 1..75: mol_type = other DNA
ctgcaactgtcatttattcccggtattggtctgaataccgcctcagagatggttcgacttgcaagcaatgatcca

SEQ ID NO: 185609 - DNA, 75 bp, synthetic construct
  source 1..75: mol_type = other DNA
gtaagcaatctctaataccatcaatgacttattttcttgacgagaaattggcttatacacattcagagttagagc

SEQ ID NO: 185610 - DNA, 75 bp, synthetic construct
  source 1..75: mol_type = other DNA
cagtgataaaggttctcagtatgtatcactggcctatacggagcgactaaaagaagcaaaactgctggcatcaac

SEQ ID NO: 185611 - DNA, 75 bp, synthetic construct
  source 1..75: mol_type = other DNA
catcgttcattaaacgtgctatggcaggtatataccgaactgtatccgaaatctttacataatcgttttgaagaa

SEQ ID NO: 185612 - DNA, 75 bp, synthetic construct
  source 1..75: mol_type = other DNA
atgcctggggccacgcccgcattccggcgcagtatgactacatcagttggatgctgcatatgagcttctatgtat

SEQ ID NO: 185613 - DNA, 75 bp, synthetic construct
  source 1..75: mol_type = other DNA
ccgtttctggacaaacgatggtgtcagataatcccgatttaggttttattattgcagatcagaataatatgccgc

SEQ ID NO: 185614 - DNA, 75 bp, synthetic construct
  source 1..75: mol_type = other DNA
aaggtgataacagcatcagagtttatgagttgattgttgatgaagaaaccgtgcgagatgtaccacctcgcacaa

SEQ ID NO: 185615 - DNA, 75 bp, synthetic construct
  source 1..75: mol_type = other DNA
gtgggtatgttgaacccagcgtcacttatgagcagttcatgagttttctttttcaggtatttgatgacgtatcaa

SEQ ID NO: 185616 - DNA, 75 bp, synthetic construct
  source 1..75: mol_type = other DNA
gtccagcctggtcaacaccgctggcgctggaacgtgccggattgacgatgagcgatctgacattgatcgatatgc

SEQ ID NO: 185617 - DNA, 75 bp, synthetic construct
  source 1..75: mol_type = other DNA
ccttaaaaacggccgataaatacctgtcttcattgtccaacgacgaaacaatgcctgtatttgtggccgatgtac

SEQ ID NO: 185618 - DNA, 75 bp, synthetic construct
  source 1..75: mol_type = other DNA
acgcttagggacttatcgctatcttgatatggatgtaacgattgcagaagccttaaaaacggccgataaatacct

SEQ ID NO: 185619 - DNA, 75 bp, synthetic construct
  source 1..75: mol_type = other DNA
aaaaaaattctatttacgtcacccctgatgaaatttctataagtatagacggcgataacttaaagttgccatatt

SEQ ID NO: 185620 - DNA, 75 bp, synthetic construct
  source 1..75: mol_type = other DNA
gcggctgttgatcctaatgtaggggcacgaattgctaaaattgatccttctattgttgcaaattttgattcgcaa

SEQ ID NO: 185621 - DNA, 75 bp, synthetic construct
  source 1..75: mol_type = other DNA
cggacggacgacgagcgcacccatcactaccattacgacagcctgcaccgcctggtccattacatccgtatccaa

SEQ ID NO: 185622 - DNA, 75 bp, synthetic construct
  source 1..75: mol_type = other DNA
atggcgagccactggtcgagagccgctacctctacggagacacagtacgatgcgtggggaaaggcggtcagcacc

SEQ ID NO: 185623 - DNA, 75 bp, synthetic construct
  source 1..75: mol_type = other DNA
tcaaccctgaaaacctgccagtgattgagtggcagggggtacgcgtagttaccactgaaacgctggcggcgggat

SEQ ID NO: 185624 - DNA, 75 bp, synthetic construct
  source 1..75: mol_type = other DNA
ccatactattatttcaaagctcggatacttttgatttgtggtttcaaagtcaaagtaatagtaaatatactgtaa

SEQ ID NO: 185625 - DNA, 75 bp, synthetic construct
  source 1..75: mol_type = other DNA
cctgtgcgtttcaattatgacgataattatttcaatcataaattccagggcatgccgaagttaggctatacccat

SEQ ID NO: 185626 - DNA, 75 bp, synthetic construct
  source 1..75: mol_type = other DNA
gattttaatggccgccacgttgggatttattggcctgggtgctcaacaaccgagtgctgaatggggcgcgatggt

SEQ ID NO: 185627 - DNA, 75 bp, synthetic construct
  source 1..75: mol_type = other DNA
acgccattgatttaaccgcccgccttttgccgccttctgcggcgcactggtttggcaccgatgaagtgggacgcg

SEQ ID NO: 185628 - DNA, 75 bp, synthetic construct
  source 1..75: mol_type = other DNA
ccagctcactttcgctggttaccgtttctctgataaaaactttgtgacaatgaatgaatatatcaatgacactaa

SEQ ID NO: 185629 - DNA, 75 bp, synthetic construct
  source 1..75: mol_type = other DNA
ttctctggcagcatgaccattcccgcctgtaggccagtgtacggtgcgtcgggtcagggaagggctggaaatcac

SEQ ID NO: 185630 - DNA, 75 bp, synthetic construct
  source 1..75: mol_type = other DNA
ggcatcgctggatatcggtagcgcgattttaatggccgccacgttgggatttattggcctgggtgctcaacaacc

SEQ ID NO: 185631 - DNA, 75 bp, synthetic construct
  source 1..75: mol_type = other DNA
ggtattgcgcatttccgggggcagcgattttgcttaccgccgtcgggtttaatctctttggtgatggtattcgcg

SEQ ID NO: 185632 - DNA, 75 bp, synthetic construct
  source 1..75: mol_type = other DNA
tgacacaaagatctactggtctaggctttgaacctagcactcaagttgccttatggagtgagcctagtaaaggct

SEQ ID NO: 185633 - DNA, 75 bp, synthetic construct
  source 1..75: mol_type = other DNA
cattccgacttaaaaattgtaaaaccaaagtttatttaccacgtgctacaaaataaacaagagcacatccatgca

SEQ ID NO: 185634 - DNA, 75 bp, synthetic construct
  source 1..75: mol_type = other DNA
aattctttatatcaaaaagtaaagttagagagcactgataagaaagcttttagaaaaattgtttcagacttgtgg

SEQ ID NO: 185635 - DNA, 75 bp, synthetic construct
  source 1..75: mol_type = other DNA
tacaacaacccttcttctggactggtgaattctcatggggttggctgaacaatgtatccctgtatggtggttcag

SEQ ID NO: 185636 - DNA, 75 bp, synthetic construct
  source 1..75: mol_type = other DNA
ttgtttggttttatcgatagtttttataccatttgcaaataaaatatcatttattttatttggctcttatgaata

SEQ ID NO: 185637 - DNA, 75 bp, synthetic construct
  source 1..75: mol_type = other DNA
acccttagagaacatactgcattaattaaggaatattacggctatcatgaatttggtgattttccattgagaaga

SEQ ID NO: 185638 - DNA, 75 bp, synthetic construct
  source 1..75: mol_type = other DNA
aaccttctccggagacgactggaaaattaccgcgcgagccgggctgggttaccagttcgacctgctggcgaacgg

SEQ ID NO: 185639 - DNA, 75 bp, synthetic construct
  source 1..75: mol_type = other DNA
gatgctgagtgaaagccagcacgcgaacgaactgcgccgcacgcattcactcaccatcatggccgtctcaaacat

SEQ ID NO: 185640 - DNA, 75 bp, synthetic construct
  source 1..75: mol_type = other DNA
tctcgcgttcaccgataccctttggctggaggtgagtcagtatccggagttgatagcgcagttttcaagtggtaa

SEQ ID NO: 185641 - DNA, 75 bp, synthetic construct
  source 1..75: mol_type = other DNA
cgtgttgcgattgaatatagtggcggaatttacgatattgataatttaaggagggcacacctcatttgcatgatg

SEQ ID NO: 185642 - DNA, 75 bp, synthetic construct
  source 1..75: mol_type = other DNA
ggcagacctcgttgctggtgcgcaaatcaaaaacatgtgctatgtcgacgacaacgcgacagctaactctgatct

SEQ ID NO: 185643 - DNA, 75 bp, synthetic construct
  source 1..75: mol_type = other DNA
aactggtccatgtggaatgatattgctattttgttcaaaacagttggcgttgtattaaaaaaagatggtgcatat

SEQ ID NO: 185644 - DNA, 75 bp, synthetic construct
  source 1..75: mol_type = other DNA
gatttttgccattattgaaatggcagtaattgctttttcaaaatggtatttctcaagatatgtatggctcctaac

SEQ ID NO: 185645 - DNA, 75 bp, synthetic construct
  source 1..75: mol_type = other DNA
atcgatagtgggagtgcgtcaaacaatactcatggaacagatgttattaatggtattgaggtaatcaaagctagc

SEQ ID NO: 185646 - DNA, 75 bp, synthetic construct
  source 1..75: mol_type = other DNA
ccatagggttattattactttgtatgtatggcttaagtaaggatatcaacaagataaatgccgccatcgcaggcg

SEQ ID NO: 185647 - DNA, 75 bp, synthetic construct
  source 1..75: mol_type = other DNA
ttgttagcttttcacttgctgtatctgatctttttagttttgttatttcactttatctggcagttggggtgttat

SEQ ID NO: 185648 - DNA, 75 bp, synthetic construct
  source 1..75: mol_type = other DNA
atgcagccattgtcgcactttcagacagtgagcgtctgatgcggctttaccagcatatttcagccgaattacgcc

SEQ ID NO: 185649 - DNA, 75 bp, synthetic construct
  source 1..75: mol_type = other DNA
atggcagaaataaaaacaggagtgcgtagtgttatcagctatcttcttagcccattaaaggaaactattaatgaa

SEQ ID NO: 185650 - DNA, 75 bp, synthetic construct
  source 1..75: mol_type = other DNA
gtgaagatgaggggcttgtcaccctctggcactacgatgcgtcggaccgcatcacgcaccggacggtgaacggcg

SEQ ID NO: 185651 - DNA, 75 bp, synthetic construct
  source 1..75: mol_type = other DNA
gacctggtgcgcatcagcggcccgcgacagacgcgggaatacggctacagtgccacgggcaggctggagagcgtg

SEQ ID NO: 185652 - DNA, 75 bp, synthetic construct
  source 1..75: mol_type = other DNA
ataaaaatcttgtaagaagtaaagataataatcttgaagcattttatctcgcaacacctgatggacgatttgagg

SEQ ID NO: 185653 - DNA, 75 bp, synthetic construct
  source 1..75: mol_type = other DNA
atgttgataatccagaatcatcgacagaatctgttggtatcggtgcaggtgttgacgcttcagttatgactctgg

SEQ ID NO: 185654 - DNA, 75 bp, synthetic construct
  source 1..75: mol_type = other DNA
actacgggtggagtgacaacggcgacctggtgcgcatcagcggcccgcgacagacgcgggaatacggctacagcg

SEQ ID NO: 185655 - DNA, 75 bp, synthetic construct
  source 1..75: mol_type = other DNA
catctgctataatggcaaatattatagtggcgcctaaaatattaattctacaattaaaatgcttgatgtttttac

SEQ ID NO: 185656 - DNA, 75 bp, synthetic construct
  source 1..75: mol_type = other DNA
tatgtcaatatatgaaggctttggtattccaccgttggagtcccttgcaaataattgccctgtacttttatctga

SEQ ID NO: 185657 - DNA, 75 bp, synthetic construct
  source 1..75: mol_type = other DNA
ggcccgctgccgttcattctctcccgcacctacagcagctaccggaccaggacacccgcgccggtgggagtgttt

SEQ ID NO: 185658 - DNA, 75 bp, synthetic construct
  source 1..75: mol_type = other DNA
ctgccgttcattctctcccgcacctacagcagctaccggaccaggacacccgcgccggtgggagtgtttggcccc

SEQ ID NO: 185659 - DNA, 75 bp, synthetic construct
  source 1..75: mol_type = other DNA
gcgcactatgtttaccactatgatgaatacggcagactgacggagaagacggaccgcatcccgacgggtgtgata

SEQ ID NO: 185660 - DNA, 75 bp, synthetic construct
  source 1..75: mol_type = other DNA
gttagaagtaaaaacgacattcaaagaatctcattttaacatgacgttatttattgacatttataaaagtgagaa

SEQ ID NO: 185661 - DNA, 75 bp, synthetic construct
  source 1..75: mol_type = other DNA
atgaaaaaaatttatattgatggttactttttagcacaaagaattacaggtgttcagcgatatgcagaggaactt

SEQ ID NO: 185662 - DNA, 75 bp, synthetic construct
  source 1..75: mol_type = other DNA
gtggtccaggcgcaggcagaagtgctttatcttatccgcgcccccgaaatgaccgacgtgcagcatatttatgat

SEQ ID NO: 185663 - DNA, 75 bp, synthetic construct
  source 1..75: mol_type = other DNA
atcaatgtaatggatgctcgcgggcgaattatcggcagcggcgatcgtgagcgtattggtgaattgcacgaaggt

SEQ ID NO: 185664 - DNA, 75 bp, synthetic construct
  source 1..75: mol_type = other DNA
ttttctcctgatggcacggttttcggcagcgaagcggccgaactccatcagacgggttttctccgggtgaaccgt

SEQ ID NO: 185665 - DNA, 75 bp, synthetic construct
  source 1..75: mol_type = other DNA
actgcttcaggaagcagcggaaaaaatcaccgatcttggtgagcagattgtaattcgccatctctatatcgagcg

SEQ ID NO: 185666 - DNA, 75 bp, synthetic construct
  source 1..75: mol_type = other DNA
ttactcagataattacagtaatacctctatgtatggttattataaagctaagtatgctcaggttaatgccggata

SEQ ID NO: 185667 - DNA, 75 bp, synthetic construct
  source 1..75: mol_type = other DNA
agcaggaaaaagtataatgaattttttaaatatatacaagcagaagccaaacaatatttcaaagaccagtataaa

SEQ ID NO: 185668 - DNA, 75 bp, synthetic construct
  source 1..75: mol_type = other DNA
ctgaatcaaaacttataaagtttctggattatgcttatgataagtctgttgaggggattggtgttcccggaatag

SEQ ID NO: 185669 - DNA, 75 bp, synthetic construct
  source 1..75: mol_type = other DNA
tctactggtgtcatcaatttgtcaaagtttgttccggttgtggggggaattgttggtggtggttttgatacaata

SEQ ID NO: 185670 - DNA, 75 bp, synthetic construct
  source 1..75: mol_type = other DNA
acctaccaatccattcaacttatatcagcaccttttttcaaatcgagattttgatctttacttagaaaatggcga

SEQ ID NO: 185671 - DNA, 75 bp, synthetic construct
  source 1..75: mol_type = other DNA
ctgattctgtttgtggtggtgtttctcggtttgctggtcacgatctactccacgggttatctgacggataaaaat

SEQ ID NO: 185672 - DNA, 75 bp, synthetic construct
  source 1..75: mol_type = other DNA
ggcggcaggggatagacaaggtcagccagctaaagaaagaatcatggatcttaaaaataacactgtcggtattgc

SEQ ID NO: 185673 - DNA, 75 bp, synthetic construct
  source 1..75: mol_type = other DNA
atggatgctattgttggcggagctcataatggggccgccgatgcaatgagacattgttacttgatgtgtcgaatg

SEQ ID NO: 185674 - DNA, 75 bp, synthetic construct
  source 1..75: mol_type = other DNA
atccaccagacggacgacggcgagttatttattgatacctgcctgacgacgaccgccgaagcgagcattgttttt

SEQ ID NO: 185675 - DNA, 75 bp, synthetic construct
  source 1..75: mol_type = other DNA
ttttgattgtggctgtaataagatacaagaaattcgatacttccccaaaaatctgaaagaagcgcgtattggata

SEQ ID NO: 185676 - DNA, 75 bp, synthetic construct
  source 1..75: mol_type = other DNA
accctgaaaaccgcgcctggtcgcctatcatcatcgggagcgaagaaacgctcgatgtttttggtgtggtgacgt

SEQ ID NO: 185677 - DNA, 75 bp, synthetic construct
  source 1..75: mol_type = other DNA
ctgaaaatagctcttatgcacccattacgataaatagcgaagatacactggatatctttggtgttgtgacgttta

SEQ ID NO: 185678 - DNA, 75 bp, synthetic construct
  source 1..75: mol_type = other DNA
tgaacgaaagtgaactgtcgatgaagtgtcgaaaggaacctctaggcgatgtcgaaaatgtgctatctacgcaga

SEQ ID NO: 185679 - DNA, 75 bp, synthetic construct
  source 1..75: mol_type = other DNA
tccagccgattatgataaatattccgatatggttaaaaagcatgtaatagatggtgaggaactcataattaaata

SEQ ID NO: 185680 - DNA, 75 bp, synthetic construct
  source 1..75: mol_type = other DNA
ctatggaatatcgcagagaaaatatattgttacgaatcccgatgattatgataaatattcttacatggttaaaag

SEQ ID NO: 185681 - DNA, 75 bp, synthetic construct
  source 1..75: mol_type = other DNA
ctgaaggtgcagacgcaccacagctaccggttcatccagtgggcggcagagcgcggcctgtaccatccggcagaa

SEQ ID NO: 185682 - DNA, 75 bp, synthetic construct
  source 1..75: mol_type = other DNA
atgaaccagctacctcgccgtgcgctttcgcgttatggtctgacttttcagggtaaattaacctgtggaaacctg

SEQ ID NO: 185683 - DNA, 75 bp, synthetic construct
  source 1..75: mol_type = other DNA
gaagtggactggcgcgacagcgtggtgaaaccgtttaacgagcaactggcaaataactatccgtttaatccgcgt

SEQ ID NO: 185684 - DNA, 75 bp, synthetic construct
  source 1..75: mol_type = other DNA
tacagcaccagcgatgactacggtgatttttctaactttgccgcctggcccatcaaggttgacgggaaaacctag

SEQ ID NO: 185685 - DNA, 75 bp, synthetic construct
  source 1..75: mol_type = other DNA
cgggttcataatggacagcattatggttgtcggtgtttgtgtgatgatgctgttatacggaggatatctcacctg

SEQ ID NO: 185686 - DNA, 75 bp, synthetic construct
  source 1..75: mol_type = other DNA
tgccgaggctggaaaagcgcctgccgcgctatatcctgagtgtggatgaggtggagcaggtgctggcgcagcctg

SEQ ID NO: 185687 - DNA, 75 bp, synthetic construct
  source 1..75: mol_type = other DNA
tcaccgaactagttaaccggaatcccgtcgcagatctggacacggcactgaaagcccgacgcccaggccataacg

SEQ ID NO: 185688 - DNA, 75 bp, synthetic construct
  source 1..75: mol_type = other DNA
taacgaatccggcaggtataaccctgattgggtcgaaatccaattggcccatgttccaaagggaatcagggcggt

SEQ ID NO: 185689 - DNA, 75 bp, synthetic construct
  source 1..75: mol_type = other DNA
gctgggagcgttcagattcagacggcaatacgtttgcttatattaagcgccctaaggacggcagagcttcgttta

SEQ ID NO: 185690 - DNA, 75 bp, synthetic construct
  source 1..75: mol_type = other DNA
cgtgacgtgctggcattgcttcagaagaaagagcgcaccgcgccggaacaagccaggaagctacgccagcgtatc

SEQ ID NO: 185691 - DNA, 75 bp, synthetic construct
  source 1..75: mol_type = other DNA
caacggcgggccatgatgcaggactacagcgacgccatcgaccagatattggctggtggcggtaatccgctggag

SEQ ID NO: 185692 - DNA, 75 bp, synthetic construct
  source 1..75: mol_type = other DNA
gccgggagcgtccagattcaaacggcaatacgtttgcttatcctcacggctttaaggaccgcagaactgcgttta

SEQ ID NO: 185693 - DNA, 75 bp, synthetic construct
  source 1..75: mol_type = other DNA
aggacgctactatcaccctacccgctgaagtcatgaaggcccgccgcccgcatgtggtcccgctatcacggcagg

SEQ ID NO: 185694 - DNA, 75 bp, synthetic construct
  source 1..75: mol_type = other DNA
tcattcatttactcatcctcacggcactaaggacgcaggagcttcgtttatgccactgggaatgggtaaacctgg

SEQ ID NO: 185695 - DNA, 75 bp, synthetic construct
  source 1..75: mol_type = other DNA
tttcactgtcattgagcgctctgatgttactgagtgcatcggtatatgcagggaataaaagcgtaaaaatgacgt

SEQ ID NO: 185696 - DNA, 75 bp, synthetic construct
  source 1..75: mol_type = other DNA
agccgtttactgatagcccagggaattgacccaatggaagaagcgcgcaaggagaaagccattgatgcgctcaac

SEQ ID NO: 185697 - DNA, 75 bp, synthetic construct
  source 1..75: mol_type = other DNA
ggcattgaccattggcgtcctctcagactgagctcttcgtattacagaattaaagataatcaatggatcccggag

SEQ ID NO: 185698 - DNA, 75 bp, synthetic construct
  source 1..75: mol_type = other DNA
taagatacgcacccaccaggttcgacactggtttgtcacaatggcactgaacgagatccaccatagcgccgtttc

SEQ ID NO: 185699 - DNA, 75 bp, synthetic construct
  source 1..75: mol_type = other DNA
tagcggttggtcagagtcctatacaaagcaggtcagatcggcactggagaaagatgtttatcccgtgctgggtaa

SEQ ID NO: 185700 - DNA, 75 bp, synthetic construct
  source 1..75: mol_type = other DNA
ctataaccaggcggcctatctgaagcaacggcgggccatgatgcaggactacagcgacgccatcgaccagatatt

SEQ ID NO: 185701 - DNA, 75 bp, synthetic construct
  source 1..75: mol_type = other DNA
ttgagcaagacaccactgacagcaaaggccatagatgccgcacaaccacaggacaagccctacaaactcacagat

SEQ ID NO: 185702 - DNA, 75 bp, synthetic construct
  source 1..75: mol_type = other DNA
gagcggttggagtgagagctatacaaagcaggtcagatcggcactagagaaagatgtttaccccgtgctgggaaa

SEQ ID NO: 185703 - DNA, 75 bp, synthetic construct
  source 1..75: mol_type = other DNA
ggcggttgcttccagtaatcgacagcatcgtccggcgctggagttaaagcgcatccctgagttacttgagaaaat

SEQ ID NO: 185704 - DNA, 75 bp, synthetic construct
  source 1..75: mol_type = other DNA
ccaaccaaaaatggtcagaagatcatgctaatcgtgtaaaaaagagcctgggggacaatatcttcctggcaattg

SEQ ID NO: 185705 - DNA, 75 bp, synthetic construct
  source 1..75: mol_type = other DNA
atggcgttcggcgtttacccggatgtttcgctggcggatgcgcggaagaaaagggaagaggccagaaagctggtc

SEQ ID NO: 185706 - DNA, 75 bp, synthetic construct
  source 1..75: mol_type = other DNA
ttgagcaagacaccactgacagcaaaggccatagaggccgcacagccgcaggacaagccctataaactcaccgat

SEQ ID NO: 185707 - DNA, 75 bp, synthetic construct
  source 1..75: mol_type = other DNA
cgggccatgatgcaggactacgcggacgccattgattcaatactggctggtgacggcaatccgctggaaccgtga

SEQ ID NO: 185708 - DNA, 75 bp, synthetic construct
  source 1..75: mol_type = other DNA
tgaagtcatgaaagcccgccgaccgcatgtagtcccgctatccaggcaggctatcaccttgcttgaggaccagtt

SEQ ID NO: 185709 - DNA, 75 bp, synthetic construct
  source 1..75: mol_type = other DNA
ttgagcaagacaccactgacagcaaaggccatagaggccgcccagccgcaggacaagccctacaaactcactgat

SEQ ID NO: 185710 - DNA, 75 bp, synthetic construct
  source 1..75: mol_type = other DNA
ccagtttacccgcagcggatacagtgctttcgtctttcctggccgattcatggacaagccactttcagccagtgc

SEQ ID NO: 185711 - DNA, 75 bp, synthetic construct
  source 1..75: mol_type = other DNA
cggtcgagctattacaggaccagtttacccgcagcggatacagtgctttcgtgttccctggtcgattcatgcaaa

SEQ ID NO: 185712 - DNA, 75 bp, synthetic construct
  source 1..75: mol_type = other DNA
gttattatttctataaacctgttacatacatcgccctggtcaaaattatcctttctaaaccgaaggtgaaggttg

SEQ ID NO: 185713 - DNA, 75 bp, synthetic construct
  source 1..75: mol_type = other DNA
tcttcatgacctgcatattgattatatcaaaattgatcacagtttcgttggccgcgtaaacgcagacccagaatc

SEQ ID NO: 185714 - DNA, 75 bp, synthetic construct
  source 1..75: mol_type = other DNA
ttacgataattaataaaaacgaaaacacgacactcactcaaaccattgctccaatatttgaagaatacctaatgg

SEQ ID NO: 185715 - DNA, 75 bp, synthetic construct
  source 1..75: mol_type = other DNA
ggagagcgtgcgcaccctcgcaccggacctggacatccgcatcccgtatgccaccgacccggcgggaaaccgcct

SEQ ID NO: 185716 - DNA, 75 bp, synthetic construct
  source 1..75: mol_type = other DNA
gtaatgccgcatatgaactgaccagcacatacacccccgcaggccagttacagagccagcacctgaacagcctgg

SEQ ID NO: 185717 - DNA, 75 bp, synthetic construct
  source 1..75: mol_type = other DNA
cagcaattcagtaattcatgggtcaatcacttctgaactgccatttggttattacagcattacgcctgaaggtta

SEQ ID NO: 185718 - DNA, 75 bp, synthetic construct
  source 1..75: mol_type = other DNA
ggcgcgcgcctgccgggagaacgtcgctaccaggcacgattgcgcagtgagcaacagggggtagagatcagccag

SEQ ID NO: 185719 - DNA, 75 bp, synthetic construct
  source 1..75: mol_type = other DNA
gggagcgctaaatattcccgggaaggctcccgtatcgtttctgaaactgttggtaactatctcttcaaccagttc

SEQ ID NO: 185720 - DNA, 75 bp, synthetic construct
  source 1..75: mol_type = other DNA
taaataaacttaacataaaaggtactgttgagttgtttatagcacctgtgaatgggataaacattattttaaact

SEQ ID NO: 185721 - DNA, 75 bp, synthetic construct
  source 1..75: mol_type = other DNA
taaaagatgaaaatattacacctgaggaaatagcagagcacttggacaaaaaaaatggaagtgattttctagaaa

SEQ ID NO: 185722 - DNA, 75 bp, synthetic construct
  source 1..75: mol_type = other DNA
gggaaaactacgtaagttctccatccagagaaaacaaaaataattttaacgaaaaagcgagttattataaaaaca

SEQ ID NO: 185723 - DNA, 75 bp, synthetic construct
  source 1..75: mol_type = other DNA
ccaccgtaaaacacgatcatcgcgaaaccgtaaaaaatgaccagacggtcacgatccaggaaggtaaccgccttc

SEQ ID NO: 185724 - DNA, 75 bp, synthetic construct
  source 1..75: mol_type = other DNA
ggtactacgatccgttgcaggggcggtatatcactcaggacccgatagggctggagggggggatggagtctgtat

SEQ ID NO: 185725 - DNA, 75 bp, synthetic construct
  source 1..75: mol_type = other DNA
tcacgctcttatggatattggtttagataactttctggaggatatgaaaagtctgccagaggatactatatcgga

SEQ ID NO: 185726 - DNA, 75 bp, synthetic construct
  source 1..75: mol_type = other DNA
aatgtaagcaatacacaaaagtatttaacctatgctatgtgtaacaatgagattgatgagtgttttgattttacg

SEQ ID NO: 185727 - DNA, 75 bp, synthetic construct
  source 1..75: mol_type = other DNA
aatgaagagaaatacgtgaatccagttaaaatcacgatgaggtctggtttaaattatattgaacaagaatctctt

SEQ ID NO: 185728 - DNA, 75 bp, synthetic construct
  source 1..75: mol_type = other DNA
cagaaacatatgaagctgatgtaattaaaaagtatcagcatttaaaaaatgctcattttcagcagcgattaaaga

SEQ ID NO: 185729 - DNA, 75 bp, synthetic construct
  source 1..75: mol_type = other DNA
tttgagccgtgcagttgaattgttcgaaggagacaagaacgctgcccaacaatggctaaacgagaagaaccgagt

SEQ ID NO: 185730 - DNA, 75 bp, synthetic construct
  source 1..75: mol_type = other DNA
ggggagtattgggaatcgctcggcgggagttcactgccgtacaggcagcttagaaactggaggcgctcacactca

SEQ ID NO: 185731 - DNA, 75 bp, synthetic construct
  source 1..75: mol_type = other DNA
gatgactagaaattatgatataacacatttcttctggcgtgaatcgcttagacttatatatgatgagtattatat

SEQ ID NO: 185732 - DNA, 75 bp, synthetic construct
  source 1..75: mol_type = other DNA
tggggaaccagcaatttcagatttttaaagatacagaaggctggtttgattcaatgggggcatgggtaattttta

SEQ ID NO: 185733 - DNA, 75 bp, synthetic construct
  source 1..75: mol_type = other DNA
ttatcgagttaatggtgaatggtttgttaagagtgattgtattaaatcgttaataacacaaatcgcagaaggaaa

SEQ ID NO: 185734 - DNA, 75 bp, synthetic construct
  source 1..75: mol_type = other DNA
attattgatactgaaaactgggcattctcaaatatagcaaatcaaatagtcaatcatctgtcagattcgtatgat

SEQ ID NO: 185735 - DNA, 75 bp, synthetic construct
  source 1..75: mol_type = other DNA
aaatgtctatcttcagaaaatttgcaacaaataaaaaatgggattggaaagttaagtctgagaactttcggactt

SEQ ID NO: 185736 - DNA, 75 bp, synthetic construct
  source 1..75: mol_type = other DNA
ctgatgttggtgtggtcaaagatgcttttggtgagatgcaaaaagaatggattttaccagttagaagcaaggata

SEQ ID NO: 185737 - DNA, 75 bp, synthetic construct
  source 1..75: mol_type = other DNA
ggaaggggatctctggtaaacatactccaagtggtattctaacactccatcaggatggctttattagaaaaataa

SEQ ID NO: 185738 - DNA, 75 bp, synthetic construct
  source 1..75: mol_type = other DNA
tttccgagctggaggcattatgttcatctcatggttttattcatggtttggcgttattgagttgtattaataaca

SEQ ID NO: 185739 - DNA, 75 bp, synthetic construct
  source 1..75: mol_type = other DNA
ggaataatagctagaatagccgctagattagccgggacaaaactcattattcacacagtacatggaatcgcattt

SEQ ID NO: 185740 - DNA, 75 bp, synthetic construct
  source 1..75: mol_type = other DNA
ataacaaaagtatgtaatagtgacggtgaaattaaactcagggatttaatctttactaaacgtactacaaatgct

SEQ ID NO: 185741 - DNA, 75 bp, synthetic construct
  source 1..75: mol_type = other DNA
atggcatgaccatgaacaagcgattccgttgataaccggccagactcaggtgacatctgaggctgaagtttggca

SEQ ID NO: 185742 - DNA, 75 bp, synthetic construct
  source 1..75: mol_type = other DNA
ctgaggaaaaatattctttagatgacgtttggttcttggaaaacatgggctttacatgtgctgaaatggtatctg

SEQ ID NO: 185743 - DNA, 75 bp, synthetic construct
  source 1..75: mol_type = other DNA
aaagaagctttccacacaggcattgtcataacagtagcctttcgcactcatactgccacgcaggttgtgtcgctt

SEQ ID NO: 185744 - DNA, 75 bp, synthetic construct
  source 1..75: mol_type = other DNA
aatacgtggctctggcttttttgcagaaatacagaagttcacaaagaccctggaaattaaaagtggttctttgag

SEQ ID NO: 185745 - DNA, 75 bp, synthetic construct
  source 1..75: mol_type = other DNA
ggatgctgagagaattgcaaaatatgcaaaaatgttcgatgaaaaaccagaagagtataccaacttagttaacaa

SEQ ID NO: 185746 - DNA, 75 bp, synthetic construct
  source 1..75: mol_type = other DNA
ccgttaaacgcatggccgacgaataccccaaaggcctgcgcaagctggtggaggataaagccaacggcccggcgg

SEQ ID NO: 185747 - DNA, 75 bp, synthetic construct
  source 1..75: mol_type = other DNA
tcatactaattctacaaaacccggtgtcatagctaggattgcggcaaaatttgccggggtaagaaaaattgttca

SEQ ID NO: 185748 - DNA, 75 bp, synthetic construct
  source 1..75: mol_type = other DNA
ctgcgccacggtgttgttggtcaggaaacttgcggacccggcggaatagcgtacggcatgcgttccattggcggc

SEQ ID NO: 185749 - DNA, 75 bp, synthetic construct
  source 1..75: mol_type = other DNA
tatccaattcctgcagttcttctcgcggaaagggaaaatgatcctggcacatatgaaataattgatggcctacaa

SEQ ID NO: 185750 - DNA, 75 bp, synthetic construct
  source 1..75: mol_type = other DNA
aagcgccagaattgtcgtcgccgcagacaacactatcgccgatgtacgcgcgggacagttctccactaacgctgt

SEQ ID NO: 185751 - DNA, 75 bp, synthetic construct
  source 1..75: mol_type = other DNA
tgttttttaattgaaacgggaaaatgtagtaagaaaaaaatcatcgcactatctttcaaaaaagatgcggcaaaa

SEQ ID NO: 185752 - DNA, 75 bp, synthetic construct
  source 1..75: mol_type = other DNA
gttatggcaggtctttcaagcagaattttaatgatataccgttaataacaaacatgataacttattgtggtatag

SEQ ID NO: 185753 - DNA, 75 bp, synthetic construct
  source 1..75: mol_type = other DNA
ccaaatacagaacctgtaaacatccttttaagcaacaatttcatcaggatcaataagaatattacattatctgat

SEQ ID NO: 185754 - DNA, 75 bp, synthetic construct
  source 1..75: mol_type = other DNA
cagaaggtcagggcagcattcagcttaattgtaaaaccaaaccgaccagcattgtcgatttaaccgcggcaacag

SEQ ID NO: 185755 - DNA, 75 bp, synthetic construct
  source 1..75: mol_type = other DNA
cagtgcccgaattgttgtcgcatcggataataccatcgcggatgtccgtgcaggtcaattctccaccaatgctat

SEQ ID NO: 185756 - DNA, 75 bp, synthetic construct
  source 1..75: mol_type = other DNA
agccacaggtggagagccgctacctctatgacccgctgggccgccggacgggaaaacgggtgtggcggcgggagc

SEQ ID NO: 185757 - DNA, 75 bp, synthetic construct
  source 1..75: mol_type = other DNA
cttaagccagccgcagttacgtcaggccgtgcaacttctgacacgaacggaactcaccctcaaacaagattacgg

SEQ ID NO: 185758 - DNA, 75 bp, synthetic construct
  source 1..75: mol_type = other DNA
ttttcaacaatggttagaaatatttcctgttcgattcgaggtgatgtttcaagtgatatattaccccttcgtgat

SEQ ID NO: 185759 - DNA, 75 bp, synthetic construct
  source 1..75: mol_type = other DNA
ataccacgtatttctggaaacagaaaaacgaacaggcataccaggcaatctatgacggctacaaaaataaaacag

SEQ ID NO: 185760 - DNA, 75 bp, synthetic construct
  source 1..75: mol_type = other DNA
cagttctggacgggaaagatggtgaaccatttgaacttgtgaagtgggtgaatgccgggttcacggtggatcaac

SEQ ID NO: 185761 - DNA, 75 bp, synthetic construct
  source 1..75: mol_type = other DNA
aaccgcagaacaacgccttcagcaactggcagagcaggaagcagaggcgcttgtggatgcggccatcgaggccgg

SEQ ID NO: 185762 - DNA, 75 bp, synthetic construct
  source 1..75: mol_type = other DNA
tcccaattcgtaagagtttcactgacgtagtgagctacgccactgattcttttgcagtcgtagaaggccgtgttt

SEQ ID NO: 185763 - DNA, 75 bp, synthetic construct
  source 1..75: mol_type = other DNA
caaaagaagccttgcgtatcaaggctgcaattgattggttggtgcaatctgaaatcactgatgatgaaaccatgt

SEQ ID NO: 185764 - DNA, 75 bp, synthetic construct
  source 1..75: mol_type = other DNA
aatattctaagagaagactacatgtctataggtgtatctgataaaggactttatagagtcacatctgaagatatt

SEQ ID NO: 185765 - DNA, 75 bp, synthetic construct
  source 1..75: mol_type = other DNA
attgcggagagagtgcttgttgattggtttgtccaaaacccagtaaaagtggcaaagcctttgacccagattcac

SEQ ID NO: 185766 - DNA, 75 bp, synthetic construct
  source 1..75: mol_type = other DNA
cagtactctcacggcgtggccggataaccgcatcgcagaggatgcgcactatgtttaccactatgatgaatacgg

SEQ ID NO: 185767 - DNA, 75 bp, synthetic construct
  source 1..75: mol_type = other DNA
gccaccgacccggcgggaaaccgcctgccggacccggagcttcacccggacagtactctcacggcgtggccggat

SEQ ID NO: 185768 - DNA, 75 bp, synthetic construct
  source 1..75: mol_type = other DNA
atgacaacggcgacctggtgcgcatcagcggtccgcgacagacgcgggaatacggctacagtgccacgggcaggc

SEQ ID NO: 185769 - DNA, 75 bp, synthetic construct
  source 1..75: mol_type = other DNA
gtgacgaaactgcttaaattaccgcagcatgttctgccgctgtttgggctgtgccttggctggcctgcggataat

SEQ ID NO: 185770 - DNA, 75 bp, synthetic construct
  source 1..75: mol_type = other DNA
caataatcgccgggatacctggagcgatcatatccgccgaacaatcattaaagaaagccgcccatttattctgga

SEQ ID NO: 185771 - DNA, 75 bp, synthetic construct
  source 1..75: mol_type = other DNA
aagttaaataaaattctcaatgtcaaaagagcgtcaggctatacgggacctatagaggttttaccgcgtcctcgt

SEQ ID NO: 185772 - DNA, 75 bp, synthetic construct
  source 1..75: mol_type = other DNA
cacgtctacaagaaagcatttatgcaagttgtcgaggctgacatgctctctaagggtctactcggtggcgaggcg

SEQ ID NO: 185773 - DNA, 75 bp, synthetic construct
  source 1..75: mol_type = other DNA
gaaagctaagcgcggcaagcgcccgacagccttccagttcctgcaagaaatcaagccggaagccgtagcgtacat

SEQ ID NO: 185774 - DNA, 75 bp, synthetic construct
  source 1..75: mol_type = other DNA
ttgctcggtgtcgttgatacggcaatgatggcgcagaattcattaaccgcagcggaatcgctgggattgggcggc

SEQ ID NO: 185775 - DNA, 75 bp, synthetic construct
  source 1..75: mol_type = other DNA
gtggtaatcggtcagagtatctgcggcgctgccttgaagctggcccaggtgatctggaagtccgggttgaaaata

SEQ ID NO: 185776 - DNA, 75 bp, synthetic construct
  source 1..75: mol_type = other DNA
cactaccgtaatcactgccgaaaaacacattgattgcccctcaataatcctgccgtcaacgtcaaaattgctggt

SEQ ID NO: 185777 - DNA, 75 bp, synthetic construct
  source 1..75: mol_type = other DNA
ccccgtggtttagcatacgattttattttagatgcaggttgcactaccagttgcattgaactatgtgcaggtata

SEQ ID NO: 185778 - DNA, 75 bp, synthetic construct
  source 1..75: mol_type = other DNA
atggcccgcgctggagtttcaataccggagatcatgcaagctggtggctggaccaatgtaaatattgtcatgaac

SEQ ID NO: 185779 - DNA, 75 bp, synthetic construct
  source 1..75: mol_type = other DNA
agagaaagccttcgagtgcctggtgtatctgcatcgctataacgacgccacgctgtcgagaatgcgtaccgaata

SEQ ID NO: 185780 - DNA, 75 bp, synthetic construct
  source 1..75: mol_type = other DNA
attacaatctagattttatatttagaaagggtattacttggtctgatgttacgtcaggtagtaatgcttttagag

SEQ ID NO: 185781 - DNA, 75 bp, synthetic construct
  source 1..75: mol_type = other DNA
ggttaactacggcaagtttggcgatctgctggcagatgtcaaagccatcaccggcaatgccccagaggtgatcta

SEQ ID NO: 185782 - DNA, 75 bp, synthetic construct
  source 1..75: mol_type = other DNA
ccacattgagacagatggtccagacgtggcagagcaacttcttatccgtcgcttcccttctattggtcagaataa

SEQ ID NO: 185783 - DNA, 75 bp, synthetic construct
  source 1..75: mol_type = other DNA
atgccaataataaccgcaaaagtatcagatgaacttttggcctatatagacctggtttcaggaggtaatcggtca

SEQ ID NO: 185784 - DNA, 75 bp, synthetic construct
  source 1..75: mol_type = other DNA
ttgcatgaatcactcgctattgaaacgctgatcctcctacgttcgatagcagaaccgggtaaaaccaaagcggca

SEQ ID NO: 185785 - DNA, 75 bp, synthetic construct
  source 1..75: mol_type = other DNA
cctggaaaacgaactggatggcttcaccttcgaagacaataaagacgaccagttcgctgtcggtgcccaggctga

SEQ ID NO: 185786 - DNA, 75 bp, synthetic construct
  source 1..75: mol_type = other DNA
tttaagtaaactgagcgctgagggttatgccatagaaggcgccacaccgctatttagcgatgtggatgagttata

SEQ ID NO: 185787 - DNA, 75 bp, synthetic construct
  source 1..75: mol_type = other DNA
ggacgacaatgccaggaattaatcaagaaaatctacaaaatatccttattccagatttttcaacttgtgacattg

SEQ ID NO: 185788 - DNA, 75 bp, synthetic construct
  source 1..75: mol_type = other DNA
atgattatcgctgacgggtggacagtcaatgacgtattaccgggtagattcctctctcctacgactttcacaatc

SEQ ID NO: 185789 - DNA, 75 bp, synthetic construct
  source 1..75: mol_type = other DNA
taattgtttagcgcaacaactcgaagatggtgttaataagatgagtttaagacttacagatctaaaatcaaagat

SEQ ID NO: 185790 - DNA, 75 bp, synthetic construct
  source 1..75: mol_type = other DNA
tccgtaaagttggtgactctgattcagcaacaaagtggttagatccaaatgcagtggcatttgcagagattagaa

SEQ ID NO: 185791 - DNA, 75 bp, synthetic construct
  source 1..75: mol_type = other DNA
actattgtttgtaaattcatattacgtaatgcttctgaatttttcgtgtgatggttttaaatactatgatgttta

SEQ ID NO: 185792 - DNA, 75 bp, synthetic construct
  source 1..75: mol_type = other DNA
tttatttttcccttttatttttgtgtctattttcttttattaagtatcgactttacgaacttaatcatagaagct

SEQ ID NO: 185793 - DNA, 75 bp, synthetic construct
  source 1..75: mol_type = other DNA
catcctggccagcgctgacctgataaagctgaatcgtaagaaagccatcgacactactctgtcgcggtttagcgg

SEQ ID NO: 185794 - DNA, 75 bp, synthetic construct
  source 1..75: mol_type = other DNA
cgtcaataaagatcacaaaagataaaacgacatatttgcatcctgacttaatagaaaagatgtggcgaaaaataa

SEQ ID NO: 185795 - DNA, 75 bp, synthetic construct
  source 1..75: mol_type = other DNA
ttatttattgcgctttctttcagtcaggccgatttaagcccggaagcgttaatgaagccactgctggtgaacgct

SEQ ID NO: 185796 - DNA, 75 bp, synthetic construct
  source 1..75: mol_type = other DNA
acagggagagaacaggtctacatccacgcgcagaagaacatggataccgaagtgctcaacgaccgtaccaccacc

SEQ ID NO: 185797 - DNA, 75 bp, synthetic construct
  source 1..75: mol_type = other DNA
tggtactcagcctgcccgcggacaccggctacccggacccgcgcggggagctggacgcggaagccgcccccggcc

SEQ ID NO: 185798 - DNA, 75 bp, synthetic construct
  source 1..75: mol_type = other DNA
ggtttaatatgtaaggataatagtggcagatatttctcaacagcacctaaccgaggagaaagaaaaggatcatat

SEQ ID NO: 185799 - DNA, 75 bp, synthetic construct
  source 1..75: mol_type = other DNA
gagcagatgcaaaaccagatggacccggtgtacacgccggcgcgaaaaattcacctgtaccactgcgaccatcgc

SEQ ID NO: 185800 - DNA, 75 bp, synthetic construct
  source 1..75: mol_type = other DNA
atggcgcaacgtaaaactttatataaattaacatggttaacatttatgccactattgttgataaattcatatttc

SEQ ID NO: 185801 - DNA, 75 bp, synthetic construct
  source 1..75: mol_type = other DNA
gatgcatcagggcgaaattgcccactctgcactgaccgggcgcgatattaatgtcgagactattatgcgcgttgc

SEQ ID NO: 185802 - DNA, 75 bp, synthetic construct
  source 1..75: mol_type = other DNA
tcatcgtttgggatatggtggacatcgggatgatcttcagcgcgtaggtggagcaggagatggtggtatcgatgg

SEQ ID NO: 185803 - DNA, 75 bp, synthetic construct
  source 1..75: mol_type = other DNA
gatggtgctgaacttatcgaatatcctgaaagtgtattttgccagccaggaatgttttataacaaagatgatggt

SEQ ID NO: 185804 - DNA, 75 bp, synthetic construct
  source 1..75: mol_type = other DNA
gtaattcttcgtctgatttttcagagaagaatggttattatatttttgattgcccgaaacacggtgtattccata

SEQ ID NO: 185805 - DNA, 75 bp, synthetic construct
  source 1..75: mol_type = other DNA
taaagaaaaggttgattttaatttattaggttttattgacaatgagaatgttagggcaatttcttattccgagat

SEQ ID NO: 185806 - DNA, 75 bp, synthetic construct
  source 1..75: mol_type = other DNA
ctgaaagaaaacggtgtgaccgagtggagtccgctgttcagcgagccgcatccttcccgtgagttttgtgtccag

SEQ ID NO: 185807 - DNA, 75 bp, synthetic construct
  source 1..75: mol_type = other DNA
tgttttttcttaggctcattagtttggatagataaaatccactccttcagtcttacaagtcatggttacgaaaga

SEQ ID NO: 185808 - DNA, 75 bp, synthetic construct
  source 1..75: mol_type = other DNA
aaaaaatcgaaggaaaaagaataggcagctactacccggttcaggaagctcaagctgaagcaatctaccaacatt

SEQ ID NO: 185809 - DNA, 75 bp, synthetic construct
  source 1..75: mol_type = other DNA
atggttttaaatactatgttgtttactcttggggttactgcttatttataaaatacgggcattccaatagatgcc

SEQ ID NO: 185810 - DNA, 75 bp, synthetic construct
  source 1..75: mol_type = other DNA
tacgggcgcagggggtagagatgtacgcagataacctcgacaacggagcagacgacgcagaacgaggtggttttg

SEQ ID NO: 185811 - DNA, 75 bp, synthetic construct
  source 1..75: mol_type = other DNA
ggtaatcgtgtttcacacatcactcgcacggcttccggtgctaatgctggcggcggaaacctcaccgatcgcggc

SEQ ID NO: 185812 - DNA, 75 bp, synthetic construct
  source 1..75: mol_type = other DNA
gggaactcgcgtatcgtctcgttattgcgccgccccaactcggtttatccccgctggcgcggggaactcagtatg

SEQ ID NO: 185813 - DNA, 75 bp, synthetic construct
  source 1..75: mol_type = other DNA
gtgcctgttattgccattatcgccattgttatcatcgtcatcattctgaacaaaactggagtgtccgacagcctc

SEQ ID NO: 185814 - DNA, 75 bp, synthetic construct
  source 1..75: mol_type = other DNA
gtttaatgaataaagatcaaagcaatatcgttttaggcaccgctactccagatatcgacctggcaccaacctcca

SEQ ID NO: 185815 - DNA, 75 bp, synthetic construct
  source 1..75: mol_type = other DNA
caaattgatcaggctacacctgtaacgccaggcgcagttacggcgaatgcgacctacgtgctggattataaataa

SEQ ID NO: 185816 - DNA, 75 bp, synthetic construct
  source 1..75: mol_type = other DNA
gactccatcagggagtcatggacaagtatcttaaaacgcgcaggtctgagacacagaaaatcgtatcaatccagg

SEQ ID NO: 185817 - DNA, 75 bp, synthetic construct
  source 1..75: mol_type = other DNA
cctttcaggtgacggatatggaggtcgttgtgatccgttgtctattttggttcttactgcaaaacaccttgaaaa

SEQ ID NO: 185818 - DNA, 75 bp, synthetic construct
  source 1..75: mol_type = other DNA
ttggaaaagcttcgggctgatgtatctccagttgttcaggataatatatctgaaataattagttcattgcatagc

SEQ ID NO: 185819 - DNA, 75 bp, synthetic construct
  source 1..75: mol_type = other DNA
gcattgtatgaccatcttgttcttggtgattcaagaaaagttatctgtgagcgtcacagtgtaaataatggctat

SEQ ID NO: 185820 - DNA, 75 bp, synthetic construct
  source 1..75: mol_type = other DNA
cacagctcgacgaagagattcgttacaccatgcgcaccacagttaacgcgcaaacgcgcgaccgccgcaaaggcg

SEQ ID NO: 185821 - DNA, 75 bp, synthetic construct
  source 1..75: mol_type = other DNA
atgagtgcgcaagtttcactggagttacatcaccgcattagccagtttctctttcacgaagccagtctgctggat

SEQ ID NO: 185822 - DNA, 75 bp, synthetic construct
  source 1..75: mol_type = other DNA
agccgctcctggcgtgcctggctatggccgggatggggcaatcccgagcactcctgcttgcgtacgcgtccggca

SEQ ID NO: 185823 - DNA, 75 bp, synthetic construct
  source 1..75: mol_type = other DNA
tgcgcagcctgagcccacgcgagctggcgggtgtgttcgcgcacgaggtcgcgcacatcgctaatgaggatgggg

SEQ ID NO: 185824 - DNA, 75 bp, synthetic construct
  source 1..75: mol_type = other DNA
taataacctggccccaagaattattcatttaggctttggtgcatttcaccgtgcgcatcagggcgtgtatgccga

SEQ ID NO: 185825 - DNA, 75 bp, synthetic construct
  source 1..75: mol_type = other DNA
tcttgatcaggctgctaccggcgatgcccctatccagtggaaagcatctctgccggttactgtttcttaccagta

SEQ ID NO: 185826 - DNA, 75 bp, synthetic construct
  source 1..75: mol_type = other DNA
aatgttggcgttaccagcctgacgtttatgaaaaacaatggcgaaatgccggttgatgctgatctgaatacgttt

SEQ ID NO: 185827 - DNA, 75 bp, synthetic construct
  source 1..75: mol_type = other DNA
gttcatttgattacggcacgaagacagtcagtacgtttaaccatggcacaaaatcaacgaacaatacgggcaatc

SEQ ID NO: 185828 - DNA, 75 bp, synthetic construct
  source 1..75: mol_type = other DNA
aaactggtacatgaggtctggcgtcacgctctgaataaagtcagtgtggataataagaataaaaactatattgtg

SEQ ID NO: 185829 - DNA, 75 bp, synthetic construct
  source 1..75: mol_type = other DNA
agcggtgaaatgccggcacatatcctcccgaaaagtgctgttgagacgtcagtcatcgcacaggtgatcatcaat

SEQ ID NO: 185830 - DNA, 75 bp, synthetic construct
  source 1..75: mol_type = other DNA
ctggaagtctttgaaggcggtctgtatgggaggatgcaacgttataccacccgtagtgggactatgtacattcgc

SEQ ID NO: 185831 - DNA, 75 bp, synthetic construct
  source 1..75: mol_type = other DNA
tgggcggcttctggatgcgtgaacttggtctgtatgatgatgccggaacactgattgcggtcgctaacatggcag

SEQ ID NO: 185832 - DNA, 75 bp, synthetic construct
  source 1..75: mol_type = other DNA
gagcatgaatttataaagcctcgttataaacttgtcggcgagtattatatcgaaattgaaaatatctatcgctca

SEQ ID NO: 185833 - DNA, 75 bp, synthetic construct
  source 1..75: mol_type = other DNA
gacttcatagaatatgttcctttggggcagccacgtaatgactcgattgttctcaaagattcagtagaaactggc

SEQ ID NO: 185834 - DNA, 75 bp, synthetic construct
  source 1..75: mol_type = other DNA
acaggcatggcaggaatatcccaaacgtgctggtggcaattccaagtcagcagccttcaaagcctggaaagcacg

SEQ ID NO: 185835 - DNA, 75 bp, synthetic construct
  source 1..75: mol_type = other DNA
atcgtcccttcatcggatattgacctgggggagaccgagcttccggtgctcggcgagatcacctggcaggcttat

SEQ ID NO: 185836 - DNA, 75 bp, synthetic construct
  source 1..75: mol_type = other DNA
ataatcatgccaatgttatattgcaactgggctgtgtggaaaaattaagtaaaaaatacaatatcatcattacag

SEQ ID NO: 185837 - DNA, 75 bp, synthetic construct
  source 1..75: mol_type = other DNA
gcatatgagtttgtaaaacctcgttatgcatttgtcggggagtattctgttgggattgaaaatacgtatcgctca

SEQ ID NO: 185838 - DNA, 75 bp, synthetic construct
  source 1..75: mol_type = other DNA
atttttttggccgattaccactactgacaaatgcattactattattaataatttgtaggatattttatagatatg

SEQ ID NO: 185839 - DNA, 75 bp, synthetic construct
  source 1..75: mol_type = other DNA
caagctactgacgagatgtcagcagcgttaacgcagtttatgaagaaaaaatttacgaagaacaactggccaatt

SEQ ID NO: 185840 - DNA, 75 bp, synthetic construct
  source 1..75: mol_type = other DNA
gtgtattagaaagagccagggaagtttctcgcttagaggacattatcacagaagataatgaagacattgaagctg

SEQ ID NO: 185841 - DNA, 75 bp, synthetic construct
  source 1..75: mol_type = other DNA
actgtacttattagaaaaaacggcaagatcgattatagcgtattcgcaacatcgctaaaaaaaccattttttgtc

SEQ ID NO: 185842 - DNA, 75 bp, synthetic construct
  source 1..75: mol_type = other DNA
gattgtttcttatagtttagtaagcacaaccattcattctttattctttacggtaatggcgttttacgtaaaaat

SEQ ID NO: 185843 - DNA, 75 bp, synthetic construct
  source 1..75: mol_type = other DNA
gttttctggctctggctgcataaaacccatgccggacgtaacgtgtttttaattgggcaaagcccgcgcgtggcg

SEQ ID NO: 185844 - DNA, 75 bp, synthetic construct
  source 1..75: mol_type = other DNA
gcgctgcgggatgatattgacctgaaaaaatgggcggtaaatcagtcggccgggcagtacatccggtcacatgag

SEQ ID NO: 185845 - DNA, 75 bp, synthetic construct
  source 1..75: mol_type = other DNA
tcgttaggttttggcaagaaattaacttttctcaactaacaaaaaaaatatggtgcccttacaacaaaggtggtg

SEQ ID NO: 185846 - DNA, 75 bp, synthetic construct
  source 1..75: mol_type = other DNA
ctcgacgatggcgttaaggttaactacggcaagtttggcgatctgctggcagatgttaaagccatcaccggcaat

SEQ ID NO: 185847 - DNA, 75 bp, synthetic construct
  source 1..75: mol_type = other DNA
taatccagggctggtgacgctttcactccggactttccgtgagcagatgcagtggctggctgaaaatggctggaa

SEQ ID NO: 185848 - DNA, 75 bp, synthetic construct
  source 1..75: mol_type = other DNA
aaaaacatagatcttggacaagtcacgacaacccatataaaccgggagcatcatagcaataaagtggccgtcgac

SEQ ID NO: 185849 - DNA, 75 bp, synthetic construct
  source 1..75: mol_type = other DNA
tttactgggttgcgctcccgcttacgacgcaaaattccctttcacaataccaacccgaatggcagtgctgggaac

SEQ ID NO: 185850 - DNA, 75 bp, synthetic construct
  source 1..75: mol_type = other DNA
tttatggattcaaaaatcagttcaataaaaaaatcacacaaaaaatgatctccgatctaaaagcaagtaatgcac

SEQ ID NO: 185851 - DNA, 75 bp, synthetic construct
  source 1..75: mol_type = other DNA
ctcatattatcaaccatggccagcagaatgttcatggcggggtatctaatggaagtcttattgaatcgggtggat

SEQ ID NO: 185852 - DNA, 75 bp, synthetic construct
  source 1..75: mol_type = other DNA
tctggttatcaggacatcatgcaaggaagtctggcgacgaacacaaccataaatggtggacgacagtatgttgaa

SEQ ID NO: 185853 - DNA, 75 bp, synthetic construct
  source 1..75: mol_type = other DNA
ccacaggcaccaatatcaacagcggaacgcaaaatatcaaaagcggcgggaaagctgacacaacaattatatcct

SEQ ID NO: 185854 - DNA, 75 bp, synthetic construct
  source 1..75: mol_type = other DNA
aactgccagataagcgaaaccgacatcccaaacgtatttgctgtgcgggtaaattatctgctttatcgggcacaa

SEQ ID NO: 185855 - DNA, 75 bp, synthetic construct
  source 1..75: mol_type = other DNA
tcgacggctgtgggattgcctggctgccggagtatgccatccaacaagaaattcgcagcgggcagctcgttgtgc

SEQ ID NO: 185856 - DNA, 75 bp, synthetic construct
  source 1..75: mol_type = other DNA
taacggtacgacggtgagctgtacgaatagtgaaggtgcattctccatccacaatcacgtggcagacaatgtgtt

SEQ ID NO: 185857 - DNA, 75 bp, synthetic construct
  source 1..75: mol_type = other DNA
ggaatgctcaatctgacaaatcttagacagttccgaatcccaattccatgcatagctgaacaaaaacgaattgta

SEQ ID NO: 185858 - DNA, 75 bp, synthetic construct
  source 1..75: mol_type = other DNA
cctgtccagtcggttccccttgagggcatggatattgcggtcgatatgccagacggcacagttaaaccgggtatc

SEQ ID NO: 185859 - DNA, 75 bp, synthetic construct
  source 1..75: mol_type = other DNA
aggtgctctgctactgttatgaaggtaacctgctggcgctggctcaggcactggagcgtttatcgctgctctggc

SEQ ID NO: 185860 - DNA, 75 bp, synthetic construct
  source 1..75: mol_type = other DNA
attgtaattgcttcaaacaacggcggagttaaagatatactaggtagcaaattctcagatttaacttttgaacct

SEQ ID NO: 185861 - DNA, 75 bp, synthetic construct
  source 1..75: mol_type = other DNA
aaggatgtttgtccggcagaaaaatggatcgatttacgggctgaaggtagtaaaactcacagagaatggcgtatt

SEQ ID NO: 185862 - DNA, 75 bp, synthetic construct
  source 1..75: mol_type = other DNA
gcagagggtgcccaaaaatcgcgaatcttgaaccccggtgatttcgtcatttctaactctatgagctttggcaga

SEQ ID NO: 185863 - DNA, 75 bp, synthetic construct
  source 1..75: mol_type = other DNA
taaccgtatcgcccgtgacgcgcactatctttaccggtatgaccgtcacggcaggctgacagagaaaaccgacct

SEQ ID NO: 185864 - DNA, 75 bp, synthetic construct
  source 1..75: mol_type = other DNA
actaccactacgacagccagcaccgtctggtgttcaacacgcggatacagcaaggggagccactggtcgagagcc

SEQ ID NO: 185865 - DNA, 75 bp, synthetic construct
  source 1..75: mol_type = other DNA
actaccactacgacagccagcaccgactggtgttcgacacgcggatacagcaaggggagccaccggtcgagagcc

SEQ ID NO: 185866 - DNA, 75 bp, synthetic construct
  source 1..75: mol_type = other DNA
actaccactacgacagccagcaccgactggtgttccacacgcggatacagcaaggggagccacgggtcgagagcc

SEQ ID NO: 185867 - DNA, 75 bp, synthetic construct
  source 1..75: mol_type = other DNA
cggacggcagcgtcacgcacagcgggtatgacgcggcaggaaggctcacggcgcagacggacgcggcgggacggc

SEQ ID NO: 185868 - DNA, 75 bp, synthetic construct
  source 1..75: mol_type = other DNA
tttatctcgcaacacctgatggacgatttgaggcgcttaataataaaggagaatatatttttatcagaaatagtg

SEQ ID NO: 185869 - DNA, 75 bp, synthetic construct
  source 1..75: mol_type = other DNA
actaccactacgacagccagcaccgtctggtgttctacacgcggatacagcaaggggagccacaggtcgagagcc

SEQ ID NO: 185870 - DNA, 75 bp, synthetic construct
  source 1..75: mol_type = other DNA
ggcgggtacgtgacctgacggggtggatgtcgctgtcgcgtaaaccggaggtaacgtggtacggctgggacggtg

SEQ ID NO: 185871 - DNA, 75 bp, synthetic construct
  source 1..75: mol_type = other DNA
gccataccagtgaaggccaccgcgtgtcggtccactaccctgtgccggatggcggcggaggaaggtatcttcttt

SEQ ID NO: 185872 - DNA, 75 bp, synthetic construct
  source 1..75: mol_type = other DNA
caatgtggctggttcgcggtggtaaggcagcgcagccggacggccacacgctggcacggctgtgggcgtcgctgc

SEQ ID NO: 185873 - DNA, 75 bp, synthetic construct
  source 1..75: mol_type = other DNA
atacctggatttggataatagatacaacagatgaagaagaacaatgtatgatgaataaggcaatagaccttaata

SEQ ID NO: 185874 - DNA, 75 bp, synthetic construct
  source 1..75: mol_type = other DNA
cccggcgggcaaccggctgccggacccggagctgcacccggacagtacactcacagtgtggccggataaccgcat

SEQ ID NO: 185875 - DNA, 75 bp, synthetic construct
  source 1..75: mol_type = other DNA
actaatttatgccgtatctggtgtacctggattgattgctgcaaacagcattactaacagtgcttaccagttcgg

SEQ ID NO: 185876 - DNA, 75 bp, synthetic construct
  source 1..75: mol_type = other DNA
tcccattgtccagggttcggcaggtgtaagaattggcgcgccaaccggcgtggcgtgctcggtgtgtccgggcgg

SEQ ID NO: 185877 - DNA, 75 bp, synthetic construct
  source 1..75: mol_type = other DNA
ttgggatgatatctgggaagacgggctggaagctgaaaagctacgggaagcattgctgtcattagaacacgcttt

SEQ ID NO: 185878 - DNA, 75 bp, synthetic construct
  source 1..75: mol_type = other DNA
agatgacggcggttcaccgtgaggaaggtatcagcctttaccgcagctatgacaaccgtggccggttaatctcag

SEQ ID NO: 185879 - DNA, 75 bp, synthetic construct
  source 1..75: mol_type = other DNA
atgcactgatactcaacgacaacggcggacggagcatttgctttgagccgctgctgccgggtgaggcggtgttca

SEQ ID NO: 185880 - DNA, 75 bp, synthetic construct
  source 1..75: mol_type = other DNA
tgtgcccacattgttctgcgttagctctgttctccctacagttaaatgcgccgtcaggtggtaaaggctaccgca

SEQ ID NO: 185881 - DNA, 75 bp, synthetic construct
  source 1..75: mol_type = other DNA
gaccgcgcgcaagaaatattttacaacatcagcggagaagcaaaatgctaacgccgccagggagaaaaagcagga

SEQ ID NO: 185882 - DNA, 75 bp, synthetic construct
  source 1..75: mol_type = other DNA
ccccgtggttgcccgttcgttttaaagacggaacgacaggcaaactggcaccagtcgatctggctgatgaaaatg

SEQ ID NO: 185883 - DNA, 75 bp, synthetic construct
  source 1..75: mol_type = other DNA
catcaccacgctgaccaacgagaacggcagccggagtgagtttacctacgatgcgcttgaccggctggtacagca

SEQ ID NO: 185884 - DNA, 75 bp, synthetic construct
  source 1..75: mol_type = other DNA
ccgacccggcgggcaaccgcctgccggacccggagctgcatcctgacagcacgctcacggtgtggccggataacc

SEQ ID NO: 185885 - DNA, 75 bp, synthetic construct
  source 1..75: mol_type = other DNA
gccacctgagcgaaggccatcaggtggcggtgcattacggttatgatgataagggccgcctggccggcgaacgcc

SEQ ID NO: 185886 - DNA, 75 bp, synthetic construct
  source 1..75: mol_type = other DNA
gacaccacgcgtatccagacggtatacgagccggggagcttctcaccgctcatccgcatcgagacagagaacggc

SEQ ID NO: 185887 - DNA, 75 bp, synthetic construct
  source 1..75: mol_type = other DNA
acgttatcattatgacctgaccggaaaactcacgcagagtgaagatgaggggcttgtcaccctctggcactacga

SEQ ID NO: 185888 - DNA, 75 bp, synthetic construct
  source 1..75: mol_type = other DNA
gaatggcgaaacgggtatggcggcgggagcgtgacctgacggggtggatgtcgctgtcgcgtaaaccggaggtga

SEQ ID NO: 185889 - DNA, 75 bp, synthetic construct
  source 1..75: mol_type = other DNA
tttaagacaacctcaataggtaactgcgacatttgcggtaggcagagcgatgctcttttgggcttgatgtcactc

SEQ ID NO: 185890 - DNA, 75 bp, synthetic construct
  source 1..75: mol_type = other DNA
gtgtccactattctctcaggaatttcaggatctgccagacggtgctgagacgacgcttactctggctcaggggct

SEQ ID NO: 185891 - DNA, 75 bp, synthetic construct
  source 1..75: mol_type = other DNA
aaataatacagttacctataactccacgcctttaagtgtttctaaaaaaatcactcccagtgagtcaaagtattg

SEQ ID NO: 185892 - DNA, 75 bp, synthetic construct
  source 1..75: mol_type = other DNA
ttaatgtttagtaggcagttagcaatagatgtaccatttaataccgaattaaaattccatcaagatattgattgg

SEQ ID NO: 185893 - DNA, 75 bp, synthetic construct
  source 1..75: mol_type = other DNA
catcaagatatagattggctactgcgagtatctcaaagtggtattgatttcgagtttattcaatctgacttaatt

SEQ ID NO: 185894 - DNA, 75 bp, synthetic construct
  source 1..75: mol_type = other DNA
gcaaaacgggtctggcggcgggagcgtgacctgacggggtggatgtcgctgtcgcgtaaaccggaggtgacgtgg

SEQ ID NO: 185895 - DNA, 75 bp, synthetic construct
  source 1..75: mol_type = other DNA
cagctgtcgaaacggggacgatgaaccgctcagcctcaatactgatccaggcgggttttaattcacgacaggcgg

SEQ ID NO: 185896 - DNA, 75 bp, synthetic construct
  source 1..75: mol_type = other DNA
gggcggtctgggctatcgtcttccttgggctatggaggcgttgcgggtacgtgccgccgccaacggtgataccgt

SEQ ID NO: 185897 - DNA, 75 bp, synthetic construct
  source 1..75: mol_type = other DNA
ttccgcggtggtaagcatgagaatttcaacagtaataaccaacggtcatactggtattcaacctgcagtgacccg

SEQ ID NO: 185898 - DNA, 75 bp, synthetic construct
  source 1..75: mol_type = other DNA
atgaagacctccatcaccgaaacccgcaatgaaatcacacagacggtcagtaaaacgctggaggaccagagcgcc

SEQ ID NO: 185899 - DNA, 75 bp, synthetic construct
  source 1..75: mol_type = other DNA
ggctgctggtcgtgaagatgaatggctccctattcgcccgggcaccgatgccgcgctggttgcgggtattgccta

SEQ ID NO: 185900 - DNA, 75 bp, synthetic construct
  source 1..75: mol_type = other DNA
ctcgccgttcttgctggtggtgaagtgcagtttgtaaaactggcaggtaaagcactgatatctgaagatggcgag

SEQ ID NO: 185901 - DNA, 75 bp, synthetic construct
  source 1..75: mol_type = other DNA
gataccgaagtgctcaacgaccgtaccaccaccgtaaaacacgatcaccgcgaaaccgtaaaaaatgaccagacg

SEQ ID NO: 185902 - DNA, 75 bp, synthetic construct
  source 1..75: mol_type = other DNA
gggtgctgtagttaagttttactctttccacatcagaaatggctacaagtttaacaatcctccctttgagcacga

SEQ ID NO: 185903 - DNA, 75 bp, synthetic construct
  source 1..75: mol_type = other DNA
tgggcagcggatttaatgagctgaagtttgatgatgcgacagggagagaacaggtctacatccacgcgcagaaga

SEQ ID NO: 185904 - DNA, 75 bp, synthetic construct
  source 1..75: mol_type = other DNA
cgagtacacgcgggacaggctgcaccgtgagacggtgcgcagcttcggcagcatggcaggcagtaatgccgcata

SEQ ID NO: 185905 - DNA, 75 bp, synthetic construct
  source 1..75: mol_type = other DNA
ttggccccggctggaaagcgccttctgatatccgcttacagatacgcgatgatgcactggtactcaacgacaacg

SEQ ID NO: 185906 - DNA, 75 bp, synthetic construct
  source 1..75: mol_type = other DNA
aaattaccaattaataaaattatcaaacctatgctgccattctatgccgtgatggtattggtgctggcaatggtg

SEQ ID NO: 185907 - DNA, 75 bp, synthetic construct
  source 1..75: mol_type = other DNA
ggaaatcttctgtgatgaacatggccgcgtgcgggtgaaatttaactgggaccgctataacccgtcaaaccagga

SEQ ID NO: 185908 - DNA, 75 bp, synthetic construct
  source 1..75: mol_type = other DNA
tttaaacgacccggctgggcagggcgttttgatcaggaaggccagtaccaggattaccagcgcacgcagtatgaa

SEQ ID NO: 185909 - DNA, 75 bp, synthetic construct
  source 1..75: mol_type = other DNA
tcaggcaccacgctggataaccactttgcggtaatcccggcagaccggacatggcggccacagccgttgctgaaa

SEQ ID NO: 185910 - DNA, 75 bp, synthetic construct
  source 1..75: mol_type = other DNA
atgttgattcatatcgaaaatgcgacacctgagaaggtgctaaataattcatttgccatagcggttgagaatata

SEQ ID NO: 185911 - DNA, 75 bp, synthetic construct
  source 1..75: mol_type = other DNA
accagtgctttctgataaatggtataagttaggtaagaatttctttagttggagttgtggtccatataaaaaagc

SEQ ID NO: 185912 - DNA, 75 bp, synthetic construct
  source 1..75: mol_type = other DNA
accgctataacccgtcaaaccaggaaagttcatgctggatccgtgtggcacaggcgtgggcaggcaccggctttg

SEQ ID NO: 185913 - DNA, 75 bp, synthetic construct
  source 1..75: mol_type = other DNA
ttggatgattatctttggaagtatggggataatttatcttcatcaattgatatattgattaatggcaaggaggca

SEQ ID NO: 185914 - DNA, 75 bp, synthetic construct
  source 1..75: mol_type = other DNA
agcgggaaaagctgaaggcggacattgtagctttcgtgcgtatgagtgggcgggcaacgcttcagcaactggcga

SEQ ID NO: 185915 - DNA, 75 bp, synthetic construct
  source 1..75: mol_type = other DNA
ggattttctgactcgctttgcgcagtttaaggacagggcagtgatcgaagggaaaactgaaccgccccgggtttc

SEQ ID NO: 185916 - DNA, 75 bp, synthetic construct
  source 1..75: mol_type = other DNA
aaaattaccagacgctgcataagcagcggtatgaggcttatcagcaattgcaggcgctggcaaaaaactgtcggg

SEQ ID NO: 185917 - DNA, 75 bp, synthetic construct
  source 1..75: mol_type = other DNA
attcttgatgcgcaatccgctctgggcgtggtcaataaaaatatcgtcattagcggcggtgccggtcagcaccca

SEQ ID NO: 185918 - DNA, 75 bp, synthetic construct
  source 1..75: mol_type = other DNA
aaaataactgcttcaatccttactttttttacgtctgcgatttgtttttataatgactctaaagttgcattactt

SEQ ID NO: 185919 - DNA, 75 bp, synthetic construct
  source 1..75: mol_type = other DNA
ctcattcactgcagaagactgttggagtttaaggaatgcatgtttgcatgaaggcgttgatgaaacgaagctaag

SEQ ID NO: 185920 - DNA, 75 bp, synthetic construct
  source 1..75: mol_type = other DNA
cctgaatgcctgccattcgggagccgttcatctctccggcccaatccctaaacttcacgacctgtacggtgaact

SEQ ID NO: 185921 - DNA, 75 bp, synthetic construct
  source 1..75: mol_type = other DNA
gcgcggggaacactcatcattatctggattatctaattcgtcagccggtttatccccgctggcgcggggaacacg

SEQ ID NO: 185922 - DNA, 75 bp, synthetic construct
  source 1..75: mol_type = other DNA
cagcgtcacgatacgccagcgggtagcgaatggctggagaacgtgcggacttatgagaaagaaattttgagtcgc

SEQ ID NO: 185923 - DNA, 75 bp, synthetic construct
  source 1..75: mol_type = other DNA
tttgaccgggtgcatatcggcctcgacttcttcgatgcctctatcaaccgcattgccgcgtgggtcattggtaca

SEQ ID NO: 185924 - DNA, 75 bp, synthetic construct
  source 1..75: mol_type = other DNA
gacgatgcgatgggaatgcagtacctgattcctggctggacgttcgataacaagcgcccgtgcatggtgcgttaa

SEQ ID NO: 185925 - DNA, 75 bp, synthetic construct
  source 1..75: mol_type = other DNA
ggtgaaaataccactttaagaaaactaatggccattttttattattttaatttctctacgtttataaaaaataat

SEQ ID NO: 185926 - DNA, 75 bp, synthetic construct
  source 1..75: mol_type = other DNA
ttctcgacggagttgatgtgtctggtatagactataaaaggcaactatatttaagaggtggttattttggttata

SEQ ID NO: 185927 - DNA, 75 bp, synthetic construct
  source 1..75: mol_type = other DNA
cttcttttgtccatgagcttaagccacttgatgcaatgatctcgaaagcctacaatcctgttggtgattgtctgg

SEQ ID NO: 185928 - DNA, 75 bp, synthetic construct
  source 1..75: mol_type = other DNA
tccttgtatgccgtgttcagcgcagcccaagagatgtttatatagtttatataaaagctgtcccacaatttgcgg

SEQ ID NO: 185929 - DNA, 75 bp, synthetic construct
  source 1..75: mol_type = other DNA
ccatccattgagatggttccgggtattgttaaatttctggagaaaaccaatgagcgaaaaaacgacgttgacaaa

SEQ ID NO: 185930 - DNA, 75 bp, synthetic construct
  source 1..75: mol_type = other DNA
aatcattctctggtcgaatcattatttccgatttaagtattgatatacaaaagaacgagtttgttgttataacag

SEQ ID NO: 185931 - DNA, 75 bp, synthetic construct
  source 1..75: mol_type = other DNA
aataacgattttgttatcataacaggtgcttctggtgttggtaagagcaccttattgaatataattggacttata

SEQ ID NO: 185932 - DNA, 75 bp, synthetic construct
  source 1..75: mol_type = other DNA
tattcagctggcagtgctatgcgccacggaagcagttcgctgacccggttgaccggccagtctgctatgacgccg

SEQ ID NO: 185933 - DNA, 75 bp, synthetic construct
  source 1..75: mol_type = other DNA
ggccgattttctgacctggcgggctaccggtgatttagcgcgttcagtatgcactgttacctgtaaatggacgtg

SEQ ID NO: 185934 - DNA, 75 bp, synthetic construct
  source 1..75: mol_type = other DNA
actcaccatccggtgctgaactacgtcggtggtaaaatttcgcctgaaatggaaacaccgaaaattctctggctg

SEQ ID NO: 185935 - DNA, 75 bp, synthetic construct
  source 1..75: mol_type = other DNA
acgctgaagaatttactggtaccgtcattagattctgttccggcatgggtatatggtgtgacagggaaaataata

SEQ ID NO: 185936 - DNA, 75 bp, synthetic construct
  source 1..75: mol_type = other DNA
aaaacttcagttttattcttaatttcaccattattatgcatgctaattattattgtttcatttttacagcactat

SEQ ID NO: 185937 - DNA, 75 bp, synthetic construct
  source 1..75: mol_type = other DNA
attgtcgggatctgcacagccattttcgttgccagcgtattgtggttaagttcgttagccgccagtcgtatcagc

SEQ ID NO: 185938 - DNA, 75 bp, synthetic construct
  source 1..75: mol_type = other DNA
cgcgacttggggtgaaaacctacctgaacagccatcaccagcgtgacgatggtaaacagcgtgagttccagcctt

SEQ ID NO: 185939 - DNA, 75 bp, synthetic construct
  source 1..75: mol_type = other DNA
cgttaactatgggctgaaagcgctgaacatccatggtgggcaaaagctgacgttagccgaacatggcggagccta

SEQ ID NO: 185940 - DNA, 75 bp, synthetic construct
  source 1..75: mol_type = other DNA
aggggatctctcagggtaaagtagattcgggaattatcactgcggggatgaaagaaacaggcacaggcaacatta

SEQ ID NO: 185941 - DNA, 75 bp, synthetic construct
  source 1..75: mol_type = other DNA
atgatgatggtaattttcttattaaaagaaactgtcagtaatggtgccacccttaattcaacgggctatggattt

SEQ ID NO: 185942 - DNA, 75 bp, synthetic construct
  source 1..75: mol_type = other DNA
gtgtctggaaatataggggcaaatccaaatggaggtaccatcattttcgatacggatattcctgctgcgacgctc

SEQ ID NO: 185943 - DNA, 75 bp, synthetic construct
  source 1..75: mol_type = other DNA
ggctatgccaatcagcacagtaatacacagagtaaccgtgtgggttataaatcagatgggagcatcagcggttac

SEQ ID NO: 185944 - DNA, 75 bp, synthetic construct
  source 1..75: mol_type = other DNA
ctcgatggacatcaaaaagcctgagggttatgtcggtggtcggttcaagaacaactggtatgttgggttcgatag

SEQ ID NO: 185945 - DNA, 75 bp, synthetic construct
  source 1..75: mol_type = other DNA
actcccgcggtctggcagtgctcgaggtgttccgggtagggcaggtcagctcgattttcttcaccaataatctgc

SEQ ID NO: 185946 - DNA, 75 bp, synthetic construct
  source 1..75: mol_type = other DNA
gcagcctgagttcacagataaaacactctccaggaaacccggggcggttcaacaaacgcccttgtggcgcaaact

SEQ ID NO: 185947 - DNA, 75 bp, synthetic construct
  source 1..75: mol_type = other DNA
gggcttaatgcacgctacaatgcgttaaccagcattagcccaaatgcggaagtcagcctcgataatacgcagggg

SEQ ID NO: 185948 - DNA, 75 bp, synthetic construct
  source 1..75: mol_type = other DNA
cattagggcgaaagtggtagaacgaatccagcaattgcgactggaggtatcgcaacttaagctgattcaacaatg

SEQ ID NO: 185949 - DNA, 75 bp, synthetic construct
  source 1..75: mol_type = other DNA
gcgagtggcgtatccgcagtgatgaattgttggagttaatcaaccagatccgcaaggcggaagggttaaatgaac

SEQ ID NO: 185950 - DNA, 75 bp, synthetic construct
  source 1..75: mol_type = other DNA
acgctcgatctcagccaaagcgttgataatgagtattactgtctgctgctggcgaaagaacttgggttgaatgtt

SEQ ID NO: 185951 - DNA, 75 bp, synthetic construct
  source 1..75: mol_type = other DNA
ttgttaccatattaaaaaatagtaatatagtaattgggttattgtcactcatgttatttccaatcttatgtataa

SEQ ID NO: 185952 - DNA, 75 bp, synthetic construct
  source 1..75: mol_type = other DNA
tttaatgcatttccaaaggaaaagtttattacagaagacgcatattggttggacctcgttggggaaaaaattttc

SEQ ID NO: 185953 - DNA, 75 bp, synthetic construct
  source 1..75: mol_type = other DNA
gatttttcgggagcctgaacgtggaatggccatgcccggcatgtggccagaaaacgctgataattgatagcgaga

SEQ ID NO: 185954 - DNA, 75 bp, synthetic construct
  source 1..75: mol_type = other DNA
acacgcgccgtgtaacttgtgcgcagcagattccgccggtttatccccgctggcgcggggaacaccgattattcc

SEQ ID NO: 185955 - DNA, 75 bp, synthetic construct
  source 1..75: mol_type = other DNA
atgattcagtcgcaaattaaccgcaatattcgtcttgatcttgccgatgccattttgctcagcaaagctaaaaaa

SEQ ID NO: 185956 - DNA, 75 bp, synthetic construct
  source 1..75: mol_type = other DNA
tgtgatgtcgttgataaatggtccgcaatgctaccgatcaaaatattgcgacttgataaaaatgttgggctagga

SEQ ID NO: 185957 - DNA, 75 bp, synthetic construct
  source 1..75: mol_type = other DNA
caccgatgatatttgtcatcctcagcgattcgaaaaacaaattttacaatttgaaaatgataatgatctcgtgct

SEQ ID NO: 185958 - DNA, 75 bp, synthetic construct
  source 1..75: mol_type = other DNA
tgcgcatgcctctctctgccttgagttaattttttatattagattgaaaaagaataaaaatcaaaagatgtcgat

SEQ ID NO: 185959 - DNA, 75 bp, synthetic construct
  source 1..75: mol_type = other DNA
tcctgaggaattagcaaatatatttaataaaaaacataaagaacatatgaatgatcctctattacatctaatccg

SEQ ID NO: 185960 - DNA, 75 bp, synthetic construct
  source 1..75: mol_type = other DNA
atgatattgaatgagttgcacaaacatgtttttttaaaggacgatgcgataaccccttgtatcttccttggggat

SEQ ID NO: 185961 - DNA, 75 bp, synthetic construct
  source 1..75: mol_type = other DNA
atccgctcagggaggcgaactggcgttgaaaacactctgggaagcggtgccgtcgatatttacccgactggcaga

SEQ ID NO: 185962 - DNA, 75 bp, synthetic construct
  source 1..75: mol_type = other DNA
ttgtatttcaaccttgatacaagcttctgtcatatatttgatttttacactgaagaaaatctaactaattatttg

SEQ ID NO: 185963 - DNA, 75 bp, synthetic construct
  source 1..75: mol_type = other DNA
gatgtatttttgaccttgaagcatatgaagcaggactggtaccccatgtctatgtttgctttagattaaaaaatg

SEQ ID NO: 185964 - DNA, 75 bp, synthetic construct
  source 1..75: mol_type = other DNA
ctgagccttcaggataaaatatactctttacaaagcgggggagcacaaccgcatatttaccccaaagacctaaat

SEQ ID NO: 185965 - DNA, 75 bp, synthetic construct
  source 1..75: mol_type = other DNA
aagaaacatgttaatattatcgatggattaacgtttacttatcaaaaatgctctgatcttgctcttttttttggt

SEQ ID NO: 185966 - DNA, 75 bp, synthetic construct
  source 1..75: mol_type = other DNA
cagcagaaaaaagccctgatgcagcaattgcttaccgggaaaaaacgcctgctggatgagaatggggtgaggttt

SEQ ID NO: 185967 - DNA, 75 bp, synthetic construct
  source 1..75: mol_type = other DNA
aaaaagacattgataatcaatttgtgcttaccccgcctgttgctgaacaaaagaaaatagcccaaatcctgtcaa

SEQ ID NO: 185968 - DNA, 75 bp, synthetic construct
  source 1..75: mol_type = other DNA
cggatttgtccggcaggatgagcgttatagtcgttatatggcgggagaaagtgtgaaaaattatatcctgcttaa

SEQ ID NO: 185969 - DNA, 75 bp, synthetic construct
  source 1..75: mol_type = other DNA
aaaagaagcagaacaaatcgcgtggttgcaacgtaaattgggcaatgcggcgcgcgttgaagatgtgcatcccat

SEQ ID NO: 185970 - DNA, 75 bp, synthetic construct
  source 1..75: mol_type = other DNA
ctatcacgataatttccttaaaattggtcaagagttgtctgatatagtcttcctgttctttattgtatcaatgct

SEQ ID NO: 185971 - DNA, 75 bp, synthetic construct
  source 1..75: mol_type = other DNA
caaccatacaccgggtgcattgttgctggcgcatacctcttccactctctttagtgaggaaaactgccagctact

SEQ ID NO: 185972 - DNA, 75 bp, synthetic construct
  source 1..75: mol_type = other DNA
acttaaaagcatttgattctagggataaaagcaatgtaatagaggaatctacatttatcagacggatgataaaag

SEQ ID NO: 185973 - DNA, 75 bp, synthetic construct
  source 1..75: mol_type = other DNA
acatttatcagaaggatgataaaggatagaatacaccactctgaagccactgtcgcctatgttgcagctctaggg

SEQ ID NO: 185974 - DNA, 75 bp, synthetic construct
  source 1..75: mol_type = other DNA
cgcgcgttgaagatgtgcatcccatatcggaacggccacagtatttatatgaacgcatcccgtttgcaaggcatc

SEQ ID NO: 185975 - DNA, 75 bp, synthetic construct
  source 1..75: mol_type = other DNA
aaaaaggtgagtttgcatataacaaaggaaactcaaaaacatacgagttcggatgtatttttgaccttgaagcat

SEQ ID NO: 185976 - DNA, 75 bp, synthetic construct
  source 1..75: mol_type = other DNA
gtataccggacagcctgcccgccgtggaatggctgacctacggcagcggttacctggcaggcatgaaactcggcg

SEQ ID NO: 185977 - DNA, 75 bp, synthetic construct
  source 1..75: mol_type = other DNA
gggggatgtccggctttttggtgtagatgatattttgcaggacttaaaacaatttgcccctaccgcttcatatat

SEQ ID NO: 185978 - DNA, 75 bp, synthetic construct
  source 1..75: mol_type = other DNA
tggcccgtggggctggggtttattagcgacgtcgatgagatcctccacttttcggaactcggcgtggtgttcctg

SEQ ID NO: 185979 - DNA, 75 bp, synthetic construct
  source 1..75: mol_type = other DNA
atgaactgattcgtcggagggtgataaaagttaaagaaagcaaaattacctggtcatctttgagtgatcggaagt

SEQ ID NO: 185980 - DNA, 75 bp, synthetic construct
  source 1..75: mol_type = other DNA
aacttcagtgtgagccacaaactcgaaagtttgcacgaaacccaaatattccttcatatgatagtcacacagaat

SEQ ID NO: 185981 - DNA, 75 bp, synthetic construct
  source 1..75: mol_type = other DNA
cgtctctatctatcggctccggtcatattattagatgtttaaatttagcaatagcactaaggaacgtaggggctg

SEQ ID NO: 185982 - DNA, 75 bp, synthetic construct
  source 1..75: mol_type = other DNA
tcaaagcaaaatccagtgcgatgaaaattcttacagccaaaaaaggagtatctgcaaagtatatttttgaagcaa

SEQ ID NO: 185983 - DNA, 75 bp, synthetic construct
  source 1..75: mol_type = other DNA
ttgtaatgcctgatggctcaacgaagggttataagcttgttgttccgggtaattttataattagcttacgatcat

SEQ ID NO: 185984 - DNA, 75 bp, synthetic construct
  source 1..75: mol_type = other DNA
tggggagtggaaatggcttagggcagtagaactgtttaagactatttcgcaaaagaataattctgaggatgtgga

SEQ ID NO: 185985 - DNA, 75 bp, synthetic construct
  source 1..75: mol_type = other DNA
tgggataaggcgatttcggtgacggaaaagcttctcaccaacagtcagcagcagaaaaaagccctgatgcaacaa

SEQ ID NO: 185986 - DNA, 75 bp, synthetic construct
  source 1..75: mol_type = other DNA
gcgatgacgccggatgcggtggtgcgcctggcggaagcggcatatgaaaaatatggcttcaacgatttcaaactg

SEQ ID NO: 185987 - DNA, 75 bp, synthetic construct
  source 1..75: mol_type = other DNA
gtagtttttcgtgcatcgcctactaaagttgacaactcatatttgtacgcggtactcaaaacggaccactataag

SEQ ID NO: 185988 - DNA, 75 bp, synthetic construct
  source 1..75: mol_type = other DNA
tggggtgatcaacgtcttcagagggccgaacggaattacaaaaccaattccccctgtaaatttggcagtaaaatt

SEQ ID NO: 185989 - DNA, 75 bp, synthetic construct
  source 1..75: mol_type = other DNA
tatcttactttcagaccttaacggttgtagaaaaatacttagaaatgcaaaacgatttctaaatggacatacaaa

SEQ ID NO: 185990 - DNA, 75 bp, synthetic construct
  source 1..75: mol_type = other DNA
caacggcggctgttcttcgtagtacactagttggtgataacaccgctgcaaaatatatgatcgaaggctatcgct

SEQ ID NO: 185991 - DNA, 75 bp, synthetic construct
  source 1..75: mol_type = other DNA
gccattaatattccttactgctcattgggcgcggcgttgacatccgaaccacgtgaaaacctgtcattgcaatcc

SEQ ID NO: 185992 - DNA, 75 bp, synthetic construct
  source 1..75: mol_type = other DNA
atctcccacattctgggccggggttcgttgtgattcctgaaaccggaacgctgaacatccaagaaaatgcactct

SEQ ID NO: 185993 - DNA, 75 bp, synthetic construct
  source 1..75: mol_type = other DNA
gtgcaaacggttgatgaggacgggatcggcagcgacagtgaagttaaaaagcagtttgccggagtcgtaactgtt

SEQ ID NO: 185994 - DNA, 75 bp, synthetic construct
  source 1..75: mol_type = other DNA
atcatggtgcatcaccgccgccatctggcagctcgggaagaagagattgccgcaattatcacgttattttcacgc

SEQ ID NO: 185995 - DNA, 75 bp, synthetic construct
  source 1..75: mol_type = other DNA
agttcaacaacaacctctacgagaaaaacggctgtcgattttttgaagtatcggagctggaagcgatggaagaca

SEQ ID NO: 185996 - DNA, 75 bp, synthetic construct
  source 1..75: mol_type = other DNA
aagatgtagtcaaggctatgtgtaagtccatacatggtgggcgtgaggctatggctggcgcgctaggcatgacct

SEQ ID NO: 185997 - DNA, 75 bp, synthetic construct
  source 1..75: mol_type = other DNA
gctgattcgggtgtaatgcaagcgaacggtgagtataaatgggaacacgttccagagttagggccgtatgtttat

SEQ ID NO: 185998 - DNA, 75 bp, synthetic construct
  source 1..75: mol_type = other DNA
aatggcgtatggttctactggtacatatattgctagttttaacagaaccgatttttctatgacacctgaaaattt

SEQ ID NO: 185999 - DNA, 75 bp, synthetic construct
  source 1..75: mol_type = other DNA
tttccaacacgtcgttactggctgactacttcgctcgccgccgtggtgctctgctggtggatgttccgcacctgg

SEQ ID NO: 186000 - DNA, 75 bp, synthetic construct
  source 1..75: mol_type = other DNA
cctgccggtcgctgacttcctctcgccaggcgatcgggctactggtatccagattgcgatggcggtgtttggcgt

SEQ ID NO: 186001 - DNA, 75 bp, synthetic construct
  source 1..75: mol_type = other DNA
tctctaaggattacatcacaaggttatcattattggaaaaaattaaaccctacaacacaagggagtagcggaatc

SEQ ID NO: 186002 - DNA, 75 bp, synthetic construct
  source 1..75: mol_type = other DNA
acgaaatagcgattggtgtggttgctgccgctcaccatttggggataacaatcggccaagagttgtcgttagtgg

SEQ ID NO: 186003 - DNA, 75 bp, synthetic construct
  source 1..75: mol_type = other DNA
tctatcgcttcgaatccaacgtccgctcggcgaccgtcgtcggcatggtcggcgcgggcgggatcggcgtcaccc

SEQ ID NO: 186004 - DNA, 75 bp, synthetic construct
  source 1..75: mol_type = other DNA
gtggtcgttttgaaattgccgatggcggcacgttgtttctcgatgaaattggcgatctgccgttagaacttcagc

SEQ ID NO: 186005 - DNA, 75 bp, synthetic construct
  source 1..75: mol_type = other DNA
ttttattaccgtttccccttttgcgggcggcggcgatctgatcacccttatctatcttcttgccctgtttcgttt

SEQ ID NO: 186006 - DNA, 75 bp, synthetic construct
  source 1..75: mol_type = other DNA
ccaggtcgtagttttttgttgagtataaccttaaatgatatgtatgcctttataccaggagataattattatttt

SEQ ID NO: 186007 - DNA, 75 bp, synthetic construct
  source 1..75: mol_type = other DNA
ggtcagtgcgctgttatgcgcgatactggcggcgctgataacgcaatatcaggtgaatacatgcgggtcagttaa

SEQ ID NO: 186008 - DNA, 75 bp, synthetic construct
  source 1..75: mol_type = other DNA
tcttcagcaccgcagtcgccgccatccctggcggctccagtgccgttctgcggcggcgtcatcgtgggtcagcct

SEQ ID NO: 186009 - DNA, 75 bp, synthetic construct
  source 1..75: mol_type = other DNA
tctgctcccttcatttttgatgaccctatttcatctctggaccacgaatttgagtggcaagttgctaaacgcctc

SEQ ID NO: 186010 - DNA, 75 bp, synthetic construct
  source 1..75: mol_type = other DNA
gtgtggggaaaatcttgaaacggtattcaaatataaaaatggcgatgatgtccgggagatagccaaaattaacat

SEQ ID NO: 186011 - DNA, 75 bp, synthetic construct
  source 1..75: mol_type = other DNA
ttatttgataaaaatggaaggtcttcagagtttctacttaatttttatgaatgttgctatgagtttttaccaaga

SEQ ID NO: 186012 - DNA, 75 bp, synthetic construct
  source 1..75: mol_type = other DNA
agatcctcagttacttcactcctgacaatctggcgtgggttacaggtgaaattggtagtccaccgtttgatgtct

SEQ ID NO: 186013 - DNA, 75 bp, synthetic construct
  source 1..75: mol_type = other DNA
tgaatagagccaatattaaaaataccttccttgattattcaaatttttatatggcgtacatggctgaggtaaatc

SEQ ID NO: 186014 - DNA, 75 bp, synthetic construct
  source 1..75: mol_type = other DNA
tcgctcagataaaaatgactgacggaactctaaattcatgttccgctatgcatgttccgctatgcatgttcaatt

SEQ ID NO: 186015 - DNA, 75 bp, synthetic construct
  source 1..75: mol_type = other DNA
gatggatacgctttctggcatcggcgtcgatctgatttatggtgatgtgattgccgatgcccaaccgctggattt

SEQ ID NO: 186016 - DNA, 75 bp, synthetic construct
  source 1..75: mol_type = other DNA
tctcaaaaaagggtattctgactatgctattaatattggctattatcgaagaggagcggggaatgataaaggccc

SEQ ID NO: 186017 - DNA, 75 bp, synthetic construct
  source 1..75: mol_type = other DNA
gaaaaaaaaggagaagcatcgatattaaagtattcaaagggatttaatagtatagatgccgacttatactttaac

SEQ ID NO: 186018 - DNA, 75 bp, synthetic construct
  source 1..75: mol_type = other DNA
agtaaatggtggttacgatttttcacaccttagcctgaaaggcatcgtgattaaagatgaagatttatccaattc

SEQ ID NO: 186019 - DNA, 75 bp, synthetic construct
  source 1..75: mol_type = other DNA
aatagctttcataatgtcaaggatttcgaatataaagaattgtttaaagagtacgctaacagtaaaatagatgaa

SEQ ID NO: 186020 - DNA, 75 bp, synthetic construct
  source 1..75: mol_type = other DNA
tgaatggatggatgggctcacggaaatagatcaattttgtcatcaatttctggggctgcgccgggcgattgaacc

SEQ ID NO: 186021 - DNA, 75 bp, synthetic construct
  source 1..75: mol_type = other DNA
cagcctggcagagacgctccagcaggaagggagtgagaacggccacggcgtggtgttcccggctgaactggtgcg

SEQ ID NO: 186022 - DNA, 75 bp, synthetic construct
  source 1..75: mol_type = other DNA
aagaagcggtccagatatatgggggaatccgttctatcatcaatatctttgtgtcccagatggtaaaggggacta

SEQ ID NO: 186023 - DNA, 75 bp, synthetic construct
  source 1..75: mol_type = other DNA
tttgctggcacatctctgtcagcttgaaggtgaactgacgatacttcgcgcctggcaacgtctcggaattacccc

SEQ ID NO: 186024 - DNA, 75 bp, synthetic construct
  source 1..75: mol_type = other DNA
ttgaaattaacaagcgagtatttaaagcgatagtaggggcaaaaccattaggttatccgcacaacgcagatggac

SEQ ID NO: 186025 - DNA, 75 bp, synthetic construct
  source 1..75: mol_type = other DNA
caatgaacaccaagcattgaagatttgcgctgatttagctaatggttctaaacattgcaaattaactcgctcaat

SEQ ID NO: 186026 - DNA, 75 bp, synthetic construct
  source 1..75: mol_type = other DNA
tggcgaaggggtgagcgccgaatctcacccgctgtttgacgtctatcagattgttttgcaggcacagctcgcggc

SEQ ID NO: 186027 - DNA, 75 bp, synthetic construct
  source 1..75: mol_type = other DNA
acattctggtggactcgcgctattacgcggatgtagaagcccgcacgcaaggttaccagctgcatttgcttgacg

SEQ ID NO: 186028 - DNA, 75 bp, synthetic construct
  source 1..75: mol_type = other DNA
gtttaacgtctatcagattgtcctgcaagcacagctggcggcaatctccgcgattcgccctggcgtacgctgcca

SEQ ID NO: 186029 - DNA, 75 bp, synthetic construct
  source 1..75: mol_type = other DNA
aacggcggtacagcaaagcgaattactctacgcaggggcgaatcgtcataccggcctgcggctcgccacgcttga

SEQ ID NO: 186030 - DNA, 75 bp, synthetic construct
  source 1..75: mol_type = other DNA
ggcaattctacctgatggtgagcaactcgatgattttgccggttggctccgtcgtgacaagcccggaggaccaat

SEQ ID NO: 186031 - DNA, 75 bp, synthetic construct
  source 1..75: mol_type = other DNA
atttacattggcattcaacgcggcggacgcagccacgggctgagttatccacatgctaactgctatttagctatc

SEQ ID NO: 186032 - DNA, 75 bp, synthetic construct
  source 1..75: mol_type = other DNA
agcgcggctaatccgctttccctgccggtggcgttgtgcggtgcggtgacctatgcgataagtggttggcacaaa

SEQ ID NO: 186033 - DNA, 75 bp, synthetic construct
  source 1..75: mol_type = other DNA
caaaaaagtgggtgtcggtctgggcaccaactatgaagagtggctgcggcagaatgttcagggtgtcgatgtgcg

SEQ ID NO: 186034 - DNA, 75 bp, synthetic construct
  source 1..75: mol_type = other DNA
taacttatggatttacggtctgggtgggctgctggtgccgtttattggtatcaaagtcattgatttactgctgac

SEQ ID NO: 186035 - DNA, 75 bp, synthetic construct
  source 1..75: mol_type = other DNA
tagccgtgaaaatgcgcacattctggtggattcgcgctattacgcggatgtggaagcccgtacgcaaggctacca

SEQ ID NO: 186036 - DNA, 75 bp, synthetic construct
  source 1..75: mol_type = other DNA
tcagggctactgctctgatatgacgcgcacctttctggttcatggcgaaggggtgagcgccgaatctcacccgct

SEQ ID NO: 186037 - DNA, 75 bp, synthetic construct
  source 1..75: mol_type = other DNA
aacaaacagccgcatctggggatctccaccggatcaggctatgtggtgattagccgtgaaagtgcgcacattctg

SEQ ID NO: 186038 - DNA, 75 bp, synthetic construct
  source 1..75: mol_type = other DNA
atccaataccttggtttaagagaactcggtaccagcggtgaaaagatccccctgttgagcacggctaacaaatgg

SEQ ID NO: 186039 - DNA, 75 bp, synthetic construct
  source 1..75: mol_type = other DNA
gcgcaaatgtgccatgaatttggcctgacctggggttcacactctaacaaccacttcgatatttcccttgcgatg

SEQ ID NO: 186040 - DNA, 75 bp, synthetic construct
  source 1..75: mol_type = other DNA
atagatggtgtcagtaattacgtgcgtataagtgagctaaaaaagcaagctgtacagaaattaattgacaacgtt

SEQ ID NO: 186041 - DNA, 75 bp, synthetic construct
  source 1..75: mol_type = other DNA
ataacagccttcaggtgacgccggttattgatggtcaggatggcacaccgttcacgctgacgcagtcaccggtca

SEQ ID NO: 186042 - DNA, 75 bp, synthetic construct
  source 1..75: mol_type = other DNA
ctcaaatttgccaaccagatgtatatcgatactggcgcagtgttctgcggaaacctcacattgattcaggtacag

SEQ ID NO: 186043 - DNA, 75 bp, synthetic construct
  source 1..75: mol_type = other DNA
caccagctttcattcgatccaaaagagatagcactgctgcggcatggtccgaatgggcacagatctatacgtcaa

SEQ ID NO: 186044 - DNA, 75 bp, synthetic construct
  source 1..75: mol_type = other DNA
ctttagcgaccgtcgcgtagacaacagcaacttttttgcgatcgataattttgcccacataaaggacgaagagtt

SEQ ID NO: 186045 - DNA, 75 bp, synthetic construct
  source 1..75: mol_type = other DNA
agtttcagaacgtacagcgctggcgcggggatgagggagctatcggggtatgtggagatgatcagttttcaagta

SEQ ID NO: 186046 - DNA, 75 bp, synthetic construct
  source 1..75: mol_type = other DNA
agataatgatgatgaatgtatctataaatacctgcataaagctaattatccgtcctgagcacattgggagtgtca

SEQ ID NO: 186047 - DNA, 75 bp, synthetic construct
  source 1..75: mol_type = other DNA
tacggtgatttatacggcgacaaatacgcagaggtttatgaatgtctggggaaacgtgagagaaaaccacacaat

SEQ ID NO: 186048 - DNA, 75 bp, synthetic construct
  source 1..75: mol_type = other DNA
ccactacgacagccagcaccgcctggttttctacccgcggatacagcatggcgagccactggtcgagagccgcta

SEQ ID NO: 186049 - DNA, 75 bp, synthetic construct
  source 1..75: mol_type = other DNA
tttaccgataccagggcaactggaagctcagggcgcttgggcagggatttaatggcgggcttgagcctctggcag

SEQ ID NO: 186050 - DNA, 75 bp, synthetic construct
  source 1..75: mol_type = other DNA
tggtgaggtgctggagtacatccccgcaaagacgcagcagcagttgcaaaaaatgaatgagattgccgaccgcgc

SEQ ID NO: 186051 - DNA, 75 bp, synthetic construct
  source 1..75: mol_type = other DNA
aatggagaattattgctggtattgagtaatctcatcgggagtgactatttttctcctttgcatttgctgcaatta

SEQ ID NO: 186052 - DNA, 75 bp, synthetic construct
  source 1..75: mol_type = other DNA
gtagtatttcaggctgacaaagctcattatgaattcggccgctcgctccgggatgctaatcgtgtacgtctcgct

SEQ ID NO: 186053 - DNA, 75 bp, synthetic construct
  source 1..75: mol_type = other DNA
ggagtaagaagtgatgtcggaaattatactcagagtgcagttgatgcattgtaccggttcaggtcagataaactg

SEQ ID NO: 186054 - DNA, 75 bp, synthetic construct
  source 1..75: mol_type = other DNA
tggggcaaccagcttaatgaggagaacccgcatcatgtgtatcagccgtaccgtctgccagggcagcagcatgat

SEQ ID NO: 186055 - DNA, 75 bp, synthetic construct
  source 1..75: mol_type = other DNA
ggatttggtaatgctattattgatgtagttcttgatgatgctattagagagcaagtcaaaaaacttgaagaacaa

SEQ ID NO: 186056 - DNA, 75 bp, synthetic construct
  source 1..75: mol_type = other DNA
ttaagatatggttttcagacaagcattttatctgttggtaatgactccaacttattgatagtgttttatgttcag

SEQ ID NO: 186057 - DNA, 75 bp, synthetic construct
  source 1..75: mol_type = other DNA
agaaactcttgctgatttcacccaggcttcggcaacaaaaatcaacactctgactgttaaatcaggcgaaaacag

SEQ ID NO: 186058 - DNA, 75 bp, synthetic construct
  source 1..75: mol_type = other DNA
actctacggttaaccagaacattgcgattaccactatgcgcgttgcctgggattctgttcagggtgcagttgcgt

SEQ ID NO: 186059 - DNA, 75 bp, synthetic construct
  source 1..75: mol_type = other DNA
atgaagcagaccaaccagacaatcagcgtcaaggatggcaacaacgttctgagagtgcaggttggccgattaacg

SEQ ID NO: 186060 - DNA, 75 bp, synthetic construct
  source 1..75: mol_type = other DNA
cgggtaaaattactgctattgatacgcactggatctggcaggaaggtaatcagcgcctgaccaaagaaccgtttg

SEQ ID NO: 186061 - DNA, 75 bp, synthetic construct
  source 1..75: mol_type = other DNA
acgaagttgcagatcctcactcgcgcatcagtggtgggtaagccggtgtactcgagtggcagtgagaaaaaccga

SEQ ID NO: 186062 - DNA, 75 bp, synthetic construct
  source 1..75: mol_type = other DNA
tcttgggcgccgcgtgatgccagaaatgctagataagtgggagctctatcgcatcgcccagcgctgcgaccagaa

SEQ ID NO: 186063 - DNA, 75 bp, synthetic construct
  source 1..75: mol_type = other DNA
ggttttgtgctcaatgagcaaatagaaatttcagcaggatgtgacttatcatggattaaaataatatcagaagac

SEQ ID NO: 186064 - DNA, 75 bp, synthetic construct
  source 1..75: mol_type = other DNA
acttagaacccagcacaataaaaacgcagaaataatcacgccaaatgattttatatcaaattatgacatgatatc

SEQ ID NO: 186065 - DNA, 75 bp, synthetic construct
  source 1..75: mol_type = other DNA
ccagccctcttaggttgagcacaacacgaaatacacttggagttggaggagccatattttcaaccaatggggaag

SEQ ID NO: 186066 - DNA, 75 bp, synthetic construct
  source 1..75: mol_type = other DNA
ttgcgcactatgtattgccgaagcaaagcttacagcaagccgtcacagttatttcggcagtttgcacacatcctg

SEQ ID NO: 186067 - DNA, 75 bp, synthetic construct
  source 1..75: mol_type = other DNA
ttgttcaggtgtctgacctgaacgggaacgtaacagaattggttctggataccggttatacggtaactggggcgg

SEQ ID NO: 186068 - DNA, 75 bp, synthetic construct
  source 1..75: mol_type = other DNA
tatttctgctacaggatattctaattctgactccagccctctgaggttgagcacaacacgaaatacacttggcgt

SEQ ID NO: 186069 - DNA, 75 bp, synthetic construct
  source 1..75: mol_type = other DNA
accgcggcgcagagccaaatcttttactttttacggcattaacggccccatttatcacgcctgctgccggctttt

SEQ ID NO: 186070 - DNA, 75 bp, synthetic construct
  source 1..75: mol_type = other DNA
atgtctgtagtgatatcaggtgcgctgactgatggcgcaggtatccccatgtccggataccatattattctgaaa

SEQ ID NO: 186071 - DNA, 75 bp, synthetic construct
  source 1..75: mol_type = other DNA
gtttgaaggggtgctcagcatccggtggactgatgcacgccctgagacaacagaaccgcggtacagagccaaatc

SEQ ID NO: 186072 - DNA, 75 bp, synthetic construct
  source 1..75: mol_type = other DNA
aacaacaacttgatgagctggaattggtgctcaatgaacggtatcgcgagattgcaaccttaacccgttggctgg

SEQ ID NO: 186073 - DNA, 75 bp, synthetic construct
  source 1..75: mol_type = other DNA
caaactcgattgataaactattaggctgtgtaaataaatattttgcaccagatcctgaaaataacaataaaattc

SEQ ID NO: 186074 - DNA, 75 bp, synthetic construct
  source 1..75: mol_type = other DNA
gaataaaatcaagttatcttacaaaggacaagagtcatgcttaacaaatataacagatataatagattgtttttt

SEQ ID NO: 186075 - DNA, 75 bp, synthetic construct
  source 1..75: mol_type = other DNA
ggccacaacctgagttatcacgtaagccagggtgatacctcgaataatgggtatacgggcagcgccacggcaaac

SEQ ID NO: 186076 - DNA, 75 bp, synthetic construct
  source 1..75: mol_type = other DNA
ggagaaagctgtgatgattcagcagatgaaagcggacaacctcccggatcagatgattggtgagatgcttgggat

SEQ ID NO: 186077 - DNA, 75 bp, synthetic construct
  source 1..75: mol_type = other DNA
tcagagcgattgccggcatgctgtatccgggcgtgaaacagtcagacctcagtgaagagcagaagcaaacgataa

SEQ ID NO: 186078 - DNA, 75 bp, synthetic construct
  source 1..75: mol_type = other DNA
aggaccagaagcagacgctaagtacgctggcgagtatctcagcaggtatagcgggtggtgttgcaggtgggaata

SEQ ID NO: 186079 - DNA, 75 bp, synthetic construct
  source 1..75: mol_type = other DNA
atcttgttacgcgatttaggtacttctgcagctattatccaaaaaaaatctttaagtcaagatttagtaaatacg

SEQ ID NO: 186080 - DNA, 75 bp, synthetic construct
  source 1..75: mol_type = other DNA
gccagaaaaggcagtgttggcccagcagatggacgccgataatttgagcgtggataaaatggcggaacttctggg

SEQ ID NO: 186081 - DNA, 75 bp, synthetic construct
  source 1..75: mol_type = other DNA
acaagttgggaaccagtatgattagagtccgccgtattatcagcgctgggcggaaggaactccgcactgtgatca

SEQ ID NO: 186082 - DNA, 75 bp, synthetic construct
  source 1..75: mol_type = other DNA
gtccttaaggaggctggcgtcacccctgccccggaaaaacaaaaccagctggttgaggcgctgacctcgtttatt

SEQ ID NO: 186083 - DNA, 75 bp, synthetic construct
  source 1..75: mol_type = other DNA
gaatttatgtccaggatacggggagaagttcggcggataacatcggtggtgtgtattacaaatccgcgcagattt

SEQ ID NO: 186084 - DNA, 75 bp, synthetic construct
  source 1..75: mol_type = other DNA
taatgctagcaagttgtttgaacaagcatgggaaagatctaatgatgaccttaaaaaaacagcgggggaaagata

SEQ ID NO: 186085 - DNA, 75 bp, synthetic construct
  source 1..75: mol_type = other DNA
ttgccctgtccggcacagcgggcagcgccctgaacacgacggtggagaccgtacaggcggtgaaatctgccggga

SEQ ID NO: 186086 - DNA, 75 bp, synthetic construct
  source 1..75: mol_type = other DNA
aataccgcgcaacaatgaagaccaaaagcggcatctggtatcgcgacgtgcgtgatacccgcaatatgtcgaaag

SEQ ID NO: 186087 - DNA, 75 bp, synthetic construct
  source 1..75: mol_type = other DNA
ggcggataacatcggcggtgtgtattacaaatccgcgcagatttatatcaatggtgcatggcgcactgtagccgg

SEQ ID NO: 186088 - DNA, 75 bp, synthetic construct
  source 1..75: mol_type = other DNA
aatattaacgtgacgtcaccttccggacagcaagaaacatttaaaatattaatcaatctagaacatctacggcaa

SEQ ID NO: 186089 - DNA, 75 bp, synthetic construct
  source 1..75: mol_type = other DNA
ctttgtgtcccagatggtaaaggggactatacttgtggtggccaagaccaacggggagaatcaaaaggagatggt

SEQ ID NO: 186090 - DNA, 75 bp, synthetic construct
  source 1..75: mol_type = other DNA
tgaaaagctaatttacgttgtaattacttcagcagtagtaatgctttcgattttgtttgtttatctgtttaaatc

SEQ ID NO: 186091 - DNA, 75 bp, synthetic construct
  source 1..75: mol_type = other DNA
gcgtcccgattggccaggtcaaaccgctgctggagcgccctacgtcgcgcctgaccaacaactggctcacgctgc

SEQ ID NO: 186092 - DNA, 75 bp, synthetic construct
  source 1..75: mol_type = other DNA
ttatatatactgtctgagatagataaaaaagatgatagcgagaattctttttctgtaaaatgttttataggtgtt

SEQ ID NO: 186093 - DNA, 75 bp, synthetic construct
  source 1..75: mol_type = other DNA
gcacctcaatgaatacagaaaagtgattctttctggggacaccatttatcagttcgctcccatccgtaccagtcc

SEQ ID NO: 186094 - DNA, 75 bp, synthetic construct
  source 1..75: mol_type = other DNA
cagtttcatgaatgccggttacaaaaactttatgacggaagttaacaacctgaacaaacgtatgggcgagctgcg

SEQ ID NO: 186095 - DNA, 75 bp, synthetic construct
  source 1..75: mol_type = other DNA
atgagtatggttgccagaaccaaccccggacccgcagaggacgacatcaccgataccgatgatggtgatacccgt

SEQ ID NO: 186096 - DNA, 75 bp, synthetic construct
  source 1..75: mol_type = other DNA
ccggccccgcagaggacgacatcaccgacaccgatgatggcgatacccgtatttcagcgggtgcattctggccgg

SEQ ID NO: 186097 - DNA, 75 bp, synthetic construct
  source 1..75: mol_type = other DNA
aacatatctgctgcaatttttaccatagttggattatggattggttttttatatccgaatgcaattgcaagcatt

SEQ ID NO: 186098 - DNA, 75 bp, synthetic construct
  source 1..75: mol_type = other DNA
taaaggcattgataatacaatggaaatggaatttgttaattctatttctaattgctgtggcctcctattggctga

SEQ ID NO: 186099 - DNA, 75 bp, synthetic construct
  source 1..75: mol_type = other DNA
taagaccgccatcagatcccgcgccggatgatggcggcgcaaaggttgagagcctgcctttctggcctgtcattg

SEQ ID NO: 186100 - DNA, 75 bp, synthetic construct
  source 1..75: mol_type = other DNA
cgtcgattttacctggcaacctggcagcgcaatgcagaaacagcttgacccgaatgaagtcgctgcacggcgtag

SEQ ID NO: 186101 - DNA, 75 bp, synthetic construct
  source 1..75: mol_type = other DNA
agactacgcagcatatcataatagaatagcaagtagcattttttgggaattactaacatctcccccacttaaccg

SEQ ID NO: 186102 - DNA, 75 bp, synthetic construct
  source 1..75: mol_type = other DNA
cgggattatcttgatgtagtatcagcaatatcccacataccaaaactaatgggcttacctcattattctaaaaaa

SEQ ID NO: 186103 - DNA, 75 bp, synthetic construct
  source 1..75: mol_type = other DNA
ttgcagcctcaccgggaaaataatgtcataaataaggatgacattagggattattttgatgtaatttcggctata

SEQ ID NO: 186104 - DNA, 75 bp, synthetic construct
  source 1..75: mol_type = other DNA
cccgtgatgatgcacaacgttttgcggagaaagcccgacaggatgcaaccgtcacagctgagaacagaaaggcca

SEQ ID NO: 186105 - DNA, 75 bp, synthetic construct
  source 1..75: mol_type = other DNA
tgttgcagtttaatcatcatcagcattggcagccgatgtaccgcttcgatctctgcgagcagcaacaaagcgatt

SEQ ID NO: 186106 - DNA, 75 bp, synthetic construct
  source 1..75: mol_type = other DNA
aacaattttgactattgccatggattttaaatctcaggcaaaagtatctgttttgtcggtagtgttagggggggc

SEQ ID NO: 186107 - DNA, 75 bp, synthetic construct
  source 1..75: mol_type = other DNA
gcggagcagctgtggcgagagcgcttctccaggagtggtttacgagcggctggtcagggatggttccgaccagtt

SEQ ID NO: 186108 - DNA, 75 bp, synthetic construct
  source 1..75: mol_type = other DNA
aacctggtgctggacacgactacgatcaacacctccggtctggccaattacggctttagctacacggatgagact

SEQ ID NO: 186109 - DNA, 75 bp, synthetic construct
  source 1..75: mol_type = other DNA
gacggcaagggaatattgattaacctggcgtctgctcctactggccgttttggacgggtttcctacgcaaccgtc

SEQ ID NO: 186110 - DNA, 75 bp, synthetic construct
  source 1..75: mol_type = other DNA
atgtctaacatagaggaaacactgccagaaagtgcgatcagttcttgggggggctttgtttaccaagggaaagta

SEQ ID NO: 186111 - DNA, 75 bp, synthetic construct
  source 1..75: mol_type = other DNA
caccatgtttgcagataattgatcccgcagctgatggtgattttgttgataatctgatacttcaacttactcatt

SEQ ID NO: 186112 - DNA, 75 bp, synthetic construct
  source 1..75: mol_type = other DNA
ggaacgcgggcggattgataaagagtggatcaaacgtctgccggataattccgcaccgtacacttccaccattgt

SEQ ID NO: 186113 - DNA, 75 bp, synthetic construct
  source 1..75: mol_type = other DNA
tccccagagttaacaaggaaatatctcggcgaaaaagccgcttggatttgcccctatatttccagacatctgtta

SEQ ID NO: 186114 - DNA, 75 bp, synthetic construct
  source 1..75: mol_type = other DNA
tatatgtaatctatatggaaaatcgcgttcttttactatatgctttatatatagtcataagacagagaggtaaat

SEQ ID NO: 186115 - DNA, 75 bp, synthetic construct
  source 1..75: mol_type = other DNA
tatcgacaacccgttgttgggaaaaggcctgcaactatctcagcgtctgtgttatctcagcagcatgatgcattt

SEQ ID NO: 186116 - DNA, 75 bp, synthetic construct
  source 1..75: mol_type = other DNA
ggtatgccgaatttacactctcatgcattccagcgggtgatggccgggctggcggaggtggccggaaacccgcag

SEQ ID NO: 186117 - DNA, 75 bp, synthetic construct
  source 1..75: mol_type = other DNA
ttttcatagaaagaggtcttaggtttaactgtgaaataaaaaaacatgacaaaaaaagtccaccattacaattcg

SEQ ID NO: 186118 - DNA, 75 bp, synthetic construct
  source 1..75: mol_type = other DNA
ttatcctttaaaaaaggagatgttattttcatagaaagaggtcttaggtttaactgtgaaataaaaaaacatgac

SEQ ID NO: 186119 - DNA, 75 bp, synthetic construct
  source 1..75: mol_type = other DNA
ccaaataatccactttcaacgctatctggtggcaatcaacaaaaggttgtcctggctaaatggattttaacacga

SEQ ID NO: 186120 - DNA, 75 bp, synthetic construct
  source 1..75: mol_type = other DNA
atgcggagcaaccattagtgacgctaaggtcactaacgaaaagtttcggtggccatagggctctaaaaaatatca

SEQ ID NO: 186121 - DNA, 75 bp, synthetic construct
  source 1..75: mol_type = other DNA
cttttcagtaacgctattagttgctgagacgtatgcctggcttgtcttattactgggttactttcaggtttgctt

SEQ ID NO: 186122 - DNA, 75 bp, synthetic construct
  source 1..75: mol_type = other DNA
ctgatacgtggaatgcctcgttcttctgtggctcttgcgcagttattcgtcgtaaaccgttggatgaaattggtg

SEQ ID NO: 186123 - DNA, 75 bp, synthetic construct
  source 1..75: mol_type = other DNA
atccaaatggtgaattaccgtcttatatcactggcgctaacatgcgcttcctgtcctggctggctagcatggtcc

SEQ ID NO: 186124 - DNA, 75 bp, synthetic construct
  source 1..75: mol_type = other DNA
cgcgcactgaagttaatcaattactacgcacagtgaattacttacgcgataaaaatattaccgtagtttttgtta

SEQ ID NO: 186125 - DNA, 75 bp, synthetic construct
  source 1..75: mol_type = other DNA
ggcggacgctgggttattgaggatgggcatcaccataaagaagaatctgtctctcaggcatttattcaggtaatg

SEQ ID NO: 186126 - DNA, 75 bp, synthetic construct
  source 1..75: mol_type = other DNA
gccaccacggcgcggaaaggtcttgttcagctcaatagtgccatcaacagcgattctgaaacgctggctgcaaca

SEQ ID NO: 186127 - DNA, 75 bp, synthetic construct
  source 1..75: mol_type = other DNA
tacgatgcaggttatagcggaaccagtatgacgggcgggaaaggtgctgatggggtttgtattatcgaggagttt

SEQ ID NO: 186128 - DNA, 75 bp, synthetic construct
  source 1..75: mol_type = other DNA
cgtcatcaggtacgtacaccccgacgccaggaacaaaacggatcagggtcacaataacgggcggcggtggcggag

SEQ ID NO: 186129 - DNA, 75 bp, synthetic construct
  source 1..75: mol_type = other DNA
gacagacatcagccatatcagcgaagggcaccgggtggcggtgcactatggttatgacagtaaaggccgcctcgc

SEQ ID NO: 186130 - DNA, 75 bp, synthetic construct
  source 1..75: mol_type = other DNA
accttgctaacgggaaatacactgcacaggatgccaccacagcgcgaaaagggcttgttcagctcagtagcgcca

SEQ ID NO: 186131 - DNA, 75 bp, synthetic construct
  source 1..75: mol_type = other DNA
gtatattccggcattattgttcaggataccggctcaaactctgccgataacattggtggcgtatattacagaccg

SEQ ID NO: 186132 - DNA, 75 bp, synthetic construct
  source 1..75: mol_type = other DNA
cagcaaatactggacaaaatggcctacctgacgatatggcagggcgatgacgtacagcgccgggtgaaaggtgtg

SEQ ID NO: 186133 - DNA, 75 bp, synthetic construct
  source 1..75: mol_type = other DNA
agagtaccgctggagaatatcgaatacgttgccgatcttggctgtggcccaggtaacagcaccgcccttctaaac

SEQ ID NO: 186134 - DNA, 75 bp, synthetic construct
  source 1..75: mol_type = other DNA
gattggcgccattctggcctgccatcctggccagcagccgattcatattcatattgctgaacagcaaaaagaggt

SEQ ID NO: 186135 - DNA, 75 bp, synthetic construct
  source 1..75: mol_type = other DNA
taattttgcatgggtgaatacatccggtgatacctatgatgtttatgttgaaataggtaattacgccacaggtgt

SEQ ID NO: 186136 - DNA, 75 bp, synthetic construct
  source 1..75: mol_type = other DNA
cgccaccaatagcacttctgaaacgctggccgcaacaccgaaagcggtgaagtctgcctatgacaatgctgaaaa

SEQ ID NO: 186137 - DNA, 75 bp, synthetic construct
  source 1..75: mol_type = other DNA
ctgaaccagtcactctcttcgcttttttccctcgatctctccctggtcagccagcagtttctctcccttgaattt

SEQ ID NO: 186138 - DNA, 75 bp, synthetic construct
  source 1..75: mol_type = other DNA
accgttacgacagcgcgggtaatgtgtcggctgtcaccagccgggaagactacggacgggaaacacggcgggagt

SEQ ID NO: 186139 - DNA, 75 bp, synthetic construct
  source 1..75: mol_type = other DNA
aagccgaccccggcctgctgtatgcgggacagtggcaggatgcagaatccgggctgtgctataaccggttccggt

SEQ ID NO: 186140 - DNA, 75 bp, synthetic construct
  source 1..75: mol_type = other DNA
cgtccgtggccccgctgtgggtgacgcggacgaatcatgcggtgagcgacctgacgggccgtccgctgatgctct

SEQ ID NO: 186141 - DNA, 75 bp, synthetic construct
  source 1..75: mol_type = other DNA
atgaacttaagtggcaactatgtaaacctttggaagtagatgactcaccattatggattaatttgtatggtaagg

SEQ ID NO: 186142 - DNA, 75 bp, synthetic construct
  source 1..75: mol_type = other DNA
gtgaatatctccgcaagcatggaaccagtgttgaatgctatatcgaaatttcaccggaagttaatctcgatcttg

SEQ ID NO: 186143 - DNA, 75 bp, synthetic construct
  source 1..75: mol_type = other DNA
gaccagctgaccgggtattgcagcgcacagggtgagctgtgggaataccgccacgacgccagcggcagacgaaca

SEQ ID NO: 186144 - DNA, 75 bp, synthetic construct
  source 1..75: mol_type = other DNA
agaggcattccttatgcaacctctacgtttcttgataacggtaatgaggggagtgcctggagacaatgtatgggg

SEQ ID NO: 186145 - DNA, 75 bp, synthetic construct
  source 1..75: mol_type = other DNA
aatcaaagttcaaagtcatttcatttattgagatattctcgtctacagtttcagtaattttggcgttaattacgg

SEQ ID NO: 186146 - DNA, 75 bp, synthetic construct
  source 1..75: mol_type = other DNA
aatttaatgtctgcaattcagttttgggttgcatcatcttggcgtccatcgtttaaaaccatcataaatggtgat

SEQ ID NO: 186147 - DNA, 75 bp, synthetic construct
  source 1..75: mol_type = other DNA
ctgaccgggtattgcagcgcacagggtgagctgtgggaataccgccacgacgccagcggcagacgaacagagaaa

SEQ ID NO: 186148 - DNA, 75 bp, synthetic construct
  source 1..75: mol_type = other DNA
gcagggggcatggaatagcaacgtaacgatggattatgggagatgggttcttgccgataatctgtactcacatga

SEQ ID NO: 186149 - DNA, 75 bp, synthetic construct
  source 1..75: mol_type = other DNA
ccatatgatatacgcattgtcggtaatttcttgtttgatttttatcggcagaatgcttcatttgacccaggggtt

SEQ ID NO: 186150 - DNA, 75 bp, synthetic construct
  source 1..75: mol_type = other DNA
atgaattacgctggtcgctgtgcacaatcgccatgaacacggcccatttatccttcgagtgcgtggtgttattag

SEQ ID NO: 186151 - DNA, 75 bp, synthetic construct
  source 1..75: mol_type = other DNA
gagagaggaaagaaggactcgatcaggtatatgaaaagcataaagctctgctaaaaaagcacggctccaattacg

SEQ ID NO: 186152 - DNA, 75 bp, synthetic construct
  source 1..75: mol_type = other DNA
cagataatcattgtctttcgccctcaaagataagcagagaactccagtttaccagaacaaacattacccgcatta

SEQ ID NO: 186153 - DNA, 75 bp, synthetic construct
  source 1..75: mol_type = other DNA
gaaggagcacagcaaaacgaaggttgcaatattccggcccataccggaagcgatcctgccgttcgtcacgcggct

SEQ ID NO: 186154 - DNA, 75 bp, synthetic construct
  source 1..75: mol_type = other DNA
catttgtctctttatctgagtgataataaaggggaatgtgatattcctgtaaaagttgttcatgcttacaaaaat

SEQ ID NO: 186155 - DNA, 75 bp, synthetic construct
  source 1..75: mol_type = other DNA
gtcttatgttctaccttatctatttgtgattatttttactaactcaagagttcagggtgaatacagacattcatt

SEQ ID NO: 186156 - DNA, 75 bp, synthetic construct
  source 1..75: mol_type = other DNA
acttgccaccgaaacattatcagcccatattgggcaacggattcggtgggccaggggaatgatccaaatcttgcg

SEQ ID NO: 186157 - DNA, 75 bp, synthetic construct
  source 1..75: mol_type = other DNA
ctcggcactattgatgaaaaaaaatacgaagagcttgtaagtaatgtggatgattttgttaaaaagagaattata

SEQ ID NO: 186158 - DNA, 75 bp, synthetic construct
  source 1..75: mol_type = other DNA
ccttatcaattatagatgtagtaatgaataatggttgggatactacaaagcagttagtaaatagctttgaactga

SEQ ID NO: 186159 - DNA, 75 bp, synthetic construct
  source 1..75: mol_type = other DNA
cgttgacgatggtgggccgggctgtctgggcatcattaaaattattttctatatttttatctttgctggtttgat

SEQ ID NO: 186160 - DNA, 75 bp, synthetic construct
  source 1..75: mol_type = other DNA
ctatcgatttcaatcgaaacgactgggatccgatgattaatctcaacctgaatgctgcattcgatatgagccagg

SEQ ID NO: 186161 - DNA, 75 bp, synthetic construct
  source 1..75: mol_type = other DNA
cattggattttttttcattacataacaaggtggccatcgtaactggggccgcgggtgagctggggagaggcttat

SEQ ID NO: 186162 - DNA, 75 bp, synthetic construct
  source 1..75: mol_type = other DNA
tgaactggcggcgcggcttgatatcagccgtgaagaagttctcaacgaactgtgggaactcaaaaaaaatggtgt

SEQ ID NO: 186163 - DNA, 75 bp, synthetic construct
  source 1..75: mol_type = other DNA
gatcgcctgatgtcgcgaacggtggaagcggtggcccatgttaatgatcagcttttcctgtggcgccaggtgcag

SEQ ID NO: 186164 - DNA, 75 bp, synthetic construct
  source 1..75: mol_type = other DNA
tgtattctgaaaatattattatactcaccccatttaaggtacaacataaacgatgagtttattcagggcataaaa

SEQ ID NO: 186165 - DNA, 75 bp, synthetic construct
  source 1..75: mol_type = other DNA
tggtggcttgatgagtgatatgtcatatggtatcgataacctgacttatattagttacagggggagagcgttctt

SEQ ID NO: 186166 - DNA, 75 bp, synthetic construct
  source 1..75: mol_type = other DNA
catcttatggggtgggacaggcatacaatccactattacgtagtgcctccatgtttcagttaaactggaacaata

SEQ ID NO: 186167 - DNA, 75 bp, synthetic construct
  source 1..75: mol_type = other DNA
catgatcacgaatcgcagaccactactcttgcagctgatggaatcttgatgcggcagagcctccacattacaaca

SEQ ID NO: 186168 - DNA, 75 bp, synthetic construct
  source 1..75: mol_type = other DNA
ttctaaaaagccatgactttggcaatagatttcatgactcaaaccttaaagacatgacaacatactgccatgaat

SEQ ID NO: 186169 - DNA, 75 bp, synthetic construct
  source 1..75: mol_type = other DNA
taatcaatgtaatatttcctgagtttagtaataaaataacttgggctttagttataactgggctaagcataattg

SEQ ID NO: 186170 - DNA, 75 bp, synthetic construct
  source 1..75: mol_type = other DNA
cgtatcggtgctgaccagagcgggaaaatcaccgctatctcacatgaaagctggtccggaaacctgcccggcggc

SEQ ID NO: 186171 - DNA, 75 bp, synthetic construct
  source 1..75: mol_type = other DNA
tgtatgcaagtaataatacaggcggattttataatgaggttactggaggggatagcggttcaggattctatcttt

SEQ ID NO: 186172 - DNA, 75 bp, synthetic construct
  source 1..75: mol_type = other DNA
gcagtggctgacgcatatctggataaggagcgctatcctgttttttatcgtctggggtctggtactcaatatatt

SEQ ID NO: 186173 - DNA, 75 bp, synthetic construct
  source 1..75: mol_type = other DNA
ctattttgcagaaatacatcaaatctcagttttacgggctatctgctaaagccgggtcaatggattcttcaaaat

SEQ ID NO: 186174 - DNA, 75 bp, synthetic construct
  source 1..75: mol_type = other DNA
cagaattcacaactgcacgtaactcagttgttgagggggatattgttgcatcgaattcaacgctgaaactggggg

SEQ ID NO: 186175 - DNA, 75 bp, synthetic construct
  source 1..75: mol_type = other DNA
tctcttgtaaaagaatataaaccatcatcatatagtttaagcttaatacaacaaagtaatatgggggctgctcgg

SEQ ID NO: 186176 - DNA, 75 bp, synthetic construct
  source 1..75: mol_type = other DNA
ttcagtctcagtatcagaccggggatatcagtgaggatttttacagacaggcacgggcacagaacgcgcagtatc

SEQ ID NO: 186177 - DNA, 75 bp, synthetic construct
  source 1..75: mol_type = other DNA
tgccgttagaacttcagcctaaactgctgcgcgtattgcaggagcgggagattgagcgtctcggcgggagtagaa

SEQ ID NO: 186178 - DNA, 75 bp, synthetic construct
  source 1..75: mol_type = other DNA
atgctctgtataacaaagcgggtgtaaatgggttgtttactgatttccctgataaagcggttaaattccttaata

SEQ ID NO: 186179 - DNA, 75 bp, synthetic construct
  source 1..75: mol_type = other DNA
gtgctctggaagttgtgttcataacaaaacgccccgaccatcaaggccgagggcagttaagatatcaaaaacccg

SEQ ID NO: 186180 - DNA, 75 bp, synthetic construct
  source 1..75: mol_type = other DNA
gaagatttactggctgaagccaattttgcgctgcgtagcctgaaaggtttggcccgggtgggagtatctattata

SEQ ID NO: 186181 - DNA, 75 bp, synthetic construct
  source 1..75: mol_type = other DNA
aatggcactattcaccatgccgttaaaactcagacatggggacagtcagactatcattatgttgatcgggtgacc

SEQ ID NO: 186182 - DNA, 75 bp, synthetic construct
  source 1..75: mol_type = other DNA
aaaatacagctgaaaaatggcctcgcgccgtcagagtcatttgactcgaaatacggcattcacttaaccgtggaa

SEQ ID NO: 186183 - DNA, 75 bp, synthetic construct
  source 1..75: mol_type = other DNA
accaatttagagatgcacaccatcaaagtattaagattacgggttatccaacagaaaaaaattttgacatgttga

SEQ ID NO: 186184 - DNA, 75 bp, synthetic construct
  source 1..75: mol_type = other DNA
agatagtgatgactctttaagttcagatgctcttgaaaaagcattagctccgatgctggataataaagatatcga

SEQ ID NO: 186185 - DNA, 75 bp, synthetic construct
  source 1..75: mol_type = other DNA
cccgctatgtccgggatatccgacttggtggtgccgccacatacaaacctgcgaacaatggcatgacatggacac

SEQ ID NO: 186186 - DNA, 75 bp, synthetic construct
  source 1..75: mol_type = other DNA
ctgggacagtggtgcttattgtgcacaggatggcggcgcatcaaaaatggtgttgcatttttacacgggtgaggg

SEQ ID NO: 186187 - DNA, 75 bp, synthetic construct
  source 1..75: mol_type = other DNA
acagctgcacaaggcgtgcataacggttattttgcgatcgataagaaaaaagattcgtcaggcaaggaaatgctc

SEQ ID NO: 186188 - DNA, 75 bp, synthetic construct
  source 1..75: mol_type = other DNA
atgaacgcgttatcaacgatccttgcggtcgataacctggtaacaacgaaggagctttttaatctcgttaacgaa

SEQ ID NO: 186189 - DNA, 75 bp, synthetic construct
  source 1..75: mol_type = other DNA
atgaccacccgtgagatagccgctgcgttcaaagaactgtatgacgcagatgtttcaccggcactgatatcaaag

SEQ ID NO: 186190 - DNA, 75 bp, synthetic construct
  source 1..75: mol_type = other DNA
agatgctcaagataaaattaaggctatgaagaaaaaaattaaaaaaggagccttattaattttactactttctcg

SEQ ID NO: 186191 - DNA, 75 bp, synthetic construct
  source 1..75: mol_type = other DNA
atgatttactattattatccattcgatgacgatgagagttttttggaattattagatgaaaaaatttttattgga

SEQ ID NO: 186192 - DNA, 75 bp, synthetic construct
  source 1..75: mol_type = other DNA
gggcattcaccttatgccaatgaatgtaataaagatgaagctaaatttaaactacgaatatcatcatttttagct

SEQ ID NO: 186193 - DNA, 75 bp, synthetic construct
  source 1..75: mol_type = other DNA
caacgccaggagttgagcgacaattttcataccattaaagagaactggcatcgtttaatgaatcgtcagcggtag

SEQ ID NO: 186194 - DNA, 75 bp, synthetic construct
  source 1..75: mol_type = other DNA
gggcatgcagtgcattgagtatcaggcatcgcatgaagcggagaacgttgattactgcgttgtcgaagtggtctt

SEQ ID NO: 186195 - DNA, 75 bp, synthetic construct
  source 1..75: mol_type = other DNA
cgtaacctgagaatgacggtccttttctggggtgacgattacgatgtgcgactccaggcgtttctggccgcgctg

SEQ ID NO: 186196 - DNA, 75 bp, synthetic construct
  source 1..75: mol_type = other DNA
cgcttccggatcgataccgttcagacggcaggtgccgatcagcccgtacagcagtgcaccacgctcgccgccgtg

SEQ ID NO: 186197 - DNA, 75 bp, synthetic construct
  source 1..75: mol_type = other DNA
attcctttaggcgtactcacagctctagttggcgcccccgtctttgtgtacttactatgcactcgtcgacgtgaa

SEQ ID NO: 186198 - DNA, 75 bp, synthetic construct
  source 1..75: mol_type = other DNA
tacatgatcaatgtctagcaacaacacaaaaagctattgaatcacttggatggactaatatctctgtaggcgttt

SEQ ID NO: 186199 - DNA, 75 bp, synthetic construct
  source 1..75: mol_type = other DNA
ggtacgaggactacacccgcgccaccgagttgttgcgtctcaatccgacactacgtaatcctaacaacatcaaag

SEQ ID NO: 186200 - DNA, 75 bp, synthetic construct
  source 1..75: mol_type = other DNA
atgacgatgaaaattttttagaattattagatgaaaaacttttcctcaaagaaaaaacaggtgtagaaccagtta

SEQ ID NO: 186201 - DNA, 75 bp, synthetic construct
  source 1..75: mol_type = other DNA
aagaagacctgaaagaaagtctggaagaaatcaaggaaaatatcctggaagaaaacctgccagcaagccggattg

SEQ ID NO: 186202 - DNA, 75 bp, synthetic construct
  source 1..75: mol_type = other DNA
gaaaaccagtcagcaagccagattgaagaccgggcagaagcattgcgcagaatgaaggaatgtctcataacaaga

SEQ ID NO: 186203 - DNA, 75 bp, synthetic construct
  source 1..75: mol_type = other DNA
atggtgccaatgggctatggaacgggaaggtttgcaagaaaacctgcaaaaaaactgcacgacgtcctggaagaa

SEQ ID NO: 186204 - DNA, 75 bp, synthetic construct
  source 1..75: mol_type = other DNA
atatctgaaaaatctaaatccactccaacttgccgctgattgcattgaaacagtaaataaaataaaagataagaa

SEQ ID NO: 186205 - DNA, 75 bp, synthetic construct
  source 1..75: mol_type = other DNA
atggcgggatacctgaactttataacgcaataaacacactagccgaacgatggggatacccattaattgatttac

SEQ ID NO: 186206 - DNA, 75 bp, synthetic construct
  source 1..75: mol_type = other DNA
agtgcttgaatgtatggagaactttttgatcttgttaccgaaggtgcagcccccgaaactgatggtactgaagtg

SEQ ID NO: 186207 - DNA, 75 bp, synthetic construct
  source 1..75: mol_type = other DNA
cgtaggaataactgttatcagtttattgtgacaattaatagtaaaaattacggttgccctcttgatgataccgat

SEQ ID NO: 186208 - DNA, 75 bp, synthetic construct
  source 1..75: mol_type = other DNA
gacagcggttccggattttacctgtatgataatcagaaaaaaaaatgggttattctgggaacattgacaggaaaa

SEQ ID NO: 186209 - DNA, 75 bp, synthetic construct
  source 1..75: mol_type = other DNA
gaaaaaacaggtgtggaacctataacgtttatgtataatcaagcagaaaaatatataagacttataaggggtggc

SEQ ID NO: 186210 - DNA, 75 bp, synthetic construct
  source 1..75: mol_type = other DNA
aacttgactcgcctgaaagtatttgactgttctagtaacgatttgatctcttcaccacggctgccgcccaaacta

SEQ ID NO: 186211 - DNA, 75 bp, synthetic construct
  source 1..75: mol_type = other DNA
aacgggacatttgggaattatggctgaaggagaaaatttccttagccagttgcttaatatagaagatgaagttct

SEQ ID NO: 186212 - DNA, 75 bp, synthetic construct
  source 1..75: mol_type = other DNA
aaaatttcatttaccatacaaacgaatcattcagaaaaatatagtatgctatcgggcatgcgcgctcatattcta

SEQ ID NO: 186213 - DNA, 75 bp, synthetic construct
  source 1..75: mol_type = other DNA
ctatggcacgtgaacatgatagtaatttagtcaatctaaaaacgctactcaatgatggttgttttattaaatata

SEQ ID NO: 186214 - DNA, 75 bp, synthetic construct
  source 1..75: mol_type = other DNA
agccatatagctgtattaggcgatgcagaagttatatcatcatcaattgggcgtggtacttatattggtggaggt

SEQ ID NO: 186215 - DNA, 75 bp, synthetic construct
  source 1..75: mol_type = other DNA
catcaggaatagcgattacttctattgttgttttcttcaattatttcgactggctgaaaatttggcttgctccaa

SEQ ID NO: 186216 - DNA, 75 bp, synthetic construct
  source 1..75: mol_type = other DNA
atgtaaagtatgtgaatactggtgagggaattaatccgggtacggttaacggaatatcaacatttacgttttcct

SEQ ID NO: 186217 - DNA, 75 bp, synthetic construct
  source 1..75: mol_type = other DNA
gttacattactttcatgttttgcggagaccgatcaaacaagaattcagaggtatattcctcagcctcaagatgcg

SEQ ID NO: 186218 - DNA, 75 bp, synthetic construct
  source 1..75: mol_type = other DNA
aaaatggacaaaagaattaataaatgattatttgtatggttgtttactatcactttactctatctgtgtaaggga

SEQ ID NO: 186219 - DNA, 75 bp, synthetic construct
  source 1..75: mol_type = other DNA
catgatccagacaccgcctcctgggtttcacttaaaaatgatccccgagtcttcacgaatggcgcagatgaaaag

SEQ ID NO: 186220 - DNA, 75 bp, synthetic construct
  source 1..75: mol_type = other DNA
gaactgaaaaaccgcggtctgaacgatatcctcatcgcctgtgaggatggtctgaaaggcttcccggatgccata

SEQ ID NO: 186221 - DNA, 75 bp, synthetic construct
  source 1..75: mol_type = other DNA
caggggcccacaggcacggtgcgggtcaggttcgacggtcgttacacactgtttacgccctctgaaaatgacgga

SEQ ID NO: 186222 - DNA, 75 bp, synthetic construct
  source 1..75: mol_type = other DNA
caagaacaaagcaatgaccttcaacgaattctgggaggaggcggacgtaacggtgattgatgacgcctaccggcg

SEQ ID NO: 186223 - DNA, 75 bp, synthetic construct
  source 1..75: mol_type = other DNA
gttttccgctatgccatcgtaacgggtagagcaatctacaatcctgcaccggatcttgccagtgcgatgcaagga

SEQ ID NO: 186224 - DNA, 75 bp, synthetic construct
  source 1..75: mol_type = other DNA
catcagataaaacagctgaaataacattagatttacctagtaaaaatcatatttaccatgggagattcataggaa

SEQ ID NO: 186225 - DNA, 75 bp, synthetic construct
  source 1..75: mol_type = other DNA
aaatattcttacaatccctgtgcctgattttagtagtatttctacattaggtatagcaacacttgtagatgctca

SEQ ID NO: 186226 - DNA, 75 bp, synthetic construct
  source 1..75: mol_type = other DNA
gagtcaaagaaactaatggtgtattggggaatccagcatacattatcacgcaggttgtacggcatcgcgccgcag

SEQ ID NO: 186227 - DNA, 75 bp, synthetic construct
  source 1..75: mol_type = other DNA
aaccgctttcaatgtctgccgcaattcagattaccatgctctcttttgcttgcctgattgtattgctgtgtcgcc

SEQ ID NO: 186228 - DNA, 75 bp, synthetic construct
  source 1..75: mol_type = other DNA
cagcacggaaatcgcgccacacgccaaactctcggtgctgctgttcctgagcggcgcggtggtgattgtcctgct

SEQ ID NO: 186229 - DNA, 75 bp, synthetic construct
  source 1..75: mol_type = other DNA
gctattgtctgcgcctttggcctggcgtggatgagtgaaaccttcgtcagcagccatatcgacctgatcaaatcg

SEQ ID NO: 186230 - DNA, 75 bp, synthetic construct
  source 1..75: mol_type = other DNA
accggtaataaggcagatactcccatccggactgaatcttcctgatatccagcctggcgagcagctacagcaaca

SEQ ID NO: 186231 - DNA, 75 bp, synthetic construct
  source 1..75: mol_type = other DNA
tgccactaagaaaacaggctgaaatattattttgtttagggggggggttctgtaaatactcatcgagtgatatgt

SEQ ID NO: 186232 - DNA, 75 bp, synthetic construct
  source 1..75: mol_type = other DNA
ctggataccgtgggattaatgccttcaatagtggcgtgataaaacttcttgttgccagagaaaatgactggattg

SEQ ID NO: 186233 - DNA, 75 bp, synthetic construct
  source 1..75: mol_type = other DNA
gtcataacaccggtcacgctatcggcattgaagttcatgaagatccgcgtttttcaccgcgggacaccacgacgc

SEQ ID NO: 186234 - DNA, 75 bp, synthetic construct
  source 1..75: mol_type = other DNA
cagaaaccagcgaaagttgggagctggggctttactacatgggtgaagaaggctggctggaaggggttgaatcca

SEQ ID NO: 186235 - DNA, 75 bp, synthetic construct
  source 1..75: mol_type = other DNA
atagcaacactggcacaccaatgaacagcagcgaacttgccgcagatgccctgcaggcgacgagcctgcgcgaaa

SEQ ID NO: 186236 - DNA, 75 bp, synthetic construct
  source 1..75: mol_type = other DNA
cgacagtatccgcatccagacgatttatcagccggggagcttcactccactcatcagtgttgaaactgccaccgg

SEQ ID NO: 186237 - DNA, 75 bp, synthetic construct
  source 1..75: mol_type = other DNA
atcccggtgcagaatcgctggggtatgattcagatggccatgaaattatggccgttgatatttatgtaaacgtaa

SEQ ID NO: 186238 - DNA, 75 bp, synthetic construct
  source 1..75: mol_type = other DNA
attcctttttatgggggagagtcaaactccaaatgggatataatatcagaatatgttgataaacatggaggtgaa

SEQ ID NO: 186239 - DNA, 75 bp, synthetic construct
  source 1..75: mol_type = other DNA
gcatggcagtagattacttttcggtggatggcgtaaaagactggcaaactatctggctggtgtttgcaggatatg

SEQ ID NO: 186240 - DNA, 75 bp, synthetic construct
  source 1..75: mol_type = other DNA
tgatcgcaacaattattcctattctggtttatatgcttcaggaattaagtctggtcaatctattaatattaagct

SEQ ID NO: 186241 - DNA, 75 bp, synthetic construct
  source 1..75: mol_type = other DNA
gcggcgcgtcagggagatatgactcagtatggcggtcccattgtccagggttcggcaggtgtaagaattggcgcg

SEQ ID NO: 186242 - DNA, 75 bp, synthetic construct
  source 1..75: mol_type = other DNA
aaactgtaatcaggaaaaaacttgttcgtaagtcgggtatctcaactttagaactggaaaaaatttctgatgcat

SEQ ID NO: 186243 - DNA, 75 bp, synthetic construct
  source 1..75: mol_type = other DNA
ctgaaaaattagctgattttctgaaggctatcattgagcagtttgattctttcgagaaagataatcaacttattt

SEQ ID NO: 186244 - DNA, 75 bp, synthetic construct
  source 1..75: mol_type = other DNA
cgtatgaatgaaatgataaaggaaattattccgcatcatattaaatggcatgccggcacgagtaatatctgtgag

SEQ ID NO: 186245 - DNA, 75 bp, synthetic construct
  source 1..75: mol_type = other DNA
gaaaggacggcgctggctgagtctcaggtgtattcaggggtgattgatatgcctgcaggaagggggcatatgacg

SEQ ID NO: 186246 - DNA, 75 bp, synthetic construct
  source 1..75: mol_type = other DNA
ccgacgttctccctgacgccggagggcaggctgacggcccgcaatgcggacatcagcggacatatcagtgcgaac

SEQ ID NO: 186247 - DNA, 75 bp, synthetic construct
  source 1..75: mol_type = other DNA
ccggcactcttatgacaagagtgccgcaggggagcaattcatgtcattagtgcgttctcaacaatgcacagtctg

SEQ ID NO: 186248 - DNA, 75 bp, synthetic construct
  source 1..75: mol_type = other DNA
cagtgattctggcgacagctattttctgaatttaaacagtggcgttaatttaggcccatggagattgcgcaacaa

SEQ ID NO: 186249 - DNA, 75 bp, synthetic construct
  source 1..75: mol_type = other DNA
aattccgaggctcgcaagacattggttacagaatggctggaagcctatcgcgtacaacttgctgaaacaccattt

SEQ ID NO: 186250 - DNA, 75 bp, synthetic construct
  source 1..75: mol_type = other DNA
gagagccacattctggttatgggcaacactccacaacatggatgatattgagctaaaatacatgtgtggctatat

SEQ ID NO: 186251 - DNA, 75 bp, synthetic construct
  source 1..75: mol_type = other DNA
tctggtgatatcaatcttcagaaagcaaaagctctttctaatcttaaacaagcaataaaggatattgaacgctta

SEQ ID NO: 186252 - DNA, 75 bp, synthetic construct
  source 1..75: mol_type = other DNA
gacacttaccgtgaataccggtgcgctgctgacaatgtcagtcagtgccaacgggggaacgccgccgtataaata

SEQ ID NO: 186253 - DNA, 75 bp, synthetic construct
  source 1..75: mol_type = other DNA
agtgctggataaaatcaaagctgtgggtgaagaagataacacaatcgttatttttaccagtgataacggtccggt

SEQ ID NO: 186254 - DNA, 75 bp, synthetic construct
  source 1..75: mol_type = other DNA
cggttaaaacgcagccagttacggcgtcggtgacacaaccgtcagacgctgacagacgaagcgccacgaacaggg

SEQ ID NO: 186255 - DNA, 75 bp, synthetic construct
  source 1..75: mol_type = other DNA
gcacggcaactatccacggaatgtggctgaggttaagtattacaccctctcgaatgatgacaccaggttacgtct

SEQ ID NO: 186256 - DNA, 75 bp, synthetic construct
  source 1..75: mol_type = other DNA
gcccggaataaactcagttcggtgacggaatcgcttaacacggcccgtaatgtcagcgccagtgatataagacgg

SEQ ID NO: 186257 - DNA, 75 bp, synthetic construct
  source 1..75: mol_type = other DNA
ttttactggtgaaagtcggcggatttattcgctggctgaaacaggattacgccgacattccggctcatcaagttg

SEQ ID NO: 186258 - DNA, 75 bp, synthetic construct
  source 1..75: mol_type = other DNA
caaacatcgaaagcggaaatcattgggaatggcgtggatgagacgactctgacagcaacagtgaaagatccgtcg

SEQ ID NO: 186259 - DNA, 75 bp, synthetic construct
  source 1..75: mol_type = other DNA
caggcggtagatgcgcgtctggcgcagatgcaaatccctgccgatgattacttcatctggataaccggcgaaggt

SEQ ID NO: 186260 - DNA, 75 bp, synthetic construct
  source 1..75: mol_type = other DNA
caaatgatgatctggacgagctgacagccatgttgcaatcacttgatgaaccagtaaaaaaagctgcacaggttg

SEQ ID NO: 186261 - DNA, 75 bp, synthetic construct
  source 1..75: mol_type = other DNA
ggaatttaagtggttatataattccctcgattatcgccattccttctcttggttttttagccagaagtcttggac

SEQ ID NO: 186262 - DNA, 75 bp, synthetic construct
  source 1..75: mol_type = other DNA
ctcccagtggttttgaccgggaaggagagttgatgttgtcattgtttttcaataaaatagtgattgcccggttaa

SEQ ID NO: 186263 - DNA, 75 bp, synthetic construct
  source 1..75: mol_type = other DNA
gcattgaggatattctggcaatacaccccacgttgccagcaagaattcatcgcccttatttgcataaaggggggc

SEQ ID NO: 186264 - DNA, 75 bp, synthetic construct
  source 1..75: mol_type = other DNA
tgggagtctgtagcaggaaaaacctgtggtgactggtatagattaccaacccaggtgattcgaaagccgctaagc

SEQ ID NO: 186265 - DNA, 75 bp, synthetic construct
  source 1..75: mol_type = other DNA
caggaatatctggaagagttttacgcgcgttataacgttgagcttattcgcgcaccagaagggttcttctattta

SEQ ID NO: 186266 - DNA, 75 bp, synthetic construct
  source 1..75: mol_type = other DNA
accaatatcgcggtggtggagcgtttcttgccggtgcggtttggtttgatagaaacagatggcgtaacgcgggtg

SEQ ID NO: 186267 - DNA, 75 bp, synthetic construct
  source 1..75: mol_type = other DNA
ccccacgttgccagcaagaatacatcgcccttatttgcataaaggggggcgcgcctggatccgtgggcaatatat

SEQ ID NO: 186268 - DNA, 75 bp, synthetic construct
  source 1..75: mol_type = other DNA
ggtgatccccatgttcccgggtattcccgcctacaccgcgatgatttcagcggtaaaaatcagccagttaggata

SEQ ID NO: 186269 - DNA, 75 bp, synthetic construct
  source 1..75: mol_type = other DNA
atggtgttcaacgttcccgtgcgggcgttacgctggtgtgcgctgcttggctcgataggtcatggttcccgaatg

SEQ ID NO: 186270 - DNA, 75 bp, synthetic construct
  source 1..75: mol_type = other DNA
ttcccgagacgctcatgccactgattacagtaacgccgtcaaccgaactctatcgcattaccggttggggggcgc

SEQ ID NO: 186271 - DNA, 75 bp, synthetic construct
  source 1..75: mol_type = other DNA
ggattatatccatgaaactaccatccgctccttggatgcatatcctgtacactcagaacatcaggatttaaatta

SEQ ID NO: 186272 - DNA, 75 bp, synthetic construct
  source 1..75: mol_type = other DNA
ttgtttatggctgctgagcgatttgagcctgatgcagatagggctgattatgaaattgatgataatggacttaag

SEQ ID NO: 186273 - DNA, 75 bp, synthetic construct
  source 1..75: mol_type = other DNA
ttacgggccagacccaggggaacatcactgccggtgctttcaccgcggattctgtcggcaatatctacgtgcagg

SEQ ID NO: 186274 - DNA, 75 bp, synthetic construct
  source 1..75: mol_type = other DNA
agcaaattccgcattacggaatcggtgttccgttttggtgcggatgtgcgtgctggcgacgatccgcgcgaggcc

SEQ ID NO: 186275 - DNA, 75 bp, synthetic construct
  source 1..75: mol_type = other DNA
tgatcctgaggaattagcaaatatatttaataaaaaacataaacaacacatggatgatcgtcttatccatctaat

SEQ ID NO: 186276 - DNA, 75 bp, synthetic construct
  source 1..75: mol_type = other DNA
aaatgtcgtcgttctggctggaaatcatgaaatcaattttaatggtaactatactgcacgactagcaaatcataa

SEQ ID NO: 186277 - DNA, 75 bp, synthetic construct
  source 1..75: mol_type = other DNA
ttattatgtgaattattaaaacacgaagacatggcttcatctgcatacaaacataaaaataataaagtgctctac

SEQ ID NO: 186278 - DNA, 75 bp, synthetic construct
  source 1..75: mol_type = other DNA
acgctcgaatgtggcgacccccgcaaaaacattagacaaaaatatggccatcatgggttaggggtaaatcagaat

SEQ ID NO: 186279 - DNA, 75 bp, synthetic construct
  source 1..75: mol_type = other DNA
ttaattaaaacgctcgatgtttgtaattatgactcagaaaggcaagttttaaccagtcatcacggaataataaga

SEQ ID NO: 186280 - DNA, 75 bp, synthetic construct
  source 1..75: mol_type = other DNA
acactactgatttcagaccagatcctgaagatatcttcaaatgtggacagacgctcgaatgtggcgacccccgca

SEQ ID NO: 186281 - DNA, 75 bp, synthetic construct
  source 1..75: mol_type = other DNA
cttcatcctaagtggcagcaggaagttatcctgaacctgcgcagtgtattccctaacattcaatttattattaca

SEQ ID NO: 186282 - DNA, 75 bp, synthetic construct
  source 1..75: mol_type = other DNA
cagcaactgggcttgagttaccgcattgctgctgttccctggtcgctgctttctctgatcgcgcgtggcctggaa

SEQ ID NO: 186283 - DNA, 75 bp, synthetic construct
  source 1..75: mol_type = other DNA
tcgggcctgacgaccggatgccgccaggcagccgggagccgaaggtgcgcccggcagacaggacaacactgcagt

SEQ ID NO: 186284 - DNA, 75 bp, synthetic construct
  source 1..75: mol_type = other DNA
aatactactgacacgtttatctttacaattataccagacaataaccatgtgataaaattatcgtctcccattacc

SEQ ID NO: 186285 - DNA, 75 bp, synthetic construct
  source 1..75: mol_type = other DNA
aaactcaaatgtgaagaccccagcaaatacattagacaaaaatatggccatcatgggctcggggtagatcagaat

SEQ ID NO: 186286 - DNA, 75 bp, synthetic construct
  source 1..75: mol_type = other DNA
ccgcctgacgttaaaggattttcgccgtttctctcttctggaaattaaactcgaagaagatctgacagtcattat

SEQ ID NO: 186287 - DNA, 75 bp, synthetic construct
  source 1..75: mol_type = other DNA
gtgcagtttggtaactacgtggaaggtccgcgtcgtcaggctgatttgaaccgggcttatgactcgctgcatgac

SEQ ID NO: 186288 - DNA, 75 bp, synthetic construct
  source 1..75: mol_type = other DNA
ggtgaggtgatgccgtatgcagaccagcagaagatgtacgaccggatgacagaggttgcgcagtatcacgcagag

SEQ ID NO: 186289 - DNA, 75 bp, synthetic construct
  source 1..75: mol_type = other DNA
aggtgagaatcagtatgccgttgaaatggataatcctgcgttctctgaagatgtggcaacggaaaccattaacac

SEQ ID NO: 186290 - DNA, 75 bp, synthetic construct
  source 1..75: mol_type = other DNA
aaaaattaagccgcgataaccttctgcacagaggactccaattgcccaaaggggaacattcttatcgcggctctg

SEQ ID NO: 186291 - DNA, 75 bp, synthetic construct
  source 1..75: mol_type = other DNA
aagaaaccgccatgcgtgaggctgaagtcgtacagcagggtgaagcagccccgcaacccgaaccggctgatccgg

SEQ ID NO: 186292 - DNA, 75 bp, synthetic construct
  source 1..75: mol_type = other DNA
aagccaggcgtgttaagcgcgtatttaaagacggcaggtttgttgacgctgaatatccggtgcgtcaggaggttt

SEQ ID NO: 186293 - DNA, 75 bp, synthetic construct
  source 1..75: mol_type = other DNA
acgggaaaaagctgaaaagcatggaaatggctggattaacgctttaccggaaggaaaaattaagccgcgataacc

SEQ ID NO: 186294 - DNA, 75 bp, synthetic construct
  source 1..75: mol_type = other DNA
cgtgctgccggtaatgttgtcggcggtatcctgggggcattcagcccgatcggcagcgagacgtcggaaacgttg

SEQ ID NO: 186295 - DNA, 75 bp, synthetic construct
  source 1..75: mol_type = other DNA
gtacggaaggaggaatgaataaggcaaatagtctggataaagccggattaacgctttaccggaagaaaaaattaa

SEQ ID NO: 186296 - DNA, 75 bp, synthetic construct
  source 1..75: mol_type = other DNA
gcctgaaaccgtccgtagtgaagaaaggtgagaatcagtatgccgttgaaatggataatcctgcgttctctgaag

SEQ ID NO: 186297 - DNA, 75 bp, synthetic construct
  source 1..75: mol_type = other DNA
ggtgtgactaaaaagctgggtgaagtcactctgcgaaaagtgctgaccgccgggctggagaaaaaatacattgcg

SEQ ID NO: 186298 - DNA, 75 bp, synthetic construct
  source 1..75: mol_type = other DNA
cctgagcgaatcgctgatccgccatcgcaaaaacgaagtgggtaacgccttcctgaaactggtgcaggataatcc

SEQ ID NO: 186299 - DNA, 75 bp, synthetic construct
  source 1..75: mol_type = other DNA
atgagcgaccggacaccatgcgtgcgattgcagagcgtgttgttccggaaaccggtgaaacccgtcacgaagttg

SEQ ID NO: 186300 - DNA, 75 bp, synthetic construct
  source 1..75: mol_type = other DNA
ttgtttatagctgctgagcgtttcgagcctgattctgatagggctgattatgaattcgatgataatggacttagg

SEQ ID NO: 186301 - DNA, 75 bp, synthetic construct
  source 1..75: mol_type = other DNA
tgttttaatcaaccacacacgagatgttgatattaatgagccagacggaccaacgaacctttccgcatgggtaag

SEQ ID NO: 186302 - DNA, 75 bp, synthetic construct
  source 1..75: mol_type = other DNA
aaccgaacagcagccgcagattcagccacaattcacagccgaggaaatcatcctcctttgctacatgcagctctg

SEQ ID NO: 186303 - DNA, 75 bp, synthetic construct
  source 1..75: mol_type = other DNA
accgagaaaaaccgtaccagcgatattcccgagacgctcgcgccactgattgcagtgacaccatcaactgaactc

SEQ ID NO: 186304 - DNA, 75 bp, synthetic construct
  source 1..75: mol_type = other DNA
cacgacttgaccaagcaagcgcccttttcgaacgggcaaaaccaatgctgaaaagccttcgggcgagacaattcg

SEQ ID NO: 186305 - DNA, 75 bp, synthetic construct
  source 1..75: mol_type = other DNA
tccctttccccaattacctataaccacatccccgtcatcactaccgaactactggcacgactttacggcactgag

SEQ ID NO: 186306 - DNA, 75 bp, synthetic construct
  source 1..75: mol_type = other DNA
cgggttactttaagtaactcacaaaatttgcaaccatctttaagaggtttgcaaatttcccccaaaactcgctcc

SEQ ID NO: 186307 - DNA, 75 bp, synthetic construct
  source 1..75: mol_type = other DNA
ttgttcgtcatgtgaaggagatgcgggagatttcgcgtgaggagcagcgtaacgccaccaaccgcgaccgtaccg

SEQ ID NO: 186308 - DNA, 75 bp, synthetic construct
  source 1..75: mol_type = other DNA
ggatgcctggcagaaagcctaccgttactacgtccccctgaaagggcaggatgttgacggtgtggtgtcactgcc

SEQ ID NO: 186309 - DNA, 75 bp, synthetic construct
  source 1..75: mol_type = other DNA
cctcggtagaagctatcacggataccgtatatcgtgtccgaatcgtaccagacgcggccttttcttttcgtgctg

SEQ ID NO: 186310 - DNA, 75 bp, synthetic construct
  source 1..75: mol_type = other DNA
cgagggcgtaccggtacggtattaacggcggtgttgcaggatcacggtacgttagcagagcatgatatctatatc

SEQ ID NO: 186311 - DNA, 75 bp, synthetic construct
  source 1..75: mol_type = other DNA
ccacggtgaagcctggctgcgcgatgatgaagagcgtccaatgattcttattgccggcggcacgggcttctctta

SEQ ID NO: 186312 - DNA, 75 bp, synthetic construct
  source 1..75: mol_type = other DNA
tgaaaaccgtggaggagatggcgctggagcagtcacagcgccaggcggaggaggggaacgctgaaagcccggtgc

SEQ ID NO: 186313 - DNA, 75 bp, synthetic construct
  source 1..75: mol_type = other DNA
atgatgcgttcaaagaatggctgaaactggataaatccattcaacagcagtttgcgaaaaaactaaagaaatgca

SEQ ID NO: 186314 - DNA, 75 bp, synthetic construct
  source 1..75: mol_type = other DNA
ctgtctgttgaacggcgggatgcagttcagggtgcggtactccgcacctggtttgagcagcatgttctgcccgaa

SEQ ID NO: 186315 - DNA, 75 bp, synthetic construct
  source 1..75: mol_type = other DNA
gccaagcaggcgcgcgatcgtgaatatcaggcgatcatgccgctgaaaggtaagatccttaacacctgggaagtt

SEQ ID NO: 186316 - DNA, 75 bp, synthetic construct
  source 1..75: mol_type = other DNA
acaggctgaatgctgagccggtggtgtttcgtggattcaccacgccggaactgggatttaccgcgctgttcagcg

SEQ ID NO: 186317 - DNA, 75 bp, synthetic construct
  source 1..75: mol_type = other DNA
ccaccagcccattgagttatttcctggcgtttattggtgcgtttatctgggcagcctattgcacagtaacgaata

SEQ ID NO: 186318 - DNA, 75 bp, synthetic construct
  source 1..75: mol_type = other DNA
atgatgcgctgaaagaatggctgaagctggataagaccattcagcttcagtttgctaaaaagctaaagaagtgct

SEQ ID NO: 186319 - DNA, 75 bp, synthetic construct
  source 1..75: mol_type = other DNA
cgcgtcaccgtactgctttacttcatcaaatttaattggttgcgggggccggatttgaaccgacgaccttcgggt

SEQ ID NO: 186320 - DNA, 75 bp, synthetic construct
  source 1..75: mol_type = other DNA
aaagatagctggatgctgacttctgttttacggcaaaacctgcaacgcgatacgtttaatgaatttacgttacag

SEQ ID NO: 186321 - DNA, 75 bp, synthetic construct
  source 1..75: mol_type = other DNA
atttcactttgtatatcatcttctccatcgcgtttatgctgatcaccattctggtgatcctggttgccaaaccca

SEQ ID NO: 186322 - DNA, 75 bp, synthetic construct
  source 1..75: mol_type = other DNA
gtaccgggctgggagaagtgcttgtgacgataaatttgcttaatgcccttgtttggctggcgatcaatctggtta

SEQ ID NO: 186323 - DNA, 75 bp, synthetic construct
  source 1..75: mol_type = other DNA
ccggctggtttgatttgcagttaaaacaacgtgtctacaacgaaaacggcaaacgggttgatgccatcgtgatga

SEQ ID NO: 186324 - DNA, 75 bp, synthetic construct
  source 1..75: mol_type = other DNA
tctcgcggcgtcgagtacaacatggcgcagaatgctgtttatcgcgtgtgcggtggcaagctgtataagggtgaa

SEQ ID NO: 186325 - DNA, 75 bp, synthetic construct
  source 1..75: mol_type = other DNA
cgcattctatcgtccggataaacgagaaattgtcctggtggcggataacatccctgacgggcggaccgttcgcga

SEQ ID NO: 186326 - DNA, 75 bp, synthetic construct
  source 1..75: mol_type = other DNA
tgcgtcgcacggggttactgaagccgacggaactgaacgatatcagacttgttcgcgagaccatccgtacgttag

SEQ ID NO: 186327 - DNA, 75 bp, synthetic construct
  source 1..75: mol_type = other DNA
ggagcagggaaggagcgacggcaaactgaaagggctggataacttatccgccctggctgtggtgaaagacagccg

SEQ ID NO: 186328 - DNA, 75 bp, synthetic construct
  source 1..75: mol_type = other DNA
aaagcggcattgtcagaaatgccacggaacagggggcgattaatgcggcgcagggcggctattcacgctatcagg

SEQ ID NO: 186329 - DNA, 75 bp, synthetic construct
  source 1..75: mol_type = other DNA
gcaaactgttcccgaaaccggactacgcaaaactggcgaacgaaggggccgacgctgacacactggcaatgattg

SEQ ID NO: 186330 - DNA, 75 bp, synthetic construct
  source 1..75: mol_type = other DNA
gggcatgaaccgcgagcagcttctggaacagtatgctgatgcggatatggctcaggagggagacgcgtctgccgt

SEQ ID NO: 186331 - DNA, 75 bp, synthetic construct
  source 1..75: mol_type = other DNA
aaacgttctgatgtgaacggcgtatcgcgcggcgtcgagtacaacatggcgcagaatgctgtttatcgtgtgtgt

SEQ ID NO: 186332 - DNA, 75 bp, synthetic construct
  source 1..75: mol_type = other DNA
atggcaatacaacaactaccactaatgaagggattagggaaaagtgcggttaatgctgattatatagaccaactt

SEQ ID NO: 186333 - DNA, 75 bp, synthetic construct
  source 1..75: mol_type = other DNA
gattgagcagaatgaaccgttcgtttacgacaaacgcgttttgtggaagcgtgtcgggcgcatcaggaaaaatgt

SEQ ID NO: 186334 - DNA, 75 bp, synthetic construct
  source 1..75: mol_type = other DNA
caaggaccaggaaactggtgaaaccattcgcgaagttgtcgagcgtccggtggcgatggcaatgatggcagaccg

SEQ ID NO: 186335 - DNA, 75 bp, synthetic construct
  source 1..75: mol_type = other DNA
cagcagccagtacgacaagcaacaggaacacctgctgtttactccgttgttcaaagctgataacgccagggtgtt

SEQ ID NO: 186336 - DNA, 75 bp, synthetic construct
  source 1..75: mol_type = other DNA
ctcagtgactactacatcaaacgtgccgagcagtatcacccggtgatccccattggtgcaggcaatgaagtgacg

SEQ ID NO: 186337 - DNA, 75 bp, synthetic construct
  source 1..75: mol_type = other DNA
ggttagccgggatcatgctggcctgtgctgcaggtccgctgggttcgtttgttgtctggcgccgtatgtcttatt

SEQ ID NO: 186338 - DNA, 75 bp, synthetic construct
  source 1..75: mol_type = other DNA
cattattgggaattatggcgcacagtgctttgtcgctgggtctggtcgtcgtcagcctgatgtctaacattcgcg

SEQ ID NO: 186339 - DNA, 75 bp, synthetic construct
  source 1..75: mol_type = other DNA
tttacgatacacctgcaggcccgtcggtggtgctatgcgcggcactgttatttattatcagtatgatgaaaaaac

SEQ ID NO: 186340 - DNA, 75 bp, synthetic construct
  source 1..75: mol_type = other DNA
atgtcaatcgaatctctcaatgcgttctcaatggattttttgaaaggtaaaaccgcaattgttaccggtgggaat

SEQ ID NO: 186341 - DNA, 75 bp, synthetic construct
  source 1..75: mol_type = other DNA
attttgtctgttgagcgtcgtgatgccgttcagggggctgtacttcgttcttggctggagcaacatgtattgcct

SEQ ID NO: 186342 - DNA, 75 bp, synthetic construct
  source 1..75: mol_type = other DNA
ctggcaatggcgtaatttactgtcgatgaccattagtcctgacctggcgtttgtcgatggcgtgaaattacagcg

SEQ ID NO: 186343 - DNA, 75 bp, synthetic construct
  source 1..75: mol_type = other DNA
cgatacagatggaagagttggcgctgtactttatgcattgctcgtttcaggacatataggtatcagggaaaaggg

SEQ ID NO: 186344 - DNA, 75 bp, synthetic construct
  source 1..75: mol_type = other DNA
gttattgtctcggtgctttgcaggttccatttaatcagatgaaaaatcctactgatcctgaggaattagcatata

SEQ ID NO: 186345 - DNA, 75 bp, synthetic construct
  source 1..75: mol_type = other DNA
ggctaaattccaggatggcagtgtttgatgaaaataaaaaaataataggttcttcctcaggactaagttgttttc

SEQ ID NO: 186346 - DNA, 75 bp, synthetic construct
  source 1..75: mol_type = other DNA
aactgcgtctgatggtggcgctggatgtcggtggtgcaatcaaaggccaacacttcgatatctatcaagggatcg

SEQ ID NO: 186347 - DNA, 75 bp, synthetic construct
  source 1..75: mol_type = other DNA
ctgattaaggcactgaaccagcaggccaatatcagttcggccaccaccaccaacacggtgaccaccaacatggtg

SEQ ID NO: 186348 - DNA, 75 bp, synthetic construct
  source 1..75: mol_type = other DNA
atgaaagcaattcacaatctgattagaaacatctcttcaagccatcaagataagcattcagataaagtcaacaat

SEQ ID NO: 186349 - DNA, 75 bp, synthetic construct
  source 1..75: mol_type = other DNA
gcgcagctgtattcctcgcaagtccggcttcaaattatgtcaatgggcatttattagtggtcgatggtggttatt

SEQ ID NO: 186350 - DNA, 75 bp, synthetic construct
  source 1..75: mol_type = other DNA
cagttggaggatgcctttgaggcaatgcctgataattggaattccgtacagtatagaatagccaaaacatttgcg

SEQ ID NO: 186351 - DNA, 75 bp, synthetic construct
  source 1..75: mol_type = other DNA
tatggggtgaccccattacactattatgataatgccgtaagtgaaatggctgaaaataaacaggaagatcccatg

SEQ ID NO: 186352 - DNA, 75 bp, synthetic construct
  source 1..75: mol_type = other DNA
gtgatttctttcttactgacgtatatgaacatattctcgtataagatcatggggattatcgggggtgatttagaa

SEQ ID NO: 186353 - DNA, 75 bp, synthetic construct
  source 1..75: mol_type = other DNA
ataattcctatgccagcagttttgccagtttctcagatgccagtaatacgatggcgcatggtcgctattactatg

SEQ ID NO: 186354 - DNA, 75 bp, synthetic construct
  source 1..75: mol_type = other DNA
cgtcaacctgatcccaacgatgcagggtggtacgcacgttaatggcttgcgtcagggcctgctggatgcgatgcg

SEQ ID NO: 186355 - DNA, 75 bp, synthetic construct
  source 1..75: mol_type = other DNA
ctctaccgtattgatctcgggaaagaggtttattacgcgctgacggaagaagagaaagagggcgtacttgagcaa

SEQ ID NO: 186356 - DNA, 75 bp, synthetic construct
  source 1..75: mol_type = other DNA
cttcggtcgtgccgactgggatccgatgattgatgtgaacctgaccgccgcattcgagttaagctatgaagcggc

SEQ ID NO: 186357 - DNA, 75 bp, synthetic construct
  source 1..75: mol_type = other DNA
acgaagcggcaaaaattatgatcccgcagaaaagcggtaaaatcattaatatctgttcactgttttcttacttag

SEQ ID NO: 186358 - DNA, 75 bp, synthetic construct
  source 1..75: mol_type = other DNA
cggtaccgtcgatattctggttaacaatgccggtatttgtaagctgaataaggtgctggacttcggtcgtgccga

SEQ ID NO: 186359 - DNA, 75 bp, synthetic construct
  source 1..75: mol_type = other DNA
taaaaatgaaggtgggattatatttgactttcccgcagctgtagccgtgagcttctctcggggggatatacttca

SEQ ID NO: 186360 - DNA, 75 bp, synthetic construct
  source 1..75: mol_type = other DNA
agaaggttgtacgtaaaaaactcaccagtggtccggcgttgcctggcaaactggctgattgtaccgcgcaggatc

SEQ ID NO: 186361 - DNA, 75 bp, synthetic construct
  source 1..75: mol_type = other DNA
gtaatccagaaactaatcagcgcgttcttgatcatattccggcaaaccgttggggcgatactcaggatttaatgg

SEQ ID NO: 186362 - DNA, 75 bp, synthetic construct
  source 1..75: mol_type = other DNA
agactaccggaactgatgcacgatccggatgcaatttaccgttccgcgacagaaagaaatgcggttgtgatgctg

SEQ ID NO: 186363 - DNA, 75 bp, synthetic construct
  source 1..75: mol_type = other DNA
ctgctccgggtatatttattaatgggtatttctccgcagctccgaatacgataggttcactcagcagaacactga

SEQ ID NO: 186364 - DNA, 75 bp, synthetic construct
  source 1..75: mol_type = other DNA
gttcactgtctggttctggcgtacacgagaaagaaacaaaaaaggcgttctctttctgttattttttattgcatt

SEQ ID NO: 186365 - DNA, 75 bp, synthetic construct
  source 1..75: mol_type = other DNA
catcgccgcgccgatagtggatccgcatcgcagcattcttgacgatgcccgcttcacctcccctgccccggcaac

SEQ ID NO: 186366 - DNA, 75 bp, synthetic construct
  source 1..75: mol_type = other DNA
caatttgtaaagctggtggataagctggaagaaggtgattgtcttgtagtgaccaagattgaccgcttaggaagg

SEQ ID NO: 186367 - DNA, 75 bp, synthetic construct
  source 1..75: mol_type = other DNA
ggtggttctcaagcttgaccgtctgggacgtgattgcatcgacctccagaaaacggttgatatgctcattgcaaa

SEQ ID NO: 186368 - DNA, 75 bp, synthetic construct
  source 1..75: mol_type = other DNA
tgctgggtaagatcactggatgcacaaaaaaagccaaagaatccacattggacgtgtgatggaacactaacgaat

SEQ ID NO: 186369 - DNA, 75 bp, synthetic construct
  source 1..75: mol_type = other DNA
attatacaaaaattaataccactacctcacgagaaaacggcgcaaaagggatcatgccttcatctcctggtcaga

SEQ ID NO: 186370 - DNA, 75 bp, synthetic construct
  source 1..75: mol_type = other DNA
ttacgctattttttatttcgccacatagtcatgcggcggtggattgctccagtggtagaattactcttggatatg

SEQ ID NO: 186371 - DNA, 75 bp, synthetic construct
  source 1..75: mol_type = other DNA
gatgatcaaaatgatcgactcgagcttacgtgaaggggcgttgtatcgcttccgcgatccggcgactggcttggg

SEQ ID NO: 186372 - DNA, 75 bp, synthetic construct
  source 1..75: mol_type = other DNA
aaacaatatatcgacaacgaactcgcagtcgataaaagcaaaaatcattgggaggttttcagccagcacctgaag

SEQ ID NO: 186373 - DNA, 75 bp, synthetic construct
  source 1..75: mol_type = other DNA
agccaggttttattgtggatggtcaacaacgtactgctgctttgcgggatgcagaaatcaattcgtttatgatgc

SEQ ID NO: 186374 - DNA, 75 bp, synthetic construct
  source 1..75: mol_type = other DNA
gtacggatattgatggtcagcctatcgtccgtaaatggaatgaactgcagaacctgtccaaggatatatcattag

SEQ ID NO: 186375 - DNA, 75 bp, synthetic construct
  source 1..75: mol_type = other DNA
ttactgggctttctcagcaaggactcatttcatttatttgcgaaggaaagaggggcgaccggagaatagaagagc

SEQ ID NO: 186376 - DNA, 75 bp, synthetic construct
  source 1..75: mol_type = other DNA
actggaaggcattctcgatcaggagctggacaccgctgaagagtcgctgttaacgccgtcacgctcgctgcaacg

SEQ ID NO: 186377 - DNA, 75 bp, synthetic construct
  source 1..75: mol_type = other DNA
ttatgaggtttataattacgttgataagccagatctgaacatgaaccagttggttgctgaagttgaacaaagtct

SEQ ID NO: 186378 - DNA, 75 bp, synthetic construct
  source 1..75: mol_type = other DNA
ttgccattgatggcgcaccgttcaggacacctgatgaacctgagttgcgtgaatattatggctctgccaacacat

SEQ ID NO: 186379 - DNA, 75 bp, synthetic construct
  source 1..75: mol_type = other DNA
ttggccaactcatcctcacgatattccgttctgactgccgcccactgggggcccatgctggttgaaaccgacggc

SEQ ID NO: 186380 - DNA, 75 bp, synthetic construct
  source 1..75: mol_type = other DNA
caacaggcactcgaccaggcgttagctggttttgacactgttgtactgctggcagcggaacatcgcgatgatgtc

SEQ ID NO: 186381 - DNA, 75 bp, synthetic construct
  source 1..75: mol_type = other DNA
attcaaaagatctaagcgagtttcctcataaaggggagactcgtgttgttcgttttggctttcttatcaatgaag

SEQ ID NO: 186382 - DNA, 75 bp, synthetic construct
  source 1..75: mol_type = other DNA
ctggatcaggcgctggccgctgtgcgcagcggtgacacgctggttgttcccaagcttgaccgtctggcgcggtca

SEQ ID NO: 186383 - DNA, 75 bp, synthetic construct
  source 1..75: mol_type = other DNA
ctttttatttgtggtaaatgggcggctggtgggtgttagcggcacctgtcagtcctttgcttatgtgttgatgat

SEQ ID NO: 186384 - DNA, 75 bp, synthetic construct
  source 1..75: mol_type = other DNA
cgtggtgcgccgcgtccgttacccgatacgctggcgacgatgacgccgcaggcttataacagcattcagtatgat

SEQ ID NO: 186385 - DNA, 75 bp, synthetic construct
  source 1..75: mol_type = other DNA
acagttcaggacacctgatgaacctgagttgcgtgaatattatggctctgccaacacatccactgagcggcagag

SEQ ID NO: 186386 - DNA, 75 bp, synthetic construct
  source 1..75: mol_type = other DNA
cggacagatccttgccggagcggtgattagcgaaggtatcaaacccggcgttatttgcattcatgaaggagcatg

SEQ ID NO: 186387 - DNA, 75 bp, synthetic construct
  source 1..75: mol_type = other DNA
cacaccatacctgagttacatcaatgactacggcggacgtccggtgctgcagttctcctgtggtggtagccgctg

SEQ ID NO: 186388 - DNA, 75 bp, synthetic construct
  source 1..75: mol_type = other DNA
ataaaatagagttctcatcagtagagttcaatgaaaaagcggaggctacgcctggtgttcctttagtttcatttg

SEQ ID NO: 186389 - DNA, 75 bp, synthetic construct
  source 1..75: mol_type = other DNA
cgcgtcgaatcctgaggcttccgggtgaaaaaatccgctctgtgtaccgtgaaagcgacatcataccgggagagc

SEQ ID NO: 186390 - DNA, 75 bp, synthetic construct
  source 1..75: mol_type = other DNA
atgtttttgccgagttaagtgaacgctgggagaagggcggttatgcacgttttacggaaggaaaaagtgagctgc

SEQ ID NO: 186391 - DNA, 75 bp, synthetic construct
  source 1..75: mol_type = other DNA
aggcacggcgtagtatcaaagttgctgattttgattttctggatgttcttaatagcgatctcactacacaagaaa

SEQ ID NO: 186392 - DNA, 75 bp, synthetic construct
  source 1..75: mol_type = other DNA
agccttggtacgtctgatcgacagggatgaactgcaaaagtatctggatgattacaatcagaagataattgaaga

SEQ ID NO: 186393 - DNA, 75 bp, synthetic construct
  source 1..75: mol_type = other DNA
ctggttgatagattagctacacggctcgaacattttaaccctaacaaattcgtcaccatgtatttagttgatgca

SEQ ID NO: 186394 - DNA, 75 bp, synthetic construct
  source 1..75: mol_type = other DNA
tggcgtctctggtcaggatgagaaaggcaactggcatggtctgtacctgatggtatttaaagattcttttaataa

SEQ ID NO: 186395 - DNA, 75 bp, synthetic construct
  source 1..75: mol_type = other DNA
gctgacttatgtgctgatttcacacaatgtctcggtgatacgtcatatgagcgatcgggtggcggtgatgtatct

SEQ ID NO: 186396 - DNA, 75 bp, synthetic construct
  source 1..75: mol_type = other DNA
gcgacgtccatatcaattttccggcccgtaaaaactggcttggcaaatctacggaacatgttcatgccattaatg

SEQ ID NO: 186397 - DNA, 75 bp, synthetic construct
  source 1..75: mol_type = other DNA
ctgccagtggctacacggtgattatcatcacagcgaaaccgtcattcaccgttacggtaccggcgcaatggtgtt

SEQ ID NO: 186398 - DNA, 75 bp, synthetic construct
  source 1..75: mol_type = other DNA
ctggggatagctcacacgctggtggaaaacggctggcacgacgaggcatttctggcgcgttgcaccacaggttat

SEQ ID NO: 186399 - DNA, 75 bp, synthetic construct
  source 1..75: mol_type = other DNA
agcaggattcttacctgaaaaaattctgcatgagatcaaacgtcgccagcgacgcaaggacaaagaacaggaata

SEQ ID NO: 186400 - DNA, 75 bp, synthetic construct
  source 1..75: mol_type = other DNA
tgcgaatactgcggcaattgcagcgctggatgtcagactaaccacggctgaaggagaaatagtcaccttacaggc

SEQ ID NO: 186401 - DNA, 75 bp, synthetic construct
  source 1..75: mol_type = other DNA
ctaccaatgagcgccgtgacgttattcgctggctggatcatggccgggcgaattcagaagatgacggaaggaaaa

SEQ ID NO: 186402 - DNA, 75 bp, synthetic construct
  source 1..75: mol_type = other DNA
cgatgcgctggggattgattacacccgcgcgaacaaaggggcattatctgtaaacggtgagccgggcttacggcc

SEQ ID NO: 186403 - DNA, 75 bp, synthetic construct
  source 1..75: mol_type = other DNA
ccgtttttcaccaccctggatacggtgactttttacatgctggtcgccttaatcaacggactggtgctgattggc

SEQ ID NO: 186404 - DNA, 75 bp, synthetic construct
  source 1..75: mol_type = other DNA
cgtaccagacagggttttatcgaagagaaaacagcaacatataaccgattgagaggtttgatatcggaattcagt

SEQ ID NO: 186405 - DNA, 75 bp, synthetic construct
  source 1..75: mol_type = other DNA
tgaaaaaggaaacgccatattacaggaagttatataaacttacataccttttatcaaagtgtgataatattgaga

SEQ ID NO: 186406 - DNA, 75 bp, synthetic construct
  source 1..75: mol_type = other DNA
aaatcacttgggaacaactgctggaagagtactttttttcaaagaatcttcggccggatacagagtggagctact

SEQ ID NO: 186407 - DNA, 75 bp, synthetic construct
  source 1..75: mol_type = other DNA
cttgaaccgccccgggtttcctggagagtgttttatctgtgaactcaggctgccagatcatcgtttccgatggaa

SEQ ID NO: 186408 - DNA, 75 bp, synthetic construct
  source 1..75: mol_type = other DNA
ctggggatcgcccatacgctggtggaaaatggttggcacgacgaagcgtttctggcgcgttgcaccacaggttat

SEQ ID NO: 186409 - DNA, 75 bp, synthetic construct
  source 1..75: mol_type = other DNA
acacaatccgaagtcgcagctctcgctacaggtttgcagcaggcgcggcagcgtattctggcgcttgaaacggca

SEQ ID NO: 186410 - DNA, 75 bp, synthetic construct
  source 1..75: mol_type = other DNA
ggttaagcgtcgcgcggtgggtaatgtgatccacaaaggtgttttacgggatgccgctgctatggtgagaaaagg

SEQ ID NO: 186411 - DNA, 75 bp, synthetic construct
  source 1..75: mol_type = other DNA
gcacgtttcgtcttggcgacacaaaaacgctgcaattgcctcggctaacgttaaacgcgggtgatagttgggcgt

SEQ ID NO: 186412 - DNA, 75 bp, synthetic construct
  source 1..75: mol_type = other DNA
agaaaaaactcaatcgtcaaaagaaaacaaaatcatctaagaacgagcccaagaaaaaaacacttcaatctgaaa

SEQ ID NO: 186413 - DNA, 75 bp, synthetic construct
  source 1..75: mol_type = other DNA
gtgctcagcaaatctctcgagcgaaaccgtcagctggcagagtacgctgaccgggcagccgaagccggacgagtc

SEQ ID NO: 186414 - DNA, 75 bp, synthetic construct
  source 1..75: mol_type = other DNA
actggaaacagttgcttatcatggcgatgcttgctgcgctggttgtcatcggtgtggttgcctggaatgttcacg

SEQ ID NO: 186415 - DNA, 75 bp, synthetic construct
  source 1..75: mol_type = other DNA
agggttaagcttcagcttgatcgctttacggctgatgatgcgcgacatgtatttttgcgtaatcttcaggacacg

SEQ ID NO: 186416 - DNA, 75 bp, synthetic construct
  source 1..75: mol_type = other DNA
actggaaacagttgcttatcgtgttgatgcttgctgctctgatcatctacggagtggttgcgtggaatgtccacg

SEQ ID NO: 186417 - DNA, 75 bp, synthetic construct
  source 1..75: mol_type = other DNA
gatgcttgctgttctggtcatatcaggagttgttgcctggaatgtgcacggcatccgtcagtacgatgccgggta

SEQ ID NO: 186418 - DNA, 75 bp, synthetic construct
  source 1..75: mol_type = other DNA
caggctgatgataaggccaggtcacaacgtgatcaggagaaaacacaaattgaacgtgaagcacaatcccgtatc

SEQ ID NO: 186419 - DNA, 75 bp, synthetic construct
  source 1..75: mol_type = other DNA
tggtatttccccgggatattacgctaccgatatcactctggcgacccgtagtaatccagaaactaaccagcgcgt

SEQ ID NO: 186420 - DNA, 75 bp, synthetic construct
  source 1..75: mol_type = other DNA
gaccatgcaaacagggcactggcgaacgccggttatcaggaagagatagaccatcgttcatacgagcgacagggg

SEQ ID NO: 186421 - DNA, 75 bp, synthetic construct
  source 1..75: mol_type = other DNA
cgttccctcagccgataacagccagctggtcatcagtgcactgaccgataaggggttacggtatgcagggtatgg

SEQ ID NO: 186422 - DNA, 75 bp, synthetic construct
  source 1..75: mol_type = other DNA
gtttatcgttaattaataacgccttgttaaacaagggcactgcattttcagcatctgagcggtgtgcgtttaatc

SEQ ID NO: 186423 - DNA, 75 bp, synthetic construct
  source 1..75: mol_type = other DNA
gcaaatctgatcgcaccaacgatcaagttgccgatggaaacggttcaaatgctgaactgtggtcgttggctgcaa

SEQ ID NO: 186424 - DNA, 75 bp, synthetic construct
  source 1..75: mol_type = other DNA
gctacactctttattcacgtaatacaacgtttgcatttattgattatgtgttgttgagaaaattcaataaaaaaa

SEQ ID NO: 186425 - DNA, 75 bp, synthetic construct
  source 1..75: mol_type = other DNA
cgcgccaatgacatcgcgctcaaatgcaaatactgtgaaaaagatttttcccataatgtggtgctggccaattaa

SEQ ID NO: 186426 - DNA, 75 bp, synthetic construct
  source 1..75: mol_type = other DNA
gtaccgcaggccgatgcctgtcgtctgccggacgtttcccctgcgccggaagagggcgcatcagaaaacataacg

SEQ ID NO: 186427 - DNA, 75 bp, synthetic construct
  source 1..75: mol_type = other DNA
tccccccagaacaagccgtaacatgcagaaatggatcagcattgttaaaagcggtcgcgaagctactgccggtat

SEQ ID NO: 186428 - DNA, 75 bp, synthetic construct
  source 1..75: mol_type = other DNA
taaattactggcggactacaaaattgcgcaggccgatctggatgagtacctctacgcccgtcacgcgccggaacg

SEQ ID NO: 186429 - DNA, 75 bp, synthetic construct
  source 1..75: mol_type = other DNA
acgatttaagcaacactatcaacaacataaagaaagaaattaactccggttttactgagttacttaatcgcgtag

SEQ ID NO: 186430 - DNA, 75 bp, synthetic construct
  source 1..75: mol_type = other DNA
gtttattagaactactactggtttgactttacctgcgcccattgacctctttggattagtacaagaaatgtacga

SEQ ID NO: 186431 - DNA, 75 bp, synthetic construct
  source 1..75: mol_type = other DNA
aaagatagaatcgacgatttctggaaaggtttaatttttagcgggaatcgattactttctatttatagaatcacc

SEQ ID NO: 186432 - DNA, 75 bp, synthetic construct
  source 1..75: mol_type = other DNA
atggtattgtatttaaagataatgaaaatcaaggtgaagtcattatttttaatttctttacttgggtggaaataa

SEQ ID NO: 186433 - DNA, 75 bp, synthetic construct
  source 1..75: mol_type = other DNA
tggtattgtctgtcttcccgtcgtgatgccccggagaaggctggcgatgacggtctgccgcctgaatattttcag

SEQ ID NO: 186434 - DNA, 75 bp, synthetic construct
  source 1..75: mol_type = other DNA
tcttcctgaaaacaccaaggctgcgtggtctgctggcactcaatatggccgtggcagcggcaagcgcgatggtta

SEQ ID NO: 186435 - DNA, 75 bp, synthetic construct
  source 1..75: mol_type = other DNA
aaatggcacttgataacccatgccggacagatggaacggaaatactcgatgccagatgggagcacggccccgatt

SEQ ID NO: 186436 - DNA, 75 bp, synthetic construct
  source 1..75: mol_type = other DNA
ttgaggtggtttggtacctatggtgagttggcggggatgtacagttacagcagttatattcgccagatgagtgct

SEQ ID NO: 186437 - DNA, 75 bp, synthetic construct
  source 1..75: mol_type = other DNA
aacctgacaacctggaacaggtcatccggtcagccggggcagtgggagagtgcctatattcgtgcggagcggggg

SEQ ID NO: 186438 - DNA, 75 bp, synthetic construct
  source 1..75: mol_type = other DNA
gaaggatatttgaaatacaatgtaacagttggagaataccgtccatctgacgatagtatcgaaggagcatatctt

SEQ ID NO: 186439 - DNA, 75 bp, synthetic construct
  source 1..75: mol_type = other DNA
ctctgctggcagtgtgcttttttactgtgggctttttcgtctttggcccgcaaatgctgattggacttgcggcgg

SEQ ID NO: 186440 - DNA, 75 bp, synthetic construct
  source 1..75: mol_type = other DNA
tgcgtcagaacgggtatctgatacagagtcagacggtggcgccgggggcatttgccctgacggacctgccggtga

SEQ ID NO: 186441 - DNA, 75 bp, synthetic construct
  source 1..75: mol_type = other DNA
cgtacatcaggtgcagtcggtgtggttggtgataatggtgaggtatacatgagcggactggctgaaaacggacgt

SEQ ID NO: 186442 - DNA, 75 bp, synthetic construct
  source 1..75: mol_type = other DNA
cactgaacctgagccagtccatggggagtctggggtatgtgagtctgtggggcagtcgcgatgagtaccgtgacg

SEQ ID NO: 186443 - DNA, 75 bp, synthetic construct
  source 1..75: mol_type = other DNA
tggtcacgcttgacccgacgagtttcccggaggatgcggaggtcccacagactgacagcagggtggtgcccacga

SEQ ID NO: 186444 - DNA, 75 bp, synthetic construct
  source 1..75: mol_type = other DNA
agaacagtctatgtcatgcggactaccgtcttccggaagagaaagggcctgcgggtattttcctgacccgcacgg

SEQ ID NO: 186445 - DNA, 75 bp, synthetic construct
  source 1..75: mol_type = other DNA
gatgacatggagtaagtcatcagaccaacccggcaattgggaaactgtatacacccgtgccgaacggggagtgaa

SEQ ID NO: 186446 - DNA, 75 bp, synthetic construct
  source 1..75: mol_type = other DNA
aaaaaccagtgcaatgcctcttaccagcttccagagcaaaaggggacggctgggattttcttggcgagctccgta

SEQ ID NO: 186447 - DNA, 75 bp, synthetic construct
  source 1..75: mol_type = other DNA
gggacaatatcgcccttcagattctgctgttgagcactcactgctgggacagttaacgtctatatacgggctacc

SEQ ID NO: 186448 - DNA, 75 bp, synthetic construct
  source 1..75: mol_type = other DNA
tgcaggcagtttaccttttaccggaaactcaggcagtgttacagcgcctggggcaacaggacttgatatctattc

SEQ ID NO: 186449 - DNA, 75 bp, synthetic construct
  source 1..75: mol_type = other DNA
ccttaagcgtgcgcaccgatggcgataagtcggcgtttatgccgctaaaaacctttgccgaaccatcacaggtgg

SEQ ID NO: 186450 - DNA, 75 bp, synthetic construct
  source 1..75: mol_type = other DNA
accgcttagcgcaaagcctgcaacaaggcggggcgggaatttctcaaatgctagaaaacattaatcagcagcgcg

SEQ ID NO: 186451 - DNA, 75 bp, synthetic construct
  source 1..75: mol_type = other DNA
tctgacgggcggcagactcagctttcggcggtgatgctgtctgaggatgacagcgccgggcagtatcagacgcgg

SEQ ID NO: 186452 - DNA, 75 bp, synthetic construct
  source 1..75: mol_type = other DNA
gttatccggcttaatggtacgctgtatcccgcgtttgccgttccctcagccgataacaggcatctggtcatcagt

SEQ ID NO: 186453 - DNA, 75 bp, synthetic construct
  source 1..75: mol_type = other DNA
aacacgcggtatcgaaacagaacgcggcgaacagaatcgtctgattaacaggcttaacctggaaatacagatttc

SEQ ID NO: 186454 - DNA, 75 bp, synthetic construct
  source 1..75: mol_type = other DNA
tgaacgtacctggcagcttgatacgcctttatttacgttgcgctttttctccccacaggaaggtattgtcggtgt

SEQ ID NO: 186455 - DNA, 75 bp, synthetic construct
  source 1..75: mol_type = other DNA
cgtgggctttttcgtctttggcccacaaatgctgattggacttgcggcggtggagtgtgggcacaaagctgcggc

SEQ ID NO: 186456 - DNA, 75 bp, synthetic construct
  source 1..75: mol_type = other DNA
cggtttttttcagggctggggatggccaccgtgtgcccgcttgctgacccactggtactcacgcaatgagcgcgg

SEQ ID NO: 186457 - DNA, 75 bp, synthetic construct
  source 1..75: mol_type = other DNA
ggagtgattcacgactacacccgcaaaaacggtgtagccagcgcagtgattctgacgccagcaaacgccccagca

SEQ ID NO: 186458 - DNA, 75 bp, synthetic construct
  source 1..75: mol_type = other DNA
ctgaccaacgctctgcgccgcgtgggcgttcagatgcatcaacacgccgatggcatcagcttctccaccactgaa

SEQ ID NO: 186459 - DNA, 75 bp, synthetic construct
  source 1..75: mol_type = other DNA
acctttgccgaaccgtcgcaggcggaccgcttagtgcaaagcctgcaacagggcggagcggggatttctcagacg

SEQ ID NO: 186460 - DNA, 75 bp, synthetic construct
  source 1..75: mol_type = other DNA
aaattacaggttgttccgctgggaaaatcactgctgagcttcgtggcgaaagtcacaaataacacggcgctgtat

SEQ ID NO: 186461 - DNA, 75 bp, synthetic construct
  source 1..75: mol_type = other DNA
atgaacaatgtcattcccctgcagaattcaccagaacgcgtctccctgttacccattgcgccgggggggggggat

SEQ ID NO: 186462 - DNA, 75 bp, synthetic construct
  source 1..75: mol_type = other DNA
attcaccagaacgcgtttcgttattaccgattgcacccggcgttgattttgcgaccgccgtggcattacgacgca

SEQ ID NO: 186463 - DNA, 75 bp, synthetic construct
  source 1..75: mol_type = other DNA
atggtaaatctccctcctgagctggggtcacctgatgtgtgggctggtggaggcattgggctgattacaggcctg

SEQ ID NO: 186464 - DNA, 75 bp, synthetic construct
  source 1..75: mol_type = other DNA
gacgttttggcacaacgcatgagattgccagcctggtggcctggctatgttccgaaggcgccaattacaccaccg

SEQ ID NO: 186465 - DNA, 75 bp, synthetic construct
  source 1..75: mol_type = other DNA
aagaccgtttgtgcggatcctgtccgaaaaagtgcgtgcgcgacgcggacgcccgccaaaagatgaagtgcgcta

SEQ ID NO: 186466 - DNA, 75 bp, synthetic construct
  source 1..75: mol_type = other DNA
atgaacaatgtcattcccctgcagaattcaccagaacgcgtctccctgttacccattgcgccaggggtggatttt

SEQ ID NO: 186467 - DNA, 75 bp, synthetic construct
  source 1..75: mol_type = other DNA
gtggcagtcatacagaaaatgatatactagatgagggcgggaatgactcggggatatccgttgtttcgcctgttg

SEQ ID NO: 186468 - DNA, 75 bp, synthetic construct
  source 1..75: mol_type = other DNA
tgacgcttaacacctgcgcttacactaccgagatttttgccggggcaatccgttcggttccgcatggggaaattg

SEQ ID NO: 186469 - DNA, 75 bp, synthetic construct
  source 1..75: mol_type = other DNA
tctatttaattatctcttatgtcctgataagcctgttccgtaaagcggaaaaacgctggttgcagcatgtgaaac

SEQ ID NO: 186470 - DNA, 75 bp, synthetic construct
  source 1..75: mol_type = other DNA
ggtcacctgatgtatgggctggtggaggcgttgggctgattgcaggtctgctactccgctatgtcattgtcaggg

SEQ ID NO: 186471 - DNA, 75 bp, synthetic construct
  source 1..75: mol_type = other DNA
aggggctaaagctgaaggtatccagtgtgcatcgtcgttgggggttacgtggacgccctggtcatctggaagtag

SEQ ID NO: 186472 - DNA, 75 bp, synthetic construct
  source 1..75: mol_type = other DNA
gtttatgacatggatgaaactgatgtacttgttgcgttgtctgtatgccagacaaagagagattgatccggatgt

SEQ ID NO: 186473 - DNA, 75 bp, synthetic construct
  source 1..75: mol_type = other DNA
ggcgtacgtgcggagatggtgcagttggatctcggtaaactgccagagggggcaatggcgctggagaaacttatt

SEQ ID NO: 186474 - DNA, 75 bp, synthetic construct
  source 1..75: mol_type = other DNA
aaggaaggagatatgagcgtatctgatatttccactatgattggtgaccgtaatagcactataaaaagacttttg

SEQ ID NO: 186475 - DNA, 75 bp, synthetic construct
  source 1..75: mol_type = other DNA
cgaatgtcttacgagggtagggcgtgaagatttaccaatgcaggatgctattcaacttaatatatatcttgagca

SEQ ID NO: 186476 - DNA, 75 bp, synthetic construct
  source 1..75: mol_type = other DNA
ggtcgaaccaaaggccgggcaggtggtaccggctctcgcacacattgggcaaagcgaagcggaatcatcccactc

SEQ ID NO: 186477 - DNA, 75 bp, synthetic construct
  source 1..75: mol_type = other DNA
tggaaggacaaagtttgcttatttgggcattatttcatgtatttatagatctatttcacataaatattcatgggg

SEQ ID NO: 186478 - DNA, 75 bp, synthetic construct
  source 1..75: mol_type = other DNA
tggtaagacattcgttgtaacttatcaggagcgagactttttttcaaacgacagtcataatttgcgactctatgt

SEQ ID NO: 186479 - DNA, 75 bp, synthetic construct
  source 1..75: mol_type = other DNA
gagagtttgataccgagtttatggatgatgcaaggcattatgaaaattttataagcgttaatttttttggagatg

SEQ ID NO: 186480 - DNA, 75 bp, synthetic construct
  source 1..75: mol_type = other DNA
tggtgaataatgcgggtgcaatgaccaaagcgccgtttcttgatatggcttttgatgagtggcgcaagattttta

SEQ ID NO: 186481 - DNA, 75 bp, synthetic construct
  source 1..75: mol_type = other DNA
taccgcgcgtgaggtggttagccacggcgtacgtgcggagatcgtgcaactggatctcggcaatctaccagaagg

SEQ ID NO: 186482 - DNA, 75 bp, synthetic construct
  source 1..75: mol_type = other DNA
tctgaaggcgcaaattacaccaccgggcagtcgttaattgtcgatggtggctttatgctggcgaatccgcagttc

SEQ ID NO: 186483 - DNA, 75 bp, synthetic construct
  source 1..75: mol_type = other DNA
aagcttctgaaagcccccatgttccgtaagtaccgcgactggtttttgtttgatgaagttgaacccaaggccggg

SEQ ID NO: 186484 - DNA, 75 bp, synthetic construct
  source 1..75: mol_type = other DNA
tgaggcttgagatggatcggtatgttgagcgtgaattgccgggagggagaacctctgtattttatcagcgaaaaa

SEQ ID NO: 186485 - DNA, 75 bp, synthetic construct
  source 1..75: mol_type = other DNA
gctcacccttccgctacgacattgagtttaccagtaccgataaagccatcgagccggagtcggtactgatgcagg

SEQ ID NO: 186486 - DNA, 75 bp, synthetic construct
  source 1..75: mol_type = other DNA
cgaagctggatttcaacgattttattgacgcaatggctggcctggtgtgtgccgtgttcatcgttctgacttgta

SEQ ID NO: 186487 - DNA, 75 bp, synthetic construct
  source 1..75: mol_type = other DNA
aatgttcagtaatcttcagggcgtgttaactatcggtgcttcagatgaatctgccgatacgatcttacctttcct

SEQ ID NO: 186488 - DNA, 75 bp, synthetic construct
  source 1..75: mol_type = other DNA
aactatctgaactgacagaaaatgacgtaattgaacattgcaggctgagaaacaacgctggtgcaggtccagcaa

SEQ ID NO: 186489 - DNA, 75 bp, synthetic construct
  source 1..75: mol_type = other DNA
gcatatgctggcaacgttgcgtgatgccgttcttggggattttcgccctgatttaacgctctatctcgatgttac

SEQ ID NO: 186490 - DNA, 75 bp, synthetic construct
  source 1..75: mol_type = other DNA
atgcgcagtaagtatatcgtcattgaggggctggaaggtgcaggcaaaaccaccgcgcgcaacgtggtggttgag

SEQ ID NO: 186491 - DNA, 75 bp, synthetic construct
  source 1..75: mol_type = other DNA
cggtcatcaaacctgcgctggctaacggcacctgggtgattggcgatcgccacgatctctccactcaggcgtatc

SEQ ID NO: 186492 - DNA, 75 bp, synthetic construct
  source 1..75: mol_type = other DNA
tctaacccgcaatcggtcgcgatggggattggcctgattttactgctgggattcacctgttacgcctcacgcggg

SEQ ID NO: 186493 - DNA, 75 bp, synthetic construct
  source 1..75: mol_type = other DNA
tagcgataacaacaacctgcgcagtgccaataacgaagaaaaacagtcattccagcttagcgacatccttgccgt

SEQ ID NO: 186494 - DNA, 75 bp, synthetic construct
  source 1..75: mol_type = other DNA
ttatcatctacagtgtggtttacatcttgttggggattctgtgctggttttttgttagcgataacaacaacctgc

SEQ ID NO: 186495 - DNA, 75 bp, synthetic construct
  source 1..75: mol_type = other DNA
caacctgaacggacagggcagcgaaagtgacctcgcggcagagctggcagacgtggaaatcatgacagagcagct

SEQ ID NO: 186496 - DNA, 75 bp, synthetic construct
  source 1..75: mol_type = other DNA
gcaccgccctctaccgtctggctctgcagcgtttcgggccggatgcacaggccctgaaactgacagaagaggccg

SEQ ID NO: 186497 - DNA, 75 bp, synthetic construct
  source 1..75: mol_type = other DNA
atgagtaagaaactgattgccctgtgtgcttgcccgatggggctggcgcacacctttatggctgcccaggcgctg

SEQ ID NO: 186498 - DNA, 75 bp, synthetic construct
  source 1..75: mol_type = other DNA
gtgtcagcacattattacgggcttacggacgcctgacctgcggggttctggctgaaaaaatgcagatgccatcct

SEQ ID NO: 186499 - DNA, 75 bp, synthetic construct
  source 1..75: mol_type = other DNA
catctctcttgattatatttgcgattgcgtttttcttttataaggattatgcatcagttggcagaaacaactctt

SEQ ID NO: 186500 - DNA, 75 bp, synthetic construct
  source 1..75: mol_type = other DNA
gtgtcagcacattattacgggcttacggacgcctgacctgtggagttctgactgaaaaaatgaatatgctgccct

SEQ ID NO: 186501 - DNA, 75 bp, synthetic construct
  source 1..75: mol_type = other DNA
gcaaaagagtttgcgacgggcgtgctgacctgtgagtcagtccacattgttgctgaggtggataacagaatgtgc

SEQ ID NO: 186502 - DNA, 75 bp, synthetic construct
  source 1..75: mol_type = other DNA
gacctttaaaatgtatcgctgcattattttgccatcggcgctgcgtattgcgttaccggcctacagcaacgaagt

SEQ ID NO: 186503 - DNA, 75 bp, synthetic construct
  source 1..75: mol_type = other DNA
gatcctgatgctgcactctactgcgctggcatttactgccacggtgccggatctgctgaaaattgcccgcgatat

SEQ ID NO: 186504 - DNA, 75 bp, synthetic construct
  source 1..75: mol_type = other DNA
gtttcttaacgctttcttccgcagtggcctgaactgtaccgtgctggcgctgacgcttaacacctgcgcttacac

SEQ ID NO: 186505 - DNA, 75 bp, synthetic construct
  source 1..75: mol_type = other DNA
tggaatatcaccgaacatgttctgcgttacctgattgttgaccggacggctgcgcctgccgcgatttctgcggag

SEQ ID NO: 186506 - DNA, 75 bp, synthetic construct
  source 1..75: mol_type = other DNA
tggccttaatggcaaagcaaattctgcaaaagtgcatttttacgccattaatgattttggtggtgccattgaagg

SEQ ID NO: 186507 - DNA, 75 bp, synthetic construct
  source 1..75: mol_type = other DNA
ctaaacgtggccaaacaatcaaactgatgtacaccgccagcagtgctctgccaaaagacagagaaagtgtgttct

SEQ ID NO: 186508 - DNA, 75 bp, synthetic construct
  source 1..75: mol_type = other DNA
cagttcgtctgacctcgcagggcgaagcctatatcggcgatcattttattgtggctaacgcgattgtttactcct

SEQ ID NO: 186509 - DNA, 75 bp, synthetic construct
  source 1..75: mol_type = other DNA
atgcagttctccgatatgtacgttaccactaaaggtttcctgccctttgcgccagaggctgatttctgggtgggt

SEQ ID NO: 186510 - DNA, 75 bp, synthetic construct
  source 1..75: mol_type = other DNA
cgtaagtacgaatgatcaagggtatgccgccaatccgttcccgaccagtagtgccgcaaaacctgatgctgtact

SEQ ID NO: 186511 - DNA, 75 bp, synthetic construct
  source 1..75: mol_type = other DNA
cattccattcgtatctccagtaacagggggttgtattgtattttattgtgccggttcaggtgtgcgtttcccggc

SEQ ID NO: 186512 - DNA, 75 bp, synthetic construct
  source 1..75: mol_type = other DNA
cgcctttgaggaaggcaacccggacaggccgtatatcgccggggtaaagcacgactcggcgcacaccgaccatgt

SEQ ID NO: 186513 - DNA, 75 bp, synthetic construct
  source 1..75: mol_type = other DNA
accattcagaactacaagcgcaacgtgctacgcaccccggcgaacaacaaaatccgcctcgacgatgagcgcggc

SEQ ID NO: 186514 - DNA, 75 bp, synthetic construct
  source 1..75: mol_type = other DNA
actgccctgcgcaccctgcacggcgtcattaccggctttaaacatctctcatcgtcacaggacgaagcccgttac

SEQ ID NO: 186515 - DNA, 75 bp, synthetic construct
  source 1..75: mol_type = other DNA
ggtgccgcaaatcgtcgaaaaaatcctgcgcgagcggcaccagatgcgcggtcaggacttcgtgtttaacctcaa

SEQ ID NO: 186516 - DNA, 75 bp, synthetic construct
  source 1..75: mol_type = other DNA
cgggggcgataacaccacctacggcgaagcctaccactatgctgacaacttcctgcaaaaaggcgataacgaggc

SEQ ID NO: 186517 - DNA, 75 bp, synthetic construct
  source 1..75: mol_type = other DNA
cgccatctaccagaaacagacggtgccgcaaatcgtcgaaaaaatcctgcgcgagcggcatcacatgcgcggtca

SEQ ID NO: 186518 - DNA, 75 bp, synthetic construct
  source 1..75: mol_type = other DNA
gatgcacgcgccgaaaggcgtggcggtcgccagcggcgagcacctgcaactggccgccgtgaaaaacctccagat

SEQ ID NO: 186519 - DNA, 75 bp, synthetic construct
  source 1..75: mol_type = other DNA
gatgcacgccccgaaaggggtggcggtcgccagcggcgagcacctgcaactggccgccgtgaaaaacctccagat

SEQ ID NO: 186520 - DNA, 75 bp, synthetic construct
  source 1..75: mol_type = other DNA
gccgacgcgcaggacaaggcgcagggtcaggtgcgcgaaatggccgacattatcagcgaactgaacagcctgagc

SEQ ID NO: 186521 - DNA, 75 bp, synthetic construct
  source 1..75: mol_type = other DNA
cgccatctaccagaagcagacggtgccgcaaatcgtcgaaaaaatcctgcgcgagcgacatcagatgcgcggtca

SEQ ID NO: 186522 - DNA, 75 bp, synthetic construct
  source 1..75: mol_type = other DNA
cgccatctaccagaaccagacggtgccgcaaatcgtcgaaaaaatcctgcgcgagcggcatcaaatgcgcggtca

SEQ ID NO: 186523 - DNA, 75 bp, synthetic construct
  source 1..75: mol_type = other DNA
atgggtattcagaatttcgatcattcacaccacaagcttaaaattcgcggcctgcaaagtgcggtggatgtgctg

SEQ ID NO: 186524 - DNA, 75 bp, synthetic construct
  source 1..75: mol_type = other DNA
tcaaccttcggctaatgttaagctgtttaaaacctctgattttggctatcgccgtattacggtggaaagaccgct

SEQ ID NO: 186525 - DNA, 75 bp, synthetic construct
  source 1..75: mol_type = other DNA
atcaatatcaaccgccacgttcattgagggagattgactgcgatttggacaaggtgagcagagatattatggctt

SEQ ID NO: 186526 - DNA, 75 bp, synthetic construct
  source 1..75: mol_type = other DNA
gcgcatgtacctgatgcgtggatcgatatcgaaaaaaccgatccttatgatgggcagattggtttagtgggttat

SEQ ID NO: 186527 - DNA, 75 bp, synthetic construct
  source 1..75: mol_type = other DNA
ctggaggagattgatgcggatctggatgcggtaagtgctgaaattatgaaactgttgcaggaggtacattcctga

SEQ ID NO: 186528 - DNA, 75 bp, synthetic construct
  source 1..75: mol_type = other DNA
gatcaactccccgcagaaaaattcgattacatgctttctaatccacctttcggcgtggactggaaaaagatagaa

SEQ ID NO: 186529 - DNA, 75 bp, synthetic construct
  source 1..75: mol_type = other DNA
tggaaggcatcgtcgcgctgccaacagatatgttctacaacaccggtattgccacctacgtctggatcctctcca

SEQ ID NO: 186530 - DNA, 75 bp, synthetic construct
  source 1..75: mol_type = other DNA
atggtatggtggttaatattattttgtggggtggcgaagataacggctttgcgaaagatattgatggtgaactta

SEQ ID NO: 186531 - DNA, 75 bp, synthetic construct
  source 1..75: mol_type = other DNA
acgccggagtcggtactgatgcaggacggcgcattcagcctgacggcaccgccggtacagggaatgccggtgcag

SEQ ID NO: 186532 - DNA, 75 bp, synthetic construct
  source 1..75: mol_type = other DNA
gtttgcctcgcgcctgctgtcggaagtgggtatctggttccggttcgccaccgacgcgcggctgaaaatcgaagt

SEQ ID NO: 186533 - DNA, 75 bp, synthetic construct
  source 1..75: mol_type = other DNA
cttcacgaagccggtaagatgctgactaacggccttgaaaaaatgatgccaggtttgtggtttgacgttgttctc

SEQ ID NO: 186534 - DNA, 75 bp, synthetic construct
  source 1..75: mol_type = other DNA
aagaacagttaatccaggaagcagaactcgaaaaagaagggcgcatacgtgctgcaaatgattttattaacagca

SEQ ID NO: 186535 - DNA, 75 bp, synthetic construct
  source 1..75: mol_type = other DNA
gagcaatataatttgtggctggattatctggacgcactggatgctgtagatacttcaactgcaccagaaatagac

SEQ ID NO: 186536 - DNA, 75 bp, synthetic construct
  source 1..75: mol_type = other DNA
aggacgcactccgtccgatcgccgttgcactcgaggctgcgcagtttatcgcgcttgacccggagaataccgatt

SEQ ID NO: 186537 - DNA, 75 bp, synthetic construct
  source 1..75: mol_type = other DNA
atgttgctcaatcaaaatattgctgcctatgctgcgctatctcaggcagaaaataccactaacaatagcgactat

SEQ ID NO: 186538 - DNA, 75 bp, synthetic construct
  source 1..75: mol_type = other DNA
atgacggcgacaaaccagaacggcaactggctggatgtcaccgtaggcgctgatatgttgctcaatcaaaatatt

SEQ ID NO: 186539 - DNA, 75 bp, synthetic construct
  source 1..75: mol_type = other DNA
gacggccagcgcggcgcgtgaccgcagctatgagctgacgtttaccgccatcccgtactcagagcgctacggcta

SEQ ID NO: 186540 - DNA, 75 bp, synthetic construct
  source 1..75: mol_type = other DNA
agcgtgtctcacaaccgagtgacgttttatcgcgacgggtatcaatcgccatgcgtacaaccgctggcgcgtttc

SEQ ID NO: 186541 - DNA, 75 bp, synthetic construct
  source 1..75: mol_type = other DNA
gcgcaactggattgcgaacacgttgcgttgaacgatttaagttatttcgttgaacagtgtccggaagacccgatc

SEQ ID NO: 186542 - DNA, 75 bp, synthetic construct
  source 1..75: mol_type = other DNA
cattgtgctcgcgatttggtgggtggtgcgaagaataagaaactcgcacaccgaccctgaacataacgaaaaccg

SEQ ID NO: 186543 - DNA, 75 bp, synthetic construct
  source 1..75: mol_type = other DNA
tcgctcctggatagatgttgaactggaacatcagaaccgtgacctgctggcttcgatgaataaccgggccagaca

SEQ ID NO: 186544 - DNA, 75 bp, synthetic construct
  source 1..75: mol_type = other DNA
atttgttgtagctaataacgcatctttgttagcattcttttccccattattattgtgggtattgattctttcagt

SEQ ID NO: 186545 - DNA, 75 bp, synthetic construct
  source 1..75: mol_type = other DNA
acggggcttgaattagtctggtttaagcaacagaacaaaactcagcagggtgtaacactaaatgaatcggcttat

SEQ ID NO: 186546 - DNA, 75 bp, synthetic construct
  source 1..75: mol_type = other DNA
tgttgccgtttattgccgctgccggcatatggatattgatgaacagggagctgctggacactttgcgctcgcaat

SEQ ID NO: 186547 - DNA, 75 bp, synthetic construct
  source 1..75: mol_type = other DNA
ccttgctgctgccttttcaggcgtttggtattgcgctcgacacagtcaaaaccctggcctttgaaaccggcagcg

SEQ ID NO: 186548 - DNA, 75 bp, synthetic construct
  source 1..75: mol_type = other DNA
catatcaaggtcagcaccgagtacggcggcaagagccagctaaacctcggccatcttgttgatgccgggaaagaa

SEQ ID NO: 186549 - DNA, 75 bp, synthetic construct
  source 1..75: mol_type = other DNA
tggaaaaaattcagatttcagcgtgttgaagaagtttaccgttgctgctggagaaacggtaagtctgtttgccca

SEQ ID NO: 186550 - DNA, 75 bp, synthetic construct
  source 1..75: mol_type = other DNA
tgcagtatggcgaggacgacctgacgtttgtctcacgcctgctgtcggaagtgggtatctggttccgcttcgcca

SEQ ID NO: 186551 - DNA, 75 bp, synthetic construct
  source 1..75: mol_type = other DNA
atttaccagtaccgataaaaccatcgagccggagtcggtgctgatgcaggatggcgcattcagcctgagcgcccc

SEQ ID NO: 186552 - DNA, 75 bp, synthetic construct
  source 1..75: mol_type = other DNA
gatgcacgccccgaaaggcgtggcggtcgccagcggcgagcacctgcaactggccgcggtgaaaaacctccagat

SEQ ID NO: 186553 - DNA, 75 bp, synthetic construct
  source 1..75: mol_type = other DNA
ccgtccggcgctaatcccccgcccggtcatggccggaacgctcccggcgcgggtcaccagcacggtgaagaacga

SEQ ID NO: 186554 - DNA, 75 bp, synthetic construct
  source 1..75: mol_type = other DNA
tgatggtgaaacggaagccgtatgggggctgaacaccgcgtacagcgtggtggaaaaaagtgtctccacgcggga

SEQ ID NO: 186555 - DNA, 75 bp, synthetic construct
  source 1..75: mol_type = other DNA
tcagcgccgatgcgcaggacaaggcgcagggtcaggtcagagagatggccgacattatcagcgaactgaacggtc

SEQ ID NO: 186556 - DNA, 75 bp, synthetic construct
  source 1..75: mol_type = other DNA
cataacgatattgatattcaggcgcaggggggaaatctgaccacctggtcaacacaggacacctatatatcgagt

SEQ ID NO: 186557 - DNA, 75 bp, synthetic construct
  source 1..75: mol_type = other DNA
cagcgcggggaaggttttgaactgcgtaccgatctgtggggtgcggtgcgggcaaagaaaggcatctttatcagc

SEQ ID NO: 186558 - DNA, 75 bp, synthetic construct
  source 1..75: mol_type = other DNA
gtttaccagtaccgataaagccatcgcgccggagtcggtgctgatgcaggatggcgcattcagcctgacggcacc

SEQ ID NO: 186559 - DNA, 75 bp, synthetic construct
  source 1..75: mol_type = other DNA
gttgcagcagagtgtaaaagatctgacgcaggctgcgatcctgctaagcgcacccaaaggcgtggcgatcgccag

SEQ ID NO: 186560 - DNA, 75 bp, synthetic construct
  source 1..75: mol_type = other DNA
cactgaaactatttatacggataaaaaacaaaagattagcattcatattgtcttagatgaggaggatgggaatga

SEQ ID NO: 186561 - DNA, 75 bp, synthetic construct
  source 1..75: mol_type = other DNA
atgttatttattatttcaattactagagacctgagaaaagtaatccacctgaaagggcggcttacttttctcttt

SEQ ID NO: 186562 - DNA, 75 bp, synthetic construct
  source 1..75: mol_type = other DNA
aacgttgtcgtgccaggagttgtttccattctgaagacaatggcaagtaatggatcacttcccagtaccggtaaa

SEQ ID NO: 186563 - DNA, 75 bp, synthetic construct
  source 1..75: mol_type = other DNA
tattctccagtacagtaaaacaaaaacacagtgttgttcgactctttttgattaaagcgaccccaataaaatctg

SEQ ID NO: 186564 - DNA, 75 bp, synthetic construct
  source 1..75: mol_type = other DNA
ctggaaaaaagattaggcaagaacgagtattttattattacaaaaagctctccggtacgtgcaatcctcaatgat

SEQ ID NO: 186565 - DNA, 75 bp, synthetic construct
  source 1..75: mol_type = other DNA
gatggaatctctgcgatttgatgcgcatgagcttctgattatccatcttccgcgccatgttctggtgtacgacgc

SEQ ID NO: 186566 - DNA, 75 bp, synthetic construct
  source 1..75: mol_type = other DNA
aaacgttctgatgtgaacggtgtatcgcgcggcgtcgagtacaacatggcgcagaatgctgtttatcgcgtgtgt

SEQ ID NO: 186567 - DNA, 75 bp, synthetic construct
  source 1..75: mol_type = other DNA
gcagagtgctgtttatcgcgtgtgcgggggcaagctgtataagggcgaaagcgaagtcggtgatgttgccggaag

SEQ ID NO: 186568 - DNA, 75 bp, synthetic construct
  source 1..75: mol_type = other DNA
ggtgggggctgtcgttacactttctcactttttgacgaactctacaccgacagctgctgtttatttatccggtgg

SEQ ID NO: 186569 - DNA, 75 bp, synthetic construct
  source 1..75: mol_type = other DNA
caaagccgcaaaaagtcacgctaatggtggatgacgttccggttgctcaggttttacaggcgctggctgaacagg

SEQ ID NO: 186570 - DNA, 75 bp, synthetic construct
  source 1..75: mol_type = other DNA
tggatcttgagctttccgcgctcgaacaaaaacagcagctggatattatcgccagtccgcgtctgctggcctcac

SEQ ID NO: 186571 - DNA, 75 bp, synthetic construct
  source 1..75: mol_type = other DNA
tgcgtaatgagctggcgctggactggccggggatcgcggtggcgctgacgttaatggatgatattgcacatctga

SEQ ID NO: 186572 - DNA, 75 bp, synthetic construct
  source 1..75: mol_type = other DNA
gatgatattgcgcacctgaagcaggaaaaccgcctgctgcgccagcggctttcccgatttgtggctcacccgtga

SEQ ID NO: 186573 - DNA, 75 bp, synthetic construct
  source 1..75: mol_type = other DNA
ctattaccgaattttgcctgcataccggcatctctgaagaggagttgaatgaaattgtcggtttgggggtggttg

SEQ ID NO: 186574 - DNA, 75 bp, synthetic construct
  source 1..75: mol_type = other DNA
tgatggcacggttaaaaccgtctcaaactggcctgcggacagcggattcacgcagtatgagttaggttcggttcg

SEQ ID NO: 186575 - DNA, 75 bp, synthetic construct
  source 1..75: mol_type = other DNA
gcaagaggcgctgatgtcgctgatgcagatggccaaaacctctgcggcgctggcgaaaatgcaagagcgcggtct

SEQ ID NO: 186576 - DNA, 75 bp, synthetic construct
  source 1..75: mol_type = other DNA
gggcgcgaatcgaatgttcggtcagtttcatttagaaatggagagttaataagcgctattgcttgtgaggggatg

SEQ ID NO: 186577 - DNA, 75 bp, synthetic construct
  source 1..75: mol_type = other DNA
ggtgccattgttgttttaccacggcattgaaagcccatatccctattcactgtgttggctggattgtttcgccga

SEQ ID NO: 186578 - DNA, 75 bp, synthetic construct
  source 1..75: mol_type = other DNA
tctcgatgactgggaacatctggaccactttttcagccacccgctggcgcgccgtccgatgcgttttgccgcacc

SEQ ID NO: 186579 - DNA, 75 bp, synthetic construct
  source 1..75: mol_type = other DNA
aagaggttggtttaatgccgtctaacacgggaatgcctggcgggaaaaagacggggcaacaaatgacgcattata

SEQ ID NO: 186580 - DNA, 75 bp, synthetic construct
  source 1..75: mol_type = other DNA
gcgaactccagcaagcatacgattttttcaatacaacgctttttaatggtgatctgccggatatgcttctgactc

SEQ ID NO: 186581 - DNA, 75 bp, synthetic construct
  source 1..75: mol_type = other DNA
ttaccgggaaattgcagttcgatatcagcagccagtacgacaagcaacaggaacacctgctgtttactccgttgt

SEQ ID NO: 186582 - DNA, 75 bp, synthetic construct
  source 1..75: mol_type = other DNA
tcttcgctcattccctggcattgccaaacgctctgatgtgaacggtgtatctcgcggcgtcgagtacaacatggc

SEQ ID NO: 186583 - DNA, 75 bp, synthetic construct
  source 1..75: mol_type = other DNA
ctgctgatgaactggctgatggcgtgatggaatcgttgcggtttgatgctcatgagttgctgattatccatcttc

SEQ ID NO: 186584 - DNA, 75 bp, synthetic construct
  source 1..75: mol_type = other DNA
atgcttgaatccggagtccctcttgcagacatcatgcgctttaccgggctgtcagaagaagagttggctgcggcg

SEQ ID NO: 186585 - DNA, 75 bp, synthetic construct
  source 1..75: mol_type = other DNA
gcctctgcatttccgctgattgatgtcaccgtcatgcctgatgatgaaatcatgcagcaccgacgtatggcgctg

SEQ ID NO: 186586 - DNA, 75 bp, synthetic construct
  source 1..75: mol_type = other DNA
atgagcaaaaagcagagttccaccccacacgatgcgctgttcaaactctttttacgccaaccggacacggctcgc

SEQ ID NO: 186587 - DNA, 75 bp, synthetic construct
  source 1..75: mol_type = other DNA
caaggcagtcagtgatggtgccaaagcctcggatgaatggctgacagatcagatgtcgccgggtgctgttcgtgc

SEQ ID NO: 186588 - DNA, 75 bp, synthetic construct
  source 1..75: mol_type = other DNA
ccttgtatcgaaaacgtcctgcaagtcgcgataatgtgaaaaataaaaaccctgattaccaatcaaccggggtgc

SEQ ID NO: 186589 - DNA, 75 bp, synthetic construct
  source 1..75: mol_type = other DNA
cgaaagaacggcattcattgacgagaacaacggaaaattgtcgatgaacgggcttatgcaggatacccggaagag

SEQ ID NO: 186590 - DNA, 75 bp, synthetic construct
  source 1..75: mol_type = other DNA
cggtgcatcgaaagccgcacagacgctcagtgactactacatcaaacgtgctgagcagtatcacccggtgatacc

SEQ ID NO: 186591 - DNA, 75 bp, synthetic construct
  source 1..75: mol_type = other DNA
tgatggcacggttaaaaccgtctcaaactggcctgcagacagcggatttacgcagtatgagttaggttcagtccg

SEQ ID NO: 186592 - DNA, 75 bp, synthetic construct
  source 1..75: mol_type = other DNA
agcctgacggcatcatcggtatcggaacatggcgagacttcatcgtctgctttggttcatcgacgattgaatatt

SEQ ID NO: 186593 - DNA, 75 bp, synthetic construct
  source 1..75: mol_type = other DNA
aagccgccatgcgtgaggctgaagtcgtacagcagggtgaagcagccccgcaacccgaaccggttgatccggtgg

SEQ ID NO: 186594 - DNA, 75 bp, synthetic construct
  source 1..75: mol_type = other DNA
ctttgcatcctggctgaatgcgttctcaggtggcagccagtaccgtcccggcgtggtggatataacaccggaatc

SEQ ID NO: 186595 - DNA, 75 bp, synthetic construct
  source 1..75: mol_type = other DNA
atgcggggcacggcgaagactgttaaaagcggcatgatcagaaacgccactgaacagggggcgattaatgcggcg

SEQ ID NO: 186596 - DNA, 75 bp, synthetic construct
  source 1..75: mol_type = other DNA
cgcaccgttcggtgcggttgccggatatcgtggaaaacgtcaggccgcagaagaaaccgccatgcgtgaggctga

SEQ ID NO: 186597 - DNA, 75 bp, synthetic construct
  source 1..75: mol_type = other DNA
ggcgcagatttaccaggagaacatgccgtttggtacaccaaaacctgacagccagctgggaagacgttcaacgcc

SEQ ID NO: 186598 - DNA, 75 bp, synthetic construct
  source 1..75: mol_type = other DNA
tactgaatgtaccgacaaaagcgctttccctgaacggtcgtcttggcctggcatttggtgcccgtggtaagggta

SEQ ID NO: 186599 - DNA, 75 bp, synthetic construct
  source 1..75: mol_type = other DNA
tggtcgtgtatcaatggcgcatggtcggacatctcaggcggtaggcgttaatggtcaactggtcgagtatcgcta

SEQ ID NO: 186600 - DNA, 75 bp, synthetic construct
  source 1..75: mol_type = other DNA
tctccctgactggcgcaaccaccgttggtgctgctttgtatgtcgcacagccatcactgatggtgcagaaaggca

SEQ ID NO: 186601 - DNA, 75 bp, synthetic construct
  source 1..75: mol_type = other DNA
gaacacctgctgtttactccgttgttcaaagcggataacgccagagtgttcgaccttgaggttgaatcttcaact

SEQ ID NO: 186602 - DNA, 75 bp, synthetic construct
  source 1..75: mol_type = other DNA
aactggcctacagacagcggattcacgcagtatgagttaggttcggttcgtgacattactcgcttacgtgggcgt

SEQ ID NO: 186603 - DNA, 75 bp, synthetic construct
  source 1..75: mol_type = other DNA
ccggggcaggtgctacagcaggccgatggcgaagtgctggcgattgataagcaggagatcgaaacgcaggtcgag

SEQ ID NO: 186604 - DNA, 75 bp, synthetic construct
  source 1..75: mol_type = other DNA
atcttcaagcgccaatggtccgcaatggtgtgtgttgaaaactggcctgtatgacgatgtgtaccgcgctatcga

SEQ ID NO: 186605 - DNA, 75 bp, synthetic construct
  source 1..75: mol_type = other DNA
aaacgttctgatgtgaatggtgtatcgcgcggtgtcgagtacaacatggcgcagaatgctgtttatcgcgtgtgt

SEQ ID NO: 186606 - DNA, 75 bp, synthetic construct
  source 1..75: mol_type = other DNA
aatgtcggcttcaaattgcgcgttatcactaagtcacctgtcactctgtcaggctgccagataaggatcgagtaa

SEQ ID NO: 186607 - DNA, 75 bp, synthetic construct
  source 1..75: mol_type = other DNA
tttggttcatcgacgattgaatatttctccctgactggtgcaaccaccgttggtgccgctttgtatgttgcacaa

SEQ ID NO: 186608 - DNA, 75 bp, synthetic construct
  source 1..75: mol_type = other DNA
atgatgatgtgtaccgcgctatcgacttcatttacgaaggaaatcagataacgtgcggcgataagctggaatcgg

SEQ ID NO: 186609 - DNA, 75 bp, synthetic construct
  source 1..75: mol_type = other DNA
tgttggtcgaatccggcgaaacattggattcaagctccgtatcatcactaaatcacctgtaactctgtcaggttg

SEQ ID NO: 186610 - DNA, 75 bp, synthetic construct
  source 1..75: mol_type = other DNA
tgatggcacggttaaaaccgtctcaaactggcctacagacagcggattcacgcagtatgagttaggttcggttcg

SEQ ID NO: 186611 - DNA, 75 bp, synthetic construct
  source 1..75: mol_type = other DNA
gtggaaatgccgaacagcaaaacgtatgacgcaacgggatgttttgtggggctggaagcctggggggatgtgtcc

SEQ ID NO: 186612 - DNA, 75 bp, synthetic construct
  source 1..75: mol_type = other DNA
tgcggtgcaggagatcgcacacctgactgaagaggttgccccgtccactacgatgcaggagcagctccgcccgat

SEQ ID NO: 186613 - DNA, 75 bp, synthetic construct
  source 1..75: mol_type = other DNA
accgaaaagacgttcagaaaatcatccgccaactcaagttagacattttcaccaaatcacgactccgcatcaaag

SEQ ID NO: 186614 - DNA, 75 bp, synthetic construct
  source 1..75: mol_type = other DNA
atgaacgaatatcagtttgtgcttccttacccgccgtcggtgaatacctactggcgaagacggggaagccaatat

SEQ ID NO: 186615 - DNA, 75 bp, synthetic construct
  source 1..75: mol_type = other DNA
tttgtcgccagcagcgactacttctccggcccgacgtggatggcgatgtatcagtcgcgattcacctgcactcgc

SEQ ID NO: 186616 - DNA, 75 bp, synthetic construct
  source 1..75: mol_type = other DNA
ttccccgaacacgcaacttggcccgcgcgtgattgtagaacgtaatttacctaccggaacttattcactccgaca

SEQ ID NO: 186617 - DNA, 75 bp, synthetic construct
  source 1..75: mol_type = other DNA
gattcgggaaaatgttgagcgtttaactggcgataatcctgaatacgctataccacaaaaagtgacgattagtat

SEQ ID NO: 186618 - DNA, 75 bp, synthetic construct
  source 1..75: mol_type = other DNA
gatgtggtgcgcaatgtaaaaccagatattctgattggcgtctcaggacagaccgggctgtttacggaagagatc

SEQ ID NO: 186619 - DNA, 75 bp, synthetic construct
  source 1..75: mol_type = other DNA
gacccagcgcgaaggattaagcgaagaagcggcgcgacagaaagtgtttatggtcgatcgctttggcctgctgac

SEQ ID NO: 186620 - DNA, 75 bp, synthetic construct
  source 1..75: mol_type = other DNA
tggtcgatcgctttggcctgctgaccgacaagatgccgaacctgctgcctttccagaccaaactggtgcagaagc

SEQ ID NO: 186621 - DNA, 75 bp, synthetic construct
  source 1..75: mol_type = other DNA
taacgatgacattcagggcaccgcggcggtaacggtcggcacactgatcgcagccagccgcgggcaggtggtcag

SEQ ID NO: 186622 - DNA, 75 bp, synthetic construct
  source 1..75: mol_type = other DNA
cggcagaaagtctttatggtcgatcgctttggcctgctgaccgacaagatgccgaacctgctgcctttccagacc

SEQ ID NO: 186623 - DNA, 75 bp, synthetic construct
  source 1..75: mol_type = other DNA
cccagtgtaacaacgcctttattttcccgggcatcggcctgggggttattgcttccggcgcgtcacgtatcaccg

SEQ ID NO: 186624 - DNA, 75 bp, synthetic construct
  source 1..75: mol_type = other DNA
tagccctggtcggcgtctgctgggtgttaggcggtgacaatgggttacattatgatcaaattattaataatatca

SEQ ID NO: 186625 - DNA, 75 bp, synthetic construct
  source 1..75: mol_type = other DNA
ggataaccctcgcgataattagttttagcggcggcgttagttttgacctggcttatttacgttatatttatcaaa

SEQ ID NO: 186626 - DNA, 75 bp, synthetic construct
  source 1..75: mol_type = other DNA
atgcaacacaactcatatcgccgttggataaccctcgcgataattagttttagcggcggcgttagttttgacctg

SEQ ID NO: 186627 - DNA, 75 bp, synthetic construct
  source 1..75: mol_type = other DNA
agtgacctcgcggcagagctggcagacctggaaatcatgacagagcagttgcgccttcaggggatgggccggctg

SEQ ID NO: 186628 - DNA, 75 bp, synthetic construct
  source 1..75: mol_type = other DNA
aacaccgtcttacattatgggcaccacggtaggtatttgttcggtgattggattcctgccggatgtcttcgttta

SEQ ID NO: 186629 - DNA, 75 bp, synthetic construct
  source 1..75: mol_type = other DNA
cactggcaggacaccctgcccgcagcagaagcctaccgcaacatgtggctgatgggcatggcggcgctcggcatg

SEQ ID NO: 186630 - DNA, 75 bp, synthetic construct
  source 1..75: mol_type = other DNA
ggaaaattatgggctggatggaagggctgcgcggcgtcggtgtaatgtcgctggcagtgtttaccatgtgggtct

SEQ ID NO: 186631 - DNA, 75 bp, synthetic construct
  source 1..75: mol_type = other DNA
ccagcctgacgatacttttcgccattctttttaatggtcagaaaacaaactggctgattattcccggattgcttt

SEQ ID NO: 186632 - DNA, 75 bp, synthetic construct
  source 1..75: mol_type = other DNA
gttaggcggtgagaatgggttacattatgatgaaatcatcaataatatcaccaccagcccggtaatgctgccaac

SEQ ID NO: 186633 - DNA, 75 bp, synthetic construct
  source 1..75: mol_type = other DNA
gcagcctactgcacagtaacgaataaatacgcacgcggatttaacggaattaccgtttttgtcctgctaacggga

SEQ ID NO: 186634 - DNA, 75 bp, synthetic construct
  source 1..75: mol_type = other DNA
agcttttagaaggcgaagtcacgccgctgaaaattcagcaatgggcgatgatggcaccattctttgctgtagctg

SEQ ID NO: 186635 - DNA, 75 bp, synthetic construct
  source 1..75: mol_type = other DNA
gggcggataactacggcaacgtgcagtttacgggttactacacaccggtaattcaggcgcgccatactcgccagg

SEQ ID NO: 186636 - DNA, 75 bp, synthetic construct
  source 1..75: mol_type = other DNA
aattgcgtctgatggtggcgctggatgtcggtggcgcaatcaaaggccaacacttcgatatctatcaagggatcg

SEQ ID NO: 186637 - DNA, 75 bp, synthetic construct
  source 1..75: mol_type = other DNA
actgaaagtaaagaaaaaccacaaaaaatattcttcccattagatggccttccggaagcatataaggctgcaatc

SEQ ID NO: 186638 - DNA, 75 bp, synthetic construct
  source 1..75: mol_type = other DNA
tatccatttctaatgtccgatgatttaccgccaaaattcagcggtaaaggttttgaaattttcggtgcttacaaa

SEQ ID NO: 186639 - DNA, 75 bp, synthetic construct
  source 1..75: mol_type = other DNA
ttacatacccaacagaagcagagcgtaaaaaaatgcgactggtgaacagggatatgacttctcaagagagaaaaa

SEQ ID NO: 186640 - DNA, 75 bp, synthetic construct
  source 1..75: mol_type = other DNA
cctttgcgcggcgttcgttaagcacgcgtcggtgtccgggctggacgatggcgactgcgttacggtgaaagaggc

SEQ ID NO: 186641 - DNA, 75 bp, synthetic construct
  source 1..75: mol_type = other DNA
cgcaacgaggatgactgttgcgatcctgcgatcgatacgatttgcgattatgcgcttctgcctaatatcgaaacc

SEQ ID NO: 186642 - DNA, 75 bp, synthetic construct
  source 1..75: mol_type = other DNA
tgaaggcgggacattcatatttctcatatggctctgagcataatttcgaatggcacaaaactgctgaggaagcta

SEQ ID NO: 186643 - DNA, 75 bp, synthetic construct
  source 1..75: mol_type = other DNA
gccaagtaaaaacgtcagcaaagatgtcttccatcctgtgttcgacgtcgatcagcagggtcgcccggtgatgcg

SEQ ID NO: 186644 - DNA, 75 bp, synthetic construct
  source 1..75: mol_type = other DNA
acaaatcgtttctgcgtttccgtgtgggcaaaattcttgacgacttgtgtgcaaaccagttgcaaccgttgctgt

SEQ ID NO: 186645 - DNA, 75 bp, synthetic construct
  source 1..75: mol_type = other DNA
tgagcgagctttcagacgccattgaaaccagcaaaggcattctgtctgtacccgttcccgttggcaaattcctgt

SEQ ID NO: 186646 - DNA, 75 bp, synthetic construct
  source 1..75: mol_type = other DNA
cggtatcacacgattttttccgcagtttaacgatcgctttgaggcgattgcggtacgtgtgccgaccatcaacgt

SEQ ID NO: 186647 - DNA, 75 bp, synthetic construct
  source 1..75: mol_type = other DNA
ctgtgaaagtttatatacaaatggatatatgtatcaacatataaaaaatgccattgataatgatgatggctccat

SEQ ID NO: 186648 - DNA, 75 bp, synthetic construct
  source 1..75: mol_type = other DNA
gtcgcccgatgcgctttgccgcgcctccgagcaaaaacgtcagcaaagatgttttccatccggtgttcgacattg

SEQ ID NO: 186649 - DNA, 75 bp, synthetic construct
  source 1..75: mol_type = other DNA
tgcgttagctgacgacatgacaggcgcaccatccgtgcttgttcgctgtttggcagcgcaactggaagttcagtt

SEQ ID NO: 186650 - DNA, 75 bp, synthetic construct
  source 1..75: mol_type = other DNA
ttggggttatcattattaaaactcgaagaaggtgtcagttttaatgcagaggaatttgatcctgtagatgtcatc

SEQ ID NO: 186651 - DNA, 75 bp, synthetic construct
  source 1..75: mol_type = other DNA
gtctgcgctgaatctaaactggatgattgttccctgttagctagatttacctctccgcgtcagttgcatacgggg

SEQ ID NO: 186652 - DNA, 75 bp, synthetic construct
  source 1..75: mol_type = other DNA
ctataatgaactcaaggatgtctatgtcccgctggcaaagaagtatcggacaaaactctttagtcacaacgcata

SEQ ID NO: 186653 - DNA, 75 bp, synthetic construct
  source 1..75: mol_type = other DNA
gttaagcgagaaaaaaatcgtcttccttggcgcaggttcagcgggatgcggcattgccgaaatgatcatcgccca

SEQ ID NO: 186654 - DNA, 75 bp, synthetic construct
  source 1..75: mol_type = other DNA
tttaagtacgatattgatcttgattcagctaacaagattttaatgaaaaatatgctaaggaggattgaaaactga

SEQ ID NO: 186655 - DNA, 75 bp, synthetic construct
  source 1..75: mol_type = other DNA
tgatttttccatcacagccactgaccacgctaacaccagagcaggttgctgatatcactgatagtgtgcgcaaag

SEQ ID NO: 186656 - DNA, 75 bp, synthetic construct
  source 1..75: mol_type = other DNA
ctacgcattaatcgtacgcatcattcccgcgatagctggattggacttctggaagaagcaggcatgaaaggcttc

SEQ ID NO: 186657 - DNA, 75 bp, synthetic construct
  source 1..75: mol_type = other DNA
catgaaggcaacaggaaatatgccagccaccgatgctttcctggctgaaattgaacgcaaagcaatccgcaagtt

SEQ ID NO: 186658 - DNA, 75 bp, synthetic construct
  source 1..75: mol_type = other DNA
acccgggcagccagccagtcgatcattccggtcgatactaaactggccgccggtatcacacgattttttccgcaa

SEQ ID NO: 186659 - DNA, 75 bp, synthetic construct
  source 1..75: mol_type = other DNA
gctggacgatggcgactgcgttacggtgaaagaggcgactgacgccctgctgcattgtgcggaacagcttcacga

SEQ ID NO: 186660 - DNA, 75 bp, synthetic construct
  source 1..75: mol_type = other DNA
tgctccacaaaatggtgaacacattctggatctttgcgccgccccaggcggtaaaacaacgcatattcttgaggt

SEQ ID NO: 186661 - DNA, 75 bp, synthetic construct
  source 1..75: mol_type = other DNA
aatggtgcggcgagcaacagtttgatcgcattttattagatgcgccttgttcggcaaccggtgtaattcgtcgcc

SEQ ID NO: 186662 - DNA, 75 bp, synthetic construct
  source 1..75: mol_type = other DNA
cgtaatcgcaaaaccggtatccactttatccagcgacacatcggcggtggtatcaatcgatgttggcgtgaatcc

SEQ ID NO: 186663 - DNA, 75 bp, synthetic construct
  source 1..75: mol_type = other DNA
tacgcattgcaatggagatatcctatctttgtgcggcaagactcggtgatgtgctcgagctgaaatggcaggata

SEQ ID NO: 186664 - DNA, 75 bp, synthetic construct
  source 1..75: mol_type = other DNA
gtggttgaaggcaggaaaaatatacttaccttttcccaattatggaagaagttcctaaacagcacggattatgca

SEQ ID NO: 186665 - DNA, 75 bp, synthetic construct
  source 1..75: mol_type = other DNA
atcctcatcgcctgtgtggatggcctgaaaggcttcccggatgccatcaacacagtatatccggaggcccgcatc

SEQ ID NO: 186666 - DNA, 75 bp, synthetic construct
  source 1..75: mol_type = other DNA
cccggtagtgacctttgccaatagcccggaaagctacatgcagtatgtcgatcagcatccggaacagagcatcaa

SEQ ID NO: 186667 - DNA, 75 bp, synthetic construct
  source 1..75: mol_type = other DNA
cgtggatgtaccgacccgctggcccaggaagaagcgcgacaggccatcattgacgccgttgatctactactccta

SEQ ID NO: 186668 - DNA, 75 bp, synthetic construct
  source 1..75: mol_type = other DNA
tcggtttcaaaggtgaaactcagatcgctgaccaattcactggttatggtcagtgggaatttaacattggcgcaa

SEQ ID NO: 186669 - DNA, 75 bp, synthetic construct
  source 1..75: mol_type = other DNA
actgggatggaaaaatacagtgtcaggtaaatgtaccggagacagcaatatctgaccagcagttattgcttccct

SEQ ID NO: 186670 - DNA, 75 bp, synthetic construct
  source 1..75: mol_type = other DNA
gacacgttgctgatagcacagagggaaaaaaataaaataaatccatatagcgaagatagatactcgatacgacct

SEQ ID NO: 186671 - DNA, 75 bp, synthetic construct
  source 1..75: mol_type = other DNA
tggctattaacaactgctatcactcaaaaacagagattcctgaatggctttctccttttgaaaatgaatacaaaa

SEQ ID NO: 186672 - DNA, 75 bp, synthetic construct
  source 1..75: mol_type = other DNA
cggcactgatatcaaaggtcaccgatgccgtgatggagcaggttgtagaatggcaaaacagaccactggatgctg

SEQ ID NO: 186673 - DNA, 75 bp, synthetic construct
  source 1..75: mol_type = other DNA
atgatggattggttgttcacggcgttcgtgctgttagtaggtgttgcagtattggctacaggttttataaaagtg

SEQ ID NO: 186674 - DNA, 75 bp, synthetic construct
  source 1..75: mol_type = other DNA
gcttataaatctagtatatgttatttcttatacactttctctgaaaatatatatatttgcacgatttacagatgc

SEQ ID NO: 186675 - DNA, 75 bp, synthetic construct
  source 1..75: mol_type = other DNA
gctgcatgagcgtcttctggcgacagtatgaagccgagcttatccggtttctgatatcaagaacaggtgacagcg

SEQ ID NO: 186676 - DNA, 75 bp, synthetic construct
  source 1..75: mol_type = other DNA
tttttccgtggttgagagcgacgaactccctgaaggcactgatatttcaggtaactggaagtttgatgatggtgt

SEQ ID NO: 186677 - DNA, 75 bp, synthetic construct
  source 1..75: mol_type = other DNA
aatccactactctctttagaagatgacagagagactatcgacaacgctgcgcatgtacttctgttaccggaagag

SEQ ID NO: 186678 - DNA, 75 bp, synthetic construct
  source 1..75: mol_type = other DNA
aacatcatgttctgttcaccgacaatatggtgttaatttgccgcgagggaaatccactactctctttagaagatt

SEQ ID NO: 186679 - DNA, 75 bp, synthetic construct
  source 1..75: mol_type = other DNA
aagtggcgtggctacgggtcgttacgctggcagtcgccgccttcatcttcaacaccaccgaatttgtccctgttg

SEQ ID NO: 186680 - DNA, 75 bp, synthetic construct
  source 1..75: mol_type = other DNA
acgccaccgatcatctgatctatctgccagatgatgaagagaaaagacgtcgtgttaccaacgcacgaacgctgg

SEQ ID NO: 186681 - DNA, 75 bp, synthetic construct
  source 1..75: mol_type = other DNA
tcatcgctgctccaggaggccaacggaaccgtggatgactggaaaacagaattaaaactggacatgattagcgat

SEQ ID NO: 186682 - DNA, 75 bp, synthetic construct
  source 1..75: mol_type = other DNA
ataacggattcaatgcgaatccgatgatttcgataaatcaaagcgttccgcgcaataacagtaagctgaccagga

SEQ ID NO: 186683 - DNA, 75 bp, synthetic construct
  source 1..75: mol_type = other DNA
attctttgatgatgatagtagtttcgaacgtgactattttgatgagcctcaaaaccttgcaatgattgatgaaaa

SEQ ID NO: 186684 - DNA, 75 bp, synthetic construct
  source 1..75: mol_type = other DNA
cgtgatggcgatgcggtagaacgtgcaatgacgcaacatttgcaggaaatcagcgaatccgtgcgccagatccgt

SEQ ID NO: 186685 - DNA, 75 bp, synthetic construct
  source 1..75: mol_type = other DNA
acttaaaaatagtttttctttatctttgtcaaaatcattggataaatacggaaatttctcacttgattataacaa

SEQ ID NO: 186686 - DNA, 75 bp, synthetic construct
  source 1..75: mol_type = other DNA
ccgcgttacagcgggccatgggggtgaatggcaagtcaacgtccatttttcaggatgaacaggtcgccattgcgc

SEQ ID NO: 186687 - DNA, 75 bp, synthetic construct
  source 1..75: mol_type = other DNA
tgtcatctaccagcatctggcaggcacgcatactgccgggttatatccgttgctggaagatgattcctgttattt

SEQ ID NO: 186688 - DNA, 75 bp, synthetic construct
  source 1..75: mol_type = other DNA
atgtacagcaagtaaaatatccagttgagaagttgaagaatatttactgtaaaagaattgttttcgataaatctg

SEQ ID NO: 186689 - DNA, 75 bp, synthetic construct
  source 1..75: mol_type = other DNA
gtatcacctcaagatatactcatacaccacccttgaaggatctacttccggtgattgattatacaatcaagtcat

SEQ ID NO: 186690 - DNA, 75 bp, synthetic construct
  source 1..75: mol_type = other DNA
caccgcctggtgttctacacgcggatacagcacggcgagccacaggtggagagccgctacctctatgacccgctg

SEQ ID NO: 186691 - DNA, 75 bp, synthetic construct
  source 1..75: mol_type = other DNA
aacgctagatgctttagctagggaggttagcttagaggatgctacaaactcacaaacaaaaactattcttgaaaa

SEQ ID NO: 186692 - DNA, 75 bp, synthetic construct
  source 1..75: mol_type = other DNA
agtaatttgagttcgggggaaaagcagaaggctattattgatgttgcgcatgcattgctgacaaagcatagaagt

SEQ ID NO: 186693 - DNA, 75 bp, synthetic construct
  source 1..75: mol_type = other DNA
gagattttatggactaatacggacgtttgaggaagttgagatggtgccgataataggagtcgaacctacgacctt

SEQ ID NO: 186694 - DNA, 75 bp, synthetic construct
  source 1..75: mol_type = other DNA
aatgaagattatctgcgtcaggctttccgtgaattagacctcgacgttgatatttcaaccctgctgcgcacgtaa

SEQ ID NO: 186695 - DNA, 75 bp, synthetic construct
  source 1..75: mol_type = other DNA
ggttttaagttacttggaggtagtcgtaatggttcgaaaacgagagacattatggttatctgtataactccaagg

SEQ ID NO: 186696 - DNA, 75 bp, synthetic construct
  source 1..75: mol_type = other DNA
aaaggtatatatctcggtcataaagaagtacagacttttcatggcgaccctttaccaggaaggtttgaatcttca

SEQ ID NO: 186697 - DNA, 75 bp, synthetic construct
  source 1..75: mol_type = other DNA
tttcttagagtcaatggggtacattgtccgctctaacggttatgtccttttaaacaaaggagtcattgccaactt

SEQ ID NO: 186698 - DNA, 75 bp, synthetic construct
  source 1..75: mol_type = other DNA
cgcatcctgtaagcatgacagcgcctgccatgcagataatcagttttctcattttgatagtatccagaggaattc

SEQ ID NO: 186699 - DNA, 75 bp, synthetic construct
  source 1..75: mol_type = other DNA
aatgtcttacggaactggcgtttgagctgggaatgaacggtatcccacgctgcaaggggccgttatcccgtgaat

SEQ ID NO: 186700 - DNA, 75 bp, synthetic construct
  source 1..75: mol_type = other DNA
aatacggatgtttgaagaagtggagatggtgccgataataggagtaaaacactcgattaatctcgtgttaatgcc

SEQ ID NO: 186701 - DNA, 75 bp, synthetic construct
  source 1..75: mol_type = other DNA
agtcattcagtcaatagactttcaacgcagcactacactggatttgcccctatatttccagacacctgttatcac

SEQ ID NO: 186702 - DNA, 75 bp, synthetic construct
  source 1..75: mol_type = other DNA
gatgagggaaaacaatatgatacgttgatgcgtcaggccggtgagcttgttagtcagttaaaggtattgctggac

SEQ ID NO: 186703 - DNA, 75 bp, synthetic construct
  source 1..75: mol_type = other DNA
gcgcaggatgaagcttcaattcgacacaatcttgataaggcagagcaaatcagggcgcatgctgaagaagcgaaa

SEQ ID NO: 186704 - DNA, 75 bp, synthetic construct
  source 1..75: mol_type = other DNA
attgcggaacagaacgtgattcattcccccgtggcgcccggggggacaagggcgggggggcgggggggggggggg

SEQ ID NO: 186705 - DNA, 75 bp, synthetic construct
  source 1..75: mol_type = other DNA
cctcgggcatattcacggtggcgacgcttctaaccgtatttgcgcttgctgtgagttgcatatggatattcgtcc

SEQ ID NO: 186706 - DNA, 75 bp, synthetic construct
  source 1..75: mol_type = other DNA
tttctgtatcacctttagttaataaactgactcaaaatacaacaaataccattgtatttatgaaattattccgtc

SEQ ID NO: 186707 - DNA, 75 bp, synthetic construct
  source 1..75: mol_type = other DNA
gacgatactgcttggggcaaggtattttccacgctgctggggagcgctaaaaactacgaaggccactggaaaccg

SEQ ID NO: 186708 - DNA, 75 bp, synthetic construct
  source 1..75: mol_type = other DNA
cagctggatcctgcccggtttgatctcattcctgaatatgttatcagggagtgcgacgcgcttatacttcctcct

SEQ ID NO: 186709 - DNA, 75 bp, synthetic construct
  source 1..75: mol_type = other DNA
cagtctcaatacctctttagacgatctgacgacgcaggccggacgcctgcagggtcaaataaataagcagcgtca

SEQ ID NO: 186710 - DNA, 75 bp, synthetic construct
  source 1..75: mol_type = other DNA
gcatgatgcccgcgccgacctgcatcaggctgaggagcaattgcagcaactgcatcgtcagttggatcctgaaca

SEQ ID NO: 186711 - DNA, 75 bp, synthetic construct
  source 1..75: mol_type = other DNA
cagattgccgaattgcgtattgagcaagctcaggagtgttcattgcaactgggcgatcggcgacaaaatgcgcag

SEQ ID NO: 186712 - DNA, 75 bp, synthetic construct
  source 1..75: mol_type = other DNA
actgcctgatgctttctgatgataaaaaacagcgatttatgaataccgtcacaacaggagagcagacgaatggca

SEQ ID NO: 186713 - DNA, 75 bp, synthetic construct
  source 1..75: mol_type = other DNA
ggcagtgtggtgttcccgccggtgctggtgcagatgctcgaccggctggaaagtgaaatcctggctgcccgggtg

SEQ ID NO: 186714 - DNA, 75 bp, synthetic construct
  source 1..75: mol_type = other DNA
ttttgagaaaaagtacggctctcagtttgtgttaatttttcgttttcttgatcactcctttgcgactggcgtgct

SEQ ID NO: 186715 - DNA, 75 bp, synthetic construct
  source 1..75: mol_type = other DNA
ttttatcactattgcctgaataaaaataaagatatagctgataaaataattcttgccgaaaacttcaaaaaatat

SEQ ID NO: 186716 - DNA, 75 bp, synthetic construct
  source 1..75: mol_type = other DNA
acacgaacgaatcatgcggtgaacgacctgacgggccgtccgctgatgctctttaacagtgaaggtaaaaccgtc

SEQ ID NO: 186717 - DNA, 75 bp, synthetic construct
  source 1..75: mol_type = other DNA
cacttaataaaacaaaaccatcagcagtggatatatattcagatgtgtttggtgggattgatattaacgactttc

SEQ ID NO: 186718 - DNA, 75 bp, synthetic construct
  source 1..75: mol_type = other DNA
cagcctgtgggggctggcactcagcctgcccgcagacacagactacccggacccgcgcggggagcgggacccgga

SEQ ID NO: 186719 - DNA, 75 bp, synthetic construct
  source 1..75: mol_type = other DNA
catggacgccatgctggtggtgcgcacattgctgctcaatggtctgggaggagtgctctacggctggctgttctg

SEQ ID NO: 186720 - DNA, 75 bp, synthetic construct
  source 1..75: mol_type = other DNA
cagtgtactgggcggaacggcggccagagcgggggaacatcgggtgtggatagggagcgcggcgctggggctgat

SEQ ID NO: 186721 - DNA, 75 bp, synthetic construct
  source 1..75: mol_type = other DNA
cagaatcctttaccctatgaagaatggcatatttatgtctggtcagaactattcttcactttcgtttttactgtc

SEQ ID NO: 186722 - DNA, 75 bp, synthetic construct
  source 1..75: mol_type = other DNA
tataatagattcaaggtagaagttaatttcttgaaagataataaagtagatggggtaatgcctttgcttgatttt

SEQ ID NO: 186723 - DNA, 75 bp, synthetic construct
  source 1..75: mol_type = other DNA
ataaacatactcaatttaatagctggaagggagtctctaaatcacatgttttatccttccggtgggggaagcgat

SEQ ID NO: 186724 - DNA, 75 bp, synthetic construct
  source 1..75: mol_type = other DNA
aactcatagctgatggtaaaacaaacaaagaaatcgctaatttcttgcagttaagcaggaaaacagtcgaaactc

SEQ ID NO: 186725 - DNA, 75 bp, synthetic construct
  source 1..75: mol_type = other DNA
ggagagatggtggtccatggcatagctactgacactatcattaacagcggtggtcttcaggctgtttccggtgga

SEQ ID NO: 186726 - DNA, 75 bp, synthetic construct
  source 1..75: mol_type = other DNA
aattacccgtaggtaaatactcattaaacgctcttattaataataaaaggacgccaatccatctggacctgcaat

SEQ ID NO: 186727 - DNA, 75 bp, synthetic construct
  source 1..75: mol_type = other DNA
tcttattcaccaacaacataaacgtattcgtgagacttatggtccagcgtcgatttttgccggctcctacggctg

SEQ ID NO: 186728 - DNA, 75 bp, synthetic construct
  source 1..75: mol_type = other DNA
ccgatgactccagcatcggggtacgcgatgcggcaatgctggccgtcattctcggctgcgggctgcgccgctcgg

SEQ ID NO: 186729 - DNA, 75 bp, synthetic construct
  source 1..75: mol_type = other DNA
atgattttttttggccttaatgacgtggcagaaggcgatctgtttgaaattgcattgattgatgatgcaacaaac

SEQ ID NO: 186730 - DNA, 75 bp, synthetic construct
  source 1..75: mol_type = other DNA
ttatcgcgcaacttgagaggaaggtagatgctcgcgcggtgcagatggttccccctctggagaaacgccgacagg

SEQ ID NO: 186731 - DNA, 75 bp, synthetic construct
  source 1..75: mol_type = other DNA
ggtaacacggcgctggcatggctggaaaaatataatggcccggagctgtcgcttacggcgtttgacccccctgcc

SEQ ID NO: 186732 - DNA, 75 bp, synthetic construct
  source 1..75: mol_type = other DNA
ttagtgaacgcacctcaaattaaggaactgtgcagtgatgggttttatcgaagcttaattcgatggaagtcattt

SEQ ID NO: 186733 - DNA, 75 bp, synthetic construct
  source 1..75: mol_type = other DNA
acaacagactagttggccactggttctggaacatagtgatgtggtggtgttgtggagcgccaatccgctaaatac

SEQ ID NO: 186734 - DNA, 75 bp, synthetic construct
  source 1..75: mol_type = other DNA
gtatgtttacagcggcggcagctctatgagcgcgacgattaatgatgaaggtacactggaagtagaggctggcgg

SEQ ID NO: 186735 - DNA, 75 bp, synthetic construct
  source 1..75: mol_type = other DNA
taagctaatggacgtcgagagtttccagcacatccgggcggtacgtaacctgaggggcagccgcctgccgcgcgg

SEQ ID NO: 186736 - DNA, 75 bp, synthetic construct
  source 1..75: mol_type = other DNA
ggaccgtgcgcttagagtgctgggtaagggaaacaaggagcgactggcatatgtcccggccggtgcctggcagcg

SEQ ID NO: 186737 - DNA, 75 bp, synthetic construct
  source 1..75: mol_type = other DNA
cagtcagcagttaatagaaaatggttttactgagttaagtaagaaaaaaatgcttaaaatattaactagcacggg

SEQ ID NO: 186738 - DNA, 75 bp, synthetic construct
  source 1..75: mol_type = other DNA
tgaggttaaataagcgcacggccggatgtggcgtgtggcttcccgtggtgctggcagcgttgctgccggccgggg

SEQ ID NO: 186739 - DNA, 75 bp, synthetic construct
  source 1..75: mol_type = other DNA
acaagctggaaagtttagatttaaaaaatcagcattcattggttaatctggaagcgcaaaataataatctaaaag

SEQ ID NO: 186740 - DNA, 75 bp, synthetic construct
  source 1..75: mol_type = other DNA
ccagacaatgtccgggcaccggagctgatgggctacagtgagctgacggccattgcccgaaactgtgccatacag

SEQ ID NO: 186741 - DNA, 75 bp, synthetic construct
  source 1..75: mol_type = other DNA
cgactttatcagcctcgctaaaacggccggtatggtgtcgcaaaacctgacgctgcaagcggcagaaacgtggct

SEQ ID NO: 186742 - DNA, 75 bp, synthetic construct
  source 1..75: mol_type = other DNA
gatgttgttgtaaaaaactctgaaagaacagctggacaaaccggtgtaaatcttgaactattaaacaaattcaat

SEQ ID NO: 186743 - DNA, 75 bp, synthetic construct
  source 1..75: mol_type = other DNA
cctgcacgctgacaccaaaggtgaatgtaccgtccagtgcggatgcaggcagtgcaaaagtcagcctgcgcttta

SEQ ID NO: 186744 - DNA, 75 bp, synthetic construct
  source 1..75: mol_type = other DNA
tgccaaaattgttcagggatactgtcatggtcgaaatcgacctagcaaacgggacagatgaagagatcgctgaat

SEQ ID NO: 186745 - DNA, 75 bp, synthetic construct
  source 1..75: mol_type = other DNA
taattacagggatcaatgggtttaccggccgttatgtggcagcggaactttccgctgccggatatcgcgttttcg

SEQ ID NO: 186746 - DNA, 75 bp, synthetic construct
  source 1..75: mol_type = other DNA
caaacattaaaatcagcaaacacttatacatgcgctggagcaaaataccaatcaacagtttcgtcaattacgaga

SEQ ID NO: 186747 - DNA, 75 bp, synthetic construct
  source 1..75: mol_type = other DNA
tctcacaaccaccgaacgactggcacagttgagcatcaacggtctgcgaaattcactgttcttttgggatgggag

SEQ ID NO: 186748 - DNA, 75 bp, synthetic construct
  source 1..75: mol_type = other DNA
tttgaagcagaagcggtcaggctttacatcgacaggatcttcactggaaaaccgtttctcatcacagaaaagcat

SEQ ID NO: 186749 - DNA, 75 bp, synthetic construct
  source 1..75: mol_type = other DNA
tgaattagctggaattgcaggatttgcccggagcgttgaatatacaagtgaaatatccgcaagtattgaccttat

SEQ ID NO: 186750 - DNA, 75 bp, synthetic construct
  source 1..75: mol_type = other DNA
aatcgctcgacagaacgatcattgctgtaaaggaagtaattaaccactgcaacataatgcgaagctcacacaagg

SEQ ID NO: 186751 - DNA, 75 bp, synthetic construct
  source 1..75: mol_type = other DNA
accggatttaagtcccttggttagtgcttcaaaaatgttaagcaaggttattaaaaatggcgatatcattatatt

SEQ ID NO: 186752 - DNA, 75 bp, synthetic construct
  source 1..75: mol_type = other DNA
cgatgcgcgaacgggtatcgcagcagttaaaagaaatagaacgtcgctatggcgtgaaagtgctgtacgcctgcg

SEQ ID NO: 186753 - DNA, 75 bp, synthetic construct
  source 1..75: mol_type = other DNA
ctctcaatggaagctactttctcagagcagtttccaagaatgggatatttgttcagagttaattaaacggacaga

SEQ ID NO: 186754 - DNA, 75 bp, synthetic construct
  source 1..75: mol_type = other DNA
tctcttccatgacatattttctggactccatggaatatataaatagtttcaatataatgcaacatctaaggcatg

SEQ ID NO: 186755 - DNA, 75 bp, synthetic construct
  source 1..75: mol_type = other DNA
tttcttatctggcagaattaattagcaataaggatttattcccattatacagcattattcttgttatatcatttt

SEQ ID NO: 186756 - DNA, 75 bp, synthetic construct
  source 1..75: mol_type = other DNA
tttaccatgggcattaatgaaatgtaagcgttatctctatgctaatatggaagttaacggacaacgattttctta

SEQ ID NO: 186757 - DNA, 75 bp, synthetic construct
  source 1..75: mol_type = other DNA
ctattttacgatccggcgtatgtgcagcttacttatcctggcggtgatgttccgcaagaacgcggtgtatgttcc

SEQ ID NO: 186758 - DNA, 75 bp, synthetic construct
  source 1..75: mol_type = other DNA
gagtctatcgaaatggtgcgtaggtacgcacaccttgcacctaatcatttgacagagcacgcgaggaaaattgac

SEQ ID NO: 186759 - DNA, 75 bp, synthetic construct
  source 1..75: mol_type = other DNA
taatgaaaacatggaaacttgttaacggaaagccaggtgatgtcgttaaaagaaaagaacccatacaaggtcctt

SEQ ID NO: 186760 - DNA, 75 bp, synthetic construct
  source 1..75: mol_type = other DNA
cactagcagtactgatgccataaatggatcacagctttatgctatcagtaagtcagtagcggaccgtcttggtgg

SEQ ID NO: 186761 - DNA, 75 bp, synthetic construct
  source 1..75: mol_type = other DNA
cattctgatgcgaacagaaactatgatatcgttgttctggaaaataaggtcagtcatttaaataaacaacgcctt

SEQ ID NO: 186762 - DNA, 75 bp, synthetic construct
  source 1..75: mol_type = other DNA
tatgatgattttcttgagaatgttttaagtacgccatgggagaaagaaatctactatcgccagttacctgtggcc

SEQ ID NO: 186763 - DNA, 75 bp, synthetic construct
  source 1..75: mol_type = other DNA
tattaatgatgatggttatgccagtgagctatgcagcatgttatagtgagttatctgttcagcacaatttggttg

SEQ ID NO: 186764 - DNA, 75 bp, synthetic construct
  source 1..75: mol_type = other DNA
cgccggatctacctacagagaacctctgttgcaggaactccccgttataacctggatggtcaaccagagggggaa

SEQ ID NO: 186765 - DNA, 75 bp, synthetic construct
  source 1..75: mol_type = other DNA
tgcgtagtgcaaaacgtaaatacggatcggcgtactggtatcacccattacttggcaaatttcagatgagcggag

SEQ ID NO: 186766 - DNA, 75 bp, synthetic construct
  source 1..75: mol_type = other DNA
ggtgctgcgtagtgcaaaacgtaaatacggatcggcatactggtatcacccgctgattggtaagttccagatgag

SEQ ID NO: 186767 - DNA, 75 bp, synthetic construct
  source 1..75: mol_type = other DNA
aggtccgccgcaatgcgctgattgcacagattctggcgcaggccggaacgcgcgggcttcatgaaagtgaacaac

SEQ ID NO: 186768 - DNA, 75 bp, synthetic construct
  source 1..75: mol_type = other DNA
aatgtagtcaagtacttcagagaacaggaagataacacctataagaattttgaccaagcaatgaagagtatggaa

SEQ ID NO: 186769 - DNA, 75 bp, synthetic construct
  source 1..75: mol_type = other DNA
tccggcgtggtgggatctggtgggacatcatctcgggaagggatttttcgactcatgggataacaccggactagg

SEQ ID NO: 186770 - DNA, 75 bp, synthetic construct
  source 1..75: mol_type = other DNA
tcactggatgatcgactggaaacctattaagaaggggaggaaagtcgttcgtcttgagttctggtttaggaaaga

SEQ ID NO: 186771 - DNA, 75 bp, synthetic construct
  source 1..75: mol_type = other DNA
tggtgaagctaatgttcttttacattttacgcctcaagtaatgccatatttatgcgaactggaagataattttac

SEQ ID NO: 186772 - DNA, 75 bp, synthetic construct
  source 1..75: mol_type = other DNA
ggaagcatgataattgccctcctggaagccagtatgtttatagatgaaagttctataaagatgatagataaacaa

SEQ ID NO: 186773 - DNA, 69 bp, synthetic construct
  source 1..69: mol_type = other DNA
tgttcacgataccattgccagagttgtatcctgtatcagtcctgcaaaatttcacgagtgctttattaa

SEQ ID NO: 186774 - DNA, 75 bp, synthetic construct
  source 1..75: mol_type = other DNA
cggaatggctggaaacccagcagcaatttaaaaaagaatggcagcaagcgggctggaaacacgtttcgatgaagt

SEQ ID NO: 186775 - DNA, 75 bp, synthetic construct
  source 1..75: mol_type = other DNA
tgaaagtgtttctgcgttcacgcacagctggagcagaacaggaaaaaccggtgctgtcctgtgacatccgtcagg

SEQ ID NO: 186776 - DNA, 75 bp, synthetic construct
  source 1..75: mol_type = other DNA
acagattctggcgcaggccggaacgcgcgggcttcatgaaagtgaacaacgggcgcttgccgcactgcaacggga

SEQ ID NO: 186777 - DNA, 75 bp, synthetic construct
  source 1..75: mol_type = other DNA
atacccaaacggtgggttacagcctgaattgcgataagcgaattgtggatgcactgaaaatgcagttgctgggta

SEQ ID NO: 186778 - DNA, 75 bp, synthetic construct
  source 1..75: mol_type = other DNA
cgactgaactacagaggaatcgctgttgaggcacatcttaacggcgaaaaatattttgtcaaacccgatttttaa

SEQ ID NO: 186779 - DNA, 75 bp, synthetic construct
  source 1..75: mol_type = other DNA
taataggccgttcagaaagtgagtgtcaagccactctgaaaattgcccgtaccatgctacagaacggtatcgacc

SEQ ID NO: 186780 - DNA, 75 bp, synthetic construct
  source 1..75: mol_type = other DNA
cgacgaatattttcagccatcttcttttacctgaaccgccccggaaatcctggagactaaactccctgagaaaga

SEQ ID NO: 186781 - DNA, 75 bp, synthetic construct
  source 1..75: mol_type = other DNA
cacgccggcgcgaaaaatccacctgtaccactgcgaccatcgcggcctgccgctggcgcttatcagcacggaagg

SEQ ID NO: 186782 - DNA, 75 bp, synthetic construct
  source 1..75: mol_type = other DNA
acgggtgatgatgcgacggccaacaacagcggcaataccaccgttgatggtcagggttcgaccggtaccgaaatc

SEQ ID NO: 186783 - DNA, 75 bp, synthetic construct
  source 1..75: mol_type = other DNA
aggtccaggcttttgggggctttttgactgcaatggtcatccccaatattggtgcttttattgcctggggttttt

SEQ ID NO: 186784 - DNA, 75 bp, synthetic construct
  source 1..75: mol_type = other DNA
ctttcagctcttttggtataagttgccataaagagaactccttcaggaactctttccgagggaagaatgatgagg

SEQ ID NO: 186785 - DNA, 75 bp, synthetic construct
  source 1..75: mol_type = other DNA
atgttgcgtcgtgactggaataggtttgaagatctgtatcaacggatgggagaatgccctttgggggcagcggct

SEQ ID NO: 186786 - DNA, 75 bp, synthetic construct
  source 1..75: mol_type = other DNA
ccaacctgcaaaaaataataattaacaaagcagaaaacaatattaatgtcatcatgccaggctatactcatttgc

SEQ ID NO: 186787 - DNA, 75 bp, synthetic construct
  source 1..75: mol_type = other DNA
aatggcacctatgatcgaaaaaatggttatccttgccgaaaatacgcgtgcagcagccgctcgaggattctcgaa

SEQ ID NO: 186788 - DNA, 75 bp, synthetic construct
  source 1..75: mol_type = other DNA
tgccttcgcattgtgtcacagtggccgcaggatgcctacctatcggtcgttgccgatttttgcgaacatttctgc

SEQ ID NO: 186789 - DNA, 75 bp, synthetic construct
  source 1..75: mol_type = other DNA
agagtggatacaggcggcgccggaaggtgcatgctatgcgattggccgcgtgcttaatcatgtacttaatactaa

SEQ ID NO: 186790 - DNA, 75 bp, synthetic construct
  source 1..75: mol_type = other DNA
gaacagttctgaccgacattcagatgcctctcagtggcctaagtgttctacttagcgaactttcgttagctggcg

SEQ ID NO: 186791 - DNA, 75 bp, synthetic construct
  source 1..75: mol_type = other DNA
attagcacatctatagcattaacacagagatttttggttatgcactttttcccaaaatccaaactaatgaaggtg

SEQ ID NO: 186792 - DNA, 75 bp, synthetic construct
  source 1..75: mol_type = other DNA
gcgcgcggcgtatcttttacttggtaacgatcctctgttattgcaggaaagccaggacgctgttcgtcaggtagc

SEQ ID NO: 186793 - DNA, 75 bp, synthetic construct
  source 1..75: mol_type = other DNA
ctgattaatggcgtatggcaaaatatgctggtggtcgctggattgaagctgatgccgggaaggaacttaaaattg

SEQ ID NO: 186794 - DNA, 75 bp, synthetic construct
  source 1..75: mol_type = other DNA
ttcggcgtcgtttgccgctgatcttgaagacaatatggaaaccctcaacgacaatttaaaagtggtcgaaaaagc

SEQ ID NO: 186795 - DNA, 75 bp, synthetic construct
  source 1..75: mol_type = other DNA
ttgcagtctcctcgttggtattcagttctgcgtcgtttgccgctgatcttgaagacaatagtaagcgtgcagcaa

SEQ ID NO: 186796 - DNA, 75 bp, synthetic construct
  source 1..75: mol_type = other DNA
atacttccaattgtaattttgataattattttatcagattttataatgtccgcttggatgggacctacatatcat

SEQ ID NO: 186797 - DNA, 75 bp, synthetic construct
  source 1..75: mol_type = other DNA
caattcttcaagtggcgcttcaaatgtattgtcgcggctggcgtgtcctaagattagccgacccaattggagaga

SEQ ID NO: 186798 - DNA, 75 bp, synthetic construct
  source 1..75: mol_type = other DNA
attctattaactataaccagattaatcctggcgtaactggtggaacaatttcagggactgatatctcaatggggg

SEQ ID NO: 186799 - DNA, 75 bp, synthetic construct
  source 1..75: mol_type = other DNA
gatccctatctggctcagtcgtggattgaagatgccagcggtaaaaaacgcgtgattacatctcgacattgccgc

SEQ ID NO: 186800 - DNA, 75 bp, synthetic construct
  source 1..75: mol_type = other DNA
gacttacttttgaaaacgactcaacccttgcctggattcgaaatactgactgggcaaagattggttttaaaaata

SEQ ID NO: 186801 - DNA, 75 bp, synthetic construct
  source 1..75: mol_type = other DNA
cttctcaattagccacgaagaagccgtttctgcctttgaacaaaatatctcagcactggcgctggccgcgcaggt

SEQ ID NO: 186802 - DNA, 75 bp, synthetic construct
  source 1..75: mol_type = other DNA
tcctgttttttgccttttcgtttaccttctcaattagccacgaagaagccgtttctgcctttgaacaaaatatct

SEQ ID NO: 186803 - DNA, 75 bp, synthetic construct
  source 1..75: mol_type = other DNA
gatttaaggcactaaaacccaaaagtaaaataacatttactaagaaccttatttctttattagatcagatagaaa

SEQ ID NO: 186804 - DNA, 75 bp, synthetic construct
  source 1..75: mol_type = other DNA
tattatttgaattttgatgattcaggattttctccatcgctcacaatgagtatagttaatcgcccagtagcgaat

SEQ ID NO: 186805 - DNA, 75 bp, synthetic construct
  source 1..75: mol_type = other DNA
gggacagtaccgcattattttatgatgactgtaaatcgctgctcctctggatgaaattacgggaggataaatatg

SEQ ID NO: 186806 - DNA, 75 bp, synthetic construct
  source 1..75: mol_type = other DNA
atctgcgcttttatcgtcattacgttgacgatttgggtttcgtttcgtgtatcggtgctggtgttctttcagttg

SEQ ID NO: 186807 - DNA, 75 bp, synthetic construct
  source 1..75: mol_type = other DNA
ggtcgaaccaaaggccgggcaggtggtaccggctctcgcacacattgggcaaagcgaagcggaatcgtcccgctc

SEQ ID NO: 186808 - DNA, 75 bp, synthetic construct
  source 1..75: mol_type = other DNA
cgggaaggcgataaaataaccggagagctgaaaatccgtggtgttaatgcgctgaggattttcaacgaagctttt

SEQ ID NO: 186809 - DNA, 75 bp, synthetic construct
  source 1..75: mol_type = other DNA
acaccgtttcgtggagatttcgcgcaccttcgggacacgggctgtcagggatagcgatatcggataccggccgtg

SEQ ID NO: 186810 - DNA, 75 bp, synthetic construct
  source 1..75: mol_type = other DNA
ttattctttgatggcattgaaacatatcagggggcagaatattacttacaatcaattcaaaacgatgctgaaaaa

SEQ ID NO: 186811 - DNA, 75 bp, synthetic construct
  source 1..75: mol_type = other DNA
ttatgaatacctccgtcaaaaaaatttaaaaagcactcatgaacactggattaagttcaaagaattaaagaatct

SEQ ID NO: 186812 - DNA, 75 bp, synthetic construct
  source 1..75: mol_type = other DNA
tcaaacacaaagccggcttgctcaatctggctgaagactcagtaacgtatcaaaagcctgtaaaatcatgggcgt

SEQ ID NO: 186813 - DNA, 75 bp, synthetic construct
  source 1..75: mol_type = other DNA
cacactggctcacagtgacacagcgatacatatgaaaaacagttcaggtgaagattctgagattttactgggaat

SEQ ID NO: 186814 - DNA, 75 bp, synthetic construct
  source 1..75: mol_type = other DNA
tcaaaacagtggttgccgcatctttgatattgctcagtgttgaaaccagtgttgcccagaataataatcagtttc

SEQ ID NO: 186815 - DNA, 75 bp, synthetic construct
  source 1..75: mol_type = other DNA
ctacgtatagatgaatctgcattagaacacattattactattggagatcttatttctgtagtcaaaaataataca

SEQ ID NO: 186816 - DNA, 75 bp, synthetic construct
  source 1..75: mol_type = other DNA
gtgatacacaccattacttcgcgaaccgtgggcggtccatggagttccaactgtaccatgatgagggctgaagaa

SEQ ID NO: 186817 - DNA, 75 bp, synthetic construct
  source 1..75: mol_type = other DNA
ctgtggttgcttctacagctgtatctggttctgcaattgcggacagctggataaccggtggtaccggcggtactg

SEQ ID NO: 186818 - DNA, 75 bp, synthetic construct
  source 1..75: mol_type = other DNA
ttgaaatggcagcggtagtggcctttatctcccaccaaccgccgcagcgcaccattcgtatcgactaccgctggg

SEQ ID NO: 186819 - DNA, 75 bp, synthetic construct
  source 1..75: mol_type = other DNA
tatgacccgctacaggggaggtatattacacaagaccccattgggctggcggggggatggaacctgtataattac

SEQ ID NO: 186820 - DNA, 75 bp, synthetic construct
  source 1..75: mol_type = other DNA
atttacagaggccagaattttagttgagtgcgcgatcattccactggcaacacgccgaattttcccagcgatgct

SEQ ID NO: 186821 - DNA, 75 bp, synthetic construct
  source 1..75: mol_type = other DNA
agcgtcgcatcaggcaacggcaccgcacttattgtcggatgcggcgtgaacgccttattcgacctacacgccaca

SEQ ID NO: 186822 - DNA, 75 bp, synthetic construct
  source 1..75: mol_type = other DNA
gtaaaagccattgatatggcggactacggaatgcaacggggtgacaaggtgctggattacgctctgtcgctcatt

SEQ ID NO: 186823 - DNA, 75 bp, synthetic construct
  source 1..75: mol_type = other DNA
cagagcgtaagcagaatatgcgatacagaagatattccgcttcctcgctcactaactcgctgcgctcggtcgttc

SEQ ID NO: 186824 - DNA, 75 bp, synthetic construct
  source 1..75: mol_type = other DNA
cgattgggccggtgggggggtggaatccctatagttatgtgcttaataatccagcccagtttattgacccaacag

SEQ ID NO: 186825 - DNA, 75 bp, synthetic construct
  source 1..75: mol_type = other DNA
ttggtatcggtgcaggtgttgacgcttcagttatgactctggcttgtagaacgtggcaagaatgctgggtcaatt

SEQ ID NO: 186826 - DNA, 75 bp, synthetic construct
  source 1..75: mol_type = other DNA
cacgctagcgatgcgtaataacgcgccgtggctggcgaatatcaaatatctttattacaacccgagcgtggcgaa

SEQ ID NO: 186827 - DNA, 75 bp, synthetic construct
  source 1..75: mol_type = other DNA
ctacaaatattactaataatggtggtactgagcgagtaatagcaaatgttgctaattctctttcagaaatttatg

SEQ ID NO: 186828 - DNA, 75 bp, synthetic construct
  source 1..75: mol_type = other DNA
catgacggcaacggcgacccacgttacaccaataaagatctggttaaatacgttgatattggtgcgacctactac

SEQ ID NO: 186829 - DNA, 75 bp, synthetic construct
  source 1..75: mol_type = other DNA
tgtgcgagcggtgggcagtatgaacggtagtgcgggcctggtgtattccccggtctaccatatcgccattcagaa

SEQ ID NO: 186830 - DNA, 75 bp, synthetic construct
  source 1..75: mol_type = other DNA
tttctcggcagcattggtgactggctgggcggtgcggtggccaatgcaaaaggcggcgtgtatacctcggcaaac

SEQ ID NO: 186831 - DNA, 75 bp, synthetic construct
  source 1..75: mol_type = other DNA
ttttggcgaagggttctattttgactccattcgcagcaccgcgtggattaaagacggcgttatgcacaccgacga

SEQ ID NO: 186832 - DNA, 75 bp, synthetic construct
  source 1..75: mol_type = other DNA
cttgagaaggttcaccctacctggcgaagcgagtttccaataccgttagatgatgaaacaggaacgcattttttg

SEQ ID NO: 186833 - DNA, 75 bp, synthetic construct
  source 1..75: mol_type = other DNA
accagatattcaaagcattgatgtaacgcgttacctgagcggaatttcaattgagcaatgtcatatacaaggcct

SEQ ID NO: 186834 - DNA, 75 bp, synthetic construct
  source 1..75: mol_type = other DNA
tgccagacacagcgccgtcaggcgctgtttttttcatcccttccgcgatttttacgccgctaccggattatgccg

SEQ ID NO: 186835 - DNA, 75 bp, synthetic construct
  source 1..75: mol_type = other DNA
tcgcttcgatgcaactgctggcggtgaaacagctgaagcatggaccgttggtgctaaatacgacgctaataacgt

SEQ ID NO: 186836 - DNA, 75 bp, synthetic construct
  source 1..75: mol_type = other DNA
tcacccaaccatacccggattcgcagccagcccggacggacttgtcaacgacgacgggcttatcgaaatcaaatg

SEQ ID NO: 186837 - DNA, 75 bp, synthetic construct
  source 1..75: mol_type = other DNA
gccagtacctgctgcagatgcacgctcagatgatgtgcacagggcgtaaatggtgtgatttcgttagtttcgacg

SEQ ID NO: 186838 - DNA, 75 bp, synthetic construct
  source 1..75: mol_type = other DNA
tcaaagcataaagtaagagatgtggactcttttattcagaatataaactctttgaaaaaagataaagatggtttt

SEQ ID NO: 186839 - DNA, 75 bp, synthetic construct
  source 1..75: mol_type = other DNA
tggtccgtggcgtttacgtaataacagtatctggaaccgtaccgatggcaaaaccaatgggataacgttggtaca

SEQ ID NO: 186840 - DNA, 75 bp, synthetic construct
  source 1..75: mol_type = other DNA
aattttgaaaaaacatatggaaagttaggcaaaaactatattcaagttcaccatataaaacctttacataagatt

SEQ ID NO: 186841 - DNA, 75 bp, synthetic construct
  source 1..75: mol_type = other DNA
aatgatgtttcttcttcggaggtatataagtcgctatcaattgcacaacaagagcgacatgcaataaagcgaaat

SEQ ID NO: 186842 - DNA, 75 bp, synthetic construct
  source 1..75: mol_type = other DNA
gattaccgccagcaacagggcattgatgccgcgcaggctgctttcacggccagcctgtacagcctgaacgcggac

SEQ ID NO: 186843 - DNA, 75 bp, synthetic construct
  source 1..75: mol_type = other DNA
aagatatggtgcagggataccactgggctatgttgcccgtgaatatggcaggcaatgcaggggagagcaccgata

SEQ ID NO: 186844 - DNA, 75 bp, synthetic construct
  source 1..75: mol_type = other DNA
agagtcagagtgccagcaccatcggctccactgccggtaatgtcagtattaccgcgggcaaacaggctcatatca

SEQ ID NO: 186845 - DNA, 75 bp, synthetic construct
  source 1..75: mol_type = other DNA
cgggatgtgtcactggcggcgggtaatcatgttgatgttcttgctgccaccagtacagatacgtcctggcgcttt

SEQ ID NO: 186846 - DNA, 75 bp, synthetic construct
  source 1..75: mol_type = other DNA
ggtatatttttctgccaaagtttacccaaactgggcagcaacgttatgcccacggtgaagctatcgttaactatc

SEQ ID NO: 186847 - DNA, 75 bp, synthetic construct
  source 1..75: mol_type = other DNA
gctggcctcaatcccattctggccgttacaggttccggtggtcttggttccgtcagttcgtcaggtattcaggct

SEQ ID NO: 186848 - DNA, 75 bp, synthetic construct
  source 1..75: mol_type = other DNA
cctgataagtgggagcaaaagtcagtccggtttctggcacactgatgacaacagttcatcatccaccacctcaca

SEQ ID NO: 186849 - DNA, 75 bp, synthetic construct
  source 1..75: mol_type = other DNA
accattaaaggcactgattcactttcgctggatgcagggaaaaacattgatattaccggggcaacggtctcgtcc

SEQ ID NO: 186850 - DNA, 75 bp, synthetic construct
  source 1..75: mol_type = other DNA
tggccccggctggaaagcgccttctgatatccgcttacagctacgcgatgatgcactggtactcaatgacaacgg

SEQ ID NO: 186851 - DNA, 75 bp, synthetic construct
  source 1..75: mol_type = other DNA
tagaggaagcttcactccttttcataataatactgtgaatatcgcccctaatgaaaaaaaatttatttccctaac

SEQ ID NO: 186852 - DNA, 75 bp, synthetic construct
  source 1..75: mol_type = other DNA
tacactaattcatttccttcttcatattcacatgaattatttgatttggttgaggcatatagaaatccaacgtat

SEQ ID NO: 186853 - DNA, 75 bp, synthetic construct
  source 1..75: mol_type = other DNA
ataggcatccatttaggatagttctcgggaataaaacattgtatccatcagaagaacttataaagtttataagaa

SEQ ID NO: 186854 - DNA, 75 bp, synthetic construct
  source 1..75: mol_type = other DNA
gagaacgttgcgccagcaacggcccgcagggcgagccacgaagtggcgagtaatcctctatcaccgaccaaattc

SEQ ID NO: 186855 - DNA, 75 bp, synthetic construct
  source 1..75: mol_type = other DNA
atgatgaaagtttattggcgacgctggaaacgtggctgctgccacatatgactggcgtacattcactacgcggcc

SEQ ID NO: 186856 - DNA, 75 bp, synthetic construct
  source 1..75: mol_type = other DNA
tttctgatggtgaataccggcatgcaattatcgcttccgcagcaacatctttcgccgcccagcttcgcaaaggag

SEQ ID NO: 186857 - DNA, 75 bp, synthetic construct
  source 1..75: mol_type = other DNA
agaaagcgcatgaattgtatgacagcatatacggtggtaaacctgctcccgatgttataaatacactgcataaaa

SEQ ID NO: 186858 - DNA, 75 bp, synthetic construct
  source 1..75: mol_type = other DNA
atggaaatatatgacagtgaggacataaaggtatacatgttaactaaaagaatattattttctgtaatgctgata

SEQ ID NO: 186859 - DNA, 75 bp, synthetic construct
  source 1..75: mol_type = other DNA
ccggacagcacgctcacggcgtggccggataaccgcatcgcggaggatgcgcactatgtctaccgacacgatgaa

SEQ ID NO: 186860 - DNA, 75 bp, synthetic construct
  source 1..75: mol_type = other DNA
tcacaacccgagttagatgctcaaatatcagacaccttttcatatctatatgataattttcagattgctgatggt

SEQ ID NO: 186861 - DNA, 75 bp, synthetic construct
  source 1..75: mol_type = other DNA
gtactgcgtcagaaaccaaactgcagatggatggaaacactccggccaaaggcctgcctaaccaggaagtcgatt

SEQ ID NO: 186862 - DNA, 75 bp, synthetic construct
  source 1..75: mol_type = other DNA
ccgctaaacaaggtgatgaagaagctccgttagcgctgggggatatctactacgaaggtgaacaggtgcgggtgg

SEQ ID NO: 186863 - DNA, 75 bp, synthetic construct
  source 1..75: mol_type = other DNA
atacgctaatatttatataaatagtactactgcaggacatggctcggccgtacgtttaaatggtaccaacaacac

SEQ ID NO: 186864 - DNA, 75 bp, synthetic construct
  source 1..75: mol_type = other DNA
gatttaaatcggtttgcatcgagctacaactggatcacgtcgataagaactcaattcgtggaacgtatgacaatg

SEQ ID NO: 186865 - DNA, 60 bp, synthetic construct
  source 1..60: mol_type = other DNA
atgactcgcttcgctcgcccttcgggccgtcgccgcgagcggctccgttgtttcgctgcg

SEQ ID NO: 186866 - DNA, 75 bp, synthetic construct
  source 1..75: mol_type = other DNA
acggcaacgtcaccctgaatgcgtcaaatggcagaatcaagttgaccgggaacgggcacggtagcgcctccggga

SEQ ID NO: 186867 - DNA, 75 bp, synthetic construct
  source 1..75: mol_type = other DNA
gccatcaaccttacagacactacaggcactaccacgctgaatgccacgaataacatcactatgcaggggacccgt

SEQ ID NO: 186868 - DNA, 75 bp, synthetic construct
  source 1..75: mol_type = other DNA
tcaaaatcaggccggaaaaattgctgttttcggttcggatatgaccactgaaattgctcaggagctggaaaacaa

SEQ ID NO: 186869 - DNA, 75 bp, synthetic construct
  source 1..75: mol_type = other DNA
actgtaaccggaagaatagtaaccctgacgagccagggggctggaacttttagttggacttacacgaaaataggt

SEQ ID NO: 186870 - DNA, 75 bp, synthetic construct
  source 1..75: mol_type = other DNA
actgccctaaaaaaacaggacttatcgccaatggttactcgcagactacatctcaggaagggttgcaaacatcat

SEQ ID NO: 186871 - DNA, 75 bp, synthetic construct
  source 1..75: mol_type = other DNA
gtcaattgttgggaatatatcagccttcgcattagctcagggtagctcaacatcaacgaaaatgatccagatttt

SEQ ID NO: 186872 - DNA, 75 bp, synthetic construct
  source 1..75: mol_type = other DNA
ctcgcaggtgctggccgatctcgatcatgtcgccagttgggcttcccgcaacggcggcgatgttcatcgtttaat

SEQ ID NO: 186873 - DNA, 75 bp, synthetic construct
  source 1..75: mol_type = other DNA
tactgctgtggctgaaaatactccgacaacacttttctctataccagattcgcaaggtacttacattattagcgt

SEQ ID NO: 186874 - DNA, 75 bp, synthetic construct
  source 1..75: mol_type = other DNA
caattgatggatctctccaccctttaagtgaagttttctcaacactctcagcggcacagatggtatatccatttg

SEQ ID NO: 186875 - DNA, 75 bp, synthetic construct
  source 1..75: mol_type = other DNA
taatctgtcgggcgccaataccaacaatggcagtatcaccattagcaataacgtcaatataacgaccagtggtgg

SEQ ID NO: 186876 - DNA, 75 bp, synthetic construct
  source 1..75: mol_type = other DNA
aggaaaatattgacaaacaataaccacaataccatttgtgtattaatgatggatattgaccattttaaaaaagta

SEQ ID NO: 186877 - DNA, 75 bp, synthetic construct
  source 1..75: mol_type = other DNA
aggcgaagatggcggtgcgatagttcagttaggttacggacagcggcttaaatggaataacgtcgtggatggcgg

SEQ ID NO: 186878 - DNA, 75 bp, synthetic construct
  source 1..75: mol_type = other DNA
cggatggtaacgatcgcatcgagtacgggctgagtggaaaagagcgtctgtggacgacgccgcgctttacgctgg

SEQ ID NO: 186879 - DNA, 75 bp, synthetic construct
  source 1..75: mol_type = other DNA
aactggaaccgggtaagcgcgtccgcctgatcgaggtggacggctcagcgttcggtgcgggtattcttcgctttc

SEQ ID NO: 186880 - DNA, 75 bp, synthetic construct
  source 1..75: mol_type = other DNA
accccacagcagacccgactcaggaaaagctgcaggtgtggtatatcgacgggaaaacgggcgagcttgccggtg

SEQ ID NO: 186881 - DNA, 75 bp, synthetic construct
  source 1..75: mol_type = other DNA
tcaattgacatagtgtattattcagttaccagccatcaattatcatggaacactacctatattaaaaccattatt

SEQ ID NO: 186882 - DNA, 75 bp, synthetic construct
  source 1..75: mol_type = other DNA
cctggccgggtatatatccgttacactgttctgatattactggtactgaactttaaaggtggcgtcggcgttggc

SEQ ID NO: 186883 - DNA, 75 bp, synthetic construct
  source 1..75: mol_type = other DNA
gggcgccaggaccagcaatggcagtatcaccattagcaataacgccaatataacgaccaatggtggggatataac

SEQ ID NO: 186884 - DNA, 75 bp, synthetic construct
  source 1..75: mol_type = other DNA
accgttaatgcggcaattaacaaaagcaacggaagtgatgtcaacctgacgctgcaggctggcggcaacatcacg

SEQ ID NO: 186885 - DNA, 75 bp, synthetic construct
  source 1..75: mol_type = other DNA
ttgctgactgcctggaaagatgagccttctgcgcagaatgatgtccgtcgggccagaattgaccgcatgggcgcc

SEQ ID NO: 186886 - DNA, 75 bp, synthetic construct
  source 1..75: mol_type = other DNA
aaaagctgacggaacatctggcgcgtactggctcgggtaaccaggggctacgtatcctctattcttccgtactcg

SEQ ID NO: 186887 - DNA, 75 bp, synthetic construct
  source 1..75: mol_type = other DNA
ctatattgaaatacattgaaagaaacattgaggtttcctcaattaatataaatactctggttgaatattcaggct

SEQ ID NO: 186888 - DNA, 75 bp, synthetic construct
  source 1..75: mol_type = other DNA
aaaccagattagctgttgttaatcattatcttgccggacacgatggcgcacgtcgtaccgctgaacgttttggtg

SEQ ID NO: 186889 - DNA, 75 bp, synthetic construct
  source 1..75: mol_type = other DNA
gtggcggatgtcacccaggtcgacaaactgctgcacggcgacgagaacgtcgtctgcgccgatgacggttacaca

SEQ ID NO: 186890 - DNA, 75 bp, synthetic construct
  source 1..75: mol_type = other DNA
ccgcgcaggctggaacggcaagggcctgtggcttgagctggtccagcagtcgccatctgtggacctgccgtacat

SEQ ID NO: 186891 - DNA, 75 bp, synthetic construct
  source 1..75: mol_type = other DNA
cggcctggtaacggccgtctccgccggaaccgcgaccattacagctacaaccgcagatggtgatttcaccgacac

SEQ ID NO: 186892 - DNA, 75 bp, synthetic construct
  source 1..75: mol_type = other DNA
ggtctggtgacttcggtaccaacgatatctcaactttctccggcgagtggaaggtctacgacgccgacactgtcg

SEQ ID NO: 186893 - DNA, 75 bp, synthetic construct
  source 1..75: mol_type = other DNA
tcaacgcgcggtcgatcagatcctgactcgttctggcaagctggattgttttatcggcaatgcgggcatctggga

SEQ ID NO: 186894 - DNA, 75 bp, synthetic construct
  source 1..75: mol_type = other DNA
gatctggcgaaccgctttgccactgccggtgtcgatgtgccggatagcgtgttttatacctctgcgatggcgacc

SEQ ID NO: 186895 - DNA, 75 bp, synthetic construct
  source 1..75: mol_type = other DNA
tcgataaccatgtgaaaggtgacggactgccgggtgaatcctggaaatcaaaaggacttaccgcctcactggaaa

SEQ ID NO: 186896 - DNA, 75 bp, synthetic construct
  source 1..75: mol_type = other DNA
atgaacgtctggggcagacgcaatacgtcgatgcaattaccggagaaccgaaagcaaccagtatgtggatgcgcc

SEQ ID NO: 186897 - DNA, 75 bp, synthetic construct
  source 1..75: mol_type = other DNA
gaatacattcttaaccaggatctctggggtgattttcccgttacacaggcagacgatcccgtcgagccgatggtt

SEQ ID NO: 186898 - DNA, 75 bp, synthetic construct
  source 1..75: mol_type = other DNA
atgaagctggtcgcggtcagagtttttctggcagttctaatggcaggctatatcaacaataatgtgttatatgca

SEQ ID NO: 186899 - DNA, 75 bp, synthetic construct
  source 1..75: mol_type = other DNA
cctggaaacaaatgaaattgatttgcataaggacatgcaaccgcaaggaatgcttgaacggtacctgtttaagct

SEQ ID NO: 186900 - DNA, 75 bp, synthetic construct
  source 1..75: mol_type = other DNA
cggcctggtgacagcagttgccgagggcaccgcgactattacggctaccactgctgacggtaatttcgccgacac

SEQ ID NO: 186901 - DNA, 75 bp, synthetic construct
  source 1..75: mol_type = other DNA
cgcctcgaaacagagcaggatgaaatgaagaagacattacgtaatctcgaagatcaaattcatcaactggatttg

SEQ ID NO: 186902 - DNA, 75 bp, synthetic construct
  source 1..75: mol_type = other DNA
ttattatttctggctgtgtacttctgtacactgtattccgcgacaatacaaaagatactgatggactacttacac

SEQ ID NO: 186903 - DNA, 75 bp, synthetic construct
  source 1..75: mol_type = other DNA
gtcgtgttatggcggctgaaatgctcaaaatggattctgttccggtcattgttctgtctggcctgacggatgagc

SEQ ID NO: 186904 - DNA, 75 bp, synthetic construct
  source 1..75: mol_type = other DNA
aatactggtaaaaaggtgctaatcccaaaaggtcttggatattataatgccacaattatatttaataattcagtc

SEQ ID NO: 186905 - DNA, 75 bp, synthetic construct
  source 1..75: mol_type = other DNA
tcaggctctacttcgctacatttcatcgccaaatatcgtgctaccgggcgtcgggttactggcggcatcgccaat

SEQ ID NO: 186906 - DNA, 75 bp, synthetic construct
  source 1..75: mol_type = other DNA
aaacgaggccgtcatcgtaaaggcgagtggcttcgcttatctttaattaataaacttcctgctgtcgttccagcc

SEQ ID NO: 186907 - DNA, 75 bp, synthetic construct
  source 1..75: mol_type = other DNA
gtaatcctgtcgctgacccggcgctggatgtgtgcggcggctgcctgagtgactgccgtaagcggtttggtgccg

SEQ ID NO: 186908 - DNA, 75 bp, synthetic construct
  source 1..75: mol_type = other DNA
ctactttgacgtcgacgagtcaacctacctccactatcaaaacctcgcccgccgcgggcaaggcgcgtccagcga

SEQ ID NO: 186909 - DNA, 75 bp, synthetic construct
  source 1..75: mol_type = other DNA
gcaacatgggaataaccaagtaggtgcaaaaaaaattgggttcattgaaactgcaaaggatttttataagctaaa

SEQ ID NO: 186910 - DNA, 75 bp, synthetic construct
  source 1..75: mol_type = other DNA
tgcgaactttgttacccgtgagtttttacagtctggcattggcgcagaggtgatgacggcagataccccccatga

SEQ ID NO: 186911 - DNA, 75 bp, synthetic construct
  source 1..75: mol_type = other DNA
tggactttccggcaccccgttcgcagcctggatggggaagtactacgaatgcctgatcaagcctacaacgattcg

SEQ ID NO: 186912 - DNA, 75 bp, synthetic construct
  source 1..75: mol_type = other DNA
aaatatggttttacaatagtgagccatctatagatattcaagaatataatagtttcgccgataatactactaaca

SEQ ID NO: 186913 - DNA, 75 bp, synthetic construct
  source 1..75: mol_type = other DNA
ctggcgacgctgtgcgtcggtggcggtcagggcgtggcgctgacactggaaagaaccacaggagaacaccatgca

SEQ ID NO: 186914 - DNA, 75 bp, synthetic construct
  source 1..75: mol_type = other DNA
cctattggcgcttccggttgccgcattctggtcactctcatttatgaaatggcgcgacgtaatgcgcaaaaaggg

SEQ ID NO: 186915 - DNA, 75 bp, synthetic construct
  source 1..75: mol_type = other DNA
aaatcaattgatttaaattctgatgcaaaaaataagatgggagtattctccccattctcgaaagtttgtctggga

SEQ ID NO: 186916 - DNA, 75 bp, synthetic construct
  source 1..75: mol_type = other DNA
tgggcgggcggtgccaactttactcatcatcaggataccaatcgcctgatccgtgcctggcaaaaaccggagctg

SEQ ID NO: 186917 - DNA, 75 bp, synthetic construct
  source 1..75: mol_type = other DNA
aaagtggggaactttctgcgccgcacctcgctggatgaattgccgcagtttatcaatgtgctgaccggcgggatg

SEQ ID NO: 186918 - DNA, 75 bp, synthetic construct
  source 1..75: mol_type = other DNA
cgggcgctttgcagacgaaattactccggtgagcgtaccacaaggtaaaaaaccaccacgctgggtaaataccga

SEQ ID NO: 186919 - DNA, 75 bp, synthetic construct
  source 1..75: mol_type = other DNA
cttgtggcaaataagttggtggttcatagatgaaaaaatttgtataagtaagtcattgcttaatcaatatgataa

SEQ ID NO: 186920 - DNA, 75 bp, synthetic construct
  source 1..75: mol_type = other DNA
ccagatttattaaatgcatttcaaagagttatttttaaaaataggagcataactacagttcataataatatatac

SEQ ID NO: 186921 - DNA, 75 bp, synthetic construct
  source 1..75: mol_type = other DNA
atgaccttttatacattagaggatggagtgtttggcttgacttgaaaataatatttctcacaatctttaaaggat

SEQ ID NO: 186922 - DNA, 75 bp, synthetic construct
  source 1..75: mol_type = other DNA
acgacagccgtggacagttaactgcggtgaaagacacgcagggccatgaaacgcggtatgaatacaacatcgccg

SEQ ID NO: 186923 - DNA, 75 bp, synthetic construct
  source 1..75: mol_type = other DNA
cactatctttaccggtatgaccgtcacggcaggctgacagagaaaaccgacctcatcccggaaggggttatccgc

SEQ ID NO: 186924 - DNA, 75 bp, synthetic construct
  source 1..75: mol_type = other DNA
ggttttgggatattttcatttgtaatatatatgtatctagtaagtatcggaaataaaagtcaaaaatcagcatta

SEQ ID NO: 186925 - DNA, 75 bp, synthetic construct
  source 1..75: mol_type = other DNA
aaaaaacaggttagttgtcgtgctcaacggaaaaattaatggcaacgcatgcatcgtcgttccattatcaaccac

SEQ ID NO: 186926 - DNA, 75 bp, synthetic construct
  source 1..75: mol_type = other DNA
gatgactcgctgtttattgactatgttgatgttgagtggtcactacgcgcacgacatcaaggactacgctgctac

SEQ ID NO: 186927 - DNA, 75 bp, synthetic construct
  source 1..75: mol_type = other DNA
aagcaagaatcagcaactgtgaatcttcgtttaattggtagcaatgttgggattgcgactgctcagaaccatggg

SEQ ID NO: 186928 - DNA, 75 bp, synthetic construct
  source 1..75: mol_type = other DNA
gggtaaaacccaatctgacttgtacgccgcaggatgatccccagtatccagggatggagacaaagacagcaagtg

SEQ ID NO: 186929 - DNA, 75 bp, synthetic construct
  source 1..75: mol_type = other DNA
cctgagagaccgggcatcctgcttttgctttctggattatgccgtcaaaggtagaggcatcaatacccggcaccg

SEQ ID NO: 186930 - DNA, 75 bp, synthetic construct
  source 1..75: mol_type = other DNA
tttactgctgtatctatggttcgtttgtttatattctgagatacggtattgtttcctgggctcctaagtttttaa

SEQ ID NO: 186931 - DNA, 75 bp, synthetic construct
  source 1..75: mol_type = other DNA
tccggtgtgctgcacatgtctgcaaccgagatcggcattatctcctgtgccggttttttatcctatggtatatca

SEQ ID NO: 186932 - DNA, 75 bp, synthetic construct
  source 1..75: mol_type = other DNA
accacttcgctaaatccacactgattagcgattctccgcgcgctaccgcctccgattcactgaccggtaccgaca

SEQ ID NO: 186933 - DNA, 75 bp, synthetic construct
  source 1..75: mol_type = other DNA
ggcgtgtatccgtcttattgggaagaatggaaaaaaatccgggaggtggtgaaagtttcctgtcctgaatgtaaa

SEQ ID NO: 186934 - DNA, 75 bp, synthetic construct
  source 1..75: mol_type = other DNA
gtaaggattgccgtgggcgtggtgtcgccattcatcgtgaagagtcggtaaaacgtggtatgcctgttatcagag

SEQ ID NO: 186935 - DNA, 75 bp, synthetic construct
  source 1..75: mol_type = other DNA
aatcagattgcaatacggtgtggttatgccagtactgcatactttatcagtgttttcagacagtattatggtatt

SEQ ID NO: 186936 - DNA, 75 bp, synthetic construct
  source 1..75: mol_type = other DNA
tggatctgcaccggctgatgcgcttcctgggtataaaggaaaaggcgttgccagtagtcaatgtgatacagcata

SEQ ID NO: 186937 - DNA, 75 bp, synthetic construct
  source 1..75: mol_type = other DNA
gtccgttaaaccgttctatgatcagctgattacgaaattcgatattgaagaggcatgggcagaaaaccaactgaa

SEQ ID NO: 186938 - DNA, 75 bp, synthetic construct
  source 1..75: mol_type = other DNA
atgtcgaacagaacgacattaccgacgaatgccttgggctgattcaaaacctcggcaatgtgcctgcacctatcc

SEQ ID NO: 186939 - DNA, 75 bp, synthetic construct
  source 1..75: mol_type = other DNA
ccggcctaacggcggtaccgacatccgaaatgacctcggatctgaccactacgtgctggtggatgtcatttccgc

SEQ ID NO: 186940 - DNA, 75 bp, synthetic construct
  source 1..75: mol_type = other DNA
tatctttgatgatgttcctttgtcgtcagaggttaaaaacgtaagttggaaagcgataaacgataatggtggttt

SEQ ID NO: 186941 - DNA, 75 bp, synthetic construct
  source 1..75: mol_type = other DNA
aatttttgaaagttggagaaaaaaattaccggcaatatcaggtcctgtaaatctctttatacctatcagattcaa

SEQ ID NO: 186942 - DNA, 75 bp, synthetic construct
  source 1..75: mol_type = other DNA
gcacactctacacacttgatgtgcagcaagaagctgaactcatggctttggttaataaatccgacgaagacattg

SEQ ID NO: 186943 - DNA, 75 bp, synthetic construct
  source 1..75: mol_type = other DNA
gaatattacctcacaggctgcattccatggatccacaaccggccatgcccattacgcggccagtaaagcgggcct

SEQ ID NO: 186944 - DNA, 75 bp, synthetic construct
  source 1..75: mol_type = other DNA
ctgattaccactataaaaaggctgctattgagtatgttgctcagatgctcatatcaaatatcggtaatcttgagg

SEQ ID NO: 186945 - DNA, 75 bp, synthetic construct
  source 1..75: mol_type = other DNA
atgaactgattcgggaacagcattaccatctggaagacggtgatctgtgttattttttcggcgagtatacggcac

SEQ ID NO: 186946 - DNA, 75 bp, synthetic construct
  source 1..75: mol_type = other DNA
tcaacgggctgcaaacctcgtttcggagagaatgagcagctggattatggcgggttccccggggcttcacttctg

SEQ ID NO: 186947 - DNA, 75 bp, synthetic construct
  source 1..75: mol_type = other DNA
gaaaataagcgagggtgtaatcaagatcatggtagtggctcctgaacgtatgaagaaagacagggaatcgttgta

SEQ ID NO: 186948 - DNA, 75 bp, synthetic construct
  source 1..75: mol_type = other DNA
actaccgcgagcagagcatccaactccccaaggcatccgatccgcgctatattgaaatggccgagcagaactcta

SEQ ID NO: 186949 - DNA, 75 bp, synthetic construct
  source 1..75: mol_type = other DNA
tttttctattgctttactatgtttctaatcagagacaaagttatctcttaattctttcattcgcgtttttgagca

SEQ ID NO: 186950 - DNA, 75 bp, synthetic construct
  source 1..75: mol_type = other DNA
cccagaaaaatatgacaatcacttggggatattacttccgtaccggcattgtcatgactgtgccggtgctgtttg

SEQ ID NO: 186951 - DNA, 75 bp, synthetic construct
  source 1..75: mol_type = other DNA
gtaaaacttacctccaaggggcctgttatatttcgacagacaagatatggcatggatggtaaaccaattaaagtt

SEQ ID NO: 186952 - DNA, 75 bp, synthetic construct
  source 1..75: mol_type = other DNA
aatcgaaagcaaatgcttctattatatcaatgttacaaagattctcagatatatttattatattcgtaggtgttt

SEQ ID NO: 186953 - DNA, 75 bp, synthetic construct
  source 1..75: mol_type = other DNA
tttaagcgtcttgaagatataattgtatcatctttgattcttattctgatatcaccaattcttctggttatagct

SEQ ID NO: 186954 - DNA, 75 bp, synthetic construct
  source 1..75: mol_type = other DNA
actttttactgtgggtttgttttcttttatacctgatttcacttatcctttcaaaatatttcttgaatggtattt

SEQ ID NO: 186955 - DNA, 75 bp, synthetic construct
  source 1..75: mol_type = other DNA
gagctggtgtattaaggaaacttggattcaatacgagaagagtagcagtagtcggaacattacctgcaggtataa

SEQ ID NO: 186956 - DNA, 75 bp, synthetic construct
  source 1..75: mol_type = other DNA
gtgcgaatgctaatgcgtcaataatctctttagtgcaaaggttttctgatattgctattatttttttaggtttgt

SEQ ID NO: 186957 - DNA, 75 bp, synthetic construct
  source 1..75: mol_type = other DNA
ctcgccgtgtagctgttgtaggatcattgcctgcaggtattaatctgctgaaaggttttgccgaagaaccatgga

SEQ ID NO: 186958 - DNA, 75 bp, synthetic construct
  source 1..75: mol_type = other DNA
agatatattcacttttaatattctccaatccagaaccgaagagataaatggcgtacccgttgttcctctttttga

SEQ ID NO: 186959 - DNA, 75 bp, synthetic construct
  source 1..75: mol_type = other DNA
gttcaaataccaatgcctcattgatttcaatggctcaacgcttctcggatgtgattataatatttttaggtttgt

SEQ ID NO: 186960 - DNA, 75 bp, synthetic construct
  source 1..75: mol_type = other DNA
tagttccgttgtttgatactccactcaatggtattaatatggtctttaaacggattgaggatgtcgttgtttctt

SEQ ID NO: 186961 - DNA, 75 bp, synthetic construct
  source 1..75: mol_type = other DNA
atgctgtttctcataacgagcaatatcgatcattaatacagggttatatgttacgccataaagtaaaacctggaa

SEQ ID NO: 186962 - DNA, 75 bp, synthetic construct
  source 1..75: mol_type = other DNA
atatttctcactgtgcttgtcatatttcaaatgataggtggtataaccgatttctatcgttcgtggcgtggagtt

SEQ ID NO: 186963 - DNA, 75 bp, synthetic construct
  source 1..75: mol_type = other DNA
atgtcggtaaggctaaggatgaaagggcgcgggaggttgttaaatctttactcagtgcaggacacaaacccgcta

SEQ ID NO: 186964 - DNA, 75 bp, synthetic construct
  source 1..75: mol_type = other DNA
ctagacggtgtaaatgtttatttatttaatgtaagtaatactaataaatttgtggggactataaattatcttagg

SEQ ID NO: 186965 - DNA, 75 bp, synthetic construct
  source 1..75: mol_type = other DNA
agtattcagagaattttttggcgagaatccgcctgcacgtatttgttgtgtggctgatctggttgtcgattgtaa

SEQ ID NO: 186966 - DNA, 75 bp, synthetic construct
  source 1..75: mol_type = other DNA
aaggtggaacaggcactggcgggcagcatttgccttttgccagggcggttgaggcgggcggctggctgtacgtct

SEQ ID NO: 186967 - DNA, 75 bp, synthetic construct
  source 1..75: mol_type = other DNA
agacgtgcgcatcgccacttactacatctgggcgcgactgcaccgcgacggtgagcgcggactggctgaggggct

SEQ ID NO: 186968 - DNA, 75 bp, synthetic construct
  source 1..75: mol_type = other DNA
aacacccgtaccgaggtgagcaccctctgcatcagccagttccgctacagcgcacaaatccgaccttcttccgtg

SEQ ID NO: 186969 - DNA, 75 bp, synthetic construct
  source 1..75: mol_type = other DNA
tggaagtggacggcctgccaccggacgcttttgcggtggtttcctttcacctgaaccagtcactctcttcgctct

SEQ ID NO: 186970 - DNA, 75 bp, synthetic construct
  source 1..75: mol_type = other DNA
tgctcacgggtgcaatgatctttgccctggcatgcctgagcatgctgtttgtcacctcgatcgaacagtatttta

SEQ ID NO: 186971 - DNA, 75 bp, synthetic construct
  source 1..75: mol_type = other DNA
tgtatatggcaggcggactggcgctacagtggctcctggggccactctccgacaggattggccgccgcccggtcc

SEQ ID NO: 186972 - DNA, 75 bp, synthetic construct
  source 1..75: mol_type = other DNA
tgcccgtctgcataacgcatctcagttaggcaaaatcagttttctgaccatcggtacgcttttgtttaccacgct

SEQ ID NO: 186973 - DNA, 75 bp, synthetic construct
  source 1..75: mol_type = other DNA
gtgggggcacctgtcatcaacacgtactggtttacgggtggtgttggtgcggggggttatgatctgaaagtcacg

SEQ ID NO: 186974 - DNA, 75 bp, synthetic construct
  source 1..75: mol_type = other DNA
cctcctgagtggacaactttatttacaagccaaaagccagaattggatcataatttcttcgggaaaaatagtagc

SEQ ID NO: 186975 - DNA, 75 bp, synthetic construct
  source 1..75: mol_type = other DNA
agtatgagccatcttttttcacaaggatttataggttctgaactttttataagtgactctgaatttcgaggcaaa

SEQ ID NO: 186976 - DNA, 75 bp, synthetic construct
  source 1..75: mol_type = other DNA
tggcaggtggtggcaagtgaactgcacggcgagcagccgcaggcggtgccgggaaggcggggagcagggacggcg

SEQ ID NO: 186977 - DNA, 75 bp, synthetic construct
  source 1..75: mol_type = other DNA
cgcgtgctgaatgcaattgttcgcctgacgtatggctggtcgaaaaaagaagaccggatcgctaacagcctcatc

SEQ ID NO: 186978 - DNA, 75 bp, synthetic construct
  source 1..75: mol_type = other DNA
ttcgctctcaacgctcgcaaaacgggcagggatgtgaaccgcatttctgagccagacaaaacaatcccacccgga

SEQ ID NO: 186979 - DNA, 75 bp, synthetic construct
  source 1..75: mol_type = other DNA
ctcatagcattaacaatcaatcagtcagcaaattttataataaccttctcatattttattaagcaaaaatggttc

SEQ ID NO: 186980 - DNA, 75 bp, synthetic construct
  source 1..75: mol_type = other DNA
ggacaggctggagggggaaatccgggcagaccgcgtgagcagtgagagccgggcgtggctggcgcagtgcgggct

SEQ ID NO: 186981 - DNA, 75 bp, synthetic construct
  source 1..75: mol_type = other DNA
ctccgacggtcaccacgcagtcggacggtacggtggagttcagtgtcaccagccagacggcaggaaccagtacag

SEQ ID NO: 186982 - DNA, 75 bp, synthetic construct
  source 1..75: mol_type = other DNA
aatagaactagccctaaattcatcagggattaatatctcgacaaaaattattaacagatcaatttatttacttca

SEQ ID NO: 186983 - DNA, 75 bp, synthetic construct
  source 1..75: mol_type = other DNA
gggaaaccggctgccggacccggaactgcacccggacagtaccttcacggcgtggccggataaccgcatcgcgga

SEQ ID NO: 186984 - DNA, 75 bp, synthetic construct
  source 1..75: mol_type = other DNA
gcggcatgcgcgatgctttcaacctggcatggaaactggcgctggtgattaacggtaaagccgacgatgcgctgt

SEQ ID NO: 186985 - DNA, 75 bp, synthetic construct
  source 1..75: mol_type = other DNA
gagatcgtctgttggggtggataacaaacaaatccgatctgcggcagagggcaatcactggattaactcctgcga

SEQ ID NO: 186986 - DNA, 75 bp, synthetic construct
  source 1..75: mol_type = other DNA
ataccgcctggagcctgaagaaagctgttgcccggcgtgtggcggggagctggattatctgggggaagtcagcgc

SEQ ID NO: 186987 - DNA, 75 bp, synthetic construct
  source 1..75: mol_type = other DNA
ctggacaggtgctgttgctgaacagctggagccgctgtatgacgtcctgcgccagtatgtgctgatgcccggtaa

SEQ ID NO: 186988 - DNA, 75 bp, synthetic construct
  source 1..75: mol_type = other DNA
ggggcctgccgctggcgcttatcagtgaagacggcaatacggcgtggcgcggggagtatgatgaatggggcaacc

SEQ ID NO: 186989 - DNA, 75 bp, synthetic construct
  source 1..75: mol_type = other DNA
gcgatcaacaaacacaaacagataaccgttcaccacttaatgaggaaaccaccagcaatgtgcagatggaagaaa

SEQ ID NO: 186990 - DNA, 75 bp, synthetic construct
  source 1..75: mol_type = other DNA
agcgttgaaccggtgatccctgaaggcgcattcacaacggccgcgaccctgcgcgcctttatcgatgagcacaat

SEQ ID NO: 186991 - DNA, 75 bp, synthetic construct
  source 1..75: mol_type = other DNA
tggaaataagaccgatcgtaataccgactatgtccacacactggacactttggatgttgaaattgcgctggccac

SEQ ID NO: 186992 - DNA, 75 bp, synthetic construct
  source 1..75: mol_type = other DNA
tccgccgaactgctggagctgggcatgcttgagtaccgcaaatcaatgcgtgctatcgctaccggctttgacact

SEQ ID NO: 186993 - DNA, 75 bp, synthetic construct
  source 1..75: mol_type = other DNA
aaagcctgcgcgccaggctgcaccgggaaatcattgaccgtgactatcacctcagcgcggctatgtattgcgaga

SEQ ID NO: 186994 - DNA, 75 bp, synthetic construct
  source 1..75: mol_type = other DNA
gatgcgttcaaaaaagcgactgaattcgaaattgccagggttgttgaggctctgaagactatcttcccgttagac

SEQ ID NO: 186995 - DNA, 75 bp, synthetic construct
  source 1..75: mol_type = other DNA
gagaagcagaccatcctgagttttgttgccgccgggctgggcgtagccctggtgcctgcatcatataaaaatatg

SEQ ID NO: 186996 - DNA, 75 bp, synthetic construct
  source 1..75: mol_type = other DNA
tgccagggcatggggtatcagtggtgaggccgagctggctgtcatgcaggctattgctgaaaaaccgggagcatt

SEQ ID NO: 186997 - DNA, 75 bp, synthetic construct
  source 1..75: mol_type = other DNA
catgaagcggcgcaaaaattactcagccttgggtttaaacctgtgctgggtaaatttacttactggagcaaatag

SEQ ID NO: 186998 - DNA, 75 bp, synthetic construct
  source 1..75: mol_type = other DNA
tcagcaaaactcgcaaacagcagctctgttgccacgctacgatttacctgcaccaatgcttgaccgaccagcaaa

SEQ ID NO: 186999 - DNA, 75 bp, synthetic construct
  source 1..75: mol_type = other DNA
acggccagcggagaactgcgggcggtgtatgaccgcagcgggacgcaggtgcgcgggtttacttatgatgcggag

SEQ ID NO: 187000 - DNA, 75 bp, synthetic construct
  source 1..75: mol_type = other DNA
tatgaccgtcagggcaggctggcggaagagatctcgcgcaacggtaacattacgcgctggttttatgactccccc

SEQ ID NO: 187001 - DNA, 75 bp, synthetic construct
  source 1..75: mol_type = other DNA
agcattcaccgtcgcgccaaagaaatcgtggcgaaaaaagaagagccctggaaatcatggagcgcccttctgcgt

SEQ ID NO: 187002 - DNA, 75 bp, synthetic construct
  source 1..75: mol_type = other DNA
gctggcctttagtctcgccacggcgattttcggcggcctgacaccagccatctccaccgcattggtccagttgac

SEQ ID NO: 187003 - DNA, 75 bp, synthetic construct
  source 1..75: mol_type = other DNA
acttcatctggctgccgattggcggcgctatctctgatcggatcgggcgacgcccggtgctgatgggcatcacct

SEQ ID NO: 187004 - DNA, 75 bp, synthetic construct
  source 1..75: mol_type = other DNA
gtatggctgggacggagacaggctgacgacggtgcagactgacaccacacgtatccagacggtatacgagccggg

SEQ ID NO: 187005 - DNA, 75 bp, synthetic construct
  source 1..75: mol_type = other DNA
cgggcatcgactcgtctccggcgatgattgctgaagcgcgcagtgctttgccagactgccagttcgtggaggcag

SEQ ID NO: 187006 - DNA, 75 bp, synthetic construct
  source 1..75: mol_type = other DNA
atctgcactttgccgctgaacgatcgcgtccggcggtggagctgcttgccagagtgccgctggagaatgtcgatt

SEQ ID NO: 187007 - DNA, 75 bp, synthetic construct
  source 1..75: mol_type = other DNA
atgactcaacaaccatcgcgtaccggcacgttcggcgcaatactccgtgttaccagcggtaatttcctcgaacag

SEQ ID NO: 187008 - DNA, 75 bp, synthetic construct
  source 1..75: mol_type = other DNA
acccaccacttcgacatttcatcaagcgtaatacgtcgcgccaaagatatcgtcgcgaataaagaagagccgtgg

SEQ ID NO: 187009 - DNA, 75 bp, synthetic construct
  source 1..75: mol_type = other DNA
gcaccccggctgtccgcttcgccgtccatctgttgggtgataaatacctttcggagatcagccaggagcagcaaa

SEQ ID NO: 187010 - DNA, 75 bp, synthetic construct
  source 1..75: mol_type = other DNA
acgccaccctgcccgcgccggttaaaaccagcggcagccgcgatgcgctgcttgaacagctggcaatcatcaacc

SEQ ID NO: 187011 - DNA, 75 bp, synthetic construct
  source 1..75: mol_type = other DNA
cgggaaaagcgcagcggcgcagcctggcagagacgctccagcaggaagggagtgagaacggccacggcgtggtgt

SEQ ID NO: 187012 - DNA, 75 bp, synthetic construct
  source 1..75: mol_type = other DNA
tcaaaccagatgccgtatttgccgacgaactgctggatgcctggcgcgataacccggaaggaaaagtgctggtca

SEQ ID NO: 187013 - DNA, 75 bp, synthetic construct
  source 1..75: mol_type = other DNA
tatggggaacctggtgcatgcgctggcgctgcagccggaaaaccttgacgaagagttcagcgtggagccgatgat

SEQ ID NO: 187014 - DNA, 75 bp, synthetic construct
  source 1..75: mol_type = other DNA
aggctgcaatgatcaactgtctctggggtttaaaaagactaatcctcgataaaggagaatttagttttataaaaa

SEQ ID NO: 187015 - DNA, 75 bp, synthetic construct
  source 1..75: mol_type = other DNA
ggtgttttgaaaacagtgaattattaatttcttatataacattgagttatagatataacaacaaatgtcaacacg

SEQ ID NO: 187016 - DNA, 75 bp, synthetic construct
  source 1..75: mol_type = other DNA
gtatcagaactgttaacctttacctcttatggttgtgataaatcgacagtatcggttacgtccactcgtcatcct

SEQ ID NO: 187017 - DNA, 75 bp, synthetic construct
  source 1..75: mol_type = other DNA
tcttgaaaaataagaaaggtgttgtaacagaaatacaacatgatgagcatctgcgcccggaaacgacgctggaac

SEQ ID NO: 187018 - DNA, 75 bp, synthetic construct
  source 1..75: mol_type = other DNA
gcatcaaagaacaggtcatttgccgaacgtttcgtcggcgtggctcgtctcgcactaatcgcagcaggagtgaag

SEQ ID NO: 187019 - DNA, 75 bp, synthetic construct
  source 1..75: mol_type = other DNA
gcttttgaataataaattctttacagcgaaagaatcagaggagcttattaatgcagcaataatggggagtgaaaa

SEQ ID NO: 187020 - DNA, 75 bp, synthetic construct
  source 1..75: mol_type = other DNA
gtgagaacgacggaatagcgaaaaccgccgaatgggcggcggagatttgcggcatttcagcggagaaaattcgcg

SEQ ID NO: 187021 - DNA, 75 bp, synthetic construct
  source 1..75: mol_type = other DNA
ataaacgccgcagtgtactgaaccttgacggtcagttagtcgattacagccagggccgtaactataccgcccatc

SEQ ID NO: 187022 - DNA, 75 bp, synthetic construct
  source 1..75: mol_type = other DNA
cctcgcctgatgtggttaaaagcaggcaacacgaaccacaaggagtcgacatgcagaaacgagaacccgtcatca

SEQ ID NO: 187023 - DNA, 75 bp, synthetic construct
  source 1..75: mol_type = other DNA
tgaatgaatggagatttacccaaaaacatttcgggcgggatcgagtatacacaactaaagcatgcgaattacggc

SEQ ID NO: 187024 - DNA, 75 bp, synthetic construct
  source 1..75: mol_type = other DNA
tttggggatacatactttattactgggtactggtggtcgtggttgttgtggtcccggtattagaaccatcaccgc

SEQ ID NO: 187025 - DNA, 75 bp, synthetic construct
  source 1..75: mol_type = other DNA
tgtcaccattcatcctgacgatgctcaggcgcgcggcataaccgaaggggatatggtgcgggtgtggaactcccg

SEQ ID NO: 187026 - DNA, 75 bp, synthetic construct
  source 1..75: mol_type = other DNA
atccccgtgctcagcaagcacatccccgattttcccaccgacccacccaatgaatttcgtgttggcgtgacgcac

SEQ ID NO: 187027 - DNA, 75 bp, synthetic construct
  source 1..75: mol_type = other DNA
ttccatccagaggataataactattatgatctcactgatatatcagttattgaaaaacaatataagttagctaaa

SEQ ID NO: 187028 - DNA, 75 bp, synthetic construct
  source 1..75: mol_type = other DNA
gctaatttgttttttgtgtctctggcagaggaatcattatttagagggtatattcaatcacggctatcagaagta

SEQ ID NO: 187029 - DNA, 75 bp, synthetic construct
  source 1..75: mol_type = other DNA
tttgttagtcctgtgtacagcttctttgtttaaaaaagaagtgaaatcagaagtgtctttgtggaaatggggggc

SEQ ID NO: 187030 - DNA, 75 bp, synthetic construct
  source 1..75: mol_type = other DNA
ttccggggcttcccttgaacgtcctcagctatcgctgttgcttgatgaggctaacaccggggatttgttgctggt

SEQ ID NO: 187031 - DNA, 75 bp, synthetic construct
  source 1..75: mol_type = other DNA
taactttcgtgcaaactcccaaagaagggctctcttttgctatgactacttatctgaatttgtttgtgaaattgc

SEQ ID NO: 187032 - DNA, 75 bp, synthetic construct
  source 1..75: mol_type = other DNA
atatatagataaagcaggaatatggagcgcatttgagggtatatttgcaactaaaaacgttctggcctttagtcg

SEQ ID NO: 187033 - DNA, 75 bp, synthetic construct
  source 1..75: mol_type = other DNA
actggctcatattttattgaaaaaaacgaccttatttatgatgaaacagttatacgtgctttagaaaaagacaat

SEQ ID NO: 187034 - DNA, 75 bp, synthetic construct
  source 1..75: mol_type = other DNA
atggttgtttcagaccccgcttttctttccacatctaaagaaaaaaaaatcgccggtatgttcagcatcggcggt

SEQ ID NO: 187035 - DNA, 75 bp, synthetic construct
  source 1..75: mol_type = other DNA
ccagatgtactggtcgcagattcattaccaccggagcttaatcacatgcgtaaacataaggtagcggcgatccgc

SEQ ID NO: 187036 - DNA, 75 bp, synthetic construct
  source 1..75: mol_type = other DNA
acagttttcagaaaaatcagaagaagctggcgagactccagcgacagttaagccgcaaggtcaaattcagcaaca

SEQ ID NO: 187037 - DNA, 75 bp, synthetic construct
  source 1..75: mol_type = other DNA
gcgcttacggcggcaaatttgccggtacgggcgacagccatatcgcttttgcttcaccggatgagaaccgctcgg

SEQ ID NO: 187038 - DNA, 75 bp, synthetic construct
  source 1..75: mol_type = other DNA
ggtgaacaacgcgcaaaaagcgtatgtcgagcattacattcagggcgatccggatctggcaaaactgccggtgct

SEQ ID NO: 187039 - DNA, 75 bp, synthetic construct
  source 1..75: mol_type = other DNA
atgcttttaacactcccacaatttcagcgagccgcaggcctttcgccagtaatggcgcaacgctggtttgaacca

SEQ ID NO: 187040 - DNA, 75 bp, synthetic construct
  source 1..75: mol_type = other DNA
gataacattttctcctaatctgacgggagaatttacatgtaattcgactaaagataagttaaatgtgcttaaaac

SEQ ID NO: 187041 - DNA, 75 bp, synthetic construct
  source 1..75: mol_type = other DNA
caatttatattaagtttaatcttgatgtcggagatggatttcctgttgatacgggaggcaggaagacttattcag

SEQ ID NO: 187042 - DNA, 75 bp, synthetic construct
  source 1..75: mol_type = other DNA
tttgcacgaacgaggaactgtctaattggctcgcgattgtagcctcaaaatacaaattacattcaatttggttta

SEQ ID NO: 187043 - DNA, 75 bp, synthetic construct
  source 1..75: mol_type = other DNA
atttgcccgccgctatacccgtaatcctgaaaaaatggccaattatgtttacgcaaatcaggggggtaacggtaa

SEQ ID NO: 187044 - DNA, 75 bp, synthetic construct
  source 1..75: mol_type = other DNA
gtattatcgagccgagagaggtggaatttgcccgccgctatacccgtaatcctgaaaaaatggccaattatgttt

SEQ ID NO: 187045 - DNA, 75 bp, synthetic construct
  source 1..75: mol_type = other DNA
caagacatcatggctatcagcttgtcgtcgtgcaggaattgaagatttccgtttccatgacctcagacacacctg

SEQ ID NO: 187046 - DNA, 75 bp, synthetic construct
  source 1..75: mol_type = other DNA
cttgatgttcaggaacagcttacacgcctgcaacttccatacaatttcaccaatgattacgaacctgaacatttt

SEQ ID NO: 187047 - DNA, 75 bp, synthetic construct
  source 1..75: mol_type = other DNA
acttaatcttagtcagaccgaggatctatattaacgacaacatctcgctggggccggggaaggttgaccttttaa

SEQ ID NO: 187048 - DNA, 75 bp, synthetic construct
  source 1..75: mol_type = other DNA
gtggctataataatacatcttattttatcagtgtattcaggcgttattttggggtcaccccggaaggttacagga

SEQ ID NO: 187049 - DNA, 75 bp, synthetic construct
  source 1..75: mol_type = other DNA
gagaagaacgccaaagcccgtattcgccgcgccggggataagtcgccacttcctctctggcagaacgagagggtt

SEQ ID NO: 187050 - DNA, 75 bp, synthetic construct
  source 1..75: mol_type = other DNA
cttaacctgattaccggactcatcatgcgattttatctgattaataatgaattttacgaacagattaaagcacgg

SEQ ID NO: 187051 - DNA, 75 bp, synthetic construct
  source 1..75: mol_type = other DNA
taggcctgtctgtggataacgcttacaaatttgcaagggcaagctgccatcaggctgtttgcaaaactcaggagg

SEQ ID NO: 187052 - DNA, 75 bp, synthetic construct
  source 1..75: mol_type = other DNA
ggcaggcgtcattttattcagtttcagaacaggtaggatttggtgtttataccagtccaacggtacatgattccg

SEQ ID NO: 187053 - DNA, 75 bp, synthetic construct
  source 1..75: mol_type = other DNA
tgctttattgccgactcggtagttgcaaaccaggcatatttgggcgcacaagtacgaaccagtaatcatcgtctg

SEQ ID NO: 187054 - DNA, 75 bp, synthetic construct
  source 1..75: mol_type = other DNA
ggcgtgaaaccggtaataccgagaaccgtgacgccatcgcctcaaggaaccgattgaaagacccggcgttcattc

SEQ ID NO: 187055 - DNA, 75 bp, synthetic construct
  source 1..75: mol_type = other DNA
tacgggcagatgaacaacgtagcgcggaaatcctcgaccgcattccagctggccgttggggactgccgagtgacc

SEQ ID NO: 187056 - DNA, 75 bp, synthetic construct
  source 1..75: mol_type = other DNA
atataaactgcacgtacgctgtgaaagtatcgcttactccgtgcagactatggtggtgaagggcggttcagcctt

SEQ ID NO: 187057 - DNA, 75 bp, synthetic construct
  source 1..75: mol_type = other DNA
tacaggaagatgtccctgtcaatttggatcgtatttttggtgcaagctataatacacgtgctgttctcgaaagcc

SEQ ID NO: 187058 - DNA, 75 bp, synthetic construct
  source 1..75: mol_type = other DNA
atggaaaaacgttactacaaccgcaatggcgatgttgtctgggcgttgcttgccgtctcactggtgcgccacacg

SEQ ID NO: 187059 - DNA, 75 bp, synthetic construct
  source 1..75: mol_type = other DNA
acattgatgccagtgattggcacatgtttatttttgatgcatgccaactcacataaaggcgtaggaaagataatg

SEQ ID NO: 187060 - DNA, 75 bp, synthetic construct
  source 1..75: mol_type = other DNA
attgactgagtcacaggatcgggcgctggctattaataattcacagttggctgccgatgtgaaaacggcgtggtt

SEQ ID NO: 187061 - DNA, 75 bp, synthetic construct
  source 1..75: mol_type = other DNA
cggcagacggcgttgcacaatgtacataccccagcctctttgttaacgacattgactgagtcacaggatcgggcg

SEQ ID NO: 187062 - DNA, 75 bp, synthetic construct
  source 1..75: mol_type = other DNA
gtgaaagaggattactccgctggaatcatgaggaaagcgatatttttgcggagctggatacgataaaagataaat

SEQ ID NO: 187063 - DNA, 75 bp, synthetic construct
  source 1..75: mol_type = other DNA
agggattatcagtctcagtccgggtggggaaatatctcttttacgtgtaacagctgcagtggaaaaaggttcgca

SEQ ID NO: 187064 - DNA, 75 bp, synthetic construct
  source 1..75: mol_type = other DNA
gctgggtatggcagtagttaaagcagcacaggaaaaggggatcgcaatacccgcagtcactcatttcgatgcacc

SEQ ID NO: 187065 - DNA, 75 bp, synthetic construct
  source 1..75: mol_type = other DNA
ttccggtcgacggtatcgtgatcgaaggcaaaacaaccgttgatgaatcgatggtgaccggggaatctatgccgg

SEQ ID NO: 187066 - DNA, 75 bp, synthetic construct
  source 1..75: mol_type = other DNA
attgatggtcttgatttactctctgttgccagtaaaaccgatggacacggaagaagtgttacagcaagtgagttg

SEQ ID NO: 187067 - DNA, 75 bp, synthetic construct
  source 1..75: mol_type = other DNA
agcacgtcatctgtcagaaatcaccatgacaaatatccggcagaatctgttttttgcatttatctacaacgcact

SEQ ID NO: 187068 - DNA, 75 bp, synthetic construct
  source 1..75: mol_type = other DNA
gtggatcacttttcatccgtcgttgacagacaggttcttgagctgcgggcacgggaacaaacctcaggcgccatt

SEQ ID NO: 187069 - DNA, 75 bp, synthetic construct
  source 1..75: mol_type = other DNA
gtgaaaaatgacaatgtagtgcaacacaacaaccagactgcttctgaacagacattatccccggacgagagccac

SEQ ID NO: 187070 - DNA, 75 bp, synthetic construct
  source 1..75: mol_type = other DNA
actggtgttgggtgccgctcgcgtctggttattcccccatgccgatggtgctgtcgataacagcctgatgtgggt

SEQ ID NO: 187071 - DNA, 75 bp, synthetic construct
  source 1..75: mol_type = other DNA
acgcttttctggagtacgatcccggtttatatcctggcagtgctggcgttgggggctgctcgcgtctggctgttc

SEQ ID NO: 187072 - DNA, 75 bp, synthetic construct
  source 1..75: mol_type = other DNA
accatcaccacgatcatcacgaagtcagccctgatcagataaaacagcctcaccaccaggcggaaaaagagaatt

SEQ ID NO: 187073 - DNA, 75 bp, synthetic construct
  source 1..75: mol_type = other DNA
ttaaaggtgacctgatgatgctgaacaaggcccgacaactgtccgagatcaccatgaagaatatccggcagaatc

SEQ ID NO: 187074 - DNA, 75 bp, synthetic construct
  source 1..75: mol_type = other DNA
gcgcaacgctcacgcgcgcccatccagagaatggctgacagtgtctcgggatggtttgttcccctggtaatattc

SEQ ID NO: 187075 - DNA, 75 bp, synthetic construct
  source 1..75: mol_type = other DNA
gcaattcgtgattgagaaaaccgacgatctcgatacgctttttggtaacaaccatggtttacgacgccatgatca

SEQ ID NO: 187076 - DNA, 75 bp, synthetic construct
  source 1..75: mol_type = other DNA
atgttgtagacaggtcaaatgcaagtatgaaagctctgaactcaagtattcccgaaaaagatcttttaagaatcg

SEQ ID NO: 187077 - DNA, 75 bp, synthetic construct
  source 1..75: mol_type = other DNA
ttcactttccttgcgctgggttggcagtttagccagaaacgcgccgcgcgtcgtttgcttgaacgcgacgcctga

SEQ ID NO: 187078 - DNA, 75 bp, synthetic construct
  source 1..75: mol_type = other DNA
cgtcgcgtgactatacgccgttgtatgacgaactacgccatgaactggcgattgatttctttattcacgaaggtg

SEQ ID NO: 187079 - DNA, 75 bp, synthetic construct
  source 1..75: mol_type = other DNA
ggggttatcgagcggttctcggctgccgctgtttgagcatagcgacgttgagatcgccgtcgatttcctgcaacg

SEQ ID NO: 187080 - DNA, 75 bp, synthetic construct
  source 1..75: mol_type = other DNA
gtactggatgcagaaatcacccgcattgaaaaaatgggcgtgaccattacgtgcaattgcgaaattggtaaaacg

SEQ ID NO: 187081 - DNA, 75 bp, synthetic construct
  source 1..75: mol_type = other DNA
tgcattgtcgatgcttctattagcaacaataaacagacgaaaccaattaaattagttaaagctgatggtgtctgg

SEQ ID NO: 187082 - DNA, 75 bp, synthetic construct
  source 1..75: mol_type = other DNA
agcgcgttcgcaatgatctgcgcttccgtgaactgactgtgttacgcgttgagcgcatcagcgccggttttcagc

SEQ ID NO: 187083 - DNA, 75 bp, synthetic construct
  source 1..75: mol_type = other DNA
tcgatgactggaacaagatccggttggtgctggcagacaatcaaaaagcaagacgacaaccagcaattcgtgatt

SEQ ID NO: 187084 - DNA, 75 bp, synthetic construct
  source 1..75: mol_type = other DNA
caagcctatacaattcccgaatcgttaactgttgattataaaaatcggcgtgagcctgccgtatttgacaaaaca

SEQ ID NO: 187085 - DNA, 75 bp, synthetic construct
  source 1..75: mol_type = other DNA
accgcaagttagcgcgctggttagcgtgcgggataacgcctgtcaggattatctcgcgcaccttgatggttttaa

SEQ ID NO: 187086 - DNA, 75 bp, synthetic construct
  source 1..75: mol_type = other DNA
ttaagccgccgctttgaaacggaacagtttgacccacagcgggttcgtgcagcggcctactggcacgcaaagtaa

SEQ ID NO: 187087 - DNA, 75 bp, synthetic construct
  source 1..75: mol_type = other DNA
aaggtggtgaagaatttaagccgtcgctttgaagcggaacagtatgaccctcaacaggtacgtgcagcggcttac

SEQ ID NO: 187088 - DNA, 75 bp, synthetic construct
  source 1..75: mol_type = other DNA
tttaccttcattctgcaacgtgtggcacaggagatttcggggatacttgtgcgtgtgccgttgacattacagcgt

SEQ ID NO: 187089 - DNA, 75 bp, synthetic construct
  source 1..75: mol_type = other DNA
tgccgacccgcctggatgttgaagtgaatggctttaacggcggtgttctgaacggtgttccttctgcatatcact

SEQ ID NO: 187090 - DNA, 75 bp, synthetic construct
  source 1..75: mol_type = other DNA
accgggaattatttcaggtctggttgcaaaaattagcgcaatggcaacagaccaccacgccttatcttttcctgc

SEQ ID NO: 187091 - DNA, 75 bp, synthetic construct
  source 1..75: mol_type = other DNA
tacgaccggtgatattgcgaacgcgtttgcatactttccacgtccccgtgtactgaatacgaccagtaagttacg

SEQ ID NO: 187092 - DNA, 75 bp, synthetic construct
  source 1..75: mol_type = other DNA
ggtatgttagtttgtctgttattaaagggcagtttgcgcgagtacttgagggaaagaatccactgactaattttg

SEQ ID NO: 187093 - DNA, 75 bp, synthetic construct
  source 1..75: mol_type = other DNA
cgtacgtttcgacaggcgtttcgcggcgttaaccgcgcaaaatttcatcagcgatcttctggtgaagcatttgcg

SEQ ID NO: 187094 - DNA, 75 bp, synthetic construct
  source 1..75: mol_type = other DNA
ctctcgatccggttcgtacggctcagaaacgccttgattaccagggtatctatactcctgatcaggttgagcgcg

SEQ ID NO: 187095 - DNA, 75 bp, synthetic construct
  source 1..75: mol_type = other DNA
gtgtttctgccttggtcaacggtgccgctggcatggctacaagtgcgttaaagggggctatcagtggagtgatca

SEQ ID NO: 187096 - DNA, 75 bp, synthetic construct
  source 1..75: mol_type = other DNA
tggagaaagtaggtatgaaagtgaccgacagcacccgttctcagggaagcctggccgtgacttacaagccactgt

SEQ ID NO: 187097 - DNA, 75 bp, synthetic construct
  source 1..75: mol_type = other DNA
ttttatatctggcgtgacggcaaaccaggaataccaccaaataactggcgttctaaattcggcggcaatgcctgg

SEQ ID NO: 187098 - DNA, 75 bp, synthetic construct
  source 1..75: mol_type = other DNA
cataactacgaagaagcctcaccacaaccctgcgccatgactttacggccttttgaggctgtctggtggttacaa

SEQ ID NO: 187099 - DNA, 75 bp, synthetic construct
  source 1..75: mol_type = other DNA
agcgccgcgcccgtgtaaccaatagcgatggtacgctaaacctgccgccagattatctcatgaatatcaggctat

SEQ ID NO: 187100 - DNA, 75 bp, synthetic construct
  source 1..75: mol_type = other DNA
tttctcgcaaggctgtattgccacctgagccggtgctgaaacatatgagtgtggccagtaaaagctacgtcggca

SEQ ID NO: 187101 - DNA, 75 bp, synthetic construct
  source 1..75: mol_type = other DNA
ctagaacatagcgcatgggttgaactgaaagatacgctcaaccgaaaagggttaatcatcgtatcaatggatttg

SEQ ID NO: 187102 - DNA, 75 bp, synthetic construct
  source 1..75: mol_type = other DNA
tcatgaaggcagcaggaatcagccgagcgacttactaccgtataaaaagcgagctgtcagtcataaaatcagaat

SEQ ID NO: 187103 - DNA, 75 bp, synthetic construct
  source 1..75: mol_type = other DNA
catcaactgaggggcaacacgctgatcgagcacttaccagcctacgtgaattttcaaaatcaaaaggctggcaga

SEQ ID NO: 187104 - DNA, 75 bp, synthetic construct
  source 1..75: mol_type = other DNA
cgcctggtggcgggtctggtgatggtgttgctgattgcaacactggtacaaaaatgggggcgtgagacaccgcaa

SEQ ID NO: 187105 - DNA, 75 bp, synthetic construct
  source 1..75: mol_type = other DNA
acttgttctttgcaatcaataaattccatgcttttagtgacggaaataaaagatcaagcatcgccctttcaacat

SEQ ID NO: 187106 - DNA, 75 bp, synthetic construct
  source 1..75: mol_type = other DNA
acgaatggctccacgaaagctaccagaaatggctgaccggcttcacccggcacgccgtattctggggcgtgtgtc

SEQ ID NO: 187107 - DNA, 75 bp, synthetic construct
  source 1..75: mol_type = other DNA
gatcctgaaaaaatcgtatgaagtgatgcatggtgagctgggaaatgcggattctatccagagctggtcgaatgc

SEQ ID NO: 187108 - DNA, 75 bp, synthetic construct
  source 1..75: mol_type = other DNA
cgatggcacgccagctgcgccgttgattagctggcaggatgcacgcgtaacacgtccctacgagcacaccaatcc

SEQ ID NO: 187109 - DNA, 75 bp, synthetic construct
  source 1..75: mol_type = other DNA
gccaaacgctacgacgcgatgaataaaggcattttcaaagacctaaccaaacatactgatgtgatcctgaaaaaa

SEQ ID NO: 187110 - DNA, 75 bp, synthetic construct
  source 1..75: mol_type = other DNA
tagttaagttagatatttatgataagtttcatttttatataatcacgacatctggagatgaaattaaatgtattt

SEQ ID NO: 187111 - DNA, 75 bp, synthetic construct
  source 1..75: mol_type = other DNA
cgttgatgatgaacggcaaagcactgccgaaagatccggtggcgtactggccgattatgtcttctattccgcaaa

SEQ ID NO: 187112 - DNA, 75 bp, synthetic construct
  source 1..75: mol_type = other DNA
cgttaattcaggatgccaaagcacaggatctttcaccggaagatttgctcaacaaaaaagcgtcttgtgtgccgc

SEQ ID NO: 187113 - DNA, 75 bp, synthetic construct
  source 1..75: mol_type = other DNA
ttcgggtggcgctggatgatttcggcatgggctacgcagggctgcgtcagctgcagcatatgaaatcgttgccaa

SEQ ID NO: 187114 - DNA, 75 bp, synthetic construct
  source 1..75: mol_type = other DNA
gtacagggagaacggctggatatggaggtcggttttgataatcggcaggccgcttttgacatggtgtgtaccatg

SEQ ID NO: 187115 - DNA, 75 bp, synthetic construct
  source 1..75: mol_type = other DNA
gcgctcggttttgcacattactctaaaaagacgtgcaggtcgtgtcttggtaatcgaggtttagctaaagaggat

SEQ ID NO: 187116 - DNA, 75 bp, synthetic construct
  source 1..75: mol_type = other DNA
ttcgagatgaagctgcaaagtttcgaattgaaattgaaaaatatatcaacactcaaaatgaagccaacctaatgg

SEQ ID NO: 187117 - DNA, 75 bp, synthetic construct
  source 1..75: mol_type = other DNA
tgtcggatttgccaaacaaagccttgctgatggagatgctggaacaggtggtcgcacgtaaacaaaccaccgcac

SEQ ID NO: 187118 - DNA, 75 bp, synthetic construct
  source 1..75: mol_type = other DNA
aatgattgccgaaggcgtggagactgaagcacaacgcgactggctggcaaaagcgggcgttggtattgcccaggg

SEQ ID NO: 187119 - DNA, 75 bp, synthetic construct
  source 1..75: mol_type = other DNA
ggaagatgccgaaagccagcctctgactgacgatcgctgcagtgtggcagcactacgtttacgggacggggaaga

SEQ ID NO: 187120 - DNA, 75 bp, synthetic construct
  source 1..75: mol_type = other DNA
caactattttggtcagtggccagtggattataagagctgggcatggagcgaagatgccgcggtaatggaaaagtt

SEQ ID NO: 187121 - DNA, 75 bp, synthetic construct
  source 1..75: mol_type = other DNA
aagacctaaccaaacatactgatgtgatcctgaaaaaatcgggtaatgactccaacttattgatagtgttttatg

SEQ ID NO: 187122 - DNA, 75 bp, synthetic construct
  source 1..75: mol_type = other DNA
gccaagttgggcattattacgagaaaacccatactggaagagacgcaagaccctgctttcattgattttgccaaa

SEQ ID NO: 187123 - DNA, 75 bp, synthetic construct
  source 1..75: mol_type = other DNA
gggtcataatgtaaaagtcatcagcccccagtatgtaaaaccttttgtccgtaggcaaaaaatgacggtaacgat

SEQ ID NO: 187124 - DNA, 75 bp, synthetic construct
  source 1..75: mol_type = other DNA
gtgggagaggggccagggatagccaccaatattggcgtagcgttgtttgatgatgaaggaaacctcgtaccgatt

SEQ ID NO: 187125 - DNA, 75 bp, synthetic construct
  source 1..75: mol_type = other DNA
cgttatgtttcacctccggcagcttgctgcaagcctaggcattgacgcaacaatgcttggctgggctgatcagat

SEQ ID NO: 187126 - DNA, 75 bp, synthetic construct
  source 1..75: mol_type = other DNA
tacatttcatcgccaaatatcgtgctaccgggcgtcgggttactggcggcatcgccaatgcccaggcctggttct

SEQ ID NO: 187127 - DNA, 75 bp, synthetic construct
  source 1..75: mol_type = other DNA
ttagaggtgataccggcggaccggacctggcgtccacgggtgcagagcaaaccgaaggtggacgggccacagagc

SEQ ID NO: 187128 - DNA, 75 bp, synthetic construct
  source 1..75: mol_type = other DNA
tctggatccggtaaaagcagccgattattcgcgcaccattactcagacgcttaaacgagcagctgacctgatgga

SEQ ID NO: 187129 - DNA, 75 bp, synthetic construct
  source 1..75: mol_type = other DNA
aatgaagccattgtttccgtagcgcagaaaagcttcgggaaagaaatggcgatgattatgttctttgcgatggtt

SEQ ID NO: 187130 - DNA, 75 bp, synthetic construct
  source 1..75: mol_type = other DNA
acatgaatgtgccgaaaagtctgctgttcttgcgcgacacgccggttgctatctcttttaccatgagcataattt

SEQ ID NO: 187131 - DNA, 75 bp, synthetic construct
  source 1..75: mol_type = other DNA
aaactggcctgaaccttacattaagatcaacggtaattgctctataattggtacagtgattttctcgggaaaacc

SEQ ID NO: 187132 - DNA, 75 bp, synthetic construct
  source 1..75: mol_type = other DNA
atgctgaaccgtgaatggcaggtggtacagagcattctgtcaggagaccagccgcaggcgcttcacggcagccag

SEQ ID NO: 187133 - DNA, 75 bp, synthetic construct
  source 1..75: mol_type = other DNA
atcattctcaatggtaaaagtatccagattgaaggaaaagataaaataaatattttcggcgcagatattgatctg

SEQ ID NO: 187134 - DNA, 75 bp, synthetic construct
  source 1..75: mol_type = other DNA
cgataagaataacgatgaaaaggacgaaattatttctagtagcgtcgttactgccgatgtttgcactggccggaa

SEQ ID NO: 187135 - DNA, 75 bp, synthetic construct
  source 1..75: mol_type = other DNA
cacaacgacaaccgcgactcgcaggcgaactacgccaccatcgttacgcaaatcctcgatgccgtcagcataaca

SEQ ID NO: 187136 - DNA, 75 bp, synthetic construct
  source 1..75: mol_type = other DNA
aggccatacgccaaagaaggcatagggatcacgtcttttgagtgctcctattacacccttccgagcttcatcaaa

SEQ ID NO: 187137 - DNA, 75 bp, synthetic construct
  source 1..75: mol_type = other DNA
agttagaggtgataccggcggaccggacgtggcgtccacggctgcaaagcaaaccgaaggtggacgggccacaga

SEQ ID NO: 187138 - DNA, 75 bp, synthetic construct
  source 1..75: mol_type = other DNA
ctgggaggggaaagtaccgaagtgcagatcctggacgatgcgaccgggacaattttgtctgcgcggcgagcgtct

SEQ ID NO: 187139 - DNA, 75 bp, synthetic construct
  source 1..75: mol_type = other DNA
gtgaatatcgacaccacgataacgatcgatacggccctaaataccggtctggcacttctcggttggttttacatc

SEQ ID NO: 187140 - DNA, 75 bp, synthetic construct
  source 1..75: mol_type = other DNA
tgttagtcctgatcggcttgctactgttgacagtgcttggtctcgatcgctggatgagctggaaaactgcgcctt

SEQ ID NO: 187141 - DNA, 75 bp, synthetic construct
  source 1..75: mol_type = other DNA
tgctggaccgggtcatcgctgaagtgttggcacaatccgtcgcgcagaaaaatgtctgcgtagtggtgactggtg

SEQ ID NO: 187142 - DNA, 75 bp, synthetic construct
  source 1..75: mol_type = other DNA
tgtatttgctaatacaggtctggaatggttgttcgcttttcctgttgttgtaatcgcaacaatccaacttgtatg

SEQ ID NO: 187143 - DNA, 75 bp, synthetic construct
  source 1..75: mol_type = other DNA
tccaattgcactactgttattaccttgaactaatgacagcaacgttccatggtcgagctgataaattaatgacag

SEQ ID NO: 187144 - DNA, 75 bp, synthetic construct
  source 1..75: mol_type = other DNA
gtgatgaaggtgaataccgcgtgcctgcggcaaaaatgctggcgatggtgctgcatggcatgcagggaacgccgt

SEQ ID NO: 187145 - DNA, 75 bp, synthetic construct
  source 1..75: mol_type = other DNA
cataactatgaagaagcctcctctcaaccgggagccatgacattgcggccatttgaggctgtctggtggttgcag

SEQ ID NO: 187146 - DNA, 75 bp, synthetic construct
  source 1..75: mol_type = other DNA
ctgcatggtatgcagggaacaccgtatatctaccagggtgaagagattggtatgaccaacccacatttcacgcgc

SEQ ID NO: 187147 - DNA, 75 bp, synthetic construct
  source 1..75: mol_type = other DNA
gcctttccgatacactatcgccaacgaggttggtattgttgaaagccagaggtaaaacactccaaaaggagtacg

SEQ ID NO: 187148 - DNA, 75 bp, synthetic construct
  source 1..75: mol_type = other DNA
gatgaatcttcggtgttttacacctatcagaaattaatcgcgctgcgtaaacaagaacccattctgacatggggc

SEQ ID NO: 187149 - DNA, 75 bp, synthetic construct
  source 1..75: mol_type = other DNA
atgaactggtggcgcaggcgaaatcgcgcggtattcgcattatccttgatatggtgtttaaccatacttctaccc

SEQ ID NO: 187150 - DNA, 75 bp, synthetic construct
  source 1..75: mol_type = other DNA
aagcaaatcctgtatatattggaagtgtagtgcttaggatctttcaaagtaatgattcaatggtcattgaaatat

SEQ ID NO: 187151 - DNA, 75 bp, synthetic construct
  source 1..75: mol_type = other DNA
tttatgatgatgaatatatgcggcataaaccaattgggaaatattttcgacagtcaaaatcctgcttggtggtgg

SEQ ID NO: 187152 - DNA, 75 bp, synthetic construct
  source 1..75: mol_type = other DNA
gagcaggacgctgtaaataatcgctcaatgcgcaattatgtcgatgctgcaatcgccggggttgttggtggtttt

SEQ ID NO: 187153 - DNA, 75 bp, synthetic construct
  source 1..75: mol_type = other DNA
taaaggcactatgtcgctaataaatggaaatattcgaatatctactggaaattcagaatatatacagttttctga

SEQ ID NO: 187154 - DNA, 75 bp, synthetic construct
  source 1..75: mol_type = other DNA
tgccgatactgcagaacatcctgacgacgatttatgggcatcattatgttttgcaggtcacgatttgatgagcca

SEQ ID NO: 187155 - DNA, 75 bp, synthetic construct
  source 1..75: mol_type = other DNA
cgcatggatatatcgttcgattctggaaagcgtggcgctgacgctgaagaataattacgacaatatgtgtaatga

SEQ ID NO: 187156 - DNA, 75 bp, synthetic construct
  source 1..75: mol_type = other DNA
ctgccggttgtttgtaccaccagtgataaaccggtagaagctctgggagccggattactggatgatgaaactgcg

SEQ ID NO: 187157 - DNA, 75 bp, synthetic construct
  source 1..75: mol_type = other DNA
tggcggaaacgatggcggcaaactgcacagatgcccagcgtcgcgaagaactgctgactattgcggagatctccc

SEQ ID NO: 187158 - DNA, 75 bp, synthetic construct
  source 1..75: mol_type = other DNA
gatttcatcaacgggcagatgacagatgaagtaaaagccgcgaccagcacgcagattttcagcatcaaccagaca

SEQ ID NO: 187159 - DNA, 75 bp, synthetic construct
  source 1..75: mol_type = other DNA
aaccttgtgtttggtgggttaattggttggcttgctgtagatccatttaatggtgggatgtataccttgaagcca

SEQ ID NO: 187160 - DNA, 75 bp, synthetic construct
  source 1..75: mol_type = other DNA
gctggttatacggtaacaggggcgggaacttatagtggcggtgcagtggttcttccgtcgccgcttgctgctggc

SEQ ID NO: 187161 - DNA, 75 bp, synthetic construct
  source 1..75: mol_type = other DNA
atgaacatcattctgcaatacgaatccaacgccagttcgctatcgttggggcgcttcgaccagtatatgttgccg

SEQ ID NO: 187162 - DNA, 75 bp, synthetic construct
  source 1..75: mol_type = other DNA
gacgttctggcaggcgtgccagttgttctggtacatgaacatcattctgcaatacgaatccaacgccagttcgct

SEQ ID NO: 187163 - DNA, 75 bp, synthetic construct
  source 1..75: mol_type = other DNA
tttcgtgtcgccattcccggtggtgaaaaaaataaagttcgccagatgattttcactggtttcaataaatgctgc

SEQ ID NO: 187164 - DNA, 75 bp, synthetic construct
  source 1..75: mol_type = other DNA
gaagtggtcgatcttagtcaggtaagccagcaaatgctggcaaaaatcagtgccggacaggcgatacgtatttaa

SEQ ID NO: 187165 - DNA, 75 bp, synthetic construct
  source 1..75: mol_type = other DNA
gtaacgacggcgcggcgggaatgttggcgatgcgtcaggcgggggcatggaccctcgcgcaaaacgaagcaagca

SEQ ID NO: 187166 - DNA, 75 bp, synthetic construct
  source 1..75: mol_type = other DNA
gaccgacttaacaagctgtgtcagatcggcgttaaagaggctgaagacggtgaacgcgtcttaccgggacatgcc

SEQ ID NO: 187167 - DNA, 75 bp, synthetic construct
  source 1..75: mol_type = other DNA
ccgcgaattgccgcgccaacaggcacaggaagcgggctacggccttgccgcgctgattgacggattatggctgcg

SEQ ID NO: 187168 - DNA, 75 bp, synthetic construct
  source 1..75: mol_type = other DNA
cgcaagatgacgctggctcgcttcctcgattccgttaattttaaagatggcaacccaacagcagatccaaaccag

SEQ ID NO: 187169 - DNA, 75 bp, synthetic construct
  source 1..75: mol_type = other DNA
ttgcgctggcaggagacgcgcgcaagtttaaagcaacaatcaaggtcgctgaccagggtgaagaagggattgcgg

SEQ ID NO: 187170 - DNA, 75 bp, synthetic construct
  source 1..75: mol_type = other DNA
aatatggcgattagctatgagcaagatgatcttttatgcggattaacggcaataggagcattttttattgtttat

SEQ ID NO: 187171 - DNA, 75 bp, synthetic construct
  source 1..75: mol_type = other DNA
ggaaccgggggaaactggctggcgttactggttggttttttatgtttaggtgtggcgacaatgatctatttacct

SEQ ID NO: 187172 - DNA, 75 bp, synthetic construct
  source 1..75: mol_type = other DNA
gtggaatggaacgttttcttgttccagttgctgtcaagttaaactcacaaaaacatgttgcagcggtgagagatg

SEQ ID NO: 187173 - DNA, 75 bp, synthetic construct
  source 1..75: mol_type = other DNA
tatattgcgccgggcgatcggcatatggagctggcgcgtagtggcgcaaattaccaaatcaaaattcacgatggc

SEQ ID NO: 187174 - DNA, 75 bp, synthetic construct
  source 1..75: mol_type = other DNA
gcgattgattttgtcactaaaccgcaactgggtattcgagaagggatgctggcgtacagcgaaatgatcgctgaa

SEQ ID NO: 187175 - DNA, 75 bp, synthetic construct
  source 1..75: mol_type = other DNA
gaccccggatgaagaaaagtatgctcagctgcgtctggaaaaacagcgacagcaacaggccagaattcagaatga

SEQ ID NO: 187176 - DNA, 75 bp, synthetic construct
  source 1..75: mol_type = other DNA
ttgcacgcgcttcctgatggcagcgccgagcagcggctacaggcgatcgtcgccggaaattttgatgaaacccag

SEQ ID NO: 187177 - DNA, 75 bp, synthetic construct
  source 1..75: mol_type = other DNA
atgcaaaaaaaactaaaacagacgtctgtgcctgattttatttattattcaatagaaaaacacaacaaatatccc

SEQ ID NO: 187178 - DNA, 75 bp, synthetic construct
  source 1..75: mol_type = other DNA
aaacggcttggagccggcatcgtgacggcatgtcctgccagtatattccctgcccgacggatagctgtcgtggca

SEQ ID NO: 187179 - DNA, 75 bp, synthetic construct
  source 1..75: mol_type = other DNA
gcgccagatgtttcctaagcacggccttaataataactggcgtaccgcatcgacgttggtgtccgactatcgctt

SEQ ID NO: 187180 - DNA, 75 bp, synthetic construct
  source 1..75: mol_type = other DNA
gagaacagatatacggtcttcgattgaatcctcgtaagggtctcaatgcatttaccaccagcttgctgcaacctg

SEQ ID NO: 187181 - DNA, 75 bp, synthetic construct
  source 1..75: mol_type = other DNA
tatgcccagggcgagggtatgaagcactacgttgagaaagtgcagcagccggaatttgccgccgcgaaagatggc

SEQ ID NO: 187182 - DNA, 75 bp, synthetic construct
  source 1..75: mol_type = other DNA
tacctgacaaaaacaatcacactaaaatacacatccatatcattctggaaaaaacctcttttctggtcttatggt

SEQ ID NO: 187183 - DNA, 75 bp, synthetic construct
  source 1..75: mol_type = other DNA
ggagaattgcagcgcagcggctttatgaccagccacagcttcctgtcggcgatcaacacccgcctattacggccg

SEQ ID NO: 187184 - DNA, 75 bp, synthetic construct
  source 1..75: mol_type = other DNA
ggctggcgttctgggccagcagtatgcatcagccgatgctctatcgcttgcagcaggtcagtagccgccgcttat

SEQ ID NO: 187185 - DNA, 75 bp, synthetic construct
  source 1..75: mol_type = other DNA
caggaagcgggctacggcctggccgcgctgattgatggattatggctgcgcgcggctcggagcggcaaacccgct

SEQ ID NO: 187186 - DNA, 75 bp, synthetic construct
  source 1..75: mol_type = other DNA
ggcctaactagttttggcatagcgaaagttatgatcgatcgtggattgctactgcgtcaccagcaaaatggtgtt

SEQ ID NO: 187187 - DNA, 75 bp, synthetic construct
  source 1..75: mol_type = other DNA
tctacccgcgcgtcagtgccctgcgccgccacaacaatgacaccttcgccatgattgaaattccggaggcgatcc

SEQ ID NO: 187188 - DNA, 75 bp, synthetic construct
  source 1..75: mol_type = other DNA
taagcgtatgaaaatagaactgcctgacattctattcactagcaccgaaatgctgaataaacagatgggcaaccc

SEQ ID NO: 187189 - DNA, 75 bp, synthetic construct
  source 1..75: mol_type = other DNA
tgccgctgtcggatcaggcgattacgatactgaaacagatcgaggccctctccgggcatctggtgtttatttttc

SEQ ID NO: 187190 - DNA, 75 bp, synthetic construct
  source 1..75: mol_type = other DNA
tatccggccctgtcgctggacaagctgcctgagcttttaacccgcacggatagctactgtggcaggttgctgacg

SEQ ID NO: 187191 - DNA, 75 bp, synthetic construct
  source 1..75: mol_type = other DNA
tgcgctgggtaactggattgacaacaaagatcctctgtctggtgcaatttcaaatggtatcggttctgctgccgg

SEQ ID NO: 187192 - DNA, 75 bp, synthetic construct
  source 1..75: mol_type = other DNA
tattcgacatgaaggcgtctatattatctgtagtttgtgtgtattttattttttctgcttagaggtggaagttgg

SEQ ID NO: 187193 - DNA, 75 bp, synthetic construct
  source 1..75: mol_type = other DNA
gcagtggtgggcgaattatctggatgcgaatctcggcgggtatatttccccttatcagtacgctgcccccctgaa

SEQ ID NO: 187194 - DNA, 75 bp, synthetic construct
  source 1..75: mol_type = other DNA
ccggtgagtacgaccaggataagtgcatgagcggcaacaccgtgaataaagcgctgcgggtgatgggctatgaca

SEQ ID NO: 187195 - DNA, 75 bp, synthetic construct
  source 1..75: mol_type = other DNA
atggcaatcagatagagccgtgcgcggcgttgtcaaaatctctcgaatatggaaatccaacgttcaagagtaaag

SEQ ID NO: 187196 - DNA, 75 bp, synthetic construct
  source 1..75: mol_type = other DNA
atggcaatcagatagaaccgtgtgcggcattggcaaaagcactcgaatatggaaatccaacatttaagagcaaag

SEQ ID NO: 187197 - DNA, 75 bp, synthetic construct
  source 1..75: mol_type = other DNA
gacattgctcaaattcactccggccaatatgtcggtcgtggtgttgccatgtgtttttgcccgttctgtggtgaa

SEQ ID NO: 187198 - DNA, 75 bp, synthetic construct
  source 1..75: mol_type = other DNA
gctattccgcttgccgatattcttcgtgatgatcgtccagtaggcgagtgcctggttgaggtattaaaagaagcg

SEQ ID NO: 187199 - DNA, 75 bp, synthetic construct
  source 1..75: mol_type = other DNA
taacggctatgtaatgggcagttcagaaaagggagcttatttcagagttcatgccagtaaatcggaaacagatca

SEQ ID NO: 187200 - DNA, 75 bp, synthetic construct
  source 1..75: mol_type = other DNA
gatattgctcaaattcactctgggaaatatatcggtcgtggcgttgcaatgtgcttttgcccgttctgtggtgaa

SEQ ID NO: 187201 - DNA, 75 bp, synthetic construct
  source 1..75: mol_type = other DNA
gtgaatggctttaacggcggtgttctgaacggtgttccttctgcatatcactggtatacggaacagtatggcgtg

SEQ ID NO: 187202 - DNA, 75 bp, synthetic construct
  source 1..75: mol_type = other DNA
gacgttattgcagaattaagccgccgtttcagctgcacgctggagcactggtatgccgaacagggctgtgatttc

SEQ ID NO: 187203 - DNA, 75 bp, synthetic construct
  source 1..75: mol_type = other DNA
agtttaaatatcttcagcttttagctggggaacatcctgaatacgttctgcgcaaaagggataaacctaaatgta

SEQ ID NO: 187204 - DNA, 75 bp, synthetic construct
  source 1..75: mol_type = other DNA
gtcggggatcgttgcactgctgttttcggtgatttatttactggcaggggaacacatcattgcgttgttgacgtc

SEQ ID NO: 187205 - DNA, 75 bp, synthetic construct
  source 1..75: mol_type = other DNA
ttatttttaatataaattatttccacacaaacctggtcaaaaatgcacaaatcattaaccaaccaggtggcgcat

SEQ ID NO: 187206 - DNA, 75 bp, synthetic construct
  source 1..75: mol_type = other DNA
gcgcggttattgaaggtgaccagcaaaccgtgaacgatgccgcacgcattcgcgctaccggcacaccagcgattc

SEQ ID NO: 187207 - DNA, 75 bp, synthetic construct
  source 1..75: mol_type = other DNA
gagaagtgcatcgcctgcgcccgcgaagtcaatccagaaattgaaatcatccttatttccgccaccagcggcgaa

SEQ ID NO: 187208 - DNA, 75 bp, synthetic construct
  source 1..75: mol_type = other DNA
atgtctggcgggcagcgtgccgccagtcggggatcgtagcgttactgttttcggtggtttatttgctggcagggg

SEQ ID NO: 187209 - DNA, 75 bp, synthetic construct
  source 1..75: mol_type = other DNA
gaccgctatcttatctggcaggtgattttgccgttggttggcgtctggtgttatctgctggacggcatgtttata

SEQ ID NO: 187210 - DNA, 75 bp, synthetic construct
  source 1..75: mol_type = other DNA
tgcgtaaaatcctcaaactacgcggaatttccggcgaaatgctgaaaactgcctggcgaggaaacttccgtcgct

SEQ ID NO: 187211 - DNA, 75 bp, synthetic construct
  source 1..75: mol_type = other DNA
gtcaggtgtcgtggcactgttgttttctgtagtttatctgctggcaggggaacacattatcgcgttgctgacctc

SEQ ID NO: 187212 - DNA, 75 bp, synthetic construct
  source 1..75: mol_type = other DNA
tactggcgcttaaccgcgacatcatgcttcgctcattgctgttgcaactctgctttggcgcaataacggttattg

SEQ ID NO: 187213 - DNA, 75 bp, synthetic construct
  source 1..75: mol_type = other DNA
ggtttatttgggcggcgtggcggttggtgcaacggcgaccagctttctctttatgctgttgctgtttttgcgcat

SEQ ID NO: 187214 - DNA, 75 bp, synthetic construct
  source 1..75: mol_type = other DNA
caaaaatgctggcgatggtgctgcatggcatgcagggaacgccgtatatctaccagggcgaagagattggcatga

SEQ ID NO: 187215 - DNA, 75 bp, synthetic construct
  source 1..75: mol_type = other DNA
ggattcgtatcattctcgatatggtgtttaaccatacctctacccaacatgcctggtttcgcgaggcgctgaaca

SEQ ID NO: 187216 - DNA, 75 bp, synthetic construct
  source 1..75: mol_type = other DNA
taggttttaaagacgtcctcatccgtcctaaacgttctactcttaaaagtcgttccgatgttgaactggaacgtc

SEQ ID NO: 187217 - DNA, 75 bp, synthetic construct
  source 1..75: mol_type = other DNA
gcctggcaaaggttgcgggtgtttcgcttgttttattactcgctgcctgtagttctgactcacgctataagcgtc

SEQ ID NO: 187218 - DNA, 75 bp, synthetic construct
  source 1..75: mol_type = other DNA
tgctggcttacacttttggtcctcgcactgatgaaacatgccgtgagttgccggaattcctgaagccattctccg

SEQ ID NO: 187219 - DNA, 75 bp, synthetic construct
  source 1..75: mol_type = other DNA
ccctggcagccagggcaaatgcgcggcaactggcagcttgtgatgcataactacgaagaagcctcaccacaaccc

SEQ ID NO: 187220 - DNA, 75 bp, synthetic construct
  source 1..75: mol_type = other DNA
atgcacgtcacactggttgaaattaacgttcatgaagacaaagttgacgagtttatcgaggtctttcgccagaac

SEQ ID NO: 187221 - DNA, 75 bp, synthetic construct
  source 1..75: mol_type = other DNA
gaaagccattaaaaacttgatagataaaggagaggaggttgaacaaaacacagagcgacttgatgcaataacaaa

SEQ ID NO: 187222 - DNA, 75 bp, synthetic construct
  source 1..75: mol_type = other DNA
ccgaagcaatataccagccgcccggagaacgccacgaatacaggatgaatgacggtagcgcggcggttgagttcc

SEQ ID NO: 187223 - DNA, 75 bp, synthetic construct
  source 1..75: mol_type = other DNA
atacgttggggcttcacgcctgaaagagctgaccaagcgcaccacgtttattcgtgtgcaggaacaagaaaaccg

SEQ ID NO: 187224 - DNA, 75 bp, synthetic construct
  source 1..75: mol_type = other DNA
attccgaacacttcgtgcagttcgttgcgaaagcgcgtgaagcgtggccgaccaaaaccatttgtgctggcaacg

SEQ ID NO: 187225 - DNA, 75 bp, synthetic construct
  source 1..75: mol_type = other DNA
gcaatttgcgcttcgatgtcttacaggacccggaagtgaattcgcgcttttatatctacgaagcctataaagatg

SEQ ID NO: 187226 - DNA, 75 bp, synthetic construct
  source 1..75: mol_type = other DNA
ggtgactataaactgcaggttggcgatttagataaccgcagcagcctacagttcatcgatccgaaaggtcatact

SEQ ID NO: 187227 - DNA, 75 bp, synthetic construct
  source 1..75: mol_type = other DNA
aaagtggtatcagaagaagctaaacggttaaccagcagtcagcaactcagcacaccagaggtgaaagcaaacgta

SEQ ID NO: 187228 - DNA, 75 bp, synthetic construct
  source 1..75: mol_type = other DNA
tggcaaccccagccgtttaccggggaacaaaatgtaaacgcggttgaacgtgcttttgatattgtgatacaaccc

SEQ ID NO: 187229 - DNA, 75 bp, synthetic construct
  source 1..75: mol_type = other DNA
tgaaagattttactgcacgctactgcgatgcgtggcatgaagagcataaaagctggccgttgagtgaggaactgt

SEQ ID NO: 187230 - DNA, 75 bp, synthetic construct
  source 1..75: mol_type = other DNA
gtaatcaaattatcgataatagtgggttgcagctttgtgaagataaagcgatataccgaacaaactcaacaccaa

SEQ ID NO: 187231 - DNA, 75 bp, synthetic construct
  source 1..75: mol_type = other DNA
cgccaataatgatgactcgataatcaaaaaagttctctatatcgggctggatgatgatgagaatggtattccaga

SEQ ID NO: 187232 - DNA, 75 bp, synthetic construct
  source 1..75: mol_type = other DNA
aatctcatcgtcttcggatcaactcgatttgacggaaatgattgaagagcaagttgaacagccaagtttcctttc

SEQ ID NO: 187233 - DNA, 75 bp, synthetic construct
  source 1..75: mol_type = other DNA
aatgcgatggcggtcattcttgatgagtttccccatatggcgggaacggcatcttcgctggcaggaaccttccgt

SEQ ID NO: 187234 - DNA, 75 bp, synthetic construct
  source 1..75: mol_type = other DNA
ctcttgcgacctttaactctgcatggccgatgatttggtcaattgcattctgcgcaaccagctccattctcttct

SEQ ID NO: 187235 - DNA, 75 bp, synthetic construct
  source 1..75: mol_type = other DNA
gtcgtcgcttgcaggaacttttcgttttggcattggcgcaattgttggcgcgctgctttcgctggcgacctttaa

SEQ ID NO: 187236 - DNA, 75 bp, synthetic construct
  source 1..75: mol_type = other DNA
cgatcagctgattgtgatgcgtttcttccacgggctggctgcggctgcggccagcgtggtcattaacgccctgat

SEQ ID NO: 187237 - DNA, 75 bp, synthetic construct
  source 1..75: mol_type = other DNA
ggtgctggtgtggctgagctggcattacatcttctggatcctcgccgtggcggcgattctggcttcggcaatgat

SEQ ID NO: 187238 - DNA, 75 bp, synthetic construct
  source 1..75: mol_type = other DNA
ttgttttcctgtttgtgatgaccatcttcaacagtcgttttgttcgccggattggcgcactaaatatgttccgct

SEQ ID NO: 187239 - DNA, 75 bp, synthetic construct
  source 1..75: mol_type = other DNA
acctgtaaagtggcacagacaagtcaccataaacgcccgtcagcaatggatacgctgcgctatctggctaaaaat

SEQ ID NO: 187240 - DNA, 75 bp, synthetic construct
  source 1..75: mol_type = other DNA
gatatgcaccgtaaagatctgcaagatgatgcagagtggatggcaaaacaggtatatctcaacgtcggtaatttc

SEQ ID NO: 187241 - DNA, 75 bp, synthetic construct
  source 1..75: mol_type = other DNA
tgccagtaaaaaacttaccccggaacaggccgagcagatcaaaactctcctgcaatacagcccatccagcaccaa

SEQ ID NO: 187242 - DNA, 75 bp, synthetic construct
  source 1..75: mol_type = other DNA
tcattcgcgcttccagtgcgattcctggattttatcgcacaggggtatcactggacggcgttaactatcttgatg

SEQ ID NO: 187243 - DNA, 75 bp, synthetic construct
  source 1..75: mol_type = other DNA
tgaaaccagttatcgcgccatccaacaatttattgagaaaccgcccggcaagttacgcattttcgaaatttatcc

SEQ ID NO: 187244 - DNA, 75 bp, synthetic construct
  source 1..75: mol_type = other DNA
tttattggcaagtttatagccaacatccttatgacgcgttttaatcgtaagcgtgcagtgagaaccgtattgacg

SEQ ID NO: 187245 - DNA, 75 bp, synthetic construct
  source 1..75: mol_type = other DNA
ctggaagacaaccagaacgccatcggcgacttcaatatgatagatgatacccacggactggtgatcgagcgtgat

SEQ ID NO: 187246 - DNA, 75 bp, synthetic construct
  source 1..75: mol_type = other DNA
gcagggccactcaggtatcaaacacatgcccgacggtacctactgggtgctgactgacaacggcttcggcagcaa

SEQ ID NO: 187247 - DNA, 75 bp, synthetic construct
  source 1..75: mol_type = other DNA
tatggaacgctttcagttgttcttagaagctgctttgttcgcagtagctgaatggcagatacaggttgaggtaga

SEQ ID NO: 187248 - DNA, 75 bp, synthetic construct
  source 1..75: mol_type = other DNA
tgccgcaaagcattttgtttttacagcactatttacaaaatgctgattctttttcactgcctggcgagcgcgtac

SEQ ID NO: 187249 - DNA, 75 bp, synthetic construct
  source 1..75: mol_type = other DNA
gcgggataccagcgcgtgttgatggtcgattttgatggctttctacctgagttttatcaccctgcctacctggcc

SEQ ID NO: 187250 - DNA, 75 bp, synthetic construct
  source 1..75: mol_type = other DNA
taaatcgccggacaacccgacgctgactctacctagcgctccggacggtaagctgaacttccaggtggcgcgttc

SEQ ID NO: 187251 - DNA, 75 bp, synthetic construct
  source 1..75: mol_type = other DNA
ggttaaagaggcggcaaggcagggcgctaaaacgttggtcgtcatccgcactgtgccgtcacaaatgtactacac

SEQ ID NO: 187252 - DNA, 75 bp, synthetic construct
  source 1..75: mol_type = other DNA
tatatctacgaagcttataaagatgaagacgcagtggcgttccataaaaccacgccccactacaaaacctgtgtc

SEQ ID NO: 187253 - DNA, 75 bp, synthetic construct
  source 1..75: mol_type = other DNA
tccaaccagcggtgcggcggcgctctcttacgccactgtctatccgttagtgatgttcctgcgcattatcacccc

SEQ ID NO: 187254 - DNA, 75 bp, synthetic construct
  source 1..75: mol_type = other DNA
acaggttcagatgctgccagtgtttattggcatcgggcttggcgtattgttaggttctattcccgtctttgtgcc

SEQ ID NO: 187255 - DNA, 75 bp, synthetic construct
  source 1..75: mol_type = other DNA
cggattattaaaagaaccgtgcacaacgccatgaaagccgccgtagaacgccataaaaggaggtttaactgcaaa

SEQ ID NO: 187256 - DNA, 75 bp, synthetic construct
  source 1..75: mol_type = other DNA
tgagcatccattttcaattttctggcgttggcattacttgggggatggtttcctaacagcaaattatcccgattt

SEQ ID NO: 187257 - DNA, 75 bp, synthetic construct
  source 1..75: mol_type = other DNA
acgtccatgaagataaagtttctgaatttatcgaagtatttcgtctcaatcatctggggtctgtaggtgaagagg

SEQ ID NO: 187258 - DNA, 75 bp, synthetic construct
  source 1..75: mol_type = other DNA
aagtgaatcttggggcaggtgaagcgggctcagtgaccataccgcgtgggcagctgaaaaacctgaaggcgagct

SEQ ID NO: 187259 - DNA, 75 bp, synthetic construct
  source 1..75: mol_type = other DNA
gggaacgccagaatcgccacgctggctactgcgccaggggcgttttgcagaagctcacgctatcgtgcatcgcta

SEQ ID NO: 187260 - DNA, 75 bp, synthetic construct
  source 1..75: mol_type = other DNA
tgaacgaggacaactaagtcttgggtcacaactttcaacgttatcagataatattgttctttattataaagaaca

SEQ ID NO: 187261 - DNA, 75 bp, synthetic construct
  source 1..75: mol_type = other DNA
cagtatcggcaagctgtactggtttatgccaccaagcgctaacctggcgctacgcgagttaggcattgtgctctt

SEQ ID NO: 187262 - DNA, 75 bp, synthetic construct
  source 1..75: mol_type = other DNA
gcataatgcacaattggtgattgggcaggaagtggatacttcgctatcaacgaaaggcaccgatttgcgcgttga

SEQ ID NO: 187263 - DNA, 75 bp, synthetic construct
  source 1..75: mol_type = other DNA
ctctcttatgccaccgtctatccgctcgtgatgttcctgcgaattatcacgccacaattgctggctgtgcttttc

SEQ ID NO: 187264 - DNA, 75 bp, synthetic construct
  source 1..75: mol_type = other DNA
gtaatgccgccgtgcgcacgcgtcttacccactctatggaagtgcagcaggtagggcgctatatcgccaaagaga

SEQ ID NO: 187265 - DNA, 75 bp, synthetic construct
  source 1..75: mol_type = other DNA
aagacccaggtttttccgctcgagcgcaatgctgctgtgcgcacgcgtcttactcactctatggaagtacagcag

SEQ ID NO: 187266 - DNA, 75 bp, synthetic construct
  source 1..75: mol_type = other DNA
cctattgtgtggcagatcttgaagatgcggtagagaaaagaatatttaccgttgagcagctttatcatcatttgc

SEQ ID NO: 187267 - DNA, 75 bp, synthetic construct
  source 1..75: mol_type = other DNA
attcccgcgctaccacttcccaacgctgcgtgcgtgcgggtggtaaacacaacgacctggaaaacgtcggttaca

SEQ ID NO: 187268 - DNA, 75 bp, synthetic construct
  source 1..75: mol_type = other DNA
ttgcaaggctaccgggtaattagtggtttattagagatatatcgacctttgttaagtatgtcgttatcagatttt

SEQ ID NO: 187269 - DNA, 75 bp, synthetic construct
  source 1..75: mol_type = other DNA
tatttgccggaacctttaatcatgcactgctggaggatgccagcgaatgtagcgatctcctgaagttatacaaaa

SEQ ID NO: 187270 - DNA, 75 bp, synthetic construct
  source 1..75: mol_type = other DNA
ctttgtctggcgctttatgcagtgcctgacagacagcattgcaatattcaccgttaccgctgccactgagcacga

SEQ ID NO: 187271 - DNA, 75 bp, synthetic construct
  source 1..75: mol_type = other DNA
ccctgtacatcgatactgcggataagttcgcacaggtgagcatcaaccatgctgattacatgcgccatatcgtga

SEQ ID NO: 187272 - DNA, 75 bp, synthetic construct
  source 1..75: mol_type = other DNA
gagttagaggcgatacacgacgcgccagcgtctttttttgtatcggcgcacacgcacacctcaacaatggtgggc

SEQ ID NO: 187273 - DNA, 75 bp, synthetic construct
  source 1..75: mol_type = other DNA
tattgcccggttgcgtaaagaacttaatttggcgctttacagtcgttttccattaacgtggattatggaagctgc

SEQ ID NO: 187274 - DNA, 75 bp, synthetic construct
  source 1..75: mol_type = other DNA
ctcacctgggcacaggttggcggtattttaaaatatacccgtccggcgtggtggcgtggcgaaacgcctgagaca

SEQ ID NO: 187275 - DNA, 75 bp, synthetic construct
  source 1..75: mol_type = other DNA
acaaggcgacacaggcgcgcccagcgtctttttttgtgtcattccatcgcgcaaccatacccagcggcaaggccc

SEQ ID NO: 187276 - DNA, 75 bp, synthetic construct
  source 1..75: mol_type = other DNA
gcgctgctggatgaagagctggcgaaactttctggcgatacgctggatggcgaaaccgctttccgtttgtacgac

SEQ ID NO: 187277 - DNA, 75 bp, synthetic construct
  source 1..75: mol_type = other DNA
ttgaacctttgccgcgtgaaattacgcgaccagcagcgtctcgataaattgggttatctggaagaatacccgcag

SEQ ID NO: 187278 - DNA, 75 bp, synthetic construct
  source 1..75: mol_type = other DNA
ggcctatttgactcagtttgatattccttgtgcaccggttttaagtatgaaagaaatttcacttgatccctcttt

SEQ ID NO: 187279 - DNA, 75 bp, synthetic construct
  source 1..75: mol_type = other DNA
cgctggataatccgccgatttccgttaaacagtcgtacgcaaaaggttcatctgtcgccctggtcagttcggtcg

SEQ ID NO: 187280 - DNA, 75 bp, synthetic construct
  source 1..75: mol_type = other DNA
atgaatatccaatatttacagtatgttcgcgagcaactcatggtggctaccgctgatttgagcggagtaacgaaa

SEQ ID NO: 187281 - DNA, 75 bp, synthetic construct
  source 1..75: mol_type = other DNA
gttatctggaagaatacccgcagtatccgaatggtacatttggtgatgcagttccccgcggtggtaatgcaggtg

SEQ ID NO: 187282 - DNA, 75 bp, synthetic construct
  source 1..75: mol_type = other DNA
cttgtgcaccggttttaagtatgaaagaaatttcacttgatccctctttgcgccaaagtggcagtgttgtcgaag

SEQ ID NO: 187283 - DNA, 75 bp, synthetic construct
  source 1..75: mol_type = other DNA
gcggatccctgaaaatatggatttagccaaaactgcgccgattctctgtgccggaattaccacattctcaccatt

SEQ ID NO: 187284 - DNA, 75 bp, synthetic construct
  source 1..75: mol_type = other DNA
gccaaaactgcgccgattctctgtgccggaattaccacgttctcaccattacgtacctggaatgttggtcctggc

SEQ ID NO: 187285 - DNA, 75 bp, synthetic construct
  source 1..75: mol_type = other DNA
catcaaagtcgatgaagccggttttgaagcagcaatggaagagcagcgccgtcgcgcacgtgaagccagtggttt

SEQ ID NO: 187286 - DNA, 75 bp, synthetic construct
  source 1..75: mol_type = other DNA
ctgatgccgatgtggattttaggcgtggtttgtctggcgctgttcggctggctgagcgcggttagttcgttgctg

SEQ ID NO: 187287 - DNA, 75 bp, synthetic construct
  source 1..75: mol_type = other DNA
ccagggttattgatgctgctttccacgctgggatcgttcctcgccattggtttgtttggcctgatgccgatgtgg

SEQ ID NO: 187288 - DNA, 75 bp, synthetic construct
  source 1..75: mol_type = other DNA
tcagcatgaggttgcgcactctgctacctgaatgctggctacagcgcgttttctccggagtattgctgatgatag

SEQ ID NO: 187289 - DNA, 75 bp, synthetic construct
  source 1..75: mol_type = other DNA
cgttataggttcgacgacgtatcaggagttcagcaacattttcgagaaagatcgtgctctggcgcgtcgcttcca

SEQ ID NO: 187290 - DNA, 75 bp, synthetic construct
  source 1..75: mol_type = other DNA
gagttcagcaacattttcgagaaagaccgtgctttggcgcgtcgcttccagaaaattgatattactgaaccgtcg

SEQ ID NO: 187291 - DNA, 75 bp, synthetic construct
  source 1..75: mol_type = other DNA
ttgatgagatccacaccattatcggtgcgggggcagcgtctggtggccaggtcgatgcggctaacctgatcaaac

SEQ ID NO: 187292 - DNA, 75 bp, synthetic construct
  source 1..75: mol_type = other DNA
tccacttattttctaagcctcaagaatttactctggcaatctcggaggcggatgagctttattggtggataaaaa

SEQ ID NO: 187293 - DNA, 75 bp, synthetic construct
  source 1..75: mol_type = other DNA
ttgattcgtttcctcagattatcagaaatgcggtttatgaagtggaacagcacacgcaggctcctcaggctttga

SEQ ID NO: 187294 - DNA, 75 bp, synthetic construct
  source 1..75: mol_type = other DNA
gggcttgcatggcgaattgttcagggcgatgtgccggaagtgatggctgactgtacgatttactctctcgatatc

SEQ ID NO: 187295 - DNA, 75 bp, synthetic construct
  source 1..75: mol_type = other DNA
acatcgacctgatagaagccgtgggaaatcaccccgacattatcgctggtagcaacaacggtgatggatacgact

SEQ ID NO: 187296 - DNA, 75 bp, synthetic construct
  source 1..75: mol_type = other DNA
agccgctgacattcgattgccacgccatgtacctgccagaggttcgtggattcagcaaggaaatcgggctggcgt

SEQ ID NO: 187297 - DNA, 75 bp, synthetic construct
  source 1..75: mol_type = other DNA
gcgggtgaacaggccggattcaacattaccccggtgattgcagaagcgtgcgagcttgtcgacaaacgtgctacc

SEQ ID NO: 187298 - DNA, 75 bp, synthetic construct
  source 1..75: mol_type = other DNA
gacgatctgctggcaaccggcggcactatcgaagcgaccgttaaactgatccgtcgtctgggtggtgaagtggct

SEQ ID NO: 187299 - DNA, 75 bp, synthetic construct
  source 1..75: mol_type = other DNA
acaagcctgaatgccgttactttgaggtgaacgtgcacggtcagtttggcggcattgtttactatcaggagattc

SEQ ID NO: 187300 - DNA, 75 bp, synthetic construct
  source 1..75: mol_type = other DNA
aaatcaccctgacattatcgccgggagcaacaacggtgatggatacgactacaagcctgaatgccgttactttga

SEQ ID NO: 187301 - DNA, 75 bp, synthetic construct
  source 1..75: mol_type = other DNA
ctggcactatttttaacggttacacgctgaacgaactgcctttcatcaacaaaatgtgggatggcgcaacatttt

SEQ ID NO: 187302 - DNA, 75 bp, synthetic construct
  source 1..75: mol_type = other DNA
tgcagatttgatggcctgcagggaccaccatcactttatctgataacagaggctgaatctggagagcgaaaaagc

SEQ ID NO: 187303 - DNA, 75 bp, synthetic construct
  source 1..75: mol_type = other DNA
cgtatgtgtctgcatttttctcctgaagctcaaaggcgctggattgagttttataatcatactgaatcgcaaatg

SEQ ID NO: 187304 - DNA, 75 bp, synthetic construct
  source 1..75: mol_type = other DNA
cttactcaacacaagggagccgacaaatcactaaccctgtttgttctactgaacatttacctgtgtttcatcaac

SEQ ID NO: 187305 - DNA, 75 bp, synthetic construct
  source 1..75: mol_type = other DNA
aggcgctgggcgcaaaaccgcagattaatgccgaagaggaaattcgccgcagcatcgattttctgaaaagctatc

SEQ ID NO: 187306 - DNA, 75 bp, synthetic construct
  source 1..75: mol_type = other DNA
tcgcccttctctgccagatgaagtggcactcggcgtgacctatgacaatatcgacgactatctggaagggaaaaa

SEQ ID NO: 187307 - DNA, 75 bp, synthetic construct
  source 1..75: mol_type = other DNA
gtggcaatgaaaaagcgcgtgagcggatgaaagcacaatatagcattgcgggtatgaccagcggtgtcgtggtgg

SEQ ID NO: 187308 - DNA, 75 bp, synthetic construct
  source 1..75: mol_type = other DNA
gctgccttacttcattacttcagcggtgatggaggcgatatatctgttaccgcagtaaaagcagcagtggagata

SEQ ID NO: 187309 - DNA, 75 bp, synthetic construct
  source 1..75: mol_type = other DNA
acatccgtttgttctccaaaaaagaaaagttttctttagatgttgcggaaacagatgagctttactgctggataa

SEQ ID NO: 187310 - DNA, 75 bp, synthetic construct
  source 1..75: mol_type = other DNA
gaaaatgagcgtcagtgtctgcgtttctctcccgaagcagaaaaacactggctcgaattttataacaaagtcgag

SEQ ID NO: 187311 - DNA, 75 bp, synthetic construct
  source 1..75: mol_type = other DNA
tgggatggctccagtttttccatcatgagaaagtcagagccagaaaaattaattacagatgccgggatgacaatc

SEQ ID NO: 187312 - DNA, 75 bp, synthetic construct
  source 1..75: mol_type = other DNA
caacttcatctgcgataaaagacgtactttgcagtacttggcgctcagttggccttatgtcagatgaggcaggaa

SEQ ID NO: 187313 - DNA, 75 bp, synthetic construct
  source 1..75: mol_type = other DNA
atgaacgatgtttatccggtggattcttttccgccctttattagaaacacaatatatgaagtacaacagcgcaca

SEQ ID NO: 187314 - DNA, 75 bp, synthetic construct
  source 1..75: mol_type = other DNA
cgctgatttgagcggagtaacgaaaggccagcttgaagcctggctggagcatgctcaatttgatactggtacata

SEQ ID NO: 187315 - DNA, 75 bp, synthetic construct
  source 1..75: mol_type = other DNA
gatggagcgcctgaagaagcttgtctggctcgcggctcaggacgtgaaagcagagctggcagggcgtgagacgta

SEQ ID NO: 187316 - DNA, 75 bp, synthetic construct
  source 1..75: mol_type = other DNA
acgggaacgcctgaaaaaattaatctggctggcggcgcaggcagtaaaagcagaactttttggcggggaaggtta

SEQ ID NO: 187317 - DNA, 75 bp, synthetic construct
  source 1..75: mol_type = other DNA
tcattaccccggtctataaaattgatccccggaaacccttaacggtaaaaaaaccggatcagatcactgttgttt

SEQ ID NO: 187318 - DNA, 75 bp, synthetic construct
  source 1..75: mol_type = other DNA
ccaggcacgttttacgcccaaaggcatcgagtggatcggcggcatgtggacggcacacatcgctaaggggcatgc

SEQ ID NO: 187319 - DNA, 75 bp, synthetic construct
  source 1..75: mol_type = other DNA
ccggtgtgcgcattgcaaagaaaacagtcgatcgcctccgtcaacttatctggctggccgcacaggacgtcaaag

SEQ ID NO: 187320 - DNA, 75 bp, synthetic construct
  source 1..75: mol_type = other DNA
gcgtcggctgaaagaagattacccggacaaagtattgatcgcttcgatcatgggggaaaatgagcagcaatggga

SEQ ID NO: 187321 - DNA, 75 bp, synthetic construct
  source 1..75: mol_type = other DNA
cagatattggcaccggtctggataccgtggtgactaaactggcggcagaagtgctgcattgtccacctcaggacg

SEQ ID NO: 187322 - DNA, 75 bp, synthetic construct
  source 1..75: mol_type = other DNA
atcctgctggaagaagtgtgcgcctgggcaacctgcgtgaccgggcgtccggtacttttccgctacacccgtgaa

SEQ ID NO: 187323 - DNA, 75 bp, synthetic construct
  source 1..75: mol_type = other DNA
ggcagttctgtctcttgaagaacatcacaaaacctggttgttgtggtgttatagcgggagtatttgctgggagta

SEQ ID NO: 187324 - DNA, 75 bp, synthetic construct
  source 1..75: mol_type = other DNA
ctggacagggatgctcttatttcagtaatgcgggtacgatcacggcaacagtcgcttaatttagaaccatatctt

SEQ ID NO: 187325 - DNA, 75 bp, synthetic construct
  source 1..75: mol_type = other DNA
agataccggttttatcggcttcaaaaatatggagcaaattgccgagcatcctctggaagaaaacctggctgcgat

SEQ ID NO: 187326 - DNA, 75 bp, synthetic construct
  source 1..75: mol_type = other DNA
ttcagcccttcaacggatgaagtctggttaccggagcgacatctgttttctgatgcggcgaatttctacgctacc

SEQ ID NO: 187327 - DNA, 75 bp, synthetic construct
  source 1..75: mol_type = other DNA
gtttgtcgcaacagctggtggtcagcgtctctgaacacctgttgttacggcatgaatgcagattaccaaatcacc

SEQ ID NO: 187328 - DNA, 75 bp, synthetic construct
  source 1..75: mol_type = other DNA
cgcgccgctatcgacgccgccaaccgcgccctgcccgcctggcgtgcgctcaccgccaaagaacgcgccaacatt

SEQ ID NO: 187329 - DNA, 75 bp, synthetic construct
  source 1..75: mol_type = other DNA
ttttcgtgagcgttacagatctgatggcctctggcacaaaaggtattccagaaacacaaaaatatccgggcgttt

SEQ ID NO: 187330 - DNA, 75 bp, synthetic construct
  source 1..75: mol_type = other DNA
taactcaaggagaaagagttttatcaaaacttattgaaattataggcaagcctattgaattagattcagagcata

SEQ ID NO: 187331 - DNA, 75 bp, synthetic construct
  source 1..75: mol_type = other DNA
aattatggctacgatggtcacagcaattctggcatcttcaactgtatgggctgctgataatgcaccggtagcggc

SEQ ID NO: 187332 - DNA, 75 bp, synthetic construct
  source 1..75: mol_type = other DNA
atgaaacgtttaattatggccacgatggtcacagcaattctggcatcttcaactgtatgggctgctgataatgca

SEQ ID NO: 187333 - DNA, 75 bp, synthetic construct
  source 1..75: mol_type = other DNA
cggaattaatatcatgctgctgtggtgtagtgcggcaaaacagggttttcaggacgagcgctggctgacctacaa

SEQ ID NO: 187334 - DNA, 75 bp, synthetic construct
  source 1..75: mol_type = other DNA
gattatgcagaggaagaactggtggcggagctgggaagtgcttttttgatggcggatttggggattgatggagag

SEQ ID NO: 187335 - DNA, 75 bp, synthetic construct
  source 1..75: mol_type = other DNA
tcagaccgttaccgacaacatcattgcagcacttgaagccggtgtaaaaccgtggtcctgtccgtggcaacgcgt

SEQ ID NO: 187336 - DNA, 75 bp, synthetic construct
  source 1..75: mol_type = other DNA
accgtgtttaacgttcagcaaatcgacggcctgtccctgacaactgaaactgtcagcccggaagcaacctttgac

SEQ ID NO: 187337 - DNA, 75 bp, synthetic construct
  source 1..75: mol_type = other DNA
aacgacaagcgttatattttcaaagcgaccagcgcagcctctaaagcacattgttacctgatggataaactctga

SEQ ID NO: 187338 - DNA, 75 bp, synthetic construct
  source 1..75: mol_type = other DNA
atgacgatttccctttatacctcccggacaagcgcccctaacaccgcagcggcgaccagcgtatcctcgctggag

SEQ ID NO: 187339 - DNA, 75 bp, synthetic construct
  source 1..75: mol_type = other DNA
ttgcgacgtggcggcggtggcgggcgacacggcatttcaggctggtataaggagcatcgctcatgcagtggcaaa

SEQ ID NO: 187340 - DNA, 75 bp, synthetic construct
  source 1..75: mol_type = other DNA
ttgcgacgtaacggcggtggcgggcgacacggcatttctggctggtataaggagcattgctcatgcagtggcaaa

SEQ ID NO: 187341 - DNA, 75 bp, synthetic construct
  source 1..75: mol_type = other DNA
cggcgaagaaacacaattgatcggcgcgcgcactctggctccttcctctctttatgttatgcccggtacgcattg

SEQ ID NO: 187342 - DNA, 75 bp, synthetic construct
  source 1..75: mol_type = other DNA
ctcggcagaagggatgacagcgggagagctggtagcgtttctggcagcaaaaggcaaatttataccttcgaaaga

SEQ ID NO: 187343 - DNA, 75 bp, synthetic construct
  source 1..75: mol_type = other DNA
accagcaagcctttcaggcgatgggttgcgacgtgacggcggtagcgggcgacacggcatttcaggctggtataa

SEQ ID NO: 187344 - DNA, 75 bp, synthetic construct
  source 1..75: mol_type = other DNA
gcgtcacgcgcctgaacggaaaatctccggctgcggtgttagcagaagtgacgaccgactggcgtgaagagaata

SEQ ID NO: 187345 - DNA, 75 bp, synthetic construct
  source 1..75: mol_type = other DNA
tttaacgttgcgggtgcagtcattctgacactggcctacttcggcagccgaattgtccagcagttaatcagctaa

SEQ ID NO: 187346 - DNA, 75 bp, synthetic construct
  source 1..75: mol_type = other DNA
gagcctgttttgaaggacgctggcactggcagtcagcaacagccaggagagtcggggtgtatgcccataagcgct

SEQ ID NO: 187347 - DNA, 75 bp, synthetic construct
  source 1..75: mol_type = other DNA
agttttcaacctcttcgtggcggcgtgcgattttgtctctcgatgaacatcagaaagcgtggttgttgtggagtt

SEQ ID NO: 187348 - DNA, 75 bp, synthetic construct
  source 1..75: mol_type = other DNA
aaagcaatcgctggcgaaggggacgtcaattcctctggtcagtccggttgagttttcgacatcatcgtggcggcg

SEQ ID NO: 187349 - DNA, 75 bp, synthetic construct
  source 1..75: mol_type = other DNA
aggatttggcattacgctgtttgagcgtttagaggggcgtgaccctaacacgctggttggtttaccgctaatcgc

SEQ ID NO: 187350 - DNA, 75 bp, synthetic construct
  source 1..75: mol_type = other DNA
atactcaatccggtaccagaaaaattgcagggaaaacgcaggaacgcctgaaaaaattaatctggctggcggcgc

SEQ ID NO: 187351 - DNA, 75 bp, synthetic construct
  source 1..75: mol_type = other DNA
gggcagttgatggcgtggcttgagaacgcgcagtttgatacgggaacgtttaaacgtaagaagcctcgaatattg

SEQ ID NO: 187352 - DNA, 75 bp, synthetic construct
  source 1..75: mol_type = other DNA
gtttgccggttctgacgcaataatctttaacggtaatatcgttaacgcgtccttgcttatcgccgcacagttaga

SEQ ID NO: 187353 - DNA, 75 bp, synthetic construct
  source 1..75: mol_type = other DNA
cgtagtgacaaaactggcagcagaagtgctgcactgtccacctcaggatgtgcatgttatctccggtgatactga

SEQ ID NO: 187354 - DNA, 75 bp, synthetic construct
  source 1..75: mol_type = other DNA
tcgaagcactgaagctcatcgacgttgaatatgaagtgcttaagccggtaatgtcgatcgacgaagcaatggcgg

SEQ ID NO: 187355 - DNA, 75 bp, synthetic construct
  source 1..75: mol_type = other DNA
tatgatcatcaacttcccgatcggttctcgcccacgcaaaaatatcgccgccagtattcatggtcatattggcga

SEQ ID NO: 187356 - DNA, 75 bp, synthetic construct
  source 1..75: mol_type = other DNA
accggtggtgtatgttgctggtgcgccagacactctggaagacgataacagccatgcagcccagcgcggcgagca

SEQ ID NO: 187357 - DNA, 75 bp, synthetic construct
  source 1..75: mol_type = other DNA
ttgtttaacatgggaatgcactctgtacgcaacagtgatgatggtttcggttttgccggttctgacgcaattatc

SEQ ID NO: 187358 - DNA, 75 bp, synthetic construct
  source 1..75: mol_type = other DNA
cgcaccgacccgcgaagagatcgacgacgcgctttctggtttgttcagccgcgatgcaggctggcaacaatacta

SEQ ID NO: 187359 - DNA, 75 bp, synthetic construct
  source 1..75: mol_type = other DNA
acggcagccacggagctttccgcgattcatggtcactcaacatcgcaatatcgccttggagaattttatcttcat

SEQ ID NO: 187360 - DNA, 75 bp, synthetic construct
  source 1..75: mol_type = other DNA
tggaacgagtttaaggctctgttaggtaaaagaaaaattgccagtaagacactggaacgcttaaagaagttgatc

SEQ ID NO: 187361 - DNA, 75 bp, synthetic construct
  source 1..75: mol_type = other DNA
gcgatgcgggttggcagcaatactatcaagtcattgaactggctattgcgcgtaaaaataacccgcgtgccacga

SEQ ID NO: 187362 - DNA, 75 bp, synthetic construct
  source 1..75: mol_type = other DNA
acctttatcgttcattctggcggtgcggatattggtactggtctggatactgtggtgaccaaactggcagcagaa

SEQ ID NO: 187363 - DNA, 75 bp, synthetic construct
  source 1..75: mol_type = other DNA
atgtcgattgacgaggcaatggcggaagatgcgcctgtcgtgcacgatgaaccggtggtgtatgttgctggtgcg

SEQ ID NO: 187364 - DNA, 75 bp, synthetic construct
  source 1..75: mol_type = other DNA
tgagaaacggcaggtgaccggcagtggcggggaagatgacgtactgatgagccgtcctggcgcggataaaccgga

SEQ ID NO: 187365 - DNA, 75 bp, synthetic construct
  source 1..75: mol_type = other DNA
acggtacgttacaagggattcatcgcaccgataaaccggcgttcagcttccagggacacccggaagccagccctg

SEQ ID NO: 187366 - DNA, 75 bp, synthetic construct
  source 1..75: mol_type = other DNA
acgttgaccggcggcctgccagaagcgaaaaaagaagacgagctgccgttccacgtcgtggcttatgattttggt

SEQ ID NO: 187367 - DNA, 75 bp, synthetic construct
  source 1..75: mol_type = other DNA
ccaggtctgaacggcatggatctggcaaaagaagtgaccaccgcagaagcctatagctggacacaagggagctgg

SEQ ID NO: 187368 - DNA, 75 bp, synthetic construct
  source 1..75: mol_type = other DNA
ccaccgccatgagtcgacttggcgcggcggtaagtactggcctgctgccgtgggtgctggcgcagtggggaatgc

SEQ ID NO: 187369 - DNA, 75 bp, synthetic construct
  source 1..75: mol_type = other DNA
gtctggaagatgcgctgactgccagcctgatgcttaatgcgttgttaattgttggcgcgttattagggttagtgt

SEQ ID NO: 187370 - DNA, 75 bp, synthetic construct
  source 1..75: mol_type = other DNA
cgattgccgatatcgatacccgtaagctgacacgtttactgcgcgagaaaggcgcacagaatggctgcattatcg

SEQ ID NO: 187371 - DNA, 75 bp, synthetic construct
  source 1..75: mol_type = other DNA
gatgggcaacgcctgattatcagtcctgacctgatagctgattctcgtgcattaccatttgcagacgcatctttt

SEQ ID NO: 187372 - DNA, 75 bp, synthetic construct
  source 1..75: mol_type = other DNA
atatgtgctgtggcagccgtatgttctggttcgataagaatgacgaccgggcgatatttagcgatatcagaaaag

SEQ ID NO: 187373 - DNA, 75 bp, synthetic construct
  source 1..75: mol_type = other DNA
cttcgctacatttcattgctaaatatcgcgcaacagggcgttgggttactggcggcatggctaatgctcaggcct

SEQ ID NO: 187374 - DNA, 75 bp, synthetic construct
  source 1..75: mol_type = other DNA
cctcactgatccttcctattctcgtcaaatcgttactcttacttatccccatattggcaatgtcggcactaatga

SEQ ID NO: 187375 - DNA, 75 bp, synthetic construct
  source 1..75: mol_type = other DNA
aggaagacgagtattgcggaaacagcgaaactttgtgaatgtagcgttagtcttgtaaaagctgtatggtctaaa

SEQ ID NO: 187376 - DNA, 75 bp, synthetic construct
  source 1..75: mol_type = other DNA
gggttagtacagacgaacaagatttaacccggcaaaatgaaattattgaaaatgccaggaataatggattctatg

SEQ ID NO: 187377 - DNA, 75 bp, synthetic construct
  source 1..75: mol_type = other DNA
ttttttgccaccacgccagagcatcttattggactgcgcattttgatcggcattggtctgggaggcgattactca

SEQ ID NO: 187378 - DNA, 75 bp, synthetic construct
  source 1..75: mol_type = other DNA
acgaccgactggcgtgaagagaaaacgccagtggtaatggcaggaatggttggcagcaacgtcggctggaaagtt

SEQ ID NO: 187379 - DNA, 75 bp, synthetic construct
  source 1..75: mol_type = other DNA
gaagttgatggcgacgatccggcagtattcagaccaatacaaaagttaattaacggaacgtggtacaacgtgtca

SEQ ID NO: 187380 - DNA, 75 bp, synthetic construct
  source 1..75: mol_type = other DNA
ggcactgttgcaaagttagcgatgaggcagccttttgtcttattcaaaggccttacatttcaaaaactctgctta

SEQ ID NO: 187381 - DNA, 75 bp, synthetic construct
  source 1..75: mol_type = other DNA
gattcttcttgatgcccagccgttggaaagctggagcagtaaagcctttgcccgcaaagtcgcttatttgccgca

SEQ ID NO: 187382 - DNA, 75 bp, synthetic construct
  source 1..75: mol_type = other DNA
gattcttcttgatgcccagccgctggaaagctggagcagcaaagcgtttgcccgcaaagtggcttatttgccgca

SEQ ID NO: 187383 - DNA, 75 bp, synthetic construct
  source 1..75: mol_type = other DNA
tcgaaaagggggttgatacctggtgtcctccggcgaagaaatcactcctgtgctgcgggaaaagtacaaagaaaa

SEQ ID NO: 187384 - DNA, 75 bp, synthetic construct
  source 1..75: mol_type = other DNA
atgaacacttcaccggtgcgaatggatgatttaccgcttaaccgttttcactgtcgcattgctgcgctcactttc

SEQ ID NO: 187385 - DNA, 75 bp, synthetic construct
  source 1..75: mol_type = other DNA
tgatcccgtggtttgtgatttacacctggctgccgactatcgcccagactattggtctggaagatgcgctgactg

SEQ ID NO: 187386 - DNA, 75 bp, synthetic construct
  source 1..75: mol_type = other DNA
catcaaaaccttgttctcttcgcgctactggcggcgcacggcgtttaacagcgtcttctttgtctgcctcgtaat

SEQ ID NO: 187387 - DNA, 75 bp, synthetic construct
  source 1..75: mol_type = other DNA
gtggaagctgttaagtaaggatattcagtccgttcgtgaagaaatatacgccggtctgaaaacgcagaggtctga

SEQ ID NO: 187388 - DNA, 75 bp, synthetic construct
  source 1..75: mol_type = other DNA
tatgggcaccagaaaccaaagcactcccgctggtggcggcgggaaatgtaggaggtgcgaatgaacattctgtta

SEQ ID NO: 187389 - DNA, 75 bp, synthetic construct
  source 1..75: mol_type = other DNA
tttccccgcgccgccatcgcggtattttgctgggcgctttcagcgtggtgtggaccgtaggctatgtgttggcaa

SEQ ID NO: 187390 - DNA, 75 bp, synthetic construct
  source 1..75: mol_type = other DNA
gtgtcggtatgctggacattatcggtaatgcctatgaatatctgatcaaaaattttgctgccagcggtggacaga

SEQ ID NO: 187391 - DNA, 75 bp, synthetic construct
  source 1..75: mol_type = other DNA
gcattgcatgccattgaagaagccaacggcaccaaactgaaagatgccgggaaaagcgtgttccaggatatttcg

SEQ ID NO: 187392 - DNA, 75 bp, synthetic construct
  source 1..75: mol_type = other DNA
gggcaacggtgagcgtatcgatcaggcgctgcatgcgattgaagaagccaacggcaccaaactgaaagatgccgg

SEQ ID NO: 187393 - DNA, 75 bp, synthetic construct
  source 1..75: mol_type = other DNA
gatatgcaggaaaccatcgacgaaacgctggatttcttcctgcgcaccgtcgagcttacggataaaccatcatga

SEQ ID NO: 187394 - DNA, 75 bp, synthetic construct
  source 1..75: mol_type = other DNA
cggatgacgttaatcatccgctgtgggtggaacgcattgcccaactgtcgccagatgtgattttctctttttatt

SEQ ID NO: 187395 - DNA, 75 bp, synthetic construct
  source 1..75: mol_type = other DNA
ctggtggtgcgtaaggaacgtgagcaactaaaggtggagctggcgaaactggaaacggagatggcgggttatctg

SEQ ID NO: 187396 - DNA, 75 bp, synthetic construct
  source 1..75: mol_type = other DNA
aagctggggaattctacaccccaccagaagtttcagacctgattgctgaactgcttgatccgcaacccggtgaca

SEQ ID NO: 187397 - DNA, 75 bp, synthetic construct
  source 1..75: mol_type = other DNA
gtcgatcctgaagtacctgcctgccacggtgacgacgttattgcattgatgcacgatacaggtgaaaccaccttc

SEQ ID NO: 187398 - DNA, 75 bp, synthetic construct
  source 1..75: mol_type = other DNA
tgagcgcgccactacattacagtggttattctggcaggttggaggcctggggccgatgctcgggcaaaatcacca

SEQ ID NO: 187399 - DNA, 75 bp, synthetic construct
  source 1..75: mol_type = other DNA
tattgcgtccatccggcgttctgatttttaaatggaatgaaacgcaaatacctgttcgccagatattggtgctga

SEQ ID NO: 187400 - DNA, 75 bp, synthetic construct
  source 1..75: mol_type = other DNA
tgttgcgtccatccggcgttctgatttttaaatggaatgaaacgcaaatacctgttcgccagatattggtactga

SEQ ID NO: 187401 - DNA, 75 bp, synthetic construct
  source 1..75: mol_type = other DNA
tttaacaccgatcgtcttggcgaagaaaaacagaaaaacaccatccttcgtcagctactggaagacttcgccggt

SEQ ID NO: 187402 - DNA, 75 bp, synthetic construct
  source 1..75: mol_type = other DNA
cacgctggatttattcggtgtctaaacaattacttgatcgagtgatctgggcctatggcgaaaaagagggtttac

SEQ ID NO: 187403 - DNA, 75 bp, synthetic construct
  source 1..75: mol_type = other DNA
tggggtggtctgattgtgctgccggtggttgaaggcagctgggttatatcgcagcagtggctgtcggagcagtgg

SEQ ID NO: 187404 - DNA, 75 bp, synthetic construct
  source 1..75: mol_type = other DNA
agcattgttatgctggcggtgatcatgggtctgatgctggtagactggccccctgaatctccagacaaccaatat

SEQ ID NO: 187405 - DNA, 75 bp, synthetic construct
  source 1..75: mol_type = other DNA
gcattacctgaagaaaattccggtgcataaagttctgcgctcggtgatgccaatcttcatcattcctatcgtcgg

SEQ ID NO: 187406 - DNA, 75 bp, synthetic construct
  source 1..75: mol_type = other DNA
ctggttcgataagaatgacgaccgggcgatatttagcgatatcagaaaggaagagcacacattatgtgatggacg

SEQ ID NO: 187407 - DNA, 75 bp, synthetic construct
  source 1..75: mol_type = other DNA
tgaaaagtctggcgcgtaaaaatgggccttcgactgatgagaaggaagacgacctggatctggattttgaaatta

SEQ ID NO: 187408 - DNA, 75 bp, synthetic construct
  source 1..75: mol_type = other DNA
ggcgcaaaaatttctcttccgaagagcgtgaagcaggtaaagcggcgctggtgatgggctgtgttggcgtcaccg

SEQ ID NO: 187409 - DNA, 75 bp, synthetic construct
  source 1..75: mol_type = other DNA
atatttcgacgaagaccattctaatttgatcgtcgggccggtgaataaaccgcgctggatttattcggtatcaaa

SEQ ID NO: 187410 - DNA, 75 bp, synthetic construct
  source 1..75: mol_type = other DNA
gtggcgatggcgcgctggaaatcgtcaccggacaggcgggcgacggcattactatgcagggctcgcaattagcgc

SEQ ID NO: 187411 - DNA, 75 bp, synthetic construct
  source 1..75: mol_type = other DNA
agttcaccctcttccgcccgtttaactggatggggccacgactggataaccttaatgcagcgcgaattggcagct

SEQ ID NO: 187412 - DNA, 75 bp, synthetic construct
  source 1..75: mol_type = other DNA
gatccgaatctgaaaaaactgtttgatatcggtgtcgcgggcttaacgctgatggtgcctttccttgctgcttac

SEQ ID NO: 187413 - DNA, 75 bp, synthetic construct
  source 1..75: mol_type = other DNA
acattacccgccattaaacacggtaatattctggaaatcgcccaacgcgagaacgaagccacctgttttggtcgc

SEQ ID NO: 187414 - DNA, 75 bp, synthetic construct
  source 1..75: mol_type = other DNA
cggataacgttaatcatccgctgtgggtggaacgcattgcccaaatgtcgccggaggtgattttctcgttttatt

SEQ ID NO: 187415 - DNA, 75 bp, synthetic construct
  source 1..75: mol_type = other DNA
gaagagagatgtccaggtgcgtttaaacaacgcccaacagcagaaaattcaggcagaaaaagcatatgataaagt

SEQ ID NO: 187416 - DNA, 75 bp, synthetic construct
  source 1..75: mol_type = other DNA
ccgctacaggtgattttcgagcgtactgctggcgaagccttgggcacattagagtgggcaatcgacagacatcgc

SEQ ID NO: 187417 - DNA, 75 bp, synthetic construct
  source 1..75: mol_type = other DNA
ccttaaagtactggaatctttcaggaatgactggagtcggcattacgaacagtatgttgaggccgaacaggtaga

SEQ ID NO: 187418 - DNA, 75 bp, synthetic construct
  source 1..75: mol_type = other DNA
gggtattcgcgggatctggcggaaagggcgctcgctcatacgctgaaaaataaggttgaggcggcatatcatcgt

SEQ ID NO: 187419 - DNA, 75 bp, synthetic construct
  source 1..75: mol_type = other DNA
cccaggccgggcgtatcggcaaaccggaatcgctgctgatcatctcccgcgatccgtctccaccaccggcggagt

SEQ ID NO: 187420 - DNA, 75 bp, synthetic construct
  source 1..75: mol_type = other DNA
cggttggactcaatcgcaacttatcatgaagtgctgggcgatttggagagggtcggtacagggatctcgcaggta

SEQ ID NO: 187421 - DNA, 75 bp, synthetic construct
  source 1..75: mol_type = other DNA
atccatctctgacacctagaatcttcaaggatcgtttgcaaatcgcctgtaatattcgcgaaattctttgtcggg

SEQ ID NO: 187422 - DNA, 75 bp, synthetic construct
  source 1..75: mol_type = other DNA
atgaaccgaatctatctcactggcggaggagctgagcttatttaccctcacataaagcaatatttcccgaatctg

SEQ ID NO: 187423 - DNA, 75 bp, synthetic construct
  source 1..75: mol_type = other DNA
gtattgatgttgatgtttgtcgtggtgttgccgctgctgtatttggcgacgacacgaaagtgaaatatacgccgc

SEQ ID NO: 187424 - DNA, 75 bp, synthetic construct
  source 1..75: mol_type = other DNA
ccacactatttggcctctgcttacaacgatgatgcacaaaagattgcagcggtgatcgatcaaaaccctggccgc

SEQ ID NO: 187425 - DNA, 75 bp, synthetic construct
  source 1..75: mol_type = other DNA
gagccgtccgttagtgacttcacccaatatctggcaaatcatcgccagagtgaataccactaccgcaattacttc

SEQ ID NO: 187426 - DNA, 75 bp, synthetic construct
  source 1..75: mol_type = other DNA
ttgttgactttcaagataatgttcaagttgctttaaagctaatgcatcgttctggaattaaaatgccatcaagtt

SEQ ID NO: 187427 - DNA, 75 bp, synthetic construct
  source 1..75: mol_type = other DNA
gctgtttgtggcgacaagcgtgtatacagatgaaccttataatgttacccgagcactgttattaatggtgatact

SEQ ID NO: 187428 - DNA, 75 bp, synthetic construct
  source 1..75: mol_type = other DNA
tcagtttctgtgcagtgctgacaaggagccggggctgcagcatttgccggatgaagacgcccgggctggcacgga

SEQ ID NO: 187429 - DNA, 75 bp, synthetic construct
  source 1..75: mol_type = other DNA
ttcaggatatcaccgacccgctgataagcgagcaggagcggcgggatgaaaccaatctgctctatgtggcggtca

SEQ ID NO: 187430 - DNA, 75 bp, synthetic construct
  source 1..75: mol_type = other DNA
gtgtgattggcaccgcactgatggcggcaatgcgtggcaggaaggtttactgggtggggggcattgaaggctaca

SEQ ID NO: 187431 - DNA, 75 bp, synthetic construct
  source 1..75: mol_type = other DNA
ccagctggtaagtgaacaaagccagaaagctgctgatacatccccgtcagaagaagagacggtatgcgggcagga

SEQ ID NO: 187432 - DNA, 75 bp, synthetic construct
  source 1..75: mol_type = other DNA
gcactgcggcgggattaccgcgattttgatgaatactgccggatagccaaatccacccgggatgtggagatgaat

SEQ ID NO: 187433 - DNA, 75 bp, synthetic construct
  source 1..75: mol_type = other DNA
ctgaacacccgtcactggctgctggttcgtctggcactcagcagtctgaatcagtttctgtgcagtgctgacaag

SEQ ID NO: 187434 - DNA, 75 bp, synthetic construct
  source 1..75: mol_type = other DNA
cttatcgtgtgggcgcacgggaatttgtcaaaaatcctttcgttactgaggcatccacatgaaatcaaaagatga

SEQ ID NO: 187435 - DNA, 75 bp, synthetic construct
  source 1..75: mol_type = other DNA
actgatctactggagcagcgtgtaccgatgatgcaggcatgggcggattatgtgatgtctcaatttgctaaaaac

SEQ ID NO: 187436 - DNA, 75 bp, synthetic construct
  source 1..75: mol_type = other DNA
gggcgctcgctcatacgctgaaaaataaggttgaggcggcatatcatcgtactgatctactggagctgcgtgtac

SEQ ID NO: 187437 - DNA, 75 bp, synthetic construct
  source 1..75: mol_type = other DNA
tacagcaaaagtatataaaaatgataacatctcaattaatgagggggagttcaacgctactgcacttataaatat

SEQ ID NO: 187438 - DNA, 75 bp, synthetic construct
  source 1..75: mol_type = other DNA
aaatccaaagcatgtcaggcagtggttatcgacgcttgaaaattacgacgtttcctcaactgggagcaaaaacgc

SEQ ID NO: 187439 - DNA, 75 bp, synthetic construct
  source 1..75: mol_type = other DNA
cgagctgatttacggacaattgttaaagaagggtttgcgcaagagaaaagaattaataaccagcaagcagtgtac

SEQ ID NO: 187440 - DNA, 75 bp, synthetic construct
  source 1..75: mol_type = other DNA
cttgtaggcctgataagacgcgtcagcgtcgcatcaggcactgaatgccggatgcggcgtgaacgccttatccgt

SEQ ID NO: 187441 - DNA, 75 bp, synthetic construct
  source 1..75: mol_type = other DNA
aacaaggggaaagcattacccctgatgttgcgtttttgctgggattcaataattgataaaaagagttatgaaact

SEQ ID NO: 187442 - DNA, 75 bp, synthetic construct
  source 1..75: mol_type = other DNA
tcagtgtagggcgctggaatgaccatctgggcgcgactgagtcgtattataacaaggggaaagcattacccctga

SEQ ID NO: 187443 - DNA, 75 bp, synthetic construct
  source 1..75: mol_type = other DNA
atatcgtcaaacaaaaaatggcggaaaataacggcggctataaagcgattaattacggttataccgacgatcgtg

SEQ ID NO: 187444 - DNA, 75 bp, synthetic construct
  source 1..75: mol_type = other DNA
tctacagcaaactgaccagtgaaaacccgattgacctggtgcgttatcagttagctaactgctatatgggccggg

SEQ ID NO: 187445 - DNA, 75 bp, synthetic construct
  source 1..75: mol_type = other DNA
agtcagggattgtaaaactggaaattataaagacaaactgaagaataaatttaatctgcgttcagacatagcgcg

SEQ ID NO: 187446 - DNA, 75 bp, synthetic construct
  source 1..75: mol_type = other DNA
tccacactactcaaaatgctgggacgccatcagccaccgtcggaaggcgagattcttctcgacgctcagccgcta

SEQ ID NO: 187447 - DNA, 75 bp, synthetic construct
  source 1..75: mol_type = other DNA
gtcgttacccgtggcatggcgcgctgggacgctttggcgtggcagatcgcgaaaaggtcgaggaagctatcgcgc

SEQ ID NO: 187448 - DNA, 75 bp, synthetic construct
  source 1..75: mol_type = other DNA
tcggcgctggatatcgcccaccaggttgatgtgctggcgctggtgcaccgtttaagtcaggaacgtggtctgacg

SEQ ID NO: 187449 - DNA, 75 bp, synthetic construct
  source 1..75: mol_type = other DNA
gggagcagatggttacgccttacacagacaaccgctggaacgaaacctattatcgttcaacgatgattattggtc

SEQ ID NO: 187450 - DNA, 75 bp, synthetic construct
  source 1..75: mol_type = other DNA
aattgataaaaagagttatgaaactctgattttttttaaaaaagggacctgggagcagatggttacgccttacgc

SEQ ID NO: 187451 - DNA, 75 bp, synthetic construct
  source 1..75: mol_type = other DNA
tggtaggcttaaagccactggcgcatcggctggtcgatagcctctctggcggcgaacgccagcgggcgtggatcg

SEQ ID NO: 187452 - DNA, 75 bp, synthetic construct
  source 1..75: mol_type = other DNA
gattcttggacgtaaggcgttcaagaaatcgatggctgacggcgtgaaactgattaacgccgtgcaggacgttta

SEQ ID NO: 187453 - DNA, 75 bp, synthetic construct
  source 1..75: mol_type = other DNA
ccagcggtttgggttacaccgacctgatcacacgtctgatcgagttggcgctggagcgtcacgctgcggataacg

SEQ ID NO: 187454 - DNA, 75 bp, synthetic construct
  source 1..75: mol_type = other DNA
agcgatttctatgcctacgacaccaagtacattgacgaagatggcgcgaaagtggtagttccggcagccattgca

SEQ ID NO: 187455 - DNA, 75 bp, synthetic construct
  source 1..75: mol_type = other DNA
ttatacttgcggtgatttgcagtatccaaatttgtagcgctgctattttaagtaaaagctattcacataatgata

SEQ ID NO: 187456 - DNA, 75 bp, synthetic construct
  source 1..75: mol_type = other DNA
actttctatgtcactgatagttatggcaaacgtgctgatgtaggtgtcgttgatccaggagggggagggcggaaa

SEQ ID NO: 187457 - DNA, 75 bp, synthetic construct
  source 1..75: mol_type = other DNA
ggcacacaacatctgcttcggcctgaagcagaaaaaagtcgctatcagtgaacagcaggaccggctgacggaggc

SEQ ID NO: 187458 - DNA, 75 bp, synthetic construct
  source 1..75: mol_type = other DNA
cggccaaccattgccgacggtagatgtcattttcccgattgtccacggtacgctgggtgaagatggctccctgca

SEQ ID NO: 187459 - DNA, 75 bp, synthetic construct
  source 1..75: mol_type = other DNA
gcggcacgccgatccttggtatcgtgcttggcgtgacactggtttccccccagctgatgaacgcttatctgctcg

SEQ ID NO: 187460 - DNA, 75 bp, synthetic construct
  source 1..75: mol_type = other DNA
gccgcaagcacaatgaacgcgagatctccgtgcctgccgctatctccgcctggcttggggtcactgagcctgcaa

SEQ ID NO: 187461 - DNA, 75 bp, synthetic construct
  source 1..75: mol_type = other DNA
aaggcaagatgaatctcaacgtgcaacaggcgggcggcagtgtactggtggtttcccagtttacccttgccgcag

SEQ ID NO: 187462 - DNA, 75 bp, synthetic construct
  source 1..75: mol_type = other DNA
atgcgtggatctgtcatcattccggtagccctgcatgccctggtggccgtttccacgttgctgtggttgctgtgg

SEQ ID NO: 187463 - DNA, 75 bp, synthetic construct
  source 1..75: mol_type = other DNA
gacggggttcgcactgccggttgtgttgagtgccgaattttccgggcctgaaacaccgtggataatcgtccgggg

SEQ ID NO: 187464 - DNA, 75 bp, synthetic construct
  source 1..75: mol_type = other DNA
ccttcttctggcaggctggactgtttttaaaaactgccggagtgaaaagcaaaagctcacatctgacgttaccct

SEQ ID NO: 187465 - DNA, 75 bp, synthetic construct
  source 1..75: mol_type = other DNA
ttttcaaaactggaacaaaattttgaaaatataatgataatatatcgggaaaatgttgatttcagcatgtatgat

SEQ ID NO: 187466 - DNA, 75 bp, synthetic construct
  source 1..75: mol_type = other DNA
attttactgggtggcgcttcctttaaccacggtaaacggagtgtcccagtttcagcctgagtggatatgctggga

SEQ ID NO: 187467 - DNA, 75 bp, synthetic construct
  source 1..75: mol_type = other DNA
tgtctttgccccttacagaaaacttgcgaaatgtagcgaaagcgttaggtaaaccactggatcggttacgtatgg

SEQ ID NO: 187468 - DNA, 75 bp, synthetic construct
  source 1..75: mol_type = other DNA
tatgaaaaagctggttgttaatcgactggctgccggggcgattgatctgtctttgcctctggcggacaacttgcg

SEQ ID NO: 187469 - DNA, 75 bp, synthetic construct
  source 1..75: mol_type = other DNA
catctgctggatttgcagccagaagcgccagatgccgaacaattgaatgctatctttcgtgcggcccattccatc

SEQ ID NO: 187470 - DNA, 75 bp, synthetic construct
  source 1..75: mol_type = other DNA
aaacgggtgatgatgttctgtctgccgttattcaccgtgttgaatggctgtttgatacattttcttcggtttgcc

SEQ ID NO: 187471 - DNA, 75 bp, synthetic construct
  source 1..75: mol_type = other DNA
atcagggcggcaacatttgcattgaagtgaccgacgatggggcggggctaaaccgtgagcgaattctggcaaaag

SEQ ID NO: 187472 - DNA, 75 bp, synthetic construct
  source 1..75: mol_type = other DNA
cgcgacgaattatcctttcgcgcctgaaggccggggaagtcgacctgctggaagaagaactgggacatctgacaa

SEQ ID NO: 187473 - DNA, 75 bp, synthetic construct
  source 1..75: mol_type = other DNA
ccgtggatggaatgcacgagaccttcgagctggatctgacgctttttgcctttgcttaccgttggcgagcctctc

SEQ ID NO: 187474 - DNA, 75 bp, synthetic construct
  source 1..75: mol_type = other DNA
ttataaaaagtgatttgccgttctataaagatcaaatttttagatatattgaaatggctaatccagaaaggaagc

SEQ ID NO: 187475 - DNA, 75 bp, synthetic construct
  source 1..75: mol_type = other DNA
gtgatttctgcctgtgccgttaaagcattaggcggggatatgcaggccgagctgattgacttttgtcaggctaaa

SEQ ID NO: 187476 - DNA, 75 bp, synthetic construct
  source 1..75: mol_type = other DNA
ttttgcaggaaaccacgcatctgatggaaaacctgctcgatgaagccagacgaggtgagatgcaactcaacaccg

SEQ ID NO: 187477 - DNA, 75 bp, synthetic construct
  source 1..75: mol_type = other DNA
tgccattaaaaaagagaacgttggtgagttttctctgcggggcgtttgtgttcctgacggaaaagtgaaggagga

SEQ ID NO: 187478 - DNA, 75 bp, synthetic construct
  source 1..75: mol_type = other DNA
caaactgagatatgcagatgataaaccctggaccacagcgtcacctgaagggttttattacaccttgtatccgtt

SEQ ID NO: 187479 - DNA, 75 bp, synthetic construct
  source 1..75: mol_type = other DNA
tggcgttacccctggcggacaacttgcgcaatgtggcgaaagcgttaggcaaaccgctggaccagctacgtatgg

SEQ ID NO: 187480 - DNA, 75 bp, synthetic construct
  source 1..75: mol_type = other DNA
aaatcctgaccgggcaagatgttctaagtgcggtagtggtgcgtattgagtggatatttgaaaacttttcctctg

SEQ ID NO: 187481 - DNA, 75 bp, synthetic construct
  source 1..75: mol_type = other DNA
atgaacaatgatttttccgcgaaaaaaatcctgacgggtgaggatgtcctgtgtgcggccgttcaccgtattgag

SEQ ID NO: 187482 - DNA, 75 bp, synthetic construct
  source 1..75: mol_type = other DNA
gcagtcatggccttcgccccacgaggcagcctgctacacgctcccgatatgtatatgaaaaaactggttgttaat

SEQ ID NO: 187483 - DNA, 75 bp, synthetic construct
  source 1..75: mol_type = other DNA
ggaaaatcggcagattgcagagcaggaacgccagcgttgcaaggcaatgggcgttgacgttaaccgtgtgtactc

SEQ ID NO: 187484 - DNA, 75 bp, synthetic construct
  source 1..75: mol_type = other DNA
gatatcctctttagcgctacgggcgtgacgggcggcgagctggtgaacggtatccaacagacggcgaatggggtg

SEQ ID NO: 187485 - DNA, 75 bp, synthetic construct
  source 1..75: mol_type = other DNA
tgactgggaagctcagtaccagtgcacaattgcacacattctgaagatgagggagatgtatcgggatgtgacgga

SEQ ID NO: 187486 - DNA, 75 bp, synthetic construct
  source 1..75: mol_type = other DNA
gaggtggcccgcaggagaaaatgccgtttctctgtactgttcattgactgggaagctcagtaccagtgcactatt

SEQ ID NO: 187487 - DNA, 75 bp, synthetic construct
  source 1..75: mol_type = other DNA
gtcccaataaaccgcggcattatgaacgttatctgcagcgcatgaaggaaaggaggaaggaatggggcatactgt

SEQ ID NO: 187488 - DNA, 75 bp, synthetic construct
  source 1..75: mol_type = other DNA
ccgtgatatatggatatataacgccagaacccgagctatctacaatcccctgtatgacctgatgtaccgtgccgg

SEQ ID NO: 187489 - DNA, 75 bp, synthetic construct
  source 1..75: mol_type = other DNA
tgtgatgccggaaagaacggcagaacattaccgtaataaaattgctgtctacctgcgctggtatcagacgcgggg

SEQ ID NO: 187490 - DNA, 75 bp, synthetic construct
  source 1..75: mol_type = other DNA
ttactgggtggcccttcccctgaccacagtaaatggcgtctctcagtttcagccagaatggatatgttgggagcc

SEQ ID NO: 187491 - DNA, 75 bp, synthetic construct
  source 1..75: mol_type = other DNA
ccctggcagaacaggcggaagttgtgctggtggtcggttcgaaaaactcctccaactccaaccgtctggcggagc

SEQ ID NO: 187492 - DNA, 75 bp, synthetic construct
  source 1..75: mol_type = other DNA
tacaaaccgcagttgcaggaaggcagtggtcgtacccagactatccgcatgattctggttgtcacgaataccgaa

SEQ ID NO: 187493 - DNA, 75 bp, synthetic construct
  source 1..75: mol_type = other DNA
tgctgcacgttgttgatattcacactcctgacccggaatcgtctgtgcgaagtccggctgaaggacggatacagg

SEQ ID NO: 187494 - DNA, 75 bp, synthetic construct
  source 1..75: mol_type = other DNA
atccgggggaaggtttccgggaaatgacaaaggcacagtgggccgccctgccccgggactgtaaggccgtgcgca

SEQ ID NO: 187495 - DNA, 75 bp, synthetic construct
  source 1..75: mol_type = other DNA
tgacgcccgatcgcatcacggactacaaagcaccatcggcagaagaggccgccgtcgccagacaggccgcgaagc

SEQ ID NO: 187496 - DNA, 75 bp, synthetic construct
  source 1..75: mol_type = other DNA
tccaactccaaccgtctggcggaactggcccagcgtatgggcaaacgcgcgtttttgattgacgatgcgaaagat

SEQ ID NO: 187497 - DNA, 75 bp, synthetic construct
  source 1..75: mol_type = other DNA
ggtaaatttatggtaatggtcagctccaacggtgggcagcagcacattgccaaacaagatctggcaacgggaggc

SEQ ID NO: 187498 - DNA, 75 bp, synthetic construct
  source 1..75: mol_type = other DNA
cgcgacgaattatcctttcgcgcctgaaggccggggaagtcgacctgctggaagaagagctggggcatctgacaa

SEQ ID NO: 187499 - DNA, 75 bp, synthetic construct
  source 1..75: mol_type = other DNA
ttccctggcggcccgctgcgcgcagatgttcatcctgatgaagtggataactggctggcgctggactggcgtctg

SEQ ID NO: 187500 - DNA, 75 bp, synthetic construct
  source 1..75: mol_type = other DNA
attattatgatgcggcaaataaagaaattcgctgtgaggtgtcgtatccggtagggatggtgaatcaggacggat

SEQ ID NO: 187501 - DNA, 75 bp, synthetic construct
  source 1..75: mol_type = other DNA
ttagatcctctgcaatttgaaggcgcggatattttccctgagcaggattttgatgacgacatatcaatttcagtt

SEQ ID NO: 187502 - DNA, 75 bp, synthetic construct
  source 1..75: mol_type = other DNA
cttcacgcgaagtataaagaacgtccggacgttcgctggcgtcgtatcaaaaaaatcgaagctgatttgcgcaag

SEQ ID NO: 187503 - DNA, 75 bp, synthetic construct
  source 1..75: mol_type = other DNA
ccgggtagcaaagaaattgcacctgaaaaagcagtgttgattgaaatgcctgagcttcctgtacgtcactggcgt

SEQ ID NO: 187504 - DNA, 75 bp, synthetic construct
  source 1..75: mol_type = other DNA
taaccctgcttaccaatgtacggttgcagcgacttaacctcgcgccagaatatcagtacttcggcgatggtagcc

SEQ ID NO: 187505 - DNA, 75 bp, synthetic construct
  source 1..75: mol_type = other DNA
gcagtcgtacagatatggttgagctgcaactcaatgatgataatggcctgttgatccgtgatgaggttgccgcgc

SEQ ID NO: 187506 - DNA, 75 bp, synthetic construct
  source 1..75: mol_type = other DNA
acagccaactgttgagccgcgatgatggttccatgatgttggtgctgcctcaggagtgtcgggaacacgccggag

SEQ ID NO: 187507 - DNA, 75 bp, synthetic construct
  source 1..75: mol_type = other DNA
aatcctcgttctgccagccagcacagcaaggtccgctttaagaatgccgatgccatcggcttcccggcgggtgat

SEQ ID NO: 187508 - DNA, 75 bp, synthetic construct
  source 1..75: mol_type = other DNA
agaagaagggtcgaatcttaagataagaaaactggtagctaatttagatgaagcaaaacgtaaggcaaaggctgc

SEQ ID NO: 187509 - DNA, 75 bp, synthetic construct
  source 1..75: mol_type = other DNA
gggcgcatattgcccatttcatggagaaattcttcgtaaactggatcaaaggaatgaagttcagagggttaaact

SEQ ID NO: 187510 - DNA, 75 bp, synthetic construct
  source 1..75: mol_type = other DNA
ttgagggcgaatggtgcaaacggtgtcatacagtatcgttataaaatgaactgtctttcttgccggactaccagt

SEQ ID NO: 187511 - DNA, 75 bp, synthetic construct
  source 1..75: mol_type = other DNA
cattgatcggttcattcgtgaaaaagagtgcatagcacttaccacgctggcaaactcaacacgctggaaaatgga

SEQ ID NO: 187512 - DNA, 75 bp, synthetic construct
  source 1..75: mol_type = other DNA
ttggtagcgcaacccgccgctgccgaagtggatgaatttgctcttgatgtagatgtttattctgaagatgaagac

SEQ ID NO: 187513 - DNA, 75 bp, synthetic construct
  source 1..75: mol_type = other DNA
ttcaacgacatgttaatgccctggttttaggtctgtttttacgagctgaagttcctgatgcgacaaaactgagtt

SEQ ID NO: 187514 - DNA, 75 bp, synthetic construct
  source 1..75: mol_type = other DNA
ctcgggtacagcggcacgatgaaagtgacgcccgatcgcatcacggactacaaagcaccatcggcagaagaggcc

SEQ ID NO: 187515 - DNA, 75 bp, synthetic construct
  source 1..75: mol_type = other DNA
caccaaaagcggttaaggcggtaatggatgaaacgaacaagaaagccccattaaacagcccggcactgaccggaa

SEQ ID NO: 187516 - DNA, 75 bp, synthetic construct
  source 1..75: mol_type = other DNA
atgattttcccggtggtgctggtggtaatggtgatataccagcgttacagcacgccgattgtccgtcgtgtgcgc

SEQ ID NO: 187517 - DNA, 75 bp, synthetic construct
  source 1..75: mol_type = other DNA
agtggcaaccgttctgcgtagcgccgcactggtgggcgcgatgctggtagcgatgttcagcctcgactggcggat

SEQ ID NO: 187518 - DNA, 75 bp, synthetic construct
  source 1..75: mol_type = other DNA
gcgcacctggggcgtaccgatgtcactgttcgtgcataaagacacggaagagctgcatccgcgtaccctcgaact

SEQ ID NO: 187519 - DNA, 75 bp, synthetic construct
  source 1..75: mol_type = other DNA
tggtggcatttcctacaggtcggctcgtgatggttatgggtttgaattaggttggtcagatttctataccacgac

SEQ ID NO: 187520 - DNA, 75 bp, synthetic construct
  source 1..75: mol_type = other DNA
ccagatggtaagcctgttcgcctgactcatatggccgtgggcgacggtggcggcacgttgcccacaccagacagt

SEQ ID NO: 187521 - DNA, 75 bp, synthetic construct
  source 1..75: mol_type = other DNA
ggccggtattccgctgcaccgacctcgttctgtcaaacaggccagagaagtggctgactgtattctcaggcgtgt

SEQ ID NO: 187522 - DNA, 75 bp, synthetic construct
  source 1..75: mol_type = other DNA
acaaaacgccgatcatcttccgcgcgacaccgcagtggttcgtcagcatggatcagaaaggtctgcgtgcgcagt

SEQ ID NO: 187523 - DNA, 75 bp, synthetic construct
  source 1..75: mol_type = other DNA
tcttggcacggtgaaaggtgccgagctggaactgttgcgctttacccatccgtttatggacttcgatgttccggc

SEQ ID NO: 187524 - DNA, 75 bp, synthetic construct
  source 1..75: mol_type = other DNA
ctgcgccagggcgtggcaatggtgcagcaagatccggtggtgctggcggataccttcctcgccaacgtgacgctg

SEQ ID NO: 187525 - DNA, 75 bp, synthetic construct
  source 1..75: mol_type = other DNA
accggcagtggcaaaagtaccctcgccagtttattgatgggctattacccgctaacggaaggtgagattcgcctt

SEQ ID NO: 187526 - DNA, 75 bp, synthetic construct
  source 1..75: mol_type = other DNA
ctgaaacactggccgcgacatcgaaagctgttaaggcggtaatggatgaaacgaacaagaaagcgcccttaaata

SEQ ID NO: 187527 - DNA, 75 bp, synthetic construct
  source 1..75: mol_type = other DNA
gggatctcgatgcgaaagagatcctcggcgacgaagctgaccagtacgtgaaagtgccggatactctcgacgtat

SEQ ID NO: 187528 - DNA, 75 bp, synthetic construct
  source 1..75: mol_type = other DNA
tggactatgaaaatggttcctggtggcaggagctggatgcggacaataaggtcaccaccaaagtctgggacggca

SEQ ID NO: 187529 - DNA, 75 bp, synthetic construct
  source 1..75: mol_type = other DNA
tgagaaatacttctggagcgaagaagagcagatgtgcctggagtcctgggacgaagccttcagcaaaaccgaaga

SEQ ID NO: 187530 - DNA, 75 bp, synthetic construct
  source 1..75: mol_type = other DNA
gatggttcaagccgccctacgctgtcgctgagtgcactgctgaaacagtatggtatccgccttacggctaatcag

SEQ ID NO: 187531 - DNA, 75 bp, synthetic construct
  source 1..75: mol_type = other DNA
ctgaacgaagggtttaaattcaccaacccgaacgtcaaagatgagtgtggttgcggcgaaagtttccacgtttga

SEQ ID NO: 187532 - DNA, 75 bp, synthetic construct
  source 1..75: mol_type = other DNA
atgtcgattacactgagcgacagtgcagcagcgcgagtaaatacctttctggctaaccgcggcaaagggtttggc

SEQ ID NO: 187533 - DNA, 75 bp, synthetic construct
  source 1..75: mol_type = other DNA
tcccgcaaatccgcgtgagacgcagccgcatttcttcgaatcccgattccctgagctgttaaagctgctcgatac

SEQ ID NO: 187534 - DNA, 75 bp, synthetic construct
  source 1..75: mol_type = other DNA
gcagaacgctcaggcgcaaccggagcctcagcagccgtctgaacccgcgtatgacttcgatgacgatattccgtt

SEQ ID NO: 187535 - DNA, 75 bp, synthetic construct
  source 1..75: mol_type = other DNA
ttattacgccgaaccgactgagttgtttcttacgtgcggaacaagcacctttgaacttattgttctaccaaaata

SEQ ID NO: 187536 - DNA, 75 bp, synthetic construct
  source 1..75: mol_type = other DNA
tgccacgaactgacggtttacatggtcgcctgcggcaacggctttccggctgatggtcgtacggacctttttacc

SEQ ID NO: 187537 - DNA, 75 bp, synthetic construct
  source 1..75: mol_type = other DNA
cactgagtgcactgctgaaacagtatggtatacgcctgacggctaatcaggcatatcaccagatggtgaaactgg

SEQ ID NO: 187538 - DNA, 75 bp, synthetic construct
  source 1..75: mol_type = other DNA
gcacagtaccagaatgtctttatcgaggatgatcagggaacgcattttcgcctggttgtccgtcaggatggcacg

SEQ ID NO: 187539 - DNA, 75 bp, synthetic construct
  source 1..75: mol_type = other DNA
cctggttgtccgtaataacggtgcaatggtctggcgtacaatggtctggcgtcggtgcaatggtctggcgtacct

SEQ ID NO: 187540 - DNA, 75 bp, synthetic construct
  source 1..75: mol_type = other DNA
aattgctgtctacctgcgctggtatcagacccggggctttccggatgacattcctgatgaacaggagaatgactt

SEQ ID NO: 187541 - DNA, 75 bp, synthetic construct
  source 1..75: mol_type = other DNA
gggaaatgtaccatgatgtgacggaaaccttttactgggtggcgcttcccctgaccacggtaaacggtgtctcgc

SEQ ID NO: 187542 - DNA, 75 bp, synthetic construct
  source 1..75: mol_type = other DNA
aatggctgcttgatacattcccttctgtctgtttgtccttttccggaggaaaggactcaaccgtactcttccatc

SEQ ID NO: 187543 - DNA, 75 bp, synthetic construct
  source 1..75: mol_type = other DNA
ttttaacccgctatcgctttccgggccgcacgctgcttgatgcgctgatggatttaccctttgcgctgccaacgg

SEQ ID NO: 187544 - DNA, 75 bp, synthetic construct
  source 1..75: mol_type = other DNA
ttatcctgacgatattccggatgagcaggaaaatgacatgggaggtcgtgatatcccctcctggcgcagaatctg

SEQ ID NO: 187545 - DNA, 75 bp, synthetic construct
  source 1..75: mol_type = other DNA
atgagttatccggtacagaaaaaaataaaaacaggtgaaaatgttcttcgggctgctgtggaacggattaactgg

SEQ ID NO: 187546 - DNA, 75 bp, synthetic construct
  source 1..75: mol_type = other DNA
ccagcggggcactttatgccaatgaaagcggggcttattttgccctgcgtaagcgcatatcaaaaccagcccatc

SEQ ID NO: 187547 - DNA, 75 bp, synthetic construct
  source 1..75: mol_type = other DNA
tgtgtcgttacgcaacatgcgtgtctgtgagccttttggcccggaacagcgtaaggggctgtggctttaccatgt

SEQ ID NO: 187548 - DNA, 75 bp, synthetic construct
  source 1..75: mol_type = other DNA
tctgcgctggtatcagacgcggggcttcccggatgacattcccgatgaacaggagaatgacctgggctgccggga

SEQ ID NO: 187549 - DNA, 75 bp, synthetic construct
  source 1..75: mol_type = other DNA
gctatctacaatcccctgtatgacctgatgtaccgtgccggcgtaccgttacgcaacatgcgtgtctgtgaacct

SEQ ID NO: 187550 - DNA, 75 bp, synthetic construct
  source 1..75: mol_type = other DNA
tgtgctgctccatcttacggccgatgtggctcgcaggaagaaacgtcgtttctctgtattattcattgactggga

SEQ ID NO: 187551 - DNA, 75 bp, synthetic construct
  source 1..75: mol_type = other DNA
tatcgccgggaatatcgcctggaagacggaagtgacgtcgctgatgatttttgtgcgcttgcaggagtttgatta

SEQ ID NO: 187552 - DNA, 75 bp, synthetic construct
  source 1..75: mol_type = other DNA
acgatgtctgaatacaaagaggaatatcgcaggctaagaaccgatggttcaccgttgagtgaagccaagaaattt

SEQ ID NO: 187553 - DNA, 75 bp, synthetic construct
  source 1..75: mol_type = other DNA
cggaccctgtccttcagcccaaacaaaccccgtcactatgaacgttatctgcaaagaatgaaagagaggagaaag

SEQ ID NO: 187554 - DNA, 75 bp, synthetic construct
  source 1..75: mol_type = other DNA
tgtggctttaccatgttctggagccggaaacttgggccaggatgtgtgagcgggtgtcgggtgctgccagcgggg

SEQ ID NO: 187555 - DNA, 75 bp, synthetic construct
  source 1..75: mol_type = other DNA
aagatatcccgtcatggcgacgtatctgtaagactcttataaagaatgatttctggtgccggaccctctccttca

SEQ ID NO: 187556 - DNA, 75 bp, synthetic construct
  source 1..75: mol_type = other DNA
tgtctttttccggaggaaaggattctactgtactctttcaccttgtggccggtgtggcacgcaggaaaaaacgtc

SEQ ID NO: 187557 - DNA, 75 bp, synthetic construct
  source 1..75: mol_type = other DNA
aagcgtatcacgaagccgcctcatcatacctggcgcagctatgcgatgttcctgctggatgtgatgccggaaaga

SEQ ID NO: 187558 - DNA, 75 bp, synthetic construct
  source 1..75: mol_type = other DNA
ctgaccacggttaacggtgtctcgcagtttcagccggagtggatatgctgggagtctggtgtgacctgggttcgc

SEQ ID NO: 187559 - DNA, 75 bp, synthetic construct
  source 1..75: mol_type = other DNA
tgccatgacatttgaagaattcattccggctttttcatcctggatggccagaagtaaacgtgggctggcagtgct

SEQ ID NO: 187560 - DNA, 75 bp, synthetic construct
  source 1..75: mol_type = other DNA
gtgatcctcgcggcgtcactgctgctgctgttctcaattaacacactgcaaagtcgctttggtcggcgtgtggta

SEQ ID NO: 187561 - DNA, 75 bp, synthetic construct
  source 1..75: mol_type = other DNA
cagatgttaatgtattacatgcggccattcaccgtattgagtggttgtttgagacattttcatctgtttgtttgt

SEQ ID NO: 187562 - DNA, 75 bp, synthetic construct
  source 1..75: mol_type = other DNA
tttagtccgaataagccccgacattatgagcgctacctggccagaatgcgtgaaaaaaggaaagagtggggaata

SEQ ID NO: 187563 - DNA, 75 bp, synthetic construct
  source 1..75: mol_type = other DNA
ccgaacaaaccccggcactatgaacgttacctgcagcgtatgaaagaaaggaggaaggaatgggggattctgtga

SEQ ID NO: 187564 - DNA, 75 bp, synthetic construct
  source 1..75: mol_type = other DNA
cctggcagggctggctgtatctggcggtggttatcgatctcttcgcccgtaacgtggtgggctggtcgatgaagc

SEQ ID NO: 187565 - DNA, 75 bp, synthetic construct
  source 1..75: mol_type = other DNA
acagaataaaacaggtggtgactttaaggaaatagacctgctgacccggcagcttaaaaaactgcatgatggcca

SEQ ID NO: 187566 - DNA, 75 bp, synthetic construct
  source 1..75: mol_type = other DNA
tcaacgtactggcgggctggatatggtcccggcggcgattgttcacggttttattctcagcctgttagtacctat

SEQ ID NO: 187567 - DNA, 75 bp, synthetic construct
  source 1..75: mol_type = other DNA
ccatcagcaagaaaaactcccgtcgcgtattgcgatggcgctggagtcgctaaaactgtgcggcgtagtagtgat

SEQ ID NO: 187568 - DNA, 75 bp, synthetic construct
  source 1..75: mol_type = other DNA
aaatagttcaaacagtggaggaattgtcaaattttggagtgataacacatctttctgatggtaatatggtcatca

SEQ ID NO: 187569 - DNA, 75 bp, synthetic construct
  source 1..75: mol_type = other DNA
ggttcaaaagtctaagctacccagatatatcttctaaaatcattatattttaccgtggtaacaatatggatttcg

SEQ ID NO: 187570 - DNA, 75 bp, synthetic construct
  source 1..75: mol_type = other DNA
tcctgccgctctcgtcacagttcacttcagcggaagattactggtccacattactgcatgaactggtacacagta

SEQ ID NO: 187571 - DNA, 75 bp, synthetic construct
  source 1..75: mol_type = other DNA
gggggtgagggaagtctggctcgggtatgacgccaacggcagcagcgggaagggggactgcggggcgctgtcggt

SEQ ID NO: 187572 - DNA, 75 bp, synthetic construct
  source 1..75: mol_type = other DNA
cgcgcctgatccagctcaccacaaaaacagagaaaagcggcagcgattttaaggaaattgaccttctcacgcgcc

SEQ ID NO: 187573 - DNA, 75 bp, synthetic construct
  source 1..75: mol_type = other DNA
ccttctggatcagtaatttcatcaaactgcgctcagtggccgcaggcatggcgacacaaaaaggactgcgccgca

SEQ ID NO: 187574 - DNA, 75 bp, synthetic construct
  source 1..75: mol_type = other DNA
ttaaaagttattaatcagctattaagctggatggtttaccttattctcttttttatgggtatcagtctggcgttt

SEQ ID NO: 187575 - DNA, 75 bp, synthetic construct
  source 1..75: mol_type = other DNA
atcgtggtgagcttgacctggttggtgcattcaactctgtccgcaagatcgttacccctggcggtgttgtcactt

SEQ ID NO: 187576 - DNA, 75 bp, synthetic construct
  source 1..75: mol_type = other DNA
agcggtttatcagctggttaaaaagcatttcccggcagcggtttgttaccagttctcaccgtccagcaaacgaat

SEQ ID NO: 187577 - DNA, 75 bp, synthetic construct
  source 1..75: mol_type = other DNA
gaattcggcatttctgaccagcaggctaagtttgcgatgctggttgctcaggggaaaaagccgacagaggcatac

SEQ ID NO: 187578 - DNA, 75 bp, synthetic construct
  source 1..75: mol_type = other DNA
gagaatcacctctatcagtggcgcgatatagcagaatttgacagggctgccgcgcaggcatccaaagatggtaaa

SEQ ID NO: 187579 - DNA, 75 bp, synthetic construct
  source 1..75: mol_type = other DNA
tctcaggaaaaaaagccagtattcgatgcgtacctgaatgagggcgatgcggaagaaatttcgttctgtcccgat

SEQ ID NO: 187580 - DNA, 75 bp, synthetic construct
  source 1..75: mol_type = other DNA
tgctgttcggcaaactggcggaagtggccagtgaatacctgcgaaaaggggctcaggtgtacatcgagggtcagc

SEQ ID NO: 187581 - DNA, 75 bp, synthetic construct
  source 1..75: mol_type = other DNA
tatcgtgctatcagctacttccgcaatcagtaccagaaacgctataccgcagacctggatttactggtgagccag

SEQ ID NO: 187582 - DNA, 75 bp, synthetic construct
  source 1..75: mol_type = other DNA
cagctacttccgcaatcagtaccagaaacgctataccgcagacctggatttactggtgagtcagttgatggccat

SEQ ID NO: 187583 - DNA, 75 bp, synthetic construct
  source 1..75: mol_type = other DNA
ccggcgtgaattgttgcgtttgctttctgctggcggggctttatgtgcagataagcggctacaggaactggaaat

SEQ ID NO: 187584 - DNA, 75 bp, synthetic construct
  source 1..75: mol_type = other DNA
aagtggaaagtggaaactcggaaactgacaactcgccacctccccaaagaacaggcgggcacaaatcaaaaaata

SEQ ID NO: 187585 - DNA, 75 bp, synthetic construct
  source 1..75: mol_type = other DNA
atgcgtacctgaatgagggcgatgcggaagaaatttcgttctgtcctgatgaattcggtatttcagaccagcagg

SEQ ID NO: 187586 - DNA, 75 bp, synthetic construct
  source 1..75: mol_type = other DNA
tgttaactgccgttattgctggggggagaatcacctctaccagtggcgagatatagcagaatttgacagggcagc

SEQ ID NO: 187587 - DNA, 75 bp, synthetic construct
  source 1..75: mol_type = other DNA
acaacgccacagcggcggtgtatcagaaagttgtgacactggaagataaactggtggagaaacctgtcacgggga

SEQ ID NO: 187588 - DNA, 75 bp, synthetic construct
  source 1..75: mol_type = other DNA
acaaaacgttgatgatacatatgtcgttttcattattggtgaaaccacgcgctgggatcatatgggcattttcgg

SEQ ID NO: 187589 - DNA, 75 bp, synthetic construct
  source 1..75: mol_type = other DNA
tcaattatctgattgcttagcaaacttaacatgtcatgtagaaatagattttttaggtcttggtaaaatattttt

SEQ ID NO: 187590 - DNA, 75 bp, synthetic construct
  source 1..75: mol_type = other DNA
gctggcgaatcaattagcgacggcggactgttcgggcgcggaccagctgcgcgcagaaaattatttacgtgcggc

SEQ ID NO: 187591 - DNA, 75 bp, synthetic construct
  source 1..75: mol_type = other DNA
tccatgagtctctccgacaaaccggttattgagaattatgagagcggtggaagcaaagcccagctgccgaatgtg

SEQ ID NO: 187592 - DNA, 75 bp, synthetic construct
  source 1..75: mol_type = other DNA
aacaccagaaaagacgccgttgctgaacaacaacgggcccgggaaatgatcgctgatctgcgaaaccggacaccg

SEQ ID NO: 187593 - DNA, 75 bp, synthetic construct
  source 1..75: mol_type = other DNA
ctgggtcaagaacaggagtttttggcgtgggtgaaagttacccttgcgccgctacctcgctttattcgcctgcgt

SEQ ID NO: 187594 - DNA, 75 bp, synthetic construct
  source 1..75: mol_type = other DNA
gagcaggagtttttcgcgtgggttgaagatactctcaagccactacctacatttattcgccgccgcgtttcatcc

SEQ ID NO: 187595 - DNA, 75 bp, synthetic construct
  source 1..75: mol_type = other DNA
gctggcgaatcaaatagcgacggcagactgttcggacgcggaccagttgcgtgcagaaaattatttacgtgtggc

SEQ ID NO: 187596 - DNA, 75 bp, synthetic construct
  source 1..75: mol_type = other DNA
gcgcaataatgaaatgagtcgtcaggttgtgctgaacgttgaaatcctgagtatcaagaaatcaagccaggaaca

SEQ ID NO: 187597 - DNA, 75 bp, synthetic construct
  source 1..75: mol_type = other DNA
gacctgaaaagcgaagtttcctcaatgctgacaccaggcacagggcgcatgtatctgtccactggttcactgaca

SEQ ID NO: 187598 - DNA, 75 bp, synthetic construct
  source 1..75: mol_type = other DNA
ggtagatggttatcgccgacccatattactgagccgtagtgagcacaatattctgtttgattttgcacgttcacg

SEQ ID NO: 187599 - DNA, 75 bp, synthetic construct
  source 1..75: mol_type = other DNA
gtacagtatcactgtgggtgagtgcaccgaatataaccgagctagagcggaaagctatttaaaagccgcgtatgc

SEQ ID NO: 187600 - DNA, 75 bp, synthetic construct
  source 1..75: mol_type = other DNA
gaatctccagagcaatttgaaatcggcaaattaaggtgggaacagaaaaaagagattgctgaaggcctgaaaatc

SEQ ID NO: 187601 - DNA, 75 bp, synthetic construct
  source 1..75: mol_type = other DNA
tcaaaaagttaaacccgctttaccatgtatttgatacccttaacggtttagttgagagattcaacaggctgccgg

SEQ ID NO: 187602 - DNA, 75 bp, synthetic construct
  source 1..75: mol_type = other DNA
gaagtacatcagtaagaatattgacggctacgcgctcgacggcgaaacggatgacgagagcggcaggccactgaa

SEQ ID NO: 187603 - DNA, 75 bp, synthetic construct
  source 1..75: mol_type = other DNA
gtgcgatggccacgctgaatggcctgacgcagacctacttttccacgccgtcatcggagatgcacgaggcgtttc

SEQ ID NO: 187604 - DNA, 75 bp, synthetic construct
  source 1..75: mol_type = other DNA
aggcatacgcctactggaacggcgaccgctggaacgagaaaaaggccacgcataaacgccagcgtttttctgtgg

SEQ ID NO: 187605 - DNA, 75 bp, synthetic construct
  source 1..75: mol_type = other DNA
gatgtttcacatgcgcatctgaaggggggcgtgctctttcctgacgaaacatggcggcagattgtcactattgag

SEQ ID NO: 187606 - DNA, 75 bp, synthetic construct
  source 1..75: mol_type = other DNA
ccggactggaacccgtttgcaccccgcccgctgggtaatcgccctgtctgggttagctatgaccccaacggcagc

SEQ ID NO: 187607 - DNA, 75 bp, synthetic construct
  source 1..75: mol_type = other DNA
ggcatgggcaactatgcagggcatttacaacgaaccgatcggcgcggaagtgaccggcgataacggcagttttgt

SEQ ID NO: 187608 - DNA, 75 bp, synthetic construct
  source 1..75: mol_type = other DNA
caccttcacgctgtcatcaaaacggtcgctggtactgaaaatgctgcaaataatgcgtgccgggcggtgggaata

SEQ ID NO: 187609 - DNA, 75 bp, synthetic construct
  source 1..75: mol_type = other DNA
acgtacgatggtgcactggtggtcgcagaaagaacgcggtggcgttgtttccgtctggaactgtgcgcataacgt

SEQ ID NO: 187610 - DNA, 75 bp, synthetic construct
  source 1..75: mol_type = other DNA
tgagcaggccagggcggagagctatctaaaagttgctcaagaattgaggcagcaggaaagggatatgcctgctgt

SEQ ID NO: 187611 - DNA, 75 bp, synthetic construct
  source 1..75: mol_type = other DNA
aggtctggtgatgcccgctgctcacatcccaccaattgaaacccgcctgcatacctaccgcattgtgcgtaagaa

SEQ ID NO: 187612 - DNA, 75 bp, synthetic construct
  source 1..75: mol_type = other DNA
tcaccgacttatctgaaagaggttaagcacttcgcgctggataaatcgtcctgggcttacttcctttatgaatat

SEQ ID NO: 187613 - DNA, 75 bp, synthetic construct
  source 1..75: mol_type = other DNA
tcgtaccatggtgcactggtggtcacagaaagaacgtggcggcattgtatcggtgtggaactgtgcgcataacgt

SEQ ID NO: 187614 - DNA, 75 bp, synthetic construct
  source 1..75: mol_type = other DNA
gcaatgccttacctggtggagcagggattctcgcgtggcgatttaggttttgcgctttcagggatctcaatcgcc

SEQ ID NO: 187615 - DNA, 75 bp, synthetic construct
  source 1..75: mol_type = other DNA
ggtaaaatttcttgctgtcggcgatgatttccgctttggcgctggtcgtgaaggcgatttcttgttattacagaa

SEQ ID NO: 187616 - DNA, 75 bp, synthetic construct
  source 1..75: mol_type = other DNA
ttattacattccgcatgcatctctctacctggcttgcgctggcgtcctggtgttcattggcgcgctggatgaccg

SEQ ID NO: 187617 - DNA, 75 bp, synthetic construct
  source 1..75: mol_type = other DNA
gatggtctggatgtcagataaatatctggaaaatccggtcaatgcgcaggcatttgcgcagctgaaaaaagaagc

SEQ ID NO: 187618 - DNA, 75 bp, synthetic construct
  source 1..75: mol_type = other DNA
cactgcaaccccgtgaagccgatctccatccactggccggcggcgagcgggtgctggaagtgcgtggtgaatatc

SEQ ID NO: 187619 - DNA, 75 bp, synthetic construct
  source 1..75: mol_type = other DNA
gccgcgcgttacgccagaccatatcgagagcattattgctcaggaggcatatttcacagcagaagatggtgtctt

SEQ ID NO: 187620 - DNA, 75 bp, synthetic construct
  source 1..75: mol_type = other DNA
ccaatcacggcaagctcagcggcgaaatactgtaccggttggtggggcaaggcaagaagctgttccgctggcggc

SEQ ID NO: 187621 - DNA, 75 bp, synthetic construct
  source 1..75: mol_type = other DNA
ttcgcaccgtggagacgcggcgggtgcaggggctggagtttgaggcgcaggcgaaggtgattgaagagttcacct

SEQ ID NO: 187622 - DNA, 75 bp, synthetic construct
  source 1..75: mol_type = other DNA
acctgaatatcctgattggctgcggtgttgacggatacgacgactggaaagactggaaaccttttgctccccgcc

SEQ ID NO: 187623 - DNA, 75 bp, synthetic construct
  source 1..75: mol_type = other DNA
acgcacgtttcatgactctgctgtggaaaaccatcaaggcgggacatatcgatgtcggtctctttcgggcggcca

SEQ ID NO: 187624 - DNA, 75 bp, synthetic construct
  source 1..75: mol_type = other DNA
cgttccgtggttactcctgtgataccgcaaccaaactctcactgcgttgcatgtttgtacgtcagggggcgcgga

SEQ ID NO: 187625 - DNA, 75 bp, synthetic construct
  source 1..75: mol_type = other DNA
tccacgccatccaccgaaacgcacgaggcatacgtctattggaacggcgaccgctggaacgagaaaaaggccgcg

SEQ ID NO: 187626 - DNA, 75 bp, synthetic construct
  source 1..75: mol_type = other DNA
taatgcgtgccgggcggtgggaatacgatcggccgaacgcgagctggtcgcggcctttaacgccgtgcgtaaggt

SEQ ID NO: 187627 - DNA, 75 bp, synthetic construct
  source 1..75: mol_type = other DNA
agtgcggggtgaatatctgcccatcgtcgaactgtggaaagtgttcaacgtcgcgggcgcgaaaaccgaagccac

SEQ ID NO: 187628 - DNA, 75 bp, synthetic construct
  source 1..75: mol_type = other DNA
actttcatacatttttgatgttgtttctggtatcgttagttcttattagtgcaaaaataaagtcgaatggcctgt

SEQ ID NO: 187629 - DNA, 75 bp, synthetic construct
  source 1..75: mol_type = other DNA
ctttccgcgttggcggcgatgccgggaggtcgcttacaagtgaaatccattgccactgcgcagctcatgcaagga

SEQ ID NO: 187630 - DNA, 75 bp, synthetic construct
  source 1..75: mol_type = other DNA
gtgaaggggaatttgggcacggctacgcaatttgcctctcatgtggtcgggcagaatctcaaactcaaccccagc

SEQ ID NO: 187631 - DNA, 75 bp, synthetic construct
  source 1..75: mol_type = other DNA
tcgcccgggccgggttctacgcgtggctgcataacccggtctcggcacgtgataaagataatcagcgtctgctga

SEQ ID NO: 187632 - DNA, 75 bp, synthetic construct
  source 1..75: mol_type = other DNA
actttcgtacatttttgatgttatttctggtatcgttagttcttattagtgcaaaaataaagtcgaatggcctgt

SEQ ID NO: 187633 - DNA, 75 bp, synthetic construct
  source 1..75: mol_type = other DNA
actttcttacatttttgatgttttttctggtatcgttagttcttattagtgcaaaaataaagtcgaatggcctgt

SEQ ID NO: 187634 - DNA, 75 bp, synthetic construct
  source 1..75: mol_type = other DNA
gcaggcccgcgaaattgcgatccgctgtcatgaacggcagattcagcatcagcaacgctgggttaaccactatca

SEQ ID NO: 187635 - DNA, 75 bp, synthetic construct
  source 1..75: mol_type = other DNA
cccgatcgcatcacggactacaaagcaccatcggcagaagaggctgccgtcgccagtcaggccgcgaagcgtccg

SEQ ID NO: 187636 - DNA, 75 bp, synthetic construct
  source 1..75: mol_type = other DNA
ccgccggtagtcaactatccgggggaaggtttccgggaaatgacaaaggcgcagtgggccgccctgccccgggac

SEQ ID NO: 187637 - DNA, 75 bp, synthetic construct
  source 1..75: mol_type = other DNA
catgcctgcacaacttccctggaaagatccacgtgttcttgtaccgtcttcggtgtgggtttctttacccgatgc

SEQ ID NO: 187638 - DNA, 75 bp, synthetic construct
  source 1..75: mol_type = other DNA
aggttgatatccgctggagaagccaacttgcgatactgttggaaaatatcgaagcgttgaaggcggataacagcg

SEQ ID NO: 187639 - DNA, 75 bp, synthetic construct
  source 1..75: mol_type = other DNA
cctgcgagtaccgcagcaagttgaacggctggcaaacacgcgagcgcgagctgttgccccgggtaatgaccttag

SEQ ID NO: 187640 - DNA, 75 bp, synthetic construct
  source 1..75: mol_type = other DNA
gaagcgggcgcggcctggaagcgatgaagtgggtcgttgtggtggcattgctcttggtggcgattgtcggcaact

SEQ ID NO: 187641 - DNA, 75 bp, synthetic construct
  source 1..75: mol_type = other DNA
ggagtgcacatgcctatgaaatacaaaagctgatcgatgcggcaaaagcaggcgacgttgagtcacagagtgctt

SEQ ID NO: 187642 - DNA, 75 bp, synthetic construct
  source 1..75: mol_type = other DNA
acgcgttaagaatggacgaatcagatggcttacagaggaggaatcgaagcgcctgtttgcagaaattgctcctca

SEQ ID NO: 187643 - DNA, 75 bp, synthetic construct
  source 1..75: mol_type = other DNA
acgattgcaacaacttttgagcttagcggacaagacatcatcaatctcaagaaacaggcagagatttctcaaccg

SEQ ID NO: 187644 - DNA, 75 bp, synthetic construct
  source 1..75: mol_type = other DNA
aaagcaaaaggtacgttccgttcgccttcaaaacagcaaaatgccaaatctgacactcagcgacttattgctaaa

SEQ ID NO: 187645 - DNA, 75 bp, synthetic construct
  source 1..75: mol_type = other DNA
tgctggcattaactttgctttttaactctggattcgttaacgcagacaataaacaaacgctgatagaagccgcta

SEQ ID NO: 187646 - DNA, 75 bp, synthetic construct
  source 1..75: mol_type = other DNA
aaccattctctctaacataacaacagaaaaaataatggaggcggtagacgggatggaaaaccgccgccatcgcct

SEQ ID NO: 187647 - DNA, 75 bp, synthetic construct
  source 1..75: mol_type = other DNA
gcgttaaagcgggcgggcattagcaacttccgcttccatgacctgaggcatacctgggcaagctggctggttcag

SEQ ID NO: 187648 - DNA, 75 bp, synthetic construct
  source 1..75: mol_type = other DNA
ggtttgttgataacgccatacccaattcggactgcccgaagtgctacggtgagggaacagggcagctttatatgg

SEQ ID NO: 187649 - DNA, 75 bp, synthetic construct
  source 1..75: mol_type = other DNA
acagggcgcccaaaatatcaacaccacgcgttaagaatggacgaatcagatggcttacagaggaggaatcgaagc

SEQ ID NO: 187650 - DNA, 75 bp, synthetic construct
  source 1..75: mol_type = other DNA
cgaaatggttcaaagatacgcccacctttcagccgggcatctcaccgagcacgcaagcaaaatcgatgcgattat

SEQ ID NO: 187651 - DNA, 75 bp, synthetic construct
  source 1..75: mol_type = other DNA
gaaaacagcaggggctccataagagatgggtatttgtccacaccaaacctgcctaccgaagcgacggaacaaaaa

SEQ ID NO: 187652 - DNA, 75 bp, synthetic construct
  source 1..75: mol_type = other DNA
atgtatgctatttgtgtagttgaccgcacgggcgcttttacattatttgacgactatgaaatcaaagatcttacc

SEQ ID NO: 187653 - DNA, 75 bp, synthetic construct
  source 1..75: mol_type = other DNA
tggttttaagaaagggttaagtgatacaccggatattaaaattgttgctgaacagcctggtattacgcgggctga

SEQ ID NO: 187654 - DNA, 75 bp, synthetic construct
  source 1..75: mol_type = other DNA
ctctaaaggtgtacaggctgcgataattaaagccgacaaagctggtatccctgttatcactgttgatgttgctgc

SEQ ID NO: 187655 - DNA, 75 bp, synthetic construct
  source 1..75: mol_type = other DNA
gaagctaaaaaagataatgtcaatttaagcgtttctattgccaaccaggatttaaataagcaactttcagatgtc

SEQ ID NO: 187656 - DNA, 75 bp, synthetic construct
  source 1..75: mol_type = other DNA
agggcgtcctgtaaacgggtttcatcataaaaaaccaaccgtccggactgggacggaatgtactgaacagtggcc

SEQ ID NO: 187657 - DNA, 75 bp, synthetic construct
  source 1..75: mol_type = other DNA
taaaaccaatcacggcaagctcagcggcgaaatactgtactggttggtgggcaaggcaagaagctgttccgctgg

SEQ ID NO: 187658 - DNA, 75 bp, synthetic construct
  source 1..75: mol_type = other DNA
tacaatcggtggttgcacgcgttgatggctttaagaaaggattaagcgatacgccggatattaaaattgttgctg

SEQ ID NO: 187659 - DNA, 75 bp, synthetic construct
  source 1..75: mol_type = other DNA
aagtgatcctggctggtgaaatcactactccggtaactgttcgtggtctgcgtgttactaaaggcgctcgtgctg

SEQ ID NO: 187660 - DNA, 75 bp, synthetic construct
  source 1..75: mol_type = other DNA
tcgaagaccctgatttcaacgaagcgcgcaatgtcagcgcgctgttcctggtacgtgagtggttgaaggggcagg

SEQ ID NO: 187661 - DNA, 75 bp, synthetic construct
  source 1..75: mol_type = other DNA
gacttcaatgaagcgcgtaatgtcagcgcgctgttcctcgtgcgcgaatggttgaaagggcaggggcgagtgtaa

SEQ ID NO: 187662 - DNA, 75 bp, synthetic construct
  source 1..75: mol_type = other DNA
ggtaaaatttctggctgttggtgatgatttccgctttggcgctggtcgtgaaggtgatttcttgttattacagaa

SEQ ID NO: 187663 - DNA, 75 bp, synthetic construct
  source 1..75: mol_type = other DNA
gctaccccagaacgttcaggggggagaatggcagtcacgggcgatagccatgaacaaggccctggtctttggcac

SEQ ID NO: 187664 - DNA, 75 bp, synthetic construct
  source 1..75: mol_type = other DNA
acctcatacaccgcacggcctggggaaacccgttgtggaatgcactgcataacctgaacatcactggtctgtgtc

SEQ ID NO: 187665 - DNA, 75 bp, synthetic construct
  source 1..75: mol_type = other DNA
tttcaatgggagatgttcagcctaaggtttttgttcgcatttttgatggtaatagagttattttagttaaatcag

SEQ ID NO: 187666 - DNA, 75 bp, synthetic construct
  source 1..75: mol_type = other DNA
atgagaggatatatagtgcataataaactaaaatatggtctgttgatattttctttattcgctataacttgtaat

SEQ ID NO: 187667 - DNA, 75 bp, synthetic construct
  source 1..75: mol_type = other DNA
aagagcatgttattcgctcaggtgataccttctgttacaatgttagtgataactttatttttgcctgaatcgccg

SEQ ID NO: 187668 - DNA, 75 bp, synthetic construct
  source 1..75: mol_type = other DNA
tgacggcatacaccccgccgtttatgccggaaggccgtctgattgtcaccacgctggcgaaccttcacatctaca

SEQ ID NO: 187669 - DNA, 75 bp, synthetic construct
  source 1..75: mol_type = other DNA
gccgggaaaatggccggaagccatgcatccggcgacgtgaccattatcatgattgccgaaaacacccatgatctt

SEQ ID NO: 187670 - DNA, 75 bp, synthetic construct
  source 1..75: mol_type = other DNA
aaaagtaatcatttcatattttgactcctgccattctttaattaataaaaatgcaaaaagcatatacctcgagga

SEQ ID NO: 187671 - DNA, 75 bp, synthetic construct
  source 1..75: mol_type = other DNA
aggaagtgttggacttgctgatgggtatgttcagaaagtgtcgaaacatctttccatatattctgaaatttgtaa

SEQ ID NO: 187672 - DNA, 75 bp, synthetic construct
  source 1..75: mol_type = other DNA
atgctcgataaactcgacgccgccttacgttttcaacaagaggcgctcaatttgcgcgcccagcgtcaggaagtg

SEQ ID NO: 187673 - DNA, 75 bp, synthetic construct
  source 1..75: mol_type = other DNA
gacctcaacgcaacacattccggcgcaggcgctgacgcctccttccgcagaactgcaataccgtattccggacca

SEQ ID NO: 187674 - DNA, 75 bp, synthetic construct
  source 1..75: mol_type = other DNA
acgatttttattgctgtttgtaatgtgatcggtagttttatcgggatgattttgttcgatcgctatggacgaata

SEQ ID NO: 187675 - DNA, 75 bp, synthetic construct
  source 1..75: mol_type = other DNA
acacatatgccgatatgctgactagttgccgcgaaggcataaccggtaatccgggcttgttgctgaaagtaaatg

SEQ ID NO: 187676 - DNA, 75 bp, synthetic construct
  source 1..75: mol_type = other DNA
atgttcttatttatcaggggaaggttgggggtttatttcgtgaaagaaaaaatgaaagggttgctacagacattg

SEQ ID NO: 187677 - DNA, 75 bp, synthetic construct
  source 1..75: mol_type = other DNA
cctgctgcaggagttctggcgtcagcgcggcgaaattggcgaagatgagtcggcccacggtcagtatgtcagcgc

SEQ ID NO: 187678 - DNA, 75 bp, synthetic construct
  source 1..75: mol_type = other DNA
ggaaaaactgaataacgcgctggcagcaattaaagctgacggtacatatcagaaaatcagcgatcagtggttccc

SEQ ID NO: 187679 - DNA, 75 bp, synthetic construct
  source 1..75: mol_type = other DNA
acccgaattccgtcaacacccggatctggttgtactggtatcacagaacattatcgcagcagatacggtcagtat

SEQ ID NO: 187680 - DNA, 75 bp, synthetic construct
  source 1..75: mol_type = other DNA
gctggggagtgaaggcaacgagtacaagctttacgaagtggattccggttcattcctggactacaccaccctgac

SEQ ID NO: 187681 - DNA, 75 bp, synthetic construct
  source 1..75: mol_type = other DNA
tattgatggggtatttggtgacacagcggtggtaaacgaatggctgaaaaccaatccacaactgggcgttgctac

SEQ ID NO: 187682 - DNA, 75 bp, synthetic construct
  source 1..75: mol_type = other DNA
ttcgcccggataacaaagccctgctggagaaactgaataacgcactggcagccgttaaagcggatggtacgtatc

SEQ ID NO: 187683 - DNA, 75 bp, synthetic construct
  source 1..75: mol_type = other DNA
atgaaaaagttagttcttgccgcattacttgcttcctttactttcggtgcttctgccgcagagaaaatcaatttt

SEQ ID NO: 187684 - DNA, 75 bp, synthetic construct
  source 1..75: mol_type = other DNA
cagttcttcttactctcttcagcctgacaggctgtggtttgaaaggtccgctctattttccgcccgcagataaaa

SEQ ID NO: 187685 - DNA, 75 bp, synthetic construct
  source 1..75: mol_type = other DNA
ctgtattacttactctcttcagcctgacgggctgcggtctgaaaggtccgctctatttcccgcctgcagataaaa

SEQ ID NO: 187686 - DNA, 75 bp, synthetic construct
  source 1..75: mol_type = other DNA
ggaatatgtctggaacaaagccaaacgcaattattacgataaaggcgtgaaactgttctggctggatgaagccga

SEQ ID NO: 187687 - DNA, 75 bp, synthetic construct
  source 1..75: mol_type = other DNA
agtaccgactgtatcaggcagcagaccgtccgactgaaaaaattgctgcgcagatgctgggaagcaccattgctg

SEQ ID NO: 187688 - DNA, 75 bp, synthetic construct
  source 1..75: mol_type = other DNA
ggccggggattacaagtcactggatgcaatggcgtccgatctgattaacgccaaaatcccggcacagttccgcaa

SEQ ID NO: 187689 - DNA, 75 bp, synthetic construct
  source 1..75: mol_type = other DNA
atgaatttcacaccagaagcacaaaagctggttaatcgctatatcagcgaactgcaaaaaacattcagtgactgc

SEQ ID NO: 187690 - DNA, 75 bp, synthetic construct
  source 1..75: mol_type = other DNA
agccacgcaagcaccttaaaatcaccatcatacactaaatcagtaagttggcagcatcaccctcgtctcgatcgt

SEQ ID NO: 187691 - DNA, 75 bp, synthetic construct
  source 1..75: mol_type = other DNA
tggatctgttcgaaaccaaaatcgaacagctggcagatgaaattgaaaatatctacagcgacctggagcagttga

SEQ ID NO: 187692 - DNA, 75 bp, synthetic construct
  source 1..75: mol_type = other DNA
gatggatacccagcgtgcgctcaacttcctggtacgcaaggcgcgtttaccgggtggtcaactggagcaggcgcg

SEQ ID NO: 187693 - DNA, 75 bp, synthetic construct
  source 1..75: mol_type = other DNA
ggcggcaatgggttttatcaacatcgagcagaaccgcatcatcaaaattttctcggtggtatccgtcgtgttcct

SEQ ID NO: 187694 - DNA, 75 bp, synthetic construct
  source 1..75: mol_type = other DNA
ctcggtggtatccgtggtattcctgccgccgacgctcgttgcttccagctatggcatgaactttgagtttatgcc

SEQ ID NO: 187695 - DNA, 75 bp, synthetic construct
  source 1..75: mol_type = other DNA
aagcgatggccgacgccgccgtgctgggcgggatgccacgcgcccaggcgtataaatttgccgctcaggcggtaa

SEQ ID NO: 187696 - DNA, 75 bp, synthetic construct
  source 1..75: mol_type = other DNA
atggccgtcaatctaactgaaacagctatccgagcattgaaagcaaaaaagacatcgttctatgtctggagcaac

SEQ ID NO: 187697 - DNA, 75 bp, synthetic construct
  source 1..75: mol_type = other DNA
gatcgatacgattatttgccagaaaaacgcagagcacttgagatctgggaggaccgggttaataactatcaacag

SEQ ID NO: 187698 - DNA, 75 bp, synthetic construct
  source 1..75: mol_type = other DNA
ccctggttaacttactggtctggtggcgaggttttcatcgtcaggaagccgcaaattaagcaatcagcaaccgtt

SEQ ID NO: 187699 - DNA, 75 bp, synthetic construct
  source 1..75: mol_type = other DNA
tggatgtgaaagacatcgtcactgattctcgtggtcgtctgaccctcgaagtgcgtgacgcgctgaactctggtt

SEQ ID NO: 187700 - DNA, 75 bp, synthetic construct
  source 1..75: mol_type = other DNA
accacgccctactatgaaaactcagccgtcgtgattgccaaaaaagatacctacaaaacgtttgccgacctgaaa

SEQ ID NO: 187701 - DNA, 75 bp, synthetic construct
  source 1..75: mol_type = other DNA
gcagtggtaaccgaatggctgaaagataacccgaaactggcggcggtgggcgataaagtgaccgataaagattac

SEQ ID NO: 187702 - DNA, 75 bp, synthetic construct
  source 1..75: mol_type = other DNA
atgtgtgaaagagcaaaaaataactgatcattttaaaataatgattgataaggctcgtaaggcacaaaagttggt

SEQ ID NO: 187703 - DNA, 75 bp, synthetic construct
  source 1..75: mol_type = other DNA
agaaattggtttcagcgacctcgcacaacttccttacattatgggattaattcgtcaggcatttgaaaaacagat

SEQ ID NO: 187704 - DNA, 75 bp, synthetic construct
  source 1..75: mol_type = other DNA
gtttacgattgagcacattatgccgcagaacgaaaatctgtcggctaaatggcgtgaagagctgggaagcgactg

SEQ ID NO: 187705 - DNA, 75 bp, synthetic construct
  source 1..75: mol_type = other DNA
attccgacgaattctcttaacaagacgtttgctactttttataaggtcattggtgatgctgccaacttactgatt

SEQ ID NO: 187706 - DNA, 75 bp, synthetic construct
  source 1..75: mol_type = other DNA
atgtacgagtttgactggagttccattgttccttccctgccgtatctgctggatgggctggtgatcaccctgaaa

SEQ ID NO: 187707 - DNA, 75 bp, synthetic construct
  source 1..75: mol_type = other DNA
atgtacgagtttgactggagttccattgtcccttccctgccatatctgctcgacgggctggtgatcacgctgaaa

SEQ ID NO: 187708 - DNA, 75 bp, synthetic construct
  source 1..75: mol_type = other DNA
gctttatcatgactataaaaatggcgatttgtctcacgaagatttcctgagcataattcgtttaattgaatctta

SEQ ID NO: 187709 - DNA, 75 bp, synthetic construct
  source 1..75: mol_type = other DNA
atgactgaactcgcgcaattacaggccagtgccgaacaggcagcggccttattgaaagcaatgagccaccctaaa

SEQ ID NO: 187710 - DNA, 75 bp, synthetic construct
  source 1..75: mol_type = other DNA
ccctggcgcgattatctttatgatcctcgcgggcctgacaccgtatctgtactttaagcgtaagaactggctgta

SEQ ID NO: 187711 - DNA, 75 bp, synthetic construct
  source 1..75: mol_type = other DNA
ttaacataggcgcaaaatttgagtatagagatggcaaaaaaaatccagtaacgggaaaggattctcatgttgcta

SEQ ID NO: 187712 - DNA, 75 bp, synthetic construct
  source 1..75: mol_type = other DNA
cgcgcctgatgaagcgacggcccaagatttagccgccaaagcactggcggagaaactggcggcctgcgcgacctt

SEQ ID NO: 187713 - DNA, 75 bp, synthetic construct
  source 1..75: mol_type = other DNA
gatccccggcgctacctctctctattactgggaaggtaagctggagcaagaatacgaagtgcagatgattttaaa

SEQ ID NO: 187714 - DNA, 75 bp, synthetic construct
  source 1..75: mol_type = other DNA
tttcactggacggattcactaattgatatagatctggatggttataagtacataagtttccccgacattatcagt

SEQ ID NO: 187715 - DNA, 75 bp, synthetic construct
  source 1..75: mol_type = other DNA
cttcattaacgaaaccaccggcgaatttccgcaaaaagaacaggaactgtttgaaggtatcgtggcggtgatcgc

SEQ ID NO: 187716 - DNA, 75 bp, synthetic construct
  source 1..75: mol_type = other DNA
atgaaccacgatatcccattaaaatattttgatattgccgatgaatacgcgactgaatgcgcagaacctgtcgca

SEQ ID NO: 187717 - DNA, 75 bp, synthetic construct
  source 1..75: mol_type = other DNA
gtgccgaaatccgaagggggactggataacataggtaatctggccatgttacatccggcatgtcatcacactgca

SEQ ID NO: 187718 - DNA, 75 bp, synthetic construct
  source 1..75: mol_type = other DNA
cacgacacaatggttaaggcattaagaatcgagcttgatgggcttaggcgtaagatcgtgatgaacaaaatcgtt

SEQ ID NO: 187719 - DNA, 75 bp, synthetic construct
  source 1..75: mol_type = other DNA
tgagtgcatgtctaaacggctatgccgtctacctgagtagccacaacacccagtttgtggtggcactgctttcca

SEQ ID NO: 187720 - DNA, 75 bp, synthetic construct
  source 1..75: mol_type = other DNA
ggcggtattcgcctcaatcttggtgcattttttaaatggaccagcctgtttattctcttcgtcgccgcagggctg

SEQ ID NO: 187721 - DNA, 75 bp, synthetic construct
  source 1..75: mol_type = other DNA
tatatcgcgccgggcgatcggcatatggagctggcgcgtagtggcgcaaattatcaaatcaaaattcacgatggc

SEQ ID NO: 187722 - DNA, 75 bp, synthetic construct
  source 1..75: mol_type = other DNA
acccttgcgcaaaacgaagcaagttgcgtggtgttcggcatgccgcgcgaggccatcaatatgggtggtgtctgc

SEQ ID NO: 187723 - DNA, 75 bp, synthetic construct
  source 1..75: mol_type = other DNA
tgagcaaacttcataatatgagttgtccgccttatatggggcatagtgcggctgttattttccatttaatttacc

SEQ ID NO: 187724 - DNA, 75 bp, synthetic construct
  source 1..75: mol_type = other DNA
gattttgtgatcacggggataagccacgacactctgtcagaaaaggttcttcccttgttagaaaactttctggca

SEQ ID NO: 187725 - DNA, 75 bp, synthetic construct
  source 1..75: mol_type = other DNA
cggtgataccatcgaggtaatggactcactgaaggcggtgcggatcaggctggtaaatattgatgcacctgaaaa

SEQ ID NO: 187726 - DNA, 75 bp, synthetic construct
  source 1..75: mol_type = other DNA
tttggcctgctaataggatttaaagaaaaggaccctgagaattgctatcttatcagtcttggtaaatcacatttt

SEQ ID NO: 187727 - DNA, 75 bp, synthetic construct
  source 1..75: mol_type = other DNA
cgatactgcaattcaatatgatattattccctatatgaaaatatccgaaattgaagagccgtgtgtttatgaaaa

SEQ ID NO: 187728 - DNA, 75 bp, synthetic construct
  source 1..75: mol_type = other DNA
tactgctcacccgtttgatgaacaatgaagagatcagcgaagaagcccaacatgaaatggctgctgaagcgggga

SEQ ID NO: 187729 - DNA, 75 bp, synthetic construct
  source 1..75: mol_type = other DNA
ctggatcagcaactgctgcggctaacagccagaaagcagcgaagacgagtgaaactaacgcaaagtccagccaga

SEQ ID NO: 187730 - DNA, 75 bp, synthetic construct
  source 1..75: mol_type = other DNA
agtatgcgcggattatttgttctggtcttgatttaactggtagttgttctcgtttctatgacgaaagtaacaatc

SEQ ID NO: 187731 - DNA, 75 bp, synthetic construct
  source 1..75: mol_type = other DNA
aaagtgaaccaccgcgctgagcgtactggccgcaaccctcagaccggtaaagaaatcaaaattgccgcagctaac

SEQ ID NO: 187732 - DNA, 75 bp, synthetic construct
  source 1..75: mol_type = other DNA
cgtttcttttccggtaaaggatgtcgccgggctcctctttttactgcgccggctgacgcggcgcggcaggaacgc

SEQ ID NO: 187733 - DNA, 75 bp, synthetic construct
  source 1..75: mol_type = other DNA
atatggtttgctgatagagaatcagcgaacaaacatgttcgtaaatagttttaatcctgatgcgtggaataaaag

SEQ ID NO: 187734 - DNA, 75 bp, synthetic construct
  source 1..75: mol_type = other DNA
tcagtagagaagaatcaaaagataagacaagaaaaaaaatgcaatatagaacttcaactgattcttatgctaatt

SEQ ID NO: 187735 - DNA, 75 bp, synthetic construct
  source 1..75: mol_type = other DNA
tgatactgcaattcaatatgatattattccttatatgaaaatatcagaaattgaagaaccgtgtgtttatgaaaa

SEQ ID NO: 187736 - DNA, 75 bp, synthetic construct
  source 1..75: mol_type = other DNA
tttattcaaaattttaccattcttccgttttatgcgcgaaaatatagaagatgtcaatatttataatttatctga

SEQ ID NO: 187737 - DNA, 75 bp, synthetic construct
  source 1..75: mol_type = other DNA
tcagttcagaagagtcaaagtcacaggataagataagaaaaaaaatggaatataaagcttcaactgattcttatg

SEQ ID NO: 187738 - DNA, 75 bp, synthetic construct
  source 1..75: mol_type = other DNA
ggttttataaagaagatcaaatttaatatattgagtcagattcacaaagaactgctgatctctgtaccttggtct

SEQ ID NO: 187739 - DNA, 75 bp, synthetic construct
  source 1..75: mol_type = other DNA
atatcaatatttataacttgtccgatgatactgcaattcaatatgatattattccatttatgaaaatatcagaga

SEQ ID NO: 187740 - DNA, 75 bp, synthetic construct
  source 1..75: mol_type = other DNA
tcggtgcggtgatgattgccattatcgccgtgctgttcatgatttttttccgcgaatccgacaacgaaattacgg

SEQ ID NO: 187741 - DNA, 75 bp, synthetic construct
  source 1..75: mol_type = other DNA
atcctgtcgccgattctggttggctctatcaccgaccgttttttctcggcgcagaaagtgctggcagtgttgatg

SEQ ID NO: 187742 - DNA, 75 bp, synthetic construct
  source 1..75: mol_type = other DNA
ctacgttaccgcttacatctatgtcgataaaaaagcccccgtgcatatgcgtactgacctgcccccacgattaga

SEQ ID NO: 187743 - DNA, 75 bp, synthetic construct
  source 1..75: mol_type = other DNA
ctgccagggcttcggcagtttgctcggctatcgtcttggcggtgtgatgatggaaaagatgttcgcttatcagga

SEQ ID NO: 187744 - DNA, 75 bp, synthetic construct
  source 1..75: mol_type = other DNA
gatttcccacgcattcgtgtgatgggcactatcggctggattgcctccggtctggcatgtggattcttgccgcaa

SEQ ID NO: 187745 - DNA, 75 bp, synthetic construct
  source 1..75: mol_type = other DNA
cacttttgccgggttcttcccgttactgctggcctactcgctaacctatatgccgaccattgcgctgactaacag

SEQ ID NO: 187746 - DNA, 75 bp, synthetic construct
  source 1..75: mol_type = other DNA
gagggatgcagacattgtcttgctgaaattatgcaaaaaaacgttgctatgttataccagcaatataatcgttaa

SEQ ID NO: 187747 - DNA, 75 bp, synthetic construct
  source 1..75: mol_type = other DNA
gctttcctcagtctgatcaccatgatggatgtaccacatccgaaaggtcaggttatcaatattggcgactctgta

SEQ ID NO: 187748 - DNA, 75 bp, synthetic construct
  source 1..75: mol_type = other DNA
agcttattaaccagtacgcggtgacgctggcgaaagcgtatagcgtcgccaccacgaaacatatgttcactatca

SEQ ID NO: 187749 - DNA, 75 bp, synthetic construct
  source 1..75: mol_type = other DNA
ttcgcaggcgcgctgctgatgtatttcgctgcgcaacagaccacttttgccgggttctttccgttactgctggct

SEQ ID NO: 187750 - DNA, 75 bp, synthetic construct
  source 1..75: mol_type = other DNA
gaagtgaggcaaagtcagttagacgaaatcaatcggatccgctacgaactggaattaatggcagttgccctggct

SEQ ID NO: 187751 - DNA, 75 bp, synthetic construct
  source 1..75: mol_type = other DNA
atgtcagtttgactctgcaggttgagaacgacctgaaacatcagcttagtattggcgcactaaaacctggcgcac

SEQ ID NO: 187752 - DNA, 75 bp, synthetic construct
  source 1..75: mol_type = other DNA
cgcctggatgttgaagtgaatggctttaacggtagtgttctgaacggtgttccttctgcatatcactggtatacg

SEQ ID NO: 187753 - DNA, 75 bp, synthetic construct
  source 1..75: mol_type = other DNA
acaggaagacatcctcaacgcgtacgaagcatacgatttccacgaagtggtacagcgtctgatgcgcttctgctc

SEQ ID NO: 187754 - DNA, 75 bp, synthetic construct
  source 1..75: mol_type = other DNA
tgcaggaaaaaggcgcgctgctgcacgttgagaaaatgcagcacagctatccgtgctgctggcgtcacaaaacgc

SEQ ID NO: 187755 - DNA, 75 bp, synthetic construct
  source 1..75: mol_type = other DNA
cgtttatgggctttgacgttccggcaatcctcggcgatcacgttacgctggatgccggtacgggggctgttcaca

SEQ ID NO: 187756 - DNA, 75 bp, synthetic construct
  source 1..75: mol_type = other DNA
cgtatcgagtcgatggttgctaaccgtcctgactggtgtatctctcgtcagcgcacctggggcgtaccgatgtca

SEQ ID NO: 187757 - DNA, 75 bp, synthetic construct
  source 1..75: mol_type = other DNA
agctatcgtcgtatccgtaacacagcgcgcttcctgctggcaaacctgaacggttttgatccagcaaaagatatg

SEQ ID NO: 187758 - DNA, 75 bp, synthetic construct
  source 1..75: mol_type = other DNA
atctccaccgcgatgaagggcaaagcgccgtatcgtcaggtactgacccacggctttaccgtggatggtcagggc

SEQ ID NO: 187759 - DNA, 75 bp, synthetic construct
  source 1..75: mol_type = other DNA
gattatgttgggaaatctcttcccgctgatgcccgtttaccaaagaactttaagacctttgattactatgatggt

SEQ ID NO: 187760 - DNA, 75 bp, synthetic construct
  source 1..75: mol_type = other DNA
tggtttatttatctcatcccggcgctggtggcatttgctctgccgccgcgcgcaggggcgacagcgtctcgctcc

SEQ ID NO: 187761 - DNA, 75 bp, synthetic construct
  source 1..75: mol_type = other DNA
gcggtgatcgccgtggtgatccttacctggatggttttctggatgcgtaaagtgtcgcgcaacgtcaaagtgcaa

SEQ ID NO: 187762 - DNA, 75 bp, synthetic construct
  source 1..75: mol_type = other DNA
tgccgcgaatacgcggcgacccaggttgacggtcaacgcaaagactttatccgtctgggcgtgctgggcgactgg

SEQ ID NO: 187763 - DNA, 75 bp, synthetic construct
  source 1..75: mol_type = other DNA
gaactggcagcgctggcgcatgacatcggaaatcctcctttcggtcattccggtgaaaaactgcttaatgaactg

SEQ ID NO: 187764 - DNA, 75 bp, synthetic construct
  source 1..75: mol_type = other DNA
tgaaaaattcaacagaaacagattaacgcacagtcttgaggttgctcagatcgcccgaagtatcgcgtcagacct

SEQ ID NO: 187765 - DNA, 75 bp, synthetic construct
  source 1..75: mol_type = other DNA
atttatcgaatacaccctgatgcgcgtaatcgcctgaccgcaggttacatgaccagctactttattggcggtgcc

SEQ ID NO: 187766 - DNA, 75 bp, synthetic construct
  source 1..75: mol_type = other DNA
ggcggcgtcccgcgagaagtgctgttcgacaatatgaaaacggttgtactggaacgcgatgcttatcaacctggc

SEQ ID NO: 187767 - DNA, 75 bp, synthetic construct
  source 1..75: mol_type = other DNA
cgggatgaccgttttaagggaatatatccgttctctggctgttaccgctccgcctgagcctgttgttcgcttcga

SEQ ID NO: 187768 - DNA, 75 bp, synthetic construct
  source 1..75: mol_type = other DNA
atggggatttccgtacgcgcgctgctgcgtaaaacgtcgaaccgtatgaggagctgggccttgcggaagataaat

SEQ ID NO: 187769 - DNA, 75 bp, synthetic construct
  source 1..75: mol_type = other DNA
aaattaaaatcctgaacaagcagggaatgagtggttgggcgattgccagagaacaggggatcttccgcaatacgg

SEQ ID NO: 187770 - DNA, 75 bp, synthetic construct
  source 1..75: mol_type = other DNA
ccgcagtcgcttcacttcgggataaataccgggactatattcttcagcacatcgccgatgcccacccttataaaa

SEQ ID NO: 187771 - DNA, 75 bp, synthetic construct
  source 1..75: mol_type = other DNA
ttgtatgacaatatgaaaactgtggttctgcaacgtgacgcatatcagaccggtcagggccgttataaagcgacg

SEQ ID NO: 187772 - DNA, 75 bp, synthetic construct
  source 1..75: mol_type = other DNA
cctgctgttgcttcactcctggatgaataccgggattatatggttcgcttcacaacagcagcagatctgttactt

SEQ ID NO: 187773 - DNA, 75 bp, synthetic construct
  source 1..75: mol_type = other DNA
atggggatcacagtacgagcgctgctgcgtaagaatgtcgaaccttttgaagcgttagggctggcggaagaccgt

SEQ ID NO: 187774 - DNA, 75 bp, synthetic construct
  source 1..75: mol_type = other DNA
agtttaaacgagaatccgctcaactggttgttgaccagaaatacacggtggcagatgccgccaaagctatggatg

SEQ ID NO: 187775 - DNA, 75 bp, synthetic construct
  source 1..75: mol_type = other DNA
cgtcgtgaacagtgcgaaaccggcgcacgtttcttccagcggccagccctgcgcgatgtcactattgaagaattc

SEQ ID NO: 187776 - DNA, 75 bp, synthetic construct
  source 1..75: mol_type = other DNA
cctggttggcagcgaatacaacacccgccgtgagcagtgtgaaaccggtgcgcgtttcttccaacaaccggccct

SEQ ID NO: 187777 - DNA, 75 bp, synthetic construct
  source 1..75: mol_type = other DNA
aaggcaggattaagacgtaagatgcgaaaagcagccatggacagaaactatctcgcgtcagtccttgcggggagc

SEQ ID NO: 187778 - DNA, 75 bp, synthetic construct
  source 1..75: mol_type = other DNA
ttttggtctggaccctgaggctgctcatgcagtgctcaccagcggtgcgccagtcactctggtcccgatggatgt

SEQ ID NO: 187779 - DNA, 75 bp, synthetic construct
  source 1..75: mol_type = other DNA
tcttgcctgcctgaaaaccggtgcggtttccgtgccgctgttaccttcctggcgggaagcagaactggtgtgggt

SEQ ID NO: 187780 - DNA, 75 bp, synthetic construct
  source 1..75: mol_type = other DNA
atgaacaagaaaaccaaacgtactttcacccccgagttcagactggaatgtgcgcaactgattgttgataagggc

SEQ ID NO: 187781 - DNA, 75 bp, synthetic construct
  source 1..75: mol_type = other DNA
ggcagccgattatgaaaatcagactgacgagttttccctcgatgcgcccattgtcgcgcatgaaaactatcaatg

SEQ ID NO: 187782 - DNA, 75 bp, synthetic construct
  source 1..75: mol_type = other DNA
acaagatggggcaaacaactgcgtgatgagcgtcagggcaaaacaccaaaagcctctccgatgacaccagaacaa

SEQ ID NO: 187783 - DNA, 75 bp, synthetic construct
  source 1..75: mol_type = other DNA
ttacccctgagttcaggctggaatgtgcacagctgattgttgataagagctactcgtatcggcaagccagtgaat

SEQ ID NO: 187784 - DNA, 75 bp, synthetic construct
  source 1..75: mol_type = other DNA
taaacgcgctggtggttgtgaataccggtctttcagcttgctggctttttcgacaagagttattggtgtgtcacg

SEQ ID NO: 187785 - DNA, 75 bp, synthetic construct
  source 1..75: mol_type = other DNA
actgccagagtggtgtttaatgaattgagcgtcaccgaaccggcgactgtcggggaaattgcgcagaatactgac

SEQ ID NO: 187786 - DNA, 75 bp, synthetic construct
  source 1..75: mol_type = other DNA
tggtcagtgatattaacgccgacgcagctaaccatgttgtagatgaaattcaacaactgggtggtcaggcatttg

SEQ ID NO: 187787 - DNA, 75 bp, synthetic construct
  source 1..75: mol_type = other DNA
gggtctttcagcttgctggctttttcgacaagagttattggtgtgtcacgttaaccggaaaagggaaaaagacat

SEQ ID NO: 187788 - DNA, 75 bp, synthetic construct
  source 1..75: mol_type = other DNA
aatacgtacctttcacgcgaacgctgccagctaatactgacccagcttgttatggcgggtctggcagactatcag

SEQ ID NO: 187789 - DNA, 75 bp, synthetic construct
  source 1..75: mol_type = other DNA
atgcctgaaaaacggcacagaacattaaacgcgctggttgttgtgaatactggtctttcagcttgctggcttttt

SEQ ID NO: 187790 - DNA, 75 bp, synthetic construct
  source 1..75: mol_type = other DNA
cagggagattgcacagaatacttacctttcacgcgaacgctgccagttaatactgacccagcttgttatggcggg

SEQ ID NO: 187791 - DNA, 75 bp, synthetic construct
  source 1..75: mol_type = other DNA
agggactgccggacggctcatttacccgcgaacaggcggaagccgttgccgcacagtaccggaacgtctttatcg

SEQ ID NO: 187792 - DNA, 75 bp, synthetic construct
  source 1..75: mol_type = other DNA
gtcggggaaattgcgcagaatacttacctttcacgcgaacgctgccagctaatactgacccagcttgttatggcg

SEQ ID NO: 187793 - DNA, 75 bp, synthetic construct
  source 1..75: mol_type = other DNA
atgacttcctatgcatcatctaaagctgcggccagtcatctggtcagaaatatggcgtttgacctgggtgaaaaa

SEQ ID NO: 187794 - DNA, 75 bp, synthetic construct
  source 1..75: mol_type = other DNA
tcacaacttgttgcgccagaaatggaaaaaaatggcggtggcgttattctgaccatcacttctatggcggcagaa

SEQ ID NO: 187795 - DNA, 75 bp, synthetic construct
  source 1..75: mol_type = other DNA
tgatattacttccgaacaggaactctctgcactggcagactttgccgtcagtaagctgggtaaagttgatatcct

SEQ ID NO: 187796 - DNA, 75 bp, synthetic construct
  source 1..75: mol_type = other DNA
gaattgatcaacaagctggaacggcagctcaataaactgcagaaaaagggcaaaccacgtcgtgccgcaacatcg

SEQ ID NO: 187797 - DNA, 75 bp, synthetic construct
  source 1..75: mol_type = other DNA
atgcgtcatgatcgcctgcgtgcagttgcacaatttcgcgggcaacaggtcaatagcgatctgggtgaaggcttt

SEQ ID NO: 187798 - DNA, 75 bp, synthetic construct
  source 1..75: mol_type = other DNA
aagagtatgacgtgcatcctggtgaaaatcaggtgaacttcgacaaatcccccctgcatcatccactctccatct

SEQ ID NO: 187799 - DNA, 75 bp, synthetic construct
  source 1..75: mol_type = other DNA
aaacaaaagggttagtcggcgcgattgaagccgcagacaccatggttaaatccgccaacgtacaactggtcggct

SEQ ID NO: 187800 - DNA, 75 bp, synthetic construct
  source 1..75: mol_type = other DNA
tcacaagcaaacctcaggcccatctgctttgcgcaaaagcggtatgagcctatcagagaagtgcttattgatcta

SEQ ID NO: 187801 - DNA, 75 bp, synthetic construct
  source 1..75: mol_type = other DNA
ggctggtgggtgttagcggcacctgccagccatctgctcatgcgttggggtcacaagcaaacctcaggcccatct

SEQ ID NO: 187802 - DNA, 75 bp, synthetic construct
  source 1..75: mol_type = other DNA
cattcctgcgctcaccagcatttagcgtgccggagtccgcccagcgttgggctaaccaagtgcgccaggaaaatg

SEQ ID NO: 187803 - DNA, 75 bp, synthetic construct
  source 1..75: mol_type = other DNA
gatgcccagaaagcggctttcaccaaggaagacggtgaaaaagtcgttgatgattcaggtaaaagactgaaataa

SEQ ID NO: 187804 - DNA, 75 bp, synthetic construct
  source 1..75: mol_type = other DNA
gatatgaccgaaaccgccagagtggtgtttaatgaattaagcgtcaccgaaccggcgaccgtcggggaaattgcg

SEQ ID NO: 187805 - DNA, 75 bp, synthetic construct
  source 1..75: mol_type = other DNA
aagtctttggtgatgttggtagtattgaggctgatttgagggaaatcagcacactgattcatcggcggaaggcat

SEQ ID NO: 187806 - DNA, 75 bp, synthetic construct
  source 1..75: mol_type = other DNA
aaaacacatctcaaatactctacaaaaaacaatcaaacagtgcattaaaaaatacaaacaaaaaatcaaaatcga

SEQ ID NO: 187807 - DNA, 75 bp, synthetic construct
  source 1..75: mol_type = other DNA
atgcgtttcattaagctgatgtatctctctgaccgcaaagcaatggagttgtatggttttcccattagtggtgat

SEQ ID NO: 187808 - DNA, 75 bp, synthetic construct
  source 1..75: mol_type = other DNA
agtggtggtacatgtgtggaatcgctgcgaatgcagacccgggataacctcgagcgcatgatggttatcaaggcg

SEQ ID NO: 187809 - DNA, 75 bp, synthetic construct
  source 1..75: mol_type = other DNA
cacagatgccgacactgaaatgggcctgtctgaaactggcgaaactggggcgatggcatgacagcaaacgcaccg

SEQ ID NO: 187810 - DNA, 75 bp, synthetic construct
  source 1..75: mol_type = other DNA
tatgtgggatggctggttcagacttcaggatatgcaggatatggttgagggttacctggtgatgaagtctcttga

SEQ ID NO: 187811 - DNA, 75 bp, synthetic construct
  source 1..75: mol_type = other DNA
ttatcctcacaccgctgtagcaggcgcggtaattgaccacgaccagtacaccgacacgcctacacgcacttatca

SEQ ID NO: 187812 - DNA, 75 bp, synthetic construct
  source 1..75: mol_type = other DNA
cggcacatatcaaacgcctttctatgtcaccaatggtgcaatgtatgtgcgcgaagcgtttattaaagacgcatc

SEQ ID NO: 187813 - DNA, 75 bp, synthetic construct
  source 1..75: mol_type = other DNA
tgacaaacatcactgaagatttgaggactgacacggacggcctaatcacagaaacgggggccataaaagctgata

SEQ ID NO: 187814 - DNA, 75 bp, synthetic construct
  source 1..75: mol_type = other DNA
atgacgaactgctcaaacaattgtcagaaaaaacacccgccagtgatcgtggctgtcgggtatcagaccaacctc

SEQ ID NO: 187815 - DNA, 75 bp, synthetic construct
  source 1..75: mol_type = other DNA
tgcctcctttcgccaggcactgttagatatcagtggtgaaaacgcaaattacacagcaggttgtcatgagttaag

SEQ ID NO: 187816 - DNA, 75 bp, synthetic construct
  source 1..75: mol_type = other DNA
taagcagccttgaaaacaaaacagacgcaagtgtttctcgtcttgataaagccatcgcagatgagacgagcgcaa

SEQ ID NO: 187817 - DNA, 75 bp, synthetic construct
  source 1..75: mol_type = other DNA
aaaagtggtggtacatgtgtggaatcgctgcgaatgcagacccgggataacctcgagcgcatggtggttatcaag

SEQ ID NO: 187818 - DNA, 75 bp, synthetic construct
  source 1..75: mol_type = other DNA
aaatgacgtcagctcgaaacactatgaccgctatgattatctgactgaaaagcgcagggcgcttgagatctggga

SEQ ID NO: 187819 - DNA, 75 bp, synthetic construct
  source 1..75: mol_type = other DNA
cattacaggaattagcctcagtgaaagagctgactaaggaaagtaacagtccctatattttcccgctatcaacca

SEQ ID NO: 187820 - DNA, 75 bp, synthetic construct
  source 1..75: mol_type = other DNA
agtgctcaacgtggtactggcaggcttggcgttaaggttcagccttcaggcagcaaagttttttatttccgttac

SEQ ID NO: 187821 - DNA, 75 bp, synthetic construct
  source 1..75: mol_type = other DNA
cctttccgccagttcggcgggctttattgtcaccgccgcgcagttgggctatgccgccggtctgctgtttcttgt

SEQ ID NO: 187822 - DNA, 75 bp, synthetic construct
  source 1..75: mol_type = other DNA
ggctatctggtttggacacacttctgtactggcgctggttatcggcatcctggtgctggatctcaccgtacaggg

SEQ ID NO: 187823 - DNA, 75 bp, synthetic construct
  source 1..75: mol_type = other DNA
catctgatcccgctgactgaatcggcactacaggaattagcctcagtgaaagaactgactaaggaaagcaacagt

SEQ ID NO: 187824 - DNA, 75 bp, synthetic construct
  source 1..75: mol_type = other DNA
gaaaggctatgcttctcagatatcccaatcaccggcatttaaggccagcaaagaagagatgttgaagatggggat

SEQ ID NO: 187825 - DNA, 75 bp, synthetic construct
  source 1..75: mol_type = other DNA
atcttccagtttaaatcgttcgctaccgcgtcctacaaccgcgcaacgctgggcggcctgcaggagggaaccgga

SEQ ID NO: 187826 - DNA, 75 bp, synthetic construct
  source 1..75: mol_type = other DNA
tacgagggattagtttgtgccccgcaacaccactggagtatattcagtcagttattgaagatgttgaaatcgtac

SEQ ID NO: 187827 - DNA, 75 bp, synthetic construct
  source 1..75: mol_type = other DNA
atctgggaagaccgggttaataaccaccaacagcagacaggtaataatgttgtcaatctgtttggtagaaggtga

SEQ ID NO: 187828 - DNA, 75 bp, synthetic construct
  source 1..75: mol_type = other DNA
gattcattcaattgggtatatggcctgagatgaaactggccacagcgaatgaactggcaaaaaagtatggtgcct

SEQ ID NO: 187829 - DNA, 75 bp, synthetic construct
  source 1..75: mol_type = other DNA
cctgatgctatgttttattccgctaacggcaaggtgagcctactgcttgggagtagtcataacaagcatgaccag

SEQ ID NO: 187830 - DNA, 75 bp, synthetic construct
  source 1..75: mol_type = other DNA
cagaaaactacacaaatacatcatcagcggcaataaggagaccaggcctagtccttgtcacaagaagctcaggat

SEQ ID NO: 187831 - DNA, 75 bp, synthetic construct
  source 1..75: mol_type = other DNA
agcaggagtgtaaccaaaaattattgggattcatcatcatctgctttatcgaaaacggtttatgtaatgatacct

SEQ ID NO: 187832 - DNA, 75 bp, synthetic construct
  source 1..75: mol_type = other DNA
gtgcgttcactcgttcaagtatcgcccgcgcagaatgctacaacgccgtgattgtatcatggaccgacccggaaa

SEQ ID NO: 187833 - DNA, 75 bp, synthetic construct
  source 1..75: mol_type = other DNA
tattaaagacggatctatcggtactgcaaaaatagcgcagcaaatccagtcaaccgtatttgttcaagactcaaa

SEQ ID NO: 187834 - DNA, 75 bp, synthetic construct
  source 1..75: mol_type = other DNA
gacaacgcatcgcctgacctttgagatccgcgtatataacgacgaaggccgcgtggtggcagcttatgaaacaac

SEQ ID NO: 187835 - DNA, 75 bp, synthetic construct
  source 1..75: mol_type = other DNA
gaacaccacggcgatcgagacaacatctaaagcgttaaccgacttcaaaggtaacgttgatgcgtcattgtcaat

SEQ ID NO: 187836 - DNA, 75 bp, synthetic construct
  source 1..75: mol_type = other DNA
atccgcgcgagacgcagccgcatttcttcgaatcccgattccctgagctgttaaagctgctcgataccgttcatt

SEQ ID NO: 187837 - DNA, 75 bp, synthetic construct
  source 1..75: mol_type = other DNA
ctaattctctttatgataggttttgctattttttagagctatataaacagaagcttgatgaagttgctgctggcc

SEQ ID NO: 187838 - DNA, 75 bp, synthetic construct
  source 1..75: mol_type = other DNA
gcgtccgaagagtcatagggacaatggagtctgccgagcttgatgaatatttttggggtaagcgctcgggtttgg

SEQ ID NO: 187839 - DNA, 75 bp, synthetic construct
  source 1..75: mol_type = other DNA
ggggttaatgcgtcaatttccacgctcgatagcaaggtgacaagcaacgtaaccaggatggataaagcgatcgca

SEQ ID NO: 187840 - DNA, 75 bp, synthetic construct
  source 1..75: mol_type = other DNA
cgattttatatatgcttgacggtaacgcagttatggaccgcctggatgacgaactgctcaaacaattgtcagaaa

SEQ ID NO: 187841 - DNA, 75 bp, synthetic construct
  source 1..75: mol_type = other DNA
ttgcatgaccagaacgaacgcacgccgattggcggcaaaatcgttttccagcgttggcatgacagcaaagccaat

SEQ ID NO: 187842 - DNA, 75 bp, synthetic construct
  source 1..75: mol_type = other DNA
agtgacggacgggtaattattaacaataacggcattacggtaaatcttcctagtggtggtaaaattattattggt

SEQ ID NO: 187843 - DNA, 75 bp, synthetic construct
  source 1..75: mol_type = other DNA
aatgcaaacggcacttgctacccacgaaaaggccaacgctacacagtttgcggagattagcgcatcactggaagc

SEQ ID NO: 187844 - DNA, 75 bp, synthetic construct
  source 1..75: mol_type = other DNA
tggtgtttttcaggcaacggtgtacccgatcagcaaaacaaccctaaccactgatacagcatacgagttctacta

SEQ ID NO: 187845 - DNA, 75 bp, synthetic construct
  source 1..75: mol_type = other DNA
aaacacctaccttgattaatgataatttgtatcacaaacaattttatcgggttctggatattctaagtgaaggtc

SEQ ID NO: 187846 - DNA, 75 bp, synthetic construct
  source 1..75: mol_type = other DNA
tacccttgcggcggcgcccgcatggattcgtaacgggaccgtattcgccgtatcaactgaatccgcgaaacctgt

SEQ ID NO: 187847 - DNA, 75 bp, synthetic construct
  source 1..75: mol_type = other DNA
gggaaagtgataactgtagacaaggttgattctgacctggtggcggctggtgacactatcagcttactggacagc

SEQ ID NO: 187848 - DNA, 75 bp, synthetic construct
  source 1..75: mol_type = other DNA
cccggggatattatcgagatactcgacaataaccgcgctggcgctcgtttgggcggtcgcatcgtggcgaataac

SEQ ID NO: 187849 - DNA, 75 bp, synthetic construct
  source 1..75: mol_type = other DNA
atccgcatatataacgccgatggtgcggtggttagaagctacgaaacaacgaaatacagttatgatttttatggc

SEQ ID NO: 187850 - DNA, 75 bp, synthetic construct
  source 1..75: mol_type = other DNA
tctcccgatactgcgaccagttggttgatgatggttacggtggccttgagcctcgcatgacgcttaatgcttaca

SEQ ID NO: 187851 - DNA, 75 bp, synthetic construct
  source 1..75: mol_type = other DNA
tcagatttctaacgtgcagcgcgcagtagctgacgaggccagcgcccgcgctgaagctattaacggtgtaaacgc

SEQ ID NO: 187852 - DNA, 75 bp, synthetic construct
  source 1..75: mol_type = other DNA
aaaaatcgacagcggaatcactggaaaccatcacagccgaaataagcgcgatggactcaaacaccaaaggtgaaa

SEQ ID NO: 187853 - DNA, 75 bp, synthetic construct
  source 1..75: mol_type = other DNA
tgtaatgataccttataaccttgcttactatatatataaccagtctggacgcattaacgtaaccataaacattaa

SEQ ID NO: 187854 - DNA, 75 bp, synthetic construct
  source 1..75: mol_type = other DNA
gctgggctacatttaacaacgttacagtacgcggcacggtatacgctaattctggtgtgtttaacggtgctgttt

SEQ ID NO: 187855 - DNA, 75 bp, synthetic construct
  source 1..75: mol_type = other DNA
aaagaatttctggaagtcgtgttatcaaaggctctcactgctgtctgctataagctggaagtattcgtgacgacc

SEQ ID NO: 187856 - DNA, 75 bp, synthetic construct
  source 1..75: mol_type = other DNA
cgatttgcatgcgaataaaagattagctcttctcgattgcgccctaaaagtcgcacctatacgagaagtacttag

SEQ ID NO: 187857 - DNA, 75 bp, synthetic construct
  source 1..75: mol_type = other DNA
cattcagacactgggtgatgaattgctacaaaaagctgagaagaaaaaaacattgtctggcgttatgaaaatttt

SEQ ID NO: 187858 - DNA, 75 bp, synthetic construct
  source 1..75: mol_type = other DNA
aacaacttgactatctgaaccaaaataatatcacatttcagcagggttattatttctataaacctgttacataca

SEQ ID NO: 187859 - DNA, 75 bp, synthetic construct
  source 1..75: mol_type = other DNA
cgtaatgtaacatttagctatcaggataacgctttttccgttgggccgattaacctcaccattaaacgtggcgaa

SEQ ID NO: 187860 - DNA, 75 bp, synthetic construct
  source 1..75: mol_type = other DNA
ctggtaacggctatctggatggcgatcaccatctggggcggttttgtgctggtggcgcgggtgtacaaacatatg

SEQ ID NO: 187861 - DNA, 75 bp, synthetic construct
  source 1..75: mol_type = other DNA
tgcgcaagagtatcgccatcatattatccgcgcagacaccttccatcttagcgccgtgaactggtcaaacatcat

SEQ ID NO: 187862 - DNA, 75 bp, synthetic construct
  source 1..75: mol_type = other DNA
gttgggggaccgcctctcatggttcacctaaatcatgggcgattggttctctgggccgctttggtaacgaatact

SEQ ID NO: 187863 - DNA, 75 bp, synthetic construct
  source 1..75: mol_type = other DNA
tggctttctgggtgagtttaaagggcttcattcaagaattgctctaacatgtacccgatgcggtaatagagccga

SEQ ID NO: 187864 - DNA, 75 bp, synthetic construct
  source 1..75: mol_type = other DNA
gattaatggagtttattaaccttaagctgggtgagccatggaaagaggatgctaaagacgatatcgatcctgaat

SEQ ID NO: 187865 - DNA, 75 bp, synthetic construct
  source 1..75: mol_type = other DNA
ttctgcgtaatgccggaacaggacaggataatctcactcaccaacttcatctgcaggaaacctttagtgcctttc

SEQ ID NO: 187866 - DNA, 75 bp, synthetic construct
  source 1..75: mol_type = other DNA
acgccacgtaccctggatatcgacagagttcagtcgatgatgcccgaatgcggtatcgaacccaaaattctgatc

SEQ ID NO: 187867 - DNA, 75 bp, synthetic construct
  source 1..75: mol_type = other DNA
accatagcacgtctgcaaaccctttatgatactccccatgatggtgttaccggactggataccgggtatatcgat

SEQ ID NO: 187868 - DNA, 75 bp, synthetic construct
  source 1..75: mol_type = other DNA
gtagcggaaaatcgacgctggcgatgttgctgacggggttgtatcagccgcaaagcggtgaaattttgctggatg

SEQ ID NO: 187869 - DNA, 75 bp, synthetic construct
  source 1..75: mol_type = other DNA
tcatgttagggttcgtggtgttcttcccggttatttatttaatcggctatagttttacttattttgattcgtggc

SEQ ID NO: 187870 - DNA, 75 bp, synthetic construct
  source 1..75: mol_type = other DNA
tgacgagcaactggcggaatattatcttacccgtggcagtaataatcgccgggatacctggagcgatcatattcg

SEQ ID NO: 187871 - DNA, 75 bp, synthetic construct
  source 1..75: mol_type = other DNA
ttttgggtgttttgcgccgactttaaccgtcatttgcagatctgccccgatgctcaactcggcctggcagaacag

SEQ ID NO: 187872 - DNA, 75 bp, synthetic construct
  source 1..75: mol_type = other DNA
ctttgcgaaaaatattgtctcttgaacagaacttattgaacatgacaagcgttaaggccgagcgtattaaagagc

SEQ ID NO: 187873 - DNA, 75 bp, synthetic construct
  source 1..75: mol_type = other DNA
ctttacgtacaatattctctcttgaacgaaatttattaaacatggcaagcattaaggccgaacgtattaaagagc

SEQ ID NO: 187874 - DNA, 75 bp, synthetic construct
  source 1..75: mol_type = other DNA
tggcacaaagggacgacattaaaagagattataaaaaatctgctctcgttgcgaatgcctgttttaggggcagac

SEQ ID NO: 187875 - DNA, 75 bp, synthetic construct
  source 1..75: mol_type = other DNA
cataatggcgttgaccgcaggggtcagcatgaccgtttcattctccacgccatttgcactggggatctttaagcc

SEQ ID NO: 187876 - DNA, 75 bp, synthetic construct
  source 1..75: mol_type = other DNA
gtgatccgcacactcaccccattaatgaccaaaacacaaagccagaaaaaactgcagtcgctactaacggcgggg

SEQ ID NO: 187877 - DNA, 75 bp, synthetic construct
  source 1..75: mol_type = other DNA
caactcggtagcgcctcgttgctggcggggttaaccagcgatgtgcgcaatatcactattgcgtttgttcgtctg

SEQ ID NO: 187878 - DNA, 75 bp, synthetic construct
  source 1..75: mol_type = other DNA
aactggtgacgctgaccggtgggcaaaaacacgtagcgcaagcggcggagttctgggtgttctgtgccgacttta

SEQ ID NO: 187879 - DNA, 75 bp, synthetic construct
  source 1..75: mol_type = other DNA
gcattaaattattaagtgtttatggttccacagaaagttcgccgcatgcggtggtgaatctcgatgatcctttgt

SEQ ID NO: 187880 - DNA, 75 bp, synthetic construct
  source 1..75: mol_type = other DNA
cccttgccgtttcaccttcccatgcggtttcgctgtttggtatcacgctgatttgcgccggtttctcggtaggtt

SEQ ID NO: 187881 - DNA, 75 bp, synthetic construct
  source 1..75: mol_type = other DNA
gacagttccatcaccaacggtggcaccggcacgcagattaacggtgacgaggccacgacgaataacaacggcaaa

SEQ ID NO: 187882 - DNA, 75 bp, synthetic construct
  source 1..75: mol_type = other DNA
cggttggtgtgtccatcaatggcgacagtgcgacgttgaccaatacgggcgatattgacgtcagcaattcggcta

SEQ ID NO: 187883 - DNA, 75 bp, synthetic construct
  source 1..75: mol_type = other DNA
tccaactcctggcggagatgagataataccagacgacggtccggatgataccccgacgcctcccaaaccgattgc

SEQ ID NO: 187884 - DNA, 75 bp, synthetic construct
  source 1..75: mol_type = other DNA
tgcttctttgcttcgtcattatcgtccagatagggctaatcgccattgatgcgagcccgttggttgttgctatgt

SEQ ID NO: 187885 - DNA, 75 bp, synthetic construct
  source 1..75: mol_type = other DNA
ttacggcagtgataataacgtgacgctggatggaaagttaactgttgtatcagacagtgaggttacttctcgtca

SEQ ID NO: 187886 - DNA, 75 bp, synthetic construct
  source 1..75: mol_type = other DNA
agttattcaggacggcgatctggatgtcagcggcggcggtcacgggattgatatcaccggcgacagcgcgacggt

SEQ ID NO: 187887 - DNA, 75 bp, synthetic construct
  source 1..75: mol_type = other DNA
ctggctcattgtaatatccttgcaaacacgttgtttggggcgatttcaggttcagccgttgcgtcagccgccgcg

SEQ ID NO: 187888 - DNA, 75 bp, synthetic construct
  source 1..75: mol_type = other DNA
cagaggccaccggagccaccggataattacggagacctgaaaaggcagtcgatcgcacttatgccgaaatgggga

SEQ ID NO: 187889 - DNA, 75 bp, synthetic construct
  source 1..75: mol_type = other DNA
atgcccaaaatatcatcagttgtatcatcatgttaccatctgttcagtgaacatcaacaactttcaaatgaaaca

SEQ ID NO: 187890 - DNA, 75 bp, synthetic construct
  source 1..75: mol_type = other DNA
tgacaaagccatcgtcaacaacgacggcgacagcacgatccttgatggcggcaccggaacccgcattacgggtga

SEQ ID NO: 187891 - DNA, 75 bp, synthetic construct
  source 1..75: mol_type = other DNA
gtggacaacaaaggcggcatgaccgtcaccgatcctgactccatcggtattcagatagacggcgacaaggcggtc

SEQ ID NO: 187892 - DNA, 75 bp, synthetic construct
  source 1..75: mol_type = other DNA
gtaataacgcggtggtgaatcaggacggcgagctggatgtgagcggcggcggtcacggtattgatatcaccggcg

SEQ ID NO: 187893 - DNA, 75 bp, synthetic construct
  source 1..75: mol_type = other DNA
gcgaggccaaagagccagaagtcatcagctctacatcggaccagaaagaacaaggcactcccaagcgagacaaga

SEQ ID NO: 187894 - DNA, 75 bp, synthetic construct
  source 1..75: mol_type = other DNA
ttggtacgcgaaagccaacagatgatggcatttttctggttaaactaattgtatctgggttgtatgaaaaagata

SEQ ID NO: 187895 - DNA, 75 bp, synthetic construct
  source 1..75: mol_type = other DNA
gctaacctcgatctcaagctggtcgataaagtcattggcatcaccaatgaagaagcgatttctaccgcgcgtcgt

SEQ ID NO: 187896 - DNA, 75 bp, synthetic construct
  source 1..75: mol_type = other DNA
gctgacgggggcattactgatgctggtcacgttgtttgttgcgccctggctggtcatcgaaacactggccggatg

SEQ ID NO: 187897 - DNA, 75 bp, synthetic construct
  source 1..75: mol_type = other DNA
tggggacacgaaagccaacggatgatggtatttttctagtaaaactgattgtttcttctctatattctaaagatg

SEQ ID NO: 187898 - DNA, 75 bp, synthetic construct
  source 1..75: mol_type = other DNA
tattgtgctcaccttttatgatcaggctacatttcctcaatcattaaagaacataagcgatccgccattttggat

SEQ ID NO: 187899 - DNA, 75 bp, synthetic construct
  source 1..75: mol_type = other DNA
aatatgcttataaatattcgaagaaaattgctaatccgtacttacctaatacatataatttaagaccggaattga

SEQ ID NO: 187900 - DNA, 75 bp, synthetic construct
  source 1..75: mol_type = other DNA
gcaaggagtatttatctttactcccgtcaatgattgcatctcttttctctggtaacggtgccgcagcggtcattg

SEQ ID NO: 187901 - DNA, 75 bp, synthetic construct
  source 1..75: mol_type = other DNA
gttgccgataaatatggcgtgcggatcaccgatatcattaccccgtccgagcggatgcgccgcctgagccgttag

SEQ ID NO: 187902 - DNA, 75 bp, synthetic construct
  source 1..75: mol_type = other DNA
ggtcagtcgtggcgctggacggtctggcgggcgaaccgctggatattctgatcaacggttatttaatcgcccaag

SEQ ID NO: 187903 - DNA, 75 bp, synthetic construct
  source 1..75: mol_type = other DNA
atggagaaaaaagaacattattgtggtccacggatgtatggcgatgaacggattgcagagccgttgcgatacagg

SEQ ID NO: 187904 - DNA, 75 bp, synthetic construct
  source 1..75: mol_type = other DNA
ataataatggtggggctatctttgctaaagaaaactcaacgataaatcttgcgaatgttattttcgacagtaatg

SEQ ID NO: 187905 - DNA, 75 bp, synthetic construct
  source 1..75: mol_type = other DNA
ggtaataggcaataccagcaacgatggcgcgattgattctcttgccggaacgggagtcatcgtgaaagagggagc

SEQ ID NO: 187906 - DNA, 75 bp, synthetic construct
  source 1..75: mol_type = other DNA
aagatgccggtgccgggcatcttggtgaaaccggattcggttcagcacttttctacacctatatctgcattgata

SEQ ID NO: 187907 - DNA, 75 bp, synthetic construct
  source 1..75: mol_type = other DNA
atggcggtagatatcgctatgtttggtcgtatgctggcgaaaaaacccgggtttaatgtagaagccgcctgctag

SEQ ID NO: 187908 - DNA, 75 bp, synthetic construct
  source 1..75: mol_type = other DNA
agagatagccgattatcttgggaaagccaaaaaagacaaaaaacaaaaaaacgacaaaaaaccaaaagatccgct

SEQ ID NO: 187909 - DNA, 75 bp, synthetic construct
  source 1..75: mol_type = other DNA
agaaaaaccttattactctgaagaattcaacaaatttattgctgataacatcggaagtgatatgaaacaatactt

SEQ ID NO: 187910 - DNA, 75 bp, synthetic construct
  source 1..75: mol_type = other DNA
tatcttaatattccccatctgacctggctcattattggcatcactatctggtttggtctggggacgggggggtat

SEQ ID NO: 187911 - DNA, 75 bp, synthetic construct
  source 1..75: mol_type = other DNA
aagtctgaaacgtgcgtggcgcacttctgcactttttgaacaggcgctggcgggccatattggtattcgcagtgg

SEQ ID NO: 187912 - DNA, 75 bp, synthetic construct
  source 1..75: mol_type = other DNA
ttggcgtcgcaatgagtcaggcattaggaccgttttcactacgggctggcgtagccagttcgacgttaggcattg

SEQ ID NO: 187913 - DNA, 75 bp, synthetic construct
  source 1..75: mol_type = other DNA
aagcctgttgctgattatgctcgtcgtacctggacgccctgttgccgctcatgaagaaatccatcaccacgcttg

SEQ ID NO: 187914 - DNA, 75 bp, synthetic construct
  source 1..75: mol_type = other DNA
gtgcgaataattacgacctggtcattaatcttacggatcagtggatggtggcactgttggtacgttgtttacccg

SEQ ID NO: 187915 - DNA, 75 bp, synthetic construct
  source 1..75: mol_type = other DNA
cattaaccgtatcaccgacgggtaaacaaaatagcttcgcctctcgtgcttatgcaacttatgccctggcggaga

SEQ ID NO: 187916 - DNA, 75 bp, synthetic construct
  source 1..75: mol_type = other DNA
gctcactgcttgccggtgaggaaaacgcaaggctgcgtgcagcccactggttacatgagagaggcctgaaagtat

SEQ ID NO: 187917 - DNA, 75 bp, synthetic construct
  source 1..75: mol_type = other DNA
agcatgaccgtttcattctcgacgccatttgcgctgggaatttttaagccacgtacgttgatgatcacctcacag

SEQ ID NO: 187918 - DNA, 75 bp, synthetic construct
  source 1..75: mol_type = other DNA
ttctggcagtggggcgagcgttttccgtcactggccggaatggaacgctggcagtggcaggatatgccattctgg

SEQ ID NO: 187919 - DNA, 75 bp, synthetic construct
  source 1..75: mol_type = other DNA
gagctgaaaatagcgcagcaactggcactcgagttctaccgtattctgaaaacccaaaataaatcacagctaagt

SEQ ID NO: 187920 - DNA, 75 bp, synthetic construct
  source 1..75: mol_type = other DNA
ggcaggtgaatatctgcgcaagggtgcgcaggtctacatcgaaggtcagcttcgcacccgtagctgggaagataa

SEQ ID NO: 187921 - DNA, 75 bp, synthetic construct
  source 1..75: mol_type = other DNA
ggacgtaaggccgcgcagccggagcctcagccgcaaccgccggagggtgacgattacgggttttcagatgatatc

SEQ ID NO: 187922 - DNA, 75 bp, synthetic construct
  source 1..75: mol_type = other DNA
cgctctgcctgaatgtgtttggcagcggagcgtacagtaaaccagcacaaatcagcctggaatgtgaacattatt

SEQ ID NO: 187923 - DNA, 75 bp, synthetic construct
  source 1..75: mol_type = other DNA
tgaggaatctgacctgctggaagcagaaatgaagctgatgcgctgcatggcgaaggtcagagcgtggacgccgga

SEQ ID NO: 187924 - DNA, 75 bp, synthetic construct
  source 1..75: mol_type = other DNA
ccgcagactggcagcactcaacatgctggcagagcgtggcatcattccggctgactggcctgtccgcgtgaaaat

SEQ ID NO: 187925 - DNA, 75 bp, synthetic construct
  source 1..75: mol_type = other DNA
cactaaattccgcttcgtgggggctgatgctttctcacctgacgaactgcgtactgatttgttcagcgatgacga

SEQ ID NO: 187926 - DNA, 75 bp, synthetic construct
  source 1..75: mol_type = other DNA
aggcaatcagcagtcgctggagtaatggtgttgtcgaaggtcatgtaaatcgcctgaagatgttgaaacgccaga

SEQ ID NO: 187927 - DNA, 75 bp, synthetic construct
  source 1..75: mol_type = other DNA
gaaacaacgtcaggaatatcttgcgaaactgcgtgacacgcaggcttacaggaatgaaatggcgaagtatggcac

SEQ ID NO: 187928 - DNA, 75 bp, synthetic construct
  source 1..75: mol_type = other DNA
caggcagtgaaaccattgtcagggatgctattgccaaatggcgtaaaggctggaacccaccggttactactgccg

SEQ ID NO: 187929 - DNA, 75 bp, synthetic construct
  source 1..75: mol_type = other DNA
gaaatccttgttaaaaccacgggcaccatgcagatgctgggacgtgccgcaggtgctcagactcagccggaagag

SEQ ID NO: 187930 - DNA, 75 bp, synthetic construct
  source 1..75: mol_type = other DNA
gaagaaaattatgcctcccgatttattagtctgatgtgtgaaaaagaaccggagctgaaaatagcgcagcaactg

SEQ ID NO: 187931 - DNA, 75 bp, synthetic construct
  source 1..75: mol_type = other DNA
aaacaatggggactgtgatggcctcaaagcagcaaatttcaacatcgtccaactgaggtgtaaaaatgttcagaa

SEQ ID NO: 187932 - DNA, 75 bp, synthetic construct
  source 1..75: mol_type = other DNA
gattcaggcaatggcagctgctccggctaacgttgctaatctgcaggctgacacgctctccgcccgtcaggatgc

SEQ ID NO: 187933 - DNA, 75 bp, synthetic construct
  source 1..75: mol_type = other DNA
ttaatggcggtaatttcgttgcaaaaaatgaaaacagtagtgcgacagggatatctctgaaagggaccacgggaa

SEQ ID NO: 187934 - DNA, 75 bp, synthetic construct
  source 1..75: mol_type = other DNA
aacactggaatttaaacttgaaccagatggcgggattttggcaaggggtattgctaccgaaggccggatcttacg

SEQ ID NO: 187935 - DNA, 75 bp, synthetic construct
  source 1..75: mol_type = other DNA
gatgcttatgtcacatcacacaaaacccgtggtagcgataacaaagctgtaactatggaatttaagatcgaacct

SEQ ID NO: 187936 - DNA, 75 bp, synthetic construct
  source 1..75: mol_type = other DNA
tggcgcgataaagatcttattggactttatttttcttcgatgaatattggcctgactcagcgggatatctggcgg

SEQ ID NO: 187937 - DNA, 75 bp, synthetic construct
  source 1..75: mol_type = other DNA
tccggtgaagcctgtaagcgggggcaggctgaaaataaagcttatgctgccgcattagcgacaagtagtgtttcg

SEQ ID NO: 187938 - DNA, 75 bp, synthetic construct
  source 1..75: mol_type = other DNA
acgcggtggacgcaagatcgaaaatacaaacttgagtctctatcgtgtcattaacgatgagcatcaagagctatt

SEQ ID NO: 187939 - DNA, 75 bp, synthetic construct
  source 1..75: mol_type = other DNA
ttaatggcggtaatttcgttgcaaaaaatgaaaaaggtagtgcgacagggatatctctggaagggaccaagggaa

SEQ ID NO: 187940 - DNA, 75 bp, synthetic construct
  source 1..75: mol_type = other DNA
gcaggtaatatgggggcttctattacatcagaaatgacggggactgaactacaaaaagtcattaatgataaattg

SEQ ID NO: 187941 - DNA, 75 bp, synthetic construct
  source 1..75: mol_type = other DNA
tgactttatgcgctgggactactgggctttcggcatctctggtctgctgttaatcgccgctatcgttattatggg

SEQ ID NO: 187942 - DNA, 75 bp, synthetic construct
  source 1..75: mol_type = other DNA
aagctcggtggactgggcggcggcaaaggcactgggtctggcggtggtagttcatcgcaaggtccgcgcccgcag

SEQ ID NO: 187943 - DNA, 75 bp, synthetic construct
  source 1..75: mol_type = other DNA
acccattactggccttgcaggtaaaacacgttttcctgaactgggtgcattaattgatcatgcagtgctttttat

SEQ ID NO: 187944 - DNA, 75 bp, synthetic construct
  source 1..75: mol_type = other DNA
tcacatattctggcgtccctggactgagaatattattcaattctgggcggggaattatcagcaaatgccgagccg

SEQ ID NO: 187945 - DNA, 75 bp, synthetic construct
  source 1..75: mol_type = other DNA
gtgcgaataattacgacctggtcattaatcttacggatcagtggatggtggccctgctggtacgttgtttacctg

SEQ ID NO: 187946 - DNA, 75 bp, synthetic construct
  source 1..75: mol_type = other DNA
gggcggctataggtgctgccgctggtccaattgctgaattggcatctccagtgattagtaaagcagccagtgcgg

SEQ ID NO: 187947 - DNA, 75 bp, synthetic construct
  source 1..75: mol_type = other DNA
cacgcaatggggccaatatgaaggctctccgtgatgctattggcacagatgcatcaaagcgccttgatacgattt

SEQ ID NO: 187948 - DNA, 75 bp, synthetic construct
  source 1..75: mol_type = other DNA
ttacagccgtaacaattaatgcggcaaatgaagacctgaatgttacttttgctggtcatgatattactactgaat

SEQ ID NO: 187949 - DNA, 75 bp, synthetic construct
  source 1..75: mol_type = other DNA
aaggaagaggagttaaaaatttcggtaattgacctgcaccgggcgcagcttcgcacgcgcgttccacgtcgttgg

SEQ ID NO: 187950 - DNA, 75 bp, synthetic construct
  source 1..75: mol_type = other DNA
atggcaaccgatgtaggtttacccgaaggatttgttctcgataatcagcctgataactcacagcttcctgatggt

SEQ ID NO: 187951 - DNA, 75 bp, synthetic construct
  source 1..75: mol_type = other DNA
ggacgagaagaaaaatctagcccgcgttggtattgtcgcttttctcagtaataacgattctttgcccacagagca

SEQ ID NO: 187952 - DNA, 75 bp, synthetic construct
  source 1..75: mol_type = other DNA
cgtatggattgttgcctttgctgcatcatttttcgtgtatagcttcaacgcagattcagcgcttgaagaagctgc

SEQ ID NO: 187953 - DNA, 75 bp, synthetic construct
  source 1..75: mol_type = other DNA
aacggcttattttgtcgatgcgccgtatcaggtcgataaaatcagcgaacaaactttcgctgactggcagaaaaa

SEQ ID NO: 187954 - DNA, 75 bp, synthetic construct
  source 1..75: mol_type = other DNA
cgcaccgctttctatctggaagtggaaaatgacgccttaccaggggcggtagaccgcctggcggacgccattgcg

SEQ ID NO: 187955 - DNA, 75 bp, synthetic construct
  source 1..75: mol_type = other DNA
atgatttctcgctgattaagtcagagaagaaatacgaccatccagagctgattgttgatgagtcgaatctgcgcg

SEQ ID NO: 187956 - DNA, 75 bp, synthetic construct
  source 1..75: mol_type = other DNA
gacggaaatgacagttatacgttaacattacccaatatgggtctggatcaaatagtaaataaaaccaccagggcc

SEQ ID NO: 187957 - DNA, 75 bp, synthetic construct
  source 1..75: mol_type = other DNA
gaaatattacgcagcgcagctgctcgggaatatggcccgccgtcgagcccctgctgttaactcagtggatttgta

SEQ ID NO: 187958 - DNA, 75 bp, synthetic construct
  source 1..75: mol_type = other DNA
ctggatatcgacttccgttatccgtcaatcacccgtgatatggattacgtcgaatggctggcagataccatgatt

SEQ ID NO: 187959 - DNA, 75 bp, synthetic construct
  source 1..75: mol_type = other DNA
gccaagccgttatttttccagcgaacccaaagctgatgtcagcctgattttgcgtaatccgaaagccatggacag

SEQ ID NO: 187960 - DNA, 75 bp, synthetic construct
  source 1..75: mol_type = other DNA
gcgccccggaacttttaccctttctgaaatattacgcagcgcagctgctcgggaatatggcccgccgtcgagccc

SEQ ID NO: 187961 - DNA, 75 bp, synthetic construct
  source 1..75: mol_type = other DNA
tgagtttcgcatcgataacaactcagcgaagttccgtagtaaaacggatgaattgattacctatctgattggtaa

SEQ ID NO: 187962 - DNA, 75 bp, synthetic construct
  source 1..75: mol_type = other DNA
gccggtagtcaccgacgcgcaaaagggcattatcattcattacgtcccggcactgccgcgtaaagttctgcgcgt

SEQ ID NO: 187963 - DNA, 75 bp, synthetic construct
  source 1..75: mol_type = other DNA
cggcggttttcgtgccaacgggttatgatgaatacaccagctcagcctacagttctctgttggggcagataatac

SEQ ID NO: 187964 - DNA, 75 bp, synthetic construct
  source 1..75: mol_type = other DNA
caatactgacgggattatttttatcatcctctgtacttgcaacagacattaatgttgattttacagcaaccgtaa

SEQ ID NO: 187965 - DNA, 75 bp, synthetic construct
  source 1..75: mol_type = other DNA
tcttaatactctgaatgatattgatatttccggcctcgatccgcgcttaaaagattgcgtcattcgcgtcgcttg

SEQ ID NO: 187966 - DNA, 75 bp, synthetic construct
  source 1..75: mol_type = other DNA
cgtggcgaagaagtaccataaaccggtaattggtattgcaggtagcctgacgaacgatgtcgctgttgtacatca

SEQ ID NO: 187967 - DNA, 75 bp, synthetic construct
  source 1..75: mol_type = other DNA
cggtccgtttgagttgcttcaggctcgccagctcatcgaaagtaatattgccgagttcgcggcaactcaggtaac

SEQ ID NO: 187968 - DNA, 75 bp, synthetic construct
  source 1..75: mol_type = other DNA
gggagatagccctgatatccgtgtgtcgatttggggaatatatgcagtattggggaaaaatcattggcgtggccg

SEQ ID NO: 187969 - DNA, 75 bp, synthetic construct
  source 1..75: mol_type = other DNA
gccagtgaagcgatgattgttgagctggacaataacctctctcactatgccgaggtcattaaaaaagcgctgcat

SEQ ID NO: 187970 - DNA, 75 bp, synthetic construct
  source 1..75: mol_type = other DNA
taatatcgccgcgacactggcgattggaatgcgcaacgcgggtgacaagggcgcgcaaaccctctatactgcgcg

SEQ ID NO: 187971 - DNA, 75 bp, synthetic construct
  source 1..75: mol_type = other DNA
gtcggtttcgtgttccagcattacgcgctgttccgccatatgacggtgttcgacaatatcgcttttggcctgacg

SEQ ID NO: 187972 - DNA, 75 bp, synthetic construct
  source 1..75: mol_type = other DNA
ggatgcgcaggtgcgtaaagagctgcgtcgctggttgcgtcaactgcatgaagaactgaaatttaccagcgtatt

SEQ ID NO: 187973 - DNA, 75 bp, synthetic construct
  source 1..75: mol_type = other DNA
cctgcagggaaccattcgcggcgggcagttccatgttggcgcgcatcgctggccgctgggctacacacctgcgta

SEQ ID NO: 187974 - DNA, 75 bp, synthetic construct
  source 1..75: mol_type = other DNA
gccggtacaggtgctggaagccagcccgaaaggccactacacccaattagtcgtgcagccgctggggtggtatga

SEQ ID NO: 187975 - DNA, 75 bp, synthetic construct
  source 1..75: mol_type = other DNA
cgtgacccacgaccaggaagaggcgaccgaagtagccgatcgtgtagtggtgatgagtcagggcaatattgaaca

SEQ ID NO: 187976 - DNA, 75 bp, synthetic construct
  source 1..75: mol_type = other DNA
atggaagtcgccaaccgcgttgtggtgatgagccagggcaatatcgaacaggctgatgaaccggatcaggtctgg

SEQ ID NO: 187977 - DNA, 75 bp, synthetic construct
  source 1..75: mol_type = other DNA
gttgaggatggtgtcattgtggaacgcggcacgcataacgatttgcttgagcaccgtggtgtctacgcgcaactt

SEQ ID NO: 187978 - DNA, 75 bp, synthetic construct
  source 1..75: mol_type = other DNA
aacgtggactggagagccatcaacaacaatcggcagaaaatctttcgctggttacgtggcgagacaacggcggcg

SEQ ID NO: 187979 - DNA, 75 bp, synthetic construct
  source 1..75: mol_type = other DNA
gagctggtgggtttgctaaagcggtaatagatagtttggattatgatgaatatgttctcgaggggtttattgatt

SEQ ID NO: 187980 - DNA, 75 bp, synthetic construct
  source 1..75: mol_type = other DNA
agagttatatggaagtaacttcgaaattgagcgacctaatgaaaatatgaaagcatttctgaaaagtgcgaaaca

SEQ ID NO: 187981 - DNA, 75 bp, synthetic construct
  source 1..75: mol_type = other DNA
ccatggactttatcaataagatggataacggtcttgatacggtgattggtgaaaacggcgtgttgctctctggcg

SEQ ID NO: 187982 - DNA, 75 bp, synthetic construct
  source 1..75: mol_type = other DNA
cgtcgtcgcctgtttggtcatatgatgggaatgccggtttcattttttgataaacagtcaaccgggactctgctt

SEQ ID NO: 187983 - DNA, 75 bp, synthetic construct
  source 1..75: mol_type = other DNA
ctggtggaagcctacaccgaataccggcatcactgcgaaacactcgatgttgagggttatacctaccgcacggaa

SEQ ID NO: 187984 - DNA, 75 bp, synthetic construct
  source 1..75: mol_type = other DNA
caccggcaagccgggcgaaagtaaataccgccggaccggatgatgttgatccgctggcagagcttttaaaagcga

SEQ ID NO: 187985 - DNA, 75 bp, synthetic construct
  source 1..75: mol_type = other DNA
tggttcaggcgaatggcagaagaactgaatgcggaagggatcatttctcagcttgatgcgcgtgcactcgagtta

SEQ ID NO: 187986 - DNA, 75 bp, synthetic construct
  source 1..75: mol_type = other DNA
agtgatattagtttgccaactgagtactattattttattgccattggtgatcctgatgatagagcattatggtta

SEQ ID NO: 187987 - DNA, 75 bp, synthetic construct
  source 1..75: mol_type = other DNA
aaatggctatagtgaattgtgattcacaattagaggatggagtcgtgattaatactagagccttgatagaacatg

SEQ ID NO: 187988 - DNA, 75 bp, synthetic construct
  source 1..75: mol_type = other DNA
tcaactattatcggctcgggggcagtggttattcgtgatattcctgataatgtagttgttgcaggtacaccaaca

SEQ ID NO: 187989 - DNA, 75 bp, synthetic construct
  source 1..75: mol_type = other DNA
taaaaccgttaaaaatcataatattgtgtctgttttgtttgaggctatgaaaggctatctgcaggatggtagctg

SEQ ID NO: 187990 - DNA, 75 bp, synthetic construct
  source 1..75: mol_type = other DNA
cggaatttgatccggtcattttctcaataggacccgtggcgcttcactggtacggcctgatgtatctggtgggtt

SEQ ID NO: 187991 - DNA, 75 bp, synthetic construct
  source 1..75: mol_type = other DNA
gcactactagggtaatgatatttgatagcgttgataatagtgatttaaacatgctattaactgcagcaacaaaaa

SEQ ID NO: 187992 - DNA, 75 bp, synthetic construct
  source 1..75: mol_type = other DNA
caacatatcattattcgcattactggcactactagggtaatgatatttgatagcgttgataatagtgatttaaac

SEQ ID NO: 187993 - DNA, 75 bp, synthetic construct
  source 1..75: mol_type = other DNA
aaggcaaattctacgcgctgccgcaatctccgcagttgttcaaacagttgctgatgatgtccggtttcgaccgct

SEQ ID NO: 187994 - DNA, 75 bp, synthetic construct
  source 1..75: mol_type = other DNA
atcatcaaccgcgcagatgttctgccgcttgactctaaccacgtcaacaccgaagaagcgcgtctgaaataccgc

SEQ ID NO: 187995 - DNA, 75 bp, synthetic construct
  source 1..75: mol_type = other DNA
gttccgtgtctgggacggtggcatgtccttccacggcggcctgattggcgttatcgtggtgatgattatcttcgc

SEQ ID NO: 187996 - DNA, 75 bp, synthetic construct
  source 1..75: mol_type = other DNA
aaagactatattaatcttgccagagaacttggtttctcttatttatatacaacagaaagaagaatgaactttccc

SEQ ID NO: 187997 - DNA, 75 bp, synthetic construct
  source 1..75: mol_type = other DNA
tctttttatcagggagaaaagctccccagaaaaagcgtcatgataacatttgatgacggttatcttgataactgg

SEQ ID NO: 187998 - DNA, 75 bp, synthetic construct
  source 1..75: mol_type = other DNA
ttaatcaataaaaacgactataaaaagtacagtaaagcagactacgaattccatcttggtattgttaatgcggca

SEQ ID NO: 187999 - DNA, 75 bp, synthetic construct
  source 1..75: mol_type = other DNA
aaattggataaaaacacttgtgcaataactacatccctgcctgaaagtgaaatcgaagatttaatcaggtgcaaa

SEQ ID NO: 188000 - DNA, 75 bp, synthetic construct
  source 1..75: mol_type = other DNA
ttcttatgtatcatcacgtcagtcgttgcccgggacttgtgacactttcacctgaaacatttcatgaacagatga

SEQ ID NO: 188001 - DNA, 75 bp, synthetic construct
  source 1..75: mol_type = other DNA
gcaaagaatggcgttcgttattctgataccgctggcaataaactggtgcatgaaacgttcgaagctatccagtat

SEQ ID NO: 188002 - DNA, 75 bp, synthetic construct
  source 1..75: mol_type = other DNA
atgaatccacaattgttacgcgtaacaaatcgaatcattgaacgttcgcgcgagactcgctctgcttatctcgcc

SEQ ID NO: 188003 - DNA, 75 bp, synthetic construct
  source 1..75: mol_type = other DNA
tgtttaccgtcatggtggcaaacctgatccactgggcagatgaacacggctaccggctgacgtttggtgaagcct

SEQ ID NO: 188004 - DNA, 75 bp, synthetic construct
  source 1..75: mol_type = other DNA
aaaaatagtctgcatactcaacggttggctattgattttaatttattcgtaaacggcgaatataaaacagacacc

SEQ ID NO: 188005 - DNA, 75 bp, synthetic construct
  source 1..75: mol_type = other DNA
aaagtggatcgtatggcgctgctggagtcagaagcggcgtcttaccatgctccgggaacctgtactttctacggc

SEQ ID NO: 188006 - DNA, 75 bp, synthetic construct
  source 1..75: mol_type = other DNA
ccggactgacgatggcggcactgtcgttcggtcatttacctgcggtatttgtgccatcagggccaatggcaagcg

SEQ ID NO: 188007 - DNA, 75 bp, synthetic construct
  source 1..75: mol_type = other DNA
ctttcgaacagccgttctcgcatcatggcgggacaaaagttttaagcggcaacttgggtcgtgctgttatgaaaa

SEQ ID NO: 188008 - DNA, 75 bp, synthetic construct
  source 1..75: mol_type = other DNA
gaagctgtacgcgacgggcgcattaagccggggcagttggttctgcttgaagcctttggcggtggattcacctgg

SEQ ID NO: 188009 - DNA, 75 bp, synthetic construct
  source 1..75: mol_type = other DNA
acggcgcgggcgctgctgtgcttgctgcctctgaagagcctggaattatctccacgcatcttcatgccgatggca

SEQ ID NO: 188010 - DNA, 75 bp, synthetic construct
  source 1..75: mol_type = other DNA
gtggatacctctgacgagtggattgtcactcgtaccggtatccgcgaacgccacattgccgcgccaaacgaaacc

SEQ ID NO: 188011 - DNA, 75 bp, synthetic construct
  source 1..75: mol_type = other DNA
tggacgtcaacttccaggcagctcgtccgccggaagaagtaaaagcggcgtttgacgatgcgattgccgcgcgtg

SEQ ID NO: 188012 - DNA, 75 bp, synthetic construct
  source 1..75: mol_type = other DNA
tctttaccgttatggtggcaaatctgatccagtgggctgaagaacatggctaccggctgacgtttggtgaggctt

SEQ ID NO: 188013 - DNA, 75 bp, synthetic construct
  source 1..75: mol_type = other DNA
tgatggtaaaggcgaaagagccgaagtttgggcgttgtcaacaaaatatgacgctaacaatgtttatgctgctgt

SEQ ID NO: 188014 - DNA, 75 bp, synthetic construct
  source 1..75: mol_type = other DNA
cagcctttgaagcgggtttgctggaccgtgattgtgtggttgttgttcgtcatcaggggccaaaagcgaacggaa

SEQ ID NO: 188015 - DNA, 75 bp, synthetic construct
  source 1..75: mol_type = other DNA
gatcccgacaactggggaaacgctggataacattgtctgtttctggcaaccggagaaagcaattaaagcgggcga

SEQ ID NO: 188016 - DNA, 75 bp, synthetic construct
  source 1..75: mol_type = other DNA
gacacatatcaatacggtctatcggctcgcggcctggcgatcgacacttacaccgacagtaaagaagagttcccc

SEQ ID NO: 188017 - DNA, 75 bp, synthetic construct
  source 1..75: mol_type = other DNA
cgtcgccgcgttcgtatgttttctgtagatcccgcaacacatctggcgcgtgaaattcactttcgcccggagttg

SEQ ID NO: 188018 - DNA, 75 bp, synthetic construct
  source 1..75: mol_type = other DNA
gtcgatatgcgtatgtatttgcgctgccagggcgatgccatcagtgaaacatggctgtatcagtatttccctcca

SEQ ID NO: 188019 - DNA, 75 bp, synthetic construct
  source 1..75: mol_type = other DNA
ccggaaggctgggcgccaggcgaacattatccagaaaaatgggcccgtcgttttgctgttgattttgtcggcggc

SEQ ID NO: 188020 - DNA, 75 bp, synthetic construct
  source 1..75: mol_type = other DNA
gtcagggcgatgccatcagtgaaacatggctgtatcaatatttcccaccagcaccggataaacgtcagtatgttg

SEQ ID NO: 188021 - DNA, 75 bp, synthetic construct
  source 1..75: mol_type = other DNA
gtcttttccgaacgttcaatgtcgttgatgactttaactatgaggcgttgtcgattgaaaacaatctgaatctgc

SEQ ID NO: 188022 - DNA, 75 bp, synthetic construct
  source 1..75: mol_type = other DNA
gaagagtgtacctatgacaattacagtactgggaaccccactgagctggaatgccaaatactcagctgatgcctc

SEQ ID NO: 188023 - DNA, 75 bp, synthetic construct
  source 1..75: mol_type = other DNA
tacgaagacctgatgaataaccagaaaatcccggacagtggtgttctgacgcagaaagtgaaagagcagattgct

SEQ ID NO: 188024 - DNA, 75 bp, synthetic construct
  source 1..75: mol_type = other DNA
gatctcggcacagtgacgctggactattttgccgacaatgtaaccccaacgacggattacgcaggtggcaaaacc

SEQ ID NO: 188025 - DNA, 75 bp, synthetic construct
  source 1..75: mol_type = other DNA
gatctcggcagtgtgaccctggactattttgccgacaacgtaactccaacaacggattatgcgggtggcaagacg

SEQ ID NO: 188026 - DNA, 75 bp, synthetic construct
  source 1..75: mol_type = other DNA
agccgaatcagcagacatttaacgtgcgaggaacggatggttcctcaacagcaatttattcggtcgcgcctggca

SEQ ID NO: 188027 - DNA, 75 bp, synthetic construct
  source 1..75: mol_type = other DNA
gcaggcagattgacaaaagggccgctgagaaaatcagcgccggtcagtcagccggaagcaaacccgaagagccgc

SEQ ID NO: 188028 - DNA, 75 bp, synthetic construct
  source 1..75: mol_type = other DNA
gcttcatgcatttcacaatatgtgatggtgattgctgatggtgattttgccgaaaaggtggtcgcggttgttctt

SEQ ID NO: 188029 - DNA, 75 bp, synthetic construct
  source 1..75: mol_type = other DNA
ccttaacccggctaacatccgcgcgctgatgacagcaggcaccctctgtttcgtcatcgggctggtcggttttat

SEQ ID NO: 188030 - DNA, 75 bp, synthetic construct
  source 1..75: mol_type = other DNA
gcagatcaacccacagcttgctggtcacggtggtcgcgtttcgctgatggaaatcaccgaagacggttacgccat

SEQ ID NO: 188031 - DNA, 75 bp, synthetic construct
  source 1..75: mol_type = other DNA
gtggctgacgatgcgccgctgatggagcgcgtggagtatatgctgcaatcacagatcaacccacagcttgctggt

SEQ ID NO: 188032 - DNA, 75 bp, synthetic construct
  source 1..75: mol_type = other DNA
gatcttatcaatgaacaaacggcatttatttctaccggcaaagacagcactctaaaagccacaggcacaacggaa

SEQ ID NO: 188033 - DNA, 75 bp, synthetic construct
  source 1..75: mol_type = other DNA
accgccggagatgatggagatggcgaaacagaaagcacaggaaattcagcaagcgtatgagctgattaagcagca

SEQ ID NO: 188034 - DNA, 75 bp, synthetic construct
  source 1..75: mol_type = other DNA
gccgcctgagatgatggagatggcgaagcagaaagcgcaggaaattcagcaggcctatgaattgattaagcagca

SEQ ID NO: 188035 - DNA, 75 bp, synthetic construct
  source 1..75: mol_type = other DNA
gatattcatatcgccagccagttgatggaccgaatgaaccttcatggcgcttcccgtactgcggcgcaaaacgcg

SEQ ID NO: 188036 - DNA, 75 bp, synthetic construct
  source 1..75: mol_type = other DNA
gacagattgacaaaagggccgctgagaaaatcagcgccagtcagtcagccggaacaaaacccgaagagcctctca

SEQ ID NO: 188037 - DNA, 75 bp, synthetic construct
  source 1..75: mol_type = other DNA
agggctgtgcgcgatttctggcgcaggcagattgataaaagggccgcagagaaaatcagcgccagtcagtcagcc

SEQ ID NO: 188038 - DNA, 75 bp, synthetic construct
  source 1..75: mol_type = other DNA
atggcaacgcacagaggtgataacggatttcaggaacgtgtattcgcattgcgggagaaattacaggaaatcgct

SEQ ID NO: 188039 - DNA, 75 bp, synthetic construct
  source 1..75: mol_type = other DNA
cacggtggtcgcgtttcgctgatggaaatcaccgaagacggttacgccattctgcaatttggcggcggctgtaac

SEQ ID NO: 188040 - DNA, 75 bp, synthetic construct
  source 1..75: mol_type = other DNA
gtgattaatgctacaggctccaccatcacagctcaaggtgaaggcacctatgtccggtctgcaatggtcatttct

SEQ ID NO: 188041 - DNA, 75 bp, synthetic construct
  source 1..75: mol_type = other DNA
ttgctcaaaagggtagtttattgcagggttttgacggtgatgcaacagacaacattacccttgctggctcaaata

SEQ ID NO: 188042 - DNA, 75 bp, synthetic construct
  source 1..75: mol_type = other DNA
aacagttcggcacgcaaaaggccgttaacgatctcaatctcaattttcaggaggggagcttttcggtgctgattg

SEQ ID NO: 188043 - DNA, 75 bp, synthetic construct
  source 1..75: mol_type = other DNA
cgcctctgaagagccaggaattatctccacccatctgcatgccgacggcagctatggtgaattgctgacgctgcc

SEQ ID NO: 188044 - DNA, 75 bp, synthetic construct
  source 1..75: mol_type = other DNA
cgcacgctttcccgagcgcagcttgtcagattcaaagcatgttgggcattaaaggttgcccggcatttgacgttg

SEQ ID NO: 188045 - DNA, 75 bp, synthetic construct
  source 1..75: mol_type = other DNA
aaaaggtagtgcgacagggatatctctggaagggccccagggaaataatgtcacgctcaatggcacaaccataaa

SEQ ID NO: 188046 - DNA, 75 bp, synthetic construct
  source 1..75: mol_type = other DNA
gaggggagtttttcggtgctgattggtacatcaggctccggtaaatccaccactctgaaaatgattaaccgcctg

SEQ ID NO: 188047 - DNA, 75 bp, synthetic construct
  source 1..75: mol_type = other DNA
tcatgatattgatgaggcgctacggctggcagaacatctggtattgatggatcacggtgaagtggtgcagcaggg

SEQ ID NO: 188048 - DNA, 75 bp, synthetic construct
  source 1..75: mol_type = other DNA
cggatgggctatgccattcaatctattggcctgtttccccactggagcgtggcgcaaaacatcgctaccgtgccg

SEQ ID NO: 188049 - DNA, 75 bp, synthetic construct
  source 1..75: mol_type = other DNA
ggcacaaaacattgccaccgtgccgcaattacaaaaatggtcgcgggcgaggattgacgatcgtatcgacgaatt

SEQ ID NO: 188050 - DNA, 75 bp, synthetic construct
  source 1..75: mol_type = other DNA
gagatgacgcgcattcaccgtttgctggggcgcactattgtgctggtcactcatgatattgatgaggcgctacgg

SEQ ID NO: 188051 - DNA, 75 bp, synthetic construct
  source 1..75: mol_type = other DNA
gctttgccggagaggagattcgttcgctgccggtgctggagttgcgccgccggatgggctacgcgattcaatcta

SEQ ID NO: 188052 - DNA, 75 bp, synthetic construct
  source 1..75: mol_type = other DNA
agccgccggatttcgctgaccgatctccgcttttttgctcctgcgctgacgaaggaggaatttcatggcaaccgt

SEQ ID NO: 188053 - DNA, 75 bp, synthetic construct
  source 1..75: mol_type = other DNA
ccgacaaaagcaaacttcttcggacacctgaaaaagccgcagattatcgcagccctgaatgaggcaggactgtcc

SEQ ID NO: 188054 - DNA, 75 bp, synthetic construct
  source 1..75: mol_type = other DNA
agcttatcgccaatggcgttaaggcggtcgccgaaggggcaaacatgcctaccaccatcgaagcgaccgagctat

SEQ ID NO: 188055 - DNA, 75 bp, synthetic construct
  source 1..75: mol_type = other DNA
ggtgccgcacgggacgcggagaagatgaagaaaggcgatgcggctgaacatgcagagttccacatgaaagacaac

SEQ ID NO: 188056 - DNA, 75 bp, synthetic construct
  source 1..75: mol_type = other DNA
ctgatggcagaaaaagcccgtcttgctgccctgttaccggagggatggtcacgggacatgacgacgttcctgtca

SEQ ID NO: 188057 - DNA, 75 bp, synthetic construct
  source 1..75: mol_type = other DNA
ctggttgttcatgccctgccaggtgaccgccacggtgtcgccgcaggtggtcgccgactggctgcactcaacatg

SEQ ID NO: 188058 - DNA, 75 bp, synthetic construct
  source 1..75: mol_type = other DNA
gtaaacctctccatccttaaattcctcggcttcgaacaaacctttaaaaatgctctgactaccctgccaatgggc

SEQ ID NO: 188059 - DNA, 75 bp, synthetic construct
  source 1..75: mol_type = other DNA
ctgcctcctcccccttcccggcgatgcggcagaacgcttgtttccgtcggtgcggtttcgtgtcagggagcgcag

SEQ ID NO: 188060 - DNA, 75 bp, synthetic construct
  source 1..75: mol_type = other DNA
tggaatgtaaacattattcgctgaccagcgatgcgccgtcagggaaggaaggtgccgcgttcatggcgatgatgg

SEQ ID NO: 188061 - DNA, 75 bp, synthetic construct
  source 1..75: mol_type = other DNA
ggttttgaagggatgcgcgtttccgtttctggctccggcaacgtcgcccagtacgctatcgaaaaagcgatggaa

SEQ ID NO: 188062 - DNA, 75 bp, synthetic construct
  source 1..75: mol_type = other DNA
aaccgtggtctgtgccggttgatatcgccctgccgtgcgcgacccagaacgaactggatgttgacgctgcacatc

SEQ ID NO: 188063 - DNA, 75 bp, synthetic construct
  source 1..75: mol_type = other DNA
accaccatcgaagcgactgaactgttccagcaggcaggcgtactgtttgcaccgggtaaagcggctaatgctggc

SEQ ID NO: 188064 - DNA, 75 bp, synthetic construct
  source 1..75: mol_type = other DNA
tgtcgccgcaggtggtcgcagactggcagcactcaatatgctggctgagcgtggaatcattccggctgactggcc

SEQ ID NO: 188065 - DNA, 75 bp, synthetic construct
  source 1..75: mol_type = other DNA
aattccgcaggagctggcgacagcagcatcaatgactgaaaacggtcatcgtcgggatatgcaccctgccgaaca

SEQ ID NO: 188066 - DNA, 75 bp, synthetic construct
  source 1..75: mol_type = other DNA
tcgccgactggctgcactcaacatgctggcagagcgtggcatcattccggctgactggcctgtacgggtgaaggt

SEQ ID NO: 188067 - DNA, 75 bp, synthetic construct
  source 1..75: mol_type = other DNA
ggggctgatgccttctcgccagacgaactgcgcaccgatttgttcagcgacgacgagggtggctatgtggactac

SEQ ID NO: 188068 - DNA, 75 bp, synthetic construct
  source 1..75: mol_type = other DNA
aattccgcaggagctggcgacggcggcatcaatgactgaaaacggtcatcgtcgggatatgcaccctgccgaaca

SEQ ID NO: 188069 - DNA, 75 bp, synthetic construct
  source 1..75: mol_type = other DNA
aattccgcaggagctggcgaccgccgcatcaatgactgaaaacggtcatcgtcgggatatgcaccctgccgaaca

SEQ ID NO: 188070 - DNA, 75 bp, synthetic construct
  source 1..75: mol_type = other DNA
aattccgcaggagctggcgactgctgcatcaatgactgaaaacggtcatcgtcgggatatgcaccctgccgaaca

SEQ ID NO: 188071 - DNA, 75 bp, synthetic construct
  source 1..75: mol_type = other DNA
ctcagccaggaggtgctgttatccctgctcagcttctgggcactgttgcaaatagtcggtggtgataaacttatc

SEQ ID NO: 188072 - DNA, 75 bp, synthetic construct
  source 1..75: mol_type = other DNA
aaaaactccaggctgttgctgaacaccttcgggaagccgagggctggggatggtgtgccggacgcatggaggccg

SEQ ID NO: 188073 - DNA, 75 bp, synthetic construct
  source 1..75: mol_type = other DNA
ccggaagcggtgtggtggtgtcctggcgttacggtaatgtgtgtgtccagcgtggtgtgcagttgcgcagtgagg

SEQ ID NO: 188074 - DNA, 75 bp, synthetic construct
  source 1..75: mol_type = other DNA
gttgattaagtcaccactgaatgtgcgcacggtgccgtattctgcggagtccgtcagcgaactggctgattccat

SEQ ID NO: 188075 - DNA, 75 bp, synthetic construct
  source 1..75: mol_type = other DNA
atgccctgccaggtgaccgttacggtgtcgccgcaggcggtcgccgactggcagcactcaacatgctggcagagc

SEQ ID NO: 188076 - DNA, 75 bp, synthetic construct
  source 1..75: mol_type = other DNA
tgtccagcgtggtgtgcagttgcgcagtgaggatgacgcgactgacgacgctgaccgcacggaacaggtgcagga

SEQ ID NO: 188077 - DNA, 75 bp, synthetic construct
  source 1..75: mol_type = other DNA
gcgactggtggcagccgacaaaagcaaacttcttcggacacctgaaaaagccgcagattatcacagccctgaatg

SEQ ID NO: 188078 - DNA, 75 bp, synthetic construct
  source 1..75: mol_type = other DNA
aggaagtgagcgtgccgctgtcctcactgattaagtcaccgctgaatgtgcgcacggtgccatattctgcggagt

SEQ ID NO: 188079 - DNA, 75 bp, synthetic construct
  source 1..75: mol_type = other DNA
agccctgaatgaggcaggactgtccggtgccgcacgggacgcggagaaaatgaagaaaggcgatgccgctgaaca

SEQ ID NO: 188080 - DNA, 75 bp, synthetic construct
  source 1..75: mol_type = other DNA
catgacgacgttcctgtcactcagccaggaggtactgttatccctgctcagtttctgcactgcatgcagcatcca

SEQ ID NO: 188081 - DNA, 75 bp, synthetic construct
  source 1..75: mol_type = other DNA
catgacgacgttcctgtcactcagtcaggaggtgctgttatccctgctcagtttctgcaccgcgtgcagcatcca

SEQ ID NO: 188082 - DNA, 75 bp, synthetic construct
  source 1..75: mol_type = other DNA
gcgtgactggtggcagccaaccagagggaattattttggagcgttaaaaaaacagcagattatcgctgccctgaa

SEQ ID NO: 188083 - DNA, 75 bp, synthetic construct
  source 1..75: mol_type = other DNA
tccgtacccgtagctgggacgacaacaacggcgtcacccgttacatcactgaaatccttgttaagaccacgggca

SEQ ID NO: 188084 - DNA, 75 bp, synthetic construct
  source 1..75: mol_type = other DNA
atggcagttcgtggcattaacaaggtcattctcgtaggacgtctgggaaaagatccggaagtccgttacatcccc

SEQ ID NO: 188085 - DNA, 75 bp, synthetic construct
  source 1..75: mol_type = other DNA
cgctgggtgcctggctggatgtgtgcgccacgtccacaggcagagacggaaaccacggaataccgtgacaaccag

SEQ ID NO: 188086 - DNA, 75 bp, synthetic construct
  source 1..75: mol_type = other DNA
tggtgtcctggcgttatggcaacgtgtgtgtccagcgtggtgtgcagttgcgcagcgaggatgacccggctgccg

SEQ ID NO: 188087 - DNA, 75 bp, synthetic construct
  source 1..75: mol_type = other DNA
ggccggtgaatatctgcgcaagggcgcgcaggtctacatcgaggggcaactccgtacccgtagctgggaagataa

SEQ ID NO: 188088 - DNA, 75 bp, synthetic construct
  source 1..75: mol_type = other DNA
gggggagatgcgggagcagacagaatggcatcgcgtggtgctgttcggcaagctcgcggaagtggcaggtgaata

SEQ ID NO: 188089 - DNA, 75 bp, synthetic construct
  source 1..75: mol_type = other DNA
gaaaaacgccgccatcagggaaacttgctggcggaatatccgtatgcgggggcgtttttccgctgtctgaacgga

SEQ ID NO: 188090 - DNA, 75 bp, synthetic construct
  source 1..75: mol_type = other DNA
cggtgtcgttgatacggcaatgatggcgcagaatgcattaaccgcagcggaatcgctgggattgggcggggtata

SEQ ID NO: 188091 - DNA, 75 bp, synthetic construct
  source 1..75: mol_type = other DNA
ttttgggtgttctgtgccgactttaaccgccatttacagatctgtccggatgctcagctcggcctggcggaacaa

SEQ ID NO: 188092 - DNA, 75 bp, synthetic construct
  source 1..75: mol_type = other DNA
tggcagaaaaagcccgtcttgctgccctgttaccggagggatggtcacgggacatgacgacattcctgtcactca

SEQ ID NO: 188093 - DNA, 75 bp, synthetic construct
  source 1..75: mol_type = other DNA
gcctggctggatgtgtacaccacgtccacaggcagagacggaaaccacggagtaccgtgacgaccaggcagaagc

SEQ ID NO: 188094 - DNA, 75 bp, synthetic construct
  source 1..75: mol_type = other DNA
aagaacgcctgaacgaactgatggcacgttacgacgcgctggaaaaccagtgtgaggaatctgacctgctggaag

SEQ ID NO: 188095 - DNA, 75 bp, synthetic construct
  source 1..75: mol_type = other DNA
ggatatgttattaactactcccgtcattagttcgctgaaaaaaaattaccctgacgcaaaaatcgatgtgctgct

SEQ ID NO: 188096 - DNA, 75 bp, synthetic construct
  source 1..75: mol_type = other DNA
aactgcgcaccgatttgttcagcgacgacgagggtggctatgtggactgtgttgcgctcgatgccgccctgctgg

SEQ ID NO: 188097 - DNA, 75 bp, synthetic construct
  source 1..75: mol_type = other DNA
tactcactgaccagcgctgcgccgtcagggaaggaaggtaccgcattcatggcgctgatggcagagcactttcgc

SEQ ID NO: 188098 - DNA, 75 bp, synthetic construct
  source 1..75: mol_type = other DNA
gtcacgggacatgacgacattcctgtcactcagtcaggaggtgctgttatccctgctcagtttctgcaccgcatg

SEQ ID NO: 188099 - DNA, 75 bp, synthetic construct
  source 1..75: mol_type = other DNA
gtgcggttccgtgtcagggaacgcagtcgccataaatccgcactggtcatgcagaagtacagccgccagcaggca

SEQ ID NO: 188100 - DNA, 75 bp, synthetic construct
  source 1..75: mol_type = other DNA
tcagtggctgtatgccatcgatgtgctgattgaaacacagggcgaggtctgcctccttccccttcccggtgatgc

SEQ ID NO: 188101 - DNA, 75 bp, synthetic construct
  source 1..75: mol_type = other DNA
atatgaaagacaaccgctgggtgcctggctggatgtgtgcaccacgtccacagacggataccactgaacgcaccg

SEQ ID NO: 188102 - DNA, 75 bp, synthetic construct
  source 1..75: mol_type = other DNA
gccccggcaataaacttacggtaagcgacggcagcggcgacacaatcgcattttcaccggcgcgattttccaaat

SEQ ID NO: 188103 - DNA, 75 bp, synthetic construct
  source 1..75: mol_type = other DNA
cggccacgaccaataaaaaacagcagaacgtagcaatgacccgcgaacaatgggtaacggaactggtgaaagctg

SEQ ID NO: 188104 - DNA, 75 bp, synthetic construct
  source 1..75: mol_type = other DNA
tatgccgattacgagcattatgccgaagcatcagactacgactttgacagcagcatttacgacgattacgccatg

SEQ ID NO: 188105 - DNA, 75 bp, synthetic construct
  source 1..75: mol_type = other DNA
ccgcgcggcctggtgacgccggttctgcgtgatgtcgataccctcggcatggcagacatcgagaagaaaattaaa

SEQ ID NO: 188106 - DNA, 75 bp, synthetic construct
  source 1..75: mol_type = other DNA
aaatagcgcagcaactagtacttgagttctaccgtattctgaaaaccccaaataaatcaaatctaagcagttggt

SEQ ID NO: 188107 - DNA, 75 bp, synthetic construct
  source 1..75: mol_type = other DNA
gccgggtatcgatggcgacccgcgacaaaaaaacagacgactattcgcgtgaagatattcataaagagtgggtta

SEQ ID NO: 188108 - DNA, 75 bp, synthetic construct
  source 1..75: mol_type = other DNA
acgcgggaaattacaactcaccgttactcagcaactcgggcgcacatcaacactgtatttgagtggtagccatca

SEQ ID NO: 188109 - DNA, 75 bp, synthetic construct
  source 1..75: mol_type = other DNA
aagtgtttatgaaagcattttatctcagggatgaagccctggcggatgaatacgcgaaactggttgagaattaca

SEQ ID NO: 188110 - DNA, 75 bp, synthetic construct
  source 1..75: mol_type = other DNA
gtacagaaaaggaaatatgggcgcaaaaacaaaaagcactggagtcaaaacttcataaagagattcgtaccggta

SEQ ID NO: 188111 - DNA, 75 bp, synthetic construct
  source 1..75: mol_type = other DNA
acgccagaagctgattcaaatcgctaataagcaggtactgggccatgccacaatagccgatgttgaaaaagcgta

SEQ ID NO: 188112 - DNA, 75 bp, synthetic construct
  source 1..75: mol_type = other DNA
tggttcctggtgcctgaaatgagaaccacggcagcctggcggctgcaaattgaaaaccgccccggttcgtcctgt

SEQ ID NO: 188113 - DNA, 75 bp, synthetic construct
  source 1..75: mol_type = other DNA
ccagtgccagttacagcatgtcacacgatctcaacggtcggatgaccaatctggtcggtgtatacggtacgttgc

SEQ ID NO: 188114 - DNA, 75 bp, synthetic construct
  source 1..75: mol_type = other DNA
attctgtcgtttatccaccagcaggatattgcatctttgatgtccggcctgttctcccgcctgaggggcggagga

SEQ ID NO: 188115 - DNA, 75 bp, synthetic construct
  source 1..75: mol_type = other DNA
aaggtgctgatacgccagatgtatggtcgagccggatttgaactacttaggcggagggtaatgagtccactggca

SEQ ID NO: 188116 - DNA, 75 bp, synthetic construct
  source 1..75: mol_type = other DNA
ttccggctgaggccgtgcgactcaaccccaagcaacggcataacggacgggtataccagtctatttattcactgg

SEQ ID NO: 188117 - DNA, 75 bp, synthetic construct
  source 1..75: mol_type = other DNA
ggaactgggcgcaccggaagtgagtagtttgtggcaccaacaacaaaaaaatccgccgttcgttctaaagcataa

SEQ ID NO: 188118 - DNA, 75 bp, synthetic construct
  source 1..75: mol_type = other DNA
aacctcggactgaatattaactaccgttttggcgtgccgctcaataaacaactgtctgctggtgaagttgcggaa

SEQ ID NO: 188119 - DNA, 75 bp, synthetic construct
  source 1..75: mol_type = other DNA
tccttcagtgtcccgggtaagccgctggttgatgccctggagaataatcaggggcgaagaaaattatgcatcccg

SEQ ID NO: 188120 - DNA, 75 bp, synthetic construct
  source 1..75: mol_type = other DNA
tcgtgccaacctgcgtgataactatcgtctggttgatggcgcatcgaaagacggctggttgttcactgctgaaca

SEQ ID NO: 188121 - DNA, 75 bp, synthetic construct
  source 1..75: mol_type = other DNA
atgcgaactagagatgcagccgtggggcactggagccggatttttgaatattacggcatgcctcctgttactggt

SEQ ID NO: 188122 - DNA, 75 bp, synthetic construct
  source 1..75: mol_type = other DNA
aactgtgccgcagaagatttccgcctggcgtgtggcggcgcattttctggtgtcgtttatcgtcggcgtgctggg

SEQ ID NO: 188123 - DNA, 75 bp, synthetic construct
  source 1..75: mol_type = other DNA
atgtctgaacccttatccggttccggcacggctgcggcgctcggcggggcgacggtgtacgggctgtttaccgga

SEQ ID NO: 188124 - DNA, 75 bp, synthetic construct
  source 1..75: mol_type = other DNA
agcatgttgattttgacctgaatccagatttttttgctgaagtggtcattggtctggcggacagtgaagatggct

SEQ ID NO: 188125 - DNA, 75 bp, synthetic construct
  source 1..75: mol_type = other DNA
tgactgaagatgaaacgcttgagcaggcctacgatatttttctcgagctggccgcagataatctcgatccggcag

SEQ ID NO: 188126 - DNA, 75 bp, synthetic construct
  source 1..75: mol_type = other DNA
aacatgttgatttcgatttgaacccagacttttttgccgaagtggtgattggtctggcggacagtgaagatggtg

SEQ ID NO: 188127 - DNA, 75 bp, synthetic construct
  source 1..75: mol_type = other DNA
aattaacgaagacagacgacgtgaaaatccttattcacgaccagttaattatcaacgcttcaatgctggcgctgg

SEQ ID NO: 188128 - DNA, 75 bp, synthetic construct
  source 1..75: mol_type = other DNA
aaaacaaaaggccgtggacgtaaggccgcgcagccggagcctcagccgcaaccgccggagggtgacgattacggg

SEQ ID NO: 188129 - DNA, 75 bp, synthetic construct
  source 1..75: mol_type = other DNA
gaacatgcagagcaccatatgaaagacaaccgctgggtgcctggctggatgtgtgcaccacgtccacagacggat

SEQ ID NO: 188130 - DNA, 75 bp, synthetic construct
  source 1..75: mol_type = other DNA
aatacaccctgcgtttttgttgtgcccgtcagatccagaataaaatcgaagagtcggtgtataccctgctcaaaa

SEQ ID NO: 188131 - DNA, 75 bp, synthetic construct
  source 1..75: mol_type = other DNA
caatgacttctactctgacatccaaaccgacgcttaatccggctttacgtagtttctggactacgcgggcacgta

SEQ ID NO: 188132 - DNA, 75 bp, synthetic construct
  source 1..75: mol_type = other DNA
ttcttcgcatggaggcaatataaacatgctgacgaaatatgcccttgcggcagtcatagtgctgtgtttaacggt

SEQ ID NO: 188133 - DNA, 75 bp, synthetic construct
  source 1..75: mol_type = other DNA
gattccgcaggagctggcgacggcagcatcaatgactgaaaacggtcatcgtcgggatatgcaccctgccgaaca

SEQ ID NO: 188134 - DNA, 75 bp, synthetic construct
  source 1..75: mol_type = other DNA
cattccgcaggagctggcgaccgcagcatcaatgactgaaaacggtcatcgtcgggatatgcaccctgccgaaca

SEQ ID NO: 188135 - DNA, 75 bp, synthetic construct
  source 1..75: mol_type = other DNA
tattccgcaggagctggcgactgcagcatcaatgactgaaaacggtcatcgtcgggatatgcaccctgccgaaca

SEQ ID NO: 188136 - DNA, 75 bp, synthetic construct
  source 1..75: mol_type = other DNA
cgccggagatgcgtgccggaggtggagtggtggtgtcctggcgttatggaaacgtatgtgtccagcgtggtgtgc

SEQ ID NO: 188137 - DNA, 75 bp, synthetic construct
  source 1..75: mol_type = other DNA
gacaaccgctgggtgcctggctggatgtgtgcaccacgtccacagacggataccactgaacgcaccgataacctg

SEQ ID NO: 188138 - DNA, 75 bp, synthetic construct
  source 1..75: mol_type = other DNA
agtccgtcttgcagccctgctgccggagggatggtcacgggacatgacgacgttcctgtcactcagtcaggaggt

SEQ ID NO: 188139 - DNA, 75 bp, synthetic construct
  source 1..75: mol_type = other DNA
catagccatatttctgtcgaataaatacagcctgcgcttttgctgtgcacgtcagatccagaacaaaattgaaga

SEQ ID NO: 188140 - DNA, 75 bp, synthetic construct
  source 1..75: mol_type = other DNA
ctttaagagacttcagagaatatgctgctaaaaatgcagagtatatggcaagactggcaggacttattcaccatt

SEQ ID NO: 188141 - DNA, 75 bp, synthetic construct
  source 1..75: mol_type = other DNA
acgacctgtttgcctggcttgaagagcaggagccgtgttgtccgcctgagggcccattaaataaggcgattaact

SEQ ID NO: 188142 - DNA, 75 bp, synthetic construct
  source 1..75: mol_type = other DNA
gacggagccgtgcccctggacaacaatatctgcgagcgtgctatccgcccggtggtcatggggcggaaagcatgg

SEQ ID NO: 188143 - DNA, 75 bp, synthetic construct
  source 1..75: mol_type = other DNA
caatttttaatgagacaacgatagagggaatgttaaaatattactccgatagcaatcgctcttttgctcttgtat

SEQ ID NO: 188144 - DNA, 75 bp, synthetic construct
  source 1..75: mol_type = other DNA
atgccaatccgtgatcgaatagagcggaatacgcacctggcggaagaatacgcgaaactggttgagaattacagt

SEQ ID NO: 188145 - DNA, 75 bp, synthetic construct
  source 1..75: mol_type = other DNA
cccctacactgctgaaatggcgagagaattagcaatatggtacggcgatgagtatattcggttatccagtccgtt

SEQ ID NO: 188146 - DNA, 75 bp, synthetic construct
  source 1..75: mol_type = other DNA
tacaaaaccctgatgaactgcgccgtctggcaacagagctgctgacggcacaggcacgcaaatatgagcagcgcc

SEQ ID NO: 188147 - DNA, 75 bp, synthetic construct
  source 1..75: mol_type = other DNA
tacagcctgcgcttttgctgtgcacgtcagatccagaacaaaattgaagagtcggtatataccctgctcaaaatt

SEQ ID NO: 188148 - DNA, 75 bp, synthetic construct
  source 1..75: mol_type = other DNA
tggaagaagcccacgcactgacggaataccagtggaaaattctggagccaacgatccgtaaagagggttcggaat

SEQ ID NO: 188149 - DNA, 75 bp, synthetic construct
  source 1..75: mol_type = other DNA
tgctaaaaatgcagagtatatggcaagactggcaggacttatttaccattcgagcggtgaagagggggacatttc

SEQ ID NO: 188150 - DNA, 75 bp, synthetic construct
  source 1..75: mol_type = other DNA
tgagtatgcctgggcgatgcaggccggctggtcaggaaccctagtggttgacgggtatgccggttacagcgagct

SEQ ID NO: 188151 - DNA, 75 bp, synthetic construct
  source 1..75: mol_type = other DNA
tgccacgggaagagacggtactggcacctgagaccggccccggcgacgggcatccatgcccgggctgtggcgcgg

SEQ ID NO: 188152 - DNA, 75 bp, synthetic construct
  source 1..75: mol_type = other DNA
ctggctgaccttgcgcctgtcatcctcgatgcgctggcagaagaccgcatcaccaccgagcactgtcaggcgctg

SEQ ID NO: 188153 - DNA, 75 bp, synthetic construct
  source 1..75: mol_type = other DNA
ctgaccagcgatgcgccatcggggaaggaaggtgccgcattcctggctttgatggcagaaaaagcccgtcttgcc

SEQ ID NO: 188154 - DNA, 75 bp, synthetic construct
  source 1..75: mol_type = other DNA
taaaggcgtcggcctgctgcagaatctggttgttcatgccctgccaggtgaccgccacggtgtcgccgcaggtgg

SEQ ID NO: 188155 - DNA, 75 bp, synthetic construct
  source 1..75: mol_type = other DNA
tcgccgactggcagcactcaacatgctggcagagcgtgacatcattccggctgactggcctgtccgtgtgaaggt

SEQ ID NO: 188156 - DNA, 75 bp, synthetic construct
  source 1..75: mol_type = other DNA
gggcgagtatatgttgattgaccatattgcgccgccaggaatgaaagccagctatttttccgcccagtcattagg

SEQ ID NO: 188157 - DNA, 75 bp, synthetic construct
  source 1..75: mol_type = other DNA
aggcaatcagtagtcgctggagtaatggtgttgtcgaaggtcatgtaaatcgcctgaagatgctgaaacgccaga

SEQ ID NO: 188158 - DNA, 75 bp, synthetic construct
  source 1..75: mol_type = other DNA
caactggcactcgagttctaccgtattctgaaaacccaaaataaatcacagctaagcagctggttcactcgagtc

SEQ ID NO: 188159 - DNA, 75 bp, synthetic construct
  source 1..75: mol_type = other DNA
gtcattgttttcattgcaagttcaaatagccgaaaaaattcggaggatgaccattcctgtagacaatataattaa

SEQ ID NO: 188160 - DNA, 75 bp, synthetic construct
  source 1..75: mol_type = other DNA
tgctcagtttctgcactgcgtgcagcatccacggtgttcagacccgtgagtatggtcacacgtcacgcagtccgc

SEQ ID NO: 188161 - DNA, 75 bp, synthetic construct
  source 1..75: mol_type = other DNA
acgggacatggcgacgttcctgtcactcagtcaggaggtgctgttgtccctgctcagtttctgcactgcgtgcag

SEQ ID NO: 188162 - DNA, 75 bp, synthetic construct
  source 1..75: mol_type = other DNA
tcgcagactggcagcactcaatatgctggcagagcgtggcatcattccggctgactggcctgtccgcgtgaaaat

SEQ ID NO: 188163 - DNA, 75 bp, synthetic construct
  source 1..75: mol_type = other DNA
acagaaatatctaaaatgccagaagatagcatttttactaagatcaatacaaggattcctcgagacacaatgccc

SEQ ID NO: 188164 - DNA, 75 bp, synthetic construct
  source 1..75: mol_type = other DNA
tcgccgactggcagcactcaacatgctggcagagcgcaacatccttacggctgactggcctgtacgcgtgaaggt

SEQ ID NO: 188165 - DNA, 75 bp, synthetic construct
  source 1..75: mol_type = other DNA
gctatttttccgcccagtcattaggctggttgggcgcagcggtaaatccattagtgagtggtgttgtacttacca

SEQ ID NO: 188166 - DNA, 75 bp, synthetic construct
  source 1..75: mol_type = other DNA
ggaaagcgccatcggctttcacatgcgcgactggtggcagccgacaaaagcaaacttcttcggacacctgaaaaa

SEQ ID NO: 188167 - DNA, 75 bp, synthetic construct
  source 1..75: mol_type = other DNA
caggaggtgctgttgtccctgctcagtttctgcaccgcgtgcagtattcacggtgttcagacccgcaattgtggt

SEQ ID NO: 188168 - DNA, 75 bp, synthetic construct
  source 1..75: mol_type = other DNA
gaagatgctgaaacgccagatgtatggtcgagcaggatttgaactactcaggcagagggtaatgagtccactggc

SEQ ID NO: 188169 - DNA, 75 bp, synthetic construct
  source 1..75: mol_type = other DNA
aaaaagcccgtcttgctgccctgttaccggagggatggtcacgagacatgacgacgttcctgtcactcagtcagg

SEQ ID NO: 188170 - DNA, 75 bp, synthetic construct
  source 1..75: mol_type = other DNA
cgtgccgctggcctcgctgattaagtcaccactgaatgtgcgcacggtgccgtattctgtggagtccgtcagcga

SEQ ID NO: 188171 - DNA, 75 bp, synthetic construct
  source 1..75: mol_type = other DNA
agggcgtggacgccggagatgcgtgccggaagtggcgtggtggtgtcctggcgttatggaaacgtatgtgtccag

SEQ ID NO: 188172 - DNA, 75 bp, synthetic construct
  source 1..75: mol_type = other DNA
attgcgccgccaggaatgaaagccagctatttttccgcccagtctttaggctgcttggtgccgcgattaacccat

SEQ ID NO: 188173 - DNA, 75 bp, synthetic construct
  source 1..75: mol_type = other DNA
cgctacaatattctgtgggccgccgcattaatccggccaacatccgcatattgatgaccgttggcacactctgtt

SEQ ID NO: 188174 - DNA, 75 bp, synthetic construct
  source 1..75: mol_type = other DNA
ctcttttttgccctcattaactgcgcctattccgtttttgctaccgtgttgaaagcctggtttgccgacaatctt

SEQ ID NO: 188175 - DNA, 75 bp, synthetic construct
  source 1..75: mol_type = other DNA
gctatcggattccacatgcgcgactggtggcagccgacaaaagcaaacttcttcggacacctgaaaaagccgcag

SEQ ID NO: 188176 - DNA, 75 bp, synthetic construct
  source 1..75: mol_type = other DNA
tcagcccagccacaggcgacacagaaagccgcaccggaagtcaaagctgaggaaaaatgcacctgttcaccgtgg

SEQ ID NO: 188177 - DNA, 75 bp, synthetic construct
  source 1..75: mol_type = other DNA
ctggcctgcgttgtcggttattacgtggtgtggaatgtatcgcacgcgctgcatacaccgttgatgtcggtcacc

SEQ ID NO: 188178 - DNA, 75 bp, synthetic construct
  source 1..75: mol_type = other DNA
aaaccagcacaaatcagcctggaatgtaaacattattcgctgaccagcgatgcgccgtcagggaaggaaggtgcc

SEQ ID NO: 188179 - DNA, 75 bp, synthetic construct
  source 1..75: mol_type = other DNA
caggaaggcaaaacgcctgcacaaatcggtgatttgctgggctattcgccccgccacgttcagcgaatgctgaaa

SEQ ID NO: 188180 - DNA, 75 bp, synthetic construct
  source 1..75: mol_type = other DNA
atttggcagtggagcgtacagcaatcccgccagaatccgcctggaatgtgagcattattcgctgaccagcgatgc

SEQ ID NO: 188181 - DNA, 75 bp, synthetic construct
  source 1..75: mol_type = other DNA
cgcagcgaggatgatgcggctgacgacgctgaccgcacggaacaggtgctggacaaagcggcagtggaggaaatc

SEQ ID NO: 188182 - DNA, 75 bp, synthetic construct
  source 1..75: mol_type = other DNA
cgcagcgaggatgatgcggctgacgacgctgaccgcacggaacaggtgctggaaaaagcggccgtggaggaaatc

SEQ ID NO: 188183 - DNA, 75 bp, synthetic construct
  source 1..75: mol_type = other DNA
cgcagcgaggatgatgcggctgacgacgctgaccgcacggaacaggtgcaggataaagcggccgtggaggaaatc

SEQ ID NO: 188184 - DNA, 75 bp, synthetic construct
  source 1..75: mol_type = other DNA
gcaattcagcctcaggatacccgtttactgggtgacgtactccggatcttaccagataatggtaactgggtgggg

SEQ ID NO: 188185 - DNA, 75 bp, synthetic construct
  source 1..75: mol_type = other DNA
ccagtctggcagcaaaggaggccggtcatgctgtccgtgagatggagcggtggatggtgccgaacaaactccggg

SEQ ID NO: 188186 - DNA, 75 bp, synthetic construct
  source 1..75: mol_type = other DNA
ccggtagtcgccaccataccacggctgtaaccggaactccgggaagccgatacattatcatgaagccagttacaa

SEQ ID NO: 188187 - DNA, 75 bp, synthetic construct
  source 1..75: mol_type = other DNA
aaagacaaccgctgggtgcctggctggatgtgttcaccacgtccacagacggatgccactgaacgcgccgataac

SEQ ID NO: 188188 - DNA, 75 bp, synthetic construct
  source 1..75: mol_type = other DNA
ggcggtgacggggaacactaaattccgctttgtgggggctgatgccttctcgccagatgaactgcgcaccgattt

SEQ ID NO: 188189 - DNA, 75 bp, synthetic construct
  source 1..75: mol_type = other DNA
acgctggagtgaccgggtggcagagcatgacctggaaaccctgttctggcagtgggcgagcgttttccgtcactg

SEQ ID NO: 188190 - DNA, 75 bp, synthetic construct
  source 1..75: mol_type = other DNA
cgcagcgaggatgatgcggctgacgacgctgaccgcacggaacaggtgccggataaagcggcagtggaggaaatc

SEQ ID NO: 188191 - DNA, 75 bp, synthetic construct
  source 1..75: mol_type = other DNA
ttgcagattatcttgggaaagctaaaaacgacaaaaaaaccaaaagatccgctcactaacgccgaaactgaacag

SEQ ID NO: 188192 - DNA, 75 bp, synthetic construct
  source 1..75: mol_type = other DNA
atgaatacggtctacgaacagaagaccgaatgcgcaagttttgacgtgatgaacaaacagggaagcatgaaggac

SEQ ID NO: 188193 - DNA, 75 bp, synthetic construct
  source 1..75: mol_type = other DNA
ttctacacctatatctgcattgataaagatctgctggtcgaaaacctcggcggtgacgaagcgttagctaatcag

SEQ ID NO: 188194 - DNA, 75 bp, synthetic construct
  source 1..75: mol_type = other DNA
cggagcttacagcaatcccgcaaaaattcgcctggaatgtgagcattatgcgctgaccagcgatgcgccgtcagg

SEQ ID NO: 188195 - DNA, 75 bp, synthetic construct
  source 1..75: mol_type = other DNA
ctgtctgccctgctggcgcagacggaggaagtgagcgtgccgctggcctcactgattaagtcaccgctgaatgtg

SEQ ID NO: 188196 - DNA, 75 bp, synthetic construct
  source 1..75: mol_type = other DNA
agaaaaaagccatcgaatgggcggcagatattgccgattatcttggtaaagccaaaaaagacaaaaaacctaaag

SEQ ID NO: 188197 - DNA, 75 bp, synthetic construct
  source 1..75: mol_type = other DNA
atctgcgtcagtctcctcctctcttgcatggagaaagctcttttaacgctgaccgcaaaatcggtcatcgtccgg

SEQ ID NO: 188198 - DNA, 75 bp, synthetic construct
  source 1..75: mol_type = other DNA
actctggaggcggtttcccaggaaaatggtattcaactgggggtttcatcatgtgatgttcaacgctggcaggct

SEQ ID NO: 188199 - DNA, 75 bp, synthetic construct
  source 1..75: mol_type = other DNA
ccttcgggaagccgaaggctgggaatggtgcgccggacgtatggagcctgtcggttcctgccgtgaggatgccgg

SEQ ID NO: 188200 - DNA, 75 bp, synthetic construct
  source 1..75: mol_type = other DNA
ccactgaatgtgcgcacggtgccgtattctgcggagtctgtcagcgaactggcggagtccattaaaggcgtcggc

SEQ ID NO: 188201 - DNA, 75 bp, synthetic construct
  source 1..75: mol_type = other DNA
gaaaacctaatgacagtgagtgcacttcatcagaccagtaatcgcgataagttgccactgtccaaagatgataat

SEQ ID NO: 188202 - DNA, 75 bp, synthetic construct
  source 1..75: mol_type = other DNA
ctgtctgccctgctggcgcagacggaggaagtgagcgtgccgctggcctcactgattaaatcaccactgaatgtg

SEQ ID NO: 188203 - DNA, 75 bp, synthetic construct
  source 1..75: mol_type = other DNA
attcttgttaagaccacgggcaccatgcagatgttggggagtgcaccacagcagaacgctcaggcgcaaccggag

SEQ ID NO: 188204 - DNA, 75 bp, synthetic construct
  source 1..75: mol_type = other DNA
attcttgttaagaccacgggcaccatgcagatgctggggagtgcaccacagcagaacgcacaggcgcaaccgaag

SEQ ID NO: 188205 - DNA, 75 bp, synthetic construct
  source 1..75: mol_type = other DNA
tggcagagcatgacctggaaaccctgttctggcagtggggcgagcgttttccgtcactggccggaatggaacgct

SEQ ID NO: 188206 - DNA, 75 bp, synthetic construct
  source 1..75: mol_type = other DNA
ctgccactgctgacgaaaatgtcctcagagcgcacgctggcagtccaggcagcactgatgcagcaaccggacaaa

SEQ ID NO: 188207 - DNA, 75 bp, synthetic construct
  source 1..75: mol_type = other DNA
atgtcagttacagagtctaaggtaaaaacggagcgtaaatccagccgtaaacctgcaaaaacgcaggaaacagtc

SEQ ID NO: 188208 - DNA, 75 bp, synthetic construct
  source 1..75: mol_type = other DNA
tcattcttgtcggtcgtctgggaaaagatccggaagtccgttacatcccaaacgggggcgcagtggcaaacctgc

SEQ ID NO: 188209 - DNA, 75 bp, synthetic construct
  source 1..75: mol_type = other DNA
gcctcagcagaatgggcagccacagagtgctgacgcgacgaaaaaaggtggcgcgaaaacgaaaggccgtggacg

SEQ ID NO: 188210 - DNA, 75 bp, synthetic construct
  source 1..75: mol_type = other DNA
accgttacggtgtcgccgcaggtggtcgccgactggcggcactcaacatgctggcagagcgtggcatccttacgg

SEQ ID NO: 188211 - DNA, 75 bp, synthetic construct
  source 1..75: mol_type = other DNA
gtcatcctcgatgcgctggcagaagaccgcatcaccaccgagcactgtcaggcgctggcgctggagaacgacacc

SEQ ID NO: 188212 - DNA, 75 bp, synthetic construct
  source 1..75: mol_type = other DNA
gcaggcacgggaggcagagcagaaaacccgtgcgtaccaggcgctggttgctcaggcagaaatcgaactggcgtt

SEQ ID NO: 188213 - DNA, 75 bp, synthetic construct
  source 1..75: mol_type = other DNA
cctggcgttatggcaacgtgtgtgtccagcgtggtgtgcagttgcgcagtgaggatgacgtggctgacgacgctg

SEQ ID NO: 188214 - DNA, 75 bp, synthetic construct
  source 1..75: mol_type = other DNA
aggtgtcgcattcatggcgctgatggcagaaaaagcccgtcttgcagccctgctgccggagggatggtcacggga

SEQ ID NO: 188215 - DNA, 75 bp, synthetic construct
  source 1..75: mol_type = other DNA
taagtctgccactgctgacgaaaatgtcctcagaacgcacgctggcagtccaggcagcactgatgcagcagccgg

SEQ ID NO: 188216 - DNA, 75 bp, synthetic construct
  source 1..75: mol_type = other DNA
ggcgaaggtcagggcgtggacgccggagatgcgtgccggaagcggtgtggtggtgtcctggcgttatggaaacgt

SEQ ID NO: 188217 - DNA, 75 bp, synthetic construct
  source 1..75: mol_type = other DNA
atgtgtgaaaaagaaccggagctgaaaatagcgcagcaactggtactcgagttctaccgtattctgaaaacccaa

SEQ ID NO: 188218 - DNA, 75 bp, synthetic construct
  source 1..75: mol_type = other DNA
cggtcatcgtcgggatatgcaccctgccgaacagattgccggattccgtgcaatggcgcaggaaggcaaaacacc

SEQ ID NO: 188219 - DNA, 75 bp, synthetic construct
  source 1..75: mol_type = other DNA
atgtcagttacagagtctaagacaaaaacggagcgtaaatccagtcgtaaacctgcaaaaacgcaggaaacagtc

SEQ ID NO: 188220 - DNA, 75 bp, synthetic construct
  source 1..75: mol_type = other DNA
aactgcgtactgatttgttcagcgacgatggggacggttatgtcgaccgcgtggcactcgataccgccctgctgg

SEQ ID NO: 188221 - DNA, 75 bp, synthetic construct
  source 1..75: mol_type = other DNA
ggcgaaggtcagggcgtggacgccggagatgcgtgccggaggtggagtggtggtgtcctggcgttatggaaacgt

SEQ ID NO: 188222 - DNA, 75 bp, synthetic construct
  source 1..75: mol_type = other DNA
ccgccacgttcagcgaatgctgaaactggctgaccttgccccagtgatcctcgatgcgctggcagaagaccacat

SEQ ID NO: 188223 - DNA, 75 bp, synthetic construct
  source 1..75: mol_type = other DNA
ccgccacgttcagcgaatgctgaaactggctgaccttgccccagtgatcctagatgcgctggcagaagaccccat

SEQ ID NO: 188224 - DNA, 75 bp, synthetic construct
  source 1..75: mol_type = other DNA
tcactcgagtccacgaaagcggatcagcagaatttcggcgcgtggcggcggggatggaagctgatgctgcggcta

SEQ ID NO: 188225 - DNA, 75 bp, synthetic construct
  source 1..75: mol_type = other DNA
gatgtgcgggttatccgcaacctgattaccgaaagtgaagtggcggtggctgggaacagtaaattccgcttcgtg

SEQ ID NO: 188226 - DNA, 75 bp, synthetic construct
  source 1..75: mol_type = other DNA
ccgccacgttcagcgaatgctgaaactggcggaccttgccccagtgatcctcgatgcgctggcagaagacctcat

SEQ ID NO: 188227 - DNA, 75 bp, synthetic construct
  source 1..75: mol_type = other DNA
ccgccacgttcagcgaatgctgaaactggcggaccttgccccagtgatccttgatgcgctggcagaagaccccat

SEQ ID NO: 188228 - DNA, 75 bp, synthetic construct
  source 1..75: mol_type = other DNA
tgacaaacagacaggggagatgcgggagcagacggaatggcaccgcgtggtgctgttcggcaagctcgcggaagt

SEQ ID NO: 188229 - DNA, 75 bp, synthetic construct
  source 1..75: mol_type = other DNA
tgacaaacagacaggggagatgcgggagcagaccgaatggcagcgcgtggtgctgttcggcaagctcgcggaagt

SEQ ID NO: 188230 - DNA, 75 bp, synthetic construct
  source 1..75: mol_type = other DNA
tcactcgagtccacgaaagcggatcagcagaatttcggggcgtggccgcggggatggaagctgatgctgcggcta

SEQ ID NO: 188231 - DNA, 75 bp, synthetic construct
  source 1..75: mol_type = other DNA
gagcagacagaatggcaacgcgtggtgctgttcggcaagctcgcggaagtggcaggtgaatatctgcgcaagggg

SEQ ID NO: 188232 - DNA, 75 bp, synthetic construct
  source 1..75: mol_type = other DNA
tgacaaacagacgggggagatgcgggagcagactgaatggcatcgcgtggtgctgttcggcaagctcgcggaagt

SEQ ID NO: 188233 - DNA, 75 bp, synthetic construct
  source 1..75: mol_type = other DNA
tgacaaacagactggggagatgcgggagcagacagaatggcatcgcgtggtgctgttcggcaagctcgcggaagt

SEQ ID NO: 188234 - DNA, 75 bp, synthetic construct
  source 1..75: mol_type = other DNA
gtgctgacgcaacgaaaaaagggagcgcgaaaacgaaaggccgtggacgtaaggctgcgcagccggagcctcagc

SEQ ID NO: 188235 - DNA, 75 bp, synthetic construct
  source 1..75: mol_type = other DNA
ttatccgcaacctgattacggaaagtgaagtggcagtgaaggacaacactaaattccgctttgtgggggctgatg

SEQ ID NO: 188236 - DNA, 75 bp, synthetic construct
  source 1..75: mol_type = other DNA
tcactcgagtccacgaaagcggatcagcagaatttcggggcgtggcggcggggatggaagctgatgctgccgcta

SEQ ID NO: 188237 - DNA, 75 bp, synthetic construct
  source 1..75: mol_type = other DNA
cttcagtgggtgtatgccatcgatgtgctgattgaaacacagggcgaggtctgcctccttccgcttcctggtgat

SEQ ID NO: 188238 - DNA, 75 bp, synthetic construct
  source 1..75: mol_type = other DNA
cttcagtgggtgtatgccatcgatgtgctgattgaaacacagggcgaggtctgcctccttcctcttcctggagat

SEQ ID NO: 188239 - DNA, 75 bp, synthetic construct
  source 1..75: mol_type = other DNA
cttcagtggttgtatgccatcgatgtgctgattgaaacacagggcgaggtctgcctccttccacttcctggcgat

SEQ ID NO: 188240 - DNA, 75 bp, synthetic construct
  source 1..75: mol_type = other DNA
gagcagacagaatggcatcgcgtggtgctgttcggcaagctcgcggaagtggcaggggaatatctgcgcaagggg

SEQ ID NO: 188241 - DNA, 75 bp, synthetic construct
  source 1..75: mol_type = other DNA
cgcgaaaacaaaaggccgtggacgtaaggccgcgcagccggagcctcagccgccggagggtgacgattacgggtt

SEQ ID NO: 188242 - DNA, 75 bp, synthetic construct
  source 1..75: mol_type = other DNA
ccatgcagatgctgggacgtgccgcaggaactcagactcagccggacggcacaccacagttcagcggtcagcctc

SEQ ID NO: 188243 - DNA, 75 bp, synthetic construct
  source 1..75: mol_type = other DNA
gagcagacggaatggcagcgcgtggtgctgttcggcaagctcgcggaagtggcaggtgaatatctgcgcaagggg

SEQ ID NO: 188244 - DNA, 75 bp, synthetic construct
  source 1..75: mol_type = other DNA
aaaccacccgcaaagcaagccgtaaatatgtaaaaacgcaggaaactgcactgtctgccctgctggcgcagacgg

SEQ ID NO: 188245 - DNA, 75 bp, synthetic construct
  source 1..75: mol_type = other DNA
cgctgggtgcctggctggatgtgtgcaccacgtccacagacggataccactgaacgcattgataacctggctgat

SEQ ID NO: 188246 - DNA, 75 bp, synthetic construct
  source 1..75: mol_type = other DNA
acctgaaaaagccgcagattatcgcagccctgaatgatgccggactgtccggtgccgcacgggacgcggagaaga

SEQ ID NO: 188247 - DNA, 75 bp, synthetic construct
  source 1..75: mol_type = other DNA
gagcagactgaatggcaccgcgtggtgctgttcggcaagctcgcggaagtggcaggcgaatatctgcgcaagggg

SEQ ID NO: 188248 - DNA, 75 bp, synthetic construct
  source 1..75: mol_type = other DNA
gagcagactgaatggcatcgcgtggtgctgttcggcaagctcgcggaagtggcaggtgaatatctgcgcaagggg

SEQ ID NO: 188249 - DNA, 75 bp, synthetic construct
  source 1..75: mol_type = other DNA
gagcagactgaatggcaacgcgtggtgctgttcggcaagctcgcggaagtggcaggagaatatctgcgcaagggg

SEQ ID NO: 188250 - DNA, 75 bp, synthetic construct
  source 1..75: mol_type = other DNA
gagcagacggaatggcatcgcgtggtgctgttcggcaagctcgcggaagtggcaggagaatatctgcgcaagggg

SEQ ID NO: 188251 - DNA, 75 bp, synthetic construct
  source 1..75: mol_type = other DNA
gagcagaccgaatggcaccgcgtggtgctgttcggcaagctcgcggaagtggcaggtgaatatctgcgcaagggg

SEQ ID NO: 188252 - DNA, 75 bp, synthetic construct
  source 1..75: mol_type = other DNA
gagcagactgaatggcagcgcgtggtgctgttcggcaagctcgcggaagtggcaggggaatatctgcgcaagggg

SEQ ID NO: 188253 - DNA, 75 bp, synthetic construct
  source 1..75: mol_type = other DNA
ttagcggaaaggatgctactagatatttggataagggattagaggagtcaacaagtatttctcagcttctagata

SEQ ID NO: 188254 - DNA, 75 bp, synthetic construct
  source 1..75: mol_type = other DNA
agcccattaccccgcgcctgtttatcggccgcatgctgctcggcggttttgtttcaatggtcgccggtgttgttc

SEQ ID NO: 188255 - DNA, 75 bp, synthetic construct
  source 1..75: mol_type = other DNA
cgcttacgaatcagcacggggctgacaactggaaaatcctgccgggtgtaccgttgtatgacacgattgttatcg

SEQ ID NO: 188256 - DNA, 75 bp, synthetic construct
  source 1..75: mol_type = other DNA
ctgccagacggtgctgagacgacgcttacgaatcagcacggggctgacaactggaaaatcctgccgggtgtaccg

SEQ ID NO: 188257 - DNA, 75 bp, synthetic construct
  source 1..75: mol_type = other DNA
ttgatcagggcggtttgctgactgatgcggtcatcaagcatccacatgcggtgctgctgctggacgaaatcgaga

SEQ ID NO: 188258 - DNA, 75 bp, synthetic construct
  source 1..75: mol_type = other DNA
ctgaatcagcttgcgcgcgtgggcggaatcgacccactgattggtcgtgagaaggagctggagcgtgctattcag

SEQ ID NO: 188259 - DNA, 75 bp, synthetic construct
  source 1..75: mol_type = other DNA
cactggataaagagaaaaatgagctgacctacgggttccagagtgcgcaaaagcacaaggcggaagcagcgcatt

SEQ ID NO: 188260 - DNA, 75 bp, synthetic construct
  source 1..75: mol_type = other DNA
gctcaaccgcacactcaggacaactgctatcgctttgcgggttattgcctgaatgtgtcgcgccatacgctggag

SEQ ID NO: 188261 - DNA, 75 bp, synthetic construct
  source 1..75: mol_type = other DNA
gtcgatcgaccatgacgctattttgctgcatgagcctccagccgcttcaccggaacaaggtgtaggcctgatggt

SEQ ID NO: 188262 - DNA, 75 bp, synthetic construct
  source 1..75: mol_type = other DNA
caaacgcaaataaagaagaagcagaaaaacgcgccgcagtagcaaaagttcacggcgaaattgttgctaacgcat

SEQ ID NO: 188263 - DNA, 75 bp, synthetic construct
  source 1..75: mol_type = other DNA
ggaagtgatgacccaggcgctgaaagtgctggatgccgtgcgcaaccgctttgcgatgcgtatcaccaccagcca

SEQ ID NO: 188264 - DNA, 75 bp, synthetic construct
  source 1..75: mol_type = other DNA
cggctccatgctgggtatcgccggttatcaggtaattgagattgccattcagcgccgctttaagggcagggggaa

SEQ ID NO: 188265 - DNA, 75 bp, synthetic construct
  source 1..75: mol_type = other DNA
tgtcggaatacctgaaggtttatgctggctcttgcattcttacagggatattcctgattatccctcttatgatgg

SEQ ID NO: 188266 - DNA, 75 bp, synthetic construct
  source 1..75: mol_type = other DNA
ttaaaattgacttcgacaagacagacaaaattgttgttgaatataatcttgaacaaatcggcatggagcaacgat

SEQ ID NO: 188267 - DNA, 75 bp, synthetic construct
  source 1..75: mol_type = other DNA
aatcccattggaattgcttgaaatccagtcaggttcctatttaggggacgatgacattatccgtattaaggacca

SEQ ID NO: 188268 - DNA, 75 bp, synthetic construct
  source 1..75: mol_type = other DNA
tcatgcaggcttttaaccggcatatcccggcggaagagcagttacgtcgctacggtgaagtccgtaaccagaatg

SEQ ID NO: 188269 - DNA, 75 bp, synthetic construct
  source 1..75: mol_type = other DNA
cttcgtgattaacggggagcaatggcttgttgttgagccaatagagttgtggcctgactggtgccggctgattgc

SEQ ID NO: 188270 - DNA, 75 bp, synthetic construct
  source 1..75: mol_type = other DNA
tacgccgggatattcagtttatttttcaggacccttacgcttcgctggacccacgtcagaccatcggtgattcga

SEQ ID NO: 188271 - DNA, 75 bp, synthetic construct
  source 1..75: mol_type = other DNA
gtgtcgcgaaatgctgcaaaacagcccaatggcactgcgctgcctgaaagccgcgctgaatgctgactgtgatgg

SEQ ID NO: 188272 - DNA, 75 bp, synthetic construct
  source 1..75: mol_type = other DNA
ctgacggtaaaagagatgattcaggcgctggcggatgcgcgttatgacgacagcattggcgtgatcattctgact

SEQ ID NO: 188273 - DNA, 75 bp, synthetic construct
  source 1..75: mol_type = other DNA
atggtgaattaccgtcttatatcactggcgctgacaatctctcccagtcattacgtctttcctcactccatggcc

SEQ ID NO: 188274 - DNA, 75 bp, synthetic construct
  source 1..75: mol_type = other DNA
gaacagcaggcggctggccatcagacgctggccgatgttccggcacccgtaattaacggagaaagcgtcaatctc

SEQ ID NO: 188275 - DNA, 75 bp, synthetic construct
  source 1..75: mol_type = other DNA
agctaccgaatgtgcaaatgtcagtgaagaatggcgattgaaatatgttcatgatgattctttaggttataacgt

SEQ ID NO: 188276 - DNA, 75 bp, synthetic construct
  source 1..75: mol_type = other DNA
aaccagaatggcagtgaacagcagcaaaaacaggctgaaatggcactgaatcagttgattaatcgttatcagttg

SEQ ID NO: 188277 - DNA, 75 bp, synthetic construct
  source 1..75: mol_type = other DNA
tccgttccaggctcgctattatgcaaccggacaggccactgctggtattgccaatgccgacgccacctttaaagt

SEQ ID NO: 188278 - DNA, 75 bp, synthetic construct
  source 1..75: mol_type = other DNA
tcagcttttcctgcctggattcagtcatccatttatcgctgtactgtctgcttgacacgtcagttttcagacatg

SEQ ID NO: 188279 - DNA, 75 bp, synthetic construct
  source 1..75: mol_type = other DNA
aagacgggcagtgtacgctcagcggtgattcagatgacatgaagcactttatgcagaacgtactgcgctatctgt

SEQ ID NO: 188280 - DNA, 75 bp, synthetic construct
  source 1..75: mol_type = other DNA
atacccgtgttgttccggacgatgtacgcaaggtctttgccgaatatcccaacgtgatcaacgagattatcaatc

SEQ ID NO: 188281 - DNA, 75 bp, synthetic construct
  source 1..75: mol_type = other DNA
aacagttttatcagtatcaacctacggaaatcattctttctgaaggtcgactggtagatagccaggggtatggtg

SEQ ID NO: 188282 - DNA, 75 bp, synthetic construct
  source 1..75: mol_type = other DNA
ttgatgaagccgatcataaaacggcggattctctgaaggccgcaaaggagaaaattttcgccgctttcccgggac

SEQ ID NO: 188283 - DNA, 75 bp, synthetic construct
  source 1..75: mol_type = other DNA
ctgtcaatggcactgaacaagtcggtggtgaataacgatcctcaggggtatccggatcgcgttcgtcagcagcgc

SEQ ID NO: 188284 - DNA, 75 bp, synthetic construct
  source 1..75: mol_type = other DNA
aacgcctgagttgctggctgcggcgaagaagagaattctggacgcgttccctgggctggaagagtgtaaggattc

SEQ ID NO: 188285 - DNA, 75 bp, synthetic construct
  source 1..75: mol_type = other DNA
acggtcaggcatgggcgcgtggcggtgcgggtgatcgtctgctgatgtacgcgcagctgaaggagtgggctgaga

SEQ ID NO: 188286 - DNA, 75 bp, synthetic construct
  source 1..75: mol_type = other DNA
tcacggttaaaccgttgaccagttatggcaatctgaatccagatgaagttcctctgctgatcctcaacggctttg

SEQ ID NO: 188287 - DNA, 75 bp, synthetic construct
  source 1..75: mol_type = other DNA
gcgcgtaatgataaaaactactggctggccttcggcgaaaaacgcgcctgggataaaaacgagctggcgtacatt

SEQ ID NO: 188288 - DNA, 75 bp, synthetic construct
  source 1..75: mol_type = other DNA
cttcgagggcggtgtgagccagtcggcttacaacacgctcgcggcgcttaatctgccgaaaccgcagcaagggcc

SEQ ID NO: 188289 - DNA, 75 bp, synthetic construct
  source 1..75: mol_type = other DNA
ggcggtgcgggtgaccgtctgctgatgtacgcacaactgaaggaatgggcagagaaaaactttgatatcaagaag

SEQ ID NO: 188290 - DNA, 75 bp, synthetic construct
  source 1..75: mol_type = other DNA
aacaggtgtgcctggagttctcctcggtgatcgagagtaaacgtttcgactcgctgtataagcaaatcgatctgg

SEQ ID NO: 188291 - DNA, 75 bp, synthetic construct
  source 1..75: mol_type = other DNA
gccaaataccaagagcatcatgactgtcggcaccaacctggagaacgtttatttcaaaaatcatggccaggttac

SEQ ID NO: 188292 - DNA, 75 bp, synthetic construct
  source 1..75: mol_type = other DNA
tttggtttgttgattatcggcgtgttgttgttgctggtgctggtggagttgcggcgttttcgccagacgccgccg

SEQ ID NO: 188293 - DNA, 75 bp, synthetic construct
  source 1..75: mol_type = other DNA
agcgatgttagggcggattaacggtttgtggacggcgcaaaacgtgacgggcgatgccataggcgcggcgctgct

SEQ ID NO: 188294 - DNA, 75 bp, synthetic construct
  source 1..75: mol_type = other DNA
gcggatcgctatgagcgtaaaaaagtgattttgctggcgcgcggcacctgtggcattggcttcattggactgtgc

SEQ ID NO: 188295 - DNA, 75 bp, synthetic construct
  source 1..75: mol_type = other DNA
tggacttcactgataaagaagtgacgatcgccaccaataaaaattacgcggaaaaatacaactaccaaaaacagg

SEQ ID NO: 188296 - DNA, 75 bp, synthetic construct
  source 1..75: mol_type = other DNA
tactgaccaggcgaaaccgttaatggcggtggcaatgaaagaaaacagctaccgcacgcttgagaaacaattaac

SEQ ID NO: 188297 - DNA, 75 bp, synthetic construct
  source 1..75: mol_type = other DNA
gaatgaaaaaattaaggccaataaatcggaggacgatcccatgcctttgaccaaagaagaacgcgccgaactggt

SEQ ID NO: 188298 - DNA, 75 bp, synthetic construct
  source 1..75: mol_type = other DNA
gacaactggcagatgtcggcggcacagattggttttctctatgcggcgatcccgctcggtgcggctattggcgcg

SEQ ID NO: 188299 - DNA, 75 bp, synthetic construct
  source 1..75: mol_type = other DNA
tgattttgctggcgcgcggcacctgtggcattggcttcattggactgtgccttaatgcactgctgccggagccgt

SEQ ID NO: 188300 - DNA, 75 bp, synthetic construct
  source 1..75: mol_type = other DNA
gtgccttacggtggtctgatttatatcaagggcaacagcccaaagaatgagtcagccgaattcacctttactggt

SEQ ID NO: 188301 - DNA, 75 bp, synthetic construct
  source 1..75: mol_type = other DNA
gcggttagttcgttgctgcaatacacaatgctgcaaacgcaaaccccggaagcgatgttagggcggattaacggt

SEQ ID NO: 188302 - DNA, 75 bp, synthetic construct
  source 1..75: mol_type = other DNA
cgttgaaatcattactggcaggatttcgttttctactcgccagcccgctggtgggagggattgcgttgctggggg

SEQ ID NO: 188303 - DNA, 75 bp, synthetic construct
  source 1..75: mol_type = other DNA
tctggcgctgttcggctggctgagcgcggttagttcgttgctgcaatatacaatgctgcaaacgcaaaccccgga

SEQ ID NO: 188304 - DNA, 75 bp, synthetic construct
  source 1..75: mol_type = other DNA
tggtggataactggcagaagagtgtaaggagccgtgcgctcccggaagaggcgatgacgggctggaacgaaggca

SEQ ID NO: 188305 - DNA, 75 bp, synthetic construct
  source 1..75: mol_type = other DNA
aaccctttccggtcagcagataatgcgactgacagaattacccccggcatacaacctgcaacgcagtgcgcagtt

SEQ ID NO: 188306 - DNA, 75 bp, synthetic construct
  source 1..75: mol_type = other DNA
gttctggtacccgactttatccgattactcgaggggtatcaaaacagctcctacctatttatgataagccaatgg

SEQ ID NO: 188307 - DNA, 75 bp, synthetic construct
  source 1..75: mol_type = other DNA
tcagaacatcattgaaaatagtgggtatttcatcattcttattggccttcatattagtagtgttcggtagtgaag

SEQ ID NO: 188308 - DNA, 75 bp, synthetic construct
  source 1..75: mol_type = other DNA
tacttaaattttgcactttaaaaaaatatgatacatcaagtgctttaggtagagaacaggaaaggtacaggatta

SEQ ID NO: 188309 - DNA, 75 bp, synthetic construct
  source 1..75: mol_type = other DNA
cagtgaacagcagcaaaaacaggctgaaatggcactgaatcagctgattaatcgttatcaggtggaacacgctgg

SEQ ID NO: 188310 - DNA, 75 bp, synthetic construct
  source 1..75: mol_type = other DNA
atcatctccacaccggacgatatgccctccttccagcgcctgttgggcgatgggtcacagttcggggtgaacttc

SEQ ID NO: 188311 - DNA, 75 bp, synthetic construct
  source 1..75: mol_type = other DNA
attgcaaaaagcgcaggaaaaggcatggtgttaggtttcgctgagacatctgccagctatatttcccacgatgac

SEQ ID NO: 188312 - DNA, 75 bp, synthetic construct
  source 1..75: mol_type = other DNA
aaaatttatctgaaattaaagacaaaggcgcggcggcgcaaaaaacggcacgggaaaatatcggcgttaatcttg

SEQ ID NO: 188313 - DNA, 75 bp, synthetic construct
  source 1..75: mol_type = other DNA
tggttttgcatggctcgatactggtacccatgatagcttaatcgaagcatcacaatttattcatactatagagaa

SEQ ID NO: 188314 - DNA, 75 bp, synthetic construct
  source 1..75: mol_type = other DNA
ttgggccgtaactggtctctatttctacgacaataacgtggtggagatggcgaaggacgtgaaaccttcagcacg

SEQ ID NO: 188315 - DNA, 75 bp, synthetic construct
  source 1..75: mol_type = other DNA
gctccggcacgcgtttgtatcccatcactcagggcgtctccaagcaactgctgccgatctatgacaagccgatga

SEQ ID NO: 188316 - DNA, 75 bp, synthetic construct
  source 1..75: mol_type = other DNA
tggacttaggtataggaaatgcattaacaaacaggatcgcacattcatttgcgtgtggcaaaaatttaaagatga

SEQ ID NO: 188317 - DNA, 75 bp, synthetic construct
  source 1..75: mol_type = other DNA
acctacggcggcatggcgcgtcacggtggcggtgcgttctccggtaaagatccatcaaaagtggaccgttccgca

SEQ ID NO: 188318 - DNA, 75 bp, synthetic construct
  source 1..75: mol_type = other DNA
gtggcggcgcgttttctggtaaagatccatccaaagtggaccgttccgcagcttacgcagcacgctatgttgcga

SEQ ID NO: 188319 - DNA, 75 bp, synthetic construct
  source 1..75: mol_type = other DNA
cctccatcatggtcgaaactttcggtactgagaaagtaccttctgaacagctgaccctgctggtacgcgagttct

SEQ ID NO: 188320 - DNA, 75 bp, synthetic construct
  source 1..75: mol_type = other DNA
ccatatcgcggcggtggaagcactggacgatattcaggcagtgctcgactacgattactccacaggctggcaacc

SEQ ID NO: 188321 - DNA, 75 bp, synthetic construct
  source 1..75: mol_type = other DNA
tataatcagctctgtaacaatcgtaaccgctaaaaaaaataaagtagaggatatcaaaaatcaacgcgataccat

SEQ ID NO: 188322 - DNA, 75 bp, synthetic construct
  source 1..75: mol_type = other DNA
aaccgattctgccgtctgaatggctgacttctgcaaccaaattcttcatcaacccgaccggacgtttcgtgatcg

SEQ ID NO: 188323 - DNA, 75 bp, synthetic construct
  source 1..75: mol_type = other DNA
cctttaccgttgttttatcaacctccattatggactcgcccaaaactcaaaaatagcagcaaggtactgccagat

SEQ ID NO: 188324 - DNA, 75 bp, synthetic construct
  source 1..75: mol_type = other DNA
atttcgtggtccgcgtctggagcaacagcggcgatctgcaaaacgtgtactgggatgtgctggagcgtattaaac

SEQ ID NO: 188325 - DNA, 75 bp, synthetic construct
  source 1..75: mol_type = other DNA
ggcgtatgattccgatatcgatcaggttaagcagatcctgaccaatattatccagtctgaagatcgcattttgaa

SEQ ID NO: 188326 - DNA, 75 bp, synthetic construct
  source 1..75: mol_type = other DNA
aacgccctcctccacctcggtgaaatgcttcgcttccctcaggaagaagcactgtatccgggattattacaggtg

SEQ ID NO: 188327 - DNA, 75 bp, synthetic construct
  source 1..75: mol_type = other DNA
tttccttctgccacaatagcggcattagccgaagcattaataaaaaatgacgatcaacgtaaacatactttgctg

SEQ ID NO: 188328 - DNA, 75 bp, synthetic construct
  source 1..75: mol_type = other DNA
acggcattgctcagaaactgaaattcaaagctttacaggagcgggcgaaagagaaaattgccgacattgctgaaa

SEQ ID NO: 188329 - DNA, 75 bp, synthetic construct
  source 1..75: mol_type = other DNA
gctgtggaaaaagggaagaagtatgaaatccgcgtggaagttcgtgaagttacgccaccaccggctccggatatg

SEQ ID NO: 188330 - DNA, 75 bp, synthetic construct
  source 1..75: mol_type = other DNA
agaccaccacaccggcagaaacactgagcacggtggtgaaaaatattcctgccgtggaaaaagggaagaagtatg

SEQ ID NO: 188331 - DNA, 75 bp, synthetic construct
  source 1..75: mol_type = other DNA
cagtattaaatataaattcccaggttcatttgattccaaacaaattgtagtcactcaatcatttgatttagaatt

SEQ ID NO: 188332 - DNA, 75 bp, synthetic construct
  source 1..75: mol_type = other DNA
ctgtttgcagccacccttgagcgctggagccgtaccacaacatttacgctgaacctgacgttcttcaatcgccag

SEQ ID NO: 188333 - DNA, 75 bp, synthetic construct
  source 1..75: mol_type = other DNA
aatgggggattaatcctgaccctgatgctggccttgacgctattgggctaccttgtggcggaattgctcaggggg

SEQ ID NO: 188334 - DNA, 75 bp, synthetic construct
  source 1..75: mol_type = other DNA
acggagtcaaagctgaggtgctgggtaactgcggtcccgccacaatcagcttggttgacgggatgattgttgtgg

SEQ ID NO: 188335 - DNA, 75 bp, synthetic construct
  source 1..75: mol_type = other DNA
gacttctcctaccctaaacccggcaggtatcgttaacgccacgactggaggtacgtcagcttatcttcaggtaaa

SEQ ID NO: 188336 - DNA, 75 bp, synthetic construct
  source 1..75: mol_type = other DNA
agctggccaaataccgtccggatatcctggaaacctgccaggctgcggtgaatgccgccgataatggcagcgatt

SEQ ID NO: 188337 - DNA, 75 bp, synthetic construct
  source 1..75: mol_type = other DNA
agcgaaaactgctacatcaacagcgacgagaagctagtggcggccattggcgtagagaatctggtgattgtcagc

SEQ ID NO: 188338 - DNA, 75 bp, synthetic construct
  source 1..75: mol_type = other DNA
cttgctaaacctgctggagctgcagcatttactgctggtgccttcagtgcatctgcgagttactctgttgcttat

SEQ ID NO: 188339 - DNA, 75 bp, synthetic construct
  source 1..75: mol_type = other DNA
ctattcttgctgtacttgggatgacttctactgcaatggctgcaaacagtggtactgttaattttacaggtgcgg

SEQ ID NO: 188340 - DNA, 75 bp, synthetic construct
  source 1..75: mol_type = other DNA
atcatttgactatactgcccaactagttagacctagtagtggtgcaactgcagggttgtttaccgcatctgcaag

SEQ ID NO: 188341 - DNA, 75 bp, synthetic construct
  source 1..75: mol_type = other DNA
atgagtgaacaaatcaaacaggatatcgatctgattgagattttattttatctgaagaaaaaggtagatgaatac

SEQ ID NO: 188342 - DNA, 75 bp, synthetic construct
  source 1..75: mol_type = other DNA
aaaaagctcgtttatttattactcacctgctactgctactttttatcgcagcgattatgttcccgctgctgatgg

SEQ ID NO: 188343 - DNA, 75 bp, synthetic construct
  source 1..75: mol_type = other DNA
ccggagcaaatctcctgggatcactggaaactggcattaggttttagcgtggaacaggctgatggtcgcattacg

SEQ ID NO: 188344 - DNA, 75 bp, synthetic construct
  source 1..75: mol_type = other DNA
cgtgatgtctgcattaccaatcaccatcgtcttcttgctggctcaacgctggctggttaacggcctgacggcagg

SEQ ID NO: 188345 - DNA, 75 bp, synthetic construct
  source 1..75: mol_type = other DNA
tactgttaacgttgttattgataacagtagcggaatgagccaggcagatgccgataaacgatatttgcagatagg

SEQ ID NO: 188346 - DNA, 75 bp, synthetic construct
  source 1..75: mol_type = other DNA
aagtgagcgcgagccaggtttatgcggtgctgacagaccggggggcgcaacttgaagccgctgcgctggcatcgg

SEQ ID NO: 188347 - DNA, 75 bp, synthetic construct
  source 1..75: mol_type = other DNA
tatgactgcgtgatgcctgtttatcagttcgttcgtgattttacgctggtgcagactgcgcacagtaagcagtcc

SEQ ID NO: 188348 - DNA, 75 bp, synthetic construct
  source 1..75: mol_type = other DNA
tgcgttacagcctggatgccgatgatgcggcttgcgccattgaacgcgccattaaccgcgcattagaagaaggca

SEQ ID NO: 188349 - DNA, 75 bp, synthetic construct
  source 1..75: mol_type = other DNA
gaaacgctgcatcaagggttgagcgcagtctcactatcacagcgctggctcgccgcacggggtgacaccctttgg

SEQ ID NO: 188350 - DNA, 75 bp, synthetic construct
  source 1..75: mol_type = other DNA
gtgttggggcaggcgctgacggataacggtgattatctcgccgactggtctgattgcgcaggtcagcccgaacag

SEQ ID NO: 188351 - DNA, 75 bp, synthetic construct
  source 1..75: mol_type = other DNA
gtctgcattaccgatcaccatcgtcttcttgctggctcaacgctggctggtcaacggcctgacggcaggtggtgt

SEQ ID NO: 188352 - DNA, 75 bp, synthetic construct
  source 1..75: mol_type = other DNA
ctgattttccagatgttcccggcagtactttcactggtcgcgttgtatgcgttgtttgatcgtctgggtgagtac

SEQ ID NO: 188353 - DNA, 75 bp, synthetic construct
  source 1..75: mol_type = other DNA
ggaaactggcgttaggttttagcgttgaacaggctgatggtcgcattacgccaccgccattcccggtactgctgt

SEQ ID NO: 188354 - DNA, 75 bp, synthetic construct
  source 1..75: mol_type = other DNA
atttaagtagctatggcgatctcgacccgcaggaaatgccgctgctgatcctcaacggctttgagtatgtgactc

SEQ ID NO: 188355 - DNA, 75 bp, synthetic construct
  source 1..75: mol_type = other DNA
tgtcatgcgctgatgaactacggcgtggatcggtataaacgcccgcaaaaaatctctctccaggaggagaaagcc

SEQ ID NO: 188356 - DNA, 75 bp, synthetic construct
  source 1..75: mol_type = other DNA
agtgagccagtatttttatccgcaaaaacagactcaggtgatgaacgaaggctgggcgaccttctggcactacac

SEQ ID NO: 188357 - DNA, 75 bp, synthetic construct
  source 1..75: mol_type = other DNA
atggcttcgctcattcaggtgcgtgatttgctggcgttacggggccgtatggacgcggcccagattagccagacg

SEQ ID NO: 188358 - DNA, 75 bp, synthetic construct
  source 1..75: mol_type = other DNA
ccacagcaaattgccgccacggaactgaacggcaatacccgcgatggcgtgattcacttcccgaatatccgcacc

SEQ ID NO: 188359 - DNA, 75 bp, synthetic construct
  source 1..75: mol_type = other DNA
aaacgccagcgccgcaaatgggcgcgaatgcttgttggtgaatggcataacgaagatttctttctggaagcgcgg

SEQ ID NO: 188360 - DNA, 75 bp, synthetic construct
  source 1..75: mol_type = other DNA
tgaggattttttccttgaggccagacacatgacgcaggatgacgccgacttattagctgatgataacgtttacta

SEQ ID NO: 188361 - DNA, 75 bp, synthetic construct
  source 1..75: mol_type = other DNA
agacgaaaaaaccggcgagtttgttggcggtaaagccattgtaaaagcagtaatttcattgccgagcgactgctt

SEQ ID NO: 188362 - DNA, 75 bp, synthetic construct
  source 1..75: mol_type = other DNA
gacgtgtttatggcagtggctgaaacattgggttatgtggtgaaaaacaatatcgaagactataacgccggtgtc

SEQ ID NO: 188363 - DNA, 75 bp, synthetic construct
  source 1..75: mol_type = other DNA
atcgcatggaacgtgatccaacttttcgctggtcgatgcgtgtttatacacgcttaatgcagcgatttgatgcct

SEQ ID NO: 188364 - DNA, 75 bp, synthetic construct
  source 1..75: mol_type = other DNA
atttgctggcgttacggggtcgtatggaagcgacccagatcagccagacgctgaacaccccgcagccgatgatta

SEQ ID NO: 188365 - DNA, 75 bp, synthetic construct
  source 1..75: mol_type = other DNA
ttcagggatttgccgtcggcggcgaatggggaggcgcggcgttgctttccgttgaaagtgcaccaaaaataaaaa

SEQ ID NO: 188366 - DNA, 75 bp, synthetic construct
  source 1..75: mol_type = other DNA
aagtcgcgcccgacgagctgcgttaggcagcttcgctggtgccgtcgtcgactggtatgattttttactctatgg

SEQ ID NO: 188367 - DNA, 75 bp, synthetic construct
  source 1..75: mol_type = other DNA
ccgcaacaaattgccgccacggaattgaacggcaatacccgcgatggagtgatccacttcccgaatatccgcacc

SEQ ID NO: 188368 - DNA, 75 bp, synthetic construct
  source 1..75: mol_type = other DNA
tggacactaaggtaattgactctcgtctcgtgggcgagggttcatccgtacgccgccgtcggcagtgtctggtgt

SEQ ID NO: 188369 - DNA, 75 bp, synthetic construct
  source 1..75: mol_type = other DNA
taatgaagaaggttatcgggagatccgtaaccggttatcgtcgcaatataacttaagtaatctggagccgaatat

SEQ ID NO: 188370 - DNA, 75 bp, synthetic construct
  source 1..75: mol_type = other DNA
ggcctatgaaatcgtcattaactctaacccgtgtatcgcttacctgatggaagaaaacaccattaccatgcaggc

SEQ ID NO: 188371 - DNA, 75 bp, synthetic construct
  source 1..75: mol_type = other DNA
cgtggctaaactcgccacgctgtcagatggcacagtctttgaacctgtaaacagttttcagaaaaaccagaagaa

SEQ ID NO: 188372 - DNA, 75 bp, synthetic construct
  source 1..75: mol_type = other DNA
ggtcaggtgcttgctgttccgccagcgtacactagccagcgttgcgcgtgctgtggtcatactgcgaaagaaaat

SEQ ID NO: 188373 - DNA, 75 bp, synthetic construct
  source 1..75: mol_type = other DNA
agtgcgaagaacgttatggcgttgatgaagtagaacggcttctggactcgtgccacgcgctgatgaactacggcg

SEQ ID NO: 188374 - DNA, 75 bp, synthetic construct
  source 1..75: mol_type = other DNA
tgctgcttggatttatcgtcgagtcggttaccggtcagcgcttgaccgctatgttgaagagtcgatttatcgccc

SEQ ID NO: 188375 - DNA, 75 bp, synthetic construct
  source 1..75: mol_type = other DNA
tgttcgaaagcggtcagttaccgattgcaacttatggttgggtggttgatcaggtatatgcggcgttaaagcaga

SEQ ID NO: 188376 - DNA, 75 bp, synthetic construct
  source 1..75: mol_type = other DNA
ttcgccggttgccgatccgcaaaagaatcccaatatgttcgaaagcggtcagttgccgattgcaacttatggttg

SEQ ID NO: 188377 - DNA, 75 bp, synthetic construct
  source 1..75: mol_type = other DNA
ttgtaaacattgcgaagagtgtgaagacgggctggaaaactactgtgatcacatgaccggcacctataactcgcc

SEQ ID NO: 188378 - DNA, 75 bp, synthetic construct
  source 1..75: mol_type = other DNA
tccactctctggggtcaggtgcacgatgaaaaagccttttattcgatgggcggcgtttccgggcatgcagggttg

SEQ ID NO: 188379 - DNA, 75 bp, synthetic construct
  source 1..75: mol_type = other DNA
ctaactttgctctgcaaaagctaatgagcgaaggcaagctgcatcctgacgatcggattgcgaaatatattccag

SEQ ID NO: 188380 - DNA, 75 bp, synthetic construct
  source 1..75: mol_type = other DNA
ccgagttatggttatcgacgcgtgtggggcatcctgcgcaagcaacgtcgcacagagggacagccacctgtgaat

SEQ ID NO: 188381 - DNA, 75 bp, synthetic construct
  source 1..75: mol_type = other DNA
tctgttccgaccttggaaaaggaaactgagtaccagtgcggtgggcctatacgctgcatgggagatgactgcctt

SEQ ID NO: 188382 - DNA, 75 bp, synthetic construct
  source 1..75: mol_type = other DNA
gtagatggttttgcggaaggcgagatcacatgtatagatgacccgactgatgctacgggctgcacagtcatcaat

SEQ ID NO: 188383 - DNA, 75 bp, synthetic construct
  source 1..75: mol_type = other DNA
cttgcatatcgcccagtcaggtcaaatccctaaactggttaccaaggtggaaaaaatcacttttagcgccgccta

SEQ ID NO: 188384 - DNA, 75 bp, synthetic construct
  source 1..75: mol_type = other DNA
gctgcgcccgcaacgccgatgccattattccatcactcgatcaatttgagttctacagtggcggagggatcgata

SEQ ID NO: 188385 - DNA, 75 bp, synthetic construct
  source 1..75: mol_type = other DNA
caggcgatatcagctataaaaacgtgctgaaagtgcagccattcggcaatgtggtggtgtatgccgacatgaccg

SEQ ID NO: 188386 - DNA, 75 bp, synthetic construct
  source 1..75: mol_type = other DNA
agtaaaaaaacctatgaaaatatggatcttattgctggtggttttggtgattgttctgccgaaacaactattaat

SEQ ID NO: 188387 - DNA, 75 bp, synthetic construct
  source 1..75: mol_type = other DNA
tgctgaccatatagattctgacagatatctaataaaatcaatttattataatttatttagtggcgaagattctaa

SEQ ID NO: 188388 - DNA, 75 bp, synthetic construct
  source 1..75: mol_type = other DNA
tgagtcggtttccgtgaaggttggtgcggaagcagtcgataacattctgaacatactggcatcgagtatgctggc

SEQ ID NO: 188389 - DNA, 75 bp, synthetic construct
  source 1..75: mol_type = other DNA
tcaaactcattcaagtcgagctcggggactgtgcaagatggcacaatctctatgccgacgttgaaagacggtcaa

SEQ ID NO: 188390 - DNA, 75 bp, synthetic construct
  source 1..75: mol_type = other DNA
ctatcgataagaacactgagtacaagtgtggtggtccgatccgttgcatgggggatgattgcttagcaataaata

SEQ ID NO: 188391 - DNA, 75 bp, synthetic construct
  source 1..75: mol_type = other DNA
actagaaggcaatcctaaatgtggcttcatcagctctgagtgtattgatggtgcccaaggcccatccggccaatg

SEQ ID NO: 188392 - DNA, 75 bp, synthetic construct
  source 1..75: mol_type = other DNA
gacaatctcagcaaagggttcgtcaaaaatctcagcaataaacaaaaaaaagaattaattagtaaaatcaaagcg

SEQ ID NO: 188393 - DNA, 75 bp, synthetic construct
  source 1..75: mol_type = other DNA
agcatcctggcggaagatggcgaaattgacatgcattgtgattactgcggtaaccactatctgttcaatgcgatg

SEQ ID NO: 188394 - DNA, 75 bp, synthetic construct
  source 1..75: mol_type = other DNA
gattctgagtaacaataatataggtacgcccagacctgaattaggcgaaggtattttgttcttccttttgaacgc

SEQ ID NO: 188395 - DNA, 75 bp, synthetic construct
  source 1..75: mol_type = other DNA
tcagcaccgatttacttgagacgattattgtctcggatgtacgttcatttgctcaggacccccgatttttgtcaa

SEQ ID NO: 188396 - DNA, 75 bp, synthetic construct
  source 1..75: mol_type = other DNA
acccgcaacagcagctagaagcactgttcaataaactggttaaacagcactccgagtttactcagccattggtcg

SEQ ID NO: 188397 - DNA, 75 bp, synthetic construct
  source 1..75: mol_type = other DNA
atgattgatgagtataaacttgacgctttcaaaataaaaagaaaatcgaagcattcacacatgaataaaaaatta

SEQ ID NO: 188398 - DNA, 75 bp, synthetic construct
  source 1..75: mol_type = other DNA
taaccactatgtgttcaatgcgatggatattgccgggatccgcaacaacgcatctccggcagacccgcaggttca

SEQ ID NO: 188399 - DNA, 75 bp, synthetic construct
  source 1..75: mol_type = other DNA
gcacatggtctattttttgtcatcacattcggtggtaacgatcattcgtatactcagccagtctcaggatacggc

SEQ ID NO: 188400 - DNA, 75 bp, synthetic construct
  source 1..75: mol_type = other DNA
tcaccattaacggtgaaaaacagtccgatcctgaatacttctttaaagaagaagatcgcctgtttggtcgttata

SEQ ID NO: 188401 - DNA, 75 bp, synthetic construct
  source 1..75: mol_type = other DNA
aatcataaaatcagcgacacagaagatgccgtcttatctgttggaaaaataatcaaccttatagaggattcacag

SEQ ID NO: 188402 - DNA, 75 bp, synthetic construct
  source 1..75: mol_type = other DNA
tgaagcaaacatttaagaaactctggttcagagctacgttattcgcaattgtcgcgataataacggctcttttat

SEQ ID NO: 188403 - DNA, 75 bp, synthetic construct
  source 1..75: mol_type = other DNA
tacatacgaacaagccaaagctggaataaatatatcaaaaaatttgtcactgtcttgtaaagataatcctgtttc

SEQ ID NO: 188404 - DNA, 75 bp, synthetic construct
  source 1..75: mol_type = other DNA
acacatcgcgcagagctgggagaaaatatctgttcgctgccggtggaacagcacatggtctattttttgtcatca

SEQ ID NO: 188405 - DNA, 75 bp, synthetic construct
  source 1..75: mol_type = other DNA
attcagggcgttatcaacaagctgtggggcgtggatacgaactacaaatctgtcagcaagttccatgtattccat

SEQ ID NO: 188406 - DNA, 75 bp, synthetic construct
  source 1..75: mol_type = other DNA
ctgaaccgtccgccaagagtgactaaaacatactctctggatgctagcggcacggtgacgttcaaggttccttat

SEQ ID NO: 188407 - DNA, 75 bp, synthetic construct
  source 1..75: mol_type = other DNA
ctatgcagtgcctctgcgtgcagataccagcaaaccgaagctgagccagcaggatgtgaccgatctgatcgccta

SEQ ID NO: 188408 - DNA, 75 bp, synthetic construct
  source 1..75: mol_type = other DNA
gaaggccaactggtggatagcctggggaacggtgttgctggcgttgactactacaccaattcaggccgtggcgta

SEQ ID NO: 188409 - DNA, 75 bp, synthetic construct
  source 1..75: mol_type = other DNA
actgctacgccaatgatgcctatgcaggcggcaccaagtgttctgcagatctgaaaaaatcgctggtcgataaca

SEQ ID NO: 188410 - DNA, 75 bp, synthetic construct
  source 1..75: mol_type = other DNA
tgctgcgctatctgtccgacgataaatggacgccggacgcgaaagccagcatgaccgtaggcaccaacctggata

SEQ ID NO: 188411 - DNA, 75 bp, synthetic construct
  source 1..75: mol_type = other DNA
ctttgaactgggctcagtgcgcggcaataagtcgaccattgcattgactgagctgggcgacgaagttcgcggcgc

SEQ ID NO: 188412 - DNA, 75 bp, synthetic construct
  source 1..75: mol_type = other DNA
aatttatcgagcagtttaagacgggtcaggccaaagagatcgataccgcgatttgtgcgaaaaccgatggttgta

SEQ ID NO: 188413 - DNA, 75 bp, synthetic construct
  source 1..75: mol_type = other DNA
cttggttctgtgcgtggtaacaagtcgactattgcattgactgaactgggtgatgaagttcgcggggcaaatatc

SEQ ID NO: 188414 - DNA, 75 bp, synthetic construct
  source 1..75: mol_type = other DNA
tgatcgcctatctgaacaaaggtggatcggtgctgatcatggaaaacgtgatgagcaatcttaaggaagagagcg

SEQ ID NO: 188415 - DNA, 75 bp, synthetic construct
  source 1..75: mol_type = other DNA
ttatcggtaacccgcactacaacagcattttgcgttgtccgaacggttacagctggaacgggggcgttaataaag

SEQ ID NO: 188416 - DNA, 75 bp, synthetic construct
  source 1..75: mol_type = other DNA
atgatcgctggttgccggatgcaaaatccaatatgaccgtgggtactaacctggacacggtgtatttcaaaaaac

SEQ ID NO: 188417 - DNA, 75 bp, synthetic construct
  source 1..75: mol_type = other DNA
cagagccagagcctgttcctacgaaaacgggttatctgaccctgggcggaagccagcgggtaactggtgctaaat

SEQ ID NO: 188418 - DNA, 75 bp, synthetic construct
  source 1..75: mol_type = other DNA
ggggaaaatggtgaattttcctttagctggggcgaaaccatctcctttggtatcgatacctttgaactgggttca

SEQ ID NO: 188419 - DNA, 75 bp, synthetic construct
  source 1..75: mol_type = other DNA
gcgcctgggataaaaacgagctggcgtacattacggaagcaccttctcttgtggtgccagaaaacgtcacgcgcg

SEQ ID NO: 188420 - DNA, 75 bp, synthetic construct
  source 1..75: mol_type = other DNA
accgacggttgtaacgaggctcgctggttctcgctgacgacgcgcaatgttaatgacggtcagattcagggcgtt

SEQ ID NO: 188421 - DNA, 75 bp, synthetic construct
  source 1..75: mol_type = other DNA
gatgaacccgagctatccgctcaactatatggaaaaaccgctgacgcgcctgatgctgggtcgttcctggtggga

SEQ ID NO: 188422 - DNA, 75 bp, synthetic construct
  source 1..75: mol_type = other DNA
cgtcgatctcgaacgtctgtaccagaacatgtcggtctggctgtggaatgaaacagaataccgctatgaaaacga

SEQ ID NO: 188423 - DNA, 75 bp, synthetic construct
  source 1..75: mol_type = other DNA
cgtataccattgatgaaacaacgaaagaagttatctggaaataccagcaagaaaacaagcctgatgacaagccga

SEQ ID NO: 188424 - DNA, 75 bp, synthetic construct
  source 1..75: mol_type = other DNA
tctatttcaaacgtcatggtcaggttacaggaaacagcgctgagttcggctttcatccggattttgcgggtatct

SEQ ID NO: 188425 - DNA, 75 bp, synthetic construct
  source 1..75: mol_type = other DNA
tggcactcctctgccagagttttacagcgagcgtgaagggatgaaaggctggaacctgttccagttgatgcatcg

SEQ ID NO: 188426 - DNA, 75 bp, synthetic construct
  source 1..75: mol_type = other DNA
aacaagtcgactattgcactgacggaactgggcgatgaagttcgcggggcaaatatcgatcagctgatccaccgc

SEQ ID NO: 188427 - DNA, 75 bp, synthetic construct
  source 1..75: mol_type = other DNA
ctgggctttaaaacgttcaccgagttcctgaactgctacgccaacaatgcttacgagggcggcaccgagtgctcc

SEQ ID NO: 188428 - DNA, 75 bp, synthetic construct
  source 1..75: mol_type = other DNA
aacgtgatgagcaatcttaaggaagagagcgcgtctggctttgtgcgtctgctggatgctgcgggtctgtcaatg

SEQ ID NO: 188429 - DNA, 75 bp, synthetic construct
  source 1..75: mol_type = other DNA
ttcctgggttacaggagtgtaaggactcgacttaccattacgagattaactgtttggagcgccgcccaggcacgg

SEQ ID NO: 188430 - DNA, 75 bp, synthetic construct
  source 1..75: mol_type = other DNA
acccgatacccgtaaagcaattctctggtataaggaagcagctgaacaagggtatgctcatgctcaatatacttt

SEQ ID NO: 188431 - DNA, 75 bp, synthetic construct
  source 1..75: mol_type = other DNA
tctttatttacgctgcgctttttctccccacaggaaggtattgtcggtgtgcggattgagcattttcagggggcg

SEQ ID NO: 188432 - DNA, 75 bp, synthetic construct
  source 1..75: mol_type = other DNA
ttatttaacaggtcattgcccaaagcaataagcacttttaaggatcacaccaacgaatatgaatcagtaaaaagc

SEQ ID NO: 188433 - DNA, 75 bp, synthetic construct
  source 1..75: mol_type = other DNA
gcacaaaaggcggcccaggcaaatctaccgttgcccagcaaattgcggtatgtctcaaagttaaaaagaaaaaga

SEQ ID NO: 188434 - DNA, 75 bp, synthetic construct
  source 1..75: mol_type = other DNA
tcaggatgacatcattaagcacctaaaatcgcttcagggtagagctgagtttgtagtggtagatgctggtggctt

SEQ ID NO: 188435 - DNA, 75 bp, synthetic construct
  source 1..75: mol_type = other DNA
cgactccgaaattcagcgacaagcgatgctgatggccgacgttatcattatcccgcttcgtcctaagcgtcgtga

SEQ ID NO: 188436 - DNA, 75 bp, synthetic construct
  source 1..75: mol_type = other DNA
cacagacagtgaggaacctgttcagaaaggcacgagaaagcgtttaagcctttctgaaaaagcaatatcactcgg

SEQ ID NO: 188437 - DNA, 75 bp, synthetic construct
  source 1..75: mol_type = other DNA
ttgggccgtctggtctggtagcgctgccgctgatgacttccgcacaaggcatccttccggccatggcggtttatg

SEQ ID NO: 188438 - DNA, 75 bp, synthetic construct
  source 1..75: mol_type = other DNA
tcgtcaaaccttcagccgggatttaccttaagcggacttggcgcgctggcggaagcctcgctgacctgtgacagg

SEQ ID NO: 188439 - DNA, 75 bp, synthetic construct
  source 1..75: mol_type = other DNA
catggataaacactatatccctgttttagaggatttaagaaaagcgatatacagcgacagaatgttatcaaggct

SEQ ID NO: 188440 - DNA, 75 bp, synthetic construct
  source 1..75: mol_type = other DNA
atgataagacaggatctgagccttggttatattgttgtggtaagaagtgataatgatagtcaggaagttagcggc

SEQ ID NO: 188441 - DNA, 75 bp, synthetic construct
  source 1..75: mol_type = other DNA
gcaagaaggcagatgaatgcagtggaagtatttgcctgccaaacgtagctctttacgcggcaggctaccgtaact

SEQ ID NO: 188442 - DNA, 75 bp, synthetic construct
  source 1..75: mol_type = other DNA
taaacgacaaagtgaaagtccgcgcggtcatgaaccaatgcccggctttgccatcacaagtgtctcgcattctag

SEQ ID NO: 188443 - DNA, 75 bp, synthetic construct
  source 1..75: mol_type = other DNA
tgcgcagggagctttatcaggttaaacaggcagttaaggggatgcgtgacgggatgtttagtgtgctgaacgaga

SEQ ID NO: 188444 - DNA, 75 bp, synthetic construct
  source 1..75: mol_type = other DNA
gcttgcagataacaacgaagtacaggaactgcgcagggaactttatcaggttaaacaggtggttaagggtatgcg

SEQ ID NO: 188445 - DNA, 75 bp, synthetic construct
  source 1..75: mol_type = other DNA
tggctgaaagaggccggatttgataccgggcggggtgtcacggtgaagatttcggaggggtgcctgaccatcatc

SEQ ID NO: 188446 - DNA, 75 bp, synthetic construct
  source 1..75: mol_type = other DNA
cttgtcgataacaacatgatctacggtgaaagtagcggcaaagcgggcatgatgaacccgagctatccgctcaac

SEQ ID NO: 188447 - DNA, 75 bp, synthetic construct
  source 1..75: mol_type = other DNA
acctacgccggaaccgacacctgatcctgagccaacaccagaaccggagccagaacctgttcctacgaaaacggg

SEQ ID NO: 188448 - DNA, 75 bp, synthetic construct
  source 1..75: mol_type = other DNA
gttatattcaaagttaaaaccattagggtattcatctaaaagtgtttctgccattttggatgttgaatataaaac

SEQ ID NO: 188449 - DNA, 75 bp, synthetic construct
  source 1..75: mol_type = other DNA
ctgaacacgatattacgccagaagtcaccatttccaaaacacagcgccgctataaagtcggctatgtcagagccc

SEQ ID NO: 188450 - DNA, 75 bp, synthetic construct
  source 1..75: mol_type = other DNA
tggtttcgcgagcggcttattgcccaccgtttggcttcggtcaatctgtcacgtttaccttacgagcccaaactt

SEQ ID NO: 188451 - DNA, 75 bp, synthetic construct
  source 1..75: mol_type = other DNA
atcaaacagaaatggataaagtgaatgtcgatttggcggcggccggggtggcatttaaagaacgctacaatatgc

SEQ ID NO: 188452 - DNA, 75 bp, synthetic construct
  source 1..75: mol_type = other DNA
gaagtacaggaactgcgcagggaactttatcacgttaaacaggctgttaaggggatgcgtgacgggatgtttagt

SEQ ID NO: 188453 - DNA, 75 bp, synthetic construct
  source 1..75: mol_type = other DNA
cccaagcctgcaccttaagggcaactggctgaaagaggccggattttataccggacggggtgtcacggtgaagat

SEQ ID NO: 188454 - DNA, 75 bp, synthetic construct
  source 1..75: mol_type = other DNA
ccccagcctgcaccttaaaggcgactggctcgctgaggcgggatttgataccgggacgggcgtgactgtgaaaat

SEQ ID NO: 188455 - DNA, 75 bp, synthetic construct
  source 1..75: mol_type = other DNA
caggaggccacgcagccggacagcgtgatagccgaaaattacgcgcgtgtggtggctgaggtgatgcgccgtgat

SEQ ID NO: 188456 - DNA, 75 bp, synthetic construct
  source 1..75: mol_type = other DNA
taatccgccgcgtcgccggaatcagccagcaggttgacgaacaggccacacagccggacagcatgaccgcagata

SEQ ID NO: 188457 - DNA, 75 bp, synthetic construct
  source 1..75: mol_type = other DNA
gatgcgccgtgatggtatccagcttaatgatgtggatatgcgcgacatacggatccgcgttcttgaaatgctggc

SEQ ID NO: 188458 - DNA, 75 bp, synthetic construct
  source 1..75: mol_type = other DNA
atgaccgagaccgaagcgctcgaaataatccgcagtattaccggaatcagccaggcaacaggcaaacaggaggcc

SEQ ID NO: 188459 - DNA, 75 bp, synthetic construct
  source 1..75: mol_type = other DNA
gaaccagagtccttgagttgctgacataccgtcgccgcgtggagatgtatcgggagaaggagaaaatcacgtacc

SEQ ID NO: 188460 - DNA, 75 bp, synthetic construct
  source 1..75: mol_type = other DNA
taatccgccgtgctggtggaatcagccagctggctgacgaacatgccaagcagccggatacagtcaccgctgaaa

SEQ ID NO: 188461 - DNA, 75 bp, synthetic construct
  source 1..75: mol_type = other DNA
taatttgcaaaacgggcaaatggtgaaaatccgccagaacgccagcggcgtggtgacgggcttaaccattgatac

SEQ ID NO: 188462 - DNA, 75 bp, synthetic construct
  source 1..75: mol_type = other DNA
tcacccgcagccagtcgctgaacgtggtggaacgtcaggcaattccggaacaagccacgtttgaacagatggttg

SEQ ID NO: 188463 - DNA, 75 bp, synthetic construct
  source 1..75: mol_type = other DNA
acgctgccattgacagcggtgtactactggaacggttgatcgcgcaaaacccggttagttacaacttccatgtcc

SEQ ID NO: 188464 - DNA, 75 bp, synthetic construct
  source 1..75: mol_type = other DNA
ctacccgtacccgcaagttacttctcaaccagcgcgaactggactcattgtacggtcgcgtcaatcgagaaggct

SEQ ID NO: 188465 - DNA, 75 bp, synthetic construct
  source 1..75: mol_type = other DNA
ccagcaggctgacgaacaggccacgcagccggacagcatgaccgcagataattatgtgcgtgtagtggtggaggt

SEQ ID NO: 188466 - DNA, 75 bp, synthetic construct
  source 1..75: mol_type = other DNA
ctaccgtcgccgcgttgagatgtatcgggagaaagagaaaattacttaccactggaagaagccggaacgattgcg

SEQ ID NO: 188467 - DNA, 75 bp, synthetic construct
  source 1..75: mol_type = other DNA
cttgagttgctggcctaccgtcgccgcgtggagatgtatcgggagaaggagaaaataacgtaccactggaagaag

SEQ ID NO: 188468 - DNA, 75 bp, synthetic construct
  source 1..75: mol_type = other DNA
aatcaatggcgctcttaccgtgtcgaacccggtaaaacgatggcgcagctgttccgcgaccacggactgcccgct

SEQ ID NO: 188469 - DNA, 75 bp, synthetic construct
  source 1..75: mol_type = other DNA
atttcagagaatgaatgtctgacctgtgattttgtattctaccgcaccaaccgctttggaattaatgaaccgtac

SEQ ID NO: 188470 - DNA, 75 bp, synthetic construct
  source 1..75: mol_type = other DNA
agtgatcaatgggcttatacatggttatgagttgaagagcaagagtgataacttgctcagattaccagcgcaggt

SEQ ID NO: 188471 - DNA, 75 bp, synthetic construct
  source 1..75: mol_type = other DNA
agttcaccgagagcgtcagcgaggccgagctgctggcccggccggaaggcttcgaccacctgcacctggtcggcg

SEQ ID NO: 188472 - DNA, 75 bp, synthetic construct
  source 1..75: mol_type = other DNA
tcaaccaccagtatcgccacgcctttgccgcccactggggcgacggcacgacctcatcctccgatggccagcgct

SEQ ID NO: 188473 - DNA, 75 bp, synthetic construct
  source 1..75: mol_type = other DNA
tgcgatcaacctcgggctgaccaagatggccgagtcgagccccggcctgacctacgccaagctgtcctggctgca

SEQ ID NO: 188474 - DNA, 75 bp, synthetic construct
  source 1..75: mol_type = other DNA
ttgagttgctggcataccgtcgccgcgtggagatgtatcgggagaaggagaaaatcacgtaccactggaagaagc

SEQ ID NO: 188475 - DNA, 75 bp, synthetic construct
  source 1..75: mol_type = other DNA
gatgcgccgtgatggtattgagcttaacggcgtggatatgcgcaacatacgaacaagagtccttgagttgctggc

SEQ ID NO: 188476 - DNA, 75 bp, synthetic construct
  source 1..75: mol_type = other DNA
taatccgccacgtctctggaatcagccagcaggctgacgaacagaccacgcagccggacagcgtgacagccgaaa

SEQ ID NO: 188477 - DNA, 75 bp, synthetic construct
  source 1..75: mol_type = other DNA
tcgttcaaaacaacatttgttaattttctttcatacaagtgggatgcatggtttactcctgaatgagttatccga

SEQ ID NO: 188478 - DNA, 75 bp, synthetic construct
  source 1..75: mol_type = other DNA
aaacaaatcaacggaaatccaatggaaagtttttattctttattcatttggtttttgtcatgaatcgatagcatc

SEQ ID NO: 188479 - DNA, 75 bp, synthetic construct
  source 1..75: mol_type = other DNA
atgatttttcatacaagcaggatgcatagtttattctttgatgaattgttttttattttaaaatgtgctgaatag

SEQ ID NO: 188480 - DNA, 75 bp, synthetic construct
  source 1..75: mol_type = other DNA
tgaattacaaggcccggcgcaaaacacgctgccgccgtgctctggacaagcgtttccggcggacaacaatggcta

SEQ ID NO: 188481 - DNA, 75 bp, synthetic construct
  source 1..75: mol_type = other DNA
aacacctctggacctatccctacacgccaaaaatgaacgctatctgtgaacgttttaaccggacgttaagagagc

SEQ ID NO: 188482 - DNA, 75 bp, synthetic construct
  source 1..75: mol_type = other DNA
aaagcactaccgcccggtaaagacaggtgagctcattgggatggacgccattgagctcagaatgggcgaactgcg

SEQ ID NO: 188483 - DNA, 75 bp, synthetic construct
  source 1..75: mol_type = other DNA
acaggaggtggatgtggttgtaaccctgccactgagcgagtatttcgatacaaacgcacagccggacatggccaa

SEQ ID NO: 188484 - DNA, 75 bp, synthetic construct
  source 1..75: mol_type = other DNA
caacggctatattgtgaatgccggagattcgttagcgattaaaggattccgcaaagataaacataccgaagcggc

SEQ ID NO: 188485 - DNA, 75 bp, synthetic construct
  source 1..75: mol_type = other DNA
aactggaatatgctattcgtgatgcgaattttaattctctacctattacgcgagtttatgattcatcaaataatg

SEQ ID NO: 188486 - DNA, 75 bp, synthetic construct
  source 1..75: mol_type = other DNA
gaagccatcatcatgcttgaagttgaaggctatgtggaggtgcgtaaaggctcgggtattcatgtggtttccaac

SEQ ID NO: 188487 - DNA, 75 bp, synthetic construct
  source 1..75: mol_type = other DNA
ctgattgcggggtatttccatcagagcaggcgtatcgcgtatggcgtaagacaccggagaaggctgctagactgg

SEQ ID NO: 188488 - DNA, 75 bp, synthetic construct
  source 1..75: mol_type = other DNA
ggtccgacgctgccttgtggatgtgctggcttgtggcgatttatacatgtccggtaaatacggtgtttttgcgtc

SEQ ID NO: 188489 - DNA, 75 bp, synthetic construct
  source 1..75: mol_type = other DNA
tccgtcacgtcttcactctgtgctgcgcattccgcagaatattatccgcttgcaaccgttgcatttttcttacga

SEQ ID NO: 188490 - DNA, 75 bp, synthetic construct
  source 1..75: mol_type = other DNA
ccgcacagtaaggcacctctggtgcgacgaaaaaaacactggcatcccgatgtgctgaaagagattcgacgcctc

SEQ ID NO: 188491 - DNA, 75 bp, synthetic construct
  source 1..75: mol_type = other DNA
atgacgcccgtggaatatattttaaaagagaataaaaattgcaatatgtggtggacccatacattgaattgcaag

SEQ ID NO: 188492 - DNA, 75 bp, synthetic construct
  source 1..75: mol_type = other DNA
ttgacgtgctgaaagatctgaatgatctggagtcgctgttgatcgttgatatcggtggaacgacccttgatattg

SEQ ID NO: 188493 - DNA, 75 bp, synthetic construct
  source 1..75: mol_type = other DNA
ggctgcgtgccggtcagacttcgatgatcgctcgtctggagaaagcattccaggaactgaacgcgatcgacgttc

SEQ ID NO: 188494 - DNA, 75 bp, synthetic construct
  source 1..75: mol_type = other DNA
gtacacggcgtatacaagccgggtaacgttgttctgactccgaccatcctgcgtgactctcaggaatatgtttcc

SEQ ID NO: 188495 - DNA, 75 bp, synthetic construct
  source 1..75: mol_type = other DNA
ccactacagcaacgagagcaacatgatcgcccgtatcgtgctgggtggcatgacggcgaagcagtgggcgcaggc

SEQ ID NO: 188496 - DNA, 75 bp, synthetic construct
  source 1..75: mol_type = other DNA
ccggttagttacaacttccatgtgccgctggccgatggtggcgtcctgctcggagccagcccggaactgctgttg

SEQ ID NO: 188497 - DNA, 75 bp, synthetic construct
  source 1..75: mol_type = other DNA
aagaaacacaccctgccgcacaacagcctgaacttcgtattccacggtggttccggttctactgctcaggaaatc

SEQ ID NO: 188498 - DNA, 75 bp, synthetic construct
  source 1..75: mol_type = other DNA
gccgtggatcgacggtctgctggacgcgggtgaaaaacacttcgctgctaccggtaagccgctgttctcttctca

SEQ ID NO: 188499 - DNA, 75 bp, synthetic construct
  source 1..75: mol_type = other DNA
tacatcatcaccgtgaacatggcaaaagaactggcgatggtcgaacacaccgaacagggccgtgccgttcgtcag

SEQ ID NO: 188500 - DNA, 75 bp, synthetic construct
  source 1..75: mol_type = other DNA
gcccgtatcacagttgccagctactttaagccaatgtgtgccgcgctggaggcgtaccgggctgaactgggtaaa

SEQ ID NO: 188501 - DNA, 75 bp, synthetic construct
  source 1..75: mol_type = other DNA
gtgctgggtgtgaagcgtgatttcacaacttggattaaaggacgcattgatgagtacggatttaaaaagggcgtg

SEQ ID NO: 188502 - DNA, 75 bp, synthetic construct
  source 1..75: mol_type = other DNA
acacaaggtagcgcctgtacgttccgcagcgttacgccgggaactgaaagcccgtatcaccgtagccagctactt

SEQ ID NO: 188503 - DNA, 75 bp, synthetic construct
  source 1..75: mol_type = other DNA
ttgcctctaccctggcttttggcgcggctaacctggcccatgccgccgataccactactgcagcaccggctgacg

SEQ ID NO: 188504 - DNA, 75 bp, synthetic construct
  source 1..75: mol_type = other DNA
cgaagccgatgatgcaccataaaggtaaattcggtccgcatcacgacatgatgtttaaagatctgaacctgaccg

SEQ ID NO: 188505 - DNA, 75 bp, synthetic construct
  source 1..75: mol_type = other DNA
caactgccggaactgcgtgcacagctagaaaatgtcgatagtgcaccagtacaggcgctgcgtgaaaaaatgggc

SEQ ID NO: 188506 - DNA, 75 bp, synthetic construct
  source 1..75: mol_type = other DNA
gctggtacgcgacggtggtgttatcgcaccgggctataacgaagagctggatgagtggcgcgcgctggctgacgg

SEQ ID NO: 188507 - DNA, 75 bp, synthetic construct
  source 1..75: mol_type = other DNA
tgcgatttgtgaacaaatcggcgatccggctaccagcaaagggccggttgagcgcaaagttgtccgtatcgtcac

SEQ ID NO: 188508 - DNA, 75 bp, synthetic construct
  source 1..75: mol_type = other DNA
gcagaaactgcgtgagctggagagcatttcgccgaatgccgccgcgacgcaggtagatggcacgcagatgtcttt

SEQ ID NO: 188509 - DNA, 75 bp, synthetic construct
  source 1..75: mol_type = other DNA
gcggcaggtgggcgatctggagcgtattctggcacgactggcgttacgtaccgctcgcccacgcgatcttgctcg

SEQ ID NO: 188510 - DNA, 75 bp, synthetic construct
  source 1..75: mol_type = other DNA
ataacgccaccgaatacagtctggtgttgatggacgagattgggcgcggaacgtccacttacgatggcctgtcgc

SEQ ID NO: 188511 - DNA, 75 bp, synthetic construct
  source 1..75: mol_type = other DNA
ctgacatatcggctgaatataaagataagcttacatcagccccttcaatggaaatcgtattgaatgaacttggcg

SEQ ID NO: 188512 - DNA, 75 bp, synthetic construct
  source 1..75: mol_type = other DNA
ctttgcgttaggagtttccggcgcgctctttcagtcggtatcgaaaaatgtgctgggttcaccggacgtgatcgg

SEQ ID NO: 188513 - DNA, 75 bp, synthetic construct
  source 1..75: mol_type = other DNA
tatctttgttttgttttgctgcagccagtattcttatatatattcgctcagaaaacaataaaacacaaaatgaat

SEQ ID NO: 188514 - DNA, 75 bp, synthetic construct
  source 1..75: mol_type = other DNA
cccgtcgccattgtagataacaagagacttggcatgtgttggatgttgcccgtcaggtccagagaaaacgggaca

SEQ ID NO: 188515 - DNA, 75 bp, synthetic construct
  source 1..75: mol_type = other DNA
tctgactgatgccgaccgctacccacagctcaatggtgagggcagcggcagctggagcggcaatcttaaaggcga

SEQ ID NO: 188516 - DNA, 75 bp, synthetic construct
  source 1..75: mol_type = other DNA
gcctgaccagcggaatatcgaccgccagcagcgatctgtcgtcattatttaacgccagcagcgggatgtggaatt

SEQ ID NO: 188517 - DNA, 75 bp, synthetic construct
  source 1..75: mol_type = other DNA
cacctgcccgaccttcattgataaaccgggtattcgcattaccgaaggtcgccatccggtggttgaacaggtact

SEQ ID NO: 188518 - DNA, 75 bp, synthetic construct
  source 1..75: mol_type = other DNA
atcggaagcctgcgctaaacagttcattgatgtcatctataaaaactggaaggaaatcaggaacaaaaatcgtgc

SEQ ID NO: 188519 - DNA, 75 bp, synthetic construct
  source 1..75: mol_type = other DNA
gtctgaattcgctaaactcacgtcatatccaggatgaggatttaccgaaatggcttaagaacaaagttgccgcac

SEQ ID NO: 188520 - DNA, 75 bp, synthetic construct
  source 1..75: mol_type = other DNA
gacatgatcattgttgatgaaggcattcctgcggatagtctggaaggactgagaaaggctggggttgaagtgatt

SEQ ID NO: 188521 - DNA, 75 bp, synthetic construct
  source 1..75: mol_type = other DNA
tgtcaagccggagtttagggagatttttaatttgggcttttacaaattatggcagggagattacatcagtgcagc

SEQ ID NO: 188522 - DNA, 75 bp, synthetic construct
  source 1..75: mol_type = other DNA
cgtattcccgggtcgcatttaacctggttttgccctgtcaataatgaagagaaacgcattgccattttagcatta

SEQ ID NO: 188523 - DNA, 75 bp, synthetic construct
  source 1..75: mol_type = other DNA
ttaaaaaaaatccggaacaactcgagtgggcatggaaatatattaacattcgtattcccgagtcacatttaacct

SEQ ID NO: 188524 - DNA, 75 bp, synthetic construct
  source 1..75: mol_type = other DNA
gccatctggcacccatcaactacatgcgtcgccagacgctgaaaaacgccgagcgctacatcattccagagctaa

SEQ ID NO: 188525 - DNA, 75 bp, synthetic construct
  source 1..75: mol_type = other DNA
ccggcgaccagcaaagggccggtcgagcgcaaagttgtccgtatcgttacgccgggcaccatcagcgatgaagca

SEQ ID NO: 188526 - DNA, 75 bp, synthetic construct
  source 1..75: mol_type = other DNA
cagcatcattatggatgccgcgacacgtcgtaacctggaaattactcagaacctggcgggcggtgcggaaaatac

SEQ ID NO: 188527 - DNA, 75 bp, synthetic construct
  source 1..75: mol_type = other DNA
atatcgatagcgcaccagtacaggcgctgcgtgagaaaatgggcgagtttgccgagctgcgtgacctgctggagc

SEQ ID NO: 188528 - DNA, 75 bp, synthetic construct
  source 1..75: mol_type = other DNA
cagcggatgatctggcatccgggcgttcaacctttatggtggaaatgaccgaaaccgccaatattttacataacg

SEQ ID NO: 188529 - DNA, 75 bp, synthetic construct
  source 1..75: mol_type = other DNA
cagaccgcgttgattgcgctgatggcgtatatcggcagttacgtcccggcgcaaaaggtcgagattgggccgatc

SEQ ID NO: 188530 - DNA, 75 bp, synthetic construct
  source 1..75: mol_type = other DNA
atgtggtggtcctttcccggcgctcccgcgatggcgggatggaatccggtgtccatatccgtggtgttaatccgg

SEQ ID NO: 188531 - DNA, 75 bp, synthetic construct
  source 1..75: mol_type = other DNA
tccgttcattcgcccggcctttgatacgacagaggagctggcagcacaggttgccatgaagcatatgaatcaggc

SEQ ID NO: 188532 - DNA, 75 bp, synthetic construct
  source 1..75: mol_type = other DNA
gaaaccggctgggcggtttccagcgtcgttgtaggttgtgtggtgggatcattcagctcaggttacttatccaaa

SEQ ID NO: 188533 - DNA, 75 bp, synthetic construct
  source 1..75: mol_type = other DNA
acaataatatggaattcgccaattacggtccgtttgagttactccaggctcgccagctcatcgaaagtaatattg

SEQ ID NO: 188534 - DNA, 75 bp, synthetic construct
  source 1..75: mol_type = other DNA
tctggaattactgagccgtgccgaaaacaacaaggttttgcgtgatgcaacgcgcgctggagccgaagtgcttaa

SEQ ID NO: 188535 - DNA, 75 bp, synthetic construct
  source 1..75: mol_type = other DNA
atgtggtgatcctttcccggcgctcccgcgatggcgggatggaatccggtgtccatatccgtggtgttaatccag

SEQ ID NO: 188536 - DNA, 75 bp, synthetic construct
  source 1..75: mol_type = other DNA
ctggttccgtgatccggcattgcggcgacgtgtccaggccgggctgaacaaaggagaagcccgtaatgctctggc

SEQ ID NO: 188537 - DNA, 75 bp, synthetic construct
  source 1..75: mol_type = other DNA
ataaaacagggaacagtgacagcatccctgatgctgagaaaacttgccagttaccccaaacaaaatgggttggct

SEQ ID NO: 188538 - DNA, 75 bp, synthetic construct
  source 1..75: mol_type = other DNA
tggtgtaaaagcattcaccaacaaaatacagcagagttgtattacacatctgttgccaatggcgactcgtaccga

SEQ ID NO: 188539 - DNA, 75 bp, synthetic construct
  source 1..75: mol_type = other DNA
aaaacatgcgcggcagagcattaagtatgcagcagtttgctatcgttttcggtcagattctgatcttctacgtta

SEQ ID NO: 188540 - DNA, 75 bp, synthetic construct
  source 1..75: mol_type = other DNA
tatgaaattgcatctcagggaactcagttaggcagttgggcgcaacgagttattgatgagcgcggaaactcggat

SEQ ID NO: 188541 - DNA, 75 bp, synthetic construct
  source 1..75: mol_type = other DNA
atatcagtacagcggaggagtacagtaaacgactgggaacgtacacagaacgagttgcgtccagtagcaggaata

SEQ ID NO: 188542 - DNA, 75 bp, synthetic construct
  source 1..75: mol_type = other DNA
gttgcatttaaagaaaacggtacgtttgtaagatgtgaaaatctcattattacccatgtgtacaaagtggtttat

SEQ ID NO: 188543 - DNA, 75 bp, synthetic construct
  source 1..75: mol_type = other DNA
ctaaaacgatgcaaattctaaattcaatggatatacctacaaaagcaattgttgatttagattttgcgttccgcg

SEQ ID NO: 188544 - DNA, 75 bp, synthetic construct
  source 1..75: mol_type = other DNA
tttaagcgtcaacagactgttggtgctcaaagtgcaaaagacgtcagattattaattaaaaacccagaaaataac

SEQ ID NO: 188545 - DNA, 75 bp, synthetic construct
  source 1..75: mol_type = other DNA
cagcgtggcactcattgcagattaacattaaaagaagcagtcaataaagtaatcgaacaacgaccagcacaagca

SEQ ID NO: 188546 - DNA, 75 bp, synthetic construct
  source 1..75: mol_type = other DNA
gctggacccgtttgcaggcagcggatcaacctgcgtggccgctcttcagtccggacgccggtatatcggtatcga

SEQ ID NO: 188547 - DNA, 75 bp, synthetic construct
  source 1..75: mol_type = other DNA
agtatcacgtggatggcaacatgtggaaaccataccacttcagacctacaagcgttacggtttacatcaaaacaa

SEQ ID NO: 188548 - DNA, 75 bp, synthetic construct
  source 1..75: mol_type = other DNA
tttgtggaagtggaacttctttagtagaatgtgcccatctgggtattgatgctatcgggacggatattaatccat

SEQ ID NO: 188549 - DNA, 75 bp, synthetic construct
  source 1..75: mol_type = other DNA
aggttgctagaattttcaatgaactatttgtccagttacaggctgcatttcctgcaagcgtttcgaccataaggg

SEQ ID NO: 188550 - DNA, 75 bp, synthetic construct
  source 1..75: mol_type = other DNA
gtgaacaacgtttttaccgcgatacaaaaccgtgacggagaagccctttctcgcatgtcaggttatgagcatcaa

SEQ ID NO: 188551 - DNA, 75 bp, synthetic construct
  source 1..75: mol_type = other DNA
gatgctggattatcttgagttacttgaaaatattaatgtaagtgatgccccggatatagtctggcctttatcacc

SEQ ID NO: 188552 - DNA, 75 bp, synthetic construct
  source 1..75: mol_type = other DNA
ctgtgcagtggcaacagttgtctttccctctgttctggcagggctgcgaattacaggtcactctcgacgcgcagc

SEQ ID NO: 188553 - DNA, 75 bp, synthetic construct
  source 1..75: mol_type = other DNA
accgggttgcggcaaaaagtggcctctgcgcaggcggaacatcatctggtggccgatatcgcctgggcggttatt

SEQ ID NO: 188554 - DNA, 75 bp, synthetic construct
  source 1..75: mol_type = other DNA
ggcacaacttgccaggcgcgcaggagaaagcgcgacgcaacggctggcagggcgcgctatttccgtgggaaagcg

SEQ ID NO: 188555 - DNA, 75 bp, synthetic construct
  source 1..75: mol_type = other DNA
gtggcaaaagtatacacacccgaacaacgggaggagctgaagactcgaatcatcgttctggtgcgcaaaaatgaa

SEQ ID NO: 188556 - DNA, 75 bp, synthetic construct
  source 1..75: mol_type = other DNA
cgacctgatggcttatattcattacctttctgacaggcggattggattcagaaacagaattgatttgttgttaaa

SEQ ID NO: 188557 - DNA, 75 bp, synthetic construct
  source 1..75: mol_type = other DNA
attatatatggtgataaatatgctgctgtttattaccgcgagggtgaacgaccctacatcatgaaaacgaccggc

SEQ ID NO: 188558 - DNA, 75 bp, synthetic construct
  source 1..75: mol_type = other DNA
aaactggcgtcgatgctggatcccggtcatctggcgctgacgcagatcgcgcaacatctggcgctgctgcaaaaa

SEQ ID NO: 188559 - DNA, 75 bp, synthetic construct
  source 1..75: mol_type = other DNA
cagtaacccttcttaaagagcattatcgttgtcatcctaaaatcattcaattttgtaataagcagttttatgata

SEQ ID NO: 188560 - DNA, 75 bp, synthetic construct
  source 1..75: mol_type = other DNA
ataatgcacaggttaatctggctgaaaaagtgctgcctgctgattttgtgaaatcgacggtgcataaatttcagg

SEQ ID NO: 188561 - DNA, 75 bp, synthetic construct
  source 1..75: mol_type = other DNA
tggctgtcgaacgggcattttcctcacagatttcagttattgaaggaccacctggaacaggtaaaacacagacta

SEQ ID NO: 188562 - DNA, 75 bp, synthetic construct
  source 1..75: mol_type = other DNA
acaacaggcagccgcacacgcctgaatatcatgggggcgctgaatctgaaagcactgacgtcaccgctaatctgc

SEQ ID NO: 188563 - DNA, 75 bp, synthetic construct
  source 1..75: mol_type = other DNA
ggatgcgtatgaggcagtggatatcatcactatccagattgaagatttactgcgtgacttgtcttgtgatgagtc

SEQ ID NO: 188564 - DNA, 75 bp, synthetic construct
  source 1..75: mol_type = other DNA
gcggtgttcaatactctgggcggggccgcgccgttaattcattctctctggtcacgctggtgggggctggatacg

SEQ ID NO: 188565 - DNA, 75 bp, synthetic construct
  source 1..75: mol_type = other DNA
ccaacgagaaacaccgtgatatctgcgagaagaagtggaatatcccgagcggcacgatcccggcaaaaatcggtc

SEQ ID NO: 188566 - DNA, 75 bp, synthetic construct
  source 1..75: mol_type = other DNA
cggaagtgagcaaattcccggtatccgaactggcggaagatcagctgaacgatgaatcccgcgagctgggcttct

SEQ ID NO: 188567 - DNA, 75 bp, synthetic construct
  source 1..75: mol_type = other DNA
ctggcggataacggcatcatctttacgccgcaatctgacctggtgatcctgaactacatcgccaactatatcatt

SEQ ID NO: 188568 - DNA, 75 bp, synthetic construct
  source 1..75: mol_type = other DNA
gctgattttgtgaaatcgacggtgcataaatttcagggacgggagtgcgatgaaattgtgttttccactgtgctg

SEQ ID NO: 188569 - DNA, 75 bp, synthetic construct
  source 1..75: mol_type = other DNA
gcctgatgaatggcgtgccgttcgcagtgatatccagatgatttttcaggacccgctggcgtctcttaacccacg

SEQ ID NO: 188570 - DNA, 75 bp, synthetic construct
  source 1..75: mol_type = other DNA
gagacattaggcgtagtaggggaatccggttgcggtaaatccacctttgcccgtgctattatcggcctggttaaa

SEQ ID NO: 188571 - DNA, 75 bp, synthetic construct
  source 1..75: mol_type = other DNA
cactggggaaatgcgctgacggcgacgctgcaaacagaaaaacgtccgctatgtctttctctggcgcgccaggct

SEQ ID NO: 188572 - DNA, 75 bp, synthetic construct
  source 1..75: mol_type = other DNA
ggcgatggcgcgattaccgcaggcatggcgtttgaagcgatgaaccacgcgggcgatatccgtcccgatatgctg

SEQ ID NO: 188573 - DNA, 75 bp, synthetic construct
  source 1..75: mol_type = other DNA
tccatcagtgccggaatcggtattgcggtggctgccgagaaagaaggtaaggatcgccgcaccgtctgcgtaatt

SEQ ID NO: 188574 - DNA, 75 bp, synthetic construct
  source 1..75: mol_type = other DNA
gcgcaggtggtcaacctgctccagcagctgcaacgtgagatgggattgtcattaattttatcgctcatgacctgg

SEQ ID NO: 188575 - DNA, 75 bp, synthetic construct
  source 1..75: mol_type = other DNA
aaccccatcgcccaggcggcgatgttcggctatttcctgatgtcggtatttatgatcgtcaccggctttgcgctg

SEQ ID NO: 188576 - DNA, 75 bp, synthetic construct
  source 1..75: mol_type = other DNA
tcagtcactatgtgtttgaagcgccagtgcggatctggcactggctgacggtgttatgcatggcggtgttaatgg

SEQ ID NO: 188577 - DNA, 75 bp, synthetic construct
  source 1..75: mol_type = other DNA
gtaatcactactcacgcgagctgttcatcgtgccagtgtggcgaaaaagctggtggctgggcgtgtggtatgaaa

SEQ ID NO: 188578 - DNA, 75 bp, synthetic construct
  source 1..75: mol_type = other DNA
cgctgcaaacagaaaaacgcccgctatgtctttccctggcgcgccaggcgggagcagataaaaatgccacgttgc

SEQ ID NO: 188579 - DNA, 75 bp, synthetic construct
  source 1..75: mol_type = other DNA
gcgcgagtgatgaacggtggctttgatgcagaaaaggtcattggtatttccgggcatctgttggcccctgatgtt

SEQ ID NO: 188580 - DNA, 75 bp, synthetic construct
  source 1..75: mol_type = other DNA
gtgctgtgcatggcggtattgatggtcaccggctactttatcggcaagccgctgccttcagtcagtggtgaggcg

SEQ ID NO: 188581 - DNA, 75 bp, synthetic construct
  source 1..75: mol_type = other DNA
gatggtttaaaattctggctgaaacagctatcaaatttcggtgttattgagattaaagaattatctttctctaca

SEQ ID NO: 188582 - DNA, 75 bp, synthetic construct
  source 1..75: mol_type = other DNA
ctggaggatactttacgtgttgtggggtattactcattagctactggttctgtcacacatgccgagcttgggcgc

SEQ ID NO: 188583 - DNA, 75 bp, synthetic construct
  source 1..75: mol_type = other DNA
gtgctaagtaactggttacgtggtcgggctatgaaaaaccagatgctcaatgcttcccgcacgttcgttatttgc

SEQ ID NO: 188584 - DNA, 75 bp, synthetic construct
  source 1..75: mol_type = other DNA
tgccctgggcaacactggtgacgctgacaagtggttatatcgggtattttattgctaacgtggggctgaaggacc

SEQ ID NO: 188585 - DNA, 75 bp, synthetic construct
  source 1..75: mol_type = other DNA
cggggaagactacgaaagcccgctctcctgcgacgacttttatcacaggagtgtggaagtgcttttccatcaatc

SEQ ID NO: 188586 - DNA, 75 bp, synthetic construct
  source 1..75: mol_type = other DNA
ccatccgcgcttccatcgaatttgaaaaagcagcatgggataaagaaattgaaaaaacaaaacaggcagcagtaa

SEQ ID NO: 188587 - DNA, 75 bp, synthetic construct
  source 1..75: mol_type = other DNA
gacccattcaaaattatcactacgccacctccggataacttttatatcttagaggatgataaatgggtgtataac

SEQ ID NO: 188588 - DNA, 75 bp, synthetic construct
  source 1..75: mol_type = other DNA
aatgcccagcaccatatcgcggcggtggaagctctggacgatattcaggcggtgctcgactacgattattcaaca

SEQ ID NO: 188589 - DNA, 75 bp, synthetic construct
  source 1..75: mol_type = other DNA
cggagaaaaaaatccctccagggttaatgtggaaaactaaaaataacggtctgatcgagttaaccaacgagatcg

SEQ ID NO: 188590 - DNA, 75 bp, synthetic construct
  source 1..75: mol_type = other DNA
agtttgcggcataacatgcccaatcctgttcctgttgttctgttagggcgtctggctgttgatgtttgtactcag

SEQ ID NO: 188591 - DNA, 75 bp, synthetic construct
  source 1..75: mol_type = other DNA
gaagaagaattatcactcatgcagagcatcgcggaaaaaccaggtgcattacgtgtattaactcatacgttgaat

SEQ ID NO: 188592 - DNA, 75 bp, synthetic construct
  source 1..75: mol_type = other DNA
aagccacacaccggggaacagatgaccttgcacgtttgttcagtcgtttcgccagaacaaagcaactacgtaaag

SEQ ID NO: 188593 - DNA, 75 bp, synthetic construct
  source 1..75: mol_type = other DNA
acgttaggtaataagggagatataatcttatacgtaacgcaccggactacagtcgggagcaatatctggacagaa

SEQ ID NO: 188594 - DNA, 75 bp, synthetic construct
  source 1..75: mol_type = other DNA
gaacagtttacaggatgcagctcctgtttctgcggtccccagcgcgtcaatacagagcgccaaagtgacggatta

SEQ ID NO: 188595 - DNA, 75 bp, synthetic construct
  source 1..75: mol_type = other DNA
cccgctggcaaataaacatccagaatgggtcaaaacggcgacgaataaaacgctcgacgatttcactctggaaaa

SEQ ID NO: 188596 - DNA, 75 bp, synthetic construct
  source 1..75: mol_type = other DNA
aagttggcggcaaattcgagtcactggcgcaattcgaagaagctgtcgagaaacgtgcctgtaatagtcgagtgc

SEQ ID NO: 188597 - DNA, 75 bp, synthetic construct
  source 1..75: mol_type = other DNA
ccattccgacgattcattacagttcgcaggtggcggaatatgccattgtggaaggtaattgtgtgttaaaacatc

SEQ ID NO: 188598 - DNA, 75 bp, synthetic construct
  source 1..75: mol_type = other DNA
tgaacagcgttatcaagcccaaatttgcgctgcatttgtccgtgaagccgcagaactctatgtcgagcgtaaaaa

SEQ ID NO: 188599 - DNA, 75 bp, synthetic construct
  source 1..75: mol_type = other DNA
cgctcgacgatttcactctggaaaatgtgctaagcgataacgtcaccgcccaggatatgcgcattacccctgaaa

SEQ ID NO: 188600 - DNA, 75 bp, synthetic construct
  source 1..75: mol_type = other DNA
aaaatgtgggctgaaatgaaaatgaatccgactgacctcgcggatgtcagtggctacacctatctcatgaacggg

SEQ ID NO: 188601 - DNA, 75 bp, synthetic construct
  source 1..75: mol_type = other DNA
acccgactgacctcgccgacgtcagcggctatacctacacctatctcatgaacggacaggcgccactgaaaaact

SEQ ID NO: 188602 - DNA, 75 bp, synthetic construct
  source 1..75: mol_type = other DNA
atgaaaatattaatcatattcgcattatatatcttgtcgccttcactatatgccaatgcagcggatatacaggga

SEQ ID NO: 188603 - DNA, 75 bp, synthetic construct
  source 1..75: mol_type = other DNA
agacgccgggcgtgatcggctggcgatgaactttgagcgcgcggcggaacttacggcagtcccggacgatcgcat

SEQ ID NO: 188604 - DNA, 75 bp, synthetic construct
  source 1..75: mol_type = other DNA
tatagcaatagatgatggcgaaaatgcacaagcattactcaaggctagtaagaaattagttcatagtaatggaaa

SEQ ID NO: 188605 - DNA, 75 bp, synthetic construct
  source 1..75: mol_type = other DNA
ccatggacagaaccggttacgctcgcgggactctggccacaagagaggggttaagtgctgccgttcccgctctcg

SEQ ID NO: 188606 - DNA, 75 bp, synthetic construct
  source 1..75: mol_type = other DNA
cccacctgactattctgacttggttaatgatgtagaaaaaatagagcgtcaaatttatgagcaaataggtgcttg

SEQ ID NO: 188607 - DNA, 75 bp, synthetic construct
  source 1..75: mol_type = other DNA
aaaagctacatacggtgaaaatcctctcggcaagcagctacagccccgatgagtgggaacggcagtgtcaatcgg

SEQ ID NO: 188608 - DNA, 75 bp, synthetic construct
  source 1..75: mol_type = other DNA
agttcaatgctgaccgttacctgtttgctgaaaacccggttgtacatctggatacggctgccaatagcaataaat

SEQ ID NO: 188609 - DNA, 75 bp, synthetic construct
  source 1..75: mol_type = other DNA
tgcataacgagtggatgaaggacgaggaatatcgtactgcatggcaggaagaagaacgcaaggagaagctcaggg

SEQ ID NO: 188610 - DNA, 75 bp, synthetic construct
  source 1..75: mol_type = other DNA
ctgaactactacaaagaaaacgaagcttacctgcaaggccagctggggcaacccgaaaggcgaagatcagccgaa

SEQ ID NO: 188611 - DNA, 75 bp, synthetic construct
  source 1..75: mol_type = other DNA
ttttatcgctggtaaaggcgtgaaatctgacgttccgcagggtgctgctatcctgggtgcgatctctggtgcgca

SEQ ID NO: 188612 - DNA, 75 bp, synthetic construct
  source 1..75: mol_type = other DNA
gttgctgaatgtaccggtggcacccgggcgtggcaatgacctgctgatatcccgtcaggcctgggacgccgagaa

SEQ ID NO: 188613 - DNA, 75 bp, synthetic construct
  source 1..75: mol_type = other DNA
cggtgctgaccggaaatctgattgtggcgaaattcaaccacgacacgaaccgtaaccaggaacctcagatacaca

SEQ ID NO: 188614 - DNA, 75 bp, synthetic construct
  source 1..75: mol_type = other DNA
gcccctggaaccccggggccatgaccggcgggcgggtatgggctgaaccggcgccggtggctccggtaccgcagg

SEQ ID NO: 188615 - DNA, 75 bp, synthetic construct
  source 1..75: mol_type = other DNA
gtgaaacggcagaggtgacaggctatagtacttcccaagtttgtcgcattcaggcgctctataaagaggttaaac

SEQ ID NO: 188616 - DNA, 75 bp, synthetic construct
  source 1..75: mol_type = other DNA
gtagtatctgtacattgggggactgaagatatttctattccagatcgtgaaacaagaatcatagctagaaaaatt

SEQ ID NO: 188617 - DNA, 75 bp, synthetic construct
  source 1..75: mol_type = other DNA
tggaccgcgtgccggacagtctgatgacggaactgaccgccggacagcgggcggcgacccggatgattctggaga

SEQ ID NO: 188618 - DNA, 75 bp, synthetic construct
  source 1..75: mol_type = other DNA
cgaaaattgtcagtgttatcaacgggaaagttacccgggccgaatacaacagcaccatgggctattttgttgaag

SEQ ID NO: 188619 - DNA, 75 bp, synthetic construct
  source 1..75: mol_type = other DNA
cagcaaccgataccttgaccattaaaggcacgccgccgaatttgcgcgaccaattgcagcgccggacgtctggcg

SEQ ID NO: 188620 - DNA, 75 bp, synthetic construct
  source 1..75: mol_type = other DNA
gataccctgaccattaaaggcacgccgccgaacctgcgcgatcaattgcagcgccggacgtctggcggcaattaa

SEQ ID NO: 188621 - DNA, 75 bp, synthetic construct
  source 1..75: mol_type = other DNA
cgtaaagtggccgatttctttatggattttctcggcgccagcgaagggttgaatgcgaaagcgcaaaaccgtggc

SEQ ID NO: 188622 - DNA, 75 bp, synthetic construct
  source 1..75: mol_type = other DNA
gtggcaaaagtatatacacccgaacagagggaggagctgaaggctcgaatcatcgctctggtgcgcaaaaatgaa

SEQ ID NO: 188623 - DNA, 75 bp, synthetic construct
  source 1..75: mol_type = other DNA
cgcctgaacataatttgtcgtgagtgccgccagagcgaagttatgcagcgtgtgctggctttctatcaggggaat

SEQ ID NO: 188624 - DNA, 75 bp, synthetic construct
  source 1..75: mol_type = other DNA
gaacaggttgagaacaacggcgaggtacgcccagtgcttacccgtccagatataggtcacatcaccgcactacac

SEQ ID NO: 188625 - DNA, 75 bp, synthetic construct
  source 1..75: mol_type = other DNA
ctctgcaccagcttatcaagcgtgatgagcagaaccttgagctggtgttgcgcgattcattgctggaaccgacag

SEQ ID NO: 188626 - DNA, 75 bp, synthetic construct
  source 1..75: mol_type = other DNA
aaaccttactcgacctgaattatgcccgtcaggttaacgaagtttccttatataccgctctgggtggcggttggc

SEQ ID NO: 188627 - DNA, 75 bp, synthetic construct
  source 1..75: mol_type = other DNA
gcggaatgtcatgttaactgcctgattgaaacagatgttcaggcttatgcaaacgctgaatttattgctgctttt

SEQ ID NO: 188628 - DNA, 75 bp, synthetic construct
  source 1..75: mol_type = other DNA
ctgccgaagcacaactggataaagcagaacggcagaacgtgcgtcagcaggtctacagctactgtaatgagcaat

SEQ ID NO: 188629 - DNA, 75 bp, synthetic construct
  source 1..75: mol_type = other DNA
gttatctggcggtggagtatctgctggtggcagttctgagcaacctgagcagtatgcgcgttaacgaaaatctcg

SEQ ID NO: 188630 - DNA, 75 bp, synthetic construct
  source 1..75: mol_type = other DNA
gataccctgaccattaaaggcacgccgccgaatttgcgcgatcaattgcagcgccggacgtctggcggcaattaa

SEQ ID NO: 188631 - DNA, 75 bp, synthetic construct
  source 1..75: mol_type = other DNA
acagccgaatgcgctgccttcagacattcagcagcagttaaaaacggccagacaagaacaggcaaacctcactgc

SEQ ID NO: 188632 - DNA, 75 bp, synthetic construct
  source 1..75: mol_type = other DNA
cgcagaagattaagggtgattgccagacgctggcagataatgttcagcagaatacaaatgctgtggaggaaaaca

SEQ ID NO: 188633 - DNA, 75 bp, synthetic construct
  source 1..75: mol_type = other DNA
tttcgcggctatccggctacgataagaaccgatcagggcccggagtttacctgccgcgcactcgatcagtgggct

SEQ ID NO: 188634 - DNA, 75 bp, synthetic construct
  source 1..75: mol_type = other DNA
agttggcaagtatctgcaaatggtgaaagagaaaaatggtgagttattacgagccgacaatgagttgacgcagaa

SEQ ID NO: 188635 - DNA, 75 bp, synthetic construct
  source 1..75: mol_type = other DNA
ttaccggcaggtgaaagcgaaattattttcactaatatcgccaattcggtaaccgacgacagcatcgccatttct

SEQ ID NO: 188636 - DNA, 75 bp, synthetic construct
  source 1..75: mol_type = other DNA
cacaaactattcgtgtatttaatttactggatggaagcaatgaatttattggcgaaagcgatgcatatattccgc

SEQ ID NO: 188637 - DNA, 75 bp, synthetic construct
  source 1..75: mol_type = other DNA
atgcctgaatgagcactggttcagcgatatcgttcacgcaaggaaaatcattaatgactggcggcaggattataa

SEQ ID NO: 188638 - DNA, 75 bp, synthetic construct
  source 1..75: mol_type = other DNA
cggcgaccgataccctgaccattaaaggcacgccgccgaacctgcgtgaccaattgcagcgccggacgtctggcg

SEQ ID NO: 188639 - DNA, 75 bp, synthetic construct
  source 1..75: mol_type = other DNA
gaaacgcaggaagaagaccgcaacgggcgcaatgtggcggaggatgtgtgggcctgggcaaataaccagaaccac

SEQ ID NO: 188640 - DNA, 75 bp, synthetic construct
  source 1..75: mol_type = other DNA
cctgatgggggtaataccgacattatccaggttcaattgagcattaccgcagcagatgaagcacctacgataacc

SEQ ID NO: 188641 - DNA, 75 bp, synthetic construct
  source 1..75: mol_type = other DNA
ttatccaggttcaattgagcattaccgcagcagatgaagcacctacgatattccagattgtcctgggagcagccg

SEQ ID NO: 188642 - DNA, 75 bp, synthetic construct
  source 1..75: mol_type = other DNA
aaaataagactcataaaattaccgactggacgctgtgggctggaaatgacgacggagaggttatgctgacctgtc

SEQ ID NO: 188643 - DNA, 75 bp, synthetic construct
  source 1..75: mol_type = other DNA
ataatttgtttgttcgagaggggtgtgactggtctgctaaagcggtatatgcagcccttgaaaacaaaggcacag

SEQ ID NO: 188644 - DNA, 75 bp, synthetic construct
  source 1..75: mol_type = other DNA
ccgggatggtcaggaaagcgtggttcagatacgcggtccccgggagcaggggatcctgacagggctaatccgtga

SEQ ID NO: 188645 - DNA, 75 bp, synthetic construct
  source 1..75: mol_type = other DNA
gtgatggtacagctaagtgatgaccagaaaagaaaagtggcggcacagaaacgagcagagtgtttgcgtaaggcg

SEQ ID NO: 188646 - DNA, 75 bp, synthetic construct
  source 1..75: mol_type = other DNA
tttgctcagtacgtggttcgtggtttaatcctgctggcagcggtgatcttcgaccgttataaacaaaaagcgaaa

SEQ ID NO: 188647 - DNA, 75 bp, synthetic construct
  source 1..75: mol_type = other DNA
gaaagggcatcgatgccgccattgaacgggagcagcttatccctctcgatcgcgagaaaggcctgttcacctcaa

SEQ ID NO: 188648 - DNA, 75 bp, synthetic construct
  source 1..75: mol_type = other DNA
gccagcgataccgtcggtaaaaccgggttctccgaaaccatactggccaaccgcatcgctttcggaaagatatac

SEQ ID NO: 188649 - DNA, 75 bp, synthetic construct
  source 1..75: mol_type = other DNA
cggtgaatttgttgccggaagactcccgtccgaaggtaatcggcctcggtccaacacaccgtgcggtgggagaaa

SEQ ID NO: 188650 - DNA, 75 bp, synthetic construct
  source 1..75: mol_type = other DNA
tcgaggtctggcgtacatcatttcagacggtaaagcggtcggtatcgaagatgaaagcttctttgcccttggtta

SEQ ID NO: 188651 - DNA, 75 bp, synthetic construct
  source 1..75: mol_type = other DNA
tgggtggcagtgaatggctccagacggaaaaagccagagagcatggcgctgatgttctctcctatagtgataatc

SEQ ID NO: 188652 - DNA, 75 bp, synthetic construct
  source 1..75: mol_type = other DNA
aaatacatttatactgcaagatctgactcagattcgagctggagttgcgggggccatagtattatattcagtgtt

SEQ ID NO: 188653 - DNA, 75 bp, synthetic construct
  source 1..75: mol_type = other DNA
ccaatctggcttaccgtagcttgtctgataatctttggtctgctgttgaacaaaactacttttggtcgaaatacg

SEQ ID NO: 188654 - DNA, 75 bp, synthetic construct
  source 1..75: mol_type = other DNA
tctccgcctgcgttttaggtggcgtttctctgaaaggtggcatcggaaaaatctcatatgtggtggcgggatctt

SEQ ID NO: 188655 - DNA, 75 bp, synthetic construct
  source 1..75: mol_type = other DNA
ccaatctggctcactgtcgcttgcctgataatctttggcttgctgctgaacaaaactacctttggtcgtaatacg

SEQ ID NO: 188656 - DNA, 75 bp, synthetic construct
  source 1..75: mol_type = other DNA
cagcaacggccggggagaaatacgttcgtaccagcgtattccggtcaccggcgggaaggatgcccgcattctgaa

SEQ ID NO: 188657 - DNA, 75 bp, synthetic construct
  source 1..75: mol_type = other DNA
cagagataccaggtggcttttcaccggaagaagcgcaggcactcctggataatctggtgcgcagccatatcagca

SEQ ID NO: 188658 - DNA, 75 bp, synthetic construct
  source 1..75: mol_type = other DNA
taattaaaacaataattgtaattctggccagtattttttacattctcctcgcatgttacatacacaacgaacaat

SEQ ID NO: 188659 - DNA, 75 bp, synthetic construct
  source 1..75: mol_type = other DNA
aggttcccgtgtggatgcgacctctgttgccgttgctctgcaacaccggggggaacgatccggaagaactgctga

SEQ ID NO: 188660 - DNA, 75 bp, synthetic construct
  source 1..75: mol_type = other DNA
ccaaatgttcacagcgtgatattgagctggcgcggcaactgcatcagcgtggcgtaccccgacgggaaattgccg

SEQ ID NO: 188661 - DNA, 75 bp, synthetic construct
  source 1..75: mol_type = other DNA
ggcttttcaccggaagaggcgcaggcactcctggataatctggtgcgcagccatgtcagcaaggcgctgtcggga

SEQ ID NO: 188662 - DNA, 75 bp, synthetic construct
  source 1..75: mol_type = other DNA
aggcgctgtcgggcgagcgaatggcagcccgtgacagaaatgccgatctggcctggattggacagcaactggtcg

SEQ ID NO: 188663 - DNA, 75 bp, synthetic construct
  source 1..75: mol_type = other DNA
tgcaacattcgcatgacttgagcatcatgcatatgaaaatcgtgcaagcgaacgccatcgatatttacgaccgct

SEQ ID NO: 188664 - DNA, 75 bp, synthetic construct
  source 1..75: mol_type = other DNA
tcccgacaattgagaatttaagggaagcattcttgccgatactctttacggaggctgacgctatcagccgttacg

SEQ ID NO: 188665 - DNA, 75 bp, synthetic construct
  source 1..75: mol_type = other DNA
gaaaagtcagctgtctccgcattatccggctcaataagccaaatagttaatgcgctggctgaggccgatccccgg

SEQ ID NO: 188666 - DNA, 75 bp, synthetic construct
  source 1..75: mol_type = other DNA
accctacgattgttagaaaagctaatcaggcccacgaggctcttctaaaaagcctgcgacaaaatttagagggat

SEQ ID NO: 188667 - DNA, 75 bp, synthetic construct
  source 1..75: mol_type = other DNA
atagtgacgatctaagccttgtcttcgataaaccgagggaaagatttgccagacgtttagctaacctggcaacac

SEQ ID NO: 188668 - DNA, 75 bp, synthetic construct
  source 1..75: mol_type = other DNA
acccggaaatgatcgctcaggcaacgcaggcgcatacggccctgatgaccagtctgaataaaagtattgagggaa

SEQ ID NO: 188669 - DNA, 75 bp, synthetic construct
  source 1..75: mol_type = other DNA
ttattcaggaaataaagacaccatgcagaacgagtgatattgcttcgcgttttgaaatgagtgcttatcaggccc

SEQ ID NO: 188670 - DNA, 75 bp, synthetic construct
  source 1..75: mol_type = other DNA
gtggccgtcactatcacttgtagaagtcttgcagaccttgcaggaggcctggcaaaatattccggcgttaaaccc

SEQ ID NO: 188671 - DNA, 75 bp, synthetic construct
  source 1..75: mol_type = other DNA
cctaccgctcagaagaaatcgtgccgttcagacggcccaaaggggatctggatagtcggtatatgcctcaggtgt

SEQ ID NO: 188672 - DNA, 75 bp, synthetic construct
  source 1..75: mol_type = other DNA
ggcgctcatttctgatcgggaatgcccgcagcttcaggcaggcgctgctcgcctaccgcgatggcgcgcgcatcc

SEQ ID NO: 188673 - DNA, 75 bp, synthetic construct
  source 1..75: mol_type = other DNA
tggttcccgaactatttaacccaggaaaaaggaatcacggcgctgaaagcaggctttatgaccacggtgccattc

SEQ ID NO: 188674 - DNA, 75 bp, synthetic construct
  source 1..75: mol_type = other DNA
tgcaaagtgaaggcgagaaaaaccccattgttgaagaacttgaaagaataagaaaaattcaagagaaattgatga

SEQ ID NO: 188675 - DNA, 75 bp, synthetic construct
  source 1..75: mol_type = other DNA
ctacttaccgttccgatgacatcgtgccttttcgtcggccgcagggagatctggataatcgctatatgccgcagg

SEQ ID NO: 188676 - DNA, 75 bp, synthetic construct
  source 1..75: mol_type = other DNA
ggcgtaccccaacgggaaattgccgaaaagtttgggatgaagttgggcgcagtgaataactacgtttatttcgac

SEQ ID NO: 188677 - DNA, 75 bp, synthetic construct
  source 1..75: mol_type = other DNA
ggcgcggcatcttcatcagtgcggtatgtcccggcgtgaaatagccggaaaattcgggatgaagttgcgcacagt

SEQ ID NO: 188678 - DNA, 75 bp, synthetic construct
  source 1..75: mol_type = other DNA
ccgcgagctgcgccgggcaaaaggtcaggttcagaagtgggagcgtgtctgcgccgcgctgcgggagctgaacaa

SEQ ID NO: 188679 - DNA, 75 bp, synthetic construct
  source 1..75: mol_type = other DNA
gggctgaaattctgatactccggcagtgtgctggcaccatgcgggtgaaagatatcgggaaactgactggtcgca

SEQ ID NO: 188680 - DNA, 75 bp, synthetic construct
  source 1..75: mol_type = other DNA
caggacgaaagcgcgggaactgggtatctgcatgatgttacggggtgattatcaccagtcagccaaatgttcaca

SEQ ID NO: 188681 - DNA, 75 bp, synthetic construct
  source 1..75: mol_type = other DNA
gtagccgctgggaaagatgcaatgaaggccgccggtgcggcgtactcgtcaattggtaatacgatggcgatgtgg

SEQ ID NO: 188682 - DNA, 75 bp, synthetic construct
  source 1..75: mol_type = other DNA
tgacgtatctctcgcggaagacttagggttcaatcatgcaatagaacggatgaggagacagatacctgtgattga

SEQ ID NO: 188683 - DNA, 75 bp, synthetic construct
  source 1..75: mol_type = other DNA
atgaaacaaatgtcactaattgagatggatggatttctgaaaggtaaatacatcccacgagatttaaaggttaac

SEQ ID NO: 188684 - DNA, 75 bp, synthetic construct
  source 1..75: mol_type = other DNA
tggagcatatgcagtcgagcggttcgttaacatttggagattgctacatatcacttaacgagttcgccgcagagc

SEQ ID NO: 188685 - DNA, 75 bp, synthetic construct
  source 1..75: mol_type = other DNA
tttgtcagcgaaagaagagttggttaatgaagcgcatccgattgatggcctgtctggtgaatatgcggagaaatc

SEQ ID NO: 188686 - DNA, 75 bp, synthetic construct
  source 1..75: mol_type = other DNA
aagctatcggaagcagcagaaagagcatgggagtcatcaatgatgcaggcttgcggcgaagacgggccgaaatca

SEQ ID NO: 188687 - DNA, 75 bp, synthetic construct
  source 1..75: mol_type = other DNA
ttcggcgctggcggcggagaatgcgatgttgaagcaacggacacagcaacttatcgacatcattagtaatactga

SEQ ID NO: 188688 - DNA, 75 bp, synthetic construct
  source 1..75: mol_type = other DNA
gctgaacgtgactgctctatgcagcgccgccaccagaaagtcgtcgaagaagcgccagcaccgggtatcacccca

SEQ ID NO: 188689 - DNA, 75 bp, synthetic construct
  source 1..75: mol_type = other DNA
ccgggcaaaatcacccgtttccacgcacctggcggttttggcgtgcgttgggagtctcatatctacgcgggctac

SEQ ID NO: 188690 - DNA, 75 bp, synthetic construct
  source 1..75: mol_type = other DNA
cgaaaatggcagcagcaatgccctgctcgcccggactctgggcgagcagaagaaaaatgtcactatcatcacggt

SEQ ID NO: 188691 - DNA, 75 bp, synthetic construct
  source 1..75: mol_type = other DNA
gtaagttcggtgaacttgaatcaaaactagaaacggcgttgcgggagtgtagttctgctggaatcacgattgata

SEQ ID NO: 188692 - DNA, 75 bp, synthetic construct
  source 1..75: mol_type = other DNA
tcaataagtctttgcgtgaagttttcgacgttacacgcatgattctgtcagcgaaagaagagttggctaatgaac

SEQ ID NO: 188693 - DNA, 75 bp, synthetic construct
  source 1..75: mol_type = other DNA
agcgccagcaccgggtatcaccccagaactgcgtcgttacatcggcgagcgttgtgcaaaagcgtgtattgatat

SEQ ID NO: 188694 - DNA, 75 bp, synthetic construct
  source 1..75: mol_type = other DNA
gttgttggcgacaacaccgaggttatcgctgaggtggttgggcgagatggcgttctggttattttggaggccatg

SEQ ID NO: 188695 - DNA, 75 bp, synthetic construct
  source 1..75: mol_type = other DNA
tgaactaagagaagcgctagcagaaccaattgtatataaaaatacatcaggtgcaggtgtcgcttatggcattga

SEQ ID NO: 188696 - DNA, 75 bp, synthetic construct
  source 1..75: mol_type = other DNA
gtaatctgtaccaaaaactcggtgtcgcccaccgtcaggccgcggtacaacacgcgcagaaactgctgaagatga

SEQ ID NO: 188697 - DNA, 75 bp, synthetic construct
  source 1..75: mol_type = other DNA
acaactcaaagagcagcgtgagtattacgaaggcgttatctctgatgggagcaagcgtattgctgaactggaagc

SEQ ID NO: 188698 - DNA, 75 bp, synthetic construct
  source 1..75: mol_type = other DNA
catcgcgtgtgaaaacatggttcgcggcaccactcagttgaaaggccatgtaatgaatgccctgccggaagaagc

SEQ ID NO: 188699 - DNA, 75 bp, synthetic construct
  source 1..75: mol_type = other DNA
cagcattggcgatgatgtcgttgatctgattgctcaggtcgatttagtcactaccgccgttggccctgtcgtgct

SEQ ID NO: 188700 - DNA, 75 bp, synthetic construct
  source 1..75: mol_type = other DNA
caaagcgtgggtagaagaacacgttggctttgtcgattccgccgttgaccgcatcgtaccgccttcggcttcggc

SEQ ID NO: 188701 - DNA, 75 bp, synthetic construct
  source 1..75: mol_type = other DNA
cttcgtcttctggtttcgcaaagtgcgtcttggtaaagcattacaaccgttgctcggttcaatgctgatcccgtt

SEQ ID NO: 188702 - DNA, 75 bp, synthetic construct
  source 1..75: mol_type = other DNA
cgatcaccaactgccctgccgggatcgctcacacctacatggtggcggaagccctggaacagaaagcccgttctc

SEQ ID NO: 188703 - DNA, 75 bp, synthetic construct
  source 1..75: mol_type = other DNA
tggatggatttctgaaagggaaatgcatcccccgagatttaaaggttaacgaaacaaacgctgaatatctggtgc

SEQ ID NO: 188704 - DNA, 75 bp, synthetic construct
  source 1..75: mol_type = other DNA
gaagcggatattatcgctgatttgctggatggactggaagaagcaaaatcacaactcaacgagcagcgttgtcag

SEQ ID NO: 188705 - DNA, 75 bp, synthetic construct
  source 1..75: mol_type = other DNA
gtttaagcgtcatatccgtcatcgggaagcggatattatcgctgatttgctggatggactggaagaagcaaaatc

SEQ ID NO: 188706 - DNA, 75 bp, synthetic construct
  source 1..75: mol_type = other DNA
cttcgtcttctggttccgcaaagtgcgccttggcaaagcattacaaccgctgctcggttcaatgctgatcccgtt

SEQ ID NO: 188707 - DNA, 75 bp, synthetic construct
  source 1..75: mol_type = other DNA
ggcagaaatgataaaaaaggcgagggaataccgggatcaggaagaggcaaggcggctggaacatcgggtgcaaat

SEQ ID NO: 188708 - DNA, 75 bp, synthetic construct
  source 1..75: mol_type = other DNA
atgcaccgccttgatgaggtggttgatacgctgcttgtcctgcagaagaagcaccggatacggtttgatgtctgg

SEQ ID NO: 188709 - DNA, 75 bp, synthetic construct
  source 1..75: mol_type = other DNA
catatgaatcagcaattgcagaagcaattggtgtggaaccggaagttatctggccatcacgttatcggaataaaa

SEQ ID NO: 188710 - DNA, 75 bp, synthetic construct
  source 1..75: mol_type = other DNA
ccaatgacctgtcactcgccataaggttctacgatccgctgatggaattgcttggacatccaaagtcaggccgta

SEQ ID NO: 188711 - DNA, 75 bp, synthetic construct
  source 1..75: mol_type = other DNA
ttgacaagttcactgactggcaacaaatgttgccagcattaccttttgaaatttcctcccgcatcacattttttc

SEQ ID NO: 188712 - DNA, 75 bp, synthetic construct
  source 1..75: mol_type = other DNA
ctcttcttaacagcttaactcctcaagagcagcaaatgcttttcacgcaacttcgcggaagaattcccatccatc

SEQ ID NO: 188713 - DNA, 75 bp, synthetic construct
  source 1..75: mol_type = other DNA
ttttcccacatcgtaaaagcatcactgacgtagtgagctatgcaaccgacccttacgcggctgtagaaagcaaaa

SEQ ID NO: 188714 - DNA, 75 bp, synthetic construct
  source 1..75: mol_type = other DNA
atctggcactcccatactgacgaatctgctgatgcgtcagacgccgaccgcgccggatgtgaggcaacggaagtt

SEQ ID NO: 188715 - DNA, 75 bp, synthetic construct
  source 1..75: mol_type = other DNA
tggatggttttctgaaaggtaaatgcatcccatgtgatttaaaggttaacgaaacaaaggctgaatatctggtgc

SEQ ID NO: 188716 - DNA, 75 bp, synthetic construct
  source 1..75: mol_type = other DNA
catctgaaatccctgaaggaatggaaatatctgttaacaagaagggcgaacccattctgattgagattaaaccat

SEQ ID NO: 188717 - DNA, 75 bp, synthetic construct
  source 1..75: mol_type = other DNA
ggcgctctctatacatctgggaacgtggcttatgtctgcgtgtccgacttcgttacagcaggtagtaataagcct

SEQ ID NO: 188718 - DNA, 75 bp, synthetic construct
  source 1..75: mol_type = other DNA
gccttgtgtgcattaaagctgatgcgctgaatgctgtaagtgaagcagcaaaaacagcattaattaaaaaaggct

SEQ ID NO: 188719 - DNA, 75 bp, synthetic construct
  source 1..75: mol_type = other DNA
aattgttatgaaagtcacgaaacattagctaagatttttaagtcttcaccatcaacaattaaacgtaagataaac

SEQ ID NO: 188720 - DNA, 75 bp, synthetic construct
  source 1..75: mol_type = other DNA
ctctatggaagtcccgtcgccgcaggctggcatcgttaaagagatcaaagtctctgttggcgataaaaccgagac

SEQ ID NO: 188721 - DNA, 75 bp, synthetic construct
  source 1..75: mol_type = other DNA
aaagttggcgataaagttgaagctgaacagtcgttgatcaccgtagaaggcgacaaggcttctatggaagttcct

SEQ ID NO: 188722 - DNA, 75 bp, synthetic construct
  source 1..75: mol_type = other DNA
actggtcaggtactgccgacagcgaaaaaagtgacctaccgtattcactttaaacgcattgttaatcgtcgtctg

SEQ ID NO: 188723 - DNA, 75 bp, synthetic construct
  source 1..75: mol_type = other DNA
atcatcagacggatggatctgcgcataatcatctttttgcgttgattatcgatcctgatcaattcaccgactggc

SEQ ID NO: 188724 - DNA, 75 bp, synthetic construct
  source 1..75: mol_type = other DNA
cagcgacgaagttgaagtgaccgaaatcctggtcaaagtgggcgacaaagttgaagccgaacagtcgctgatcac

SEQ ID NO: 188725 - DNA, 75 bp, synthetic construct
  source 1..75: mol_type = other DNA
gccggaagtggctatcctcggcgtttccaagtccgcgatggagccggtgtggaatggtaaagagttcgtgccgcg

SEQ ID NO: 188726 - DNA, 75 bp, synthetic construct
  source 1..75: mol_type = other DNA
tgttcgatgccatcgataatgcagcaaaaacacaaatgaataatgtcacggctgttatggctgtgatgggggttg

SEQ ID NO: 188727 - DNA, 75 bp, synthetic construct
  source 1..75: mol_type = other DNA
aagcaactggttttggtgctgcaagtcacatgagtaaggcattaggaagtaaattagttgatcgttttcatggta

SEQ ID NO: 188728 - DNA, 75 bp, synthetic construct
  source 1..75: mol_type = other DNA
gctaaaacgaccaaatggtattgaggcatatttttctaagcattacccaaatatatacgatgactttgatattcc

SEQ ID NO: 188729 - DNA, 75 bp, synthetic construct
  source 1..75: mol_type = other DNA
aaaaagtgacctatcgtatccactttaaacgtattgttaaccgtcgcttgatcatgggtctggccgatggtgaag

SEQ ID NO: 188730 - DNA, 75 bp, synthetic construct
  source 1..75: mol_type = other DNA
tcttattagccaaaaaggacaaccaaaatttgctggttggatctttaacggctttgacaagagaaaacagccagg

SEQ ID NO: 188731 - DNA, 75 bp, synthetic construct
  source 1..75: mol_type = other DNA
ctcgatgagtacggcatcccaaatgcctggcaaggggaaaccaacttctggggcagtaccgccgtcagtatcgat

SEQ ID NO: 188732 - DNA, 75 bp, synthetic construct
  source 1..75: mol_type = other DNA
attctcgtctactaaaggaacgcgtcatttttctgactggccaggttgaagaccacatggctaacctgattgtgg

SEQ ID NO: 188733 - DNA, 75 bp, synthetic construct
  source 1..75: mol_type = other DNA
cttcaaaaaagtgccaatgagttaaaactcagatatatcgctaagggtagttttttggatatgcttaaatccgat

SEQ ID NO: 188734 - DNA, 75 bp, synthetic construct
  source 1..75: mol_type = other DNA
ttttaatgttgtaaaggcggataatttcatccttgcaggaatactacacaaagggttaagcactgacagcgatta

SEQ ID NO: 188735 - DNA, 75 bp, synthetic construct
  source 1..75: mol_type = other DNA
cgctgactgtcaagctggcagtatcctccacattttttataaatctaaggcgaagaacggtggcaatatatttgc

SEQ ID NO: 188736 - DNA, 75 bp, synthetic construct
  source 1..75: mol_type = other DNA
tgagggtgttacccgcaaacatcggatcctgtttcgtggccgcatctacaacattgagggcgttttacctgaccc

SEQ ID NO: 188737 - DNA, 75 bp, synthetic construct
  source 1..75: mol_type = other DNA
ggaagatatccaggagaaagaccgtattcttttccgtggcaaaatctacagcattgaggggatccttcctgaccc

SEQ ID NO: 188738 - DNA, 75 bp, synthetic construct
  source 1..75: mol_type = other DNA
acgccaaaatccatggacaggctaaagcagccagtgactttggtgtaatccagtgcgctatcagtaaggccattc

SEQ ID NO: 188739 - DNA, 75 bp, synthetic construct
  source 1..75: mol_type = other DNA
gccctaacaggcgcacacgatctgacatttgcatccaacttcgttactcacggtccataaacgcgctgcccaggt

SEQ ID NO: 188740 - DNA, 75 bp, synthetic construct
  source 1..75: mol_type = other DNA
atggatgtcattgaacttagagagttacttatcaagtataatggtcttcaaaatactgacgaagtctatacgttt

SEQ ID NO: 188741 - DNA, 75 bp, synthetic construct
  source 1..75: mol_type = other DNA
acctgcccgagtgtttccaccatcggcagaatgatcgccaccgcacacgataaaatgcggatggtaccagtacgt

SEQ ID NO: 188742 - DNA, 75 bp, synthetic construct
  source 1..75: mol_type = other DNA
aaaaattacaggcaggcagaaaaagtgtgtcaggagggcataaatacagatatgagtataacggtcaaacaatgt

SEQ ID NO: 188743 - DNA, 75 bp, synthetic construct
  source 1..75: mol_type = other DNA
gcgtgctgagggctattcatcctttcgtacagagaatttattttaccgtcgtgatttgtctaacatgacatatgt

SEQ ID NO: 188744 - DNA, 75 bp, synthetic construct
  source 1..75: mol_type = other DNA
cccgctggaaacaacctcacggcaaatatatctcacccgcggcatttattccacttgctgaaaaatctggattaa

SEQ ID NO: 188745 - DNA, 75 bp, synthetic construct
  source 1..75: mol_type = other DNA
ctcgtattcctgctttccctgacagtaatttactgttggctccggcaatcgacaccgtcaatagattgcctatcc

SEQ ID NO: 188746 - DNA, 75 bp, synthetic construct
  source 1..75: mol_type = other DNA
gagattctgcgtagggcgataagcaatggtgagattgtgcctttttaccaaccggtagttaatggtcgggaaggg

SEQ ID NO: 188747 - DNA, 75 bp, synthetic construct
  source 1..75: mol_type = other DNA
catatttttgtctacgataacaaattgtgcttaagttgtttgttaaccaatattgatgtgttttctctaatgaat

SEQ ID NO: 188748 - DNA, 75 bp, synthetic construct
  source 1..75: mol_type = other DNA
atgaatcttttaattaaaagaaacgtagaagagtttttaagattattagggaatgatttttatttgtttgataat

SEQ ID NO: 188749 - DNA, 75 bp, synthetic construct
  source 1..75: mol_type = other DNA
ctggatgattttggtactggctattcagggctttcttatctgcatgatctgcatattgattatattaaaattgat

SEQ ID NO: 188750 - DNA, 75 bp, synthetic construct
  source 1..75: mol_type = other DNA
cccgtattcctgttatatctgacaacaatttgctattggctccggcgatcgacaccgtaaatagattacccatcc

SEQ ID NO: 188751 - DNA, 75 bp, synthetic construct
  source 1..75: mol_type = other DNA
ccggtacattttaccgagggttttaacaatattcgccatattggcacggtgtcatgtaccgaaacagcggtggca

SEQ ID NO: 188752 - DNA, 75 bp, synthetic construct
  source 1..75: mol_type = other DNA
ttcggatcgctcgggctcacccgaacccgaaacgcattacgttattataactggtctcagcccttttactcccga

SEQ ID NO: 188753 - DNA, 75 bp, synthetic construct
  source 1..75: mol_type = other DNA
tgttaatcgcctgcgccgctgccttcctgcttgataggtatttcaataaaagcgcaacgcctgaagagatcctgc

SEQ ID NO: 188754 - DNA, 75 bp, synthetic construct
  source 1..75: mol_type = other DNA
ttgtttattaccggtgtcgctattttgaacatccagctctggtattccgcaaaagcagagtacctggcgggagcg

SEQ ID NO: 188755 - DNA, 75 bp, synthetic construct
  source 1..75: mol_type = other DNA
acatttcagcagggttattatttctataaaccggtaacatacatcgacctggtcaaaattatcctttctaaaccg

SEQ ID NO: 188756 - DNA, 75 bp, synthetic construct
  source 1..75: mol_type = other DNA
tgatggctggcaacctgaaactggattcaccggtcgcgatatgatgcgtaccgatgtggtcaatgccgtgctgga

SEQ ID NO: 188757 - DNA, 75 bp, synthetic construct
  source 1..75: mol_type = other DNA
cgggaaaagtccgcattattcagtatatcgccgggcgtaagtcggcgaagaaaaagaactcactgttaattaaag

SEQ ID NO: 188758 - DNA, 75 bp, synthetic construct
  source 1..75: mol_type = other DNA
agacaaaaagagcaacttggaagtgatgcttacaagttagattttgagcaatggctggagcagcaacgcggggaa

SEQ ID NO: 188759 - DNA, 75 bp, synthetic construct
  source 1..75: mol_type = other DNA
gagtcatcttgaggcggcattaaacattaaaccgggccatacgctaggcgtcattgatgccatgttggttcatga

SEQ ID NO: 188760 - DNA, 75 bp, synthetic construct
  source 1..75: mol_type = other DNA
cgttgttacaggaaggagatgttgtgctggtagtgacccattccgggcgaaccagtgatgtaaaagcggctgtag

SEQ ID NO: 188761 - DNA, 75 bp, synthetic construct
  source 1..75: mol_type = other DNA
gccttacctgcgaatgaagcaggaaggaatgacagaaaatgaaagccgcatcgtggagtggttactcaaacccgg

SEQ ID NO: 188762 - DNA, 75 bp, synthetic construct
  source 1..75: mol_type = other DNA
tcactaaagaacgcatatcagagattatcgcccgtatcgaaatgtatggtcacggtgctggatatacggcagatg

SEQ ID NO: 188763 - DNA, 75 bp, synthetic construct
  source 1..75: mol_type = other DNA
cgtcagggcaatgaccatggcacgcagtatcgttccgcgatttatccgctaacaccagaacaggatgctgccgcc

SEQ ID NO: 188764 - DNA, 75 bp, synthetic construct
  source 1..75: mol_type = other DNA
aagatgaccaccaacaatatctgcacaaaaacccatatggctattgtggaattggtgggatcggcgtttgcctgc

SEQ ID NO: 188765 - DNA, 75 bp, synthetic construct
  source 1..75: mol_type = other DNA
ttgcccgtagcggcgttttattctcattacagacgcacctaagttgcggggcctataccagtttgttggggcgaa

SEQ ID NO: 188766 - DNA, 75 bp, synthetic construct
  source 1..75: mol_type = other DNA
cagcaattacgagaaagaattagccgtgttttgggcgacgttattacgccagatcatcataaacaagccgagaaa

SEQ ID NO: 188767 - DNA, 75 bp, synthetic construct
  source 1..75: mol_type = other DNA
tcaggctgcgtttccggttatcgctgccatcggcgggatgatcgttccggcattgctctatctggcctttaacta

SEQ ID NO: 188768 - DNA, 75 bp, synthetic construct
  source 1..75: mol_type = other DNA
tcacgccgaagcggtgcgcgtggtatacgatccttcagttctcagctatgagcaactgttgcaagtattctggga

SEQ ID NO: 188769 - DNA, 75 bp, synthetic construct
  source 1..75: mol_type = other DNA
gttcagcgtcgtaccgggtacgcattgcgctggcgctgaaaggcattaattaccagaccgaaggggtgaatatcc

SEQ ID NO: 188770 - DNA, 75 bp, synthetic construct
  source 1..75: mol_type = other DNA
ccaagaacgcggtcgaaaaccacttcgacacctcttatgaattagaatctctccttgagcagcgcgtgaagcgtc

SEQ ID NO: 188771 - DNA, 75 bp, synthetic construct
  source 1..75: mol_type = other DNA
aaaattctcagggagcttgagggtgtagatcaggacactccccaagacgagcttgatgaaccggctgataaccac

SEQ ID NO: 188772 - DNA, 75 bp, synthetic construct
  source 1..75: mol_type = other DNA
ttatttagatcctatattgggaaaacgttgtgaggtagaagatgttgtagcgattttggctcagcagcaggtaga

SEQ ID NO: 188773 - DNA, 75 bp, synthetic construct
  source 1..75: mol_type = other DNA
ttattgataacgcttctgcggatcctctgcgttataaccttgccgcgatgattgcacgtttcaacgaaacaggcc

SEQ ID NO: 188774 - DNA, 75 bp, synthetic construct
  source 1..75: mol_type = other DNA
gggttatatgcaagcgtttgtgaagtatgggctgcgtaacctgaaggagggcgctaagttccgcaaaggcattga

SEQ ID NO: 188775 - DNA, 75 bp, synthetic construct
  source 1..75: mol_type = other DNA
gtagccaggtgctggcaaaacgtatgccgggtgacctctctgaatactccgttattcagaccaaagagccgctgg

SEQ ID NO: 188776 - DNA, 75 bp, synthetic construct
  source 1..75: mol_type = other DNA
agcccattcagcttcgactcacgttactgggggactgtgaaaaatgatcagatcattggccgcgcatatcccctg

SEQ ID NO: 188777 - DNA, 75 bp, synthetic construct
  source 1..75: mol_type = other DNA
ttaccatttcgcacgaagcaatccctgctgtgggctggcctgcaatgaccatgcgcttcacttttgttaatgcag

SEQ ID NO: 188778 - DNA, 75 bp, synthetic construct
  source 1..75: mol_type = other DNA
ggatccagcaagggttaagcgcggtggaacaactgttgcgccagaaccagtcggggcaattttgtgtgggcgaga

SEQ ID NO: 188779 - DNA, 75 bp, synthetic construct
  source 1..75: mol_type = other DNA
ccagtgatgcttcggtacagcaagttatcaagggcaccggtgtcgttaaagacattgatatgaatagtaaaaaaa

SEQ ID NO: 188780 - DNA, 75 bp, synthetic construct
  source 1..75: mol_type = other DNA
tatcaggggctccggtgtcgttaaagccattgatatgaatagtaaaaaaatcaccatttcgcacgaagcaatccc

SEQ ID NO: 188781 - DNA, 75 bp, synthetic construct
  source 1..75: mol_type = other DNA
ttaccatttcgcacgaagcaatcccggcggtgggctggcctgcaatgaccatgcgcttcacttttgttaatgcag

SEQ ID NO: 188782 - DNA, 75 bp, synthetic construct
  source 1..75: mol_type = other DNA
aacgggtacagaacagctgctttgatagcttttatattgcaataccaacacctgctgtaatgagcttattttcag

SEQ ID NO: 188783 - DNA, 75 bp, synthetic construct
  source 1..75: mol_type = other DNA
tggtggaaatccgctcgcttttcccaagtgaatttgaagaaacggagttaggttgggtgccaaagggctggacgc

SEQ ID NO: 188784 - DNA, 75 bp, synthetic construct
  source 1..75: mol_type = other DNA
ttgcagcagccgaaattctggaaatggataaagttccagcgattcggttgagtaacctttctgaaaaacagaaga

SEQ ID NO: 188785 - DNA, 75 bp, synthetic construct
  source 1..75: mol_type = other DNA
cagccgcagactctggattccgatctgatggcagtagggcgctacgtgctttctgcggatatctgggcagaactg

SEQ ID NO: 188786 - DNA, 75 bp, synthetic construct
  source 1..75: mol_type = other DNA
gtcatcaaaacgaaagagccgctggatgtcgaaggtaaagttagccgtatcgttgattttatcgaaaaacctgac

SEQ ID NO: 188787 - DNA, 75 bp, synthetic construct
  source 1..75: mol_type = other DNA
gcctgggccactcaattctttgcgcgcgaccgatcgttggcgataacccgtttgtggttgttctgcccgatatca

SEQ ID NO: 188788 - DNA, 75 bp, synthetic construct
  source 1..75: mol_type = other DNA
aataaaccaaatgatcgctggattcgttctgtatggtacatggatgatcagcagcgattgaatgataacgcagta

SEQ ID NO: 188789 - DNA, 75 bp, synthetic construct
  source 1..75: mol_type = other DNA
ctgcccggtcgtgatgccttctttcgtgatgtggttgatcctgaaactcgatgctgggttcctgatgatgcggaa

SEQ ID NO: 188790 - DNA, 75 bp, synthetic construct
  source 1..75: mol_type = other DNA
ctgcccggtcgtgatgccttctttcgtgatgtggttgatcctgagactcgatgctgggttcctgatgatgcggag

SEQ ID NO: 188791 - DNA, 75 bp, synthetic construct
  source 1..75: mol_type = other DNA
taaaggggaaactcaaatcaattccgatctgaccggttatggtcagtgggaatataacttccagggtaacaactc

SEQ ID NO: 188792 - DNA, 75 bp, synthetic construct
  source 1..75: mol_type = other DNA
taatgtttgcctgcgtgtgatgctggatgctgctcaggaagcaggggtattgtttgctccaattgaccccaaaaa

SEQ ID NO: 188793 - DNA, 75 bp, synthetic construct
  source 1..75: mol_type = other DNA
acttacatttccgggatagggactgcggctggtgaagcagattcagtcattggcatgggattaggcaccagtatt

SEQ ID NO: 188794 - DNA, 75 bp, synthetic construct
  source 1..75: mol_type = other DNA
gaaaaaaccgcgccgggtgcctggggacgtattcagttgacggatgctatcgccgagctggcgaagaaacagtcc

SEQ ID NO: 188795 - DNA, 75 bp, synthetic construct
  source 1..75: mol_type = other DNA
cacggttcactgtgtgagttccggctgaatttgtggggagcggagtttgcggcgttcttacagtgtaagcagtag

SEQ ID NO: 188796 - DNA, 75 bp, synthetic construct
  source 1..75: mol_type = other DNA
cctacatggcaccttttgatgttttcgatactcaggataagccgattacgatttgttgtggtaatgacaagcttt

SEQ ID NO: 188797 - DNA, 75 bp, synthetic construct
  source 1..75: mol_type = other DNA
gtagccaggtgctggcaaaacgtatgccgggtgacctctctgaatactccgtcatccagaccaaagaaccgctgg

SEQ ID NO: 188798 - DNA, 75 bp, synthetic construct
  source 1..75: mol_type = other DNA
aggaatgagtctggtaggcgatatgtttattatgatctgctggattattccttttttattttgttcccttgagct

SEQ ID NO: 188799 - DNA, 75 bp, synthetic construct
  source 1..75: mol_type = other DNA
caccatctggatgttacacggttcgctgtgtgagttccggctgaatttgtggggagcggagtttgcggcgttctt

SEQ ID NO: 188800 - DNA, 75 bp, synthetic construct
  source 1..75: mol_type = other DNA
tcacaatttgtatgacggttatcttcaccatctggatgttacacggctcgttgtgtgagttccggctgaatttgt

SEQ ID NO: 188801 - DNA, 75 bp, synthetic construct
  source 1..75: mol_type = other DNA
ggttttttctgtattcatcgcctgtttattgtcgattcgatttcgtttcacaatattgataagcaggttgcgcaa

SEQ ID NO: 188802 - DNA, 75 bp, synthetic construct
  source 1..75: mol_type = other DNA
ttatgtccttagcgcccaaatctggcctctgctggcaaaaacacctccgggagctggtgatgaaattcagctcac

SEQ ID NO: 188803 - DNA, 75 bp, synthetic construct
  source 1..75: mol_type = other DNA
tttgaactggaagcaatgctggaaaaacgtgtaaaacgtcaactgcttgatgaagtgcagtctatttgtccgccg

SEQ ID NO: 188804 - DNA, 75 bp, synthetic construct
  source 1..75: mol_type = other DNA
acagctacgactgcggcaaaaaaatgggctatatgcaggcgtttgtgaagtatggcctacgcaacctgaaagaag

SEQ ID NO: 188805 - DNA, 75 bp, synthetic construct
  source 1..75: mol_type = other DNA
gtagtcaggtgctggcaaaacgtatgccgggtgacctctctgaatactccgtcattcagaccaaagagccgctgg

SEQ ID NO: 188806 - DNA, 75 bp, synthetic construct
  source 1..75: mol_type = other DNA
aatgctaaaagcggcgagagcggaaggctttttctgtattcatcgcttgtttattgtcgactcgatttcttttca

SEQ ID NO: 188807 - DNA, 75 bp, synthetic construct
  source 1..75: mol_type = other DNA
gatattgcccggatgatccttacctctactgagtttatggctaatgcgccggaaggcgattttgatcgctcattc

SEQ ID NO: 188808 - DNA, 75 bp, synthetic construct
  source 1..75: mol_type = other DNA
tggtgaagttgggccaaacaagaacgttccggggctgattagaggcgcagagatatgcgtaagtattgctgaaca

SEQ ID NO: 188809 - DNA, 75 bp, synthetic construct
  source 1..75: mol_type = other DNA
gtaacgcgatgattgattttgtcgatggtgaagttgggccaaacaagaacgttccggggctgattagaggcgcag

SEQ ID NO: 188810 - DNA, 75 bp, synthetic construct
  source 1..75: mol_type = other DNA
tttggaggccatgaaggcaacaggaaatatgccagccaccgacgctttcctggctgaagtccgggcgcatggcgt

SEQ ID NO: 188811 - DNA, 75 bp, synthetic construct
  source 1..75: mol_type = other DNA
gcgctggcagcggagaatgcggggctaaaggcgatatgtgatgaccgtcgcagattcatcatgaatggggtgcag

SEQ ID NO: 188812 - DNA, 75 bp, synthetic construct
  source 1..75: mol_type = other DNA
cgatgttgttggcgacaacaccgaggttatctgcgaggaggtagggagagatggcgttctggttattttggaggc

SEQ ID NO: 188813 - DNA, 75 bp, synthetic construct
  source 1..75: mol_type = other DNA
gcgctggcagcggagagtgcggggctgaagtctgcgcaccctcaaccattcggacatgagatgatgaaggctctt

SEQ ID NO: 188814 - DNA, 75 bp, synthetic construct
  source 1..75: mol_type = other DNA
gggctatatgcaggcgtttgtgaagtatggactgcgcaacctgaaagaaggggcgaagttccgtaaagggattga

SEQ ID NO: 188815 - DNA, 75 bp, synthetic construct
  source 1..75: mol_type = other DNA
gaacgcactcagccaggtgcatggggacgtattcagctgactgatgccattgctgaactggcgaaaaaacagtcc

SEQ ID NO: 188816 - DNA, 75 bp, synthetic construct
  source 1..75: mol_type = other DNA
atggcgttctggttattttggaggcaatgaaggcaacaggaaatatgccagccaccgatgctttcctgtctgaag

SEQ ID NO: 188817 - DNA, 75 bp, synthetic construct
  source 1..75: mol_type = other DNA
gcgctggcggcggagaatgcgcggtgcctttttgagatatcccgctgccaccagacagttgatgaaatgtttcac

SEQ ID NO: 188818 - DNA, 75 bp, synthetic construct
  source 1..75: mol_type = other DNA
gaaccgcacccgattgatggcctgtccggtgaatatgcagagaaatcccttgaagaatgggcggaacggcttcgc

SEQ ID NO: 188819 - DNA, 75 bp, synthetic construct
  source 1..75: mol_type = other DNA
ggtggcactctgctttccaatatggtcaaagaggttgcggctgattttgccgcgaaacttcgcagaggaggcaac

SEQ ID NO: 188820 - DNA, 75 bp, synthetic construct
  source 1..75: mol_type = other DNA
acgcgtcggtgtccgggctggacgatggcgactgcgttacggtgaaagaagcgacggacgccctgctgcattgtg

SEQ ID NO: 188821 - DNA, 75 bp, synthetic construct
  source 1..75: mol_type = other DNA
cctgccaatttgtgacagctggcgcattccttatgccgattcgttatccagccttgccgccagttgcgatgcggt

SEQ ID NO: 188822 - DNA, 75 bp, synthetic construct
  source 1..75: mol_type = other DNA
gtgaaaaaaatacgtatcggcgtggtgggattaggcggtatcgcacaaaaagcgtggttgccggtgctggcggct

SEQ ID NO: 188823 - DNA, 75 bp, synthetic construct
  source 1..75: mol_type = other DNA
gggagcttactttgtggcgaacagaatgctggctgcctgggaagctggttttattgatgatactgcaaagaacgc

SEQ ID NO: 188824 - DNA, 75 bp, synthetic construct
  source 1..75: mol_type = other DNA
tgcgtgaggcagcagtagcaattgaaacagtagcaacacctcaaaaattgctggcatttcgtatgaaagtcacac

SEQ ID NO: 188825 - DNA, 75 bp, synthetic construct
  source 1..75: mol_type = other DNA
cgacacatgacgatatggaaatcgacgtcgcgctggcagcacgcccctcttatatcgcgctgggacatgtgttcc

SEQ ID NO: 188826 - DNA, 75 bp, synthetic construct
  source 1..75: mol_type = other DNA
tcgttttgctgacacactccacgccattgagcgtgagttctttaccaaagagctacctgatgaagagcacgaagg

SEQ ID NO: 188827 - DNA, 75 bp, synthetic construct
  source 1..75: mol_type = other DNA
tgatcagcgatttggcaacgcaactggaagtgcaactggcgcgtgctaatgcactggccgaagaccagcagaaag

SEQ ID NO: 188828 - DNA, 75 bp, synthetic construct
  source 1..75: mol_type = other DNA
agaacgttccggggctgattagaggcgcagagatatgcgtaagtattgctgaacagcttcgcaaaggaggcaacc

SEQ ID NO: 188829 - DNA, 75 bp, synthetic construct
  source 1..75: mol_type = other DNA
cgctttcttggcggaagtgcgggcgcagggggtggatatggctcgtaacgcgatgattgattttgttgatggtga

SEQ ID NO: 188830 - DNA, 75 bp, synthetic construct
  source 1..75: mol_type = other DNA
gatggtgaaacgctggaacaatttcgcgtgattgctttcaacgtcaatcaggatatcagcagcagtatgcagacg

SEQ ID NO: 188831 - DNA, 75 bp, synthetic construct
  source 1..75: mol_type = other DNA
gacgatggacaacatgcctatcgaatcacgtctctattccgacggattattcagcttctcggtaaacgttaaccg

SEQ ID NO: 188832 - DNA, 75 bp, synthetic construct
  source 1..75: mol_type = other DNA
atccgaaccgttccgcgaacatcgcgctggttttgtacaaagacggtgaacgccgttacatcctggcccctaaag

SEQ ID NO: 188833 - DNA, 75 bp, synthetic construct
  source 1..75: mol_type = other DNA
tgatggtgcttatgtcaccctgcgtctgcgttcttgtgaaatgcgtaaagtagaagcagactgccgtgcaactct

SEQ ID NO: 188834 - DNA, 75 bp, synthetic construct
  source 1..75: mol_type = other DNA
gtacttacgttcagatcgttgctcgtgatggtgcttatgtcaccctgcgtctgcgttcttgtgaaatgcgtaaag

SEQ ID NO: 188835 - DNA, 75 bp, synthetic construct
  source 1..75: mol_type = other DNA
ggctgacgcgcgatgtaaaacgcggtgattatctctggctttcggacgcgatgggggaatttacctgcgacgata

SEQ ID NO: 188836 - DNA, 75 bp, synthetic construct
  source 1..75: mol_type = other DNA
acgatttccctgatttgccacgattactacccatatcgcgccgggcaatatgcactggtcagcgtgcgaaactca

SEQ ID NO: 188837 - DNA, 75 bp, synthetic construct
  source 1..75: mol_type = other DNA
gcacccggtaactccgtggggcgttcagaccaaaggtaagaagacccgcagcaacaagcgtactgataaattcat

SEQ ID NO: 188838 - DNA, 75 bp, synthetic construct
  source 1..75: mol_type = other DNA
ggagtctcatatctacgctggctacaccgtgccgccgtactatgactcaatgatcggtaaactgatttgctacgg

SEQ ID NO: 188839 - DNA, 75 bp, synthetic construct
  source 1..75: mol_type = other DNA
cagcgccgctgaaatcaccggcgcagtagcaatccatccgggttacggcttcctttccgaaaacgccaattttgc

SEQ ID NO: 188840 - DNA, 75 bp, synthetic construct
  source 1..75: mol_type = other DNA
agtcactctattacagttttattaatcatggcaaagagagtgtggttcttgatttaaagaatgatcacgataaaa

SEQ ID NO: 188841 - DNA, 75 bp, synthetic construct
  source 1..75: mol_type = other DNA
gtagagatgttctcagaaaaattcggaggtggcactccgctttccaatatggtcaaagaggttgcggctgatttt

SEQ ID NO: 188842 - DNA, 75 bp, synthetic construct
  source 1..75: mol_type = other DNA
gaatttgtggcacgcttcccgaataagatcatcaatattcaccattcattcctgccagcgtttatcggcgcacgt

SEQ ID NO: 188843 - DNA, 75 bp, synthetic construct
  source 1..75: mol_type = other DNA
cttgatttaaagaatgaccacgataaaagtatatttataaatatgcttaaacaagctgatgtattagccgagaat

SEQ ID NO: 188844 - DNA, 75 bp, synthetic construct
  source 1..75: mol_type = other DNA
atatacggtgagcagcacaatgacgctgaccgacgccgaaatcgctgaaggttacgtactggcctgctcctgcca

SEQ ID NO: 188845 - DNA, 75 bp, synthetic construct
  source 1..75: mol_type = other DNA
tgttgaatttattgaaaaaccggatcagccgcagacgctggactcagacataatggctgttggtcgttatgtgct

SEQ ID NO: 188846 - DNA, 75 bp, synthetic construct
  source 1..75: mol_type = other DNA
gggctatatgcaggcgtttgtgaagtatggcttacgcaacctgaaagaaggggcgaagttccgtaaaggtattga

SEQ ID NO: 188847 - DNA, 75 bp, synthetic construct
  source 1..75: mol_type = other DNA
attgcgcgattcaacgaaacgggtcgtagccaggttctggcaaaacgtatgccgggtgacctttctgaatactcc

SEQ ID NO: 188848 - DNA, 75 bp, synthetic construct
  source 1..75: mol_type = other DNA
ctgcccgccgggcgtgaccattatgaacgtgcgtcagggcgaacctttaggtttaggccactccattttatgtgc

SEQ ID NO: 188849 - DNA, 75 bp, synthetic construct
  source 1..75: mol_type = other DNA
gggctatatgcaggcgtttgtgaagtatggactacgcaacttgaaagaaggggcgaagttccgcaaaggtatcga

SEQ ID NO: 188850 - DNA, 75 bp, synthetic construct
  source 1..75: mol_type = other DNA
atgacgaatttaaaagcagttataccggtagcaggtcttgggatgcatatgttgcctgccactaaggcgattccc

SEQ ID NO: 188851 - DNA, 75 bp, synthetic construct
  source 1..75: mol_type = other DNA
aaagtctctgcaatcagacaccccggccaccgacgcattccttgctgaaattgaacgcaaagcaatccgcaagtt

SEQ ID NO: 188852 - DNA, 75 bp, synthetic construct
  source 1..75: mol_type = other DNA
gaagtgaaagcgctcggcgtgacgcgtttctttaaagagaaattcttcaccccagtagcggaagcggcgaccagc

SEQ ID NO: 188853 - DNA, 75 bp, synthetic construct
  source 1..75: mol_type = other DNA
gagcagcacaatgacgctgaccaacgccgaaatcgctgaaggttacgtgctggcctgctcctgccatccgcaggg

SEQ ID NO: 188854 - DNA, 75 bp, synthetic construct
  source 1..75: mol_type = other DNA
tcctggctgaaattgaacgcaaagcaatccgcaagttcattaacagcattgaacacatcctgcgtgacaagttgt

SEQ ID NO: 188855 - DNA, 75 bp, synthetic construct
  source 1..75: mol_type = other DNA
acgcaacgaggggattaactataccgcaagccgtcttgctgctgctttcaatcacggatttatcaataagtcttt

SEQ ID NO: 188856 - DNA, 75 bp, synthetic construct
  source 1..75: mol_type = other DNA
taaatgacaaaatgaatagactcttggtctggcctggcatcgagttctattcgtcagcatgggagttctgcaatc

SEQ ID NO: 188857 - DNA, 75 bp, synthetic construct
  source 1..75: mol_type = other DNA
ttagtacagcataaatatatctcaggaattatagcaggagtctgttatctttgccgaaaatattaccgtaaataa

SEQ ID NO: 188858 - DNA, 75 bp, synthetic construct
  source 1..75: mol_type = other DNA
tttatttagacttaaaaaaatgggctgacgcaaaactaacagaaaaagcgttgtctattcttatgagtaaagata

SEQ ID NO: 188859 - DNA, 75 bp, synthetic construct
  source 1..75: mol_type = other DNA
aggtgtttctatcacatcaattgttctaaataatcgacatattaatcttgatttttatattattgctgatatcta

SEQ ID NO: 188860 - DNA, 75 bp, synthetic construct
  source 1..75: mol_type = other DNA
ttactgaaaaccgctgttcccaaactggaaatatttaaaaatggtcatgcacagggacaaccggtgcatcgtctg

SEQ ID NO: 188861 - DNA, 75 bp, synthetic construct
  source 1..75: mol_type = other DNA
tgccggcaatacgtattcttgctaattgtgttgaagatacggtgttagatcgtgcaacactgactgaattaactc

SEQ ID NO: 188862 - DNA, 75 bp, synthetic construct
  source 1..75: mol_type = other DNA
atgaacattctgcccgttgtgtccaccaaaggtggcgaaggaaaatcaacccagtctgctaatcttgccggtttt

SEQ ID NO: 188863 - DNA, 75 bp, synthetic construct
  source 1..75: mol_type = other DNA
ctttttactaaggaaggaagcagggaacccgttggtcggacatcattgcagtcgctgccttacaatttaatgcag

SEQ ID NO: 188864 - DNA, 75 bp, synthetic construct
  source 1..75: mol_type = other DNA
gacaagagcgattatctagaagaacagcgtaaagcctaccaggtatggtgggagagggttgaatcgctcgttact

SEQ ID NO: 188865 - DNA, 75 bp, synthetic construct
  source 1..75: mol_type = other DNA
gctttggtttgaacttaaaaaagggcaaggactcgcagaaggcacactacgcgatacatggcgctcgctggagcg

SEQ ID NO: 188866 - DNA, 75 bp, synthetic construct
  source 1..75: mol_type = other DNA
atgacaatatttttgcctcgtgagtacaatacaatttatacaattaaaagtgaattaaaagataaaacacatcaa

SEQ ID NO: 188867 - DNA, 75 bp, synthetic construct
  source 1..75: mol_type = other DNA
accgtaatgaaaggcaacgtaaaaaaagttcgccgcctgtataacgataaagtgatcgcaggctttgccggcggc

SEQ ID NO: 188868 - DNA, 75 bp, synthetic construct
  source 1..75: mol_type = other DNA
caaagctactgaagccatgacggtggagtctgtgatccgtgcctggtatgcagcatattgtgtaaaaaataaaaa

SEQ ID NO: 188869 - DNA, 75 bp, synthetic construct
  source 1..75: mol_type = other DNA
attctgcgctggtcaccatgcacagcctggcctgtgagttgttgcctgagtggagtgagttttttgatgtattgc

SEQ ID NO: 188870 - DNA, 75 bp, synthetic construct
  source 1..75: mol_type = other DNA
ggtcagtcagtgacactgaaaattaacggtcagacagtcatcagcggctggctggatcaggtgaatcagagtatc

SEQ ID NO: 188871 - DNA, 75 bp, synthetic construct
  source 1..75: mol_type = other DNA
tcaaagctgggatgcgggtcttcgctacgctggcgaaacactgcaatctcaacttgtttccagttatagccatag

SEQ ID NO: 188872 - DNA, 75 bp, synthetic construct
  source 1..75: mol_type = other DNA
cttgaacataacttctctgatacgtggagcggatttgttcgtggctacggctatgataaccgaactaaatatgac

SEQ ID NO: 188873 - DNA, 75 bp, synthetic construct
  source 1..75: mol_type = other DNA
cagccaacccaaatttgaagccagaagaatctaaacagtgggagattggaattgagggggtaactgggactctgg

SEQ ID NO: 188874 - DNA, 75 bp, synthetic construct
  source 1..75: mol_type = other DNA
ggtgtgagcttgtgggatcttgcggttgcgtatccggtcacctctcatctaacagttcgtggtaaaatagccaac

SEQ ID NO: 188875 - DNA, 75 bp, synthetic construct
  source 1..75: mol_type = other DNA
cagagaaaccgttcgcatctttcacgcttgagaactcagaaacagtggcggatgcactcacacgagccgcacggc

SEQ ID NO: 188876 - DNA, 75 bp, synthetic construct
  source 1..75: mol_type = other DNA
ttatcgctgcgctggtgcacgatcctcgactccgtgccgctttagccgactctcaccatcgaccggtcatctatg

SEQ ID NO: 188877 - DNA, 75 bp, synthetic construct
  source 1..75: mol_type = other DNA
ttatgagaagcatattaagcgcacattagcggagcataaaggcgatctgcttatcgctgcgctggtgcacgatcc

SEQ ID NO: 188878 - DNA, 75 bp, synthetic construct
  source 1..75: mol_type = other DNA
aattacggtatccgccttcctgatatttccattctcgtcaactgtatcgaaaacaccctgcttgaccgtgaagcg

SEQ ID NO: 188879 - DNA, 75 bp, synthetic construct
  source 1..75: mol_type = other DNA
actcctcacctgatagttcgcggtaaaatagctaatctgttcaacaaagattatgagactggttatggctatcag

SEQ ID NO: 188880 - DNA, 75 bp, synthetic construct
  source 1..75: mol_type = other DNA
gtggatcacttttcatccgtcgttgacagcgaacgtgactcgcagtttttctccgttatcacagcggaactcgaa

SEQ ID NO: 188881 - DNA, 75 bp, synthetic construct
  source 1..75: mol_type = other DNA
tctgcctgtctgcgaagcagcgcccatacccgacgataaccatacgtgggcagctctccgataacatggtgtata

SEQ ID NO: 188882 - DNA, 75 bp, synthetic construct
  source 1..75: mol_type = other DNA
gaagagtggaacgatattatcgaaaccaacctttcatctgttttccgtctgtcaaaagtggtaatgcgcgctatg

SEQ ID NO: 188883 - DNA, 75 bp, synthetic construct
  source 1..75: mol_type = other DNA
tacgctgcggcgaaagcgggcttgatcggcttcagtaaatccctggcgcgcgaagttgcgtcacgtggtattact

SEQ ID NO: 188884 - DNA, 75 bp, synthetic construct
  source 1..75: mol_type = other DNA
catttaaaaaactcaatggcctggtgtctgaattttccatgggtggggtatctaccaccaataatatggaattgt

SEQ ID NO: 188885 - DNA, 75 bp, synthetic construct
  source 1..75: mol_type = other DNA
gacgattctgttgatcacccacgaaatggacgttgtgaagcgcatttgtgattgcgtggcggtcatcagcaatgg

SEQ ID NO: 188886 - DNA, 75 bp, synthetic construct
  source 1..75: mol_type = other DNA
gatgttgcgtctggagtttaccggtcaatcggtcgatgccccactgctttctgaaaccgcgcgtcgtttcaacgt

SEQ ID NO: 188887 - DNA, 75 bp, synthetic construct
  source 1..75: mol_type = other DNA
atgataaaactttcgaatatcaccaaagtgttccaccagggcacccgcaccatccaggcgttgaacaacgtcagc

SEQ ID NO: 188888 - DNA, 75 bp, synthetic construct
  source 1..75: mol_type = other DNA
tctgacggtggtggaactgcgtcagggaaccaccgtgcgtcacggtatcgagctgtatcgccactgccagcggca

SEQ ID NO: 188889 - DNA, 75 bp, synthetic construct
  source 1..75: mol_type = other DNA
aggccaaggtttatcccccgcatgatgcaaataaatacattcaaatgctaaggaagcaggcagaaattgctatgc

SEQ ID NO: 188890 - DNA, 75 bp, synthetic construct
  source 1..75: mol_type = other DNA
acaaatagcaagattgaatttgcaatcgttacttagtgattctgttaaaaaacagcttgcgaacatgacgagctt

SEQ ID NO: 188891 - DNA, 75 bp, synthetic construct
  source 1..75: mol_type = other DNA
ctggaaaatctgaatggtgttcataacttacgctttgtcagtgagccagataacggcatctacgacgctatgaac

SEQ ID NO: 188892 - DNA, 75 bp, synthetic construct
  source 1..75: mol_type = other DNA
ttgagcgagtcaccggctggctgtttttatcggtcattcccgtgggtttgcctgccgcactacaaattgccgccg

SEQ ID NO: 188893 - DNA, 75 bp, synthetic construct
  source 1..75: mol_type = other DNA
acatttatatacagagcttcgcccgcctggtctggtcgcaggcgcaacataatcctgaccactacctggcacgcc

SEQ ID NO: 188894 - DNA, 75 bp, synthetic construct
  source 1..75: mol_type = other DNA
aatcaatcctgaccaccggcccggttgtaccggttatcgtggtaaaaaaactggaacacgcagtgccgatggcaa

SEQ ID NO: 188895 - DNA, 75 bp, synthetic construct
  source 1..75: mol_type = other DNA
aggccgcactcgcacacgtggacacgaacgaggtaaggcgggcatataacagaagtaactacctggaaaaacgca

SEQ ID NO: 188896 - DNA, 75 bp, synthetic construct
  source 1..75: mol_type = other DNA
cgaagacaagggaacacgttcgaaaatgtggcggcggcatggtaccaggtgaaaatcagccagaatctggccccc

SEQ ID NO: 188897 - DNA, 75 bp, synthetic construct
  source 1..75: mol_type = other DNA
gttgaagcatcgtcggcacgctgggaagaaatcgacatagaggcgcaacgctggaccataccagccggacgcatg

SEQ ID NO: 188898 - DNA, 75 bp, synthetic construct
  source 1..75: mol_type = other DNA
gtgttaatgtgctggtggggtgattttgtggaagcagccgcaaccggaacaaccatcgccagcgggcacagagga

SEQ ID NO: 188899 - DNA, 75 bp, synthetic construct
  source 1..75: mol_type = other DNA
ttgaagccatgaagccgattagcgcacgaagggagcatgttttcccaagtcttaaaaatccagtgcaaccaatga

SEQ ID NO: 188900 - DNA, 75 bp, synthetic construct
  source 1..75: mol_type = other DNA
ccggggcacagtggagcgagatagatgcagatgccagagtgtggcgtatatcagccgggcgactaaaacaacgaa

SEQ ID NO: 188901 - DNA, 75 bp, synthetic construct
  source 1..75: mol_type = other DNA
cggttgtatcgccttcgcaggcaaatgttgataccgccgcgaccccggtaccaacggcagcaacaacgccagatg

SEQ ID NO: 188902 - DNA, 75 bp, synthetic construct
  source 1..75: mol_type = other DNA
ccaaattcaccgaagtaggctatgtcggtaaggaagtggattctattatccgcgatctgactgacgccgcagtga

SEQ ID NO: 188903 - DNA, 75 bp, synthetic construct
  source 1..75: mol_type = other DNA
acaaaatctgtaagcgcggcgagtcttccggtccggatgtttctcgtgaaggcgttcagcgtgacctgctgccgc

SEQ ID NO: 188904 - DNA, 75 bp, synthetic construct
  source 1..75: mol_type = other DNA
gtatatgttaaggctgttaagattgatccgtctcttaaacaagagcaacgcaactggaataaaactgttcgtgat

SEQ ID NO: 188905 - DNA, 75 bp, synthetic construct
  source 1..75: mol_type = other DNA
ccgaaagtagttaagataaccacaattgacggactgagtgtagaagatcgtgatatagtgaaagaaaacacaaaa

SEQ ID NO: 188906 - DNA, 75 bp, synthetic construct
  source 1..75: mol_type = other DNA
gacaagaacgattatctagatgaacagcgtaaagcttacttggcatggtggaatagggttaaatcgatagttact

SEQ ID NO: 188907 - DNA, 75 bp, synthetic construct
  source 1..75: mol_type = other DNA
taacgcggaaccgactgaagattccagcgattatcacgtcactacttctcaacatgctcgccaggccgaagacga

SEQ ID NO: 188908 - DNA, 75 bp, synthetic construct
  source 1..75: mol_type = other DNA
gtggaagcgatctccgattccttgctgaaactgtctactgacgaagttaaagtgaagattatcggttctggcgta

SEQ ID NO: 188909 - DNA, 75 bp, synthetic construct
  source 1..75: mol_type = other DNA
attggtacagagctgggaatggaccaggatgaggtgctaagactgaaacagattagcgggctgacggagctgttt

SEQ ID NO: 188910 - DNA, 75 bp, synthetic construct
  source 1..75: mol_type = other DNA
aagcgatcgtgaagtcgaaggcggccgtggccgtggtcgtaacgcgaaagcagcgcgtccgaagaaaggcaacaa

SEQ ID NO: 188911 - DNA, 75 bp, synthetic construct
  source 1..75: mol_type = other DNA
ggtggtggttgcagtgaacaagatcgataaaccagaagccgatccggatcgcgttaagaacgaactctcccagta

SEQ ID NO: 188912 - DNA, 75 bp, synthetic construct
  source 1..75: mol_type = other DNA
tgttaagaacgaactctcccagtatggcatcctgccggaagagtggggcggtgaaagccagttcgtacacgtatc

SEQ ID NO: 188913 - DNA, 75 bp, synthetic construct
  source 1..75: mol_type = other DNA
tggtcgatacccgtaaactctatagccaaagttgggacgccgggctgcgctataacggcgaactgattaaatcac

SEQ ID NO: 188914 - DNA, 75 bp, synthetic construct
  source 1..75: mol_type = other DNA
tataacggcgaactgattaaatcacaactgattaccagctacagccatagcaaagattacaactacgatccgcat

SEQ ID NO: 188915 - DNA, 75 bp, synthetic construct
  source 1..75: mol_type = other DNA
gggtgaactggcgtatttccggatatcgtaacgatgtcagtgacttgatcgattatgatgatcacaccctgaaat

SEQ ID NO: 188916 - DNA, 75 bp, synthetic construct
  source 1..75: mol_type = other DNA
tggatcaggatgaagtactgagacttaaacaaattagcgggctaactgagttatttcaggaagtggatttcagcc

SEQ ID NO: 188917 - DNA, 75 bp, synthetic construct
  source 1..75: mol_type = other DNA
tgcgcagagtgcttcatgaagtcagtccttttgcacatgagccagtggactgtgtgctgtgggtaaaagcagatg

SEQ ID NO: 188918 - DNA, 75 bp, synthetic construct
  source 1..75: mol_type = other DNA
tataacggtgaactgattaaatcacaactcattaccagctatagccatagcaaagattacaactacgatccccat

SEQ ID NO: 188919 - DNA, 75 bp, synthetic construct
  source 1..75: mol_type = other DNA
acgttgtgatcggcgaaactatcaccgttggcgaactggcgaacaagatggcgattaaaggctctcaggtcatca

SEQ ID NO: 188920 - DNA, 75 bp, synthetic construct
  source 1..75: mol_type = other DNA
tactgggtgaaatgattcgccggtatttcagtcaggcactaactgaagaagaaaccatacaggccctgaattatc

SEQ ID NO: 188921 - DNA, 75 bp, synthetic construct
  source 1..75: mol_type = other DNA
cagcaatctacatctggattatcgggtcagcacgactgtgcgcaacgtgatcctttccggttattttgattctat

SEQ ID NO: 188922 - DNA, 75 bp, synthetic construct
  source 1..75: mol_type = other DNA
gaaagggacaggcatcgcgtattgctgcgaccattcgacataaccgggccaggggaaaacaccagataacctcaa

SEQ ID NO: 188923 - DNA, 75 bp, synthetic construct
  source 1..75: mol_type = other DNA
cgtgtaaacctgctcgatgattgccagtacaggataaaactaacctcgcctcagtataaaaattactctatacat

SEQ ID NO: 188924 - DNA, 75 bp, synthetic construct
  source 1..75: mol_type = other DNA
ttgaactggtagcggaaagccagggtgaattgctggacaagatggaaaaactgagcgcagggcagcttaagaaca

SEQ ID NO: 188925 - DNA, 75 bp, synthetic construct
  source 1..75: mol_type = other DNA
tattaacggatatgattcgccaatatttcggtcagtacagaccagaagatgagacagttaatgctttaaatcatc

SEQ ID NO: 188926 - DNA, 75 bp, synthetic construct
  source 1..75: mol_type = other DNA
tcagtgctatgggggctaatgcccactcgccgtttttctataaccgcgtcaaaggggagatggaagaagcgttaa

SEQ ID NO: 188927 - DNA, 75 bp, synthetic construct
  source 1..75: mol_type = other DNA
atgccgcagaccattgaagcaatccagcacgcgaaagcggcgggtgtgccggttgtggttgctgtgaacaaaatc

SEQ ID NO: 188928 - DNA, 75 bp, synthetic construct
  source 1..75: mol_type = other DNA
ccagcacattggtgcataccacgttgaaactgaaaacggcatgatcaccttcctggacaccccggggcacgccgc

SEQ ID NO: 188929 - DNA, 75 bp, synthetic construct
  source 1..75: mol_type = other DNA
tgtgtactgtgggtgaaagcggatgaggtggtggccaacgattacaatcccaatgtcatggcaccgggtgagaaa

SEQ ID NO: 188930 - DNA, 75 bp, synthetic construct
  source 1..75: mol_type = other DNA
catcgctcgcccgtcgatgttgctgggcgatcgtaacaaacagcggatgaacgaaaccctttttgcgccactgtt

SEQ ID NO: 188931 - DNA, 75 bp, synthetic construct
  source 1..75: mol_type = other DNA
ttgttgtctcggcaccacgcggcgggaagcggggagcaaagaagcgtttattcatgccgattacacgctggttgt

SEQ ID NO: 188932 - DNA, 75 bp, synthetic construct
  source 1..75: mol_type = other DNA
gagtataaggatttcaaagcggcgcagagtgattgctgtatgtaccctggttcagacctggtagggaaggttgaa

SEQ ID NO: 188933 - DNA, 75 bp, synthetic construct
  source 1..75: mol_type = other DNA
tgtgtgctgtgggtgaaagcggatgatatagtggccaacgattataaccccaatgtcatggcgccgggcgagaag

SEQ ID NO: 188934 - DNA, 75 bp, synthetic construct
  source 1..75: mol_type = other DNA
tactgagcgacatgattcgtcggtattttagtcaggtgcaaactgaagaagagaccatacaagccctgaatcact

SEQ ID NO: 188935 - DNA, 75 bp, synthetic construct
  source 1..75: mol_type = other DNA
aggatgaagtgctgagactgaaacaaattagcgggctgacagaattgtttcaggaagaggatttcagcccggcat

SEQ ID NO: 188936 - DNA, 75 bp, synthetic construct
  source 1..75: mol_type = other DNA
tgtgtcagaggagaagaaccattatctggtggtggatggttttcatcgtcagttactgggcagggaagcaggtac

SEQ ID NO: 188937 - DNA, 75 bp, synthetic construct
  source 1..75: mol_type = other DNA
gatgaacctttacaagggcttgacccgctgaatcgccagcttatccgccgttttgtggatatactgattagcgaa

SEQ ID NO: 188938 - DNA, 75 bp, synthetic construct
  source 1..75: mol_type = other DNA
ggtcagtccttttgcacaggagcctgtggactgtgtgttgtgggtgaaagcggatgaggtggtggccaacgatta

SEQ ID NO: 188939 - DNA, 75 bp, synthetic construct
  source 1..75: mol_type = other DNA
ggtggttccggtgacgatgttgatgcctttattcgccagcagatgaaaaaacaggggatcagctttgatgaatga

SEQ ID NO: 188940 - DNA, 75 bp, synthetic construct
  source 1..75: mol_type = other DNA
ggagtttttacttgatgagcataacggggaagtcacccggctggtactggcaccgcgtgacggctttatcgttcc

SEQ ID NO: 188941 - DNA, 75 bp, synthetic construct
  source 1..75: mol_type = other DNA
ttagcgggaaagctgtctacaccaatggaagatgttatgtgggatataatgaggatggctatcattttatccttt

SEQ ID NO: 188942 - DNA, 75 bp, synthetic construct
  source 1..75: mol_type = other DNA
tactgagcaacatgattcgtcagtactttagccaggaacgaccagaagaagaggccatacaggccctgaatcatc

SEQ ID NO: 188943 - DNA, 75 bp, synthetic construct
  source 1..75: mol_type = other DNA
aaggcttgcattagctactcaaggtgcagcccaagcaaatattgtagaactaggagcacaagtttgtcttgctgg

SEQ ID NO: 188944 - DNA, 75 bp, synthetic construct
  source 1..75: mol_type = other DNA
tacagcgcgtttcatcgttctccgctggagcaaatgctgaaagagagtggacgtaaccagctgattattaccggg

SEQ ID NO: 188945 - DNA, 75 bp, synthetic construct
  source 1..75: mol_type = other DNA
cttcaatgtctgaaattgtcagggacctgtcacggctgggctggacagatgagcgaattggaacagaggctgggc

SEQ ID NO: 188946 - DNA, 75 bp, synthetic construct
  source 1..75: mol_type = other DNA
cttcaatgtctgaaattgtcagggacctgtcacgcctgggctggacagatgaccgaattggaacagaggctgggc

SEQ ID NO: 188947 - DNA, 75 bp, synthetic construct
  source 1..75: mol_type = other DNA
cttcaatgtctgaaattgtcagggacctgtcacgactgggctggacagatgaacgaattggaacagaggctgggc

SEQ ID NO: 188948 - DNA, 75 bp, synthetic construct
  source 1..75: mol_type = other DNA
aataggtggggtcgtgaatatcatcacgacgcgcgatcaacccggaacggaaatttcagcagggtggggaagcaa

SEQ ID NO: 188949 - DNA, 75 bp, synthetic construct
  source 1..75: mol_type = other DNA
atggtacgtcgtacaaggcacctaatcttgggcaactctacggcttctacggtaatccggatctgaaccctgaga

SEQ ID NO: 188950 - DNA, 75 bp, synthetic construct
  source 1..75: mol_type = other DNA
aaagcaaacagtgggaaggcgcgtttgaaggcttaactgctggggttaactggcgtatttccggatatcgtaacg

SEQ ID NO: 188951 - DNA, 75 bp, synthetic construct
  source 1..75: mol_type = other DNA
cgggccagggggaaacaccagataacgtcaatgtctgaaattgtcagggacctttcccgactgggctggacagat

SEQ ID NO: 188952 - DNA, 75 bp, synthetic construct
  source 1..75: mol_type = other DNA
cgcgccagggggaaacaccagataacgtcaatgtctgaaattgtcagggacctttcccggctgggctggacggat

SEQ ID NO: 188953 - DNA, 75 bp, synthetic construct
  source 1..75: mol_type = other DNA
atcgactttgtcatgctggcgaaaaacccgaccatcgacgcttggtggaagctactctcccgcgaggtgaaataa

SEQ ID NO: 188954 - DNA, 75 bp, synthetic construct
  source 1..75: mol_type = other DNA
cttcaatgtctgaaattgtcagggacctctcacgcctgggctggacagatgagcgaattggaacagaggctgggc

SEQ ID NO: 188955 - DNA, 75 bp, synthetic construct
  source 1..75: mol_type = other DNA
cttcaatgtctgaaattgtcagggacctttcacgactgggctggacagatgatcgaattggaacagaggctgggc

SEQ ID NO: 188956 - DNA, 75 bp, synthetic construct
  source 1..75: mol_type = other DNA
cttcaatgtctgaaattgtcagggacctatcacgactgggctggacagatgagcgaattggaacagaggctgggc

SEQ ID NO: 188957 - DNA, 75 bp, synthetic construct
  source 1..75: mol_type = other DNA
ttaaaaaacttgcacttggctcagtaagcgatctctataatagagattcaaatattacctggcgtgataatttaa

SEQ ID NO: 188958 - DNA, 75 bp, synthetic construct
  source 1..75: mol_type = other DNA
tgaacaagattttgctgctttaggcgtggaactcaaaacgattcctgtggatagtctgggacgtccgctggaaac

SEQ ID NO: 188959 - DNA, 75 bp, synthetic construct
  source 1..75: mol_type = other DNA
taataaggagcgggccgtggtacacaaatttaatcagtatcgctacatcaggttcctgaataagcgcgcaaaaaa

SEQ ID NO: 188960 - DNA, 75 bp, synthetic construct
  source 1..75: mol_type = other DNA
aactctttttcgattacttgcactgcattcagtctctggcaggtgccactggtacgccagaaccggcgctgcgcc

SEQ ID NO: 188961 - DNA, 75 bp, synthetic construct
  source 1..75: mol_type = other DNA
gcgattctggaaaaacagggtgctaaaaaactcggcgaagttgctgacgagaacctctcagacgtgatcgctcag

SEQ ID NO: 188962 - DNA, 75 bp, synthetic construct
  source 1..75: mol_type = other DNA
ccggctgataacagaccagccatcctgccggtcaccctctccgtcagtgacactgccaccctgaaacttcagtgc

SEQ ID NO: 188963 - DNA, 75 bp, synthetic construct
  source 1..75: mol_type = other DNA
cattcttgccagtatgatcgtgagctggctgaacaagcggaagtaacgtgtcatgcgggcgtcaggctgccgtct

SEQ ID NO: 188964 - DNA, 75 bp, synthetic construct
  source 1..75: mol_type = other DNA
agaaactgaaagcgcgtgccagtaagattcagggccaggtcgtggcgctcaagaaaatgctcgacgagccgcacg

SEQ ID NO: 188965 - DNA, 75 bp, synthetic construct
  source 1..75: mol_type = other DNA
aaaacggtacaggcgcaaatattgacgctattgaaatcattgcaacaaaagcatcaactggcctatttgtttatc

SEQ ID NO: 188966 - DNA, 75 bp, synthetic construct
  source 1..75: mol_type = other DNA
ttttccggggggcaacgacaacgcatagcgattgccagagcgttgattcttaagccttcactgatcattcttgat

SEQ ID NO: 188967 - DNA, 75 bp, synthetic construct
  source 1..75: mol_type = other DNA
acggaggaatcgggtcgcgtgcgtctggttgccaaaggcgcacgctctaaacgctctactctgaaaggtgcatta

SEQ ID NO: 188968 - DNA, 75 bp, synthetic construct
  source 1..75: mol_type = other DNA
cgtggttgattatcgcgacgccgaaggcgagaagcgcgttgtgcagatcgacgcgctggacagcgccctgcaggg

SEQ ID NO: 188969 - DNA, 75 bp, synthetic construct
  source 1..75: mol_type = other DNA
agctgatttaccgtccagcatcccttaagggtggacgtaaggatgcggaaaaacagctgaggctggagcagcgtg

SEQ ID NO: 188970 - DNA, 75 bp, synthetic construct
  source 1..75: mol_type = other DNA
tggctgctctcctttctctctctttctgcaaccagtctatggctgcatttgtgctgaatgggactcgcttcattt

SEQ ID NO: 188971 - DNA, 75 bp, synthetic construct
  source 1..75: mol_type = other DNA
ttttgccgatttaaacgcgcaggttgagcaactcagcaggcgttgttcaaaggcttttggctcacatggccgtta

SEQ ID NO: 188972 - DNA, 75 bp, synthetic construct
  source 1..75: mol_type = other DNA
cctggcagggtgaaaccaacttctggggcagtatcgccgtcagtatcgatcgtttggcagcgtacaaagatgttg

SEQ ID NO: 188973 - DNA, 75 bp, synthetic construct
  source 1..75: mol_type = other DNA
gggcagtaccgccgtcagtatcgatcgtctggcagcgtataaagacgttgatgtgctctgttttgatcacgacaa

SEQ ID NO: 188974 - DNA, 75 bp, synthetic construct
  source 1..75: mol_type = other DNA
gtctggtcggcaggatatggcccttcaccagaaatgctggcacgcattgcgccggggcgcggatttaacttcagc

SEQ ID NO: 188975 - DNA, 75 bp, synthetic construct
  source 1..75: mol_type = other DNA
gccaggaaacttggtgaagtaacggatgaaaatctcgctgaagtaatcaccctggctgaaaaagcactggagggt

SEQ ID NO: 188976 - DNA, 75 bp, synthetic construct
  source 1..75: mol_type = other DNA
acactatcagtaagttggagtcattaccagtgcgtggatagtaataatcaaattgaaacctgtttaagcagaaag

SEQ ID NO: 188977 - DNA, 75 bp, synthetic construct
  source 1..75: mol_type = other DNA
gtaacatcctgcgcttctgggacgatttacctaccatcgcggcacgccgtgaatttgccgagcgtttattggacg

SEQ ID NO: 188978 - DNA, 75 bp, synthetic construct
  source 1..75: mol_type = other DNA
atattctgaccggaagcgcaaagtcttttgctgatttaaacgcgcaggttgagcaactcagcaggcgttgttcag

SEQ ID NO: 188979 - DNA, 75 bp, synthetic construct
  source 1..75: mol_type = other DNA
atattctgaccggaagcgcaaaatcttttgctgatttaaacgcgcaggttgagcaactcagcaagcgttgttcag

SEQ ID NO: 188980 - DNA, 75 bp, synthetic construct
  source 1..75: mol_type = other DNA
tccggtctgtttgtgaaaacttaaagttacaaactaagccaaccttaagaattaaaaacaaacgtcaagttatca

SEQ ID NO: 188981 - DNA, 75 bp, synthetic construct
  source 1..75: mol_type = other DNA
atggccagacgcagcacaatagaaaagctgccggaagacgtgcgccgctggcttgaacgggcgctgactgaatcc

SEQ ID NO: 188982 - DNA, 75 bp, synthetic construct
  source 1..75: mol_type = other DNA
aactgcccgaagaggtcaggcgctggctggaacgggcgctgaccaacagtggcttcagcggttatgccgaactgg

SEQ ID NO: 188983 - DNA, 75 bp, synthetic construct
  source 1..75: mol_type = other DNA
aatgccaaatattacaaagtgagattggtaaaaatgcgtttatagttacaaccgaatatattgacgaaattctaa

SEQ ID NO: 188984 - DNA, 75 bp, synthetic construct
  source 1..75: mol_type = other DNA
tgcaggtatttactgtaaacggtcgggctgacagggtgcaggttcgtctggaatgcgacgatgcagctgtttttg

SEQ ID NO: 188985 - DNA, 75 bp, synthetic construct
  source 1..75: mol_type = other DNA
gcgtattactcgctcttgccgcttattttatttggggtattgcgccagcgtacttcaagctgatttactacgtgc

SEQ ID NO: 188986 - DNA, 75 bp, synthetic construct
  source 1..75: mol_type = other DNA
tgattctggcgatatgtggcgtgttagtccagctgtggacttttggttcgctacctattatcgcgctgggactgg

SEQ ID NO: 188987 - DNA, 75 bp, synthetic construct
  source 1..75: mol_type = other DNA
cattactcttgcccgtgagtgtggcggcagttatgcgacaaaagccgacagggttcgtattgcaaaatattttct

SEQ ID NO: 188988 - DNA, 75 bp, synthetic construct
  source 1..75: mol_type = other DNA
aaacttcgccagacgagcagtattaaaaccagacatatttctggttaccttctcagcaggaaagcagcgggtatt

SEQ ID NO: 188989 - DNA, 75 bp, synthetic construct
  source 1..75: mol_type = other DNA
tgatgttgataaatccgctttcaaagaacgcgtcaaaccgttatacgatgaattcaaggcgaaagatgcacaatc

SEQ ID NO: 188990 - DNA, 75 bp, synthetic construct
  source 1..75: mol_type = other DNA
gcatattttggtgagcaattaaaaaacagattgctagacaaggaaactcttattgattatttccaaagaaatcca

SEQ ID NO: 188991 - DNA, 75 bp, synthetic construct
  source 1..75: mol_type = other DNA
gcaacgccaaatccagaagataaaccaaacgtggatgatattaataaggctatagcacagtgttcatttgatttt

SEQ ID NO: 188992 - DNA, 75 bp, synthetic construct
  source 1..75: mol_type = other DNA
ggttggattaaccggagagaaatcacctcacagtatgcgttaccatttttctcaggaggccaggagtttttatcg

SEQ ID NO: 188993 - DNA, 75 bp, synthetic construct
  source 1..75: mol_type = other DNA
gcctgcaggatgcgggtttcgaaatgtcgcttagcctgaaagccaaatggcgaccggaccaggacgctctggagt

SEQ ID NO: 188994 - DNA, 75 bp, synthetic construct
  source 1..75: mol_type = other DNA
tcgcttgttgtatgctttcggcgtgactgccgggtttatgctggttgaggttattggcggttttctctcaggttc

SEQ ID NO: 188995 - DNA, 75 bp, synthetic construct
  source 1..75: mol_type = other DNA
tacgtgatgcggcagaaaaggcaacacagggtgaatgggtcgcatttatttcgccgggcaaatacggcacgtacg

SEQ ID NO: 188996 - DNA, 75 bp, synthetic construct
  source 1..75: mol_type = other DNA
agcaatgctgacaccagaaaaaggccgttactggttatctgcatcgagctcaacgctgacagtcactgatactcc

SEQ ID NO: 188997 - DNA, 75 bp, synthetic construct
  source 1..75: mol_type = other DNA
aagatttgtcggtgggttttcgccatcagcaaaccgtacgtacagtagtcaatgatgtttcactacagattgagg

SEQ ID NO: 188998 - DNA, 75 bp, synthetic construct
  source 1..75: mol_type = other DNA
cgaagtgggagagaaactggtcgggtatgcctgggtaatggaatatacggaacgtaaagggcttcacattcattt

SEQ ID NO: 188999 - DNA, 75 bp, synthetic construct
  source 1..75: mol_type = other DNA
attttgtgggctatctgaacggtcagagccacaggagttcgtatctggtatccagattgatgggagatatctgga

SEQ ID NO: 189000 - DNA, 75 bp, synthetic construct
  source 1..75: mol_type = other DNA
tcttaaatgcttgtagtgatctagaaatgtttaatgataaaattgaagacattatcattgcttgtacatcatttc

SEQ ID NO: 189001 - DNA, 75 bp, synthetic construct
  source 1..75: mol_type = other DNA
tggttaaagaagaaacctgtgccaccacgatggctgatctcggtccgcggatgcagtgcagtgtctgccagtgga

SEQ ID NO: 189002 - DNA, 75 bp, synthetic construct
  source 1..75: mol_type = other DNA
gcgttactacgccaatatcctgacaccgttcagccgcctggtaacgccgaaaatcaccgagatcctgggctttaa

SEQ ID NO: 189003 - DNA, 75 bp, synthetic construct
  source 1..75: mol_type = other DNA
tggaagcacgcttcgtgctggaagataagttgattctgctggtacttgacgccgcccgcgtcaaacatcctgctt

SEQ ID NO: 189004 - DNA, 75 bp, synthetic construct
  source 1..75: mol_type = other DNA
cggagcgcgtcagaggaagtaacaaactggttgatcgctggctacatgtacgtaagcatctgctcgtggcttact

SEQ ID NO: 189005 - DNA, 75 bp, synthetic construct
  source 1..75: mol_type = other DNA
gtagaatgctgactatcaaagatattcagggtgaaagaccttttattttagatttaacatcaaatgagaaatata

SEQ ID NO: 189006 - DNA, 75 bp, synthetic construct
  source 1..75: mol_type = other DNA
tgccgctggtattgtcaccaccgtaccgctgttgtgttttaccgcagcagctacacgcctgcgtctctccacgtt

SEQ ID NO: 189007 - DNA, 75 bp, synthetic construct
  source 1..75: mol_type = other DNA
ttagttttgccttctacggtctggtacgcaagaagattgccgttgaagcgcaaaccggcatgttaatcgaaacca

SEQ ID NO: 189008 - DNA, 75 bp, synthetic construct
  source 1..75: mol_type = other DNA
ctggcagtctctgccgtgctgattggtggcaactggctactgtttatctgggcggtgaacaatcaccatatgctg

SEQ ID NO: 189009 - DNA, 75 bp, synthetic construct
  source 1..75: mol_type = other DNA
cgccgccggtattgtcaccaccgtgccactgttatgttttaccgcagcagctacacgcttacgactctcaacatt

SEQ ID NO: 189010 - DNA, 75 bp, synthetic construct
  source 1..75: mol_type = other DNA
ctgctgatgagatcctgacgcatcgtgtaatctggtcgtttttctttatggtggtgttgatgagcatcagccgcc

SEQ ID NO: 189011 - DNA, 75 bp, synthetic construct
  source 1..75: mol_type = other DNA
ttcacctttatttgggtggcgctggcaatttttgtgatggatgcgatttatactcaacgtagaacgtccaaataa

SEQ ID NO: 189012 - DNA, 75 bp, synthetic construct
  source 1..75: mol_type = other DNA
tattgtttttaccgatccgtcgaatctaccctggataactctcactgccgcaatttacgggatggtattcctcta

SEQ ID NO: 189013 - DNA, 75 bp, synthetic construct
  source 1..75: mol_type = other DNA
tgttgccgagccaggaccatggaccaatttaatcgttgcctgcggtatgttaacgccttttgcgatcgtaccact

SEQ ID NO: 189014 - DNA, 75 bp, synthetic construct
  source 1..75: mol_type = other DNA
tgttgccgagcccggagcatggacgaatttaatcgttgcttgcagtatgttaacgccttttgcgatcgtacctct

SEQ ID NO: 189015 - DNA, 75 bp, synthetic construct
  source 1..75: mol_type = other DNA
cgctggctggcgattagcgcaggacgctgaaaccagcgtgcagccgcgcagcgacgaaaaagcgatcctcagcca

SEQ ID NO: 189016 - DNA, 75 bp, synthetic construct
  source 1..75: mol_type = other DNA
ggtagaggctcaagtggcggcggggttagcggcgggggcggttcttctggcggtggcggcgcgtccggtcgctgg

SEQ ID NO: 189017 - DNA, 75 bp, synthetic construct
  source 1..75: mol_type = other DNA
aaaaggttcttcttcatcctcttccggtggcggctcaagtggcggcggatttagcggaggtggcggttcttctgg

SEQ ID NO: 189018 - DNA, 75 bp, synthetic construct
  source 1..75: mol_type = other DNA
ccggcgcggactacccgccaacgcttatcaccaaagagaacctgcagcaggctgagcgtatcggtgaggccggta

SEQ ID NO: 189019 - DNA, 75 bp, synthetic construct
  source 1..75: mol_type = other DNA
gaaagtaacgattatgcttgaggagctgctggcgctgggcgttactggtgcagagtacgacgcctggctgattcg

SEQ ID NO: 189020 - DNA, 75 bp, synthetic construct
  source 1..75: mol_type = other DNA
atatggcgatttggccgtggtttggcaacgtggtgttaggcggcgtgtatgatgccgcagagtttctggatgcgg

SEQ ID NO: 189021 - DNA, 75 bp, synthetic construct
  source 1..75: mol_type = other DNA
atcccggcactgcgtgatcatacgcataatccgcctatccgcgtatttgagtcaggatcgattctgctttatttg

SEQ ID NO: 189022 - DNA, 75 bp, synthetic construct
  source 1..75: mol_type = other DNA
gagacggcggagaactccgacaggagctgctgcgcatgggcgttaccattccctacaaacaacggcaggcactga

SEQ ID NO: 189023 - DNA, 75 bp, synthetic construct
  source 1..75: mol_type = other DNA
accgcaccaacgggccgctgaacgagcagttgcatgagcgccatgacgccagtgatttcgagacgaatacggaag

SEQ ID NO: 189024 - DNA, 75 bp, synthetic construct
  source 1..75: mol_type = other DNA
cctcggcggtggttttggtcacttttaccattacgcgccggtgaaaattgagtacgccatcaaccgctttaccat

SEQ ID NO: 189025 - DNA, 75 bp, synthetic construct
  source 1..75: mol_type = other DNA
agaaattattatggatgacatgattctggattcagtcgtggcgttaagtccgttatggattgtgcattctcttgc

SEQ ID NO: 189026 - DNA, 75 bp, synthetic construct
  source 1..75: mol_type = other DNA
caggctgctgtcgccgccctgcgattactggctgaattaagttgttcagtcaatcccaatacgttctttgacgaa

SEQ ID NO: 189027 - DNA, 75 bp, synthetic construct
  source 1..75: mol_type = other DNA
ttgtaattggttttcttacatccagaatgtcagaagcagtgacccaggccagcaaagctaacattgtagaacttg

SEQ ID NO: 189028 - DNA, 75 bp, synthetic construct
  source 1..75: mol_type = other DNA
atgaaaaaacgttgccggttggcaagcacccgttacagctctattcgctgggcacgccgaacggtcagaaagtaa

SEQ ID NO: 189029 - DNA, 75 bp, synthetic construct
  source 1..75: mol_type = other DNA
gaaaaatccgccgctggggcgtttctaaccttgattatgccgatatgcaggaactctggcagctgccggggggaa

SEQ ID NO: 189030 - DNA, 75 bp, synthetic construct
  source 1..75: mol_type = other DNA
caaaatgcggctgtgctggagattgtgctttcgccagaagaattagcgatgctggacaaagcgtatccggcacca

SEQ ID NO: 189031 - DNA, 75 bp, synthetic construct
  source 1..75: mol_type = other DNA
tatcagatagttcgcattttcggtcaggagccgcaggtcatttttgacggccaggttcggcacggggtggcgcta

SEQ ID NO: 189032 - DNA, 75 bp, synthetic construct
  source 1..75: mol_type = other DNA
ggggtcatcaccaatcacaataaattcgatcccggcgagtttaaggcattgcgcaaagcggcgcgtcgtgaaggc

SEQ ID NO: 189033 - DNA, 75 bp, synthetic construct
  source 1..75: mol_type = other DNA
ccggggtggaaaaagcagatcccgccgacttcctgaagctgaaagccgggctggaagttgcggaacaaaaaatag

SEQ ID NO: 189034 - DNA, 75 bp, synthetic construct
  source 1..75: mol_type = other DNA
gtggatggtgggcgagaagccagtaatgacgctgcatgtgcaggtgatcccgccacacgatcacgacgcattgtt

SEQ ID NO: 189035 - DNA, 75 bp, synthetic construct
  source 1..75: mol_type = other DNA
acgccgttttcccaggtaaagattttgctgatatcgaaggggctgatatcgtatcgaaggggctgatatcgcgaa

SEQ ID NO: 189036 - DNA, 75 bp, synthetic construct
  source 1..75: mol_type = other DNA
tatatttatcgcttgccgaatgtattcggtaagtggtgtcgaccaaattataactcctttatagcaactttctgc

SEQ ID NO: 189037 - DNA, 75 bp, synthetic construct
  source 1..75: mol_type = other DNA
ttgctggtatggaaacatttcgggcgcgtagcgccacatggcaaagagtggaagtggatgatggaaagcgtgctg

SEQ ID NO: 189038 - DNA, 75 bp, synthetic construct
  source 1..75: mol_type = other DNA
cagatgtatggggggcaggtatgggtggataataccagtgagggaaacggtatctacatggttcctcagcctcct

SEQ ID NO: 189039 - DNA, 75 bp, synthetic construct
  source 1..75: mol_type = other DNA
gcgcgtacccgcagtctggttttatggtgcaactctctcggcaatgcactttgtgcgcgttctggataacgccat

SEQ ID NO: 189040 - DNA, 75 bp, synthetic construct
  source 1..75: mol_type = other DNA
cgggctgagccctggcaggatcagagagctttttgataacgagcttatccgccggcgcgtaacgggatttcagaa

SEQ ID NO: 189041 - DNA, 75 bp, synthetic construct
  source 1..75: mol_type = other DNA
tcctgcagaaaaagcaggcgctgacggaggaatttgtcacgaacggtgcaatagtgatccacacccaacgcctga

SEQ ID NO: 189042 - DNA, 75 bp, synthetic construct
  source 1..75: mol_type = other DNA
taaatataatctcatttggctttttcagaagttccctatccctttcatttcttttattctaaatttacgcgcaat

SEQ ID NO: 189043 - DNA, 75 bp, synthetic construct
  source 1..75: mol_type = other DNA
ggctattattgccgcgttgattattatctggaccggctggacacctgcagaccccattctctcgatactggtatc

SEQ ID NO: 189044 - DNA, 75 bp, synthetic construct
  source 1..75: mol_type = other DNA
ttggcttatcgttaataaaaagctacgcgccaaatacaaaaaactcagtaaagaaagagcttcaagaaaaggttc

SEQ ID NO: 189045 - DNA, 75 bp, synthetic construct
  source 1..75: mol_type = other DNA
gcaacacgcgtttttgatagctggaaactgggagataagcagcgaaacgatggtattttactgctggttgcctgg

SEQ ID NO: 189046 - DNA, 75 bp, synthetic construct
  source 1..75: mol_type = other DNA
gtagcttaaactcacaagaaaagaaagaactgacgcacaagttagaatctattttcaataatacccaagtacaaa

SEQ ID NO: 189047 - DNA, 75 bp, synthetic construct
  source 1..75: mol_type = other DNA
tattgtggtgcgttcctgtgtttgcccagcaaattgctgtaccggaactacaccaacaggtgaccgatcttactg

SEQ ID NO: 189048 - DNA, 75 bp, synthetic construct
  source 1..75: mol_type = other DNA
gagaaacgatggtattttacttctggttgcctgggaggatcatgctgttcgtattgaggttggctacgggctgga

SEQ ID NO: 189049 - DNA, 75 bp, synthetic construct
  source 1..75: mol_type = other DNA
aggcgcaggtcgctatattagtggtgccatccactggtgaagataccattgaacaatatgcaacacgcgtttttg

SEQ ID NO: 189050 - DNA, 75 bp, synthetic construct
  source 1..75: mol_type = other DNA
gacgcgcagtgctgccgatgtggtcatcatgaaggagattgtgcgtcagacgccggaactgcgggaggcggtata

SEQ ID NO: 189051 - DNA, 75 bp, synthetic construct
  source 1..75: mol_type = other DNA
gtgggcaataccgatatggcacgggcatacgccctgattgcggccggtggcggtcgtgccgtggccagtggtgac

SEQ ID NO: 189052 - DNA, 75 bp, synthetic construct
  source 1..75: mol_type = other DNA
ctgtggctgattcaccattcacggcactgaagctggagaacggctgggtggaaacgcccgggcattccgtcagcg

SEQ ID NO: 189053 - DNA, 75 bp, synthetic construct
  source 1..75: mol_type = other DNA
tctcacgcaattacatcacctctcaggtgagctcgacatggttcttgcttttgtccgtctggatattggcgagca

SEQ ID NO: 189054 - DNA, 75 bp, synthetic construct
  source 1..75: mol_type = other DNA
ctttttttgatataatatatacaacagacgcggattcaattaatcgatatgactcattactagaccacaggtgcc

SEQ ID NO: 189055 - DNA, 75 bp, synthetic construct
  source 1..75: mol_type = other DNA
aagggcattgcgatggcacaaggcaagttcgcgttgtttctcaactcgggcgatatttttcatcaggatgccgca

SEQ ID NO: 189056 - DNA, 75 bp, synthetic construct
  source 1..75: mol_type = other DNA
tcaaattgaacaatataatcaggctgttcaggctgcgtatttgcatcgccttaaaatctggttatccagtgcttt

SEQ ID NO: 189057 - DNA, 75 bp, synthetic construct
  source 1..75: mol_type = other DNA
tcgggtggctctttcgctggacctcggcgatacgctggcgcagaaggatttcatccagatagccgctgaactgat

SEQ ID NO: 189058 - DNA, 75 bp, synthetic construct
  source 1..75: mol_type = other DNA
ctagcggaatattgcgggaaagtgaagcagactattttgcagatcgccacaattgacgttttggaagttctcgaa

SEQ ID NO: 189059 - DNA, 75 bp, synthetic construct
  source 1..75: mol_type = other DNA
aaatttcccgtttatacggctatacaattaacgccgctaagaaatggcaagaacgaggaatgccatttaatacca

SEQ ID NO: 189060 - DNA, 75 bp, synthetic construct
  source 1..75: mol_type = other DNA
ttcgctgacgtggaaaccaagttcaaagagatgggatttgatcgcgtctttgccccaagtcatgacttagaagat

SEQ ID NO: 189061 - DNA, 75 bp, synthetic construct
  source 1..75: mol_type = other DNA
cgcacccagccatgacttagaagatgtctgccaactgatgaccaacgatatcaaccaacgtcatggcgtagaaat

SEQ ID NO: 189062 - DNA, 75 bp, synthetic construct
  source 1..75: mol_type = other DNA
tgggtaatgcccgccgcctgttcaaactggcgcgcggtgtgtaccggatttgtgatatcagcgatgcaccggtca

SEQ ID NO: 189063 - DNA, 75 bp, synthetic construct
  source 1..75: mol_type = other DNA
cttctgctgtggacggcggatcggcaaaaaccattgcattctgccaggaagacgtaagactggaagcggaagact

SEQ ID NO: 189064 - DNA, 75 bp, synthetic construct
  source 1..75: mol_type = other DNA
atgcaaacgtggttaaatttgcaggataaaatcattattgtcaccggcggcgcatccggtattggtctggcgatt

SEQ ID NO: 189065 - DNA, 75 bp, synthetic construct
  source 1..75: mol_type = other DNA
atgcaaacgtggttaaatttgcaggataaaatcattattgtcaccggtggcgcatccggcattggtctggcgatt

SEQ ID NO: 189066 - DNA, 75 bp, synthetic construct
  source 1..75: mol_type = other DNA
accaggaaaaaatgaatctcctgattcctgtcggttatgtagaacagcaactagcggaatactgcgggaaagtga

SEQ ID NO: 189067 - DNA, 75 bp, synthetic construct
  source 1..75: mol_type = other DNA
ttgacggcaaatccgttactgaaacagcagtatctgccgcagcacttaagccgggtactccggtaaaaatggcgt

SEQ ID NO: 189068 - DNA, 75 bp, synthetic construct
  source 1..75: mol_type = other DNA
agatcaggccatccaggtaaacgaagttactgtcgcgtactgccaggaagacgtgaaactggaagctgaagactt

SEQ ID NO: 189069 - DNA, 75 bp, synthetic construct
  source 1..75: mol_type = other DNA
atgaaacacgtatcctcccgtgctgccaatgcggataataatcgcatcctaactggccgggacattaacgaaatc

SEQ ID NO: 189070 - DNA, 75 bp, synthetic construct
  source 1..75: mol_type = other DNA
aggctgccgccgcgacgttaacggtgagttcaggtttcggttatatgcattacctggaacccggctggcttgaat

SEQ ID NO: 189071 - DNA, 75 bp, synthetic construct
  source 1..75: mol_type = other DNA
gcgaaattaccgctgtagatcgtatgccagatgctgtctctctggcgcaacgtaatgctggctggcagcagggtg

SEQ ID NO: 189072 - DNA, 75 bp, synthetic construct
  source 1..75: mol_type = other DNA
ctggatgaccgtaagagcaccatgatggccggtctgtcctacgcacactttacccagtacggttatctgcgtacc

SEQ ID NO: 189073 - DNA, 75 bp, synthetic construct
  source 1..75: mol_type = other DNA
gagaaatcgaacgcaaaaatgattgttatcgatccgcgatataccgatacggctgctggtcgtgaagacgaatgg

SEQ ID NO: 189074 - DNA, 75 bp, synthetic construct
  source 1..75: mol_type = other DNA
cacttatcttcttgaaaaagcgcgcgagaaatcgaacgcaaaaatgattgttatcgatccgcgatataccgatac

SEQ ID NO: 189075 - DNA, 75 bp, synthetic construct
  source 1..75: mol_type = other DNA
acaaaacgcatgaaattctgcaggacgaatcgaaatgcgaaatgattgtggtcatcgaaaactttatgacctcat

SEQ ID NO: 189076 - DNA, 75 bp, synthetic construct
  source 1..75: mol_type = other DNA
ccaatgcggataataatcgcatcctaactggccgggacattaacgaaatcgaattcacaccaccaattcacgcca

SEQ ID NO: 189077 - DNA, 75 bp, synthetic construct
  source 1..75: mol_type = other DNA
gttctggatcatgacacctggctgcatatccgcctgctgatgggcgagataagggtgccaatccggtgtctggaa

SEQ ID NO: 189078 - DNA, 75 bp, synthetic construct
  source 1..75: mol_type = other DNA
ggttatccttactggcaatgcctacgaagttaaagccatgctttctgcggccgctaccgggcacagtggttgcat

SEQ ID NO: 189079 - DNA, 75 bp, synthetic construct
  source 1..75: mol_type = other DNA
gtgaccaaactcaaacttctggcacttggagtgcttatcgcaacgtctgcaggcgtaggtgtcgttgaacaccca

SEQ ID NO: 189080 - DNA, 75 bp, synthetic construct
  source 1..75: mol_type = other DNA
gcatagtttggaaaatattgggacaataccacttgtgttaatagaagtttggaccggttcttatcttgctgatga

SEQ ID NO: 189081 - DNA, 75 bp, synthetic construct
  source 1..75: mol_type = other DNA
accactatcaggtcaaacgaataacagttaatccaagtgaaaaattatcgttgcaattacatcatcaccgtgcgg

SEQ ID NO: 189082 - DNA, 75 bp, synthetic construct
  source 1..75: mol_type = other DNA
gcgttaaaggcacttaccagatggttgacttcgaaaggcaatcagtgggtttacgtcatggagtgggctcgacac

SEQ ID NO: 189083 - DNA, 75 bp, synthetic construct
  source 1..75: mol_type = other DNA
atggaattatacgataaagacgcgagtctatccacaaaatcacaagccgtaatcaatcgcattaatggtcgaacc

SEQ ID NO: 189084 - DNA, 75 bp, synthetic construct
  source 1..75: mol_type = other DNA
tatcaagaagcgtatcaagaagtaagacaggaagtaagacaggaagtaagacaggaattcgcccagcgttttcta

SEQ ID NO: 189085 - DNA, 75 bp, synthetic construct
  source 1..75: mol_type = other DNA
atgcaacaagggttaaacccatacgactggaaacctttttcaactatcggccctggtgtgcgagagattcgtact

SEQ ID NO: 189086 - DNA, 75 bp, synthetic construct
  source 1..75: mol_type = other DNA
ggttttgctggtctgttgctgtcgattgtgtctggcactatttgtcgtatctttggcaaacgaaggggaaaacag

SEQ ID NO: 189087 - DNA, 75 bp, synthetic construct
  source 1..75: mol_type = other DNA
atggagaaggggattcagcagggaagacaggaagtaagtcaggaattcgccctgcgtcttctaagtaaaggaatg

SEQ ID NO: 189088 - DNA, 75 bp, synthetic construct
  source 1..75: mol_type = other DNA
ttattgattccgtcgatgcaggggtcggagcggtaattgacttgtttgaattagacctcacgcccctgggtggcg

SEQ ID NO: 189089 - DNA, 75 bp, synthetic construct
  source 1..75: mol_type = other DNA
taagcggttgccgtttgcgttttccgcgcccgaatccgttaccaatttcatgttttcctggatcgagcaaggtgg

SEQ ID NO: 189090 - DNA, 75 bp, synthetic construct
  source 1..75: mol_type = other DNA
tgagcggttgccgtttgcgtttcccgcgcccgaatccgttaccgatttcctgcttccctgggtccagtaaggtcg

SEQ ID NO: 189091 - DNA, 75 bp, synthetic construct
  source 1..75: mol_type = other DNA
cccagcgtcttctgagtaaaggaatgtctcgggaagacgttgcagagatggcaactttatctcttacagaggttg

SEQ ID NO: 189092 - DNA, 75 bp, synthetic construct
  source 1..75: mol_type = other DNA
tttacgaaacccaatattgttattaagcctaacgccaacagccgcccttctggcgacaccaccggttatctggca

SEQ ID NO: 189093 - DNA, 75 bp, synthetic construct
  source 1..75: mol_type = other DNA
attgcagagtccgccattaagcttactgaagagatttaccctcctcaaaaatcttcacaaaattcctgcgagtaa

SEQ ID NO: 189094 - DNA, 75 bp, synthetic construct
  source 1..75: mol_type = other DNA
tccctgtattttctctgcccgtttttcaaccgacttgcgcaattcacttagttactggagcctccccttctctgc

SEQ ID NO: 189095 - DNA, 75 bp, synthetic construct
  source 1..75: mol_type = other DNA
ttgatggcaagtcaattaccgaaacctatgcagccaatgaggcggtgaagcccggtgaactggttaaactggctg

SEQ ID NO: 189096 - DNA, 75 bp, synthetic construct
  source 1..75: mol_type = other DNA
gattatgtggaacagggccgagagtttgctctccttgttcctgcagccgcttatgttaagggtgcagctattgct

SEQ ID NO: 189097 - DNA, 75 bp, synthetic construct
  source 1..75: mol_type = other DNA
cgtggagtctggtcgtaagaactgggcgtcgtcatcccgctttaatggaaagcgtggagggtatcgtcttatttc

SEQ ID NO: 189098 - DNA, 75 bp, synthetic construct
  source 1..75: mol_type = other DNA
gcttaatagcttcacgcgatcctggtcgaaagaattgggtaaacacggtatccgtgtagtcggtatcgcgccggg

SEQ ID NO: 189099 - DNA, 75 bp, synthetic construct
  source 1..75: mol_type = other DNA
tggccgaccgatatttccagcgccaaagaggtaaatcatacggtagcagaaattatccagcgttttggtcgcatc

SEQ ID NO: 189100 - DNA, 75 bp, synthetic construct
  source 1..75: mol_type = other DNA
atacaaaaagggggcagctatcgctttcacggctactggcgtcaagctgtttaccgagccacttgaatcagcacc

SEQ ID NO: 189101 - DNA, 75 bp, synthetic construct
  source 1..75: mol_type = other DNA
aagatgaattgttgaaagatgaacaaccagtattcttctttgatacgtgttcaatattagatatattaaattcta

SEQ ID NO: 189102 - DNA, 75 bp, synthetic construct
  source 1..75: mol_type = other DNA
atggctactatccctaccccaactcaccctgaatttatctggcgcttttattcctgccagaaacgtcactatcac

SEQ ID NO: 189103 - DNA, 75 bp, synthetic construct
  source 1..75: mol_type = other DNA
ttcctgtaaaaaacaccactatcacttcgttatcgcagcaactgaagacgaagcacgctctcaattgcctgatgg

SEQ ID NO: 189104 - DNA, 75 bp, synthetic construct
  source 1..75: mol_type = other DNA
ctcagacgaaccgatgactggaaagatggtcgccgcagccgtcactcagatgatacggatgtgcttctccgtata

SEQ ID NO: 189105 - DNA, 75 bp, synthetic construct
  source 1..75: mol_type = other DNA
gttttaatgaaaaaataatattcgttactgaaaataaagaagattttggctcatacaatgctctaaaaccaccac

SEQ ID NO: 189106 - DNA, 75 bp, synthetic construct
  source 1..75: mol_type = other DNA
aaataaaaaaactagatcgtagtataagttcgacaattaacgtgaccaacttagtcttaaatacaaattattcta

SEQ ID NO: 189107 - DNA, 75 bp, synthetic construct
  source 1..75: mol_type = other DNA
cggcgcggccatcgccggagtgatgggcagcgcggtcggtgatatccgcagcgctggcgaacaggtcgggaaaat

SEQ ID NO: 189108 - DNA, 75 bp, synthetic construct
  source 1..75: mol_type = other DNA
ttcgagctatgccctgtttccggcgtttgataacgtccgccaggcgctgccgatggcgcaggcgtttctcgaaat

SEQ ID NO: 189109 - DNA, 75 bp, synthetic construct
  source 1..75: mol_type = other DNA
aatcacttgaattacatgctgttgcagaaagtcatgtcacacctctttatcagttaatctgtaaaaatagaacct

SEQ ID NO: 189110 - DNA, 75 bp, synthetic construct
  source 1..75: mol_type = other DNA
taactgtaatatttgaattattctgtttcgttatatcagttcctgtagttgccatttacttaatatttatattct

SEQ ID NO: 189111 - DNA, 75 bp, synthetic construct
  source 1..75: mol_type = other DNA
ttcatgtgatcagcaaaggcatcaccagcgcaacggttgccaccctgccctgccagccggatctgcgtcagatcc

SEQ ID NO: 189112 - DNA, 75 bp, synthetic construct
  source 1..75: mol_type = other DNA
cctgtggctgaaggcgcgcggccagggggctgatgaaggcaacgtcgcccgcctgctggtcgtctgggtggagca

SEQ ID NO: 189113 - DNA, 75 bp, synthetic construct
  source 1..75: mol_type = other DNA
ctggccgcagagaaactggaaaaaatgcttaaaccaggctttatgtcagaaaatattcgcctgtcagtttttggt

SEQ ID NO: 189114 - DNA, 75 bp, synthetic construct
  source 1..75: mol_type = other DNA
gtcacagagatgcgggagatttaccgggatattatttttggtgcccctgatggagatctccctgaagattttgag

SEQ ID NO: 189115 - DNA, 75 bp, synthetic construct
  source 1..75: mol_type = other DNA
ctggcaaccatcagctccggcctgagctgcggcaggctattcgggccgctgtgcgcggcggcaatgttggtcatt

SEQ ID NO: 189116 - DNA, 75 bp, synthetic construct
  source 1..75: mol_type = other DNA
catcgccgcgttcgatatgcctacgctacttcgtaccaccgagggatacaccggggcagagattgaacaggccgt

SEQ ID NO: 189117 - DNA, 75 bp, synthetic construct
  source 1..75: mol_type = other DNA
gtccaatctttgactacattccgagcggtattcagaaagcagaaaaacggtggcttcctgttcctggtggtgatt

SEQ ID NO: 189118 - DNA, 75 bp, synthetic construct
  source 1..75: mol_type = other DNA
tgtcgcaatcgcgctgattatggcagcattatttgcaactatattatttaccattgtgtctgtatttatcgtaag

SEQ ID NO: 189119 - DNA, 75 bp, synthetic construct
  source 1..75: mol_type = other DNA
tggctggacgcgccgattggctacatgggttccttcaagaatctgtgcgacaaacgcggcgacactaccagcttc

SEQ ID NO: 189120 - DNA, 75 bp, synthetic construct
  source 1..75: mol_type = other DNA
caggcaggtcaggcgcagagcattgtggcggggggtatggaaaatatgagtttagccccctacttactcgatgca

SEQ ID NO: 189121 - DNA, 75 bp, synthetic construct
  source 1..75: mol_type = other DNA
cggtacgtactgccatcggtagttttaatggttcactcgcctccaccagcgccatcgatctgggggcaacagtaa

SEQ ID NO: 189122 - DNA, 75 bp, synthetic construct
  source 1..75: mol_type = other DNA
ttaaagccgccattgaacgtgcaaaaatcgattcactacacgttgatgaagtgattatgggtaacgtgttgcaag

SEQ ID NO: 189123 - DNA, 75 bp, synthetic construct
  source 1..75: mol_type = other DNA
gagttttccgccagtcgggtaaaagtgttacatgccaatatcagccgctgtggcatccgtaatgttgcgctcacg

SEQ ID NO: 189124 - DNA, 75 bp, synthetic construct
  source 1..75: mol_type = other DNA
ccgttgccgccttgtttgctgacgataatgcaccacagcgggtgatggatgtcgcagctgcgccaggctccaaaa

SEQ ID NO: 189125 - DNA, 75 bp, synthetic construct
  source 1..75: mol_type = other DNA
aacgcttttgaactgacaccgcaggaagcggaggagtggtatcgcgggcgcgatgtttacccgcaagccgcgcca

SEQ ID NO: 189126 - DNA, 75 bp, synthetic construct
  source 1..75: mol_type = other DNA
attatcaccctactgataacgcggtacagaagaatctggccaaagccccaaagcgctctggcaccaaaatcccgg

SEQ ID NO: 189127 - DNA, 75 bp, synthetic construct
  source 1..75: mol_type = other DNA
ttacaggagcagcgatgaatgcactatgtatttttattatcagacttctggataaggattttattgaagtctata

SEQ ID NO: 189128 - DNA, 75 bp, synthetic construct
  source 1..75: mol_type = other DNA
ttccgcgtgaactggacgaacaacaaaaagcagcgcttgctgcagatattaccgacgttattattcgccatctga

SEQ ID NO: 189129 - DNA, 75 bp, synthetic construct
  source 1..75: mol_type = other DNA
ggctcgcgataaaacgctgggtctggcgacgctgtgcattggcggcggtcagggaattgcgatggtgattgaacg

SEQ ID NO: 189130 - DNA, 75 bp, synthetic construct
  source 1..75: mol_type = other DNA
tcatggcaagcggtctgggacgccgaaatcgcgccccaaatggagacgttgataaagaaacccggttacagcatg

SEQ ID NO: 189131 - DNA, 75 bp, synthetic construct
  source 1..75: mol_type = other DNA
ttccccgtgaactggacgagcaacaaaaagcggaactggccgcggagattaccgacgtcattattcgccatctga

SEQ ID NO: 189132 - DNA, 75 bp, synthetic construct
  source 1..75: mol_type = other DNA
atgaatagcatcgagacacaatattcctcatctgaagttatgaactatgacccaaatctgacgtcgtgcggacgc

SEQ ID NO: 189133 - DNA, 75 bp, synthetic construct
  source 1..75: mol_type = other DNA
caaaccgttcgattaactttcgggctatgggaataccgcgaaacattcgaagttactgtcggcggcaatctgacc

SEQ ID NO: 189134 - DNA, 75 bp, synthetic construct
  source 1..75: mol_type = other DNA
ttatgaagaagtcgaggatgagcgtacaggggaaactgaaccgccccggaaatcctggagactaaactccctgag

SEQ ID NO: 189135 - DNA, 75 bp, synthetic construct
  source 1..75: mol_type = other DNA
accagcgatggtctggcaatctgggatgagcaggcaatctccgtccacgccgatagcgacagtgaaatcctgctg

SEQ ID NO: 189136 - DNA, 75 bp, synthetic construct
  source 1..75: mol_type = other DNA
ctggatcatgcctgaagaaaacggtattacgccgcgttatgaactgatcttacccagcaatagtggacacgcggc

SEQ ID NO: 189137 - DNA, 75 bp, synthetic construct
  source 1..75: mol_type = other DNA
cacaggttgccgttgatgaacgctccggtgagaaggacggtaaaaaatgggtgtcccgtgagcagaaaggatata

SEQ ID NO: 189138 - DNA, 75 bp, synthetic construct
  source 1..75: mol_type = other DNA
taaaccaacatccgcagactgataagattcattttcatcactcatcgagcggaacgcgactcgaattagtgcgat

SEQ ID NO: 189139 - DNA, 75 bp, synthetic construct
  source 1..75: mol_type = other DNA
gataaccagtacagcaatgcttattcactactaagttcgccactcgacacctcttgttatcagattgccgttcgg

SEQ ID NO: 189140 - DNA, 75 bp, synthetic construct
  source 1..75: mol_type = other DNA
taaaccacatcattgccacagacggctggttgctgagtacctggcagataaatggcctgatgtcactatcatgca

SEQ ID NO: 189141 - DNA, 75 bp, synthetic construct
  source 1..75: mol_type = other DNA
ccttacagtaattgtcgcggcgaaattctatttcggtggaatccccgatataaaagattacgaaaaacaattaca

SEQ ID NO: 189142 - DNA, 75 bp, synthetic construct
  source 1..75: mol_type = other DNA
catttaccctggtgcttgcccgttccggaaaagagtttgtggtgccggaagagatgactattttgcaggttattg

SEQ ID NO: 189143 - DNA, 75 bp, synthetic construct
  source 1..75: mol_type = other DNA
ggtacacgcctggagttagcacgtttgttagcggatattgcaccgggcacgcatatctacacctgtggtccagca

SEQ ID NO: 189144 - DNA, 75 bp, synthetic construct
  source 1..75: mol_type = other DNA
ctcgtactctcaacgatgccgttgaagttaaacatgcagataataccctgaccttcggtccgcgtgatggttacg

SEQ ID NO: 189145 - DNA, 75 bp, synthetic construct
  source 1..75: mol_type = other DNA
ggagcagctccacccttacgatctcaacccacggttgatacgtaaccccaactatgacgatataaaggcatcaat

SEQ ID NO: 189146 - DNA, 75 bp, synthetic construct
  source 1..75: mol_type = other DNA
tttcggtagcattttcctgtgggtgattatcggtgttattcctgtcgctgtagcaaaaatggcgtggcgttttgt

SEQ ID NO: 189147 - DNA, 75 bp, synthetic construct
  source 1..75: mol_type = other DNA
tcttattaaagcattccggctaatccgtattgtccgccggatcagagaattacagcaggaggcacaacatgttgc

SEQ ID NO: 189148 - DNA, 75 bp, synthetic construct
  source 1..75: mol_type = other DNA
ggctcagtgcgctgcttgaggcccgggaagctgaaggcagccttgcccgggcgcttttcacgccggatacgccgg

SEQ ID NO: 189149 - DNA, 75 bp, synthetic construct
  source 1..75: mol_type = other DNA
ggatatgaatgcctgggatgagtggcagtccagttctgatgttttgagggatatgcatcgtcgtgaagaggtcaa

SEQ ID NO: 189150 - DNA, 75 bp, synthetic construct
  source 1..75: mol_type = other DNA
agaaaacacagactaccagtcaatcggatattgatttagccaaacgacgctataaagaacttgttcaggagcgga

SEQ ID NO: 189151 - DNA, 75 bp, synthetic construct
  source 1..75: mol_type = other DNA
tcagattgtgaagcgaaaaggacggctgtatgtgatttgtaaatctaatccacgttttaaggccgttcagggtcg

SEQ ID NO: 189152 - DNA, 75 bp, synthetic construct
  source 1..75: mol_type = other DNA
gggtaaccgaagggcaggcactgcaacctgaagcgccggatgtggtaaccgaagaggtcgctccaaaagttaccg

SEQ ID NO: 189153 - DNA, 75 bp, synthetic construct
  source 1..75: mol_type = other DNA
gattcccgccaccggttaatcatgaatggtctgttcaggggcattcatgggatgattacgtcgataatttcttcc

SEQ ID NO: 189154 - DNA, 75 bp, synthetic construct
  source 1..75: mol_type = other DNA
ggtggtgacgttcattgtggttgccagcagttttatccggttggtaggtgaaggtaaagacatggtgggtgtgct

SEQ ID NO: 189155 - DNA, 75 bp, synthetic construct
  source 1..75: mol_type = other DNA
tgccggtggtgcctccagcttcctcgcggatcgtgtggaagaagagggtgaagtccgcgtctttatcgaacataa

SEQ ID NO: 189156 - DNA, 75 bp, synthetic construct
  source 1..75: mol_type = other DNA
aagtttcgcagagcatggagtttatggatgagccgggtgagggcaacgttgagctcctcgatgtggacaagcaag

SEQ ID NO: 189157 - DNA, 75 bp, synthetic construct
  source 1..75: mol_type = other DNA
agacgaacactggaaaactgcttggactgccttaaataggatacacgaagtattcgcagtttctagcatacctcg

SEQ ID NO: 189158 - DNA, 75 bp, synthetic construct
  source 1..75: mol_type = other DNA
cagctcagaaagtattttaaaataaccccgtttaaatatatgcatgtacaaggagagaataagttttgtggataa

SEQ ID NO: 189159 - DNA, 75 bp, synthetic construct
  source 1..75: mol_type = other DNA
actgttcctcttttttggcattggttgtttgtgcgccctgaaagttgccggggcaagtctgggactgtgggaaat

SEQ ID NO: 189160 - DNA, 75 bp, synthetic construct
  source 1..75: mol_type = other DNA
ttgtatcatttggggattaggtatttcgcttgctgtttaccttacggcaggaatttccggcgctcatctcaatcc

SEQ ID NO: 189161 - DNA, 75 bp, synthetic construct
  source 1..75: mol_type = other DNA
gtgatgaacacggatactggacgcatcctgcactgacccgcagcggctgtgaaactccggcagaacttcgctact

SEQ ID NO: 189162 - DNA, 75 bp, synthetic construct
  source 1..75: mol_type = other DNA
gtgaaactggagggcggttgccaccacacggcggcaatgcactcgcgcaatatcgaaaacatgaaccagatggcg

SEQ ID NO: 189163 - DNA, 75 bp, synthetic construct
  source 1..75: mol_type = other DNA
gcatttccggtgctcatcttaacccggcggttactattgctctgtggttgtttgccgcttttcctggtcgtaaag

SEQ ID NO: 189164 - DNA, 75 bp, synthetic construct
  source 1..75: mol_type = other DNA
tcatgaacattctggtcgtctacaacatctcgttgatgaactggcgatgccagatactgctttttatgcctggga

SEQ ID NO: 189165 - DNA, 75 bp, synthetic construct
  source 1..75: mol_type = other DNA
taactgaacgtcggaacgtattgctacaaggcgctggctggttattgttgctggccccgtttttcttcttcacct

SEQ ID NO: 189166 - DNA, 75 bp, synthetic construct
  source 1..75: mol_type = other DNA
gcggcgatttatcgctttcttattgcacaaaatttacctgtcaatagtgttacgcctaaagatatcagcgaatag

SEQ ID NO: 189167 - DNA, 75 bp, synthetic construct
  source 1..75: mol_type = other DNA
aaattttcacctggcttgctggttggggggaaattgcaatgactggcggacgcaatattccttattttattgtac

SEQ ID NO: 189168 - DNA, 75 bp, synthetic construct
  source 1..75: mol_type = other DNA
tcgcttgctgtttaccttacggcaggtatttccggcgctcatctcaacccggcagttaccattgctctgtggctg

SEQ ID NO: 189169 - DNA, 75 bp, synthetic construct
  source 1..75: mol_type = other DNA
gtcgcatcattccggcaccagaacttatcaataaccagtggcaacgccgctacgacctgtctgtgacacttcgcc

SEQ ID NO: 189170 - DNA, 75 bp, synthetic construct
  source 1..75: mol_type = other DNA
acgaagaatttcatacgttagccaaagcagcaaatttcaacatcgtccaactgaggtgtaaaaatgttcagaatc

SEQ ID NO: 189171 - DNA, 75 bp, synthetic construct
  source 1..75: mol_type = other DNA
atcacacctcgcatcagaataaccatccacgcagcacctcccgataaccgcaaacgagatttggacaatctgcca

SEQ ID NO: 189172 - DNA, 75 bp, synthetic construct
  source 1..75: mol_type = other DNA
cccaccattatattcgtgcggtcttagtgcgctgtaatatccaacgatatagtccgttattgcgtgagctgcatc

SEQ ID NO: 189173 - DNA, 75 bp, synthetic construct
  source 1..75: mol_type = other DNA
tggagccttgtccccggcagcgccctgcccggcgctgcgctggcgatcctctgcggcgggcgctggctggcgcgg

SEQ ID NO: 189174 - DNA, 75 bp, synthetic construct
  source 1..75: mol_type = other DNA
aacggctgaaccgcgagccagcggtgtttcgcggcctgacggtcagcgagctgctgatagcgctgcttgtcgggc

SEQ ID NO: 189175 - DNA, 75 bp, synthetic construct
  source 1..75: mol_type = other DNA
aactggtaaaacgcataccgggtgtgaaatcgcctgcggtatatgcgcaggcaattgcggacattaaaaaagggc

SEQ ID NO: 189176 - DNA, 75 bp, synthetic construct
  source 1..75: mol_type = other DNA
ctgatcgattcgtcattccattctttttgtttataatgggcattacactggtgttggcgtgtttacctgcgtgtc

SEQ ID NO: 189177 - DNA, 75 bp, synthetic construct
  source 1..75: mol_type = other DNA
acaccagcacagagcgcggctggctgacacccaccagcggcgatccggcttatgacgaagcgctcgacaggctgc

SEQ ID NO: 189178 - DNA, 75 bp, synthetic construct
  source 1..75: mol_type = other DNA
cacattgtacaggcactctctcaggccggactggctggcgcagcacaggacgccgcgaagatgaagaaaaaggat

SEQ ID NO: 189179 - DNA, 75 bp, synthetic construct
  source 1..75: mol_type = other DNA
aaccccggcgtgaatgatgacgtcgtggccggggctctggaagccgtctgggaagaacagcagaccatcgcgcac

SEQ ID NO: 189180 - DNA, 75 bp, synthetic construct
  source 1..75: mol_type = other DNA
ccgattgaatattctgagacagaatcagaacgtcttgcggagctggaagctctggaagctaagtatgaaggcgag

SEQ ID NO: 189181 - DNA, 75 bp, synthetic construct
  source 1..75: mol_type = other DNA
accgctggggagcgtgggctgcagcagataacagtggtgtggactggcagccgatagcagcaggctttaaggggc

SEQ ID NO: 189182 - DNA, 75 bp, synthetic construct
  source 1..75: mol_type = other DNA
tcgcaaaaaaaagaagatgttctgatgggaaaattagaaaagatctacaaacagccatcggatttattgatggct

SEQ ID NO: 189183 - DNA, 75 bp, synthetic construct
  source 1..75: mol_type = other DNA
cggcaataaccctgcctggtcacagccttcgaaagagacattacagaataaaagcatcacccatattaatggctt

SEQ ID NO: 189184 - DNA, 75 bp, synthetic construct
  source 1..75: mol_type = other DNA
ctataattacgtacataatttatccaaaagtaatacaatagcgttagatggataccttggagatgtgctacagcg

SEQ ID NO: 189185 - DNA, 75 bp, synthetic construct
  source 1..75: mol_type = other DNA
ctgcagaaaagcaaaaatcagctttcttagttgaagcacatgcaacgatcagtctgtggcagacggagctacagt

SEQ ID NO: 189186 - DNA, 75 bp, synthetic construct
  source 1..75: mol_type = other DNA
aggctgaacagcagaaaaccgcattactggcggaagcgtctgcaatcatcgcgccattggctgatgctcaggctg

SEQ ID NO: 189187 - DNA, 75 bp, synthetic construct
  source 1..75: mol_type = other DNA
aaagaagttctggattcaaaaaataatattagcgatgtacaaaagcgtattattgctggggtgtttatttgtatc

SEQ ID NO: 189188 - DNA, 75 bp, synthetic construct
  source 1..75: mol_type = other DNA
tatgaaaccaatatttattccattcgctaatttattagggcgcattattactaactttcatccgaaatacaaaaa

SEQ ID NO: 189189 - DNA, 75 bp, synthetic construct
  source 1..75: mol_type = other DNA
acgaaaatggttatgaagtcatgaatactgaattaccattcgatgttattaatgaagccaaaaagttaattttaa

SEQ ID NO: 189190 - DNA, 75 bp, synthetic construct
  source 1..75: mol_type = other DNA
cggaacagttcgaaaagatatgcaaacagctatggggtttattgatgggtgcttgtcattttttttttatttaat

SEQ ID NO: 189191 - DNA, 75 bp, synthetic construct
  source 1..75: mol_type = other DNA
ttttcgggtggactgatcgatttcctcctcttcggcgtgctacagggggaagcgaaaaccaactggatgtacgtc

SEQ ID NO: 189192 - DNA, 75 bp, synthetic construct
  source 1..75: mol_type = other DNA
tggttgaatccggccagcctcagagtgaacgcgcagcggcagtcattgccgggctgggaggcaaagagaatctgg

SEQ ID NO: 189193 - DNA, 75 bp, synthetic construct
  source 1..75: mol_type = other DNA
tgagcactgtagatcaaaatactgatcgccagcttgcaggactaactctcgataaagtctttgaagataagctgt

SEQ ID NO: 189194 - DNA, 75 bp, synthetic construct
  source 1..75: mol_type = other DNA
ttttcccgaaaatgagcaggtaaaaaactcactcgcaggtcttgccaatgccatcgaaccgggtggcattctcat

SEQ ID NO: 189195 - DNA, 75 bp, synthetic construct
  source 1..75: mol_type = other DNA
gatggttgttattcgcgcgtcgccgaggggaaacaacccatatgtgtcgaatcctgcccgctgcgtgcacttgag

SEQ ID NO: 189196 - DNA, 75 bp, synthetic construct
  source 1..75: mol_type = other DNA
tggccgcatttccagaaactcatttttggactgggcggcctggtggatgcaacgggctatctggggacgctgttg

SEQ ID NO: 189197 - DNA, 75 bp, synthetic construct
  source 1..75: mol_type = other DNA
gatggcgtgtcagtgcgtaaaaccgccgagatctttaatgttgctccttcgacggtacagcgaattaagaaggaa

SEQ ID NO: 189198 - DNA, 75 bp, synthetic construct
  source 1..75: mol_type = other DNA
cattgcagacattacaagcgcgatgggaaaaatgatgcttactatgttgtcggcagtggcaacgtgtgaacgtga

SEQ ID NO: 189199 - DNA, 75 bp, synthetic construct
  source 1..75: mol_type = other DNA
gcagaaaaacctgacggcggcggcgtgcgaagagaaagtagtggccctgacgctggacgacaaacgccgcgagca

SEQ ID NO: 189200 - DNA, 75 bp, synthetic construct
  source 1..75: mol_type = other DNA
aatcgctgaaaaacgtcagcggctacaaaggcaccctgcgcaaggtgatcgcctggcaggagcaggaaaaaacgc

SEQ ID NO: 189201 - DNA, 75 bp, synthetic construct
  source 1..75: mol_type = other DNA
cgctggatgacaaacgccgcgagcagcaagaaagtgccacggcgaaagcgcaaaaagcggtggatgacatcgccg

SEQ ID NO: 189202 - DNA, 75 bp, synthetic construct
  source 1..75: mol_type = other DNA
gcaggaaagcgccacggcgaaagcgcaaaaagcggtggatgacattgccgttcagtgctggctacggcataaatt

SEQ ID NO: 189203 - DNA, 75 bp, synthetic construct
  source 1..75: mol_type = other DNA
tattgtcgggcaggttatcgagggagcgtatgaagtgctcggtgtctttgataaggtcactgataatatggaggc

SEQ ID NO: 189204 - DNA, 75 bp, synthetic construct
  source 1..75: mol_type = other DNA
taccaggacaagagtcattacaggtattgatggtgatataagaatcaacaaagcattatggatgattgccgaaca

SEQ ID NO: 189205 - DNA, 75 bp, synthetic construct
  source 1..75: mol_type = other DNA
actgttatgcgattagcttcccgttttggtcgatataattctattcgccgtgagcgcccgttaacggatgacgaa

SEQ ID NO: 189206 - DNA, 75 bp, synthetic construct
  source 1..75: mol_type = other DNA
ccaagaccggagcgaaacgcaccccacgtccagctaagtataaatacatcgataccgatggttctgaaaagacat

SEQ ID NO: 189207 - DNA, 75 bp, synthetic construct
  source 1..75: mol_type = other DNA
ggacaggtcagggccgaactcctcgtgctatcgctgctgcgctcgaagccggtaagacactggaagatttcgaga

SEQ ID NO: 189208 - DNA, 75 bp, synthetic construct
  source 1..75: mol_type = other DNA
acaggcattgacggtgatatccgaatcaacaaagcattatggatgattgccgaacagttcagggagtggaagtca

SEQ ID NO: 189209 - DNA, 75 bp, synthetic construct
  source 1..75: mol_type = other DNA
agtgacgagcaacatttatttggcagagctgcaatgatggccaggtaggaagatgaaaataaaacgccagtgacg

SEQ ID NO: 189210 - DNA, 75 bp, synthetic construct
  source 1..75: mol_type = other DNA
agtgacgaccaacatttatttggcagagctgcaatgatgggcaggtaggaagatgaaaataaaacgccagtgacg

SEQ ID NO: 189211 - DNA, 75 bp, synthetic construct
  source 1..75: mol_type = other DNA
gcgaaatccgtgttcctcataaaggagatattgtcgggcaggtcattgagggggcgtatgaggtcctgggtgtgt

SEQ ID NO: 189212 - DNA, 75 bp, synthetic construct
  source 1..75: mol_type = other DNA
tgttgacccaagaaaagcttatttttgttgcccagagactaaaggccctcgcgcagtcaggcctgacctattcaa

SEQ ID NO: 189213 - DNA, 75 bp, synthetic construct
  source 1..75: mol_type = other DNA
gaacgaatctgcattattgaagacacaggtgaactccagtgttcagccgaaaactacgttcagtatcacaccact

SEQ ID NO: 189214 - DNA, 75 bp, synthetic construct
  source 1..75: mol_type = other DNA
ggtataattccatccgtcgtgaacgtcctttaacggatgatgaattaatgcagttcgtgccttcggtattttccg

SEQ ID NO: 189215 - DNA, 75 bp, synthetic construct
  source 1..75: mol_type = other DNA
ctacgtgctggcagtcggtcccgtgccttatctttattacctccatcaaatgcgattactggatatcgcgctgat

SEQ ID NO: 189216 - DNA, 75 bp, synthetic construct
  source 1..75: mol_type = other DNA
attcaggcgcgcttcttgccgggttaggcggcatgaactccaacgctccaagagcaagtgatgcagacgctacgc

SEQ ID NO: 189217 - DNA, 75 bp, synthetic construct
  source 1..75: mol_type = other DNA
ggttccagtatcggtaaaacgcatgcaaaaccatgcaccttatgcatgcatggcttttctacgtaaaaaaggcgg

SEQ ID NO: 189218 - DNA, 75 bp, synthetic construct
  source 1..75: mol_type = other DNA
tgcctgtcagagtcgggttcgtgatttgggacgtcgcgaatacagtaaacatatgttacgtcttcgcagggaagg

SEQ ID NO: 189219 - DNA, 75 bp, synthetic construct
  source 1..75: mol_type = other DNA
tttatcaataaatctgttgacattattgttgttggcggtaactctgctataaatgctaatcttgaaaacccaaat

SEQ ID NO: 189220 - DNA, 75 bp, synthetic construct
  source 1..75: mol_type = other DNA
gttgatcaccttggaatggctgcacttggtccagaacaatattttcaggcacaagacagaatcgttggtcgtgag

SEQ ID NO: 189221 - DNA, 75 bp, synthetic construct
  source 1..75: mol_type = other DNA
gttggcttgcaggctttgcagggcatttcatctgtcatggatatgtataagcagatggatcagcagaagcggcag

SEQ ID NO: 189222 - DNA, 75 bp, synthetic construct
  source 1..75: mol_type = other DNA
gcagcggcgcaacgatttggcgatgggcatctcagtgagcgtatccactttgatgaaggttcgagctttgaacga

SEQ ID NO: 189223 - DNA, 75 bp, synthetic construct
  source 1..75: mol_type = other DNA
cacacgattggggtaagacgctgaaggagatggatttaaatctctctttcgatctgcgtgtcgagccactgagta

SEQ ID NO: 189224 - DNA, 75 bp, synthetic construct
  source 1..75: mol_type = other DNA
cggtatcgcccacgaactgcgaacgccgttagtgcgcctgcgttatcgcctggagatgagcgataacctgagcgc

SEQ ID NO: 189225 - DNA, 75 bp, synthetic construct
  source 1..75: mol_type = other DNA
caagagccattacaggtattgatggtgatataagaatcaacaaggcgttgtgggtgattgccgaacagttcagaa

SEQ ID NO: 189226 - DNA, 75 bp, synthetic construct
  source 1..75: mol_type = other DNA
cgtttttattacggtgcgcagctcaaacgggtagttattactataactggattgctattgggtattaagatgaaa

SEQ ID NO: 189227 - DNA, 75 bp, synthetic construct
  source 1..75: mol_type = other DNA
atgaaaaaactgtttatccagttttatcttttactgtttgtctgctttctggtgatgtctctactggttggcctg

SEQ ID NO: 189228 - DNA, 75 bp, synthetic construct
  source 1..75: mol_type = other DNA
caaaatgaacgtaggcgacgtgcaacgtttgtcggtcgccgtcgtggtgaattacaaaacgctgccggatggtaa

SEQ ID NO: 189229 - DNA, 75 bp, synthetic construct
  source 1..75: mol_type = other DNA
taagagcgatagaaaagctcaaaagggacatggggccaagtttgatggaagcgttggaagatcctgaaacgctgg

SEQ ID NO: 189230 - DNA, 75 bp, synthetic construct
  source 1..75: mol_type = other DNA
gaattttgttcaatatcacaccaccattaatgtcactatgactgacattcttcgtctgatcctgcgtatgcgacc

SEQ ID NO: 189231 - DNA, 75 bp, synthetic construct
  source 1..75: mol_type = other DNA
atgaatctcatgcggcgcttcgttcacgccagcttaatgagagcgagcaaagcggttccggttatccgggcggcg

SEQ ID NO: 189232 - DNA, 75 bp, synthetic construct
  source 1..75: mol_type = other DNA
atccccttctgcatcggtgacggtaaatctgttacccggccgcgcactcgatgaagggcaaattagcgccattgt

SEQ ID NO: 189233 - DNA, 75 bp, synthetic construct
  source 1..75: mol_type = other DNA
gcgaggcgatgggcttttctgaaaagcgcggcgattcactcaatgtcgtcaactcccccttcaacagcggtgacg

SEQ ID NO: 189234 - DNA, 75 bp, synthetic construct
  source 1..75: mol_type = other DNA
tatcgctggatcgcacgcgagctcggtatcagcaagaataccgtcgctgacatcgtgcaacgacacagagctaac

SEQ ID NO: 189235 - DNA, 75 bp, synthetic construct
  source 1..75: mol_type = other DNA
ctggataacatgattgcccaggggaacccgatgccggtgccttacggggaaatgctggttggctcccgccgtata

SEQ ID NO: 189236 - DNA, 75 bp, synthetic construct
  source 1..75: mol_type = other DNA
ccatgttcaacctgatgggaactttctatactcagcctggagtgaaaaggcgaaagttacagtgctgtgtaatgg

SEQ ID NO: 189237 - DNA, 75 bp, synthetic construct
  source 1..75: mol_type = other DNA
ttgacgcctggaacaccgggcatgagggcggcgcggcctcacttcacgccaacaacacgctttctgctctcacgc

SEQ ID NO: 189238 - DNA, 75 bp, synthetic construct
  source 1..75: mol_type = other DNA
gggggacgtggtgagtcaggtgattgaaggcgcgtatgaggtgctggggatttttgaccgggtggaggagaaacg

SEQ ID NO: 189239 - DNA, 75 bp, synthetic construct
  source 1..75: mol_type = other DNA
acggtccactattaccggctgcgggattacgccctgcagcatccggaatgcagcgccattatgcgcatcattgac

SEQ ID NO: 189240 - DNA, 75 bp, synthetic construct
  source 1..75: mol_type = other DNA
aatctcttgagtggcttaatcgcctgcgtgcgaatccgaaaattccattgattgttgccggttccgcagcagtgg

SEQ ID NO: 189241 - DNA, 75 bp, synthetic construct
  source 1..75: mol_type = other DNA
gcaccggggaaatgtggtggacatagttattgaaggggcttacgaggtggtgggcgtgtttgaccggattgagga

SEQ ID NO: 189242 - DNA, 75 bp, synthetic construct
  source 1..75: mol_type = other DNA
gcaccggggaaatgtggtggacaaagtgattgaaggggcttacgaggtggtgggcgtgtttgaccggattgagga

SEQ ID NO: 189243 - DNA, 75 bp, synthetic construct
  source 1..75: mol_type = other DNA
gcaccggggaaatgtggtggaaacagtcattgaaggggcttacgaggtggtgggcgtgtttgaccggattgagga

SEQ ID NO: 189244 - DNA, 75 bp, synthetic construct
  source 1..75: mol_type = other DNA
gcgaaatccgtgttccacataaaggtgatattgtcgggcaggttatcgagggagcgtatgaagtgctcggtgtct

SEQ ID NO: 189245 - DNA, 75 bp, synthetic construct
  source 1..75: mol_type = other DNA
tctgcacaaatggcctggtgtgcggaaataattttggcgaaatccgcgttccacataaaggtgatattgtcgggc

SEQ ID NO: 189246 - DNA, 75 bp, synthetic construct
  source 1..75: mol_type = other DNA
gcaccggggaaatgtggtggacagagtaattgaaggggcttacgaggtggtgggcgtgtttgaccggattgagga

SEQ ID NO: 189247 - DNA, 75 bp, synthetic construct
  source 1..75: mol_type = other DNA
tcgcctattgtcggcaacggcaatattcacgcccaggttacggcgcaactggacttcgccagtaaggagcaaacc

SEQ ID NO: 189248 - DNA, 75 bp, synthetic construct
  source 1..75: mol_type = other DNA
ttcacgctcaggtgacggcacaactggatttcgccagtaaagagcaaacggaagagcagtatcgccccaatggca

SEQ ID NO: 189249 - DNA, 75 bp, synthetic construct
  source 1..75: mol_type = other DNA
ttgttggtaacggtaatattcacgcccaggtcacggcgcagctggacttcgccagtaaagaacaaacggaagaac

SEQ ID NO: 189250 - DNA, 75 bp, synthetic construct
  source 1..75: mol_type = other DNA
cggctcgcgttttgcaggccaaatcccgccgcttgttgctggaccagcatttgcaatccgtaaaaaagcctcccg

SEQ ID NO: 189251 - DNA, 75 bp, synthetic construct
  source 1..75: mol_type = other DNA
gaagggcatattaacgggcaggaagttcctgaaattatcctgcttaattcacatgatggttcatccagttatcag

SEQ ID NO: 189252 - DNA, 75 bp, synthetic construct
  source 1..75: mol_type = other DNA
attgaagatctgacccgcgaggcgatgggcttttctgaaaaacgcggtgactcgctcaatgtcgttaactcgccg

SEQ ID NO: 189253 - DNA, 75 bp, synthetic construct
  source 1..75: mol_type = other DNA
tgatattcctgcttcagttatcggcgatattcagtggaaaattataaccgattttgggggcgagagtaagcctta

SEQ ID NO: 189254 - DNA, 75 bp, synthetic construct
  source 1..75: mol_type = other DNA
tgctggataatgacgtacttagtgtaatcgcactcaatgatcaaagtatcattgcgcaggtcgcgattaatccgt

SEQ ID NO: 189255 - DNA, 75 bp, synthetic construct
  source 1..75: mol_type = other DNA
cactgacccgcgcgggcgttcttgagcgttcgcgggatgtggacaccaccgacaaaggtgatcgccgggccgatg

SEQ ID NO: 189256 - DNA, 75 bp, synthetic construct
  source 1..75: mol_type = other DNA
cgatctctatgatacatttattaaattaccaccttttgaagagcagaaacgaattgtggatcttctcgataaagc

SEQ ID NO: 189257 - DNA, 75 bp, synthetic construct
  source 1..75: mol_type = other DNA
gctggcaagtgatggcacccgctttgccaccggtcaggccgtggtgacgccatccgtgatcaaaacggagctgct

SEQ ID NO: 189258 - DNA, 75 bp, synthetic construct
  source 1..75: mol_type = other DNA
ctggacacctttaaaaagaatctgctcgtggagcgcaacacaaaagaccgtaaccgtctggatgtgatgtgtaca

SEQ ID NO: 189259 - DNA, 75 bp, synthetic construct
  source 1..75: mol_type = other DNA
acgggcccggcctgtgttgaagcctgtccgacaaaagcgttgcagtgtatggatgttgagaaagtgcagcggaat

SEQ ID NO: 189260 - DNA, 75 bp, synthetic construct
  source 1..75: mol_type = other DNA
cgacgaaatgtatcggttgccgtacctgtgaagtggcttgcgcagtgtcgcatcaggattgcgctgcgttgtcac

SEQ ID NO: 189261 - DNA, 75 bp, synthetic construct
  source 1..75: mol_type = other DNA
gcccgacaaaggcgttgcagtgcatggatgtcgagaaagtgcagcggcagcggcatcggctacggcagcagcctg

SEQ ID NO: 189262 - DNA, 75 bp, synthetic construct
  source 1..75: mol_type = other DNA
atgagcatggtagccagaccccgtgtgaacgacgccacggatgacacgacagacaccgacgacggagaagcgcgc

SEQ ID NO: 189263 - DNA, 75 bp, synthetic construct
  source 1..75: mol_type = other DNA
cgacgaaatgtattggttgccgtacctgtgaagtggcctgcgccgtgtcgcatcaggaaaatcaggattgtgcgg

SEQ ID NO: 189264 - DNA, 75 bp, synthetic construct
  source 1..75: mol_type = other DNA
cgcgtacaaaggcgagggcgattaagtgcgatctctgctggcatcgggcgacagggccggcctgtgttgaagcct

SEQ ID NO: 189265 - DNA, 75 bp, synthetic construct
  source 1..75: mol_type = other DNA
tgctcgttatgggccacctgtgtttcaaatacttagaggtttatccggcagctacaatgtggctttaatgaaagc

SEQ ID NO: 189266 - DNA, 75 bp, synthetic construct
  source 1..75: mol_type = other DNA
tcccgagcaggatactgttgtaggagaagatggacatattggtcatagcgctatccttcacggctgcattatccg

SEQ ID NO: 189267 - DNA, 75 bp, synthetic construct
  source 1..75: mol_type = other DNA
gcagacgttgcatcaagttgagccattgcgggaagttgaatccggcaggaaacgcctggtatttgatgagaatct

SEQ ID NO: 189268 - DNA, 75 bp, synthetic construct
  source 1..75: mol_type = other DNA
ttgcaagggaagcgaagtctcatgcaataacagatgaagagttgtgccaggccattttagaaacagatcagggta

SEQ ID NO: 189269 - DNA, 75 bp, synthetic construct
  source 1..75: mol_type = other DNA
aagctcccgaagcggtagttgaggcatggctaaatgaagattattcaaccttactaagtgaatttaaggtgtttc

SEQ ID NO: 189270 - DNA, 75 bp, synthetic construct
  source 1..75: mol_type = other DNA
aaaaccagaaattgcacatgaaattgcccagcgtctactggggcaaaaaaaattaccctcgcttgagtggttaaa

SEQ ID NO: 189271 - DNA, 75 bp, synthetic construct
  source 1..75: mol_type = other DNA
acctcggtgaaatgctccgcttccctcaggaagaggcgctgtatccgggattattgcaggtgaaagatgcctgta

SEQ ID NO: 189272 - DNA, 75 bp, synthetic construct
  source 1..75: mol_type = other DNA
agcaagcagcggtgaaggcgctgttcttacgcgagataaagacgcgttttggtaagtatcggttagggtacttgt

SEQ ID NO: 189273 - DNA, 75 bp, synthetic construct
  source 1..75: mol_type = other DNA
taatatttagcttagctactctattcattagtctagcattatatatatactatgaagaggatatgttgacctcat

SEQ ID NO: 189274 - DNA, 75 bp, synthetic construct
  source 1..75: mol_type = other DNA
agctatatcatgcatcgcactatgccggatatttcattccctattttccttattaatgggctgattccatttttt

SEQ ID NO: 189275 - DNA, 75 bp, synthetic construct
  source 1..75: mol_type = other DNA
agcaagcagcaataaaagctttgttgatgcgagagataaagacacgttttggaaaatatagacttggatatctat

SEQ ID NO: 189276 - DNA, 75 bp, synthetic construct
  source 1..75: mol_type = other DNA
cctattttattaaaaccattatattttgtgtcctgtataatgtttccattgcattcaatacctagagaatattgg

SEQ ID NO: 189277 - DNA, 75 bp, synthetic construct
  source 1..75: mol_type = other DNA
ggtttcatcatgcatagaactatgccaggcatatcattcccagtctttttgctaaatggtattattccattcttt

SEQ ID NO: 189278 - DNA, 75 bp, synthetic construct
  source 1..75: mol_type = other DNA
ggtgaagcgtggtgcggttccgttcagcgctgttagcgtactgcgcgattttcgtaacgttttttgcaaccggct

SEQ ID NO: 189279 - DNA, 75 bp, synthetic construct
  source 1..75: mol_type = other DNA
gtgcaattcagggtaccagtatctgttttattgctaccgttggttatgtcacggtgcaggaagcctttgggcaga

SEQ ID NO: 189280 - DNA, 75 bp, synthetic construct
  source 1..75: mol_type = other DNA
tgcaccatgacggcatggcctggtttagcctgccgcagggcaaagagaacccggcacacggtctgctggcgctca

SEQ ID NO: 189281 - DNA, 75 bp, synthetic construct
  source 1..75: mol_type = other DNA
ctctcgatagccttcatccacacaaggcctcagcgcctttgaggcttgtcatccaccagccaggtgggattggtg

SEQ ID NO: 189282 - DNA, 75 bp, synthetic construct
  source 1..75: mol_type = other DNA
cctttccgttcgtccggcacatttagcacgtttacagttactgcatgatgaaggtcgtttgttgacagccggtcc

SEQ ID NO: 189283 - DNA, 75 bp, synthetic construct
  source 1..75: mol_type = other DNA
tcgcctggacacaggttccggtgttcggcgcggtgattgtcgcgaatgccatcgtggcgcgtttcgttaaagatc

SEQ ID NO: 189284 - DNA, 75 bp, synthetic construct
  source 1..75: mol_type = other DNA
ttgttatgccacgttttttttgcccgccatgccgccacgctgtttttcccgatggcgttgattttgtatgacttt

SEQ ID NO: 189285 - DNA, 75 bp, synthetic construct
  source 1..75: mol_type = other DNA
gctggggccgctttccgacagaattggccgcaggccggtgctgattaccggggcgctaatatttacccttgcctg

SEQ ID NO: 189286 - DNA, 75 bp, synthetic construct
  source 1..75: mol_type = other DNA
ggctgtggtcggtgctgggcaccagtttgtatgctttcgggattggtttgatcttcccgaccttattccgcttta

SEQ ID NO: 189287 - DNA, 75 bp, synthetic construct
  source 1..75: mol_type = other DNA
agtaatgcaggtgtagatgccggagaaagcgggcgaaatatatcatttagatggcgcaatgcttttaatattgtt

SEQ ID NO: 189288 - DNA, 75 bp, synthetic construct
  source 1..75: mol_type = other DNA
gttgccaatggcaaaatttatatcggtaaaattgacactgacccggtaaatccagaaaaccagattcaggtttat

SEQ ID NO: 189289 - DNA, 75 bp, synthetic construct
  source 1..75: mol_type = other DNA
ctatttgtcacacaacggcctgttgggccaacctggtcggataaagaaagagttcgtattgttgagtttaatctt

SEQ ID NO: 189290 - DNA, 75 bp, synthetic construct
  source 1..75: mol_type = other DNA
gagccgaagcacaaccggaacctgcttccggagcagaaacacaaccggagggtaccccggagccggaaccggcga

SEQ ID NO: 189291 - DNA, 75 bp, synthetic construct
  source 1..75: mol_type = other DNA
agtcctggatgactacttcaccggagaactccagcatcgcaacagcttaagtgcgcagctcaatatgaagtgtca

SEQ ID NO: 189292 - DNA, 75 bp, synthetic construct
  source 1..75: mol_type = other DNA
tatgggggagctttatgtggaagttttggaggagatttttcgtactcatctgacattaggaaaagatggtgtcta

SEQ ID NO: 189293 - DNA, 75 bp, synthetic construct
  source 1..75: mol_type = other DNA
ctaatgctcatatagcctttaatgaatatcttcttcgttcaaatctgccacaatcgcatcaaaatattagaaaaa

SEQ ID NO: 189294 - DNA, 75 bp, synthetic construct
  source 1..75: mol_type = other DNA
ggtgaacggagagagtgtacacgtccaccgctaccgcagggccgtcttcgcactcacccgcgcgtttgtactgga

SEQ ID NO: 189295 - DNA, 75 bp, synthetic construct
  source 1..75: mol_type = other DNA
ccggccccgcagaggacgacatcaccgataccgatgatggcgacactcgcatttcagcgggtgcattctggccgg

SEQ ID NO: 189296 - DNA, 75 bp, synthetic construct
  source 1..75: mol_type = other DNA
atgtcatgagtttgaccagaaaagacatggcgagcttctgcggacaagggctggcagcatggcgctatacgaagc

SEQ ID NO: 189297 - DNA, 75 bp, synthetic construct
  source 1..75: mol_type = other DNA
gatgtcctacaaaggaacaccttcttccacactttctggaacatttaggtaacaaccatctggatattggcgttg

SEQ ID NO: 189298 - DNA, 75 bp, synthetic construct
  source 1..75: mol_type = other DNA
gctatttacacagagatataaaaccatttaatgtcttgcgatttagcgacggaacatacaaggtgtctgattttg

SEQ ID NO: 189299 - DNA, 75 bp, synthetic construct
  source 1..75: mol_type = other DNA
acagcttaccgcaatgtgtttactgaagatgaccagggaacatattcccggctggttatccgtaatgctgaaggt

SEQ ID NO: 189300 - DNA, 75 bp, synthetic construct
  source 1..75: mol_type = other DNA
acaaggaatttataatcccgcagagaaaactgccatacttgagaaagcacttggtactacacgagatttttttca

SEQ ID NO: 189301 - DNA, 75 bp, synthetic construct
  source 1..75: mol_type = other DNA
aacgttcaggtatacatgataccgtgaaaagccttagtgaaaatctgagaaaatacattgaggcacaatatcata

SEQ ID NO: 189302 - DNA, 75 bp, synthetic construct
  source 1..75: mol_type = other DNA
catttccatgttttaccttcttcactgcctgcctggaaatatatctacaaaaagctgtgtaatacgcaatgcagc

SEQ ID NO: 189303 - DNA, 75 bp, synthetic construct
  source 1..75: mol_type = other DNA
catcgcgctggatgatttcggtactggttactcagggctttcttatctgcatgacttgcatattgattatatcaa

SEQ ID NO: 189304 - DNA, 75 bp, synthetic construct
  source 1..75: mol_type = other DNA
ggaaagcgagtttctgccggacagcccgaaccaccctgaatggccgcaaccggactgcttcctgcgtcctggcga

SEQ ID NO: 189305 - DNA, 75 bp, synthetic construct
  source 1..75: mol_type = other DNA
agtctgacgtgcgtaatcacaagctgcagattctggctgacgaatatctgccggtagatgaaagcggtattccgc

SEQ ID NO: 189306 - DNA, 75 bp, synthetic construct
  source 1..75: mol_type = other DNA
tattttagtatatgcaaagcaacggaagaattcaaaaaatgattcaaatggttggaacatagattttctaccaag

SEQ ID NO: 189307 - DNA, 75 bp, synthetic construct
  source 1..75: mol_type = other DNA
gttgataatttaaaaaaagtttgctcggaaatctttggtgaagagaactttgttgctaatattgtatggcaaaaa

SEQ ID NO: 189308 - DNA, 75 bp, synthetic construct
  source 1..75: mol_type = other DNA
ttgatatttattctgttaatcgcctgcgccgctgccttcctgcttgataggtatttcaataaaagcgcaacgcct

SEQ ID NO: 189309 - DNA, 75 bp, synthetic construct
  source 1..75: mol_type = other DNA
atccacccacagcaacatctggcggactacagaggtatcctgcaggccgatgcatatgcgggttacaatgctctt

SEQ ID NO: 189310 - DNA, 75 bp, synthetic construct
  source 1..75: mol_type = other DNA
ctggtaaaaccagaactttagttaatgttctggaaatgattttgaagagtcactcagaagagttcaggctaagag

SEQ ID NO: 189311 - DNA, 75 bp, synthetic construct
  source 1..75: mol_type = other DNA
ggcagttatgcctggctatatcagcgaaggcgtgagtctgaactaccttgcaatgttcactctggtcaccctgtt

SEQ ID NO: 189312 - DNA, 75 bp, synthetic construct
  source 1..75: mol_type = other DNA
atttctgggggcctctattggccgttatgccaaccgtatcgctaatagccgctacacctttgacggcgaaaccgt

SEQ ID NO: 189313 - DNA, 75 bp, synthetic construct
  source 1..75: mol_type = other DNA
gacaggacctgaacctggtgcttgaggtgaccgaacgcgaacagctacatgtggatgaaagcatggtacaacgcc

SEQ ID NO: 189314 - DNA, 75 bp, synthetic construct
  source 1..75: mol_type = other DNA
ttaataaatatatgaaaaaggatagtactcctgaagaaacccttcgcagggcgattgctaatggtgaaattgtgc

SEQ ID NO: 189315 - DNA, 75 bp, synthetic construct
  source 1..75: mol_type = other DNA
agatcagaaagcctttaacctactggtagtgcgctatcagcataaagtggcgagtctggtttcccgctatgtgcc

SEQ ID NO: 189316 - DNA, 75 bp, synthetic construct
  source 1..75: mol_type = other DNA
atgactacagaaacgtatagcccggacgattttattcttgggcctgaccttgttgtcacgaccgtcggtcatttt

SEQ ID NO: 189317 - DNA, 75 bp, synthetic construct
  source 1..75: mol_type = other DNA
tctgccgcattacgcctgggattacaggcaagcgaaaccgtgctggtgcactacgactggccgggcaatattcgt

SEQ ID NO: 189318 - DNA, 75 bp, synthetic construct
  source 1..75: mol_type = other DNA
gcaattgtctggcggctgtactgctcgctttcgcaacttgagcaagcaccaccgcaaggtacgctggcctcttaa

SEQ ID NO: 189319 - DNA, 75 bp, synthetic construct
  source 1..75: mol_type = other DNA
ggttcagtaggaaaggccattgggttgacggcaacagcggtaaacactggtgcaagttctgcagactgctcgtac

SEQ ID NO: 189320 - DNA, 75 bp, synthetic construct
  source 1..75: mol_type = other DNA
tgttgtcacgaccgtcggtcattttcagggcgggatcaacgtaccccggctgacaccgattatgctcgacgctac

SEQ ID NO: 189321 - DNA, 75 bp, synthetic construct
  source 1..75: mol_type = other DNA
cctagctacattagtttgggatagaaatagaaaaaatgacgcaaaatatttttccgtcggacatgaatacatgtt

SEQ ID NO: 189322 - DNA, 75 bp, synthetic construct
  source 1..75: mol_type = other DNA
atccagaatggaaaggtgatgttggctttcgtgtgtttaaacttgatacatctaacatccgtccgtgggaagcga

SEQ ID NO: 189323 - DNA, 75 bp, synthetic construct
  source 1..75: mol_type = other DNA
tagccgctatcatggattgtccggtgggtacggtgcgttcacgtatcttccgtgcgagggaagctattgataata

SEQ ID NO: 189324 - DNA, 75 bp, synthetic construct
  source 1..75: mol_type = other DNA
acctgttttatcggctgagcattttacgcctgcaactgccaccactgcgtgagcgggtggcggatattctgccgc

SEQ ID NO: 189325 - DNA, 75 bp, synthetic construct
  source 1..75: mol_type = other DNA
tcggcggcctatgcccttgccagcgccgccgaccggatcctggtcccccgcacgggcggcgtgggatccgtcggt

SEQ ID NO: 189326 - DNA, 75 bp, synthetic construct
  source 1..75: mol_type = other DNA
ggttctgtgggtgtgatcaccatgcaccttgactggacgcagcggattaaagatgacggtcttaaagttacgatc

SEQ ID NO: 189327 - DNA, 75 bp, synthetic construct
  source 1..75: mol_type = other DNA
caccgtggcgctggtggtctgttccgacatgggcttgaagtggccttctgggcagctcaggcatctgagtcagtt

SEQ ID NO: 189328 - DNA, 75 bp, synthetic construct
  source 1..75: mol_type = other DNA
tccctcacgtactggaaatatcgccaactgatgccgccgcttttggtcagctttttgccgactacgaactgttac

SEQ ID NO: 189329 - DNA, 75 bp, synthetic construct
  source 1..75: mol_type = other DNA
cagacgttattttaccgtggctggcaaaagatattgctgtcgtttttccgcttgaagtcgtacccaccaccttaa

SEQ ID NO: 189330 - DNA, 75 bp, synthetic construct
  source 1..75: mol_type = other DNA
aacaggcttgttttgccggtgattcagcggtatgccgcgtttgttcacctgctacctgcttccgaatcacaccac

SEQ ID NO: 189331 - DNA, 75 bp, synthetic construct
  source 1..75: mol_type = other DNA
cacctcagatgctgtcgaggagaaaccagagcaaaaagatgctggatcaacggaatcatctaagcctgacgctgg

SEQ ID NO: 189332 - DNA, 75 bp, synthetic construct
  source 1..75: mol_type = other DNA
tgagattgagttcgttgatcctgaggaagtcgatgacgaccaagaggaagatgtgtcagctctgaacgatgacat

SEQ ID NO: 189333 - DNA, 75 bp, synthetic construct
  source 1..75: mol_type = other DNA
gccagaaaactttcagctcttcctggttgaacatccactggtacgccacttaacccgccgtctgatttggggcgt

SEQ ID NO: 189334 - DNA, 75 bp, synthetic construct
  source 1..75: mol_type = other DNA
aacacgccattaccggcctgctgcctgctgcgctcggcaaagccgatgaagctcaggataacgcccgcgctgcct

SEQ ID NO: 189335 - DNA, 75 bp, synthetic construct
  source 1..75: mol_type = other DNA
gtaattcaacacaggaagcgcagttctccgtgctcgacgacatcaccgccagcgagctaattaacgatatcgaag

SEQ ID NO: 189336 - DNA, 75 bp, synthetic construct
  source 1..75: mol_type = other DNA
gatgaaaccttaaaaccgtttgtgcgtgacgcttccggcagccgcctgaaagacctgcccaaaccgaacaaaagc

SEQ ID NO: 189337 - DNA, 75 bp, synthetic construct
  source 1..75: mol_type = other DNA
ggcactcctatcaacgggaatggcagctttacatgttagccgccctgcctatcgaaaaaacagcgcaggcgtgga

SEQ ID NO: 189338 - DNA, 75 bp, synthetic construct
  source 1..75: mol_type = other DNA
ctacctggcacgtctgggtttcaatcgctggaataatggccagtatatgaaagcgtctgatgctgttgtagaact

SEQ ID NO: 189339 - DNA, 75 bp, synthetic construct
  source 1..75: mol_type = other DNA
aaccagcgttaatcagcctgtgaccaagctgatgcttcgtgctgaccaagagagcgtctctcgggaccttcgcca

SEQ ID NO: 189340 - DNA, 75 bp, synthetic construct
  source 1..75: mol_type = other DNA
gaaaaagaatagccgtgataacatacaccaatgcggcttgtgatgaaataaaaagaagagttaaattcaacaaat

SEQ ID NO: 189341 - DNA, 75 bp, synthetic construct
  source 1..75: mol_type = other DNA
tctagaatttcctcgtgttctagttttaattgatgattctgaggctaaaggttttatgtttagttatgacaaact

SEQ ID NO: 189342 - DNA, 75 bp, synthetic construct
  source 1..75: mol_type = other DNA
cttggtgaggcgcagttgcaactcacctcaatggccggagagacagcgccgaaaacatcagactctcccgtccgc

SEQ ID NO: 189343 - DNA, 75 bp, synthetic construct
  source 1..75: mol_type = other DNA
ggggctgtttaattatcgcccagtaaaacccatcgatacgatcattgcgcgcgccctgcttgagacgctgattta

SEQ ID NO: 189344 - DNA, 75 bp, synthetic construct
  source 1..75: mol_type = other DNA
ctcattgtctggatggcaggcgaatatttcgagataacaaattttttacaacttgtggctacctggagcctgctg

SEQ ID NO: 189345 - DNA, 75 bp, synthetic construct
  source 1..75: mol_type = other DNA
agaaagtcaccgtagaggcattatttctacgagaaatacgaacacgctttggtaagttccgtctgggatatttgt

SEQ ID NO: 189346 - DNA, 75 bp, synthetic construct
  source 1..75: mol_type = other DNA
ctgagccgggcacagagacggcctttgctcaagaaacgtcagggaaaactgtatttagaggtaaatgaaacatga

SEQ ID NO: 189347 - DNA, 75 bp, synthetic construct
  source 1..75: mol_type = other DNA
gcaaacacatcctctgcgggatgctgagccgggcacagagacggcctttgctcaagaaacgtcagggaaaactgt

SEQ ID NO: 189348 - DNA, 75 bp, synthetic construct
  source 1..75: mol_type = other DNA
ccggtattccacgagaccctgacacgctggctgacattctcatcgagcgtggttttgctgtaccaaacacggtgc

SEQ ID NO: 189349 - DNA, 75 bp, synthetic construct
  source 1..75: mol_type = other DNA
tatcaaggagcgttttagcaaatctcctttgtctcgtttaggaaatgaatcttcttactttgtacgagcccatga

SEQ ID NO: 189350 - DNA, 75 bp, synthetic construct
  source 1..75: mol_type = other DNA
cgtccagttgatgcagtcgttgtacgactggatacagttgcagaggaaaacgctgtcgaaacatgcggagatggc

SEQ ID NO: 189351 - DNA, 75 bp, synthetic construct
  source 1..75: mol_type = other DNA
catattccttcctgggctgccctggtgattgagcaggcctggttaagtcaacaggacgacgtacaggccatcgcc

SEQ ID NO: 189352 - DNA, 75 bp, synthetic construct
  source 1..75: mol_type = other DNA
cggggatcattaatgtggtccgtgattttaatgccgatgtcagtctggcccctgctgccgtcagtctctatctcg

SEQ ID NO: 189353 - DNA, 75 bp, synthetic construct
  source 1..75: mol_type = other DNA
cgaccgtaacggtctgcgtccggcacgctacgtcatcaccaaagataaactgatcacctgcgcctctgaagtcgg

SEQ ID NO: 189354 - DNA, 75 bp, synthetic construct
  source 1..75: mol_type = other DNA
cgatggcggttggcgcgatccagacccgtctggtcgagcaaagcctgcgttgcgatgccaacatcatcgtcgaaa

SEQ ID NO: 189355 - DNA, 75 bp, synthetic construct
  source 1..75: mol_type = other DNA
cgtgaaacccgcgagctgatggcgcaactgggcgtaacgcgcctggtggatctgattggccgtaccgacctgctc

SEQ ID NO: 189356 - DNA, 75 bp, synthetic construct
  source 1..75: mol_type = other DNA
gtgaagacccggcgcgctatggcactaacaaagtgtcgcgcatcaagcaggtggcgtccggtcgcttcggcgtta

SEQ ID NO: 189357 - DNA, 75 bp, synthetic construct
  source 1..75: mol_type = other DNA
gcgacggctatttatccgtaccttgcctatgaaacactgggtcgcctggttgacacccacgcgattgccaaaaat

SEQ ID NO: 189358 - DNA, 75 bp, synthetic construct
  source 1..75: mol_type = other DNA
aatatctgcgtatttgccacctgaacaactgcgcgactggcgtagcaactcaggatgacaaattacgtaagaacc

SEQ ID NO: 189359 - DNA, 75 bp, synthetic construct
  source 1..75: mol_type = other DNA
tatccgctgcgccgcctggcacaaaagcgggtgggctgtgtatttgccactcggggagacttgagcttttttgcc

SEQ ID NO: 189360 - DNA, 75 bp, synthetic construct
  source 1..75: mol_type = other DNA
acgctggatgtcatgtgggatcattttctttcccgccactggtcgcagctgtcacccaattttccgctagaggaa

SEQ ID NO: 189361 - DNA, 75 bp, synthetic construct
  source 1..75: mol_type = other DNA
atgaattttttagctcacctgcatttagcccatctcgctgaaagctcgctttctggcaacttactggctgatttt

SEQ ID NO: 189362 - DNA, 75 bp, synthetic construct
  source 1..75: mol_type = other DNA
atgacacgcaaaccccgtcgccacgctctttctgtgcccgtgcgcagcggttcggaagtggggttcccgcagagc

SEQ ID NO: 189363 - DNA, 75 bp, synthetic construct
  source 1..75: mol_type = other DNA
atggtgatacgcaaaaagaagtgcagggactgtggaaacgcgattactcataatactgtgtgttgcccgtattgt

SEQ ID NO: 189364 - DNA, 75 bp, synthetic construct
  source 1..75: mol_type = other DNA
aaaacgcatccaaaggtgcggggcgaactgctctatttcccgacgcggatggacccttctctcaatatgatggcg

SEQ ID NO: 189365 - DNA, 75 bp, synthetic construct
  source 1..75: mol_type = other DNA
ccgggcgataaagtcactccttacatcgccaaactgcgctattccgtacccggcgtaacgttgatctccccgccg

SEQ ID NO: 189366 - DNA, 75 bp, synthetic construct
  source 1..75: mol_type = other DNA
ggaactgtacctgaccggtgatgccaacgactatgtcggtaaaggcatggcgggcggcttaatcgccattcgtcc

SEQ ID NO: 189367 - DNA, 75 bp, synthetic construct
  source 1..75: mol_type = other DNA
cgtgcatggcggcgaataccacgcctacaacccggacgtcgtgcgcacactgcaacaggcagttcagagtggcga

SEQ ID NO: 189368 - DNA, 75 bp, synthetic construct
  source 1..75: mol_type = other DNA
tgtgcacggcggcgaataccacgcctacaacccggacgtggtgcgcacgctgcaacaggcggtacagagcggcga

SEQ ID NO: 189369 - DNA, 75 bp, synthetic construct
  source 1..75: mol_type = other DNA
tgacggcggcaccggcgcaagtccgctttcatcggtgaaatacgcaggctgtccgtgggagctggggcttgttga

SEQ ID NO: 189370 - DNA, 75 bp, synthetic construct
  source 1..75: mol_type = other DNA
agcaactcaggatgacaaactgcgtaagaatcactatcacggcctgccattcaaggtgacgaattactttgagtt

SEQ ID NO: 189371 - DNA, 75 bp, synthetic construct
  source 1..75: mol_type = other DNA
ttcagattaaagtcgctcagggcgcgaaaccgggtgaaggtggtcagttacctggcgataaagtcacgccgtata

SEQ ID NO: 189372 - DNA, 75 bp, synthetic construct
  source 1..75: mol_type = other DNA
gcaggttgatggcggcctgaaaaccggcgttgatatcatcaaagcggcgattctcggcgcagaaagcttcggctt

SEQ ID NO: 189373 - DNA, 75 bp, synthetic construct
  source 1..75: mol_type = other DNA
aaaacaacccgccgtttgataacggcctgctgaacgcgcagttgctgcaacaggcaaaaccgtttgtcgatgaac

SEQ ID NO: 189374 - DNA, 75 bp, synthetic construct
  source 1..75: mol_type = other DNA
aatatctgcgtatttgccacctgaacaactgcgccacgggtgtagcaactcaggatgacaaactgcgtaagaatc

SEQ ID NO: 189375 - DNA, 75 bp, synthetic construct
  source 1..75: mol_type = other DNA
ggcccgatggtggcgctcggttgtaaatacttgcgaatttgtcatctgaacaactgcgcgacgggcgtggcaact

SEQ ID NO: 189376 - DNA, 75 bp, synthetic construct
  source 1..75: mol_type = other DNA
ccgcaccacgatatctactctatcgaagacttagcgcagctcattttcgacctcaagcaggttaacccgaaagcg

SEQ ID NO: 189377 - DNA, 75 bp, synthetic construct
  source 1..75: mol_type = other DNA
cggacctgcgtctggaatcggccatttgcctgttccaccagcgcttctccactaacaccgtaccgcgctggccgc

SEQ ID NO: 189378 - DNA, 75 bp, synthetic construct
  source 1..75: mol_type = other DNA
agaacaatttcaacgccgtccgctgttcgcactaccccaacgcgccgcgctggtatgaactttgcgaccgttacg

SEQ ID NO: 189379 - DNA, 75 bp, synthetic construct
  source 1..75: mol_type = other DNA
agtacttgaagctttttattcaaatatatatcaattaattatagggaaattttttacaccacagcttgtagggca

SEQ ID NO: 189380 - DNA, 75 bp, synthetic construct
  source 1..75: mol_type = other DNA
ttttacactcatatctttcgtggtttttaaatggattatttagccagaaagtatcaacgatcacaataaggaagc

SEQ ID NO: 189381 - DNA, 75 bp, synthetic construct
  source 1..75: mol_type = other DNA
aaggcatgctgggtgccggcactggtatggatgcgaacggcggcaacggcaacatgtcttccgaagagcaggctc

SEQ ID NO: 189382 - DNA, 75 bp, synthetic construct
  source 1..75: mol_type = other DNA
ggctgatgattgctctgcctgttatggcaattgcggcatgttcttccaacaagaacgccagcaatgacggcagcg

SEQ ID NO: 189383 - DNA, 75 bp, synthetic construct
  source 1..75: mol_type = other DNA
gacagcttcaggttgaggatattattgatgcaattaaaggcgttaataatactaatgtcataaaagattatgtgc

SEQ ID NO: 189384 - DNA, 75 bp, synthetic construct
  source 1..75: mol_type = other DNA
gtgatattacggcggttgatcgaatgccggatgccgtcgagcttgcaaagcgcaatgcccggcatctgacgatca

SEQ ID NO: 189385 - DNA, 75 bp, synthetic construct
  source 1..75: mol_type = other DNA
gattgcgaaggttttttcgttgctcgtctgcgtaaaactcaggcgattcccgcgttgcctgcgccgaaatataaa

SEQ ID NO: 189386 - DNA, 75 bp, synthetic construct
  source 1..75: mol_type = other DNA
caacaaaggttatcgctggcagcatgaagcggttattgctcttgcctcacccgataatatgaatgcattcgagct

SEQ ID NO: 189387 - DNA, 75 bp, synthetic construct
  source 1..75: mol_type = other DNA
ataggtttaatctcgaagccattagtctctgtattattaggaagtgagtggaaatttacatctgatattctgttt

SEQ ID NO: 189388 - DNA, 75 bp, synthetic construct
  source 1..75: mol_type = other DNA
cgtaatgcgcagcatctggcgattaaaaatatccatatcctgcaaagcgactggtttagtgcgcttggcgagcag

SEQ ID NO: 189389 - DNA, 75 bp, synthetic construct
  source 1..75: mol_type = other DNA
cagtgtgagcaactcgacgtactgctggcgcgtcgtcgtgcaggtgaacctattgctcatttaaccggtgtgcgt

SEQ ID NO: 189390 - DNA, 75 bp, synthetic construct
  source 1..75: mol_type = other DNA
aagaaaagcagaagccctggtcgttgtcgccatcaggtgcctggaattcagataaagatgaagagaatatgcaac

SEQ ID NO: 189391 - DNA, 75 bp, synthetic construct
  source 1..75: mol_type = other DNA
tgacttgttccaccgcctgagcgtgtttccactttcagtgccgccgctgcgtgagcggggcgatgatgtcattct

SEQ ID NO: 189392 - DNA, 75 bp, synthetic construct
  source 1..75: mol_type = other DNA
ccggggaacgttcgtgaactggaacatgctattcatcgggcggtagtgctggcgagagcaacccgagcgtgttct

SEQ ID NO: 189393 - DNA, 75 bp, synthetic construct
  source 1..75: mol_type = other DNA
acgtggtgcgctttcccgcagacagcgaattgcccgatccctatgatggtttgattcccggacaggagagtctga

SEQ ID NO: 189394 - DNA, 75 bp, synthetic construct
  source 1..75: mol_type = other DNA
ctaaccgacaatctgccggaagtccgcgaagcacgggaatggtttcgtagtgaaactcgccgcgttgcgcctatt

SEQ ID NO: 189395 - DNA, 75 bp, synthetic construct
  source 1..75: mol_type = other DNA
gtccgcgaagcacgggaatggtttcgtagtgaaacgcgccgcgttgcgcctattaccctggatgtcatgtgggat

SEQ ID NO: 189396 - DNA, 75 bp, synthetic construct
  source 1..75: mol_type = other DNA
gcagtatggcgatattcagcgcgttggcgatgaccgtagtttgcgggtcgatgtgcgcgtgctggcggcgactaa

SEQ ID NO: 189397 - DNA, 75 bp, synthetic construct
  source 1..75: mol_type = other DNA
gcagtttaattatggggtctttttatcagatacaaatccaacattatcagaatattataatttgaatagagctat

SEQ ID NO: 189398 - DNA, 75 bp, synthetic construct
  source 1..75: mol_type = other DNA
ggaatcgcaggtgctgaaaaatgagcaggaaatggcatcatctcagcaggaactgaagacacaacggaacacgct

SEQ ID NO: 189399 - DNA, 75 bp, synthetic construct
  source 1..75: mol_type = other DNA
ataagctgtttggttttctcagtgccaaagctcaggctgatttcagttataaaggctccgacaggtcgtctcatg

SEQ ID NO: 189400 - DNA, 75 bp, synthetic construct
  source 1..75: mol_type = other DNA
taacacatatgaagcatataactcagagaatcaatattttaccagagaggactatacgtatgattacgacctttt

SEQ ID NO: 189401 - DNA, 75 bp, synthetic construct
  source 1..75: mol_type = other DNA
agaagagttactttcagataacaccctcgagaaagacgaaaattctccggacaatggctttgaggtcggggaata

SEQ ID NO: 189402 - DNA, 75 bp, synthetic construct
  source 1..75: mol_type = other DNA
atttaaacatagaagactctagctcagaagagttactttcagataataccctcgagaaagacgaaaattctccgg

SEQ ID NO: 189403 - DNA, 75 bp, synthetic construct
  source 1..75: mol_type = other DNA
tatacgttctgatccggcgtgcccggcaaggcagcggcctcgtgacggatctggtgcccggccagtccggtggag

SEQ ID NO: 189404 - DNA, 75 bp, synthetic construct
  source 1..75: mol_type = other DNA
aaagtggtgagtaatattatttaccatattgaaatgccgtgggtgaatgagtttggggctgatgctggttgcata

SEQ ID NO: 189405 - DNA, 75 bp, synthetic construct
  source 1..75: mol_type = other DNA
ctgttaatactcgtcgtgtgcataaaagttactggatgacagctgtgtttgcggtgttttctttatgcattcagt

SEQ ID NO: 189406 - DNA, 75 bp, synthetic construct
  source 1..75: mol_type = other DNA
gccgctggtgggcgataaagcgaagttacagcattacgccgcgaccacgccgattgtcgacatggtgcgtttctc

SEQ ID NO: 189407 - DNA, 75 bp, synthetic construct
  source 1..75: mol_type = other DNA
gatcaatgatggtgcccacatttatgtctgcggcgacgctaatcgcatggcgaaagacgttgagcaggcacttct

SEQ ID NO: 189408 - DNA, 75 bp, synthetic construct
  source 1..75: mol_type = other DNA
cgatgcagatgattcacgacgaactgccgggaacgaccttctccaaccctgaccagcgcggcgactacgattccg

SEQ ID NO: 189409 - DNA, 75 bp, synthetic construct
  source 1..75: mol_type = other DNA
gtgcaggaggcgttcggacagacaaaagggatcaagttgatggcgattatcacctccatcgtactgattgcgccg

SEQ ID NO: 189410 - DNA, 75 bp, synthetic construct
  source 1..75: mol_type = other DNA
agaaaaacgctttggcgataaaggagcggaacggccaatccagtggctgactgataacggttcggcttatacagc

SEQ ID NO: 189411 - DNA, 75 bp, synthetic construct
  source 1..75: mol_type = other DNA
tccgtcctatatggttggcgcgatagtcggttctaccgccgctgtctggttgggcgcggtgcagtggttccctga

SEQ ID NO: 189412 - DNA, 75 bp, synthetic construct
  source 1..75: mol_type = other DNA
ggcgctggacggaccgattgttatggccctcctggctgcaattcatgatgtaaacgaactgggaaagactacgag

SEQ ID NO: 189413 - DNA, 75 bp, synthetic construct
  source 1..75: mol_type = other DNA
gtgaaggaaagcgaccagcgttggtgttccgatggctttgagttcggttgcgatgatggcgaaaaactgcgtgtt

SEQ ID NO: 189414 - DNA, 75 bp, synthetic construct
  source 1..75: mol_type = other DNA
ttaagctatatcccgatgatgagttgggtggctgtctcgccggtgatccttatcgatgcaggcggcttaacaact

SEQ ID NO: 189415 - DNA, 75 bp, synthetic construct
  source 1..75: mol_type = other DNA
tgccggtggtgcctccagcttcctcgcggatcgcgtggaagaagagggcgaagtccgcgtctttatcgaacataa

SEQ ID NO: 189416 - DNA, 75 bp, synthetic construct
  source 1..75: mol_type = other DNA
ggacgacgtacaggccatcgcccgtaagttggcatcggcaaactgctctggtagcggtaagactgtttgcatcta

SEQ ID NO: 189417 - DNA, 75 bp, synthetic construct
  source 1..75: mol_type = other DNA
atgatctggcagcctgagttcacagataaaacactctccaggaaacccggggcggttcaacttcgcgacatcacg

SEQ ID NO: 189418 - DNA, 75 bp, synthetic construct
  source 1..75: mol_type = other DNA
cgaactgccgtgtaatgcggatttctggctggcagtacagcaagagttactgccgctggtgaaaacgatcgcccc

SEQ ID NO: 189419 - DNA, 75 bp, synthetic construct
  source 1..75: mol_type = other DNA
acatgatggagctcattcgtaacatcgcgatcgagcactccggttactctgtgtttgcgggcgtaggtgaacgta

SEQ ID NO: 189420 - DNA, 75 bp, synthetic construct
  source 1..75: mol_type = other DNA
atgggcttggcaccttgcaggacaacgcgctggaaggctcgaacgtggatatcgtcaacgaaatggtggcgatga

SEQ ID NO: 189421 - DNA, 75 bp, synthetic construct
  source 1..75: mol_type = other DNA
gcgccgggcgcgatgctcgaccagaacaacatcatgccgaccgggctgcaattcggtagcggcgtgcgcattgtc

SEQ ID NO: 189422 - DNA, 75 bp, synthetic construct
  source 1..75: mol_type = other DNA
gatgcgctttgttggcgcggtggcttgatgcaggggctaatcgacctctggcaaccactttccatgacaggagtt

SEQ ID NO: 189423 - DNA, 75 bp, synthetic construct
  source 1..75: mol_type = other DNA
gatgaacctgtcaccgtcgagggcaaaacgttgcctctgaacgaggccctacagtggcacttcgaactgaccgtc

SEQ ID NO: 189424 - DNA, 75 bp, synthetic construct
  source 1..75: mol_type = other DNA
cagcactggtaaaagagattgttgaactgctgtggttgaaaggcgatgaacccgtcaccgttgatggcaaaacgc

SEQ ID NO: 189425 - DNA, 75 bp, synthetic construct
  source 1..75: mol_type = other DNA
gatccgctgaatccgcaaagctggaaaggagggcgagggcacgctgtttccgcactcgaaatgccgcaagcgccg

SEQ ID NO: 189426 - DNA, 75 bp, synthetic construct
  source 1..75: mol_type = other DNA
gtctggcagtggatgacacaactcaatgctaactggcgcggcagttactgttttattcccaccgaacgcgatgac

SEQ ID NO: 189427 - DNA, 75 bp, synthetic construct
  source 1..75: mol_type = other DNA
atgccaactggcgcggcagctactgctttattcctaccgaacgcgatgacattttttctgcaccatcccccgatc

SEQ ID NO: 189428 - DNA, 75 bp, synthetic construct
  source 1..75: mol_type = other DNA
acaagcgccgactaactttagaatcaaggcaactggcgagactctacacggtaaaaatatctctttaacatggga

SEQ ID NO: 189429 - DNA, 75 bp, synthetic construct
  source 1..75: mol_type = other DNA
gtttttggtgtaacccgtgtcggtgcgatctgcgtttataaggctatttctaaacaggaaagcaataagctggtg

SEQ ID NO: 189430 - DNA, 75 bp, synthetic construct
  source 1..75: mol_type = other DNA
ttgccgctggtgcgatgaccttgatcgcttccactctggcaactccaaaaacaccaaaagtacagagtgcggata

SEQ ID NO: 189431 - DNA, 75 bp, synthetic construct
  source 1..75: mol_type = other DNA
cgactgttacctatgaattgcctacgccagtgatccgcatcaaaaatcagggtagcacgccaggaactttcgaag

SEQ ID NO: 189432 - DNA, 75 bp, synthetic construct
  source 1..75: mol_type = other DNA
cagcgcaactaagattgatcaggttaaagctgaactgaaaggcgatatcaccaaagaagttagcgcatccgctac

SEQ ID NO: 189433 - DNA, 75 bp, synthetic construct
  source 1..75: mol_type = other DNA
ggtgtctgtgtggaaacggtgcattgatggtattgaggttgtaagtatagaacggtatttaggcacgtttgatta

SEQ ID NO: 189434 - DNA, 75 bp, synthetic construct
  source 1..75: mol_type = other DNA
tccgcggcctggcacatgagatcaaaaatccacttggcggcttacgaggtgcggcgcagttactcagcaaagcgt

SEQ ID NO: 189435 - DNA, 75 bp, synthetic construct
  source 1..75: mol_type = other DNA
caggcgctggggccggagggtggtgaaatcattctgcgtacccgcaccgcgtttcaactgaccttacacggcgag

SEQ ID NO: 189436 - DNA, 75 bp, synthetic construct
  source 1..75: mol_type = other DNA
accggaataccgatcgtctgctctttctactgacgttactgcctgtgctgattctggttgtcgttccagacgcca

SEQ ID NO: 189437 - DNA, 75 bp, synthetic construct
  source 1..75: mol_type = other DNA
cgccgccatcaccgccgcctatcgccgcccggaaaccgaagcggtttctatgctgctggaacaagctcgcctgcc

SEQ ID NO: 189438 - DNA, 75 bp, synthetic construct
  source 1..75: mol_type = other DNA
caggcgctggggccagagggtggtgaaatcattctgcgtacccgcacagctttccaactgaccttacacggcgag

SEQ ID NO: 189439 - DNA, 75 bp, synthetic construct
  source 1..75: mol_type = other DNA
taacagtattttgttaatcgatgacaacctggcgatccattacgccaaccccgccgcgcaacaactgctcgccca

SEQ ID NO: 189440 - DNA, 75 bp, synthetic construct
  source 1..75: mol_type = other DNA
taaagagtctgattgcttctggtgataaggcaagttcaactaagattgatcaggttaaagctgaactgaaaggcg

SEQ ID NO: 189441 - DNA, 75 bp, synthetic construct
  source 1..75: mol_type = other DNA
caggtgagaagggggcgctgatgtatgcgatgggtatcgcagcagcgaccgcaatcgacctcggtggcccaatca

SEQ ID NO: 189442 - DNA, 75 bp, synthetic construct
  source 1..75: mol_type = other DNA
gctgattatttctattgtcgcgggttacctcgtgaaatggatgaaccagaaaatccagatgccggatttcctgtt

SEQ ID NO: 189443 - DNA, 75 bp, synthetic construct
  source 1..75: mol_type = other DNA
tatccgcagggtaaaaccgccatgttcctggcgtttatggggatcagtgagggtgcgattccgtttgcactggaa

SEQ ID NO: 189444 - DNA, 75 bp, synthetic construct
  source 1..75: mol_type = other DNA
actgaaatttgcctggctgtcacaatcttttggcggcgtgttgtttggctttgctattccgatgtttgctgcttt

SEQ ID NO: 189445 - DNA, 75 bp, synthetic construct
  source 1..75: mol_type = other DNA
ggtatccgtaccgtgctgactgccgcaggtgagaagggcgcgctgatgtacgcaatggggatcgccgcggcgaca

SEQ ID NO: 189446 - DNA, 75 bp, synthetic construct
  source 1..75: mol_type = other DNA
tgcaatggggattgccgcggcgaccgcaatcgaccttggtggcccaatcaacaaagcggcaggtttcgttgcctt

SEQ ID NO: 189447 - DNA, 75 bp, synthetic construct
  source 1..75: mol_type = other DNA
acatcatttaggctcagactggaccgatgcttacaagggtaacggtattgcgaccatgtgtattgttttacgccg

SEQ ID NO: 189448 - DNA, 75 bp, synthetic construct
  source 1..75: mol_type = other DNA
caaatcttttctgttgcagagggtgaaatcgaccattacaaagcactctttatcgataataaaaatgtgttggtc

SEQ ID NO: 189449 - DNA, 75 bp, synthetic construct
  source 1..75: mol_type = other DNA
acttgccgattaatcgttaagaaaaatggctctgttctatatgatcgcacggctacttctggcagcatgtacaca

SEQ ID NO: 189450 - DNA, 75 bp, synthetic construct
  source 1..75: mol_type = other DNA
tgagatgcgtacaggcatgacagcggcagatgtgcttctggtgccgttccgtccttcccagccggatctggatac

SEQ ID NO: 189451 - DNA, 75 bp, synthetic construct
  source 1..75: mol_type = other DNA
aaggtggctgtggcaaatcaaccaccagcgtaaatatttgtgcggagcttgcccgcgcaaataaggacgtagttc

SEQ ID NO: 189452 - DNA, 75 bp, synthetic construct
  source 1..75: mol_type = other DNA
cttagatgaaactatcgcggatgctattgctcaagctggcgctaatgccgatgctaaaattgatgcaatgcataa

SEQ ID NO: 189453 - DNA, 75 bp, synthetic construct
  source 1..75: mol_type = other DNA
ttgaaacgtgagcgtcttattccactggccatgctgggcggctggtgtgtgttcgtggtgttcatatccctgccg

SEQ ID NO: 189454 - DNA, 75 bp, synthetic construct
  source 1..75: mol_type = other DNA
ggtgtctcgtctggttggtgctcctccgggatatgtgggctatgaagaaggtggctacctgactgaagcggtgcg

SEQ ID NO: 189455 - DNA, 75 bp, synthetic construct
  source 1..75: mol_type = other DNA
ctgtctcatcgctacattgctgaccgtcagttgccggataaagctatcgacctgatcgatgaggcggcatccagc

SEQ ID NO: 189456 - DNA, 75 bp, synthetic construct
  source 1..75: mol_type = other DNA
gcgtcggtaaaactgccatcgttgaaggtctggcgcagcgtatcatcaacggcgaagtgccggaagggttgaaag

SEQ ID NO: 189457 - DNA, 75 bp, synthetic construct
  source 1..75: mol_type = other DNA
ccggcactggcccgtggtgaactgcactgcgtgggcgcgaccacccttgatgaatatcgccagtacattgaaaaa

SEQ ID NO: 189458 - DNA, 75 bp, synthetic construct
  source 1..75: mol_type = other DNA
ctctaacctcggttccgatctgattcaggaacgcttcggtgaactggattatgcgcacatgaaagagctggtgct

SEQ ID NO: 189459 - DNA, 75 bp, synthetic construct
  source 1..75: mol_type = other DNA
ccatcgcgtaattggtcagaacgaagcggttgatgcggtatctaacgctattcgtcgtagccgtgcggggctggc

SEQ ID NO: 189460 - DNA, 75 bp, synthetic construct
  source 1..75: mol_type = other DNA
ggaaaatcacacatcaccctgaaggaaaacggcgtcattcaaatcacaggagaacaattaaacgtttcagggaaa

SEQ ID NO: 189461 - DNA, 75 bp, synthetic construct
  source 1..75: mol_type = other DNA
aaaaacagttagaaaaattaaatccaccgcaagatttacgttctgcaatagaaaaaattgggtggaagaatagac

SEQ ID NO: 189462 - DNA, 75 bp, synthetic construct
  source 1..75: mol_type = other DNA
tatttttgtagagccggaggaaacagaccagacggtttaaatgagccggttacgaatgacatgaacatattaaaa

SEQ ID NO: 189463 - DNA, 75 bp, synthetic construct
  source 1..75: mol_type = other DNA
aacccggtactgattggggaacctggtgttggtaaaactgcgattgttgaaggactggcgcagcgtattatcaat

SEQ ID NO: 189464 - DNA, 75 bp, synthetic construct
  source 1..75: mol_type = other DNA
cctgatcgatgaagcagcatccagcattcgtatgcagattgactcaaaaccagaagaactcgaccgactcgatcg

SEQ ID NO: 189465 - DNA, 75 bp, synthetic construct
  source 1..75: mol_type = other DNA
gttcagaagccatcgtgctggccgtgggcggacggcgtgacgggctggttgccatcgcggtggaggataagcgat

SEQ ID NO: 189466 - DNA, 75 bp, synthetic construct
  source 1..75: mol_type = other DNA
cgggcgtttgtgggatatcgatgtgctgacgcccgaaggcgaaattctctcccgccgcaattattcactaccgcc

SEQ ID NO: 189467 - DNA, 75 bp, synthetic construct
  source 1..75: mol_type = other DNA
tgctgctggcggcagatcgcgtccgcgaaggaagcagcctgcgcgccgcgctggcggagcttcgcctgttcccgc

SEQ ID NO: 189468 - DNA, 75 bp, synthetic construct
  source 1..75: mol_type = other DNA
gcgtggtcactattttgctgacggcagtggtgccgaaaattatcgaacagttcgatcacctcggacacgcgctgc

SEQ ID NO: 189469 - DNA, 75 bp, synthetic construct
  source 1..75: mol_type = other DNA
ggggggatgttgcagcgtcggcggcacgcacatcgtcgcgtggcggcggcagatctggcgctgttcacgcgccaa

SEQ ID NO: 189470 - DNA, 75 bp, synthetic construct
  source 1..75: mol_type = other DNA
caatattcgaattgaagaactgaaagaacaccagccgcctgatggcggtttctttttgcctggagaattaagatg

SEQ ID NO: 189471 - DNA, 75 bp, synthetic construct
  source 1..75: mol_type = other DNA
gcgcgggctgaatacggcgcgtttttcccgcacattaagcatcctcaccgccagcagtgttccgctactggaagg

SEQ ID NO: 189472 - DNA, 75 bp, synthetic construct
  source 1..75: mol_type = other DNA
catgagcgacgcgttacaggccagcggcgtgtactggctggcaggcctgctggggcttctggtgctggggcaacg

SEQ ID NO: 189473 - DNA, 75 bp, synthetic construct
  source 1..75: mol_type = other DNA
agtggtgccgaaaatcatcgaacagtttgatcatctcggacacgcgctacccgcctcaacccgcacgcttattgc

SEQ ID NO: 189474 - DNA, 75 bp, synthetic construct
  source 1..75: mol_type = other DNA
cttaatcgcctggcagattacaccgaacagcgacagcgcctgaaatcacgtctattgcaggccatgctctatccg

SEQ ID NO: 189475 - DNA, 75 bp, synthetic construct
  source 1..75: mol_type = other DNA
catgtaaaaagcctcggaatggcgctgcgcagccggattcaggaaggttacaccctgtcggacagcctgcgcgaa

SEQ ID NO: 189476 - DNA, 75 bp, synthetic construct
  source 1..75: mol_type = other DNA
ctgcgctgggacaaaaccttgctgcgcctgcccgtgacagggcgtgttgcgcgcggactgaatacggcgcgtttt

SEQ ID NO: 189477 - DNA, 75 bp, synthetic construct
  source 1..75: mol_type = other DNA
ctggcggagttgcgcctgttcccgccgatgatgctgtacatgatcgcctccggcgaacagagcggcgaactggaa

SEQ ID NO: 189478 - DNA, 75 bp, synthetic construct
  source 1..75: mol_type = other DNA
ttggcggcagatcgcgtccgcgaaggaagcagtctgcgcgctgcgctggcggagttgcgcctgttcccccgatga

SEQ ID NO: 189479 - DNA, 75 bp, synthetic construct
  source 1..75: mol_type = other DNA
atggtggtctgttctccggaggtggacgatgaaaaccttccgctggaaagtgaaacccggtacggaaagcatgat

SEQ ID NO: 189480 - DNA, 75 bp, synthetic construct
  source 1..75: mol_type = other DNA
tttcaggcgccagcaaaggtgctgaaattaccggaagtgcagattcatgagatcgttagtcactatgcgagaatg

SEQ ID NO: 189481 - DNA, 75 bp, synthetic construct
  source 1..75: mol_type = other DNA
tttcaggcgccagcaaaggtgctgaaattaccggaagtgcacattcatgaaatcgttagtcactgtgcgagaatg

SEQ ID NO: 189482 - DNA, 75 bp, synthetic construct
  source 1..75: mol_type = other DNA
ggggacaaaaagaaaccggagaatggcagtggacatttcaggtcggggacctgaggtgtactggcaatagcggac

SEQ ID NO: 189483 - DNA, 75 bp, synthetic construct
  source 1..75: mol_type = other DNA
gaatggcagtggacatttcaggtcggggaccttgaaaacgtcaatatcactcactgggcagtaatgccgaaagca

SEQ ID NO: 189484 - DNA, 75 bp, synthetic construct
  source 1..75: mol_type = other DNA
cttacagcacaactgcgtctggggccggcagacattctggagtcagatgagaatggcattatcccggagcaggcc

SEQ ID NO: 189485 - DNA, 75 bp, synthetic construct
  source 1..75: mol_type = other DNA
attttcaggcgccagcaaaggtgctgaaattcccggaagtgcaaattcaggaaatcataagtaactgtgcgagaa

SEQ ID NO: 189486 - DNA, 75 bp, synthetic construct
  source 1..75: mol_type = other DNA
cgatgatgctgtacatgatcgcctccggcgaacagagcggcgagctggaaaccatgcttgaacaggccgcggtca

SEQ ID NO: 189487 - DNA, 75 bp, synthetic construct
  source 1..75: mol_type = other DNA
gcgcggactgaatacggcgcgtttttcccgcacgttaagcatcctcaccgccagcagtgttccgctactggaagg

SEQ ID NO: 189488 - DNA, 75 bp, synthetic construct
  source 1..75: mol_type = other DNA
tttcaggcgccagcaaaggtgctgaaattaccggaagtgcatattcatgatatcgttagtcactctgcgagaatg

SEQ ID NO: 189489 - DNA, 75 bp, synthetic construct
  source 1..75: mol_type = other DNA
tttcaggcgccagcaaaggtgctgaaattaccggaagtgcaaattcatgacatcgttagtcactgtgcgagaatg

SEQ ID NO: 189490 - DNA, 75 bp, synthetic construct
  source 1..75: mol_type = other DNA
attttcaggcggcagcaaaggtgctgaaattcccggaagtgcaaattcaggaaatcatcagtaactgtgcgagac

SEQ ID NO: 189491 - DNA, 75 bp, synthetic construct
  source 1..75: mol_type = other DNA
aaaaagcagatacagtgcgtggtaagaccgctgcaaattctgcgtgctgacgggacgtgggaaaatattggcggg

SEQ ID NO: 189492 - DNA, 75 bp, synthetic construct
  source 1..75: mol_type = other DNA
ctggatgcggataaaaagcagatacagtgtgtggtaagaccgctgcaaatcctgcgtgctgacgggacgtgggaa

SEQ ID NO: 189493 - DNA, 75 bp, synthetic construct
  source 1..75: mol_type = other DNA
agaatggtattatcccggagcaggacagggtaatcacgcaggtggtgatactggatgcggataaaaagcagatac

SEQ ID NO: 189494 - DNA, 75 bp, synthetic construct
  source 1..75: mol_type = other DNA
gtgatacaggcagaactggagaatgacatgaatattttgagaaagcttatgcagagtctgtgcggttgcggaaag

SEQ ID NO: 189495 - DNA, 75 bp, synthetic construct
  source 1..75: mol_type = other DNA
tggatgcagataaaaagcagatacaatgcgtggtaagaccgctgcaaattctgcgtgctgacgggacgtgggaaa

SEQ ID NO: 189496 - DNA, 75 bp, synthetic construct
  source 1..75: mol_type = other DNA
ttaagtcacctgttttgtgttgtggtgagaatatcacctttcatcaggtggccaaatttagtgtgccactacaga

SEQ ID NO: 189497 - DNA, 75 bp, synthetic construct
  source 1..75: mol_type = other DNA
atactggatacagataaaaagctgatacagtgtgtggtaagaccgctgcaaatcctgcgtgctgacgggacgtgg

SEQ ID NO: 189498 - DNA, 75 bp, synthetic construct
  source 1..75: mol_type = other DNA
cggcagacatcctggagtcagatgagaatggtattatcccggagcaggacagggtaatcacgcaggtggtgatac

SEQ ID NO: 189499 - DNA, 75 bp, synthetic construct
  source 1..75: mol_type = other DNA
ccataacgcgtccgataatggcatgggaaaagcttactgaagccagacttgaagaagtattaacggcttataaag

SEQ ID NO: 189500 - DNA, 75 bp, synthetic construct
  source 1..75: mol_type = other DNA
tccggacgcagaaatcattaaagcgggaaatgtacgcgcgttagcggtcgaacattcggtttaccttcatcggtg

SEQ ID NO: 189501 - DNA, 75 bp, synthetic construct
  source 1..75: mol_type = other DNA
ttagcacctatctgggtgaggataaaaatgactgggtggcatgggacagttgtgcgctgatgtacgccagcaatg

SEQ ID NO: 189502 - DNA, 75 bp, synthetic construct
  source 1..75: mol_type = other DNA
cagccgggttatgatcacagctattacttcattgcttcttttatagaggatcatctgcgcttccatgcgcagtat

SEQ ID NO: 189503 - DNA, 75 bp, synthetic construct
  source 1..75: mol_type = other DNA
atgaatatactaaaaaaacttatgcagcgtctgtgtggttgcggaaagcatgatgaccgtgaaaacggggagtta

SEQ ID NO: 189504 - DNA, 75 bp, synthetic construct
  source 1..75: mol_type = other DNA
tgctgcggaggcactctgttctgctgccgtttcagaggacttagcgtttgtctcagacgttttggccgccttcgc

SEQ ID NO: 189505 - DNA, 75 bp, synthetic construct
  source 1..75: mol_type = other DNA
agattaatggactcggtggttttatgctccagaataattccgttacaggttcctttggcggctggaccgatctgg

SEQ ID NO: 189506 - DNA, 75 bp, synthetic construct
  source 1..75: mol_type = other DNA
aggtagtcgagagtccatctggttcacgaaaatggtacaaatacgagcacaagacaggttgtattgcgtcctgtg

SEQ ID NO: 189507 - DNA, 75 bp, synthetic construct
  source 1..75: mol_type = other DNA
tttctgccgactttccggcagcggtggcactggctgaggcctgcccggcatttgttgacgcggcgctggcagatg

SEQ ID NO: 189508 - DNA, 75 bp, synthetic construct
  source 1..75: mol_type = other DNA
gctgtctcggcgcgcgttgccgcggattccgccgtacttttgctctgtgctgccgctgccgcactgccagcagcc

SEQ ID NO: 189509 - DNA, 75 bp, synthetic construct
  source 1..75: mol_type = other DNA
ttgccgccttcgcggaattgcctgccgccgttgccgaggaagcggcactactggcgcttgatgatgcgttcgttt

SEQ ID NO: 189510 - DNA, 75 bp, synthetic construct
  source 1..75: mol_type = other DNA
cctcttttgaagccgacgcatcccgggctgaggtggcagcttctgacgctttcgtggtcgcggtggatgcagaag

SEQ ID NO: 189511 - DNA, 75 bp, synthetic construct
  source 1..75: mol_type = other DNA
tgttgacgcggcgctggcagatgatgcagccgctgtttttgagcctgccgcagctgaggcgctctgtcccgctgc

SEQ ID NO: 189512 - DNA, 75 bp, synthetic construct
  source 1..75: mol_type = other DNA
ggctgaaatccaccaccggggacgttactgccatccgttatcactgttacccggaacagtccgactggtcaggct

SEQ ID NO: 189513 - DNA, 75 bp, synthetic construct
  source 1..75: mol_type = other DNA
cgcttcttttgaggccgccgcatcccgggccgaggtcgcagcttctgatgccttcgtggtcgcggtggatgcaga

SEQ ID NO: 189514 - DNA, 75 bp, synthetic construct
  source 1..75: mol_type = other DNA
gctgcttctgacgccttcgtggtcgcggcggatgcagaagtggctgctgattgttgtgacgctgccgcattcgtt

SEQ ID NO: 189515 - DNA, 75 bp, synthetic construct
  source 1..75: mol_type = other DNA
ttgttttaactggagaagcgcttgcgctatctacagtgtattcattgagctatgcacgagatgaatttaacttac

SEQ ID NO: 189516 - DNA, 75 bp, synthetic construct
  source 1..75: mol_type = other DNA
caggtgacagcatctaataccagcattgcatttgacgcagataaagttaatacagatggttttaaattccaggca

SEQ ID NO: 189517 - DNA, 75 bp, synthetic construct
  source 1..75: mol_type = other DNA
atgcttaagttaaaactttgttctgttattgctttagcatttgcaagtgttgcggttaatgctgcacagcaaagc

SEQ ID NO: 189518 - DNA, 75 bp, synthetic construct
  source 1..75: mol_type = other DNA
ccagtgcggttgccgcgatgaaatgtacccagcctggcggtcgggccggcattcctaatcgtgagcaaaccgaat

SEQ ID NO: 189519 - DNA, 75 bp, synthetic construct
  source 1..75: mol_type = other DNA
ttatcattacacagcggcagggcaactggctcagcatgaagacacttctacggtgcagcttagcggtgacctgtt

SEQ ID NO: 189520 - DNA, 75 bp, synthetic construct
  source 1..75: mol_type = other DNA
atacgtccggtgcggttagcctgcaaaatggcgtcgctggcgatacgctgacggtaaacggtgattataccggcg

SEQ ID NO: 189521 - DNA, 75 bp, synthetic construct
  source 1..75: mol_type = other DNA
atggaaaaatacctgcacctgttaagtcggggagataaaattggcctgacattgattcgtctgagtattgcgatt

SEQ ID NO: 189522 - DNA, 75 bp, synthetic construct
  source 1..75: mol_type = other DNA
ctgttgcctatacagctactttctatgaaaaagtaacagaaaagtatggtgagaaagctgaattattagcgaaaa

SEQ ID NO: 189523 - DNA, 75 bp, synthetic construct
  source 1..75: mol_type = other DNA
cgtaaattactctgcatcattaatgccatgctttcatcagggacaatgtttaaccctgccctgcatcccggtccg

SEQ ID NO: 189524 - DNA, 75 bp, synthetic construct
  source 1..75: mol_type = other DNA
gcgcgtattgaccgtgatatttcagcgcatgtggggtcctgtttttccgatatctcttctcttcttcagtcattc

SEQ ID NO: 189525 - DNA, 75 bp, synthetic construct
  source 1..75: mol_type = other DNA
ccttactgggggaagccttgttgatgtaattaaacgtaaacctgttctgactgtagaagaaatcaggaattccta

SEQ ID NO: 189526 - DNA, 75 bp, synthetic construct
  source 1..75: mol_type = other DNA
ttaatcccctcccccggcgagccaaagcaggaattgcgtcaattatggtgcagtaaagaaaaaggcaaagtgaat

SEQ ID NO: 189527 - DNA, 75 bp, synthetic construct
  source 1..75: mol_type = other DNA
gcttcctcccgttgccagatcgtgccaaacacaaacaaaaaaaagcccgcaattacgcgggcttagcggcatttc

SEQ ID NO: 189528 - DNA, 75 bp, synthetic construct
  source 1..75: mol_type = other DNA
gaagctgcactactggcacttgatgatgcattcgtttctgaagatttcgctgcctcttttgaggccgccgcaccc

SEQ ID NO: 189529 - DNA, 75 bp, synthetic construct
  source 1..75: mol_type = other DNA
ctttaccctttattggaaagggtgaacaacataaagtacaaattaagcttgcaatgcaaaataaagctaatgatg

SEQ ID NO: 189530 - DNA, 75 bp, synthetic construct
  source 1..75: mol_type = other DNA
atacaataaatgttatgccgattacaattatattaaattttactctcctacagatattcttcaatactctcttga

SEQ ID NO: 189531 - DNA, 75 bp, synthetic construct
  source 1..75: mol_type = other DNA
gccgtttcagaagacatggcgttcgtctcagacgtatttgccgccttcgcagaatttactgacgccgttgccgag

SEQ ID NO: 189532 - DNA, 75 bp, synthetic construct
  source 1..75: mol_type = other DNA
cgctggcgaagcagctatgaggtggaaaaactacctgaagagcacacaaaaagttcaactgcagaactttgccaa

SEQ ID NO: 189533 - DNA, 75 bp, synthetic construct
  source 1..75: mol_type = other DNA
ctccagggaaagcaatcatcgactggcacaaatcacgcaatatgcccgtcaactggccagctcgccttcaataat

SEQ ID NO: 189534 - DNA, 75 bp, synthetic construct
  source 1..75: mol_type = other DNA
ctatcatcattagttaactttattgaaaaaaaacatgaaggtaaacaactatttattagtacgcacagttcattt

SEQ ID NO: 189535 - DNA, 75 bp, synthetic construct
  source 1..75: mol_type = other DNA
atgtccaaaaaaaaccttgcaatagtttttagtggcacgcgcgatcttgtttttgcaatggcaaatgttgttata

SEQ ID NO: 189536 - DNA, 75 bp, synthetic construct
  source 1..75: mol_type = other DNA
cctgggcgtagtcgaggtacttatagcactgctggtactggctaatcctgttagtcgttggttgggattactggg

SEQ ID NO: 189537 - DNA, 75 bp, synthetic construct
  source 1..75: mol_type = other DNA
ctgccgtttttgaggattctgcacgggtttccgacgctttcgcgttcgtttcggatgtcttcgctgcggaagctg

SEQ ID NO: 189538 - DNA, 75 bp, synthetic construct
  source 1..75: mol_type = other DNA
ccgccttcgcggaatttcctgccgccgttgccgaggaagcggcactactggcgcttgatgatgcgttcgtttctg

SEQ ID NO: 189539 - DNA, 75 bp, synthetic construct
  source 1..75: mol_type = other DNA
ggcactggctgaggcctgcccggcacttgttgacgcggcactggccgacgatgcagccgctgtttttgaacctgc

SEQ ID NO: 189540 - DNA, 75 bp, synthetic construct
  source 1..75: mol_type = other DNA
actttttgaggactctgcagcggcagcacttttcgctgcttcactggcctttgtcgatgccgttcctgcgctgga

SEQ ID NO: 189541 - DNA, 75 bp, synthetic construct
  source 1..75: mol_type = other DNA
caatatcctctgcccgttttgccgctgtctcagcgcgcgttgctgcggattctgccgtacttttgctctgtgctg

SEQ ID NO: 189542 - DNA, 75 bp, synthetic construct
  source 1..75: mol_type = other DNA
gtggcgctgcccttcgctgctgacgcctgtctggtcgcctcatcttttgaagctgacgccgatgatgccgatgaa

SEQ ID NO: 189543 - DNA, 75 bp, synthetic construct
  source 1..75: mol_type = other DNA
gcattcgtttctgacgttttcgcggcactggcgctggtagctgccgcgctttttgatgactctgcagcagcagca

SEQ ID NO: 189544 - DNA, 75 bp, synthetic construct
  source 1..75: mol_type = other DNA
gtggcgctgcccttcgctgctgacgcctgtctggtcgtctcatcttttgaagcagacgccgatgatgccgatgac

SEQ ID NO: 189545 - DNA, 75 bp, synthetic construct
  source 1..75: mol_type = other DNA
gccgtttcagaagacttagcgttcgtctcggacgtttttgccgctttcgcggaattgcctgccgccgttgccgag

SEQ ID NO: 189546 - DNA, 75 bp, synthetic construct
  source 1..75: mol_type = other DNA
gtagcagcaatcgcgaaagcgaaaggtagccgtgtggtggttgcggatattgatgccggacgtcgccaacaaatt

SEQ ID NO: 189547 - DNA, 75 bp, synthetic construct
  source 1..75: mol_type = other DNA
gctttttgaggactctgcagcagcagcacttttcgatgcttcactggcctttgttgatgccgttcttgcgctgga

SEQ ID NO: 189548 - DNA, 75 bp, synthetic construct
  source 1..75: mol_type = other DNA
tttctgccgattttccggcggcggtggcactggctgaggcctgcccggcacttgttgacgcggcactggcagatg

SEQ ID NO: 189549 - DNA, 75 bp, synthetic construct
  source 1..75: mol_type = other DNA
tcgttgtggctgttgaagcggatgatgcggcgctttctgccgattttccggcggcggtggcactgactgctgcct

SEQ ID NO: 189550 - DNA, 75 bp, synthetic construct
  source 1..75: mol_type = other DNA
ctggcaacgctggtacaggcagcaatgccgctggaaacctgcttacaggcggtcagtgagcaaagtgaaaaactg

SEQ ID NO: 189551 - DNA, 75 bp, synthetic construct
  source 1..75: mol_type = other DNA
ataagtttactatgttttatacagcagacaatgatgtagtagtcaccaatatatctgataatactcaaacttact

SEQ ID NO: 189552 - DNA, 75 bp, synthetic construct
  source 1..75: mol_type = other DNA
ataaggttggctacaataatatatcatacttcatatcccatttcagacaatttttcggaatgacgccaaaacaac

SEQ ID NO: 189553 - DNA, 75 bp, synthetic construct
  source 1..75: mol_type = other DNA
gtatttgtttcaggagtttaatactggaaataagaatgaaaaaagcattatcacttttgattgcaggagaattat

SEQ ID NO: 189554 - DNA, 75 bp, synthetic construct
  source 1..75: mol_type = other DNA
cttcatattttatatcatatttcagaagtttttttggtataaccccaaaacagttacaggcactgttaaaaaaat

SEQ ID NO: 189555 - DNA, 75 bp, synthetic construct
  source 1..75: mol_type = other DNA
attttggcggacgaatttaacttatctgaagtagcaataagaaaaaaacttgaatcagaaggaatttgctttaga

SEQ ID NO: 189556 - DNA, 75 bp, synthetic construct
  source 1..75: mol_type = other DNA
ataacaaaagagtttcatggtgatattttaaaaagagctgtgttttttgattactcacaaatagtaaagttaaaa

SEQ ID NO: 189557 - DNA, 75 bp, synthetic construct
  source 1..75: mol_type = other DNA
tgattcagccgatttactgcgcgctactccaaccgagcgttacgccacgtatgagaaagggattaagaacgggat

SEQ ID NO: 189558 - DNA, 75 bp, synthetic construct
  source 1..75: mol_type = other DNA
cgatgccgtgttatctgtatctggtacgcaatgacaagggcagggaggcgcgggaatggctggacagtcacccgg

SEQ ID NO: 189559 - DNA, 75 bp, synthetic construct
  source 1..75: mol_type = other DNA
gatgatggctttctggggcgttcccccgtcacgatttgccgtgaggcgctggggcttggccttgctcaacagcgt

SEQ ID NO: 189560 - DNA, 75 bp, synthetic construct
  source 1..75: mol_type = other DNA
tatcgaagcagacaaacgcataaaagagtccttcgaggaaattattaaagcagacagcactcataacagggctat

SEQ ID NO: 189561 - DNA, 75 bp, synthetic construct
  source 1..75: mol_type = other DNA
ctgacaaaagagtttcctggagatatattaaaaaaaactgtgtcttttgatttttcacaaatcattacattaaaa

SEQ ID NO: 189562 - DNA, 75 bp, synthetic construct
  source 1..75: mol_type = other DNA
ttattcagtgggggcgtgatggttttccggcggctttacatccttacccgccgcagtcggtgaacgtggagcaga

SEQ ID NO: 189563 - DNA, 75 bp, synthetic construct
  source 1..75: mol_type = other DNA
aaacatattcaggacccatcgcgctaccacgtggtgatggatgagcttaacgatctcgagatgggcaaactgctg

SEQ ID NO: 189564 - DNA, 75 bp, synthetic construct
  source 1..75: mol_type = other DNA
catttattagacggcagcctgcaagtgatggttgcggataccttaggccagcttccggcactgaacacgcgactt

SEQ ID NO: 189565 - DNA, 75 bp, synthetic construct
  source 1..75: mol_type = other DNA
agaaagaatatgaaatgattaattataatgatggttggtattatgttcttgctcgttatgataattgtctggttt

SEQ ID NO: 189566 - DNA, 75 bp, synthetic construct
  source 1..75: mol_type = other DNA
gttggtattatgttcttgctcgttatgataattgtctggttttgtctacttctttcaatgcaggtagtaaaaggt

SEQ ID NO: 189567 - DNA, 75 bp, synthetic construct
  source 1..75: mol_type = other DNA
catttactggacggcagcctgcaagcgatggttgcggataccttaggccaacttccggcgctgaacgcacgactt

SEQ ID NO: 189568 - DNA, 75 bp, synthetic construct
  source 1..75: mol_type = other DNA
ttgcactttcatggcgaaaaagccgctgtttatgattggtcacagcgttggcccgttccaggatgagcaatttaa

SEQ ID NO: 189569 - DNA, 75 bp, synthetic construct
  source 1..75: mol_type = other DNA
ccgcatggtggcgctcaacctgcgccagcacatcagcgatcctgcccgttatcacgtagtgatggatgaacttaa

SEQ ID NO: 189570 - DNA, 75 bp, synthetic construct
  source 1..75: mol_type = other DNA
tgaactggaaccgtttgacaagcgccttggtaccactcaggaagcgtatgaaaaagcgtttgccggtgtggttaa

SEQ ID NO: 189571 - DNA, 75 bp, synthetic construct
  source 1..75: mol_type = other DNA
aacgaggcggtggcgcgggaacgtgcggcggggctggcgatggtggaatcggtcttaacgcgcatcggggaggga

SEQ ID NO: 189572 - DNA, 75 bp, synthetic construct
  source 1..75: mol_type = other DNA
cgtcaccgacagcggcaagctgcgtaatatcgcgattgcccagggctttaccgattttgtgcgcctgctgtcagg

SEQ ID NO: 189573 - DNA, 75 bp, synthetic construct
  source 1..75: mol_type = other DNA
gatgaatttctccactccggcaattgccatcaactacgaacataaatccgccgggattatgcagcagttgggact

SEQ ID NO: 189574 - DNA, 75 bp, synthetic construct
  source 1..75: mol_type = other DNA
tgtaccaactgagccagaaacaacaggccgctgcgggcgtcagcgggcgggtaaaaaaggtgctgcgccgccgtt

SEQ ID NO: 189575 - DNA, 75 bp, synthetic construct
  source 1..75: mol_type = other DNA
gctccccgtgctgactgcccggacagaagaggccgtgagacgcgagcgggaaaaaggatgtgcgatgatcgagtc

SEQ ID NO: 189576 - DNA, 75 bp, synthetic construct
  source 1..75: mol_type = other DNA
tgcacatggcctgcccgtattggagaatctgctggagcaggacttcagcgccagaggcccgaaccagaagtgggc

SEQ ID NO: 189577 - DNA, 75 bp, synthetic construct
  source 1..75: mol_type = other DNA
tcggggcttgcccgtcagagtatttaccgcgcattatccccgaacgggaacccgaccatcacaacacttgcacaa

SEQ ID NO: 189578 - DNA, 75 bp, synthetic construct
  source 1..75: mol_type = other DNA
aagttcagtccgtttaaaaccagggcacccagctatatgtcgaaacgggtttctgcgatgaaaaacggaatctat

SEQ ID NO: 189579 - DNA, 75 bp, synthetic construct
  source 1..75: mol_type = other DNA
gggtgaaacccgtctgacgctgccgcttgggggagcgatcaacgttaacctgcaaaatatgctggccagtgacag

SEQ ID NO: 189580 - DNA, 75 bp, synthetic construct
  source 1..75: mol_type = other DNA
tatcaggaaccgattacagtacgttttcaggacgcaaaccccgttgccggagggttttctggtagtgctgtatta

SEQ ID NO: 189581 - DNA, 75 bp, synthetic construct
  source 1..75: mol_type = other DNA
tatttcatctttgatttacaatgcgctacctctcacagatgcacatattactccccctagagagtcatcactacc

SEQ ID NO: 189582 - DNA, 75 bp, synthetic construct
  source 1..75: mol_type = other DNA
gcctgtggtgccgccgggatgctgattgcgtatgcggaatgtctgctggaagccgatattaacccttccatgcat

SEQ ID NO: 189583 - DNA, 75 bp, synthetic construct
  source 1..75: mol_type = other DNA
ggttataaatatgaaaaagggaaagttttaccaattatctcaagggctaggtttgatgcagaactatattggtct

SEQ ID NO: 189584 - DNA, 75 bp, synthetic construct
  source 1..75: mol_type = other DNA
aacacatattttaaagaatatgaatggttagccacacgatggaaggattgtccattgaaggacaaatccccgtgg

SEQ ID NO: 189585 - DNA, 75 bp, synthetic construct
  source 1..75: mol_type = other DNA
cccgaccatcacaacgcttgcacaacttacatcggtagccggattacagttcactctcagtaaatccagccacta

SEQ ID NO: 189586 - DNA, 75 bp, synthetic construct
  source 1..75: mol_type = other DNA
tcagctttccctgctgggtattcctgccgaggtggtcacgggcaatacgctgacgatgaagttaaacagggtgcg

SEQ ID NO: 189587 - DNA, 75 bp, synthetic construct
  source 1..75: mol_type = other DNA
tcagaagtgttccgcgactttatccagcttgctgccaaccagctggatgtggctcgggtgcgcacgccagagggc

SEQ ID NO: 189588 - DNA, 75 bp, synthetic construct
  source 1..75: mol_type = other DNA
ccaatggcagcgtcggctggcagggtaaaaacatcgctgccagcgggcggactgatggcaacgctggggtgatat

SEQ ID NO: 189589 - DNA, 75 bp, synthetic construct
  source 1..75: mol_type = other DNA
agttctgcatctccgctatgcctcggatgatggctttctggggcgttcccccgtcacgatttgccgtgaggcgct

SEQ ID NO: 189590 - DNA, 75 bp, synthetic construct
  source 1..75: mol_type = other DNA
cgccgcgtgaagggggcgacgaatacagccaggcatggaagcaggaagtgaaggtcagtaccggttctgagaata

SEQ ID NO: 189591 - DNA, 75 bp, synthetic construct
  source 1..75: mol_type = other DNA
gagatgcgcattacatataacgggcatgtgcacacctgtcctgacggcgaaacagataaaccaaatcaacaaatg

SEQ ID NO: 189592 - DNA, 75 bp, synthetic construct
  source 1..75: mol_type = other DNA
gagcgcccgaacgcatggcaaaccccctaccagtttaagcgaatgatgatccgccactgcctgttaaacggtaat

SEQ ID NO: 189593 - DNA, 75 bp, synthetic construct
  source 1..75: mol_type = other DNA
actccacggatgacggttttatggggcgctcacctgtaaccatttgccgcgaatcgctggggcttgggctggccc

SEQ ID NO: 189594 - DNA, 75 bp, synthetic construct
  source 1..75: mol_type = other DNA
tccggcgttatgtgtccgaacgaagcccgcgaacgtgaaggactgtcaccgcgtgatggtggtgatgagttcagc

SEQ ID NO: 189595 - DNA, 75 bp, synthetic construct
  source 1..75: mol_type = other DNA
cggattttcccgcttaacggcaagcgtaactatctcccgctctctccctatggaagatatgaggtggagttacag

SEQ ID NO: 189596 - DNA, 75 bp, synthetic construct
  source 1..75: mol_type = other DNA
ggtcggtgatgtggtctgcagcggcctctcatcgtgggcggcggtgacgcagacaggagagattcatgttcaggc

SEQ ID NO: 189597 - DNA, 75 bp, synthetic construct
  source 1..75: mol_type = other DNA
tgatcgttaacggtcgcgtgatcagcaaacgcccccagcgggtcaataagctgtttagccgggggcgcggcgtcg

SEQ ID NO: 189598 - DNA, 75 bp, synthetic construct
  source 1..75: mol_type = other DNA
gctgattggctggcgttctctctggtacacctggggacaaaaagaaaccggagaatggcagtggacatttcaggt

SEQ ID NO: 189599 - DNA, 75 bp, synthetic construct
  source 1..75: mol_type = other DNA
gcttccggctgtcgttccggcaggtccggataacccgatggggctgtatgcactctacatcggtcgcctgtacgc

SEQ ID NO: 189600 - DNA, 75 bp, synthetic construct
  source 1..75: mol_type = other DNA
gcaatcatgaagtggatacccggggtctaccgtacggtatttacgatgtggaagttgaggtgatcgttaacggtc

SEQ ID NO: 189601 - DNA, 75 bp, synthetic construct
  source 1..75: mol_type = other DNA
agtaatgactgggcccgtcatcagttagccaccgcagccgaattggttcgggaaggggtcagcctgcatcaggcg

SEQ ID NO: 189602 - DNA, 75 bp, synthetic construct
  source 1..75: mol_type = other DNA
tgatgaccgtgaaaacggggagttacttacagcacagctgcgactgggaccggcagacattctggagtcagatga

SEQ ID NO: 189603 - DNA, 75 bp, synthetic construct
  source 1..75: mol_type = other DNA
agcgtctgtgcggttgcggaaagcatgatggccgtgaacacggggagttacttacagcacagctgcgactggggc

SEQ ID NO: 189604 - DNA, 75 bp, synthetic construct
  source 1..75: mol_type = other DNA
atggctacatacggcggtcagtttacgcttaccaaaaagcagtatcacggcattctcaagcttgatgccatcacc

SEQ ID NO: 189605 - DNA, 75 bp, synthetic construct
  source 1..75: mol_type = other DNA
taaacagaacgatagcgaggcgttcgcggttaaatatgacaaagaggtttatcaaccggcgattgcggcatgtca

SEQ ID NO: 189606 - DNA, 75 bp, synthetic construct
  source 1..75: mol_type = other DNA
agcatgttggaacgggccgccgacaatcaggatcgtgagttcagcacacagatgcaactggcgctgggattgttt

SEQ ID NO: 189607 - DNA, 75 bp, synthetic construct
  source 1..75: mol_type = other DNA
aactccgtactgtggtttatgggcgatgatattccgcatgtgccaaacaaacgcggtggcggactgtgcctcggc

SEQ ID NO: 189608 - DNA, 75 bp, synthetic construct
  source 1..75: mol_type = other DNA
cctggctgctatcgctaaaggcgaagccaaatccccactgctgactccggaaaaagccatcgaactgctgggcac

SEQ ID NO: 189609 - DNA, 75 bp, synthetic construct
  source 1..75: mol_type = other DNA
cttgcatgaccaacatcggtcacttccgtgctgcgggtaaactgctggatgcgcataaaggccagttgccgaccc

SEQ ID NO: 189610 - DNA, 75 bp, synthetic construct
  source 1..75: mol_type = other DNA
atgaacatactaaaaaaacttatgcagcgtctgtgcgggcacggaaagcatgatggccgtgaacacggggggtta

SEQ ID NO: 189611 - DNA, 75 bp, synthetic construct
  source 1..75: mol_type = other DNA
cggcgggttctggtctggtggcatttgcagccgcaacaggcgtaatgccgctggatatgccagaatccgttctgg

SEQ ID NO: 189612 - DNA, 75 bp, synthetic construct
  source 1..75: mol_type = other DNA
ccgctgatcgatgcgctggacgacactgcactggcgccgatcgcagctaaagcactgtcccatacgctgctgatg

SEQ ID NO: 189613 - DNA, 75 bp, synthetic construct
  source 1..75: mol_type = other DNA
aacggacagcactgtttccagtaatgatgcggcacatgattgccagcggtgaaaacagtggtgagcttgacagta

SEQ ID NO: 189614 - DNA, 75 bp, synthetic construct
  source 1..75: mol_type = other DNA
acaaaaagttcaactgcagaactttgccaactggccaacacacactctctccaccctatttcactttcccttctc

SEQ ID NO: 189615 - DNA, 75 bp, synthetic construct
  source 1..75: mol_type = other DNA
cgatgatgctgtacatgatcgcctccggcgaacagagcggtgaactggaaaccatgcttgaacaggccgcagtta

SEQ ID NO: 189616 - DNA, 75 bp, synthetic construct
  source 1..75: mol_type = other DNA
ggtggggctggcgttggggctgtttgagcctgctctggtggtgatgatggcgggcgtggtgctgtttatcgtcat

SEQ ID NO: 189617 - DNA, 75 bp, synthetic construct
  source 1..75: mol_type = other DNA
aacgtttttatgaaattaatccagacagcataaaggtggactcgcaatttaccggcgatattttcggtactgcgg

SEQ ID NO: 189618 - DNA, 75 bp, synthetic construct
  source 1..75: mol_type = other DNA
atcagcgatctcaaactggcaatggggcttaacgcatccaaaggcaaaaaaacggcaatcgataaaatttatccg

SEQ ID NO: 189619 - DNA, 75 bp, synthetic construct
  source 1..75: mol_type = other DNA
acgccgcagcggagaacgcgcgcaggctgcgtgacgcggttaaacgcggcacgatagctgcagttcaaatgaaac

SEQ ID NO: 189620 - DNA, 75 bp, synthetic construct
  source 1..75: mol_type = other DNA
aacgaggcatccctttttggcaagcggaaaacggggtctggctgacatcaacggttgcggttgagtttcttgagt

SEQ ID NO: 189621 - DNA, 75 bp, synthetic construct
  source 1..75: mol_type = other DNA
aaagcgctttagttattccagtgatggtacgtgtattcgcgccgttcaggggcattcgacttcgcaggtcgccat

SEQ ID NO: 189622 - DNA, 75 bp, synthetic construct
  source 1..75: mol_type = other DNA
aacgaggcatccctttctggcaagcggaaaacggagtctggctgacatcaacggttgcggtcgaatttcttgagt

SEQ ID NO: 189623 - DNA, 75 bp, synthetic construct
  source 1..75: mol_type = other DNA
tgccgctggaaacctgcttacaggcggtcagtgagcaaagcgaaaaactgcatgtaaaaagcctcggaatggcgc

SEQ ID NO: 189624 - DNA, 75 bp, synthetic construct
  source 1..75: mol_type = other DNA
gcaaatcgctatgtcgggcaacaactgctgatggcggctgggcgcgtccgcgaaggaagcagtctgcgtgccgcg

SEQ ID NO: 189625 - DNA, 75 bp, synthetic construct
  source 1..75: mol_type = other DNA
aagcggttaacccgtgcattgctggataccgtggtcgccaccagcgataaaaagcgttttagttattccagtgat

SEQ ID NO: 189626 - DNA, 75 bp, synthetic construct
  source 1..75: mol_type = other DNA
atttccaataattcaccattgtggtgggctaccttaggtttcgcaatatcaactttactaaacacttgtttttct

SEQ ID NO: 189627 - DNA, 75 bp, synthetic construct
  source 1..75: mol_type = other DNA
tgtagatacgggctaaaacgaccaaatggtattgaggcatatttttctaagcattacccaaatgtatacgaagac

SEQ ID NO: 189628 - DNA, 75 bp, synthetic construct
  source 1..75: mol_type = other DNA
tatttagatataagcaattacatcctaagcacgttgattataaagatgcattcaaagatgttttgggtaaagagg

SEQ ID NO: 189629 - DNA, 75 bp, synthetic construct
  source 1..75: mol_type = other DNA
gaggtagctatgttaaatcataccacacacccgcaagggcgggactcgcacaacctgaataaatacatctggcgt

SEQ ID NO: 189630 - DNA, 75 bp, synthetic construct
  source 1..75: mol_type = other DNA
tctggcttctgtagcatatggttttgctttcgcctccatatctgtctgcgacgttcagtaccgtctggcgcggag

SEQ ID NO: 189631 - DNA, 75 bp, synthetic construct
  source 1..75: mol_type = other DNA
gggagaaaaagcaaatttattttttaaaaatagacatgaagttaaaaccgtagtaaacaatttgttggaacatat

SEQ ID NO: 189632 - DNA, 75 bp, synthetic construct
  source 1..75: mol_type = other DNA
gccagagatggcgattgatatccgtcatttactggacggtagcctgcaagcgatggttgcggataccttaggcca

SEQ ID NO: 189633 - DNA, 75 bp, synthetic construct
  source 1..75: mol_type = other DNA
cgatctggaaatgggcaaaattctgggggcctgtgaactcaccgtcggtacgcgcctgcactctgccattatctc

SEQ ID NO: 189634 - DNA, 75 bp, synthetic construct
  source 1..75: mol_type = other DNA
gccagagatggcaattgatatccgtcatttattagacggcagcctgcaagcgatggttgcggataccttaggcca

SEQ ID NO: 189635 - DNA, 75 bp, synthetic construct
  source 1..75: mol_type = other DNA
aaatatagcgaagaacttgataaatttataatgtcaataatgccattgcagcctaaagtatcaaaaattttggga

SEQ ID NO: 189636 - DNA, 75 bp, synthetic construct
  source 1..75: mol_type = other DNA
gctgtcagtcgcgaacgtcagacgggaatgcagatggtacagtctgtactggaacgcatcggggaggtgaaatga

SEQ ID NO: 189637 - DNA, 75 bp, synthetic construct
  source 1..75: mol_type = other DNA
aatcggtcagccttgatctgatgaaacgcagcaatatcactaccgcaaaagttgaacatggcgtcgataccgcgt

SEQ ID NO: 189638 - DNA, 75 bp, synthetic construct
  source 1..75: mol_type = other DNA
gatcagtgtgctggcttgctggtgggctattcctgctctttagcatcgccatactgcgatgttttccaggtatgc

SEQ ID NO: 189639 - DNA, 75 bp, synthetic construct
  source 1..75: mol_type = other DNA
gcgatcgccacatttcaggcttatcttgagcaaccgatacgctggctacccggtctggaagtgcaaagctacgca

SEQ ID NO: 189640 - DNA, 75 bp, synthetic construct
  source 1..75: mol_type = other DNA
taaaagatcttcttttaggttgtttttataaacgtgatatttatgacaaaatatcagaggcaatgaaagctagag

SEQ ID NO: 189641 - DNA, 75 bp, synthetic construct
  source 1..75: mol_type = other DNA
ctgggtttaaattggtgttcaacaccttgttggcgcaaggtgcagaaacgacgaaacccggcagtgcgctaacac

SEQ ID NO: 189642 - DNA, 75 bp, synthetic construct
  source 1..75: mol_type = other DNA
atgcgtattacatataacgggcatacgcacatatgccctgacggagaaacagataaaccaaatcaaccaatggcg

SEQ ID NO: 189643 - DNA, 75 bp, synthetic construct
  source 1..75: mol_type = other DNA
atgagtacgatagctgagcttgtccgcgccgactttcaggagaacattggccgtgcaaagcggtactggtctgct

SEQ ID NO: 189644 - DNA, 75 bp, synthetic construct
  source 1..75: mol_type = other DNA
aagagcgaaaacgaaattaaccagtggactgaccgccatcctgttgagcgcaccgccattcaggcgatacaatgg

SEQ ID NO: 189645 - DNA, 75 bp, synthetic construct
  source 1..75: mol_type = other DNA
tctttaacattgccatgccgcgatgttttccaggtatgcgatcccatttttgtgcgcctgtactcttttaagaac

SEQ ID NO: 189646 - DNA, 75 bp, synthetic construct
  source 1..75: mol_type = other DNA
cgctgatgtcgccgctttcgcacagcatgtcgattgaagagggccaacgcctgacggatgactgcgcgcggatga

SEQ ID NO: 189647 - DNA, 75 bp, synthetic construct
  source 1..75: mol_type = other DNA
cgctgatgtcgccgctttcgcacagcatgtcgattgaagagggccaacgcctgacggatgactgcgcacgaatga

SEQ ID NO: 189648 - DNA, 75 bp, synthetic construct
  source 1..75: mol_type = other DNA
tactaccgcacgccagaaatgcagaatattttgctgcaaaatgtcgttggccacgctgtccggaaagcaaaaaat

SEQ ID NO: 189649 - DNA, 75 bp, synthetic construct
  source 1..75: mol_type = other DNA
tttgtgcgcctgtactctttcaggaacgtctcaaggacaaacgcacacggcgcgaatctgtctgattcatgctcg

SEQ ID NO: 189650 - DNA, 75 bp, synthetic construct
  source 1..75: mol_type = other DNA
taccgcgtttttgcgttgttttttcctggatgaggataatttctttaatgatttgttagtcatcgtagatacctg

SEQ ID NO: 189651 - DNA, 75 bp, synthetic construct
  source 1..75: mol_type = other DNA
gaccattgccagcatcactttctccggtaacaaatcggtgaaagatgacatgctgaagcaaaacctcgaggcttc

SEQ ID NO: 189652 - DNA, 75 bp, synthetic construct
  source 1..75: mol_type = other DNA
gtacttccttcttctgggatatgggtaccgtttgggatacaaactgggattccagccaatattctggatatccgg

SEQ ID NO: 189653 - DNA, 75 bp, synthetic construct
  source 1..75: mol_type = other DNA
cgtcgctgctgtttagcagcgccaccgtatacggtgctgaaggattcgtagtgaaagatattcatttcgaaggcc

SEQ ID NO: 189654 - DNA, 75 bp, synthetic construct
  source 1..75: mol_type = other DNA
cgcgcgtggaattttgaagcggataccgggaaatggctcaaccgttacatcgaacgttacggtattcgtaaacag

SEQ ID NO: 189655 - DNA, 75 bp, synthetic construct
  source 1..75: mol_type = other DNA
ctcccggaacgtagcagcatgcttcatcgaacagattttcacgatgattaccaaacggtaatggcatacaaagtt

SEQ ID NO: 189656 - DNA, 75 bp, synthetic construct
  source 1..75: mol_type = other DNA
aaaaaaggtatttacgtcacggtgaacatcaccgaaggcgatcagtacaagctttctggcgttgaagtgagcggc

SEQ ID NO: 189657 - DNA, 75 bp, synthetic construct
  source 1..75: mol_type = other DNA
tttgtcattattgacccggagaatggtctggtatttcttgaagtcaaggactggaccgttcacacgttgcatcag

SEQ ID NO: 189658 - DNA, 75 bp, synthetic construct
  source 1..75: mol_type = other DNA
gcaaaaaattgccgggatgtttaccacggggttcagaacccgggtgacaccccggatgagagatattctgcgcgc

SEQ ID NO: 189659 - DNA, 75 bp, synthetic construct
  source 1..75: mol_type = other DNA
gcgggaatgcattgaagccagagggctggcgtcacgggttacggtatcccattttcacagctggtgtgcctcaat

SEQ ID NO: 189660 - DNA, 75 bp, synthetic construct
  source 1..75: mol_type = other DNA
aaaccagccaaaggcgaagttcttgtcgttgtttctggttttactggttgcggaaaaagcgccattgccggggaa

SEQ ID NO: 189661 - DNA, 75 bp, synthetic construct
  source 1..75: mol_type = other DNA
gaagctcggagaacagaccgcacgacagagacagattattgacctgctcgacaacgaagcaggactcacagaaca

SEQ ID NO: 189662 - DNA, 75 bp, synthetic construct
  source 1..75: mol_type = other DNA
aaaaaagacaggatattacaggcacttaaggaacttaagtacgatctggagacatccccaaacccagacgcgtaa

SEQ ID NO: 189663 - DNA, 75 bp, synthetic construct
  source 1..75: mol_type = other DNA
tggcaagctacagccaatgtacggtgattggtattgattacaccctttcacctgaagcgcgttttccgcaagcga

SEQ ID NO: 189664 - DNA, 75 bp, synthetic construct
  source 1..75: mol_type = other DNA
cgcattgctgagttatcacaccatctccagtgcgcgcacggttttatcgagcatacagaggcgtttggccacgaa

SEQ ID NO: 189665 - DNA, 75 bp, synthetic construct
  source 1..75: mol_type = other DNA
ccgcagagaagcgcattgcagaactggaagcacgggaaataaaaccagccaaaggcgaagttcttgtcgttgttt

SEQ ID NO: 189666 - DNA, 75 bp, synthetic construct
  source 1..75: mol_type = other DNA
tggtgtaccggttcagtggactaatggcgatgtggaaaagcgcatgacaggagctgactggctgacagcgattga

SEQ ID NO: 189667 - DNA, 75 bp, synthetic construct
  source 1..75: mol_type = other DNA
tcagatgcagtagatgccgtagttgacagaattgctgatttagaagctaaacagccatcgccagtagtacctgaa

SEQ ID NO: 189668 - DNA, 75 bp, synthetic construct
  source 1..75: mol_type = other DNA
aagtgattctcaggcacaaaagttagttgaagcaatcattgttgcgatagaaaacgaacaggaacgtctttttga

SEQ ID NO: 189669 - DNA, 75 bp, synthetic construct
  source 1..75: mol_type = other DNA
gactggctgactgcgattgagatgtacaaaccaactgtgcgcatcgtggaagttaatgtgccacgcgccgctggc

SEQ ID NO: 189670 - DNA, 75 bp, synthetic construct
  source 1..75: mol_type = other DNA
tttcccgccggcaccgaggaagacctcacggttttgctcggcaatctcttccagcgtctccagacaatccgcagc

SEQ ID NO: 189671 - DNA, 75 bp, synthetic construct
  source 1..75: mol_type = other DNA
gtgccgccctgctatatcgctggcgcagagttcgatccgctgctggatgacagccgcctgctttaccagacgtta

SEQ ID NO: 189672 - DNA, 75 bp, synthetic construct
  source 1..75: mol_type = other DNA
accgcgagtcgccgtattactgcctgtttaataacgatctcactcgcgatgtgcccccctgctatatcgccggtg

SEQ ID NO: 189673 - DNA, 75 bp, synthetic construct
  source 1..75: mol_type = other DNA
attgcagaactggaagcacgggaaataaaaccagccaaaggcgaagttcttgtcgttgtctctggttttactggt

SEQ ID NO: 189674 - DNA, 75 bp, synthetic construct
  source 1..75: mol_type = other DNA
ttgcgctaacggtagggaagttgcgcgttgagcttgaggcagaaaaacagcgggcaaaggatctgtttatggaaa

SEQ ID NO: 189675 - DNA, 75 bp, synthetic construct
  source 1..75: mol_type = other DNA
attgcggtaaagttgcgggcgttttgctgtggtatgggctttacggattacgggattccgtgactcgtcgtctgt

SEQ ID NO: 189676 - DNA, 75 bp, synthetic construct
  source 1..75: mol_type = other DNA
cggggaaaagcgggttgcatcccgtcttgaggcatttatgagtaatgagtgtctggtctggtacgatattccggt

SEQ ID NO: 189677 - DNA, 75 bp, synthetic construct
  source 1..75: mol_type = other DNA
gtgaaggaggttgatgacatgctggctggtaatttcattggtcttaatccttacttccgatacgacctggctaat

SEQ ID NO: 189678 - DNA, 75 bp, synthetic construct
  source 1..75: mol_type = other DNA
atctggcgtggcttaataccattccggtgattggcgcgaagctatatgcaggctggcacaacttgctggatatgg

SEQ ID NO: 189679 - DNA, 75 bp, synthetic construct
  source 1..75: mol_type = other DNA
tgcttacggcagaatgacggtcagtataagggacgactgaacttggcctgggcgtatggtgtggggtttacccgc

SEQ ID NO: 189680 - DNA, 75 bp, synthetic construct
  source 1..75: mol_type = other DNA
aaggatgtggtgcatttactgacgtaccagagcagcaaggggctggagttcccgtatgtggcggttatcaatgcg

SEQ ID NO: 189681 - DNA, 75 bp, synthetic construct
  source 1..75: mol_type = other DNA
gccacggtattaaggtgacggccgacagaaaagaatatcctgataaatgcttcagtgcactggaagaggccgtga

SEQ ID NO: 189682 - DNA, 75 bp, synthetic construct
  source 1..75: mol_type = other DNA
gaaggtagaggatctttctcaagcggtgaagaacctgaaatgatccggcgacttaagttccaaacattgatctgg

SEQ ID NO: 189683 - DNA, 75 bp, synthetic construct
  source 1..75: mol_type = other DNA
atgaggggatctctcagtacctggcgaccgctggcggatgaaaattttcatttaggtctgggattcaccgctggc

SEQ ID NO: 189684 - DNA, 75 bp, synthetic construct
  source 1..75: mol_type = other DNA
gccatcaactatgaacataaatccgccgggattatgcaacaactggggctaccggagatggcgattgatatccgt

SEQ ID NO: 189685 - DNA, 75 bp, synthetic construct
  source 1..75: mol_type = other DNA
tgcgctgatgcttctcttcagcgccctgctgtactggcgcggtgaacaggtggcgcaaggcattcgccattttgc

SEQ ID NO: 189686 - DNA, 75 bp, synthetic construct
  source 1..75: mol_type = other DNA
atctggcgtggcttaataccattccggtgattggcacgaagctgtatgcaggctggcacaacttgctggatatgg

SEQ ID NO: 189687 - DNA, 75 bp, synthetic construct
  source 1..75: mol_type = other DNA
atgaataatggtgtattttcaaaatcagaagagcttgccgccctgctgattgccggtggtttgccgaaaaaagaa

SEQ ID NO: 189688 - DNA, 75 bp, synthetic construct
  source 1..75: mol_type = other DNA
ctggagtgatatggctgtgctgtgtccgacagagcgttcagcgaaacaattgcaagacgttatgacacaacgcgg

SEQ ID NO: 189689 - DNA, 75 bp, synthetic construct
  source 1..75: mol_type = other DNA
tcaccggtcagcaggtcatccgcattattcatcaattgcatcacagcctgagcgaggaacacgcgctcttaatct

SEQ ID NO: 189690 - DNA, 75 bp, synthetic construct
  source 1..75: mol_type = other DNA
aaaatttacgccgacacaggataaatatgaaggtaagccttatgcaacgtacagaataggtttattttttaatgg

SEQ ID NO: 189691 - DNA, 75 bp, synthetic construct
  source 1..75: mol_type = other DNA
ccttatgtctgtattgccgtgcagtctacagcacaggcaaagcactggaataatggtccgggatgggctgaagtg

SEQ ID NO: 189692 - DNA, 75 bp, synthetic construct
  source 1..75: mol_type = other DNA
tgtggcgttcacacgggcaacccgcgaattactggtaacctgttaccgtgaaaacagtatcagctgtcaccttga

SEQ ID NO: 189693 - DNA, 75 bp, synthetic construct
  source 1..75: mol_type = other DNA
ggttgcagactggctggagaaacgccatgccctgtgtggtcactggagtgatatggctgtactgtgtccggcaga

SEQ ID NO: 189694 - DNA, 75 bp, synthetic construct
  source 1..75: mol_type = other DNA
atatggactacgtgtgtgatctggcaggccagcctgaaataaccatgtacaaagatgatggagaaacaaatgtcg

SEQ ID NO: 189695 - DNA, 75 bp, synthetic construct
  source 1..75: mol_type = other DNA
atttacttcacccgcagacgagttccgtaaagccggacacgaagtgattaccattgaaaaacaagcgggtaaaac

SEQ ID NO: 189696 - DNA, 75 bp, synthetic construct
  source 1..75: mol_type = other DNA
aagctattgctaccagagttctttctcatcttaatacaaaatgaaaaagtccgtgagttactaacaaaacaagcg

SEQ ID NO: 189697 - DNA, 75 bp, synthetic construct
  source 1..75: mol_type = other DNA
gctgatgattttttgcgtgctacgtttctggaaatttttggcgatcccgttaaaaaccctaaaggatggaaaaag

SEQ ID NO: 189698 - DNA, 75 bp, synthetic construct
  source 1..75: mol_type = other DNA
tgatttcaaccatacagattttctttggtgtccagaatataaaggtactgaaaggcagtttgaatgtacccgact

SEQ ID NO: 189699 - DNA, 75 bp, synthetic construct
  source 1..75: mol_type = other DNA
ttttgtgaatagcggcaaacctgttttcgccatctgtcacggtccccagttgctgatcagcgccgatgtgatccg

SEQ ID NO: 189700 - DNA, 75 bp, synthetic construct
  source 1..75: mol_type = other DNA
tgctgatcagcgccgatgtgattcgggggcgcaaactgaccgcagttaaaccgatcattattgatgttaaaaacg

SEQ ID NO: 189701 - DNA, 75 bp, synthetic construct
  source 1..75: mol_type = other DNA
attatgtccgtaccttcttccgtggcgtcgatattagtcaggtattcagtgcgaaagatattgcccgccggacac

SEQ ID NO: 189702 - DNA, 75 bp, synthetic construct
  source 1..75: mol_type = other DNA
cgcctgattgaacccacccgcggacaagtgctgattgacggtgtagatattgccaaaatatccgatgccgaactc

SEQ ID NO: 189703 - DNA, 75 bp, synthetic construct
  source 1..75: mol_type = other DNA
attggtgtaccggttcagtggactaatggcgatgcggaaaagcgcatgacaggagctgactggctgacagcgatt

SEQ ID NO: 189704 - DNA, 75 bp, synthetic construct
  source 1..75: mol_type = other DNA
gacgttagcattgttgaccagtgccagaaaaccgctgatgtagttcgggcgatgctggatgagctggaaagaaac

SEQ ID NO: 189705 - DNA, 75 bp, synthetic construct
  source 1..75: mol_type = other DNA
aaactcaacgagcagcgcgagtattacgagggagttatctctgatgggtgcaagcgtattgctgaactggaagcg

SEQ ID NO: 189706 - DNA, 75 bp, synthetic construct
  source 1..75: mol_type = other DNA
cgaggatattgcgcttacggtagggaagttgcgcgttgagcttgaggcagaaaaacagcgggcaaaggatctgtt

SEQ ID NO: 189707 - DNA, 75 bp, synthetic construct
  source 1..75: mol_type = other DNA
cgaaaacggtcagcttgttgccgatacgctacgccacttagctgataacgaaatcgactctgattattttgctat

SEQ ID NO: 189708 - DNA, 75 bp, synthetic construct
  source 1..75: mol_type = other DNA
aatggtttacaggcagcatcaggttcttgaggcactgcacaacgctggaataaacgtcaccgaagcaggtaaagg

SEQ ID NO: 189709 - DNA, 75 bp, synthetic construct
  source 1..75: mol_type = other DNA
gaattgccattatgcaaaatggtgaagtcgttcaggtcggtacaccggatgaaattcttaataatccggcgaatg

SEQ ID NO: 189710 - DNA, 75 bp, synthetic construct
  source 1..75: mol_type = other DNA
gaacaaggactttcgaaagaacaaattctggaaaaaactgggctatcgcttggcgtaaaagacgccagtctggcc

SEQ ID NO: 189711 - DNA, 75 bp, synthetic construct
  source 1..75: mol_type = other DNA
tgtactgccgcgtgcgcacgatgttcacccattagggccgcagtcggcgaaaattttttgtgagtttcaccggag

SEQ ID NO: 189712 - DNA, 75 bp, synthetic construct
  source 1..75: mol_type = other DNA
tggactaatggcgatgcggaaaagcgcatgacaggagctgactggctgacagcgattgagatgtacaaaccaaca

SEQ ID NO: 189713 - DNA, 75 bp, synthetic construct
  source 1..75: mol_type = other DNA
tgatgagccaaccagctccctttctgcccgtgaaatcgacaatcttttccgcgttattcgtgaactgcgaaaaga

SEQ ID NO: 189714 - DNA, 75 bp, synthetic construct
  source 1..75: mol_type = other DNA
tatgtcaaaacctttaccgatatgcagcaggttgaccacgacgcgctggtgcaggcgatggtcgggcgcgacatt

SEQ ID NO: 189715 - DNA, 75 bp, synthetic construct
  source 1..75: mol_type = other DNA
catttcgcggcattggtaaaactttccccggcgttaaggcgttgacggatattagttttgactgctatgccggtc

SEQ ID NO: 189716 - DNA, 75 bp, synthetic construct
  source 1..75: mol_type = other DNA
ctgctggagcgctggttaccccggccacaggaactgtcgatggatgccggcgatccggtcactgaatttgctcag

SEQ ID NO: 189717 - DNA, 75 bp, synthetic construct
  source 1..75: mol_type = other DNA
ggcatgtttggcgggacgcaaatcaccgccggtcaggtttatatcgaccaacagccgatcgatattcgtaaaccg

SEQ ID NO: 189718 - DNA, 75 bp, synthetic construct
  source 1..75: mol_type = other DNA
gttcgcgacaatatcaacatcagtgccagacgtaatttatgcgctggcggcgcagggcgtggcggtgctgtttgc

SEQ ID NO: 189719 - DNA, 75 bp, synthetic construct
  source 1..75: mol_type = other DNA
taaccttggcgccagaactagttgagcacgtctcatttatattagggaaaaaatataaagtcattaaatttcttg

SEQ ID NO: 189720 - DNA, 75 bp, synthetic construct
  source 1..75: mol_type = other DNA
ttactggttgcggaaaaagcgccattgccggggaaatagaaatcgcgatgaaggctattggtgtaccggttaagt

SEQ ID NO: 189721 - DNA, 75 bp, synthetic construct
  source 1..75: mol_type = other DNA
taagcgcattgcagaactggaagcacgggaaataaaaccagccaaaggtgaagttcttgtcgttgtttctggttt

SEQ ID NO: 189722 - DNA, 75 bp, synthetic construct
  source 1..75: mol_type = other DNA
atcttatacgtttctcaccgtatggaagaaatatttgccctcagcgatgccatcactgtctttaaagatggacgt

SEQ ID NO: 189723 - DNA, 75 bp, synthetic construct
  source 1..75: mol_type = other DNA
cgatgcactggatctgatcctgacgccgttcctgacggtgatcatttccggttttatcgccctgctgattatcgg

SEQ ID NO: 189724 - DNA, 75 bp, synthetic construct
  source 1..75: mol_type = other DNA
caaaaaaaatgaacaagaatctaatagactcaaaaggcaagtgcttgagtatgcattcaataaagtgcagtattt

SEQ ID NO: 189725 - DNA, 75 bp, synthetic construct
  source 1..75: mol_type = other DNA
acgcagtttgaacaagttgctgacctctacgaaatgcaatttgatgacggtcgcacttgtgcctttcacactgat

SEQ ID NO: 189726 - DNA, 75 bp, synthetic construct
  source 1..75: mol_type = other DNA
gcagcaatccttaacgctgctaaacgcgcatatgaagaatcagcaagcgccgctggcatcaaggaggagtctgag

SEQ ID NO: 189727 - DNA, 75 bp, synthetic construct
  source 1..75: mol_type = other DNA
ttgacgaaaagcttatggagcttcacaagtggttttgggaacaaagcgaagccgagcgcgccgcaggcattcgca

SEQ ID NO: 189728 - DNA, 75 bp, synthetic construct
  source 1..75: mol_type = other DNA
gctgaatttattgctgcctttaatccaaaggttgctttggcactactggatgaacgggaaagaaaccagcaatac

SEQ ID NO: 189729 - DNA, 75 bp, synthetic construct
  source 1..75: mol_type = other DNA
tgcgtgaagcggcagaaaaagcaacgtggggagactgggactcatataaaccacaccgtggcacacgtggttatg

SEQ ID NO: 189730 - DNA, 75 bp, synthetic construct
  source 1..75: mol_type = other DNA
tgcgtgaaaaggaagagaaagcaacgagtggtgtgtggtcgctcgaatatggagaggagagatttgatgctggtg

SEQ ID NO: 189731 - DNA, 75 bp, synthetic construct
  source 1..75: mol_type = other DNA
tgcgaatggcggcagaaaatgcaacaccaggcgaatggtgtactgatgactactatggggtaattgctgatgccg

SEQ ID NO: 189732 - DNA, 75 bp, synthetic construct
  source 1..75: mol_type = other DNA
gtgaacaagattgactatcaggcattgcgtgaaaaggcagagaaagcaacgtgtggtgagtggtcgctcgaatat

SEQ ID NO: 189733 - DNA, 75 bp, synthetic construct
  source 1..75: mol_type = other DNA
gcagccagtccagctaccgtgctggcgctgctggatgaacgggaaaggaaccagcaatacatcaaatcccgcgac

SEQ ID NO: 189734 - DNA, 75 bp, synthetic construct
  source 1..75: mol_type = other DNA
ctgttaatcgggaaaaacattctggtcatgcaggctgccattatcgaatggcaggcaactggcgacgctaagagc

SEQ ID NO: 189735 - DNA, 75 bp, synthetic construct
  source 1..75: mol_type = other DNA
tgcgtgccaaggcagaaaaagcaactaaaggaagctacatcgtagggcatacatctgttaaccagtacggcaatt

SEQ ID NO: 189736 - DNA, 75 bp, synthetic construct
  source 1..75: mol_type = other DNA
atttgtgcatggtattcagtggattggctacacgctccacttcccggactggctgactatcttcctcgcccaggg

SEQ ID NO: 189737 - DNA, 75 bp, synthetic construct
  source 1..75: mol_type = other DNA
gctgcgtgctgagctggaagccgcagaggagcgcattgcagaactggaaagcaacgaagtccgtgaagtcggaaa

SEQ ID NO: 189738 - DNA, 75 bp, synthetic construct
  source 1..75: mol_type = other DNA
caaccctgaagtagtgcaggcgttgctggatgaacgggaaagaaaccagcaatacattaaacgccgggaccagga

SEQ ID NO: 189739 - DNA, 75 bp, synthetic construct
  source 1..75: mol_type = other DNA
caagcgtattgctgaactggaagcgcgggaagttcaattaccgactcgctacgaccttcgatatggacacccgat

SEQ ID NO: 189740 - DNA, 75 bp, synthetic construct
  source 1..75: mol_type = other DNA
gttgcgggaggttgtgcttccgcaatgctatagcatgttgcatcgcgtcgattttgacgagccttaccacactga

SEQ ID NO: 189741 - DNA, 75 bp, synthetic construct
  source 1..75: mol_type = other DNA
cgccgcgatcaggagaacgaggatattgctcttactgttgggaagctgagagttgagctggaagccgcagagaag

SEQ ID NO: 189742 - DNA, 75 bp, synthetic construct
  source 1..75: mol_type = other DNA
ttggtaatccaaactctggcaagaccaccttatttaaccagctcactggcgcacgtcagcgcgtgggaaactggg

SEQ ID NO: 189743 - DNA, 75 bp, synthetic construct
  source 1..75: mol_type = other DNA
ctgtccggtgatcccgctggtttcaacccgtggtcgcggtattgaagcgctcaagctggcgattgatcgctataa

SEQ ID NO: 189744 - DNA, 75 bp, synthetic construct
  source 1..75: mol_type = other DNA
tctacagccgcgcctacgccggtgaagcgtcgcagcatctggatgccgccctcgcccgtctgcgtaatgagatgg

SEQ ID NO: 189745 - DNA, 75 bp, synthetic construct
  source 1..75: mol_type = other DNA
tgaaactggcaattgaccgctacaaagccaacgagaatgtagaactggtgcattacgcccaaccgctaatcaatg

SEQ ID NO: 189746 - DNA, 75 bp, synthetic construct
  source 1..75: mol_type = other DNA
atgaaaaaattaaccattggcttaattggtaatccaaattctggcaagacaaccttatttaaccagctcaccggc

SEQ ID NO: 189747 - DNA, 75 bp, synthetic construct
  source 1..75: mol_type = other DNA
ggtagacgcttcaaaccttgagcgtaacctttacctgacgctgcaactgctggaactcggcattccgtgcattgt

SEQ ID NO: 189748 - DNA, 75 bp, synthetic construct
  source 1..75: mol_type = other DNA
aatcggtcagccttgatttgatgaaacgcagcaatatcactaccgcaaaagttgaacatggcgttgataccgcgt

SEQ ID NO: 189749 - DNA, 75 bp, synthetic construct
  source 1..75: mol_type = other DNA
aattccaggaaatggcagcgaatatagttcgttcccaactggcgactcttgacctgagtgccgtagaaaaagaaa

SEQ ID NO: 189750 - DNA, 75 bp, synthetic construct
  source 1..75: mol_type = other DNA
tggcctatcacgactggtggttacgtaaccgcgatcacaacggcaacggcgtgccggaatatggcgcgacccgcg

SEQ ID NO: 189751 - DNA, 75 bp, synthetic construct
  source 1..75: mol_type = other DNA
gtgtatcagtagagacttccaccacagagaaccagattcaagccattaagaaggctggctatgatattcctaagt

SEQ ID NO: 189752 - DNA, 75 bp, synthetic construct
  source 1..75: mol_type = other DNA
ggcagggcgtagtgaattaatgaaggggatgtttggcggcacgcaaattactgcggggcaggtttatatcgatcg

SEQ ID NO: 189753 - DNA, 75 bp, synthetic construct
  source 1..75: mol_type = other DNA
cattccaggaaatggcagcgaatatagttcattctcaattggcgactcttgacctgagtaccgtagaaaaagaaa

SEQ ID NO: 189754 - DNA, 75 bp, synthetic construct
  source 1..75: mol_type = other DNA
aagggattcgaatagctccccttgaaaatcattttacagcaagcagtattaattcctgtgatttaaagcatcaca

SEQ ID NO: 189755 - DNA, 75 bp, synthetic construct
  source 1..75: mol_type = other DNA
atgcctggtctgaatcaccgagaaatatgattgccctggctaaagggatttctatgcacgcacgccaccacgcca

SEQ ID NO: 189756 - DNA, 75 bp, synthetic construct
  source 1..75: mol_type = other DNA
actcccgccggttctgccagaaatcaatcgtgaagcatggataaaacttggcagcctttcacaggatttaaacta

SEQ ID NO: 189757 - DNA, 75 bp, synthetic construct
  source 1..75: mol_type = other DNA
cctaatgaagttcgaactcactgcgtcagcgttcggttaaacgaagaagaattatctattctcgatagtaaaaga

SEQ ID NO: 189758 - DNA, 75 bp, synthetic construct
  source 1..75: mol_type = other DNA
aaggtaaacttattcttcaactattcagtacctttgcagagtttgaacttaaccgcatcagagagcgaaccagag

SEQ ID NO: 189759 - DNA, 75 bp, synthetic construct
  source 1..75: mol_type = other DNA
gctactggcagaaacagagcggagtaggggctaacgccacggcgctaatcggtttctctcaaggcgcgattatgg

SEQ ID NO: 189760 - DNA, 75 bp, synthetic construct
  source 1..75: mol_type = other DNA
tttactgataactggctgaacgatatgaaaaaagaattatcagcagaggactggaaaatgctgtttatgtgcgaa

SEQ ID NO: 189761 - DNA, 75 bp, synthetic construct
  source 1..75: mol_type = other DNA
tgctctgcccggaagatcgcaaagcggaaggcattattcccgtgcactccgttcgcgacaatatcaacatcagtg

SEQ ID NO: 189762 - DNA, 75 bp, synthetic construct
  source 1..75: mol_type = other DNA
cgaaccagagaaagcagacaataagacgataaaagactaagagtcaaaatcggttgaagacgaagatattattcg

SEQ ID NO: 189763 - DNA, 75 bp, synthetic construct
  source 1..75: mol_type = other DNA
atgagtgttatgaatccaataagttctaatatatttaatgctgaatttttaaacaccccggcagcggcacttgcc

SEQ ID NO: 189764 - DNA, 75 bp, synthetic construct
  source 1..75: mol_type = other DNA
tttaccattcattgcttctgatgattacttgaaaaaaataaaaaccagtcgattttattatgagcaaaataaata

SEQ ID NO: 189765 - DNA, 75 bp, synthetic construct
  source 1..75: mol_type = other DNA
cgaaccagagaaagcagacaagaagacgattaaagactcagagtcaaaatcggttgaagacgaagatattattcg

SEQ ID NO: 189766 - DNA, 75 bp, synthetic construct
  source 1..75: mol_type = other DNA
cgaaccagagaaagcagacaacaagacgatgaaagacttagagtcaaaatcggttgaagacgaagatattattcg

SEQ ID NO: 189767 - DNA, 75 bp, synthetic construct
  source 1..75: mol_type = other DNA
cgaaccagagaaagcagacaacaagacgattaaagactgagagtcaaaatcggttgaagacgaagatattattcg

SEQ ID NO: 189768 - DNA, 75 bp, synthetic construct
  source 1..75: mol_type = other DNA
ttatccctgctggtgctaacgttgttgctcgccgtcgttcctggcagcaaccattgtgtgttgagttgttgaaac

SEQ ID NO: 189769 - DNA, 75 bp, synthetic construct
  source 1..75: mol_type = other DNA
gacctgagtaccgtagaaaaagaaaccatcgataatatatccggtaacgtgcgccgagcctttatcgggctgtac

SEQ ID NO: 189770 - DNA, 75 bp, synthetic construct
  source 1..75: mol_type = other DNA
aggatttacataaaaaatacttcttggaattaatggacatcattgataagggatttggcttgttaatgaaacaga

SEQ ID NO: 189771 - DNA, 75 bp, synthetic construct
  source 1..75: mol_type = other DNA
caagatcttgtgtcaaatgaaaattcattacagtgttttaaattaggtattgaagcgctaaataagttctctcaa

SEQ ID NO: 189772 - DNA, 75 bp, synthetic construct
  source 1..75: mol_type = other DNA
aagacggtattgccaatatgtcattatctatatatgcatactcgacatgtcgtttctggtcaaaagaaagtgtgg

SEQ ID NO: 189773 - DNA, 75 bp, synthetic construct
  source 1..75: mol_type = other DNA
gaatattgtcactggtgataaggttcacattaccccggaaagtacaggcgctgatgattgggagtttgtacattg

SEQ ID NO: 189774 - DNA, 75 bp, synthetic construct
  source 1..75: mol_type = other DNA
ttgattatgcaagtaaggataatctagatgatgccgctgattatttgagaggaaaaaaagctatacgtatgcgtg

SEQ ID NO: 189775 - DNA, 75 bp, synthetic construct
  source 1..75: mol_type = other DNA
tcattgaagtgcgtcatgctgttgacgcggttccgtacccgaaatttgctgagctgatcggcaagaagcccgcca

SEQ ID NO: 189776 - DNA, 75 bp, synthetic construct
  source 1..75: mol_type = other DNA
agtacccgctagacgcggttcatcctgataagttcgcggaattgctgggtaaaccacgcacagccgtacaaacca

SEQ ID NO: 189777 - DNA, 75 bp, synthetic construct
  source 1..75: mol_type = other DNA
aaacacaaaatttataaagataaacttaaacatcataatatatttgtttcaattaatgatctcgagggtgatatt

SEQ ID NO: 189778 - DNA, 75 bp, synthetic construct
  source 1..75: mol_type = other DNA
attcgtctaaagttccaaggaaaaaagagtggcaatattcaggtttaaatcgagctttggctctatgtggaatgg

SEQ ID NO: 189779 - DNA, 75 bp, synthetic construct
  source 1..75: mol_type = other DNA
aaggatttaggaactattctgatagttttgtaaaatttaattattcaactcttataattggtggtaatgatgttg

SEQ ID NO: 189780 - DNA, 75 bp, synthetic construct
  source 1..75: mol_type = other DNA
cctacacgagtcatgggaaaagctctgtgttgtcggtttctcaacttctcttggggcatcggtttttggaaacgc

SEQ ID NO: 189781 - DNA, 75 bp, synthetic construct
  source 1..75: mol_type = other DNA
tgatacgagattttgccattccattgcccgcgagctaggttttccgctgcatggtgcaacgtctcctaccaggct

SEQ ID NO: 189782 - DNA, 75 bp, synthetic construct
  source 1..75: mol_type = other DNA
tcagcacggtaatcagaagcagggggcctggctggatagctggctgcaatacgcgtggtttaacaatgatgtttc

SEQ ID NO: 189783 - DNA, 75 bp, synthetic construct
  source 1..75: mol_type = other DNA
atgagcgaatcagagcttgaggggttcattcaggtagcaccatatccacttgaagcggtgccatatcaactattt

SEQ ID NO: 189784 - DNA, 75 bp, synthetic construct
  source 1..75: mol_type = other DNA
aaacctttttacggccgcaccgggatataagagtaaccccatgctggacgagctcgccgaactgtatcgggctta

SEQ ID NO: 189785 - DNA, 75 bp, synthetic construct
  source 1..75: mol_type = other DNA
ttggggcatcggtttttggaaacgcctatgccttcttcagcaatatcacagagcaaattcatctttgcctgacct

SEQ ID NO: 189786 - DNA, 75 bp, synthetic construct
  source 1..75: mol_type = other DNA
tgaggcagaacaggaacgtactaaaatcgtggcccaggcgcaggcggaaattgaagctgagcgtaaacgtgcccg

SEQ ID NO: 189787 - DNA, 75 bp, synthetic construct
  source 1..75: mol_type = other DNA
accgcttcctgaaattccgtgaaggcgcttttacagatccggattcctatttccataactacgctaaattaacaa

SEQ ID NO: 189788 - DNA, 75 bp, synthetic construct
  source 1..75: mol_type = other DNA
ggctcaaaagggagatttgattatcgcaactactagtgagaatgatgaggatgtatgtaaagctgttgcatggtt

SEQ ID NO: 189789 - DNA, 75 bp, synthetic construct
  source 1..75: mol_type = other DNA
ttttcagaaaaaagactttatggatgcaggtgtaggatgcatacactatggtcaaatctatacgtattacggaac

SEQ ID NO: 189790 - DNA, 75 bp, synthetic construct
  source 1..75: mol_type = other DNA
aacccagagcggaatattcctggtaacagcgaaaaacattcggatgggatatatagattaccatgcttcgcaaga

SEQ ID NO: 189791 - DNA, 75 bp, synthetic construct
  source 1..75: mol_type = other DNA
atggatggattcaaaaaatttttaatccctcttccctgcccggataatccggaaaaatcccttgccatccagtct

SEQ ID NO: 189792 - DNA, 75 bp, synthetic construct
  source 1..75: mol_type = other DNA
acacagctatcaaattcatttttaaagcactatttattgggtagtcaatttcaagataaattgatgcaagcggcg

SEQ ID NO: 189793 - DNA, 75 bp, synthetic construct
  source 1..75: mol_type = other DNA
taccggtgaagatggtcaaggccatcatccatcatgtgatttctatggagatagactaacatctgaggtgaagca

SEQ ID NO: 189794 - DNA, 75 bp, synthetic construct
  source 1..75: mol_type = other DNA
cgaatacaattgaatatatcgaaagggatatacctgaattaaaagcggacgaggcacttttaaaaatacgtgccg

SEQ ID NO: 189795 - DNA, 75 bp, synthetic construct
  source 1..75: mol_type = other DNA
ttgaagccgagcgtaaacgtgcccgtgaagagctgcgtaagcaagttgctatcctggctgttgctggcgccgaga

SEQ ID NO: 189796 - DNA, 75 bp, synthetic construct
  source 1..75: mol_type = other DNA
gatactttttctcgttggttcgtctattgtttcccatatattaaaaatgctttcctgaatgagggtaattatacc

SEQ ID NO: 189797 - DNA, 75 bp, synthetic construct
  source 1..75: mol_type = other DNA
ataatgattgtgaaacggggattgccgaaaaattatatacccacaaaaaaggtattttacatcgggctgtttctg

SEQ ID NO: 189798 - DNA, 75 bp, synthetic construct
  source 1..75: mol_type = other DNA
accggtactcgcacccataaaccgttcatttttaccaaagaaatcgatgcgtccagcccgtatctctacaaagct

SEQ ID NO: 189799 - DNA, 75 bp, synthetic construct
  source 1..75: mol_type = other DNA
gattctgctggaaaaagcatggatacatgccagtactaaatggcaatgcaatcacattgatatacctgttttttt

SEQ ID NO: 189800 - DNA, 75 bp, synthetic construct
  source 1..75: mol_type = other DNA
gtgaacaacaaaaagcatccggtctgttaagatgcttggagcagcgagttttggggcagcgatatgctatgtccg

SEQ ID NO: 189801 - DNA, 75 bp, synthetic construct
  source 1..75: mol_type = other DNA
tgctacgttctcttttgcccatgatggaaaaacaccataatgtttctatcagggaagaagcaataactgcaacgg

SEQ ID NO: 189802 - DNA, 75 bp, synthetic construct
  source 1..75: mol_type = other DNA
agtgtgtggataaaaactgtgttgctgatgttgtatcaggatggacaggaattccactgggactatgtcttgata

SEQ ID NO: 189803 - DNA, 75 bp, synthetic construct
  source 1..75: mol_type = other DNA
tggggagaatataaaaagtattttgaaaaagacggcgcattagcccggcgttttcagatcgtaaaagtaactgaa

SEQ ID NO: 189804 - DNA, 75 bp, synthetic construct
  source 1..75: mol_type = other DNA
catttatgggaagagctaacttaattccgttcacaccgttgcataccaaaatacttagagatatcgtactcatca

SEQ ID NO: 189805 - DNA, 75 bp, synthetic construct
  source 1..75: mol_type = other DNA
atgaatccggcattgcttgccacgctcggaacgcttgcggaaacggcgtcgctgaaaacggacatcttaccgccg

SEQ ID NO: 189806 - DNA, 75 bp, synthetic construct
  source 1..75: mol_type = other DNA
tgccgcaggagaaacccgaacagcaggccagactggcgacttacgccagtgaagatttacatgccattgcgtcga

SEQ ID NO: 189807 - DNA, 75 bp, synthetic construct
  source 1..75: mol_type = other DNA
gaaaccagaacgcgcgaagcctgagccaacccgcgtgaacgcgcgcacgccagtagagcgtaaaacggaaaaatt

SEQ ID NO: 189808 - DNA, 75 bp, synthetic construct
  source 1..75: mol_type = other DNA
atgagtacctatctgaaattaattattaataaattaactccagaaagccgaagtactcttgattctgctattaat

SEQ ID NO: 189809 - DNA, 75 bp, synthetic construct
  source 1..75: mol_type = other DNA
atgcgttatgttgtgatatggatgtagctgaggagttacttatctctttttcagacgaagcagagcattctgctt

SEQ ID NO: 189810 - DNA, 75 bp, synthetic construct
  source 1..75: mol_type = other DNA
aaatcaaaacgattttagacgactttcgcatatcaaaaaagagtcttaccgatatgagcacagaacagtgggtta

SEQ ID NO: 189811 - DNA, 75 bp, synthetic construct
  source 1..75: mol_type = other DNA
agcctgctcttgcccgtggggaattgcgcattatagccgccacgacatggggagaatataaaaagtattttgaaa

SEQ ID NO: 189812 - DNA, 75 bp, synthetic construct
  source 1..75: mol_type = other DNA
cgaatatcaacaactgtttcgccgtggcgacctgatgttaccaataagcaatctgtgggccggaaggctgcaaaa

SEQ ID NO: 189813 - DNA, 75 bp, synthetic construct
  source 1..75: mol_type = other DNA
cgatggttgcggataccttaggccaacttccggcgctgaacgcacgacttagcgaagccgtcagtcgcgaacgtc

SEQ ID NO: 189814 - DNA, 75 bp, synthetic construct
  source 1..75: mol_type = other DNA
ccgcatggtggcgctcaatctgcgccagcacatcagcgatcctgcccgttatcacgtggtgatggatgaactcaa

SEQ ID NO: 189815 - DNA, 75 bp, synthetic construct
  source 1..75: mol_type = other DNA
aacgaagccgtcagtcgtgaacgcatgacggggatgcagatggtgcaatctgtactggaacgcatcggggaggcg

SEQ ID NO: 189816 - DNA, 75 bp, synthetic construct
  source 1..75: mol_type = other DNA
cgcgtctgcactccgccattatctccatgaactttgccactccggcaattgccatcaactacgaacataaatccg

SEQ ID NO: 189817 - DNA, 75 bp, synthetic construct
  source 1..75: mol_type = other DNA
atcatttccgtcgcacgcttaaccgagaaaaaaggcctgcatgtggcgattgaagcctgccgtcagttgaaagag

SEQ ID NO: 189818 - DNA, 75 bp, synthetic construct
  source 1..75: mol_type = other DNA
aatcaggatgtcactgcagggatactacgttctcttttacccatgatggaaaagcaccataatgtctccatcagg

SEQ ID NO: 189819 - DNA, 75 bp, synthetic construct
  source 1..75: mol_type = other DNA
agagactgctaggtcattggccaagtttgtttatggagatgaaaataaactgatcactattaatatgactgaatt

SEQ ID NO: 189820 - DNA, 75 bp, synthetic construct
  source 1..75: mol_type = other DNA
tccgggagttgggaaaagtagtatagttgaaggtttagcgctgcaaattgcatctggtcgtgttcctggtacatt

SEQ ID NO: 189821 - DNA, 75 bp, synthetic construct
  source 1..75: mol_type = other DNA
actggcatcaaacactcaagagaatagtcatttaatccaactccgcgactggctcctccctctacttatgaacgg

SEQ ID NO: 189822 - DNA, 75 bp, synthetic construct
  source 1..75: mol_type = other DNA
ccactgggtgtatgccttgatagtgaacaacaaaaaacatccggtctgttaagatgtctggagcaacgggttttg

SEQ ID NO: 189823 - DNA, 75 bp, synthetic construct
  source 1..75: mol_type = other DNA
cacctgtattttctgagtcgatgcagactctgctggaaaaaacatggatacatgccagtactaaatggcagtcta

SEQ ID NO: 189824 - DNA, 75 bp, synthetic construct
  source 1..75: mol_type = other DNA
acgaagaagccgctgcgcaaggtttgctggccggtcttaacgctgcccgtctgtctgctgacaaagaaggttggg

SEQ ID NO: 189825 - DNA, 75 bp, synthetic construct
  source 1..75: mol_type = other DNA
ggttaaggtccatatcggtaaccgcagtggactgggtgccggaaatcgcatccgtctttcgcagcgggccacgct

SEQ ID NO: 189826 - DNA, 75 bp, synthetic construct
  source 1..75: mol_type = other DNA
gtaccgggctgacgcaggccctggcccttaacaacgatatctggcgggccagtttttatcgtttctgtcagctgc

SEQ ID NO: 189827 - DNA, 75 bp, synthetic construct
  source 1..75: mol_type = other DNA
ctcaaactttcgttttcgggcatttcgtccagacttaagttcacaacacctcaccggagcctgctccggtgagtt

SEQ ID NO: 189828 - DNA, 75 bp, synthetic construct
  source 1..75: mol_type = other DNA
caggcagatcgtgtgctctaccgtcaggcggtacgtacggcgctggagaaccaaccgaacctgatgatcttccag

SEQ ID NO: 189829 - DNA, 75 bp, synthetic construct
  source 1..75: mol_type = other DNA
gtttgctggctggcctgaacgccgcccgcttgtctgctgataaagaaggttgggcgccggcgcgttcccaggctt

SEQ ID NO: 189830 - DNA, 75 bp, synthetic construct
  source 1..75: mol_type = other DNA
ttattggcttccgaataaattacagcgtgctgtggattatttttcggctattgatcctttacaacctaccttgta

SEQ ID NO: 189831 - DNA, 75 bp, synthetic construct
  source 1..75: mol_type = other DNA
gttcactggtgccgaatcagtttgccctgggcatttactggcagttgtcgtccctgccggagggagtgacgctgg

SEQ ID NO: 189832 - DNA, 75 bp, synthetic construct
  source 1..75: mol_type = other DNA
cgaaccagagaaagcagacaagaagacgatcaaagacttagagtcaaaatcggttgaagacgaagatattattcg

SEQ ID NO: 189833 - DNA, 75 bp, synthetic construct
  source 1..75: mol_type = other DNA
aggcgcaaggctggtcgatggaaaatgtgattgcgtttggcgataactttaatgatatcagtatgctggaagccg

SEQ ID NO: 189834 - DNA, 75 bp, synthetic construct
  source 1..75: mol_type = other DNA
aacagcgcccaacgtttactcaggttgcctctctggccgaaacggcgcaacacgttaatgcgatatggaaattcg

SEQ ID NO: 189835 - DNA, 75 bp, synthetic construct
  source 1..75: mol_type = other DNA
gtgaatgctgaattaaaacgcaaaattttgtccgatagtggtatcggtgtaccattcgcgcagacgaaaattctt

SEQ ID NO: 189836 - DNA, 75 bp, synthetic construct
  source 1..75: mol_type = other DNA
atggacagtgctaaagaaattgcccgggatatgctggaggccgtaaatattaatggggatgggtttctgggggcc

SEQ ID NO: 189837 - DNA, 75 bp, synthetic construct
  source 1..75: mol_type = other DNA
atagctgaaatgttttatgaacattctttattgaatccggatgctcttcttaatgtcattgaaaatgaactgctt

SEQ ID NO: 189838 - DNA, 75 bp, synthetic construct
  source 1..75: mol_type = other DNA
actcttaaagagatcactatcattaaaattaaaaaaatttgtgaccgttttgaaatggcatccggtcatctttgt

SEQ ID NO: 189839 - DNA, 75 bp, synthetic construct
  source 1..75: mol_type = other DNA
atcaccagatttaattcaggttcttgaagctaaattagcaagactcaagggtgaacttgtactgctgacacagga

SEQ ID NO: 189840 - DNA, 75 bp, synthetic construct
  source 1..75: mol_type = other DNA
acaactcgacaacggcaaactgatggtgcacatcggcgcgaaccaaagtgaagtttccgcgcgttacagcagttt

SEQ ID NO: 189841 - DNA, 75 bp, synthetic construct
  source 1..75: mol_type = other DNA
ttaccctgccgaaaatggcggtggccgcggtggcagagcgcgttcataacgctaaaaccagccagcaacaggcga

SEQ ID NO: 189842 - DNA, 75 bp, synthetic construct
  source 1..75: mol_type = other DNA
atgaatccggcattgcttgccacgctcggaacgcttgcggaaacggcgtcgctgaaagcggatattttaccgccg

SEQ ID NO: 189843 - DNA, 75 bp, synthetic construct
  source 1..75: mol_type = other DNA
gttggtggaagtattctggctgccaacaaagtttacgatcaggtgatgcgtacatatcgacaaagagaatgggca

SEQ ID NO: 189844 - DNA, 75 bp, synthetic construct
  source 1..75: mol_type = other DNA
gtaactctgtaattgatgaagtcgttgtctgcgataccattccgctgagcgatgaaatcaaatcactgccgaacg

SEQ ID NO: 189845 - DNA, 75 bp, synthetic construct
  source 1..75: mol_type = other DNA
gctgaaagctcagggggatttggatcttttgtactttcttgttgaagatattgtgcgcccgtttgaacgagcctg

SEQ ID NO: 189846 - DNA, 75 bp, synthetic construct
  source 1..75: mol_type = other DNA
ggcatgctggcgcgcgccagggaggccggactgaatgtgcagaaaatggattgtctgcagtttttgcaaagtcag

SEQ ID NO: 189847 - DNA, 75 bp, synthetic construct
  source 1..75: mol_type = other DNA
acattgctacaacgtttgttccaacgcgtaatgctggtgcaatctgacacgatgatgatgcagtccagaagatat

SEQ ID NO: 189848 - DNA, 75 bp, synthetic construct
  source 1..75: mol_type = other DNA
agcggaacggatctccgggagcgttaactatgcgagagtaaagcaacaccttcgtcagctttggattgtctataa

SEQ ID NO: 189849 - DNA, 75 bp, synthetic construct
  source 1..75: mol_type = other DNA
agccagcagttatatcttagggtttataaagaccattctccttggcgctttaaagaatggattcattatggtgat

SEQ ID NO: 189850 - DNA, 75 bp, synthetic construct
  source 1..75: mol_type = other DNA
agagagatgattgaaatgtgcgacaactggttgcgggtagatcgcattgaactaaccgtgttggtgatgcctcta

SEQ ID NO: 189851 - DNA, 75 bp, synthetic construct
  source 1..75: mol_type = other DNA
cgcagtcatgttgccgattttggtatctgtgtcgactctcgttggaagaaccgcggcgtcgccagcgccctgatg

SEQ ID NO: 189852 - DNA, 75 bp, synthetic construct
  source 1..75: mol_type = other DNA
acggagccctgccatgaatgggatatggccggcattcagccttctcccgcacaggcacagaacattcgcgaaaaa

SEQ ID NO: 189853 - DNA, 75 bp, synthetic construct
  source 1..75: mol_type = other DNA
tcgtggcgtcgccagtgccctgatgcaagagatgattgaaatgtgcgacaactggttgcgggtagatcgcattga

SEQ ID NO: 189854 - DNA, 75 bp, synthetic construct
  source 1..75: mol_type = other DNA
gaaggcaccggcaaaaattacgcttttcgtaatggtgaatatgtcgatgcgtattatatggcgcgggtgaaatag

SEQ ID NO: 189855 - DNA, 75 bp, synthetic construct
  source 1..75: mol_type = other DNA
acggctttgaaattgaagggactggtaagaagtacgcattgcgtaatggtgaatatgtcgatgcatattatatgg

SEQ ID NO: 189856 - DNA, 75 bp, synthetic construct
  source 1..75: mol_type = other DNA
agatgattctcaaggaccggaaaaaataaaattattttcaatgctaaatcatgaaaaaggtctatactatttggc

SEQ ID NO: 189857 - DNA, 75 bp, synthetic construct
  source 1..75: mol_type = other DNA
aagatgatcaaatcagtgccgagctggtgcagatgcgcttgcttgccccagaacaatggggcatgccgctgcctt

SEQ ID NO: 189858 - DNA, 75 bp, synthetic construct
  source 1..75: mol_type = other DNA
cattggcggtaatcggctggtgctgtttctctcattctgtcggattaacgatctggataccgcgttgaatcatat

SEQ ID NO: 189859 - DNA, 75 bp, synthetic construct
  source 1..75: mol_type = other DNA
cggacatcagcaggtgctgtttgtggtgacgcaggccgataaaacggagccctgccatgaatgggatgtggccgg

SEQ ID NO: 189860 - DNA, 75 bp, synthetic construct
  source 1..75: mol_type = other DNA
tgtaccggaagatatcaccacactgttgtcgatgactcagccgattaaactgcggggattccagaagtgggatgt

SEQ ID NO: 189861 - DNA, 75 bp, synthetic construct
  source 1..75: mol_type = other DNA
gaacagtggggcataccgctgcctttaacacagagttccaccccagtaatcaatgccgagcacgacggtcgcaac

SEQ ID NO: 189862 - DNA, 75 bp, synthetic construct
  source 1..75: mol_type = other DNA
tccgtacggccctgcgcgctgttcgtgacacggtggtctctgttgcccgtgcggtatggaactggattttcttct

SEQ ID NO: 189863 - DNA, 75 bp, synthetic construct
  source 1..75: mol_type = other DNA
tgctaacggagaaggctggctaattggctggcgttctctctggtacacctggggacaaaaagaaaccggaggctg

SEQ ID NO: 189864 - DNA, 75 bp, synthetic construct
  source 1..75: mol_type = other DNA
gtttgtggtgacgcaggccgacaaaacggaaccctgccatgaatgggatatggcaggtattcagccttctcccgc

SEQ ID NO: 189865 - DNA, 75 bp, synthetic construct
  source 1..75: mol_type = other DNA
gttaatccttcgtttgtctggaaaggtgatttagctaaccgctacttatctggacatttgcagggcttcccaatc

SEQ ID NO: 189866 - DNA, 75 bp, synthetic construct
  source 1..75: mol_type = other DNA
tccatttctgatgatgacctgtgcgcctggtgtacccgtctgctttaccgtcccggagaagctcagtctgtgcag

SEQ ID NO: 189867 - DNA, 75 bp, synthetic construct
  source 1..75: mol_type = other DNA
tgccaaaaggcccgctgggtcgtgctatgtttcgtaaactgaaagtttacgcgggtaacgagcacaaccacgcgg

SEQ ID NO: 189868 - DNA, 75 bp, synthetic construct
  source 1..75: mol_type = other DNA
acctggctgaaggagaatcaggaacgtgcccaggtatatctggaaacagagaacggcaatcagatgctgcgtatt

SEQ ID NO: 189869 - DNA, 75 bp, synthetic construct
  source 1..75: mol_type = other DNA
tttttttaagttatggcgaggtgggtttagattaaataacagtagaactaaattattattaaaattcttaatacg

SEQ ID NO: 189870 - DNA, 75 bp, synthetic construct
  source 1..75: mol_type = other DNA
cggtggtctctgttgcccgcgctgtatggaactggattttcttctgaacagtctgccagggaaatgcctgataac

SEQ ID NO: 189871 - DNA, 75 bp, synthetic construct
  source 1..75: mol_type = other DNA
tggtgacgcaggccgacaaaacggagccctgccatgaatgggatatggccggtattcagccttctcctgcacagg

SEQ ID NO: 189872 - DNA, 75 bp, synthetic construct
  source 1..75: mol_type = other DNA
agtcgttcttagctttatttttagaatctgaaaatccatttgtttcgacagatgagttggctaaagccggttacg

SEQ ID NO: 189873 - DNA, 75 bp, synthetic construct
  source 1..75: mol_type = other DNA
aggaagttcagaaattaaggaaagtaaaacctcatgcaataatcacaacaaattatgacgacacattagaaaaaa

SEQ ID NO: 189874 - DNA, 75 bp, synthetic construct
  source 1..75: mol_type = other DNA
gcggaaatatgccccttgatcaaacgcccttatggttactacagccaaacaaagggtgataacaaacctttgatt

SEQ ID NO: 189875 - DNA, 75 bp, synthetic construct
  source 1..75: mol_type = other DNA
atcgcctattcaacatctggcacgtttagcgccgcaggagctggaacaaaaactgcgtgactacctcggcggctt

SEQ ID NO: 189876 - DNA, 75 bp, synthetic construct
  source 1..75: mol_type = other DNA
ttcagacttactgctgctcgacgaaccgacaaaccacctcgatctcgatgccgttatctggctggaaaaatggct

SEQ ID NO: 189877 - DNA, 75 bp, synthetic construct
  source 1..75: mol_type = other DNA
agcgcatggagctgattgcccccgcgcacgtcgataacccgttccgctttagcttccgcgcgccggaaagcctgc

SEQ ID NO: 189878 - DNA, 75 bp, synthetic construct
  source 1..75: mol_type = other DNA
cggggtgggcgagagccgggacagggatgcagagtatgaagccctgtaccgtgacattctgccaaaactggacct

SEQ ID NO: 189879 - DNA, 75 bp, synthetic construct
  source 1..75: mol_type = other DNA
ggacgagctgcgcacggaatctgtccgctctcaggcccgtgaacagtttaccggtgcggtggaccggatatttga

SEQ ID NO: 189880 - DNA, 75 bp, synthetic construct
  source 1..75: mol_type = other DNA
gggtaaaagcggggccggtaaatcttcactctgtaatgcactgtttcagggggaggtcaccccggtcagtgatgt

SEQ ID NO: 189881 - DNA, 75 bp, synthetic construct
  source 1..75: mol_type = other DNA
gacgagctgcgcacggagtctgtccgctctcaggcccgtgaacagtttaccggtgcggtggaccggatatttgac

SEQ ID NO: 189882 - DNA, 75 bp, synthetic construct
  source 1..75: mol_type = other DNA
ctggaacatctgcgcaaactcaccagccacgaacccgtgattggcattatggggaaaagcggggccggtaaatcc

SEQ ID NO: 189883 - DNA, 75 bp, synthetic construct
  source 1..75: mol_type = other DNA
ctttccggtgcgcgggttttgtcgttttttctaccgggaatacatgtatcgaatccgtctgatgccattgaggca

SEQ ID NO: 189884 - DNA, 75 bp, synthetic construct
  source 1..75: mol_type = other DNA
tcactctgtaatgcactgtttcaggggaggtcaccccggtcagtgatgttcacgccggcacccgggaagtgcggc

SEQ ID NO: 189885 - DNA, 75 bp, synthetic construct
  source 1..75: mol_type = other DNA
tcactctgtaatgcgctgtttcagggggaggtcaccccggtcagtgatgttcacgccggccccgggaagtgcagc

SEQ ID NO: 189886 - DNA, 75 bp, synthetic construct
  source 1..75: mol_type = other DNA
gtgaatcccccgccacctttccggtgcgcggggttttgtcttttttcaccgggaatacatgtatgaatccgtctg

SEQ ID NO: 189887 - DNA, 75 bp, synthetic construct
  source 1..75: mol_type = other DNA
tcacgccggcacccaggaagtacggcgcttccgtctgagtggccacggtcacagcatggttatcactgacctgcc

SEQ ID NO: 189888 - DNA, 75 bp, synthetic construct
  source 1..75: mol_type = other DNA
cgcttccgtctgagtggccacggttgcagcctagttatcgctgacctgcccggggtgggcgagagccgggacagg

SEQ ID NO: 189889 - DNA, 75 bp, synthetic construct
  source 1..75: mol_type = other DNA
gtcacgaacccgtgattggcattatggggaaaagcggggccggtaaatcctcactctgtaatgcactgtttcagg

SEQ ID NO: 189890 - DNA, 75 bp, synthetic construct
  source 1..75: mol_type = other DNA
ttgcctctgttgcacgcacggttctgcgcgccgtccgtgactctgtggtctctgttgcccgcgcggtatggaact

SEQ ID NO: 189891 - DNA, 75 bp, synthetic construct
  source 1..75: mol_type = other DNA
tggaatgcgccactctcccgttgtctgacgatgatcgaaagcgtgcaagggcagaagtttagtcgctatgtgccg

SEQ ID NO: 189892 - DNA, 75 bp, synthetic construct
  source 1..75: mol_type = other DNA
tttctctctttctgccggattaatgatctggataccgcgttgaaccatattttcccactgcctactggcgatatt

SEQ ID NO: 189893 - DNA, 75 bp, synthetic construct
  source 1..75: mol_type = other DNA
tcagcaacagatccaaaccatggcggcgaaactggcttctaccgggctaacacatgcccgtatggatggtcatac

SEQ ID NO: 189894 - DNA, 75 bp, synthetic construct
  source 1..75: mol_type = other DNA
cggcgcagaaaacgttcgatcgcctgaagaatgagcaaccgcaaattcgggccaacccggattatctgcgtacca

SEQ ID NO: 189895 - DNA, 75 bp, synthetic construct
  source 1..75: mol_type = other DNA
atgaaaacattaatttgtcagcagcctggcgttatggaatatgtggaaaaggatattcccacaccagcagataat

SEQ ID NO: 189896 - DNA, 75 bp, synthetic construct
  source 1..75: mol_type = other DNA
gcgtctgtgttgccactgttgcacgcgcggttctgcgtgctgttcgtgacaccgtggtctctgttgcccgcgcgg

SEQ ID NO: 189897 - DNA, 75 bp, synthetic construct
  source 1..75: mol_type = other DNA
ggggaaaagcggggccggtaaatcctcactctgtaatgcgctgtttcagggggaggtcaccccggtcagtgatgt

SEQ ID NO: 189898 - DNA, 75 bp, synthetic construct
  source 1..75: mol_type = other DNA
cagtggcgtaaaaactcccagacgggcaactggcaggcttacgacatgattgctgaaggcgtcagtatgatcacc

SEQ ID NO: 189899 - DNA, 75 bp, synthetic construct
  source 1..75: mol_type = other DNA
tcgcccgccggtgcgtctggacttccagtggcgtaaaaactcccagacgggcaactggcaggcttacgacatgat

SEQ ID NO: 189900 - DNA, 75 bp, synthetic construct
  source 1..75: mol_type = other DNA
tatgtagctaatagcactggctggcagattaacaaagcaggtactatctacattaacggtactggcggtactggt

SEQ ID NO: 189901 - DNA, 75 bp, synthetic construct
  source 1..75: mol_type = other DNA
tgccgcagataaatttgttatttctggtgcaagtacggcaacagttggtggtgcagcaccatttacggttattgg

SEQ ID NO: 189902 - DNA, 75 bp, synthetic construct
  source 1..75: mol_type = other DNA
ctgatgcagacgagatcaatagtattctagatctagatgaccgtttgactgatacactagacaaggccgtagccg

SEQ ID NO: 189903 - DNA, 75 bp, synthetic construct
  source 1..75: mol_type = other DNA
tgttgttcgttattacagctatatcgaaattacccgtcgtgcacatcagacattgtggcgagaatatgagcatct

SEQ ID NO: 189904 - DNA, 75 bp, synthetic construct
  source 1..75: mol_type = other DNA
gcgttcattgcaaaactcactggcgagacgtaccgcgatgaccgcaggtaaacggcgggaacttcatgctctgga

SEQ ID NO: 189905 - DNA, 75 bp, synthetic construct
  source 1..75: mol_type = other DNA
tatggccaaacgtttttatatattgctgtatctgtttctcagcagaacatacaagaacgtcgaagtcgtttacat

SEQ ID NO: 189906 - DNA, 75 bp, synthetic construct
  source 1..75: mol_type = other DNA
aaacatcgttgatggtgaatataaggttaagatgggattctttgacgtattcggcacggacaatatgatcctacc

SEQ ID NO: 189907 - DNA, 75 bp, synthetic construct
  source 1..75: mol_type = other DNA
ctggctatcgctggcctgctggcgaaccacgcaatacagctctgttaccagtcggagacgcagcaacctcaacta

SEQ ID NO: 189908 - DNA, 75 bp, synthetic construct
  source 1..75: mol_type = other DNA
gtcaggtggcttttgccgcaaagcgtaagcctacagcgtcacagaacaggcgaaagaaagggtacgcagtaagat

SEQ ID NO: 189909 - DNA, 75 bp, synthetic construct
  source 1..75: mol_type = other DNA
ttctctcaggaagtaactattactcccgaaaacttgcaatgtggtctagtacagggcgtagaagttggtggcgga

SEQ ID NO: 189910 - DNA, 75 bp, synthetic construct
  source 1..75: mol_type = other DNA
tggataacgagccaattttagcagtaccagttactaccgatggtattatcccaaaagctaatctagtttcaaaat

SEQ ID NO: 189911 - DNA, 75 bp, synthetic construct
  source 1..75: mol_type = other DNA
cttaatagtaagtatgtgtttaccgaagaagatgcaaatgaaattaatagtattctagacctagatgatcgtcta

SEQ ID NO: 189912 - DNA, 75 bp, synthetic construct
  source 1..75: mol_type = other DNA
cattgtggcgggaatatgagcatctgcaatctactttcgaaaactttgcgatgcagcatatacgcgatcaggatg

SEQ ID NO: 189913 - DNA, 75 bp, synthetic construct
  source 1..75: mol_type = other DNA
ttgacccgtcaggtgtggggcagattctggattcactggcggaagccgggatccccgatgagagtgtggtgggga

SEQ ID NO: 189914 - DNA, 75 bp, synthetic construct
  source 1..75: mol_type = other DNA
tggcgggtgttggtctgactctgctgtacctggcgctgttccgtctgggttcagacagcgcgtcgctggtcgatc

SEQ ID NO: 189915 - DNA, 75 bp, synthetic construct
  source 1..75: mol_type = other DNA
ccggtgatttcgtggcgctggcgactatggctgcgaatttttttgctcccacggagtctgcgaaaccgcccgtgg

SEQ ID NO: 189916 - DNA, 75 bp, synthetic construct
  source 1..75: mol_type = other DNA
gtgaacagattaaccagtatcaggaaagtgacctgcaatttattcagcgtttgctggctgaagtggggatttttt

SEQ ID NO: 189917 - DNA, 75 bp, synthetic construct
  source 1..75: mol_type = other DNA
tgttatccgtacgccggcaaataacaagttgcggatggaggacaaacgcggtgaggaacatatcaagctcagtac

SEQ ID NO: 189918 - DNA, 75 bp, synthetic construct
  source 1..75: mol_type = other DNA
gtggggcgtcccgcataactacgcattagcgtttgcagagaaaagcaccagtaaaaatgggcgtatcgctttgca

SEQ ID NO: 189919 - DNA, 75 bp, synthetic construct
  source 1..75: mol_type = other DNA
agagaatttggccatcatcagcaacagtgaacctgcgcaactgctggaagaggaacggctgcgcaaagagattgc

SEQ ID NO: 189920 - DNA, 75 bp, synthetic construct
  source 1..75: mol_type = other DNA
acaagcatcagatggcgacaactgggccgatgactctccgctttgtcatgaaatcctggcgaaaaaattactccc

SEQ ID NO: 189921 - DNA, 75 bp, synthetic construct
  source 1..75: mol_type = other DNA
aacaaaatgcaacagctaaagactaaaactatcagccgggtcattatcgcctggctgatttttagcttactgtaa

SEQ ID NO: 189922 - DNA, 75 bp, synthetic construct
  source 1..75: mol_type = other DNA
tggcgcatccgataccatgctgcgcgccagcgcctcattctttaatggcggcaaatacagcgacgaatggcaccc

SEQ ID NO: 189923 - DNA, 75 bp, synthetic construct
  source 1..75: mol_type = other DNA
ggagaaaacggggtgatgatgccggtgaaaaatccgatgtccggcaccggtctgcgctggaagccgctgcgcgat

SEQ ID NO: 189924 - DNA, 75 bp, synthetic construct
  source 1..75: mol_type = other DNA
catcgggcgggttataccgctaacggcgttccggccaatatcagcgttgtgcgttcattgcagaactcactggcg

SEQ ID NO: 189925 - DNA, 75 bp, synthetic construct
  source 1..75: mol_type = other DNA
agaggaagacgaacataaattcgattttgatatacttgatccaacaaagttgatcccagagtctttggttcccgt

SEQ ID NO: 189926 - DNA, 75 bp, synthetic construct
  source 1..75: mol_type = other DNA
aagtgagggagatttatatttatccagatgcttccggagattccagaaaatcaagtaacgcaagtacgacggata

SEQ ID NO: 189927 - DNA, 75 bp, synthetic construct
  source 1..75: mol_type = other DNA
cggacaataccggctggttttcccgggacgttgtgatatcaacaagccaatgagcgaagccagcatcaatatggt

SEQ ID NO: 189928 - DNA, 75 bp, synthetic construct
  source 1..75: mol_type = other DNA
cagagcaagtgctggcagcgttacattcccatccactggggaaagacgcggcgctgattggtgaagtggtggaac

SEQ ID NO: 189929 - DNA, 75 bp, synthetic construct
  source 1..75: mol_type = other DNA
tgaactttcagaagcggcactgccggttaaacctgccgtgcgcggcgtttgcgaactgctgggactggacgccct

SEQ ID NO: 189930 - DNA, 75 bp, synthetic construct
  source 1..75: mol_type = other DNA
tcgcggcagcctgcggttgtggtattgaaatttcagaagcggcactgccggttaaacctgctgtgcgcggcgttt

SEQ ID NO: 189931 - DNA, 75 bp, synthetic construct
  source 1..75: mol_type = other DNA
taccagacctacgtggcgcaggtagataaaaccgccgttgatacttaccgttatctgaacttcaaccagctttct

SEQ ID NO: 189932 - DNA, 75 bp, synthetic construct
  source 1..75: mol_type = other DNA
cgtttcccgatcggcatttctttcccggcaggctccggtctggtggcatttgctgctgcaactggcgtcatgccg

SEQ ID NO: 189933 - DNA, 75 bp, synthetic construct
  source 1..75: mol_type = other DNA
attctatgggggtaataaatgtccctgaaaatcggttatggggagcgcaaacccagcgatctctggagcattttc

SEQ ID NO: 189934 - DNA, 75 bp, synthetic construct
  source 1..75: mol_type = other DNA
gaaaatctctgtcaccaacaccttccatgctctcgcaatcgaatggcatcatcataaatctttatcatggtctga

SEQ ID NO: 189935 - DNA, 75 bp, synthetic construct
  source 1..75: mol_type = other DNA
acgcgacgatgcccgaaaaattatctccgaagggggtgacccgggcgaaaagaagcgaaaggaaaaactcactca

SEQ ID NO: 189936 - DNA, 75 bp, synthetic construct
  source 1..75: mol_type = other DNA
cgttatgccatcgcccccggacgagccactgtcaatccggcatctgaactgaccagtacgctggcgacgccaaaa

SEQ ID NO: 189937 - DNA, 75 bp, synthetic construct
  source 1..75: mol_type = other DNA
gttacgtcattgacccgctgttctttcctggcggtaatatcggcaagctggcgatttgcggcaccgccaatgacg

SEQ ID NO: 189938 - DNA, 75 bp, synthetic construct
  source 1..75: mol_type = other DNA
aagcctacaaacaccttaaaccgattgcgctggcaggagacgcgcgcaagtttaaagcaacaatcaaggtcgctg

SEQ ID NO: 189939 - DNA, 75 bp, synthetic construct
  source 1..75: mol_type = other DNA
atcaatacccagattagttttgtgactgacaaaatcagggagctccagtctgcggtcctgctgggtagcgcgccg

SEQ ID NO: 189940 - DNA, 75 bp, synthetic construct
  source 1..75: mol_type = other DNA
cggatattgcctgtgacgcgttactgctgaagccggcgtcatttactttccaggtcccgatgtctgacggaacac

SEQ ID NO: 189941 - DNA, 75 bp, synthetic construct
  source 1..75: mol_type = other DNA
cggcaaaatggtgctcaatcgtaatccggataacttctttgctgaaaacgaacaggtggctttccatccagggca

SEQ ID NO: 189942 - DNA, 75 bp, synthetic construct
  source 1..75: mol_type = other DNA
cccttgcggcaatattgcggatatcgctgacaacggcgatgccaactactatctgatggaagcctacaaacacct

SEQ ID NO: 189943 - DNA, 75 bp, synthetic construct
  source 1..75: mol_type = other DNA
ggtagttttatggatgaactattaacgctaatggcagcgcaccgcgtatggtcacgtattcctaagattgataaa

SEQ ID NO: 189944 - DNA, 75 bp, synthetic construct
  source 1..75: mol_type = other DNA
ccggaaaaatggccatgccagcccaggccaaaaaactgcgggcgctggggtaccgggtacgcaccggtaaacgct

SEQ ID NO: 189945 - DNA, 75 bp, synthetic construct
  source 1..75: mol_type = other DNA
atggcagggctgatgatggtttttatgttcatatctattgcttatatgcactacgtacgtattgaaaaagaaaaa

SEQ ID NO: 189946 - DNA, 75 bp, synthetic construct
  source 1..75: mol_type = other DNA
ctcggtgaccacggtgcaactatccttaacctgcgtgagcaactggggctggatggcgaactggtcagcgactgt

SEQ ID NO: 189947 - DNA, 75 bp, synthetic construct
  source 1..75: mol_type = other DNA
gttacgcactgacgatcgttccccgtatcgcccttctgaactatacgaaagggagcgaaatctacctcaatcagt

SEQ ID NO: 189948 - DNA, 75 bp, synthetic construct
  source 1..75: mol_type = other DNA
gcgcaagcggggttgctgatacgaaagctggaggggacgccagcgaaaaagacatggactgtcaccctgcctgcc

SEQ ID NO: 189949 - DNA, 75 bp, synthetic construct
  source 1..75: mol_type = other DNA
ttgacaaggcgctggcgcgtcagcttcaggccatcggctttggctgggacgttaaagcgcaggatattaagggga

SEQ ID NO: 189950 - DNA, 75 bp, synthetic construct
  source 1..75: mol_type = other DNA
taaaggggcgcatgttgttgttgctgatattgactgtcaacgtcgccagcacgttgtggatcatctggcaattaa

SEQ ID NO: 189951 - DNA, 75 bp, synthetic construct
  source 1..75: mol_type = other DNA
aatgtggagttatcgctgaaaaaactgctgcaaaaaccggtgttttatcacttatggtttttcttcgcgattgcg

SEQ ID NO: 189952 - DNA, 75 bp, synthetic construct
  source 1..75: mol_type = other DNA
cgttacatcagtccggtattactctggtactggtgctcaatcgcttcgatgagatcccggaatttgtccagtttg

SEQ ID NO: 189953 - DNA, 75 bp, synthetic construct
  source 1..75: mol_type = other DNA
aggggcttgatccgctcaatcgccagcttatccgccgttttgttgatgtgctgattagcgaaggtgaaacgcaat

SEQ ID NO: 189954 - DNA, 75 bp, synthetic construct
  source 1..75: mol_type = other DNA
tacaaagcgtttgatggctactggggcaccaaaccgcagatcgatacgctggtcttctctattactcctgacgct

SEQ ID NO: 189955 - DNA, 75 bp, synthetic construct
  source 1..75: mol_type = other DNA
tccgtgcgttacgcgaaattgcagaagaacgaatgccaggtgatgccgtacccgaacccggcagatatcgcccgc

SEQ ID NO: 189956 - DNA, 75 bp, synthetic construct
  source 1..75: mol_type = other DNA
ataacctgcgagggatagcgtgtttaatggtggtgatgattcacaccactacctggtatgtgaccaatgcccata

SEQ ID NO: 189957 - DNA, 75 bp, synthetic construct
  source 1..75: mol_type = other DNA
cgtatgattatttgccgctggaagaggtattacaggcgttaaatgatcgtccatatcagcagacagtgattatca

SEQ ID NO: 189958 - DNA, 75 bp, synthetic construct
  source 1..75: mol_type = other DNA
ggatgcccgtgtggcgcaggcccaggatgaacgcggcattattatcgtttttactggcaatggaaaaggcaaaac

SEQ ID NO: 189959 - DNA, 75 bp, synthetic construct
  source 1..75: mol_type = other DNA
gtcagcagcgagttaaagaaaaagtggatgcccgtgtggcgcaggcccaggatgaacgcggcattattatcgttt

SEQ ID NO: 189960 - DNA, 75 bp, synthetic construct
  source 1..75: mol_type = other DNA
gttaagatgtatccaagagcgaaattatttaaaagttcatttgggaacgacagaaaaatatccatagtaccacta

SEQ ID NO: 189961 - DNA, 75 bp, synthetic construct
  source 1..75: mol_type = other DNA
gcaaatcagccgtgcgtcgtaacagcctgatgatcactctgtcgcagtccggtgaaaccgcggataccctggcgg

SEQ ID NO: 189962 - DNA, 75 bp, synthetic construct
  source 1..75: mol_type = other DNA
gagccgtattgagcagatgctgtctcaggacaaacgcattgaagcgctggcagaagatttctctgacaaacatca

SEQ ID NO: 189963 - DNA, 75 bp, synthetic construct
  source 1..75: mol_type = other DNA
gcaccggcccgttccagttacagcagtatcaaaaagattcccgtattcgctacaaagcgtttgatggctactggg

SEQ ID NO: 189964 - DNA, 75 bp, synthetic construct
  source 1..75: mol_type = other DNA
atgtttaatgaagtccatagtattcatggtaatacattgctattaatcactaaaccttccttgcaggcgaccgcg

SEQ ID NO: 189965 - DNA, 75 bp, synthetic construct
  source 1..75: mol_type = other DNA
agagatgtttgtgggggttacccgggtactgagtgataatgaatcaaaggtattcttcgagaaggtaaaaggtca

SEQ ID NO: 189966 - DNA, 75 bp, synthetic construct
  source 1..75: mol_type = other DNA
tattaaacctgcgaatatccccttccctgcgccaggtgatatcgaactttccgggctatttgctgcgttatcggt

SEQ ID NO: 189967 - DNA, 75 bp, synthetic construct
  source 1..75: mol_type = other DNA
gtcggcgctggctcgcgcgctggccggtgaactttcgcttttgaaaggcgaacggcaaaaccagttttcccgcat

SEQ ID NO: 189968 - DNA, 75 bp, synthetic construct
  source 1..75: mol_type = other DNA
atgccaaatcatgatcgattcgaatgccaaactgcgatcgattcagatgccattttgcattcaggctctattatt

SEQ ID NO: 189969 - DNA, 75 bp, synthetic construct
  source 1..75: mol_type = other DNA
cgcggggaatgctactttacgcaaaaacttgccagctatctgatcacacattctggtaactatcgttataacagc

SEQ ID NO: 189970 - DNA, 75 bp, synthetic construct
  source 1..75: mol_type = other DNA
atgctttagagatcaatctggacgcactcattatttatgccaacggcatctttattatgatttacctattgtgca

SEQ ID NO: 189971 - DNA, 75 bp, synthetic construct
  source 1..75: mol_type = other DNA
tatctggcctgctttgccagcctcaacatttatatacagagcttcgcccgcctggtctggtcgcaggcgcaacat

SEQ ID NO: 189972 - DNA, 75 bp, synthetic construct
  source 1..75: mol_type = other DNA
ttccagtgctaatctacaaacggtcattgccgggcttatcgtcgcactgattgtcgccatctggtgggcgggcga

SEQ ID NO: 189973 - DNA, 75 bp, synthetic construct
  source 1..75: mol_type = other DNA
atgagtggactcaaacaagaactggggctggcccagggcattggcctgctatcgacgtcattattaggcactggc

SEQ ID NO: 189974 - DNA, 75 bp, synthetic construct
  source 1..75: mol_type = other DNA
tttgcccatcttgcctcggaatttaaaaatccagagcgtgattttcctcgtgctttgatgattggtctgctgctg

SEQ ID NO: 189975 - DNA, 75 bp, synthetic construct
  source 1..75: mol_type = other DNA
ccgggttattttctgcgttatcggtgatgttctggtgctttgtcggtctggaggcatttgcccatctcgcctcgg

SEQ ID NO: 189976 - DNA, 75 bp, synthetic construct
  source 1..75: mol_type = other DNA
tatttgcacttaaaggcagaactgcgccagccagcaaagtttcctgggttattgttaatgattacggaggatatc

SEQ ID NO: 189977 - DNA, 75 bp, synthetic construct
  source 1..75: mol_type = other DNA
aggccgaattaaagcagttaatccaacaccttattacataacctacaacaaaattgcagttgaccagaataagca

SEQ ID NO: 189978 - DNA, 75 bp, synthetic construct
  source 1..75: mol_type = other DNA
tctatggaagttccggctccgtttgcaggcgtcgtgaaggaactgaaagtcaacgttggcgataaagtgaaaact

SEQ ID NO: 189979 - DNA, 75 bp, synthetic construct
  source 1..75: mol_type = other DNA
aattccgccactatgggcgctctgttatttggaggcgctacggcggctgctggcgtgatggctgttagtaaaacc

SEQ ID NO: 189980 - DNA, 75 bp, synthetic construct
  source 1..75: mol_type = other DNA
agagcacaagctgccgcagcaagagcacaggcaaggcaacaggcacaaatagcagcacgcaaggagaaagcagac

SEQ ID NO: 189981 - DNA, 75 bp, synthetic construct
  source 1..75: mol_type = other DNA
tgttatttggaggcgctacggctgctgctggcgtgatggctgtaagtagagcgtcggagtttgttagtaacagtt

SEQ ID NO: 189982 - DNA, 75 bp, synthetic construct
  source 1..75: mol_type = other DNA
gcaaaggtgctgcaaaccagcgccaccacataccaggaaacggcgcagacggacaatgccatcacacattacatc

SEQ ID NO: 189983 - DNA, 75 bp, synthetic construct
  source 1..75: mol_type = other DNA
ggacgaggtgtaccgcgtgaaacgtgttcgcgatctaaacagtaaacgacggtttctgcttcttgagtgcaccga

SEQ ID NO: 189984 - DNA, 75 bp, synthetic construct
  source 1..75: mol_type = other DNA
gcaaaggtggctcagccaggcgctgccgcttatcagggctcagtgcagacagaaaatgtcgttacgcattatttt

SEQ ID NO: 189985 - DNA, 75 bp, synthetic construct
  source 1..75: mol_type = other DNA
ggctccggcggcgactggcggcggtatcccaggcatgctgccgtggccgaaggtggacttcagcaagtttggtga

SEQ ID NO: 189986 - DNA, 75 bp, synthetic construct
  source 1..75: mol_type = other DNA
tctctgttggcgataaaacccagaccggcgcactgattatgattttcgattccgccggcggtgcagcagacgctg

SEQ ID NO: 189987 - DNA, 75 bp, synthetic construct
  source 1..75: mol_type = other DNA
acaatgggagctagcactgaaagactttcccgttgatcaagtgtacgacaatgcctggcattatttccaaccggc

SEQ ID NO: 189988 - DNA, 75 bp, synthetic construct
  source 1..75: mol_type = other DNA
attaacaaaagcgaccttaaaaaatttgctgataatccagccggattaatttctaaggctgttaatggaatgatg

SEQ ID NO: 189989 - DNA, 75 bp, synthetic construct
  source 1..75: mol_type = other DNA
atgagtgatgaacgctaccaacagcgtcagcagcgtgtaaaagataaagtggatgcccgtgtggcccaggcccag

SEQ ID NO: 189990 - DNA, 75 bp, synthetic construct
  source 1..75: mol_type = other DNA
accattaacccggtaaccctcgtcagcgccagccggtaccacgtgatcgacagcagcccgagcgccgacgattac

SEQ ID NO: 189991 - DNA, 75 bp, synthetic construct
  source 1..75: mol_type = other DNA
ttcataatacccgcaatacaaaacggttatcgttgttgactcaactttatattaagctcaatgatgtcacgacgt

SEQ ID NO: 189992 - DNA, 75 bp, synthetic construct
  source 1..75: mol_type = other DNA
gtcagcaacgcgtaaaagataaagtggatgcccgtgtggcgcaggcacaggatgaacgcggcattatcatcgtct

SEQ ID NO: 189993 - DNA, 75 bp, synthetic construct
  source 1..75: mol_type = other DNA
acttgaactggcggatacggtaagtgagttacgccccgtcaaacatgcgtttgatgctggtgtaaaagcgcagat

SEQ ID NO: 189994 - DNA, 75 bp, synthetic construct
  source 1..75: mol_type = other DNA
aggcgttaaatgaacgtccacatcaacagacggtgattatcacgggtcgtggttgtcatcgggatattcttgaac

SEQ ID NO: 189995 - DNA, 75 bp, synthetic construct
  source 1..75: mol_type = other DNA
ccccggttttggcggtcagtctttcattccgcaaacgttagataaactacgcgaagtgcgtcgccgcatcgacga

SEQ ID NO: 189996 - DNA, 75 bp, synthetic construct
  source 1..75: mol_type = other DNA
acattggcgaaatcgctgcggcgggcgcggatatgttcgttgccggttcggcaatcttcgaccagccagactaca

SEQ ID NO: 189997 - DNA, 75 bp, synthetic construct
  source 1..75: mol_type = other DNA
tcaaacagggtgctttaaataatcttgcaatgacaactccggcttataatttatctcctgtattcaatctgaatc

SEQ ID NO: 189998 - DNA, 75 bp, synthetic construct
  source 1..75: mol_type = other DNA
actttgtgcttattacgacaccggtgatcttcccggtccagctctggccagtacgctggtgcgcgagatggctgc

SEQ ID NO: 189999 - DNA, 75 bp, synthetic construct
  source 1..75: mol_type = other DNA
ctgattgccggaaaattgaaagatgggtccagcctccatgagtgttcccaggaagaaaaggcgtttgtcaaaaag

SEQ ID NO: 190000 - DNA, 75 bp, synthetic construct
  source 1..75: mol_type = other DNA
gccattttcgatcagccagactacaaaaaggtcattgatgaaatgcgcagtgaactggcaaaggtaagtcatgaa

SEQ ID NO: 190001 - DNA, 75 bp, synthetic construct
  source 1..75: mol_type = other DNA
ttgccattggcgctcgtctgttaccgcgcgtcaaccgaatggagtggactattttagcctctgccggaaccatcg

SEQ ID NO: 190002 - DNA, 75 bp, synthetic construct
  source 1..75: mol_type = other DNA
ttatcgtagcattaattctcggtcttgctggcggcgtcagcctggggccggaacatccgatcatgaccgtcaata

SEQ ID NO: 190003 - DNA, 75 bp, synthetic construct
  source 1..75: mol_type = other DNA
caaccgaatggagtggactattttagcctctgccggaactatcggcgcgctgtttggcacacctgttgcggcggc

SEQ ID NO: 190004 - DNA, 75 bp, synthetic construct
  source 1..75: mol_type = other DNA
cgtcacgccttacccaccaacgaaccgcgcattgtgctgaataatggcgtggtttcttataacgatcgccccatt

SEQ ID NO: 190005 - DNA, 75 bp, synthetic construct
  source 1..75: mol_type = other DNA
cggattgcacgttagcagaaacgggcgctaaagaggaactgctccagcaagctctcgttgcgcaactggcgcata

SEQ ID NO: 190006 - DNA, 75 bp, synthetic construct
  source 1..75: mol_type = other DNA
cagcgggtttcgtggcgggcgaatcttcccggcagtgtttgttggcgtggcgttaggtttgatgctacatgaaca

SEQ ID NO: 190007 - DNA, 75 bp, synthetic construct
  source 1..75: mol_type = other DNA
ggataccctgctggcggcacgttctggtagtccgctggtgattggcctggggatgggcgaaaactttatcgcttc

SEQ ID NO: 190008 - DNA, 75 bp, synthetic construct
  source 1..75: mol_type = other DNA
ttgttggaaaaactgaaatctaacattgaagaagttcgtgcgcgtggcggtcagttgtatgtcttcgccgatcag

SEQ ID NO: 190009 - DNA, 75 bp, synthetic construct
  source 1..75: mol_type = other DNA
gccgggcgcaccgatgaagagaaacaggccgacgctgatcggataaacctggcccttggcaacatcacggaggaa

SEQ ID NO: 190010 - DNA, 75 bp, synthetic construct
  source 1..75: mol_type = other DNA
cattgaagctgaaagagatctcttacattcatgctgaagcctacgctgcaggcgaactgaaacacggtccgctgg

SEQ ID NO: 190011 - DNA, 75 bp, synthetic construct
  source 1..75: mol_type = other DNA
tatgacccgcctgcgtcgcctcggtaaagtcaagatgctggctcaggcagcggaagaacatcctctgcatggcgg

SEQ ID NO: 190012 - DNA, 75 bp, synthetic construct
  source 1..75: mol_type = other DNA
gggagctgaaacaaggcgggactctgcgtgaggctgttctgcgtgctatcccgcaactgcgtggtgcgtacggta

SEQ ID NO: 190013 - DNA, 75 bp, synthetic construct
  source 1..75: mol_type = other DNA
atgcgcatgaatgttttcgaaatggaagggtttcttcacgggagatgtgtaccacgagacctgaaagtgaatgaa

SEQ ID NO: 190014 - DNA, 75 bp, synthetic construct
  source 1..75: mol_type = other DNA
gtcacgaacccgttattggcattatgggtaaaagcggggccggtaaatcctcactctgtaatgcactgtttcagg

SEQ ID NO: 190015 - DNA, 75 bp, synthetic construct
  source 1..75: mol_type = other DNA
gaatcccccgccacctttccggtgcgcggggttttgtcttttttcaccgggaatacatgtatgaatccgtctgat

SEQ ID NO: 190016 - DNA, 75 bp, synthetic construct
  source 1..75: mol_type = other DNA
cgcaccggctgggaactggatactgtcacgaacggtgcaatagtgatccacacccaacgcctgaaatcagatcca

SEQ ID NO: 190017 - DNA, 75 bp, synthetic construct
  source 1..75: mol_type = other DNA
tgacagcgcttcccgaccatgccgccagtcccctgatgacccgcctgcaggacgagctgcgcacggaatctgtcc

SEQ ID NO: 190018 - DNA, 75 bp, synthetic construct
  source 1..75: mol_type = other DNA
gggaggtcacaccggtcagtgatgttcacgccggcacccgggaagtgcagcgcttccgtctgagtggtcacggtc

SEQ ID NO: 190019 - DNA, 75 bp, synthetic construct
  source 1..75: mol_type = other DNA
ttcccggacatgccgccagtcccctgatgacccgactgcaggacgagctgcgcacggaatctgtccgcgctcagg

SEQ ID NO: 190020 - DNA, 75 bp, synthetic construct
  source 1..75: mol_type = other DNA
acagtcgggaaccgttttatttttgctgctgtcaggacaccgatgaagacaggagtaccgtgctgtacttgcagg

SEQ ID NO: 190021 - DNA, 75 bp, synthetic construct
  source 1..75: mol_type = other DNA
cagtacaatgccattcaggaacgcctgatttcgcgctttagcgagctttacagtcgggaaccgttttatttttgc

SEQ ID NO: 190022 - DNA, 75 bp, synthetic construct
  source 1..75: mol_type = other DNA
cctggtttgagggcgaaaaaccgcagattgccgctggcgaaagctatgtgcgtaaaccgatctactcgcgcgaag

SEQ ID NO: 190023 - DNA, 75 bp, synthetic construct
  source 1..75: mol_type = other DNA
ccatgaatgggatatggcaggtattcagccttctcccgcacaggaacagaacattcgcgaaaaaacagatgcggt

SEQ ID NO: 190024 - DNA, 75 bp, synthetic construct
  source 1..75: mol_type = other DNA
atgctgagacacaacgttcctgtgcggcgggatctggaccagatcgccgccgataacggatttgactttcatatc

SEQ ID NO: 190025 - DNA, 75 bp, synthetic construct
  source 1..75: mol_type = other DNA
tgtgccttgaggtggtggagcgtgcggttaaagatgaacagatcctgacgcaactggcgatcccgccgttgtact

SEQ ID NO: 190026 - DNA, 75 bp, synthetic construct
  source 1..75: mol_type = other DNA
gataacctggctcttaaagcgaagctgattcatcgtttcgaaagtcgtatcgactggtctttgctcgatatggct

SEQ ID NO: 190027 - DNA, 75 bp, synthetic construct
  source 1..75: mol_type = other DNA
aatattatcttgcctctctcgtcgcctttgctttatggaaagaggcacctgataccattgaactgttcagaacac

SEQ ID NO: 190028 - DNA, 75 bp, synthetic construct
  source 1..75: mol_type = other DNA
cttaataaccttagctggcaggtgaatccaggtgaacactggcaaattgtcgggccaaatggcgcgggaaaatcg

SEQ ID NO: 190029 - DNA, 75 bp, synthetic construct
  source 1..75: mol_type = other DNA
cttaccgctgaattagagcgaagcaaagcggaatttgaaaagagcaccgacgaggtagctaaattcaaacaggcg

SEQ ID NO: 190030 - DNA, 75 bp, synthetic construct
  source 1..75: mol_type = other DNA
ggcatgaaaggcgttcttttccgtgcgaaagacgcaatcaaggcgaaattcggcgctcgctggctgccagcgaag

SEQ ID NO: 190031 - DNA, 75 bp, synthetic construct
  source 1..75: mol_type = other DNA
ctgttaaaccgccgaaagagctaccggatgaaccaacagatgcgcagatagcgaaatacaacgagcaaatggctc

SEQ ID NO: 190032 - DNA, 75 bp, synthetic construct
  source 1..75: mol_type = other DNA
actggcgcggaagtaaaacgtcaggatatcgaatccaatctgcaatatgacgcgggcgataaaggtatttaccgt

SEQ ID NO: 190033 - DNA, 75 bp, synthetic construct
  source 1..75: mol_type = other DNA
agggcgatattgcggaaattactcgccgttcggtaaacatcttcgataaaactggcgcggaagtaaaacgtcagg

SEQ ID NO: 190034 - DNA, 75 bp, synthetic construct
  source 1..75: mol_type = other DNA
atggaaaagcagtcgggcaaggtggagggagtgagtgcagaagtgctgaaaaggatttttttaatattctgaaaa

SEQ ID NO: 190035 - DNA, 75 bp, synthetic construct
  source 1..75: mol_type = other DNA
taccttcgtttctgaaactgacaccgaagtgattgcccatctggtgaactgggagctgaaacaaggcgggactct

SEQ ID NO: 190036 - DNA, 75 bp, synthetic construct
  source 1..75: mol_type = other DNA
tggcttaccatgtcgcgctgatcaaaggcaccgacgttgaccagccgcgtaacctggcaaaatcggttacggttg

SEQ ID NO: 190037 - DNA, 75 bp, synthetic construct
  source 1..75: mol_type = other DNA
accacggctgaaatcattcaggatgaagttaaggatgcaccgcgttgcatgcagctggcgcagcagttcggtatt

SEQ ID NO: 190038 - DNA, 75 bp, synthetic construct
  source 1..75: mol_type = other DNA
tatgagatcaccacagcacagtttggcaccattggcatttacagcaataaagacgagatcaagcaggcaatggac

SEQ ID NO: 190039 - DNA, 75 bp, synthetic construct
  source 1..75: mol_type = other DNA
agtgaaaccgatcgccggtcgctgtggtagcaatatcgacctggtcagccatcatgaagaagtgctggacaaaac

SEQ ID NO: 190040 - DNA, 75 bp, synthetic construct
  source 1..75: mol_type = other DNA
ccatcgggattatcaatcatcgtgatgctgttggtaagttggatgaagacgaaaagggggtcggttcaacagaca

SEQ ID NO: 190041 - DNA, 75 bp, synthetic construct
  source 1..75: mol_type = other DNA
gaaacggtcgcggtgcccgagttggctccaaccgtgcaagcgttcgcgttcactactactgcggcaaggggtctt

SEQ ID NO: 190042 - DNA, 75 bp, synthetic construct
  source 1..75: mol_type = other DNA
gaactacatcaaggcgcaacatgcagctggcgaggatgttgcggctcttaccgctgaattagagcgaagtaaagc

SEQ ID NO: 190043 - DNA, 75 bp, synthetic construct
  source 1..75: mol_type = other DNA
gatccaatccagctcgatgatttccgccttgcgtttaccggcgaactgccagccagtgatgaagagttgcttaat

SEQ ID NO: 190044 - DNA, 75 bp, synthetic construct
  source 1..75: mol_type = other DNA
gaaacaaacgatgaatatcttgtccgtaagttcggtgaacttgaatcaaaactagaaacggcgttgcgggagtgt

SEQ ID NO: 190045 - DNA, 75 bp, synthetic construct
  source 1..75: mol_type = other DNA
atatcgttacggtgaaagaagcgacggacgccctgctgcattgtgcggaacagcttcacgagggagtgcattcat

SEQ ID NO: 190046 - DNA, 75 bp, synthetic construct
  source 1..75: mol_type = other DNA
tggacaccagccagtatcgcacagcgtaacggtcgcggtgcccgagttggctccaaccgtgcaagcgttcgcgtt

SEQ ID NO: 190047 - DNA, 75 bp, synthetic construct
  source 1..75: mol_type = other DNA
atggccagtggtgctgacaatgatgcagttgtgctggaggctcttctgcgtgattttgataatacgccctttaag

SEQ ID NO: 190048 - DNA, 75 bp, synthetic construct
  source 1..75: mol_type = other DNA
tcttattcctcagagttttctctcacagatctattcagaggataatgacgctccctgtagtggcacagtaaattt

SEQ ID NO: 190049 - DNA, 75 bp, synthetic construct
  source 1..75: mol_type = other DNA
ttatcgcgtatccaccgccgacctgaagatgatgtacgcaccaaaattcgccgctggcgaggtatttgggcttca

SEQ ID NO: 190050 - DNA, 75 bp, synthetic construct
  source 1..75: mol_type = other DNA
tgattgaacagatcaatatcgcccttgaacataaaggttccggtaacttttcagcgtgggttattgaagcctgca

SEQ ID NO: 190051 - DNA, 75 bp, synthetic construct
  source 1..75: mol_type = other DNA
ccggtaacttttcagcgtgggttattgaagcctgcaggagaaggctggcaacagatgcaacgcatctgatgcccg

SEQ ID NO: 190052 - DNA, 75 bp, synthetic construct
  source 1..75: mol_type = other DNA
tgaagcctgccgccggagactgtgctcagaaaaaagagtttcttctgaagcaaacaaagaaaagagtgacattac

SEQ ID NO: 190053 - DNA, 75 bp, synthetic construct
  source 1..75: mol_type = other DNA
gatgtggctcagcgtctggtgcagcatcttgcagagcatggcattaatacatctaagcgctcgtgattataatat

SEQ ID NO: 190054 - DNA, 75 bp, synthetic construct
  source 1..75: mol_type = other DNA
tcagaaaaaagagtttctcctgaagcaaacaaagaaaagagtgacattactgaattgctcagaaaacagatcaga

SEQ ID NO: 190055 - DNA, 75 bp, synthetic construct
  source 1..75: mol_type = other DNA
tatctggcagaccggctccggcacgcaaagtaatatgaacatgaacgaagtgctggctaaccgggccagtgaatt

SEQ ID NO: 190056 - DNA, 75 bp, synthetic construct
  source 1..75: mol_type = other DNA
aggtgaacatctgagggctaatatcgacagagccagtgttcataaattccgccagtttcgttacatccggtttct

SEQ ID NO: 190057 - DNA, 75 bp, synthetic construct
  source 1..75: mol_type = other DNA
ggttatggctcccgtgagttacgggttgagacaataagttgctggctggcccgactggtcatcgtcaataaacat

SEQ ID NO: 190058 - DNA, 75 bp, synthetic construct
  source 1..75: mol_type = other DNA
tgtctttccgacggcgatgcatgttgcggcgctgctggcgctgcgcaagcaactcattccgcagcttaaaaccct

SEQ ID NO: 190059 - DNA, 75 bp, synthetic construct
  source 1..75: mol_type = other DNA
cagcctgcctcacgtagcggaactggctctgggcggtacagcggtgggtactggactaaatacccatccggagta

SEQ ID NO: 190060 - DNA, 75 bp, synthetic construct
  source 1..75: mol_type = other DNA
aactcattccgcagcttaaaaccctgacacagacactgaatgagaaatcccgtgcatttgccgatatcgtcaaaa

SEQ ID NO: 190061 - DNA, 75 bp, synthetic construct
  source 1..75: mol_type = other DNA
tgatatgacattattgtcatgcgcgtcgcccgtggcaattcgccatctcagtgtacatgaacaaacgcactatcc

SEQ ID NO: 190062 - DNA, 75 bp, synthetic construct
  source 1..75: mol_type = other DNA
atgaccacctttacccaaaaagaactgattaaagaaataaaagatcgcatcagcagcctcgacgtccgagacgat

SEQ ID NO: 190063 - DNA, 75 bp, synthetic construct
  source 1..75: mol_type = other DNA
caggattacacgtttaaggtgccggactggccggggatgtatgagcagcagggtgagagcctgaacggacagctt

SEQ ID NO: 190064 - DNA, 75 bp, synthetic construct
  source 1..75: mol_type = other DNA
tcatcggtgcagagccaggattacacgtttaaggtgccggactggccggggatgtatgagcagcagggtgagagc

SEQ ID NO: 190065 - DNA, 75 bp, synthetic construct
  source 1..75: mol_type = other DNA
gcgtggcaaactgaaagaggtcgcggagatccgcgcaccggaagtggttgaagaacagcgttcatctgacggtac

SEQ ID NO: 190066 - DNA, 75 bp, synthetic construct
  source 1..75: mol_type = other DNA
atctagcaaacatgaaattaaagtgaagttgttatttgcgaatgatgattttctctcaatggaaggacactatgg

SEQ ID NO: 190067 - DNA, 75 bp, synthetic construct
  source 1..75: mol_type = other DNA
cgctgtcggtggacggtattgtggagatggcgacggcagtggtgagcttccgtctgtaccagcaccactgcacac

SEQ ID NO: 190068 - DNA, 75 bp, synthetic construct
  source 1..75: mol_type = other DNA
aatatccgtttccccaatcacatgattgaacagatcaatatcgcccttgaacataaaggttccggtaacttttca

SEQ ID NO: 190069 - DNA, 75 bp, synthetic construct
  source 1..75: mol_type = other DNA
cggatcgggactgcatctatggtgtgatcaaaggttcggcggtcaataatgatggcaataacaaaatcggctata

SEQ ID NO: 190070 - DNA, 75 bp, synthetic construct
  source 1..75: mol_type = other DNA
atgtttcggtgtttgagatgtggtctaccttgctcaaccacggcaaactagtattactcagcaaacaggcattac

SEQ ID NO: 190071 - DNA, 75 bp, synthetic construct
  source 1..75: mol_type = other DNA
gtacgtaatgaccagacgctgcaggtgacgaatgaccggacggtgagcgtgagtaatgatgacggcctgtacgtc

SEQ ID NO: 190072 - DNA, 75 bp, synthetic construct
  source 1..75: mol_type = other DNA
tgcgggagaggaaatcttctgtgatgaacatggccgggtacgggtgaagtttcactgggaccgttatcacgggat

SEQ ID NO: 190073 - DNA, 75 bp, synthetic construct
  source 1..75: mol_type = other DNA
ccgcgtatagaccaggaagtgattgtcgattttttaaacggcgacccggaccagcccatcatcatggggcgtacc

SEQ ID NO: 190074 - DNA, 75 bp, synthetic construct
  source 1..75: mol_type = other DNA
accatttgctgccctgaccggcatacgctgcagtaccgcgcatatcacggcaaaagacaacgcctggctgtactc

SEQ ID NO: 190075 - DNA, 75 bp, synthetic construct
  source 1..75: mol_type = other DNA
gtcgatggtgttaatctcgctgaactgattaacgtggtctgcgacaatggccactcccttcgtgttgttgatgaa

SEQ ID NO: 190076 - DNA, 75 bp, synthetic construct
  source 1..75: mol_type = other DNA
ccgacagcgttaacgtacaggcgctgaacatggggcgcattgtcgttgacgtcgatggtgttaatctcgctgaac

SEQ ID NO: 190077 - DNA, 75 bp, synthetic construct
  source 1..75: mol_type = other DNA
tggattcatttcacaggtagcggatatctgttacgtaccggtgcgtggtcgtacccggttctgcggcttaagcgc

SEQ ID NO: 190078 - DNA, 75 bp, synthetic construct
  source 1..75: mol_type = other DNA
acttatccggcgttatggcgtcagtctcattcatctggatgccagcgctgaatgcctgccgggtttacctacttt

SEQ ID NO: 190079 - DNA, 75 bp, synthetic construct
  source 1..75: mol_type = other DNA
acacgaaccgatctccatcgatgttactcaccgatctccttcacggtaatacgcaccacaacccttaccggcata

SEQ ID NO: 190080 - DNA, 75 bp, synthetic construct
  source 1..75: mol_type = other DNA
aacgttccgtcgtctggtcgtcacactcatccggcgttatggtgtcagtctcattcatctggatgccagtgccgg

SEQ ID NO: 190081 - DNA, 75 bp, synthetic construct
  source 1..75: mol_type = other DNA
gcacgccaccatttgctgcccttaccggcatacgctgcagtaccgcacatatcacggaaacggacaacgcctggc

SEQ ID NO: 190082 - DNA, 75 bp, synthetic construct
  source 1..75: mol_type = other DNA
ccggtgttatggtgtcagtctcattcatctggatgccagtgccggatatctgccgggtttacccactttcgactg

SEQ ID NO: 190083 - DNA, 75 bp, synthetic construct
  source 1..75: mol_type = other DNA
tctctggtggcgtggattcctccgtaaccgcaatgctgctgcaccgcgctatcggtaaaaacctgacttgcgtat

SEQ ID NO: 190084 - DNA, 75 bp, synthetic construct
  source 1..75: mol_type = other DNA
caacgaagcagagcaggttctggatatgtttggcgatcactttggtctgaacattgttcacgttccggcagaaga

SEQ ID NO: 190085 - DNA, 75 bp, synthetic construct
  source 1..75: mol_type = other DNA
ctgtcacaccagaccagtgacttcggtgaatcagaatggattcattttaccggtaccggttatctgttacgtacc

SEQ ID NO: 190086 - DNA, 75 bp, synthetic construct
  source 1..75: mol_type = other DNA
cttcggcgaatcagaatggattcattttaccggtagcggatatctgttacgtaccgatgcgtggtcatacccggt

SEQ ID NO: 190087 - DNA, 75 bp, synthetic construct
  source 1..75: mol_type = other DNA
ttcacaggtagcggatatctgttacgtaccgatgcgtggtcatatccggttttgcggcttaagcgcctgggcctg

SEQ ID NO: 190088 - DNA, 75 bp, synthetic construct
  source 1..75: mol_type = other DNA
tcgtctggttgtcactcttagccggtgttatggcgtccgtctcattcatctggttgccagcgccgaatttctgcc

SEQ ID NO: 190089 - DNA, 75 bp, synthetic construct
  source 1..75: mol_type = other DNA
tcgtctggttgtcactcttagccggagttatggcgtccgtctcattcatctggttgccagcgccgtatttctgcc

SEQ ID NO: 190090 - DNA, 75 bp, synthetic construct
  source 1..75: mol_type = other DNA
cccgaatcatcagcacgcctgaacttattcgctataacgacaatatcgttggttatggctcccgtgagttgcggg

SEQ ID NO: 190091 - DNA, 75 bp, synthetic construct
  source 1..75: mol_type = other DNA
tccgaccaacacgcaaccagtacaccaccaccgttaacaacccttacctgcatacgttgcagcaccgcacatatc

SEQ ID NO: 190092 - DNA, 75 bp, synthetic construct
  source 1..75: mol_type = other DNA
cgttggtgaatcagaatggattcatttcacaggtagcggatatctgttacgtaccgatgcgtggtcgtacccggt

SEQ ID NO: 190093 - DNA, 75 bp, synthetic construct
  source 1..75: mol_type = other DNA
ccgacagtattaacgtgcaggcgctgaacatggggcgcattgtcgttgacattgatggtattgagcttgctgaac

SEQ ID NO: 190094 - DNA, 75 bp, synthetic construct
  source 1..75: mol_type = other DNA
gaacatggggcgcattgttgttgacgtcgatggtgttactctcgctgaactgattaacgtggtctgtgataatgg

SEQ ID NO: 190095 - DNA, 75 bp, synthetic construct
  source 1..75: mol_type = other DNA
tctgaccggacctcaacagactgcacgccaccatttgctgccctgaccggcatacgctgcagtaccgcgcatatc

SEQ ID NO: 190096 - DNA, 75 bp, synthetic construct
  source 1..75: mol_type = other DNA
tcgtctggttgtcacacttagccggggttatggcgtccgtctcattcatctggttgccagcgccgcatttctgcc

SEQ ID NO: 190097 - DNA, 75 bp, synthetic construct
  source 1..75: mol_type = other DNA
tcgtctggttgtcacacttagccggcgttatggcgtccgtctcattcatctggttgccagcgccggatttctgcc

SEQ ID NO: 190098 - DNA, 75 bp, synthetic construct
  source 1..75: mol_type = other DNA
tggggctgtcaaaaatgttccgccgtctggttgtcacacttatccggcgttatggcgtcagtctcattcatctgg

SEQ ID NO: 190099 - DNA, 75 bp, synthetic construct
  source 1..75: mol_type = other DNA
ttaatcaatgtccctatggggattatcgttctgacattatgcttaaccttacttaaaggaagagaaactgagact

SEQ ID NO: 190100 - DNA, 75 bp, synthetic construct
  source 1..75: mol_type = other DNA
ttcacgctgagtacttcccgtggggacgtactcccttctgtagaaaaagctcctgtagcacattcggagattaac

SEQ ID NO: 190101 - DNA, 75 bp, synthetic construct
  source 1..75: mol_type = other DNA
cagtaccagccagacggcgatggttatgaatgctctgggggccaattcttccctgatttccaccagaatggtctt

SEQ ID NO: 190102 - DNA, 75 bp, synthetic construct
  source 1..75: mol_type = other DNA
aaaccgtaacatttgaagaatggcacgagctattaatggattacgcagagttacgcggtgggaatgccgccgatg

SEQ ID NO: 190103 - DNA, 75 bp, synthetic construct
  source 1..75: mol_type = other DNA
ctgaagcatggcgttatgactacgaagcaggaaaaactccggtcaaagcatattgtgatgagtggggcgatgaat

SEQ ID NO: 190104 - DNA, 75 bp, synthetic construct
  source 1..75: mol_type = other DNA
atggggattatcgtcctgacattatgcttaaccttacttaaaggaagagaaactgaaacttcaccggtcaaaatg

SEQ ID NO: 190105 - DNA, 75 bp, synthetic construct
  source 1..75: mol_type = other DNA
gcaggtgcggccctcgcaggtgcgttcaaaagaccacacgtttaaggtgccggactggccgggtatttacattga

SEQ ID NO: 190106 - DNA, 75 bp, synthetic construct
  source 1..75: mol_type = other DNA
actgagtaaccatatcacggtcatcccggcagaccggacctggcgctcacagcccctgccgaagccgaaggtgga

SEQ ID NO: 190107 - DNA, 75 bp, synthetic construct
  source 1..75: mol_type = other DNA
cggttcaccctgacggggcatccggtacagggagcgaacccgaaccgtgagtggcaggtggtgagcagcacgctg

SEQ ID NO: 190108 - DNA, 75 bp, synthetic construct
  source 1..75: mol_type = other DNA
caccagcgccaccggcacgcaactgctgaacaccactactacgcgcaccagcgtatccgaccgtctgaaggccgg

SEQ ID NO: 190109 - DNA, 75 bp, synthetic construct
  source 1..75: mol_type = other DNA
ggcggtgaaatccatagtgacattataaggaaacgaacaatagatcgagtaaatcgcagtcagggacaaggattg

SEQ ID NO: 190110 - DNA, 75 bp, synthetic construct
  source 1..75: mol_type = other DNA
gccgggatttggtaatctggcgataccgcgggtgggccaggaggtgattgttgattttctgaacggggacccgga

SEQ ID NO: 190111 - DNA, 75 bp, synthetic construct
  source 1..75: mol_type = other DNA
ccacgatcgtcacaaggatgtagggaacgatcaaatcagtaagataataggaaaagataccgaagaagtcgtgaa

SEQ ID NO: 190112 - DNA, 75 bp, synthetic construct
  source 1..75: mol_type = other DNA
tgtcgttgaccagttggcgcatatcgatcttaaccttgcgcaggcggtagcaaaaaatctcggtattgagctgac

SEQ ID NO: 190113 - DNA, 75 bp, synthetic construct
  source 1..75: mol_type = other DNA
gacttcaccaacgatccgctgttgcagggacgttttgttctcctataccgatacacaaatcagtcgtcttggtgg

SEQ ID NO: 190114 - DNA, 75 bp, synthetic construct
  source 1..75: mol_type = other DNA
aggggcgtttattctcctataccgatacacaaatcagtcgtcttggcgggccaaatttccatgagattccgatta

SEQ ID NO: 190115 - DNA, 75 bp, synthetic construct
  source 1..75: mol_type = other DNA
tgggtcaatatagaaatattattttctgggataataagaatgatatatatgaaattttcaataaaattgatctgg

SEQ ID NO: 190116 - DNA, 75 bp, synthetic construct
  source 1..75: mol_type = other DNA
aaaattgttagacttgctggcaaaacggcatttaatccaatattaaagccagtgctgggtaatgtaataattaag

SEQ ID NO: 190117 - DNA, 75 bp, synthetic construct
  source 1..75: mol_type = other DNA
ccgatgcatggcgtgatgcttatgaagcaggaaaaacaccggtcgaagcatattgtgatgagtggggcgatgaat

SEQ ID NO: 190118 - DNA, 75 bp, synthetic construct
  source 1..75: mol_type = other DNA
accttccgcctgattaatgccgaagggaaggcaacgtttgtacgtttccactggaaaccactggcaggtaaagcc

SEQ ID NO: 190119 - DNA, 75 bp, synthetic construct
  source 1..75: mol_type = other DNA
gcaggtgtatatccatgcccagaagaacatggatacggaggtgctcaacgaccggacaacggatgtgaaacatga

SEQ ID NO: 190120 - DNA, 75 bp, synthetic construct
  source 1..75: mol_type = other DNA
accagtcttatccgtttgtgatgagtgtggatgtcgccagcgactcttttatgcagacggcggagatgctgctgg

SEQ ID NO: 190121 - DNA, 75 bp, synthetic construct
  source 1..75: mol_type = other DNA
gccgacggtagttttatggatgaactgttaacgctgatggcagcacaccgcgtgtggtcacgcattcctaagatt

SEQ ID NO: 190122 - DNA, 75 bp, synthetic construct
  source 1..75: mol_type = other DNA
ggtttcagttttgagttaagcaaagtcgttcgtccgtatattcgtgagcgcgttgttgaccagctggcgcatatt

SEQ ID NO: 190123 - DNA, 75 bp, synthetic construct
  source 1..75: mol_type = other DNA
ccatcgtttggcgaatattattcccatccgcgtctgttctggctaagtcagacgccattcgagcagcgccatatt

SEQ ID NO: 190124 - DNA, 75 bp, synthetic construct
  source 1..75: mol_type = other DNA
gggggtcacgaccagagtatcacggtggcgaacgaccggcgcataacggtacgtaatgaccagacgctgaaggtg

SEQ ID NO: 190125 - DNA, 75 bp, synthetic construct
  source 1..75: mol_type = other DNA
tcagcgtacagggcgatattgttttacagagcgacagcaaaatcagtctgcgggtgggcggttcatttgtggtga

SEQ ID NO: 190126 - DNA, 75 bp, synthetic construct
  source 1..75: mol_type = other DNA
accatgaggacaaccgttcgccggggagtctgccggggacgaagacgcagatgacgatacggtcgaagacctata

SEQ ID NO: 190127 - DNA, 75 bp, synthetic construct
  source 1..75: mol_type = other DNA
cgctgaccatctggcagggcgtcatcccgcagcgttatgtcacaggcgtggtggcagggtttggtatgcaggaga

SEQ ID NO: 190128 - DNA, 75 bp, synthetic construct
  source 1..75: mol_type = other DNA
tacttgtctttcctgacggtgcggaattaacaccaatatatgtgtatctgaaaactgcaagggatgaagcgggaa

SEQ ID NO: 190129 - DNA, 75 bp, synthetic construct
  source 1..75: mol_type = other DNA
actattgagccaatttaataaagctaaccaaacgttgataaagcgtggacgcgcaccttatactatatcaagaca

SEQ ID NO: 190130 - DNA, 75 bp, synthetic construct
  source 1..75: mol_type = other DNA
agggcaatggcgactccggtgatggagaggggggggccggagatgatgatagtggaaacgattcggacaattcag

SEQ ID NO: 190131 - DNA, 75 bp, synthetic construct
  source 1..75: mol_type = other DNA
catactcatcgccgttcgtcctggatgtggacgttgccagcgactcgttccgccagacggcggagaagctgctgg

SEQ ID NO: 190132 - DNA, 75 bp, synthetic construct
  source 1..75: mol_type = other DNA
acgttaacgacggcactgaacacgcgcaccaactggcggaactgctgaaagatacgccgtgtaagattaacctga

SEQ ID NO: 190133 - DNA, 75 bp, synthetic construct
  source 1..75: mol_type = other DNA
atgtcctcagaaggattacgtttcacgctgtcggtggacgacatcgtggagatggcgacggcggtggtgagcttc

SEQ ID NO: 190134 - DNA, 75 bp, synthetic construct
  source 1..75: mol_type = other DNA
gctgtcacaggcgggggagtttccgtttaacccggacacatcggcaggagcggaaacggagtgtgtcagtatgtt

SEQ ID NO: 190135 - DNA, 75 bp, synthetic construct
  source 1..75: mol_type = other DNA
agcccggagcagaagctgacgctgtgcgacgatgtggcggggctgtcacaggcgggggagcttccgtttaacccg

SEQ ID NO: 190136 - DNA, 75 bp, synthetic construct
  source 1..75: mol_type = other DNA
cgtttgtgatgagtgtggatgttgccagcgattcttttatgcagacggcggagatgctgctggagaagaacgcaa

SEQ ID NO: 190137 - DNA, 75 bp, synthetic construct
  source 1..75: mol_type = other DNA
acgctgcaaccgacggtgctgaagacaccggggggtgagaagagtggtgatggcagtgactccggagaagaaaat

SEQ ID NO: 190138 - DNA, 75 bp, synthetic construct
  source 1..75: mol_type = other DNA
cattcagggggcgtggacatcgtcgggccgaaaatcaatctcaatagcggcggtagtccgggaacgccggtgccg

SEQ ID NO: 190139 - DNA, 75 bp, synthetic construct
  source 1..75: mol_type = other DNA
atgaacatggccgggtacgggtgaagtttcactgggaccgttatcacgggatgacggaggcgagttcatgctggg

SEQ ID NO: 190140 - DNA, 75 bp, synthetic construct
  source 1..75: mol_type = other DNA
gcagcacggcaaggatttcacgctgtatcagatggagagcctgcgcagtgatgcggaaaaggccacagggcagag

SEQ ID NO: 190141 - DNA, 75 bp, synthetic construct
  source 1..75: mol_type = other DNA
cagagtcaggattacacgtttaaggtaccggactggccggggatatacgaacagcagggtgagaggctgaacgga

SEQ ID NO: 190142 - DNA, 75 bp, synthetic construct
  source 1..75: mol_type = other DNA
tcagataagcctgaaggtgggcaggtcgttcgtagtgatacactcgggcggcgtggatatcgtcgggccgaagat

SEQ ID NO: 190143 - DNA, 75 bp, synthetic construct
  source 1..75: mol_type = other DNA
gcgacagcaaaatcagtctgcgggtgggaggttcatttgtggtgatccattccggcggcgtggatattaagggcg

SEQ ID NO: 190144 - DNA, 75 bp, synthetic construct
  source 1..75: mol_type = other DNA
gttaccgcgatgatttactggctaaccgtgcgattgtgaaacacggtaatttcgcactgttaacaccagacggtc

SEQ ID NO: 190145 - DNA, 75 bp, synthetic construct
  source 1..75: mol_type = other DNA
gaacacggtgcctatattctttccggtcagggggtttataacctcgacaataactggatcccggtgaaaaaaggc

SEQ ID NO: 190146 - DNA, 75 bp, synthetic construct
  source 1..75: mol_type = other DNA
acgaacacgggcgggtacgggtgaagtttcactgggacaggtataacccggcaacggaggcgagttcgtgctggg

SEQ ID NO: 190147 - DNA, 75 bp, synthetic construct
  source 1..75: mol_type = other DNA
acggggaaccatgtcagcctggtggagggaaagcacagcctggtggtgaagggggacctggcgaggaaggtgagt

SEQ ID NO: 190148 - DNA, 75 bp, synthetic construct
  source 1..75: mol_type = other DNA
gttcggtaacctggcgataccgcgtgtgggtcaggaagtgatagtggacttcctgaacggggacccggaccagcc

SEQ ID NO: 190149 - DNA, 75 bp, synthetic construct
  source 1..75: mol_type = other DNA
aggcatttgcgcaactgaccccttctgtacgcctgccgggcatatgctgttgtaccgcgcatattactcctgagg

SEQ ID NO: 190150 - DNA, 75 bp, synthetic construct
  source 1..75: mol_type = other DNA
ccagacgcgaattatttttgatggcgttaactcggcgtttcatctgtggtgcaacgggcgctgggtcggttacgg

SEQ ID NO: 190151 - DNA, 75 bp, synthetic construct
  source 1..75: mol_type = other DNA
cgtctgacggatgatccgcagtggctgccagcaatgagcgaacgcgtaacgcgtatggtgcagcgcgatcgtaat

SEQ ID NO: 190152 - DNA, 75 bp, synthetic construct
  source 1..75: mol_type = other DNA
ctgtggagcgccgaactcccgaatctctatcgtgcagttattgaactgcacaccgccgacggcacgctgattgaa

SEQ ID NO: 190153 - DNA, 75 bp, synthetic construct
  source 1..75: mol_type = other DNA
taatcacgacgcgctctatcgctggataaaatccgtcgatccctcccgtccggtgcagtatgaaggtggcggagc

SEQ ID NO: 190154 - DNA, 75 bp, synthetic construct
  source 1..75: mol_type = other DNA
tctgaatttgacctgagcgcatttttacgcgccggagaaaaccgcctcgcggtgatggtgctgcgctggagtgac

SEQ ID NO: 190155 - DNA, 75 bp, synthetic construct
  source 1..75: mol_type = other DNA
acgatttcagccgcgccgtgctggaggctgaagtgcacatgggtggcgagttgcgcgactttctgcgggtaacag

SEQ ID NO: 190156 - DNA, 75 bp, synthetic construct
  source 1..75: mol_type = other DNA
gatacaccgcatccggcgcggattggcctgacctgccaactggcacaggtcgcagaacgggttaactggctgggg

SEQ ID NO: 190157 - DNA, 75 bp, synthetic construct
  source 1..75: mol_type = other DNA
caactgattgatggggaagggcgactggttaactgcgtatggaaaacctgggcgtgggaaacggcatttgatcaa

SEQ ID NO: 190158 - DNA, 75 bp, synthetic construct
  source 1..75: mol_type = other DNA
tcatccgcaaaatgaagtgcgtcttatcgacgtattgctgcgcccggaagtgctggtctttgagccgctgtggac

SEQ ID NO: 190159 - DNA, 75 bp, synthetic construct
  source 1..75: mol_type = other DNA
ttaaccgccagtcaggctttctttcacagatgtggattggcgataaaaaacaactgctgacgccgctgcgcgatc

SEQ ID NO: 190160 - DNA, 75 bp, synthetic construct
  source 1..75: mol_type = other DNA
ggcccgctataatcgcccttcccggcagttacgcagcctgaatggtgagtggcaatttgcctggttcccgtcccc

SEQ ID NO: 190161 - DNA, 75 bp, synthetic construct
  source 1..75: mol_type = other DNA
ttggtggcgacgactcctggagcccgtcagtatcggcggaattccagctgagcgccggtcgctaccattaccagt

SEQ ID NO: 190162 - DNA, 75 bp, synthetic construct
  source 1..75: mol_type = other DNA
cgggcaactttggctcacggtacaggtggtgcaaccaaacgcgaccgcgtggtcagaagccggacacatcagcgc

SEQ ID NO: 190163 - DNA, 75 bp, synthetic construct
  source 1..75: mol_type = other DNA
agccggaaaacataccgtattgatggacacggtgagatgagcatcagtgtggatgttgaagttgcaagcgatacg

SEQ ID NO: 190164 - DNA, 75 bp, synthetic construct
  source 1..75: mol_type = other DNA
ccattaccgagtccgggctgcgcgttggtgcggatatctcggtagtgggatacgacgataccgaagacagctcat

SEQ ID NO: 190165 - DNA, 75 bp, synthetic construct
  source 1..75: mol_type = other DNA
ccaggccgaagcggcgttgttgcagtgcacggcagatacacttgccgacgcggtgctgattaccactgtccacgc

SEQ ID NO: 190166 - DNA, 75 bp, synthetic construct
  source 1..75: mol_type = other DNA
agcgccatatatcagaagctcaagcgaaaggtgaatttgataacttaccaggtaacggcgaaccattgatgctgg

SEQ ID NO: 190167 - DNA, 75 bp, synthetic construct
  source 1..75: mol_type = other DNA
aacttgagcaacggagagaagcaattcagcttctggatattctcaaaggtatccgtcacgatgatccgcaatatc

SEQ ID NO: 190168 - DNA, 75 bp, synthetic construct
  source 1..75: mol_type = other DNA
agattctgttagttcgtagaaacgctcctggcgtctggcagtgggtgagactcagcaaccgacggatggggttga

SEQ ID NO: 190169 - DNA, 75 bp, synthetic construct
  source 1..75: mol_type = other DNA
gcaccgctggataacgacattggcgtaagtgaagcgacccgcattgaccctaacgcctgggtcgaacgctggaag

SEQ ID NO: 190170 - DNA, 75 bp, synthetic construct
  source 1..75: mol_type = other DNA
aacctcagcgtgacactcccctccgcgccccacgccatcccgcaactgaccaccagcgaaacggatttttgcatc

SEQ ID NO: 190171 - DNA, 75 bp, synthetic construct
  source 1..75: mol_type = other DNA
ggcaatttgtctggtttccggcaccagaagcggttccggaaagctggctggagtgcgatcttcctgacgccgata

SEQ ID NO: 190172 - DNA, 75 bp, synthetic construct
  source 1..75: mol_type = other DNA
aggatgccattgctgtggaagctgcctgcactaatgttccggcgttatttcttgatgtctctgaccagacaccca

SEQ ID NO: 190173 - DNA, 75 bp, synthetic construct
  source 1..75: mol_type = other DNA
ctgctgctgaacggcaagccgttgctgattcgcggcgttaaccgtcacgagcatcatcctctgcatggtcaggtc

SEQ ID NO: 190174 - DNA, 75 bp, synthetic construct
  source 1..75: mol_type = other DNA
ggcggtgaaattatcgatgagcgtggtggttatgccgatcgcgtcacactacgtctgaacgtcgaaaacccgaaa

SEQ ID NO: 190175 - DNA, 75 bp, synthetic construct
  source 1..75: mol_type = other DNA
tcgccagtttgatcgaaaaccggctggcttcggatattcatggccgcccgctacccagcgcccgcacgcgtaccc

SEQ ID NO: 190176 - DNA, 75 bp, synthetic construct
  source 1..75: mol_type = other DNA
ttgctcaactttgcggagcattcgctggcctttttcagcctgtttatccgcgcctttgcgctggtgtggcactgg

SEQ ID NO: 190177 - DNA, 75 bp, synthetic construct
  source 1..75: mol_type = other DNA
atgcgtaattatccgcaacccggcgaacgctggcagcatgtacgtggctggaccgtaacaatcatccgattaact

SEQ ID NO: 190178 - DNA, 75 bp, synthetic construct
  source 1..75: mol_type = other DNA
atcatcatgctgtgtatgacggtgtgggcgttgtatctgatattccgtaataaaaaagagattacccagcatttg

SEQ ID NO: 190179 - DNA, 75 bp, synthetic construct
  source 1..75: mol_type = other DNA
tcgtgccgccaacgctggttgaagagcaaaccgtgctacaaaaggtgaccgaagtcagtcgccattatggtgaag

SEQ ID NO: 190180 - DNA, 75 bp, synthetic construct
  source 1..75: mol_type = other DNA
ttcgcgcgccagtgcagacttatcaggtgctgcctgctccgggcgcgaccccggctgaaccgctgccgccggggg

SEQ ID NO: 190181 - DNA, 75 bp, synthetic construct
  source 1..75: mol_type = other DNA
taaccagtatcaggaaagcgatctgagatttatccagcgcctgctggcagaagttggcattttttacttctttac

SEQ ID NO: 190182 - DNA, 75 bp, synthetic construct
  source 1..75: mol_type = other DNA
tgccggtacgtctggccaaaccctacagtggtgatgcttatggttttcattttccgctgattcagggaacggaag

SEQ ID NO: 190183 - DNA, 75 bp, synthetic construct
  source 1..75: mol_type = other DNA
gctgggatgcccgggacagattctgttaaaaagcacgaatatgcagaagatgggaccaacaagtcttgatattgc

SEQ ID NO: 190184 - DNA, 75 bp, synthetic construct
  source 1..75: mol_type = other DNA
ggtttgagcagcggtatacgcgcctgtttaatgccccgctctttaaaccttcgccagctcccgcggggggtatct

SEQ ID NO: 190185 - DNA, 75 bp, synthetic construct
  source 1..75: mol_type = other DNA
atgcgtaattatccgcaccccggcgaacgctggcagcatgaacgtggctggacggtcacgattatccgattaata

SEQ ID NO: 190186 - DNA, 75 bp, synthetic construct
  source 1..75: mol_type = other DNA
ggcagcagatggctattaacagcatcaatggtgaaattatactgaatgcagcacagggtattaccctgaccagca

SEQ ID NO: 190187 - DNA, 75 bp, synthetic construct
  source 1..75: mol_type = other DNA
ttgatcgccatgaagatgctgataaagccaatcaggcactgaaagatgcggtagcggaattaatggaaaacgaag

SEQ ID NO: 190188 - DNA, 75 bp, synthetic construct
  source 1..75: mol_type = other DNA
actgataaaaaagtcaaaagaatattcatgatctgcgacaaagatgaggctccaattacctatcagaaagatgga

SEQ ID NO: 190189 - DNA, 75 bp, synthetic construct
  source 1..75: mol_type = other DNA
cttctggacaaaatgagaaatactcaacgtatttctctgattatctttctcatgaaaggcaagcaaataggggtc

SEQ ID NO: 190190 - DNA, 75 bp, synthetic construct
  source 1..75: mol_type = other DNA
cttatggcatcgactacatagtattaatggttatgcgataacaaccacccatctattagactcaattacagctac

SEQ ID NO: 190191 - DNA, 75 bp, synthetic construct
  source 1..75: mol_type = other DNA
ttgctgcggtgccgatccgtaccggtcatccgcaaaatgaagtgcgtcttatcgacgtattgctgcgcccggaag

SEQ ID NO: 190192 - DNA, 75 bp, synthetic construct
  source 1..75: mol_type = other DNA
ttgcgtctctcctggcagcgtcgccgtcaccatatgatcactggtcgtatggatttctgcatggatgagcgtggc

SEQ ID NO: 190193 - DNA, 75 bp, synthetic construct
  source 1..75: mol_type = other DNA
cccgatccggaatggggtgatcgctggcgttatttctggcgtgtgacgttgccggtggatgccggtgctcagtgg

SEQ ID NO: 190194 - DNA, 75 bp, synthetic construct
  source 1..75: mol_type = other DNA
ctggacagtattgggcttaccttgcagcacgacgacgccattgccgcttatgaagcaaaacaacctgcgtttatg

SEQ ID NO: 190195 - DNA, 75 bp, synthetic construct
  source 1..75: mol_type = other DNA
gatgaaaaaggccaacagccaaacccggacttcgtgctgaacttcccgcagtatcagggcgcttccattttgctg

SEQ ID NO: 190196 - DNA, 75 bp, synthetic construct
  source 1..75: mol_type = other DNA
atatatatagctacgaaacaggcgcccactctgatttcgaatctattcgtgcggttgttcgcccggcctatattt

SEQ ID NO: 190197 - DNA, 75 bp, synthetic construct
  source 1..75: mol_type = other DNA
caagaggtgaaggcaggtgagaaaacctatcgctttaccatcgatgcattccgccgccactgcatgatgaacggg

SEQ ID NO: 190198 - DNA, 75 bp, synthetic construct
  source 1..75: mol_type = other DNA
ctggacagcattggcctgaccctgcagcacgacgacgctattgcgtcttatgaagagaagcaaccggcatttatg

SEQ ID NO: 190199 - DNA, 75 bp, synthetic construct
  source 1..75: mol_type = other DNA
ctggacagcattgggcttaccttgcagcacgacgacgccattgcggcttatgaagcgaagcaacccgcgtttatg

SEQ ID NO: 190200 - DNA, 75 bp, synthetic construct
  source 1..75: mol_type = other DNA
atgaccacctttacccaaaaagaactgattaaagaaatcaaagatcgcatcagcagcctcgacgtacgagacgat

SEQ ID NO: 190201 - DNA, 75 bp, synthetic construct
  source 1..75: mol_type = other DNA
tgattaacaaggtctctgaaaacggttattcactccgcgtggtcgataaatccgaccaacacgcaaccagtacac

SEQ ID NO: 190202 - DNA, 75 bp, synthetic construct
  source 1..75: mol_type = other DNA
cctggggctgtcaaaaacgttccgtcgtctggtcgtcacactcatccggcgttatggcgtcagtctcattcatct

SEQ ID NO: 190203 - DNA, 75 bp, synthetic construct
  source 1..75: mol_type = other DNA
ggggcgcattgtcgttgacgtcgatggcgttaatctcactgaactgattaataacgtcgctgaaaacggttattc

SEQ ID NO: 190204 - DNA, 75 bp, synthetic construct
  source 1..75: mol_type = other DNA
atgaacctttccctgacgctggaagccgacagcattaacgtgcaggcactgaacatggggcgcattgtcgttgac

SEQ ID NO: 190205 - DNA, 75 bp, synthetic construct
  source 1..75: mol_type = other DNA
ctactcccttcgtgttgttgataaatctgaccggacctcaacagacagcatccccccctcagttgccctgagcgg

SEQ ID NO: 190206 - DNA, 75 bp, synthetic construct
  source 1..75: mol_type = other DNA
tcacactcatccaacgttatggcgtcagtctcattcatctggatgtcagcgctgaatgtctgccggacctgccca

SEQ ID NO: 190207 - DNA, 75 bp, synthetic construct
  source 1..75: mol_type = other DNA
atcaccggacgtacccacatggcgaaagcaatcattatcggtatggcggtgagtgccatcgggatcttcagttac

SEQ ID NO: 190208 - DNA, 75 bp, synthetic construct
  source 1..75: mol_type = other DNA
attctggcgtattactgggatgatttcgctccggcgctggccaccgactgggacaaaatcaacctgctgaaaacc

SEQ ID NO: 190209 - DNA, 75 bp, synthetic construct
  source 1..75: mol_type = other DNA
atgaccacctttacccaaaaagaactgattaaagaaatcaaagagcgcatcagcagcctcgacgttcgagacgat

SEQ ID NO: 190210 - DNA, 75 bp, synthetic construct
  source 1..75: mol_type = other DNA
tgcggcttaaacgcctggggctgtcaaaaacgttccgtcgtctggttgtcacactcatccaacgttatggcgtca

SEQ ID NO: 190211 - DNA, 75 bp, synthetic construct
  source 1..75: mol_type = other DNA
actcatccggcgttatggcgtcagtctcattcatctggatgccagtgccggatgtctgccgggtctgcccacttt

SEQ ID NO: 190212 - DNA, 75 bp, synthetic construct
  source 1..75: mol_type = other DNA
ctgggcctgtccagaacgttccgtcgtctggtcgtcactctcacccggcgttatggcgtcagtctcattcatctg

SEQ ID NO: 190213 - DNA, 75 bp, synthetic construct
  source 1..75: mol_type = other DNA
cggcatacgctgcagcaccgcacatatcacggaaacagacaacgccaggctgtactcgctgtcacaccagactaa

SEQ ID NO: 190214 - DNA, 75 bp, synthetic construct
  source 1..75: mol_type = other DNA
tcacacttacccgacgttatggcgtcagtctcattcatctggatgtcagcgctgaatgtctgccggacctgccca

SEQ ID NO: 190215 - DNA, 75 bp, synthetic construct
  source 1..75: mol_type = other DNA
caacccttgcccgcatacgctgcagtaccgcacatatcacggaaacggacaacgcctggttgtactcgctgtcac

SEQ ID NO: 190216 - DNA, 75 bp, synthetic construct
  source 1..75: mol_type = other DNA
atgaaactggctctgacgctggaagccgacagcattaacgcgcaggcgctgaacatggggcgcattgtcgttgac

SEQ ID NO: 190217 - DNA, 75 bp, synthetic construct
  source 1..75: mol_type = other DNA
tcaaaaacgttccgccgtctggttgtcacacttatccggcgttatggtgtcagtctcattcatctggatgccagt

SEQ ID NO: 190218 - DNA, 75 bp, synthetic construct
  source 1..75: mol_type = other DNA
atgaccacctttacccaaaaagaactgattaaagaaattaaagaccgcatcagcagcctcgacgtgcgagacgat

SEQ ID NO: 190219 - DNA, 75 bp, synthetic construct
  source 1..75: mol_type = other DNA
tgacgtcgatggtgttaatctcactgaactgattaacaaagtcgctgaaaacggttattcactccgggtggttga

SEQ ID NO: 190220 - DNA, 75 bp, synthetic construct
  source 1..75: mol_type = other DNA
tgacgtcgatggtgttaatctcattgaactgattaacaaagtcactgaaaacggttattcactccgggtggtaga

SEQ ID NO: 190221 - DNA, 75 bp, synthetic construct
  source 1..75: mol_type = other DNA
tgacgtcgatggtgttaatctcaatgaactgattaacaaagtctctgaaaacggttattcactccgggtggtaga

SEQ ID NO: 190222 - DNA, 75 bp, synthetic construct
  source 1..75: mol_type = other DNA
caacccttcccggcatacgctgcagtaccgcacatatcacggaaacggacaacgcctggttgtactcgctgtcac

SEQ ID NO: 190223 - DNA, 75 bp, synthetic construct
  source 1..75: mol_type = other DNA
caacccttccccgcatacggtgcagtaccgcacatatcacggaaacggacaacgcctggttgtactcgctgtcac

SEQ ID NO: 190224 - DNA, 75 bp, synthetic construct
  source 1..75: mol_type = other DNA
tgacgtcgatggtgttaatctcagtgaactgattaacaaagtccctgaaaacggttattcactccgggtggttga

SEQ ID NO: 190225 - DNA, 75 bp, synthetic construct
  source 1..75: mol_type = other DNA
tgttgacgcgaccggtaaaactctgggccgtctggctactgaactggctcgtcgcctgcgcggtaagcacaaagc

SEQ ID NO: 190226 - DNA, 75 bp, synthetic construct
  source 1..75: mol_type = other DNA
tcgttggactactggtcatcttattttcagggaccatgattatccctggactggtagcactcatctaccgggatg

SEQ ID NO: 190227 - DNA, 75 bp, synthetic construct
  source 1..75: mol_type = other DNA
atgccatcggtcatagctttgcgacaatcgctattggtggtttctcgacacatgatgctagtgttggctatttcg

SEQ ID NO: 190228 - DNA, 75 bp, synthetic construct
  source 1..75: mol_type = other DNA
tctgcggcttaaacgcctggggctgtcaaaaacgttccgtcgtctggttatcacactgaaccgacgttatggcgt

SEQ ID NO: 190229 - DNA, 75 bp, synthetic construct
  source 1..75: mol_type = other DNA
aagggtttcttcgtgggatatgtgtacctcgagatctgaaagttaatgaaacatatgctgattaccttgtgcgta

SEQ ID NO: 190230 - DNA, 75 bp, synthetic construct
  source 1..75: mol_type = other DNA
atgaaaacttttacagctaaaccagaaaccgtaaaacgcgactggtatgttgttgacgcgaccggtaaaactctg

SEQ ID NO: 190231 - DNA, 75 bp, synthetic construct
  source 1..75: mol_type = other DNA
gtggtgggttatagcaatgaaacgctgtcatttattttaacgcctgcaccaggcggcatcgatgttccgacgcag

SEQ ID NO: 190232 - DNA, 75 bp, synthetic construct
  source 1..75: mol_type = other DNA
actaccgtttctatgattttgaaagaaacgaaaaagagatgtcattactttatcaaaagtttctttttgaatttt

SEQ ID NO: 190233 - DNA, 75 bp, synthetic construct
  source 1..75: mol_type = other DNA
attacgtgcggggtatcgcttgctgaagaatgctggttgcttaccgccagaacttgagcataggagggaagcaat

SEQ ID NO: 190234 - DNA, 75 bp, synthetic construct
  source 1..75: mol_type = other DNA
cctgagggtttcgttaccgtagccagcaccgaaagttgcccgtttgccataatggctaacgaagaaaaacgtttc

SEQ ID NO: 190235 - DNA, 75 bp, synthetic construct
  source 1..75: mol_type = other DNA
ccacggcgataaggtaactgcaattcctgagggtttcgttaccgtagccagcaccgaaagttgcccgtttgccat

SEQ ID NO: 190236 - DNA, 75 bp, synthetic construct
  source 1..75: mol_type = other DNA
taatgggcgatggtcgtaagtatgactgggttgtttctctgcgtgccgtcgaaaccatcgactttatgaccgcac

SEQ ID NO: 190237 - DNA, 75 bp, synthetic construct
  source 1..75: mol_type = other DNA
tctgcggcttaaacgcctggggctgtcaaaaacgttccgtcgtctggttttcacacttaaccgacgttatggcgt

SEQ ID NO: 190238 - DNA, 75 bp, synthetic construct
  source 1..75: mol_type = other DNA
ttgtcacacttacccgacgttatggcgtcagtctcattcatctggatgccagcgctgaatgcctgccgggtttac

SEQ ID NO: 190239 - DNA, 75 bp, synthetic construct
  source 1..75: mol_type = other DNA
tggtcgccctgtcttttctcgcgccgctgtggctcaacgccgcgccgcgcgtcatcacgctttctcccgccaaca

SEQ ID NO: 190240 - DNA, 75 bp, synthetic construct
  source 1..75: mol_type = other DNA
atggactggctggctaaatattggtggattctggtaattgtctttttggtgggcgtcctgctgaatgttatcaaa

SEQ ID NO: 190241 - DNA, 75 bp, synthetic construct
  source 1..75: mol_type = other DNA
aagggtttctgcgcgggaaatgtgtaccgcgagatctgaaagtgaatgaaacggatgctgaatacctggtgcgta

SEQ ID NO: 190242 - DNA, 75 bp, synthetic construct
  source 1..75: mol_type = other DNA
tatcagtgtcagctgaactgccgccagcaaatgaaagtgttctgttatttgatgctaatggagaaggctggctga

SEQ ID NO: 190243 - DNA, 75 bp, synthetic construct
  source 1..75: mol_type = other DNA
cttaaacgcctggggttgtcaaaaacgttccgtcgtctggttgtcacactcatccaacgttatggcgtcagtctc

SEQ ID NO: 190244 - DNA, 75 bp, synthetic construct
  source 1..75: mol_type = other DNA
gtctggttatcacactaatcctacgttatggcgtcagtctcattcatctggatgccagcgctgaatgcctgccgg

SEQ ID NO: 190245 - DNA, 75 bp, synthetic construct
  source 1..75: mol_type = other DNA
tctgcggcttaaacgcctggggctgtcaaaaacgttccgtcgtctggttgtcacactgaaccaacgttatggcgt

SEQ ID NO: 190246 - DNA, 75 bp, synthetic construct
  source 1..75: mol_type = other DNA
tctgcggcttaaacgcctggggctgtcaaaaacgttccgtcgtctggttgtcacactaaaccgacgttatggcgt

SEQ ID NO: 190247 - DNA, 75 bp, synthetic construct
  source 1..75: mol_type = other DNA
gtctggttgtcacactaaccccacgttatggcgtcagtctcattcatctggatgccagcgctgaatgcctgccgg

SEQ ID NO: 190248 - DNA, 75 bp, synthetic construct
  source 1..75: mol_type = other DNA
gtctggttctcacactaaaccaacgttatggcgtcagtctcattcatctggatgccagcgctgaatgcctgccgg

SEQ ID NO: 190249 - DNA, 75 bp, synthetic construct
  source 1..75: mol_type = other DNA
gtctggttttcacactaatccgacgttatggcgtcagtctcattcatctggatgccagcgctgaatgcctgccgg

SEQ ID NO: 190250 - DNA, 75 bp, synthetic construct
  source 1..75: mol_type = other DNA
ttgcgactatcggcaaacttttatcagccgtttgctgcatggcatgaacagacagccacgcaggaacaacggatg

SEQ ID NO: 190251 - DNA, 75 bp, synthetic construct
  source 1..75: mol_type = other DNA
ttctccgcgcgatctctatatgcgcccgcgcacgccgtttgttgcgggattcgttgggacatcgaatgtttttga

SEQ ID NO: 190252 - DNA, 75 bp, synthetic construct
  source 1..75: mol_type = other DNA
gagctgaaaaagctgcaacagtctctcggtatcacttttatcttcgttacccacgatcagggcgaagcgttatcg

SEQ ID NO: 190253 - DNA, 75 bp, synthetic construct
  source 1..75: mol_type = other DNA
tgtctgattggcggcgtgctattgctcaaacgccgcctgtatagcccgcgcgtgcgtgcaacgactaccggagcg

SEQ ID NO: 190254 - DNA, 75 bp, synthetic construct
  source 1..75: mol_type = other DNA
cgccgccagcttgagtacaagcagctctggagtggcggtcaggtgcttgctgttccgccagcgtacacaagccag

SEQ ID NO: 190255 - DNA, 75 bp, synthetic construct
  source 1..75: mol_type = other DNA
ttagcggcggggcacgccgttcttgcctgtggagagatggtgcagtcaggccgctcgttgaagcaggaacccccc

SEQ ID NO: 190256 - DNA, 75 bp, synthetic construct
  source 1..75: mol_type = other DNA
gaccggaacatatccgcttcaacatccccggcgaagtgcaggctaatggcacgatccaggcggtgcagtatcagg

SEQ ID NO: 190257 - DNA, 75 bp, synthetic construct
  source 1..75: mol_type = other DNA
cgcagagactaccttcataaagtcacaacgatcatcagcaaaaaccacgcaatgattgtcattgaggatttgaag

SEQ ID NO: 190258 - DNA, 75 bp, synthetic construct
  source 1..75: mol_type = other DNA
aaataagagttatcgatactcacataccagctcctgctggtggaggctcatcagaaaaaatggcttcttcagtat

SEQ ID NO: 190259 - DNA, 75 bp, synthetic construct
  source 1..75: mol_type = other DNA
gtgcttttgaaaagaataaatcacgatcattcactttcctgtcattcaaaaaaccttattagacttattttaaat

SEQ ID NO: 190260 - DNA, 75 bp, synthetic construct
  source 1..75: mol_type = other DNA
taaaacgccgcctgttcagcccgcgcgtgcgtgcaacgactaccggagcggacatcctgatcctgtcgctgctgg

SEQ ID NO: 190261 - DNA, 75 bp, synthetic construct
  source 1..75: mol_type = other DNA
gacgttattcctgctgttcccgttctcgcgtctggtacacatctggagcgtcccggtggagtatctgacacgtaa

SEQ ID NO: 190262 - DNA, 75 bp, synthetic construct
  source 1..75: mol_type = other DNA
tgccgaaacttggctggatgcgctaccggaatagccgtcaggtcacgggagttgtgaaaaatgtcactgtcagcc

SEQ ID NO: 190263 - DNA, 75 bp, synthetic construct
  source 1..75: mol_type = other DNA
acatcagtattcagacagaaagtgaagtatcaactccggttcacccttcagcatcaatggtcgggctggatgctg

SEQ ID NO: 190264 - DNA, 75 bp, synthetic construct
  source 1..75: mol_type = other DNA
ggcgctcgtaacattttagcggcgggacacgccgttcttgcctgtggagagatggtgcagtcaggccgctcgttg

SEQ ID NO: 190265 - DNA, 75 bp, synthetic construct
  source 1..75: mol_type = other DNA
ttccgctacccgcagggcgtaaagctcgatcaggaaaacagccgtatttttctgccgaaactgggctggatgcgc

SEQ ID NO: 190266 - DNA, 75 bp, synthetic construct
  source 1..75: mol_type = other DNA
agcgttctgaccttgttgaaaaactgaatgatattattgcacggcattatcctggtgcattgccgccacgagtct

SEQ ID NO: 190267 - DNA, 75 bp, synthetic construct
  source 1..75: mol_type = other DNA
ctgacgggcataaggaactgcgcctgaatgatgtgctgctcccctattccacctatgatcggttgtcggaagttg

SEQ ID NO: 190268 - DNA, 75 bp, synthetic construct
  source 1..75: mol_type = other DNA
ggccatgcgcagtcttctgcgggatctgaaagccaacctgctggataacgtgactttccgtaaagagctggaaaa

SEQ ID NO: 190269 - DNA, 75 bp, synthetic construct
  source 1..75: mol_type = other DNA
atttgaaggtcagcaacatgtcaaagtcagcagcgggtacggtcagccagccgggacgcaatgtccgggcaaaat

SEQ ID NO: 190270 - DNA, 75 bp, synthetic construct
  source 1..75: mol_type = other DNA
ttagcggcaggacatgccgtgcttgcctgtggagggatggtacagtcaggccgcccactgaagcaggaacccacc

SEQ ID NO: 190271 - DNA, 75 bp, synthetic construct
  source 1..75: mol_type = other DNA
ctgcattcccgtatcgcaaatatccgcagggactaccttcacaaagtcacaacgaccgtcagcaaaaaccacgca

SEQ ID NO: 190272 - DNA, 75 bp, synthetic construct
  source 1..75: mol_type = other DNA
aacagttttcagaaaaaccagaagacgctggcgagacttcagcgacagttaagccgcaaggtcaaattcagcaac

SEQ ID NO: 190273 - DNA, 75 bp, synthetic construct
  source 1..75: mol_type = other DNA
tcacgggtgttgtgaaaaatgtcacggtcagccagtcctgcggtaagtggtacatcagtattcagacagaaagtg

SEQ ID NO: 190274 - DNA, 75 bp, synthetic construct
  source 1..75: mol_type = other DNA
atgaggctctttgccggagcttgtcgtttcgttttcaatcgtgcactggcacttcagaatgaaaattatgaggcc

SEQ ID NO: 190275 - DNA, 75 bp, synthetic construct
  source 1..75: mol_type = other DNA
aaaagcggggacagaatgatgcattccgctacccgcagggtgttaagctcgatcaggaaaacagccgtatttttc

SEQ ID NO: 190276 - DNA, 75 bp, synthetic construct
  source 1..75: mol_type = other DNA
ttcagcctgaacggtgggaaagtggatgccggtacctgggaatactatctgaacaaggaaaatactgactggtac

SEQ ID NO: 190277 - DNA, 75 bp, synthetic construct
  source 1..75: mol_type = other DNA
gtgcaccagggggcgtatggggccgttataccgggtcagacaaccgcattagcggcggggccagctcgggctata

SEQ ID NO: 190278 - DNA, 75 bp, synthetic construct
  source 1..75: mol_type = other DNA
atatcaaaaacaccggtctggagccagtatctgctggtgcgccgcttcaggtggtgcaaacaggtggcggtgatg

SEQ ID NO: 190279 - DNA, 75 bp, synthetic construct
  source 1..75: mol_type = other DNA
aacaattatttgcagcagaatatcgcacgccaggccgcgcaggattcacaaagtcttgagttcctgcagcgtcag

SEQ ID NO: 190280 - DNA, 75 bp, synthetic construct
  source 1..75: mol_type = other DNA
ctggcatctgggctgaagctcgttatgaaaacggtaagcagaccgagtctccggtcacgggaagttttgggttcc

SEQ ID NO: 190281 - DNA, 75 bp, synthetic construct
  source 1..75: mol_type = other DNA
acggcacggcagtgaaaggcgattatcatcagaatggctttggtggcagcctggaagcaggcagaaccttcagtc

SEQ ID NO: 190282 - DNA, 75 bp, synthetic construct
  source 1..75: mol_type = other DNA
caaactgtcaggcaaccagataaccaataatggggttctgcattttctcgacaatagttcagcaaactatagcgg

SEQ ID NO: 190283 - DNA, 75 bp, synthetic construct
  source 1..75: mol_type = other DNA
tggaagattgaatataccgaaagtacgtctgcggcaatggaaaaggttgcacaggcaaaatcaccgcatgttgct

SEQ ID NO: 190284 - DNA, 75 bp, synthetic construct
  source 1..75: mol_type = other DNA
tgacgttaactatcgaccattgtttgttggtctccggcacgactgatttatccaccattaatacggtctacagcc

SEQ ID NO: 190285 - DNA, 75 bp, synthetic construct
  source 1..75: mol_type = other DNA
ggctcagcctctaaggttactcagaacagtggcggtgctgtcgttactaataccagtgcagacctgagtggtacc

SEQ ID NO: 190286 - DNA, 75 bp, synthetic construct
  source 1..75: mol_type = other DNA
cacaccggagatttgttgaatgtaaatggaaatgccagcggtaactttgtgctgaatatcagaaataccggacag

SEQ ID NO: 190287 - DNA, 75 bp, synthetic construct
  source 1..75: mol_type = other DNA
aggtgggcaagtatttttctctgaatgagaatacctggttacttccttatgcccgaacaacagctcttgctgtga

SEQ ID NO: 190288 - DNA, 75 bp, synthetic construct
  source 1..75: mol_type = other DNA
tgcaggaaacctttaccgttagcgaacgcagtaaagaaagcgggatgctggaacttaccatgactggtgatgatc

SEQ ID NO: 190289 - DNA, 75 bp, synthetic construct
  source 1..75: mol_type = other DNA
gttacggataccaccatcaacagtggcggaggacagtatgtttacgtcaacggaaatgtcacaaaaacgaccatc

SEQ ID NO: 190290 - DNA, 75 bp, synthetic construct
  source 1..75: mol_type = other DNA
ctgacgcgccgttgattagcgataaacaagaaattgatgcccgttaccgttactggcgtcgccatattctgctga

SEQ ID NO: 190291 - DNA, 75 bp, synthetic construct
  source 1..75: mol_type = other DNA
cagggctgacgcgtaaagagatcctcaccaaatatgtgttgctgaatccgtatatctggctgctttcgttttgct

SEQ ID NO: 190292 - DNA, 75 bp, synthetic construct
  source 1..75: mol_type = other DNA
tcgaagtcggcggtagtgccacgaacaccaccattaacagtggtggtggcctgtccgtctacgggggcgccagtg

SEQ ID NO: 190293 - DNA, 75 bp, synthetic construct
  source 1..75: mol_type = other DNA
gcgaaagtactcgatacctggcactggagcggattttttgtggttatcgccatcgccgccggggtttccgcactg

SEQ ID NO: 190294 - DNA, 75 bp, synthetic construct
  source 1..75: mol_type = other DNA
ggaacagataatccggtacctccggtacgccatacaacaaaatcggctgatgctgtgctggatatggcaacggca

SEQ ID NO: 190295 - DNA, 75 bp, synthetic construct
  source 1..75: mol_type = other DNA
cagcatcagccataaccgtggtggcagcagtactgtcggaagtaccggcggtggtttgtatgcaacctggtttaa

SEQ ID NO: 190296 - DNA, 75 bp, synthetic construct
  source 1..75: mol_type = other DNA
gctgatcgccgtcgcttattcgctactcagtacgccgatttatcaggcggacacgttggtacaggtcgagcagaa

SEQ ID NO: 190297 - DNA, 75 bp, synthetic construct
  source 1..75: mol_type = other DNA
tttggcaaaggaggctttgatgtgattactcgcggtcaggtgccacctaacccgtctgaactgctgatgcgcgat

SEQ ID NO: 190298 - DNA, 75 bp, synthetic construct
  source 1..75: mol_type = other DNA
ggagtggtttttttgtggtcattgctatcgccgccgggatttcagcgctgctgttactgccctttttgaacgctc

SEQ ID NO: 190299 - DNA, 75 bp, synthetic construct
  source 1..75: mol_type = other DNA
gcatccgcactgcattacggctggcgtgtcgggatgatgattgctggttggatggccattgtggtgggaattttt

SEQ ID NO: 190300 - DNA, 75 bp, synthetic construct
  source 1..75: mol_type = other DNA
aactgttggcagtgacggtacactgtctgtacagagcggtggtgtactccgtggcaccaccaccctgacagataa

SEQ ID NO: 190301 - DNA, 75 bp, synthetic construct
  source 1..75: mol_type = other DNA
gctggatatggctgccacgctggcagtgcctttcacaggtgacgggcgggatgctgcggagatcctgcgtacact

SEQ ID NO: 190302 - DNA, 75 bp, synthetic construct
  source 1..75: mol_type = other DNA
ccgcatactttccggcacagctatatcatgcacatgctttatcaccgccagcccaggaaggtcatccaggcactg

SEQ ID NO: 190303 - DNA, 75 bp, synthetic construct
  source 1..75: mol_type = other DNA
attcaccagaacgcgtttccctgttacccattgcgccggggggggattttgcgaccgcggtggcactccggcgga

SEQ ID NO: 190304 - DNA, 75 bp, synthetic construct
  source 1..75: mol_type = other DNA
ggtgtatacgcgggtgttcgcgctggacatggccgccacactggctgtgccgttcaccggtgacgggcatgatgc

SEQ ID NO: 190305 - DNA, 75 bp, synthetic construct
  source 1..75: mol_type = other DNA
atgccggaccagcgtcaccacatgttgttcgccaccatgtggaataccgggatccgtatcggtgaagcccggaca

SEQ ID NO: 190306 - DNA, 75 bp, synthetic construct
  source 1..75: mol_type = other DNA
accatgcgcaactggctgaagcaggctgtcagacgggccgaagctgacggggtacacttttcgattccggtcaca

SEQ ID NO: 190307 - DNA, 75 bp, synthetic construct
  source 1..75: mol_type = other DNA
cagtccgccaatgcggttaaggcgatgaaacaagaaggtgcattctcgttaagccgtgttaagcgtattgccttt

SEQ ID NO: 190308 - DNA, 75 bp, synthetic construct
  source 1..75: mol_type = other DNA
atttattaccggtgatgattggttctaccggtggtcacctggtcggcggtaaacgcggtgcggtgatggggggaa

SEQ ID NO: 190309 - DNA, 75 bp, synthetic construct
  source 1..75: mol_type = other DNA
taggtactattggtgtgatcgtcggcgcagagatcccgatgttccttggctcaatgattatggggccgctcggtg

SEQ ID NO: 190310 - DNA, 75 bp, synthetic construct
  source 1..75: mol_type = other DNA
ggagccgcagcccaaagcggtcacccgcaccccgcgtaagacccggagcgtgaccccggcaaaacgtggacgccc

SEQ ID NO: 190311 - DNA, 75 bp, synthetic construct
  source 1..75: mol_type = other DNA
gagtcagccaatgcggttaaagcaatgaagcaggaaggcgcattttcattaagccgtgtgaaacgcattgccttt

SEQ ID NO: 190312 - DNA, 75 bp, synthetic construct
  source 1..75: mol_type = other DNA
ctctgcgcctggtgcgatgattattcacttcctcggtggcatccacgagctgtattttccgtatgtattgatgaa

SEQ ID NO: 190313 - DNA, 75 bp, synthetic construct
  source 1..75: mol_type = other DNA
ccgcataccttccggcacagctatatcatgcacatgctctatcaccgccagccccggaaagtcatccaggcactg

SEQ ID NO: 190314 - DNA, 75 bp, synthetic construct
  source 1..75: mol_type = other DNA
tgatacctgacggtgatggcccggtgaatccggacgggttagccttctatcaccgcctgatcgacgccctgacgc

SEQ ID NO: 190315 - DNA, 75 bp, synthetic construct
  source 1..75: mol_type = other DNA
atcttcccatccgatttaacagaaaaacgcaaaaaatttatgttgccgacctaaagatagaaggtggtatatttt

SEQ ID NO: 190316 - DNA, 75 bp, synthetic construct
  source 1..75: mol_type = other DNA
ctactccccctaacccaagctgagatatctcgcctagtttcatgggaagacagcacaaaaatagccataacattc

SEQ ID NO: 190317 - DNA, 75 bp, synthetic construct
  source 1..75: mol_type = other DNA
aaggcgggctgaagcgggtggtgaaaaaggaacacgcggacggcagcgtcacgcagagtcagtttgatgcggtgg

SEQ ID NO: 190318 - DNA, 75 bp, synthetic construct
  source 1..75: mol_type = other DNA
acaaagtttggacataaaataacagaagaattagagtcatcagagcatgaatatatatttagaggattaagaaaa

SEQ ID NO: 190319 - DNA, 75 bp, synthetic construct
  source 1..75: mol_type = other DNA
accagttgggaatatgactggtttgatgcagatgttatttacatagcgaagtattacgaagttcgtaaagagtct

SEQ ID NO: 190320 - DNA, 75 bp, synthetic construct
  source 1..75: mol_type = other DNA
caggtgcttgctgttccgccagcgtatacaagccagcgttgcgcgttctgtggtcatacagcgaaagataatcgc

SEQ ID NO: 190321 - DNA, 75 bp, synthetic construct
  source 1..75: mol_type = other DNA
caggtgcttgctgttccgccagcgtaaacaagccagcgttgcgcgtgctgtggtcatacagcgaaagataatcgc

SEQ ID NO: 190322 - DNA, 75 bp, synthetic construct
  source 1..75: mol_type = other DNA
ggtacacttttcgattccggtcacaccacacaccttccggcacagctatatcatgcacatgctctatcaccgcca

SEQ ID NO: 190323 - DNA, 75 bp, synthetic construct
  source 1..75: mol_type = other DNA
gcggtaagtggtacatcagtattcagacagaaagtgaagtatcaactccggttcacccttcagcatcaatggtcg

SEQ ID NO: 190324 - DNA, 75 bp, synthetic construct
  source 1..75: mol_type = other DNA
gctgtcagatggcacagtctttgagcctgtaaacagttttcagaaaaaccagaagaagctggcgagacttcagcg

SEQ ID NO: 190325 - DNA, 75 bp, synthetic construct
  source 1..75: mol_type = other DNA
caggtgcttgctgttccgccagcgtagacaagccagcgttgcgcgtactgtggtcatacagcgaaagataatcgc

SEQ ID NO: 190326 - DNA, 75 bp, synthetic construct
  source 1..75: mol_type = other DNA
gttttgtaccgcgtggcagccagatgcaggatctcaccttgccgcagcatattaataccatgctctacgaagcag

SEQ ID NO: 190327 - DNA, 75 bp, synthetic construct
  source 1..75: mol_type = other DNA
atgatatctctccctgccggttcgcgtatctggctggttgcaggtatcaccgacatgcgaaatggttttaacggc

SEQ ID NO: 190328 - DNA, 75 bp, synthetic construct
  source 1..75: mol_type = other DNA
cgatatgcgaaatggctttaacggcctggcctcaaaagttcagaacgtcctgaaggatgacccgttctccgggca

SEQ ID NO: 190329 - DNA, 75 bp, synthetic construct
  source 1..75: mol_type = other DNA
gcaacctgactgagctgaaaaaatatcgcaaaagccacccggaaaagatggccttcagctatagctacgcgctca

SEQ ID NO: 190330 - DNA, 75 bp, synthetic construct
  source 1..75: mol_type = other DNA
ttgcagcactcaaaggtcagcgattctgtgctggcaagcgagattcaaggcgaagcgggatcgctggtgattgaa

SEQ ID NO: 190331 - DNA, 75 bp, synthetic construct
  source 1..75: mol_type = other DNA
ctgtttacgtcgctggaagcgatggcagaaagcgatgctattgacgcggtgtatattgccagtccaaacgccctg

SEQ ID NO: 190332 - DNA, 75 bp, synthetic construct
  source 1..75: mol_type = other DNA
cagcaggctgatggtcgtattgaagtaccagaagttctgcgtccgtatatgaacggactggaatatattggctaa

SEQ ID NO: 190333 - DNA, 75 bp, synthetic construct
  source 1..75: mol_type = other DNA
actggcacgccgaggctttaagctggatgtagataagctgggcgctcttgaagagcgtcgtaaagtattgcaggt

SEQ ID NO: 190334 - DNA, 75 bp, synthetic construct
  source 1..75: mol_type = other DNA
gaagcagacaccagtaactacgcgctgatcccaacggcagaagttccgctgaccaacctggttcgcggtgaaatc

SEQ ID NO: 190335 - DNA, 75 bp, synthetic construct
  source 1..75: mol_type = other DNA
aaatttggctggttgccggtatcaccgatatgagaaatggcttcaacggcctggcttcaaaagttcagaatgtcc

SEQ ID NO: 190336 - DNA, 75 bp, synthetic construct
  source 1..75: mol_type = other DNA
tcaatggcggcgctggaagagatgaccggtcatgcagagaaagttctgcaactgctgggcctgccgtaccgtaag

SEQ ID NO: 190337 - DNA, 75 bp, synthetic construct
  source 1..75: mol_type = other DNA
acaggctgaaattcgcgatatcgcgctgaccatccctaacctgcctgcagatgaagtgccggtaggtaaagacga

SEQ ID NO: 190338 - DNA, 75 bp, synthetic construct
  source 1..75: mol_type = other DNA
ttgttgccgggaaaaaaaaacaccggggaagagtgggacatcctggaattcagcaacctgactgagctgaaaaaa

SEQ ID NO: 190339 - DNA, 75 bp, synthetic construct
  source 1..75: mol_type = other DNA
gagtcactatcgcgagtggttgaaatcggcagatttggcgctttacaaagcaaagaaagccggacgtaaccgcac

SEQ ID NO: 190340 - DNA, 75 bp, synthetic construct
  source 1..75: mol_type = other DNA
atttgcggtgattatgtctggtacgccagcagaaaatgccattaccgccatgttacgggtacatgaagggttaaa

SEQ ID NO: 190341 - DNA, 75 bp, synthetic construct
  source 1..75: mol_type = other DNA
atgttgatgattatgtgtctgaatttgatgggggcaggcggcccccgtctgtttgtcgcgggtctggtgttgatg

SEQ ID NO: 190342 - DNA, 75 bp, synthetic construct
  source 1..75: mol_type = other DNA
gactgcaatggtcatccccaatattggtgcttttattgcctggggcttcataactgcgttatttattcccaccgg

SEQ ID NO: 190343 - DNA, 75 bp, synthetic construct
  source 1..75: mol_type = other DNA
gtctttaacgccgaaggcaaaatcacccttgatacaccagagatgatgcaggcgctgacctattaccgcgacctt

SEQ ID NO: 190344 - DNA, 75 bp, synthetic construct
  source 1..75: mol_type = other DNA
tcctttaactcctcaaaacgaacatcagcggtccgggctgcgcttcgcccgtcgcgtcagactaccccgtgcggt

SEQ ID NO: 190345 - DNA, 75 bp, synthetic construct
  source 1..75: mol_type = other DNA
aacggcggctgcattgcgtcagcagcaggcgttgctgacacggctggcagaactggctgcagattccagcgccga

SEQ ID NO: 190346 - DNA, 75 bp, synthetic construct
  source 1..75: mol_type = other DNA
aacggcggcagcattgcggcagcagcaggcgttgctgacacggctggcagaacagggcgcagattccagcgccga

SEQ ID NO: 190347 - DNA, 75 bp, synthetic construct
  source 1..75: mol_type = other DNA
atgacaagccgcagccgccaggctgcctactcgagccttaattaccaggaagaaagcttgagttatcagcgactg

SEQ ID NO: 190348 - DNA, 75 bp, synthetic construct
  source 1..75: mol_type = other DNA
tgggcttttgtctggccgcatttagcctggcagttagcgagcagagccattgatccgcttggtcgggaaatttac

SEQ ID NO: 190349 - DNA, 75 bp, synthetic construct
  source 1..75: mol_type = other DNA
gatcgcagctacgcgtgggtggtttacccggacggacgcacgcaaaaagcgccggtggcttactggaacaagcgt

SEQ ID NO: 190350 - DNA, 75 bp, synthetic construct
  source 1..75: mol_type = other DNA
tgattttgagtgtgggggcgtcatcggtcttcgcggcaggaaccgtcaaggtgttcagcaatggcagcagtgagg

SEQ ID NO: 190351 - DNA, 75 bp, synthetic construct
  source 1..75: mol_type = other DNA
ctgtcggcagcggtgagtcatgaattttcggataacaacaaagtccgtatcaatgacacctatgacttcaggaac

SEQ ID NO: 190352 - DNA, 75 bp, synthetic construct
  source 1..75: mol_type = other DNA
tggcttccggtatggctattcacaagaaatggcgacagacctatttttccacgccatccagcctgacccacagtg

SEQ ID NO: 190353 - DNA, 75 bp, synthetic construct
  source 1..75: mol_type = other DNA
gatgaatatttctggataccgaaatttcaggagcttcgcaaggtggcctccgggatggcgattcacaagaaatgg

SEQ ID NO: 190354 - DNA, 75 bp, synthetic construct
  source 1..75: mol_type = other DNA
acccaaacgtcgccaaccgcaacaaaggcccgcgccgtcagccggaaaagaatgttttcaccgatgagcagattg

SEQ ID NO: 190355 - DNA, 75 bp, synthetic construct
  source 1..75: mol_type = other DNA
agctgatgtcgcgcctgggatgggcatggcgactggtcatgaccgggttatgttttgccctgtttggtctcggcg

SEQ ID NO: 190356 - DNA, 75 bp, synthetic construct
  source 1..75: mol_type = other DNA
tacgcaaaacggcgacagtgccggatgcgtggtggtggctccgccagcggtgccgggcggtaagttccgcattct

SEQ ID NO: 190357 - DNA, 75 bp, synthetic construct
  source 1..75: mol_type = other DNA
cgtgggcgcaacaaagccgacaaggtggacatcgagctgtcccacagcaatctggctcccggcctgctgtgtgca

SEQ ID NO: 190358 - DNA, 75 bp, synthetic construct
  source 1..75: mol_type = other DNA
gctatattttgataaagttttttatagtcatgtttatttataaaaatcttacaataatttataagtcattggcga

SEQ ID NO: 190359 - DNA, 75 bp, synthetic construct
  source 1..75: mol_type = other DNA
acattatcctctatttttaaaatacgtgaacctatattaaatggcgtgataattggttctggatatgttttatta

SEQ ID NO: 190360 - DNA, 75 bp, synthetic construct
  source 1..75: mol_type = other DNA
aagctaatgtagttgtaatattagtcaagcataaggaattcattggattgaatcttaatgatatcaacaacgcta

SEQ ID NO: 190361 - DNA, 75 bp, synthetic construct
  source 1..75: mol_type = other DNA
aggcctacgacattatcagccaccaccgtctggagtttgacgccgggcacaccgacattgcgcaatcatttatgg

SEQ ID NO: 190362 - DNA, 75 bp, synthetic construct
  source 1..75: mol_type = other DNA
cacaagaaatggcggcagacctatttttccacaccatccagcctgacccacagtgcttatccgttctggtccggt

SEQ ID NO: 190363 - DNA, 75 bp, synthetic construct
  source 1..75: mol_type = other DNA
atacataccagcattaatccttatttatatatcaaaaccctctaagattagcttaattatatgtttattattaag

SEQ ID NO: 190364 - DNA, 75 bp, synthetic construct
  source 1..75: mol_type = other DNA
atgaaaacggtgagtgtgggttaactttccgtttgccgtcaaattttgcaatgaaaggcatcaacttagtaaaaa

SEQ ID NO: 190365 - DNA, 75 bp, synthetic construct
  source 1..75: mol_type = other DNA
gaatgaaggcgatgatgaacaacgctgggaaatatttaaaaactctgagtcagcaggattttccactcaaacagg

SEQ ID NO: 190366 - DNA, 75 bp, synthetic construct
  source 1..75: mol_type = other DNA
atatatatgattatggtgaaaagcatgcaaaacttataaaaaaaatacaagcagaaacacttcctcatggtatct

SEQ ID NO: 190367 - DNA, 75 bp, synthetic construct
  source 1..75: mol_type = other DNA
gtttatgcagagaatgcaacagatgatgttgataaaatgattaaaaatatttcccaaatacctgaatttagagga

SEQ ID NO: 190368 - DNA, 75 bp, synthetic construct
  source 1..75: mol_type = other DNA
aacagcaataccgtactggtatttatgagcagctacaaaagtgcaggcaccggcctcaactactttgttaaatac

SEQ ID NO: 190369 - DNA, 75 bp, synthetic construct
  source 1..75: mol_type = other DNA
ataataccgattcgttaacattaattaaatggctggcacaattcatttctcagtcctcttctgaagatgattcgg

SEQ ID NO: 190370 - DNA, 75 bp, synthetic construct
  source 1..75: mol_type = other DNA
atgacagcggcagaaaatcacactgttccggaaatgaataaaacggttgagcaaatgctggcacaaggacaatgg

SEQ ID NO: 190371 - DNA, 75 bp, synthetic construct
  source 1..75: mol_type = other DNA
gatgctgaagacaccggtaagaaaaacatgcgtgtggcgcgtattgatgcccgtttcgatccgacaatctatatc

SEQ ID NO: 190372 - DNA, 75 bp, synthetic construct
  source 1..75: mol_type = other DNA
tcgccagtcggcgttatttgccgaggatgccgaagataccggcaagaaaaacatgcgtgtggcacgtattgatgc

SEQ ID NO: 190373 - DNA, 75 bp, synthetic construct
  source 1..75: mol_type = other DNA
ggctcgtgcgactaatgacgtcgatcgcgtcgtgtttgccgccggagaaggggtgctgacgctggtggattcact

SEQ ID NO: 190374 - DNA, 75 bp, synthetic construct
  source 1..75: mol_type = other DNA
gattacaagaatcagtactgaaagcaatgaaattatcgaaacattcaaaacaggaaaaatcagtaaccactttgc

SEQ ID NO: 190375 - DNA, 75 bp, synthetic construct
  source 1..75: mol_type = other DNA
caatatgcctaatgtcatttaatttacatgcagctaatcttgtatattctgcaaatcaaaatgacaatacagtgt

SEQ ID NO: 190376 - DNA, 75 bp, synthetic construct
  source 1..75: mol_type = other DNA
gagaaaccatcttcaaggactcaagtgatgctgtaaatgagtatgctgatggatttgcttactcgtcttttgggg

SEQ ID NO: 190377 - DNA, 75 bp, synthetic construct
  source 1..75: mol_type = other DNA
ggatcggttatgacccagcaaaaggtacgcagaacggtgacagtgccgggtgcgtggtggtggctccgccagccg

SEQ ID NO: 190378 - DNA, 75 bp, synthetic construct
  source 1..75: mol_type = other DNA
gactttcgcgcccaggctgacgccatcaaaaaactgactgaacagtacaacgtgacatacataggtatcgactca

SEQ ID NO: 190379 - DNA, 75 bp, synthetic construct
  source 1..75: mol_type = other DNA
aggcccgcgccgtcagccggaaaaaaatgtcttcaccgatgaacagattgagaaactggaagaaatcttccattc

SEQ ID NO: 190380 - DNA, 75 bp, synthetic construct
  source 1..75: mol_type = other DNA
ggatcggttatgacccggcgaaaggtacgcagaacggcgacagtgccggatgcgtggtggtggcaccgccagccg

SEQ ID NO: 190381 - DNA, 75 bp, synthetic construct
  source 1..75: mol_type = other DNA
tcaaaaaactgaccgaacagtacaacgtgacctatatcggcatcgactcgaccggcgtcggtcacggggtttacg

SEQ ID NO: 190382 - DNA, 75 bp, synthetic construct
  source 1..75: mol_type = other DNA
aatggcggcaacgaagccgacttaaatcctaacgtcgccaaccgcaacaaaggcccgcgtcgtcagccggaaaag

SEQ ID NO: 190383 - DNA, 75 bp, synthetic construct
  source 1..75: mol_type = other DNA
tgagcgtcaccagtggcgcgggatggatttccgcgcccaggctgacgccatcaaaaaacttaccgaacagtacaa

SEQ ID NO: 190384 - DNA, 75 bp, synthetic construct
  source 1..75: mol_type = other DNA
cgcccgtttggctggcgcgaagtgtggatcggttatgacccgtcaaaaggtacgcaaaacggcgacagcgccggg

SEQ ID NO: 190385 - DNA, 75 bp, synthetic construct
  source 1..75: mol_type = other DNA
ggagatctgcgaagcgcaatcaccttctcggaaaccctcgcgaaattttgcagtcgcgacgccagagaccgaggg

SEQ ID NO: 190386 - DNA, 75 bp, synthetic construct
  source 1..75: mol_type = other DNA
cccgtcacaccgtggcgacagcgccggatgcgtggtactggcaccgccggtggtggccggtggcaaattcagaat

SEQ ID NO: 190387 - DNA, 75 bp, synthetic construct
  source 1..75: mol_type = other DNA
tatcaaagccctcacgcagcaatataacgtgacctatatcggcatcgactcaaccggcgtaggccacggcgtcta

SEQ ID NO: 190388 - DNA, 75 bp, synthetic construct
  source 1..75: mol_type = other DNA
cgtcagataggcgcaacgtatttcttcgcccgcgaggcactgatcgacgctatcaccacagggcgcaatcaaatc

SEQ ID NO: 190389 - DNA, 75 bp, synthetic construct
  source 1..75: mol_type = other DNA
ttggtgtcggcatacgctgagaaatggtgggatactgaagaaggacaattagctttaagtgaaaaagaacaggag

SEQ ID NO: 190390 - DNA, 75 bp, synthetic construct
  source 1..75: mol_type = other DNA
atgttctttaaaaatcaggatttatttcaggctccggcaatacgcatttatttgttctgtcagtcatccggctgg

SEQ ID NO: 190391 - DNA, 75 bp, synthetic construct
  source 1..75: mol_type = other DNA
atgatttcgtcagtgatgtaaaggtttacgctgatgctgcaagtcgcagcataccaaagcagattgagtactggg

SEQ ID NO: 190392 - DNA, 75 bp, synthetic construct
  source 1..75: mol_type = other DNA
aaaaaacggcgtcagtagcattgctgaagccaaaacgaataaaacggggcatgctgaacgagcggatgctgaacg

SEQ ID NO: 190393 - DNA, 75 bp, synthetic construct
  source 1..75: mol_type = other DNA
gcataaagaatttaaaggtcttattaataaaaagtatacaagcgctacaatactagattttgtaaatgctgccaa

SEQ ID NO: 190394 - DNA, 75 bp, synthetic construct
  source 1..75: mol_type = other DNA
acataaagaatttaaagatcttaggaataaagaaaataagaataccacaatactagattttgtaaatacagccca

SEQ ID NO: 190395 - DNA, 75 bp, synthetic construct
  source 1..75: mol_type = other DNA
tccaggaatggaacctcacgagcatgcaccagagcctgcatggcgtatgatctgtactttgaatacctatgataa

SEQ ID NO: 190396 - DNA, 75 bp, synthetic construct
  source 1..75: mol_type = other DNA
tgggagtataattaatgaaacagaactctcaggtggcgttttatctcgattaaaaatcactcctattagttttca

SEQ ID NO: 190397 - DNA, 75 bp, synthetic construct
  source 1..75: mol_type = other DNA
gctaagtgaaactaaaaaaaggattccagcacatttattcagaatgataaaagatgaactttatgaattagtctt

SEQ ID NO: 190398 - DNA, 75 bp, synthetic construct
  source 1..75: mol_type = other DNA
ccaggatggattgattactggcaggagccacggtattgccgaaatatataaaatacatggttgctgcactgagcc

SEQ ID NO: 190399 - DNA, 75 bp, synthetic construct
  source 1..75: mol_type = other DNA
tatcgaaatctattcactgaataagctgcgtgctataggtgaaaagctgtattcacttacggggttaacagtacc

SEQ ID NO: 190400 - DNA, 75 bp, synthetic construct
  source 1..75: mol_type = other DNA
ctgcgtgctaaaggtgaaaagctgtattcacttacggggttaacagtacctgatacggaagctgtggcgaatgag

SEQ ID NO: 190401 - DNA, 75 bp, synthetic construct
  source 1..75: mol_type = other DNA
ttatgatttcagtttctttttaagaatgatgccttatatggagcttggattaatcaagcgcgatatgggagagct

SEQ ID NO: 190402 - DNA, 75 bp, synthetic construct
  source 1..75: mol_type = other DNA
catcagcaaaagggcaaaacggtggttctcgatttaggggccaacgtcgattgtgacagcacaatgttggtgcaa

SEQ ID NO: 190403 - DNA, 75 bp, synthetic construct
  source 1..75: mol_type = other DNA
catcagcaaaagggcaaaacggtggtccttgacttaggggccaacgtcgattgtgacagtacaatgttggtgcaa

SEQ ID NO: 190404 - DNA, 75 bp, synthetic construct
  source 1..75: mol_type = other DNA
acagtattcgggatgcctctgctgtgcttaaaaaaatcccttccatcaattacatcggctatcttgaagccaatg

SEQ ID NO: 190405 - DNA, 75 bp, synthetic construct
  source 1..75: mol_type = other DNA
cgctcaccacccagaaatcgaaatcacaacaacattctgaaagtgacacagtatccggcagtacgctgaatgccg

SEQ ID NO: 190406 - DNA, 75 bp, synthetic construct
  source 1..75: mol_type = other DNA
gagcagtgacagccgtctgaaagccctgcaggccacaaagacagcgctgtctggtgtgcaggccggacaggctgc

SEQ ID NO: 190407 - DNA, 75 bp, synthetic construct
  source 1..75: mol_type = other DNA
ggtggttgacccggggcatgaccgtcgtactgtggacgaaaaatttgagcagaagaaaagcgggctgacggttgc

SEQ ID NO: 190408 - DNA, 75 bp, synthetic construct
  source 1..75: mol_type = other DNA
ccatgcctttctgctgtcttttgtcgagccggaagcccgggaggagtttaagcctgtcctggaagaagaagcggc

SEQ ID NO: 190409 - DNA, 75 bp, synthetic construct
  source 1..75: mol_type = other DNA
tcttcccgttcacccgactggtgcatgtgtggagcgcgccgtttgagtactttactcgtcgatatcaaattgtgc

SEQ ID NO: 190410 - DNA, 75 bp, synthetic construct
  source 1..75: mol_type = other DNA
ctggcacaaagaataggcgaattaaggttatttttactttcagtcacttttttttcgtctgtcttccttaatgtg

SEQ ID NO: 190411 - DNA, 75 bp, synthetic construct
  source 1..75: mol_type = other DNA
tgacagtgcctgcagcattgcaggcactgaattctaattcgcaactcactcttcttttagtcggtaatcccgacg

SEQ ID NO: 190412 - DNA, 75 bp, synthetic construct
  source 1..75: mol_type = other DNA
aaacggtcgtggtggctactgttattaaagcgttggctacaaaagagcttgacgaggcgattcagtcacctcaac

SEQ ID NO: 190413 - DNA, 75 bp, synthetic construct
  source 1..75: mol_type = other DNA
atgagtttaggttgtggtgagtgggggttgtgtttagggccgggggagagtcagggtaagactacgaaagcccgc

SEQ ID NO: 190414 - DNA, 75 bp, synthetic construct
  source 1..75: mol_type = other DNA
cttacaggaatgaaatggcgaagtatggtaccggcagtgaaattcagcggggtatccaggccgcgacagcggcgc

SEQ ID NO: 190415 - DNA, 75 bp, synthetic construct
  source 1..75: mol_type = other DNA
tctccggtgcgtcgcacaacaaaatcggccgacgcagtactgggcatggcgacagcaccggcatacgtcttcaac

SEQ ID NO: 190416 - DNA, 75 bp, synthetic construct
  source 1..75: mol_type = other DNA
accaaaacaactattacaagcggtggcatgctgcaggtggaggccggtggctcagcctctctggttacccaaaac

SEQ ID NO: 190417 - DNA, 75 bp, synthetic construct
  source 1..75: mol_type = other DNA
cagattaacaatcgttatgacttcagtaatgatatctccgggacgatcgggaaatatgggctgggtgtcaatatt

SEQ ID NO: 190418 - DNA, 75 bp, synthetic construct
  source 1..75: mol_type = other DNA
cccgctctggcggcagcctatgacaatcagacaattggtaggggtgaaacaagcaagtccatgcacctgtctgca

SEQ ID NO: 190419 - DNA, 75 bp, synthetic construct
  source 1..75: mol_type = other DNA
atgctgtgctgaatatggcaacggcaccgatctatgtgttcaacagtgagcttcagagtctgcgttttcgtcacg

SEQ ID NO: 190420 - DNA, 75 bp, synthetic construct
  source 1..75: mol_type = other DNA
tggcggcagtgcagtcaatatgctgctggagaacgatggctacctgacggtttacagtggtcatcaggccagcga

SEQ ID NO: 190421 - DNA, 75 bp, synthetic construct
  source 1..75: mol_type = other DNA
gaacagcggcaggcatatctggcaaaactgcgtgatacgccggaatacaaaaaggaacaggaaaagtatggtacc

SEQ ID NO: 190422 - DNA, 75 bp, synthetic construct
  source 1..75: mol_type = other DNA
aaggagaaagagcagaggcgtctgcagacagtggggcttatcagtgacataggcagtcaggtggcggatatcgcg

SEQ ID NO: 190423 - DNA, 75 bp, synthetic construct
  source 1..75: mol_type = other DNA
aaccggaatgtttgccggtgatggtggcttcgacattacagtgggcagacatacccaactggatggtgcggtgat

SEQ ID NO: 190424 - DNA, 75 bp, synthetic construct
  source 1..75: mol_type = other DNA
ggcgctggaacaggcagaacagccgaaggaagaggaaaaacccgcgaagaaaggcaaacgtaagcccaaagcaaa

SEQ ID NO: 190425 - DNA, 75 bp, synthetic construct
  source 1..75: mol_type = other DNA
tgatgaattaaccgtatgtaacttcgcgtttttttctgggctaattggcgcgcaattctgggcggagagggtgca

SEQ ID NO: 190426 - DNA, 75 bp, synthetic construct
  source 1..75: mol_type = other DNA
tcggtggtgtgacagcagcccttcagggcaacagtgcggcagcaggcgcaattggtgcgggtactggtgaagtga

SEQ ID NO: 190427 - DNA, 75 bp, synthetic construct
  source 1..75: mol_type = other DNA
tgcaatcgactttagtaccgaagatgtgactgctgctgtgcgcccgtcacttcgtatcgtctacaactggattga

SEQ ID NO: 190428 - DNA, 75 bp, synthetic construct
  source 1..75: mol_type = other DNA
atgtggaggattacgcccctggcggcatgaaattcaaccagcacggaccattacgcaactctggtgaatttcagg

SEQ ID NO: 190429 - DNA, 75 bp, synthetic construct
  source 1..75: mol_type = other DNA
gaaacgcttgagaaaagcgacaacaagattcgccagatccgtaatatcgccagccaaaaggcggatactgagggg

SEQ ID NO: 190430 - DNA, 75 bp, synthetic construct
  source 1..75: mol_type = other DNA
ctccaccagggtaagcggctcgccagaaccgtattgatatttactgagaagtcagatcaactttccagggcaaca

SEQ ID NO: 190431 - DNA, 75 bp, synthetic construct
  source 1..75: mol_type = other DNA
tttattgtaaaagatattgacggaagtgaatttgttaagactgaagtgaaaaaactcggaattttgcattatcat

SEQ ID NO: 190432 - DNA, 75 bp, synthetic construct
  source 1..75: mol_type = other DNA
caggcacctgtaagcgtcattgcggatgtaatcacagcctgggaattggacgcgaaacgcgttgttactgaaacc

SEQ ID NO: 190433 - DNA, 75 bp, synthetic construct
  source 1..75: mol_type = other DNA
gcggacgtgctcagggaatctcgaaactgcgcatggctctggacattaacccaatgttactaaccctgttgggtg

SEQ ID NO: 190434 - DNA, 75 bp, synthetic construct
  source 1..75: mol_type = other DNA
accgacactttaagcgctgggtaaaaaatggtggccaggataactccagcagccagaatacacctttgggccaat

SEQ ID NO: 190435 - DNA, 75 bp, synthetic construct
  source 1..75: mol_type = other DNA
ggagatgtttcgcgaccagttaggagcattcgaagttaacggcgacgccgccgaacgcatcatttccattacccg

SEQ ID NO: 190436 - DNA, 75 bp, synthetic construct
  source 1..75: mol_type = other DNA
cctcgactttatggactgggcctctggtctgaaaaaccgcgaccgctatattcagtggtacgaaggggcgaaagg

SEQ ID NO: 190437 - DNA, 75 bp, synthetic construct
  source 1..75: mol_type = other DNA
cagccgtcctggtggcgatcccactaaacaactgtttcgctgcctgataagcaatgatttggcgctatacgatta

SEQ ID NO: 190438 - DNA, 75 bp, synthetic construct
  source 1..75: mol_type = other DNA
ataagaaacatgaccagatcctgacctttaccccattcaaagggcgtcacacagtccatttggtctttttcgatt

SEQ ID NO: 190439 - DNA, 75 bp, synthetic construct
  source 1..75: mol_type = other DNA
tcacacgccagttatcagaaaaaaagtcagtgatttgagtgcactggtgatgcttttcagccaacaggccggtca

SEQ ID NO: 190440 - DNA, 75 bp, synthetic construct
  source 1..75: mol_type = other DNA
gattaccgccgcgttaggctggtcattgcaaatgttgggagaaaatgtcctgctggtggatgcctgcccggacaa

SEQ ID NO: 190441 - DNA, 75 bp, synthetic construct
  source 1..75: mol_type = other DNA
gaagaaatattgacgctggcaaactggtgtctgttgaactattccgggctgaaaacgccagtcgggggcgcatca

SEQ ID NO: 190442 - DNA, 75 bp, synthetic construct
  source 1..75: mol_type = other DNA
ggcagccagattcaggatgatatttaccaactttggttacaaagccaacggcgtctgttgccgatgctcatccat

SEQ ID NO: 190443 - DNA, 75 bp, synthetic construct
  source 1..75: mol_type = other DNA
attaatggcggggccgttaattccactgtcacagagtttattattaaggaattatccaccagaaaaagaacattt

SEQ ID NO: 190444 - DNA, 75 bp, synthetic construct
  source 1..75: mol_type = other DNA
tactcaaaacaagaaagctgtgacagaaataatgtatccaatagttatttttgtttgtgtctgaaaaaactgaat

SEQ ID NO: 190445 - DNA, 75 bp, synthetic construct
  source 1..75: mol_type = other DNA
gaagaaattctgacgctggcgaactggtgtctgttgaactattccgggctgaaaacgccagtcgggagcgcatca

SEQ ID NO: 190446 - DNA, 75 bp, synthetic construct
  source 1..75: mol_type = other DNA
tgccatttgggtgcagtaacagcctaaccatgatgtttaaccagttattgaatagagccagacagggagcaactc

SEQ ID NO: 190447 - DNA, 75 bp, synthetic construct
  source 1..75: mol_type = other DNA
tgccgtttgggtgtagtaacagcttaaccatgatgtttaaccagctattaaacacagccagaaagggaactgcac

SEQ ID NO: 190448 - DNA, 75 bp, synthetic construct
  source 1..75: mol_type = other DNA
tgttggatagcgtggaaaatcacacgccagttatcagaaaaaaagccagtgatttgagtgcactgatgatgcttt

SEQ ID NO: 190449 - DNA, 75 bp, synthetic construct
  source 1..75: mol_type = other DNA
tggttgcaaagccagcgccgattgctgccgatgctcattcatcgtgatgaagcgatggctgaatgcctggcggct

SEQ ID NO: 190450 - DNA, 75 bp, synthetic construct
  source 1..75: mol_type = other DNA
gaagagattctaacgctggcgaactggtgtctgttgaactattccgggctgaaagcgtcagccgggagcgaatca

SEQ ID NO: 190451 - DNA, 75 bp, synthetic construct
  source 1..75: mol_type = other DNA
aaatatgccattgttattgcctatccgtatgaggaccgaaaattaaaagtccgccgtgaggagcatgagcgattt

SEQ ID NO: 190452 - DNA, 75 bp, synthetic construct
  source 1..75: mol_type = other DNA
caccgtgggctgaccagtctggtggacgagttaggccgctgccatgaagaatgtccggtcgaggaaggaatatga

SEQ ID NO: 190453 - DNA, 75 bp, synthetic construct
  source 1..75: mol_type = other DNA
tggagatgatgctggttattctacttattggaagtgccgccagcctagtattgatgtcatttcctgccgcacagc

SEQ ID NO: 190454 - DNA, 75 bp, synthetic construct
  source 1..75: mol_type = other DNA
cttattgcagcgtgcgaacaatccgaaggtgcacaggttgaagctgacgaattgtctaatctgatcatcgttatt

SEQ ID NO: 190455 - DNA, 75 bp, synthetic construct
  source 1..75: mol_type = other DNA
gttcctgaggtcaaggtgggggtcaatgagttatatcttgcttatgatttcagtttctttttaagaatgatgcct

SEQ ID NO: 190456 - DNA, 75 bp, synthetic construct
  source 1..75: mol_type = other DNA
gcgcgcgatcttatcgtcaatgcccgccagtttaaaaatatggattccgtcatccagtctgcgaaggttaagtaa

SEQ ID NO: 190457 - DNA, 75 bp, synthetic construct
  source 1..75: mol_type = other DNA
gctgcttacatcgcagcttgaagaagccatcgcccaactggattgtgaagacggcattgtttttctgacagattt

SEQ ID NO: 190458 - DNA, 75 bp, synthetic construct
  source 1..75: mol_type = other DNA
ttcttgtctggtatattaaaaatgttattcctgtcatacagacattgcctgacgatgaaaaaactcactcctcat

SEQ ID NO: 190459 - DNA, 75 bp, synthetic construct
  source 1..75: mol_type = other DNA
cggtacaaaatcataatgcatcaataaaaaatcgtgaaaaaacacgccgatattataacataatttattttatat

SEQ ID NO: 190460 - DNA, 75 bp, synthetic construct
  source 1..75: mol_type = other DNA
caagaatcgtgaaaaaactcgcagatgttataatataatttattttatatcaggtgttttattaacaattttcat

SEQ ID NO: 190461 - DNA, 75 bp, synthetic construct
  source 1..75: mol_type = other DNA
aaggtgcacagattgaagctgatgacctttctaatctgatcatcgtcattcatgacaccactgaaatcatgaaag

SEQ ID NO: 190462 - DNA, 75 bp, synthetic construct
  source 1..75: mol_type = other DNA
aaggtgcacaggttgaagctgatgatctgagtaacctgattatcgttattcaggacaccacagaaatcatgcaag

SEQ ID NO: 190463 - DNA, 75 bp, synthetic construct
  source 1..75: mol_type = other DNA
tgaatacactcctgattcaacagattactggactaaactaagtaaaaaaattgatggctttgcagaagaattaaa

SEQ ID NO: 190464 - DNA, 75 bp, synthetic construct
  source 1..75: mol_type = other DNA
gatattttctctggtaaaaagcgatcttctttttcatcgcctctgcgggaacatcctgttcgtcagagcgaaaag

SEQ ID NO: 190465 - DNA, 75 bp, synthetic construct
  source 1..75: mol_type = other DNA
tctggctggcggcgcgttgctgctggcggcgcttttacccgtctctgcaccgattaaatttactctgctggttgt

SEQ ID NO: 190466 - DNA, 75 bp, synthetic construct
  source 1..75: mol_type = other DNA
ccgggtgtgcagctttgcattacttgccaggaaatcgcagagctgaaaggcaaacattacaacggaggtgctgta

SEQ ID NO: 190467 - DNA, 75 bp, synthetic construct
  source 1..75: mol_type = other DNA
agcagcgcgttgaagaagaacgccagagccatatccgtgctgctcgtgccaaaacaccgggcgtgtctcgcgtgc

SEQ ID NO: 190468 - DNA, 75 bp, synthetic construct
  source 1..75: mol_type = other DNA
aataccactgggtgacagacggccgcgttattctctggcgtggcaaaatcgttagcaatccaccgggaacaccca

SEQ ID NO: 190469 - DNA, 75 bp, synthetic construct
  source 1..75: mol_type = other DNA
aataccactgggtgacagatggccgcgttattctctggcgtggcaaaattgttagcaacccaccgggaacaccta

SEQ ID NO: 190470 - DNA, 75 bp, synthetic construct
  source 1..75: mol_type = other DNA
aaaacgccgggcgtgtcccgcgtgctttgtattgaatgtgaagcgccaattccgccagcacgacgccgtgccatt

SEQ ID NO: 190471 - DNA, 75 bp, synthetic construct
  source 1..75: mol_type = other DNA
gaaaaaaccacgcaagggcttgttgccattgagcgaaatggcgaacctgatccggatgtgttaagcggtaaaaaa

SEQ ID NO: 190472 - DNA, 75 bp, synthetic construct
  source 1..75: mol_type = other DNA
caccgttaggataccggtgcgtatggcttctggttggatatgatcagttagcaatgaaagctttccaggcttttc

SEQ ID NO: 190473 - DNA, 75 bp, synthetic construct
  source 1..75: mol_type = other DNA
ctcgttacggtatgcctgagccagatattctttctggtaaagccagatcttcattctctccccctctgaaccgta

SEQ ID NO: 190474 - DNA, 75 bp, synthetic construct
  source 1..75: mol_type = other DNA
ccctcgctgttggtgcgccgcttggcctgttgattcatagccattacggttttgccgcactggcgctcaccacaa

SEQ ID NO: 190475 - DNA, 75 bp, synthetic construct
  source 1..75: mol_type = other DNA
gtatgacgaactggtcatgaaagcgtttcatgcctttcactacgggctgatttcgcgggcgcagcgggacaacat

SEQ ID NO: 190476 - DNA, 75 bp, synthetic construct
  source 1..75: mol_type = other DNA
gatccgccagcaggtcgcaggactggaggctgtgctgaacaatattcccggcaatatcgtgatctctgatattgc

SEQ ID NO: 190477 - DNA, 75 bp, synthetic construct
  source 1..75: mol_type = other DNA
ccttccggcactgtgggggatggtctccggtgcggtttctgtgctggcggggtgctttccggtcttctcagtcct

SEQ ID NO: 190478 - DNA, 75 bp, synthetic construct
  source 1..75: mol_type = other DNA
ttcttcgcaggctcaaaggtatcgagggtaatacgtcgggtatgcttcaggaagcccgcaagcgtatcggtcctg

SEQ ID NO: 190479 - DNA, 75 bp, synthetic construct
  source 1..75: mol_type = other DNA
cttacgccgctgaaggcgctgatggatggacttgcctgggtactggaaaagcttggcgtgctgcctgatgaagct

SEQ ID NO: 190480 - DNA, 75 bp, synthetic construct
  source 1..75: mol_type = other DNA
tggtcttttttgcccagcaaaaccagtgggatctcagcaactacgacaacttcgatatgaaagccctcggtgaag

SEQ ID NO: 190481 - DNA, 75 bp, synthetic construct
  source 1..75: mol_type = other DNA
aaccgttctctatcgagggggaggggcttaaaggggaaaaggttggtgatgttatctcccgtgcgttgcaaaagg

SEQ ID NO: 190482 - DNA, 75 bp, synthetic construct
  source 1..75: mol_type = other DNA
taaatcactgtacgaaaagtgtcagtcagcgacctatccgcaattgctggccaccgtcgaacggctcaatcgctg

SEQ ID NO: 190483 - DNA, 75 bp, synthetic construct
  source 1..75: mol_type = other DNA
cgatgggggcgttgtccgttgcggcctggatggttgtcgcaccgttactgaaactgcgtctggggcttgccctgc

SEQ ID NO: 190484 - DNA, 75 bp, synthetic construct
  source 1..75: mol_type = other DNA
tcgtcgatccggctgagcgggccaatgcggccatcgcactttttggtacaccggttgaagatctgtctgtcgatc

SEQ ID NO: 190485 - DNA, 75 bp, synthetic construct
  source 1..75: mol_type = other DNA
cagcaacgctatgaacaggcgcaggagcgactcgggcggatacgtaatgccggtgcggcggcactggctgccggt

SEQ ID NO: 190486 - DNA, 75 bp, synthetic construct
  source 1..75: mol_type = other DNA
ctgggcaaaaagagattattgttcctgatatggaaacgaaaatcgccgcccatcttgcgggcgttggcattggtt

SEQ ID NO: 190487 - DNA, 75 bp, synthetic construct
  source 1..75: mol_type = other DNA
aacaggtgaatgatggcgtggaacgccaggtgaatattgtcatcaacaacctgctctacaacccccaggccgtcg

SEQ ID NO: 190488 - DNA, 75 bp, synthetic construct
  source 1..75: mol_type = other DNA
cattcagtgcagccgataacctgacccggccagccactagtgcccgtgaaagtgcagaagcgctggccgcctctc

SEQ ID NO: 190489 - DNA, 75 bp, synthetic construct
  source 1..75: mol_type = other DNA
cgaatgatattgagcgagtggcagaagattgtcgccgtgcatggaatctaggtcttggccctatatcatcaatgg

SEQ ID NO: 190490 - DNA, 75 bp, synthetic construct
  source 1..75: mol_type = other DNA
acgtatcaaagcgcaaaccgggatgagtgataaagccccggtcatgggcgaaacctttatccagtgggtagtgga

SEQ ID NO: 190491 - DNA, 75 bp, synthetic construct
  source 1..75: mol_type = other DNA
gataaagcgctgtttggcgatttaaccgaacgtgaagattttgccgcgttgttgcgcgaaaaaatcgctgacgtc

SEQ ID NO: 190492 - DNA, 75 bp, synthetic construct
  source 1..75: mol_type = other DNA
gacaaggcactgttcggcgatttaaccgactgtgccgattttgccgcgctgctgcgcgaaaaaattgctgacgtc

SEQ ID NO: 190493 - DNA, 75 bp, synthetic construct
  source 1..75: mol_type = other DNA
tcagtggaaacaacttgtaaaaacccttcgtcggtgggacaacttctgggttcatgcggccagaaaaaaacacct

SEQ ID NO: 190494 - DNA, 75 bp, synthetic construct
  source 1..75: mol_type = other DNA
tggtttgtgcgctcttcagtatcacggcagttctcgggtgtctggcgtttacatgggctattgcgtatacatttc

SEQ ID NO: 190495 - DNA, 75 bp, synthetic construct
  source 1..75: mol_type = other DNA
tggtttgtgcactcttcagtatcacagcagttctcgggtgtctagcgtttacatgggctattacgtatatttttc

SEQ ID NO: 190496 - DNA, 75 bp, synthetic construct
  source 1..75: mol_type = other DNA
caaaccttagacagcagattatggatgatgtacaaagaagatatggagaatatcttgataaggataaagtatctt

SEQ ID NO: 190497 - DNA, 75 bp, synthetic construct
  source 1..75: mol_type = other DNA
gctgcttacatcgcagcttgaagaggccatcgcccaactggattgtgaagacggcattgtttttctgacggattt

SEQ ID NO: 190498 - DNA, 75 bp, synthetic construct
  source 1..75: mol_type = other DNA
acttcacctaccaacggtccaacacaattcttacaaatggtttgatgtagtaacgttgctgaatagcactatagt

SEQ ID NO: 190499 - DNA, 75 bp, synthetic construct
  source 1..75: mol_type = other DNA
caggacggtattcttgatgcgccagcggtacatgcgatgttcgaatccgcagacccgattgccgtttatgccagc

SEQ ID NO: 190500 - DNA, 75 bp, synthetic construct
  source 1..75: mol_type = other DNA
atattggtttaggttctttccaccgcgcacaccaggcgtggtatctgcatcgcctgctggtggggggggatgcgc

SEQ ID NO: 190501 - DNA, 75 bp, synthetic construct
  source 1..75: mol_type = other DNA
tgatgtacaaagaagatatggagaatatcttgataaggataaagtatcttgtattacaagcaagatagctgcggc

SEQ ID NO: 190502 - DNA, 75 bp, synthetic construct
  source 1..75: mol_type = other DNA
cccgtaacacaattccgtccgatattcctgaggaaaaagtgccgttatatctacaacgtctggaatattatcgcc

SEQ ID NO: 190503 - DNA, 75 bp, synthetic construct
  source 1..75: mol_type = other DNA
acatataacataaatcttaaggagatacaaaaaattgcagataacactccccaatataatccagacttattagac

SEQ ID NO: 190504 - DNA, 75 bp, synthetic construct
  source 1..75: mol_type = other DNA
ctttgctggttggcatggctttgggactcgcgggcgcagaaatgcagacgatcctcaacaatccattagccagtc

SEQ ID NO: 190505 - DNA, 75 bp, synthetic construct
  source 1..75: mol_type = other DNA
atgccgcgaccgtgagaaggctatgaaggctatggaacggaagaaacgccgtgatagccagcgggaagaacgcaa

SEQ ID NO: 190506 - DNA, 75 bp, synthetic construct
  source 1..75: mol_type = other DNA
ccagacactagacggcaacatcggagggtatcgcccggcgctgattcgaaaaattggcctcgccagggtggtagc

SEQ ID NO: 190507 - DNA, 75 bp, synthetic construct
  source 1..75: mol_type = other DNA
ttacaggacggtagccgccgccggacaccttcgcttcaacgaggataattgccataagcaatgtaggcactgcaa

SEQ ID NO: 190508 - DNA, 75 bp, synthetic construct
  source 1..75: mol_type = other DNA
gacctggaacaagtggttcttacttgtttacaaaaacgagcggaggatcgcttttccactatttccgacttaatt

SEQ ID NO: 190509 - DNA, 75 bp, synthetic construct
  source 1..75: mol_type = other DNA
ccggtggcgtgggcatcggcggtgtgctggaaccgctgcaggctaacccaaccatcattgaagataattgcttca

SEQ ID NO: 190510 - DNA, 75 bp, synthetic construct
  source 1..75: mol_type = other DNA
acgccaaccaggttcggtctttacgcgacatgcttgtccccgccctgttgttctatgtggtgatgacggccatgt

SEQ ID NO: 190511 - DNA, 75 bp, synthetic construct
  source 1..75: mol_type = other DNA
cgaagacaaagcgcgtctgacccgtaacatcattgctggtcttccgggcgcggaagaaggctacaccctcgacca

SEQ ID NO: 190512 - DNA, 75 bp, synthetic construct
  source 1..75: mol_type = other DNA
tggccacgttccgtcacctgaatgccggaaaggtggatacttttgaaaaaggcgttattgacgttttccggcagt

SEQ ID NO: 190513 - DNA, 75 bp, synthetic construct
  source 1..75: mol_type = other DNA
tccggatatgcagttcgctttaactctctgactccggaacagcagcgcgacgttattgctcgtacctttactgaa

SEQ ID NO: 190514 - DNA, 75 bp, synthetic construct
  source 1..75: mol_type = other DNA
aaatggacgatagaagaatgtaaggagatcataaaagtctatcaggctaaattagacgccttaaggagaaaggca

SEQ ID NO: 190515 - DNA, 75 bp, synthetic construct
  source 1..75: mol_type = other DNA
atcattatgttgagctatggttgccctggcgtattggctttgtgggtggcggaaatcattcaataacggctggca

SEQ ID NO: 190516 - DNA, 75 bp, synthetic construct
  source 1..75: mol_type = other DNA
ctcgatgggcggtatgaagcagaccattacccgtgaggagctgattgcactcggtgagcgttttggcgttacgcc

SEQ ID NO: 190517 - DNA, 75 bp, synthetic construct
  source 1..75: mol_type = other DNA
ttcccggatggtgtcggcattctgccgtggatggtgccaggcacggacgaaatcggccaggccaccgcgcaagaa

SEQ ID NO: 190518 - DNA, 75 bp, synthetic construct
  source 1..75: mol_type = other DNA
acgaaaggtcaggagagatcttggcctatttagatcttttgaaatttattgagtatgccggtgcagaactgatat

SEQ ID NO: 190519 - DNA, 75 bp, synthetic construct
  source 1..75: mol_type = other DNA
agaaagcagcaaccggcaatgaaaaaaagcgcttcgatcacctgctttcggtggccgagaaattacctgtcatga

SEQ ID NO: 190520 - DNA, 75 bp, synthetic construct
  source 1..75: mol_type = other DNA
tcataaggtcgaagcggttaagtcggggcgttcagctgcggtgtttgagatagggcggctattagtggaaggagc

SEQ ID NO: 190521 - DNA, 75 bp, synthetic construct
  source 1..75: mol_type = other DNA
ggcggtgtattcctgacaacgatccataaattcaccgaagacaccgaactcctttctgaacgcagcaatatcatt

SEQ ID NO: 190522 - DNA, 75 bp, synthetic construct
  source 1..75: mol_type = other DNA
ctgccgatatccgcagtactatgccgcccgcaaactctattacagcatcaagcaagcgcgtaaacctttcggtag

SEQ ID NO: 190523 - DNA, 75 bp, synthetic construct
  source 1..75: mol_type = other DNA
taaacctacaatgccgacattgcaatcaggtattagacggcaatgttgagttatacagaataaatttaataaaaa

SEQ ID NO: 190524 - DNA, 75 bp, synthetic construct
  source 1..75: mol_type = other DNA
gttaaacacagttttctggttaagcaaacggaagacattccgcaggtgctgaaaaaggctttctggctggcggca

SEQ ID NO: 190525 - DNA, 75 bp, synthetic construct
  source 1..75: mol_type = other DNA
ttccgctttttatcgataaagccgtagatttcatggcatctagccaggcgttccgggagtatctgaataaacttc

SEQ ID NO: 190526 - DNA, 75 bp, synthetic construct
  source 1..75: mol_type = other DNA
atgatgtatctggcagcagccagagaagaggctgaaaagtttttaaaccggacacttcacgatgaaactgttcct

SEQ ID NO: 190527 - DNA, 75 bp, synthetic construct
  source 1..75: mol_type = other DNA
ctctacgcgagcctgagtaaccgtgtggtcgccctgctggaagagctgtcgccccgcgtcgaacaatactcaatt

SEQ ID NO: 190528 - DNA, 75 bp, synthetic construct
  source 1..75: mol_type = other DNA
cctgtcgtcgttctcagtaacaacgatggctgcgttattgcccggagtgctgaagccaaacggctgggtataaag

SEQ ID NO: 190529 - DNA, 75 bp, synthetic construct
  source 1..75: mol_type = other DNA
aagtggtcaacaaaaactggccaccgagttagagttttttccagtatcgattttccgattcgtttggtggtaacc

SEQ ID NO: 190530 - DNA, 75 bp, synthetic construct
  source 1..75: mol_type = other DNA
tggagcactgtatggggcttgaggacttcggccggcagctgcgtcagcacgtgtatgactgtacccgcctgacca

SEQ ID NO: 190531 - DNA, 75 bp, synthetic construct
  source 1..75: mol_type = other DNA
gcaccaggctgttgttcagtatgcagagcgggccgcagagaaactacgtggggagcgtcagtattgccggcaggt

SEQ ID NO: 190532 - DNA, 75 bp, synthetic construct
  source 1..75: mol_type = other DNA
atgggcgtaccgtggttccagctgaaggacgcacagtttcccgagaagctgcacgtgttctccagcaactatgag

SEQ ID NO: 190533 - DNA, 75 bp, synthetic construct
  source 1..75: mol_type = other DNA
tgatcccccggaaaaaagctggtacagccgctttatgccgaagaaaaaagtggaactggatgccggaatagagca

SEQ ID NO: 190534 - DNA, 75 bp, synthetic construct
  source 1..75: mol_type = other DNA
gcaatgtttatacctggaccgatacagaggtcaggattacgccatccccctgtccggcgaaaactcgtgtcagag

SEQ ID NO: 190535 - DNA, 75 bp, synthetic construct
  source 1..75: mol_type = other DNA
gaacaatttcatctgattactggcaatattgcgcagtataaagatcgtctgtatgtaacaaaattatcgactttt

SEQ ID NO: 190536 - DNA, 75 bp, synthetic construct
  source 1..75: mol_type = other DNA
atgaaagtcagggccattcagggagacaccgtggatttactctgtttccggcactacggcagaactcagggcgtc

SEQ ID NO: 190537 - DNA, 75 bp, synthetic construct
  source 1..75: mol_type = other DNA
tgatgccgggcaggaagttgaactgcctgacgtcgacacctctgcgacaaaggagactgttcaattatggagctg

SEQ ID NO: 190538 - DNA, 75 bp, synthetic construct
  source 1..75: mol_type = other DNA
tttacctcacgggctgcaggtggagctgccggacataccgacaaccaccaccgtgcagaccgtccagctatggga

SEQ ID NO: 190539 - DNA, 75 bp, synthetic construct
  source 1..75: mol_type = other DNA
ccatcggcgttggaatgggccccacgaaaacgctggctaaaagcgcgcagtgggcgtcaaaggagtggaagcaat

SEQ ID NO: 190540 - DNA, 75 bp, synthetic construct
  source 1..75: mol_type = other DNA
cttggcttgctgctcggcctggtactgccgcacctgatcccaacgcgcaaacgtaaagatcgctggatgaactaa

SEQ ID NO: 190541 - DNA, 75 bp, synthetic construct
  source 1..75: mol_type = other DNA
cttggcttgctgctcggtctggtactgccgcacctgatcccaagccgcaaacgcaaagatcgctggatgaactaa

SEQ ID NO: 190542 - DNA, 75 bp, synthetic construct
  source 1..75: mol_type = other DNA
cttggcttgctgctcggtctggtactgccgcacctgatcccaacgcgcaaacgcaaagatcgctggatgaactaa

SEQ ID NO: 190543 - DNA, 75 bp, synthetic construct
  source 1..75: mol_type = other DNA
tttgagcttggcaaaaacacccgtgttggcatcgactatgagcgttcatttggcggtaaatacaatatcgataat

SEQ ID NO: 190544 - DNA, 75 bp, synthetic construct
  source 1..75: mol_type = other DNA
gcatcgactatgagcgttcatttggcggtaaatacaatatcgataatgagctgaacttaaaagtacgctattcat

SEQ ID NO: 190545 - DNA, 75 bp, synthetic construct
  source 1..75: mol_type = other DNA
catagttcgataactgaaactgtaacatcaattgatattttatcgacacacagttcggttgatgaagtgtatgtt

SEQ ID NO: 190546 - DNA, 75 bp, synthetic construct
  source 1..75: mol_type = other DNA
ataacaactgcactgcagctggcgcgcgctaaccctgtatttatcaggaaaaacttcaatgtggttctggagaga

SEQ ID NO: 190547 - DNA, 75 bp, synthetic construct
  source 1..75: mol_type = other DNA
gtattgacagctgcatcgatttcgaggatttcggccggcagctgcgtgaacacgtcaggaacgggactggcctga

SEQ ID NO: 190548 - DNA, 75 bp, synthetic construct
  source 1..75: mol_type = other DNA
ggggcgaggaaccgcccctgaatggcaaatgaaacgggaaatgctctcgccttcgtatacaacacaatggactga

SEQ ID NO: 190549 - DNA, 75 bp, synthetic construct
  source 1..75: mol_type = other DNA
tcattatcgcctcgtgggcacggttaacgccggcgaggaagtgaccttattacaaactgacgccaacaccaatta

SEQ ID NO: 190550 - DNA, 75 bp, synthetic construct
  source 1..75: mol_type = other DNA
atcagccgtgaagagttgatagcactcggccagcgtttcggcgttacaccactcgccagtgcgctggcgctgtaa

SEQ ID NO: 190551 - DNA, 75 bp, synthetic construct
  source 1..75: mol_type = other DNA
caggactcggaaaagtgtggtttgcgggccgggggattgcatctgaatggcaaatgaaacgggagatgctttcac

SEQ ID NO: 190552 - DNA, 75 bp, synthetic construct
  source 1..75: mol_type = other DNA
ctcgttgttattctgattatttatataaaacaacggcaggaatattcgcaacaaattactttcgccgcaaatctt

SEQ ID NO: 190553 - DNA, 75 bp, synthetic construct
  source 1..75: mol_type = other DNA
ccgggtgagtgaggaaagccgccgctggctggcatcgtgcggcctgaccgtggagcagatgcaaaaccagatgga

SEQ ID NO: 190554 - DNA, 75 bp, synthetic construct
  source 1..75: mol_type = other DNA
gtggcagtatgacgaacgcggctggctgacagacatcagccatatcagcgaagggcaccgggtggcggtgcatta

SEQ ID NO: 190555 - DNA, 75 bp, synthetic construct
  source 1..75: mol_type = other DNA
ccaaagtgaaagccctcagtgcggcgctgggggaaccggtaagcagcgcgcaaatcaaagcggcgctggctgagg

SEQ ID NO: 190556 - DNA, 75 bp, synthetic construct
  source 1..75: mol_type = other DNA
tggacgctctctgccagcggcgaattgtggcagcatctggcgatcagctcctggcgggcgttgattggcttttca

SEQ ID NO: 190557 - DNA, 75 bp, synthetic construct
  source 1..75: mol_type = other DNA
ggaaggagtggtgatggcgttctggacgctctccgccagcggcgaattgtggcagcatctggcgatcagctcctg

SEQ ID NO: 190558 - DNA, 75 bp, synthetic construct
  source 1..75: mol_type = other DNA
ctggcgtgcgctgattggtttttcaattggcggatcgctgggattaattctggggctgattagcgggctgtcacg

SEQ ID NO: 190559 - DNA, 75 bp, synthetic construct
  source 1..75: mol_type = other DNA
taccggcgtaccgcgtgaagcctgcgccgctaaagccgcccgattactgacgcgcctgaacgtgcctgaacgcct

SEQ ID NO: 190560 - DNA, 75 bp, synthetic construct
  source 1..75: mol_type = other DNA
gccatcgtcggcatcttccatgacgaagccgtacgtaatgacgtcgccgaccgcctgcacccaatgggagcctct

SEQ ID NO: 190561 - DNA, 75 bp, synthetic construct
  source 1..75: mol_type = other DNA
cggctgggtgagccagtttctgcgcgtcatcccgcgtatttcggcactggaagtggtgatgcagccgctgctcga

SEQ ID NO: 190562 - DNA, 75 bp, synthetic construct
  source 1..75: mol_type = other DNA
ctacgctcgctgtatgccaactatctacccgacgaagggcaaatccagatcaaacacggtgatgaatgggtcgac

SEQ ID NO: 190563 - DNA, 75 bp, synthetic construct
  source 1..75: mol_type = other DNA
gccatcgtcggtatcttccatgacgaaaccgtgcgcgagcaagtcgccgaccgcctgcacccaatgggagtctct

SEQ ID NO: 190564 - DNA, 75 bp, synthetic construct
  source 1..75: mol_type = other DNA
cctaccgcctcgctggacgctaaaaacagcgccgccgtagtggaactgatccgcgaagccaaagcccgcggcgcg

SEQ ID NO: 190565 - DNA, 75 bp, synthetic construct
  source 1..75: mol_type = other DNA
cgagtgtgacgcgatgactgagcactattatcgcttacgcgactacgcgctgaactatccagagtgcagcgccat

SEQ ID NO: 190566 - DNA, 75 bp, synthetic construct
  source 1..75: mol_type = other DNA
cttgttgctgctctggcaagccccaggggcgtgggtcgcattagcgggcgcggcattaactggagccggatgttc

SEQ ID NO: 190567 - DNA, 75 bp, synthetic construct
  source 1..75: mol_type = other DNA
caaacttccccgctatgttgtgaaacttcatccggatgatttttttgacgaagaagacgctgaagttctgcactt

SEQ ID NO: 190568 - DNA, 75 bp, synthetic construct
  source 1..75: mol_type = other DNA
tctttgtggatgcgggaaacaaaaagctggtcttctggtttgtacgtgttgatgccgaagggtatccggaagtcg

SEQ ID NO: 190569 - DNA, 75 bp, synthetic construct
  source 1..75: mol_type = other DNA
aatgatagtcattgaggatttgaaggtcggcaacatgtcaaagtcagcagcgggtacggtcagccagccgggcgc

SEQ ID NO: 190570 - DNA, 75 bp, synthetic construct
  source 1..75: mol_type = other DNA
tcagcaaaaaccacgcaatgatagtcattgaggatttgaaggtcagcaacatgtcaaagtcagcagcgggtacgg

SEQ ID NO: 190571 - DNA, 75 bp, synthetic construct
  source 1..75: mol_type = other DNA
atcagcgccggcggcatgtactgcccggagtgtggcatggttcactggccagacggagtcaccccgcccttctga

SEQ ID NO: 190572 - DNA, 75 bp, synthetic construct
  source 1..75: mol_type = other DNA
ttggtgaatggtattaagctgcaaggacaaatcgagtcttttgatcagtttgtgatcctgttgaaaaacacggtc

SEQ ID NO: 190573 - DNA, 75 bp, synthetic construct
  source 1..75: mol_type = other DNA
agccagatggtttacaagcacgcgatttctactgttgtcccatctcgcccggtttctcatcacagtaacaacgcc

SEQ ID NO: 190574 - DNA, 75 bp, synthetic construct
  source 1..75: mol_type = other DNA
atgaatacacaaaatcatcagttcgcggagcataccgcaattactgcctcagtggtcccggacgagttacgcatc

SEQ ID NO: 190575 - DNA, 75 bp, synthetic construct
  source 1..75: mol_type = other DNA
gagacacatatcttcgcatggatggaccgtctgtgcgcagactacagcggcggtatctggcagttttacacgctc

SEQ ID NO: 190576 - DNA, 75 bp, synthetic construct
  source 1..75: mol_type = other DNA
gccatgactgagcactattaccgcctgcgggattacgccctgcagcaccctgaatccagcgccattctgagcatt

SEQ ID NO: 190577 - DNA, 75 bp, synthetic construct
  source 1..75: mol_type = other DNA
gaacggcaatggtgcccaaatgagtgcagaagccgcaggtatcgctgtctgcctgactgaatacagccatcatgc

SEQ ID NO: 190578 - DNA, 75 bp, synthetic construct
  source 1..75: mol_type = other DNA
tgacctacggcagcggctatcttgcgggcatgaagctgggcgggacgccgctgctggagttcacgcgcgaccgcc

SEQ ID NO: 190579 - DNA, 75 bp, synthetic construct
  source 1..75: mol_type = other DNA
ccgtatcgcccgtgacgcgcactatctttaccggtatgaccgtcacggcaggctgacaaagaaaaccgacctcat

SEQ ID NO: 190580 - DNA, 75 bp, synthetic construct
  source 1..75: mol_type = other DNA
cccgacccggagctgcacccggacagcaccctcagcatgtggccggataaccgtatcgcccgtgacgcgcactat

SEQ ID NO: 190581 - DNA, 75 bp, synthetic construct
  source 1..75: mol_type = other DNA
ccgacggcaacggtagccagccgttcttcgatgacgaagggaatttaacccatatcggtgttgccggttttgaaa

SEQ ID NO: 190582 - DNA, 75 bp, synthetic construct
  source 1..75: mol_type = other DNA
aggcatcagcctttaccgcagccacgataaccgtggccggttaatctcggtgaaagacgcacagggccgtgaaac

SEQ ID NO: 190583 - DNA, 75 bp, synthetic construct
  source 1..75: mol_type = other DNA
gctgggacggcgaatggcaaaacgggtctggcggcgggagcgtgacctgacggggtggatgtcgctgtcgcgtaa

SEQ ID NO: 190584 - DNA, 75 bp, synthetic construct
  source 1..75: mol_type = other DNA
gctggacatggcggccacgctggctgtgccgttcaccggtgacgggtatgatgccgcgcaaatcctccgcacact

SEQ ID NO: 190585 - DNA, 75 bp, synthetic construct
  source 1..75: mol_type = other DNA
agtgccctcctctactatatgcccgaccagcggcatcacatgctgttcgccaccatgtggaacaccggcatccgt

SEQ ID NO: 190586 - DNA, 75 bp, synthetic construct
  source 1..75: mol_type = other DNA
ccactgcgaccatcgcggcctgccgctggcgcttgtcagcacggaagggacaacagcgtggtacgcagaatacga

SEQ ID NO: 190587 - DNA, 75 bp, synthetic construct
  source 1..75: mol_type = other DNA
ccgctggtggagtacacccgcgaccgcctgcaccgggaaacgctgcgcagcttcggtcgttatgaactcaccacc

SEQ ID NO: 190588 - DNA, 75 bp, synthetic construct
  source 1..75: mol_type = other DNA
gagcagtgaaagccgggtgtggcttgcgcagtgcgggctgacggtggagcaactggccagacaggtggagccgga

SEQ ID NO: 190589 - DNA, 75 bp, synthetic construct
  source 1..75: mol_type = other DNA
gctggacatggcggccacgctggccgtaccttttaccggtgatggccgggatgccgccgatattctgcgctctct

SEQ ID NO: 190590 - DNA, 75 bp, synthetic construct
  source 1..75: mol_type = other DNA
gctgttttcagctatctggcggatgatctgcgcgagcttcaacagctcatccagcagcaaaacaaactccattaa

SEQ ID NO: 190591 - DNA, 75 bp, synthetic construct
  source 1..75: mol_type = other DNA
atgaaccgctcggcgcgctggatctcaaattgcgagagcaaatgcagcttgagctgaaaaagctgcaacagtctc

SEQ ID NO: 190592 - DNA, 75 bp, synthetic construct
  source 1..75: mol_type = other DNA
acgtctcgcggttgtacggtgacgtgcgcgcggtagatggcgtcagtattgcgataaaagatggtgagttctttt

SEQ ID NO: 190593 - DNA, 75 bp, synthetic construct
  source 1..75: mol_type = other DNA
cgctggcgaatatccgtgcgctgtttaatccggcgaattacgacatcattctccgcacgctgactatggctgtgg

SEQ ID NO: 190594 - DNA, 75 bp, synthetic construct
  source 1..75: mol_type = other DNA
acagaatacagcccggatgtggtgacgggcctcatcacgcgcatcaccacgccggatggcagggcatcggcgttt

SEQ ID NO: 190595 - DNA, 75 bp, synthetic construct
  source 1..75: mol_type = other DNA
gtcattgccccggacggcagcagaaacgggacacagtacgatgcgtggggaaaggccatccgtaccacgcagggc

SEQ ID NO: 190596 - DNA, 75 bp, synthetic construct
  source 1..75: mol_type = other DNA
cgcgcaacacgcgtcgcacaaatcatgcatatcaacatgctgcatgagcgcacgcacgcactatcaaaccgttac

SEQ ID NO: 190597 - DNA, 75 bp, synthetic construct
  source 1..75: mol_type = other DNA
ttcttcctatgaccagcaagaaggacaaaaacggaacggtcatttcagaggctcaggttgctggctggacacctc

SEQ ID NO: 190598 - DNA, 75 bp, synthetic construct
  source 1..75: mol_type = other DNA
gaccgggaaaggcgaaattctgccaggcaatgacgcagacttactggtcatgacgcctgaattgcgcattgagca

SEQ ID NO: 190599 - DNA, 75 bp, synthetic construct
  source 1..75: mol_type = other DNA
atcgctgccgccgagtcctgcattgccgaactgaatcttaacgctgtacgaggcctgattgtcagcggcgacgcg

SEQ ID NO: 190600 - DNA, 75 bp, synthetic construct
  source 1..75: mol_type = other DNA
gcgcatcgttaatgaggacggcagcgatgacgtggcgctgatgactggtgaagtggttgaccgtcagacagggca

SEQ ID NO: 190601 - DNA, 75 bp, synthetic construct
  source 1..75: mol_type = other DNA
gaaacggcaatctatgatgaagagcaaatcaaagatattgtcgacgagctgaccgatggcgcattcgaactgatt

SEQ ID NO: 190602 - DNA, 75 bp, synthetic construct
  source 1..75: mol_type = other DNA
ctcaacgtttcgtccgggtgtccggcgcacagtgggaaggcagcacaaacgctggttactcatttgatgaaggca

SEQ ID NO: 190603 - DNA, 75 bp, synthetic construct
  source 1..75: mol_type = other DNA
agggatgctattggcacattcccggatggcgaaagagccataggttacaagcagcgttttaagatgccttatatt

SEQ ID NO: 190604 - DNA, 75 bp, synthetic construct
  source 1..75: mol_type = other DNA
tgaatatcaaaggatggctcttaaatgaaccagattatcgcctggggctcatggcgggatatcaggaaaaccgtt

SEQ ID NO: 190605 - DNA, 75 bp, synthetic construct
  source 1..75: mol_type = other DNA
agttatcgttatgaagattttgagctaggtggcacatttaaatacagcggctgggtggaagcatctgataacgat

SEQ ID NO: 190606 - DNA, 75 bp, synthetic construct
  source 1..75: mol_type = other DNA
caacaaaacatgcagaactggatttgattataaatatactcaataaatttccagctttttgtcgtcaattaaagc

SEQ ID NO: 190607 - DNA, 75 bp, synthetic construct
  source 1..75: mol_type = other DNA
tactctgtctcactacatgctggttattatattacacctgcagctaaagtttatgtcgaaggaacatggaaccgt

SEQ ID NO: 190608 - DNA, 75 bp, synthetic construct
  source 1..75: mol_type = other DNA
atgatagctttgagttcggggggagtttcaaatatagcggatgggtgaaggcatcggataatgatgagcattaca

SEQ ID NO: 190609 - DNA, 75 bp, synthetic construct
  source 1..75: mol_type = other DNA
aaaggcgttagtgctgatccagagttgcgtattaaggtcgtgaaagctgtgatcgagcagcacatgtcccttaat

SEQ ID NO: 190610 - DNA, 75 bp, synthetic construct
  source 1..75: mol_type = other DNA
tggacgctctcagccagcggcgaattatggcagcatctggcgatcagctcctggcgggcgctaatcggtttttcc

SEQ ID NO: 190611 - DNA, 75 bp, synthetic construct
  source 1..75: mol_type = other DNA
tttggcagcatctggcgatcagctcctggcgggcgctgattggtttttcgattggcggatcgctggggttgattc

SEQ ID NO: 190612 - DNA, 75 bp, synthetic construct
  source 1..75: mol_type = other DNA
gttcgatggcgaccccggccaatatgaaatccgcctggggagagctggaacgtaacggatacaaggtatgggaaa

SEQ ID NO: 190613 - DNA, 75 bp, synthetic construct
  source 1..75: mol_type = other DNA
tcagatgatgctgcacgaatccctggcaatcgagacggtgatcctgctgcgttcgatggcgaccccggccaatat

SEQ ID NO: 190614 - DNA, 75 bp, synthetic construct
  source 1..75: mol_type = other DNA
acagatgatgttgcatgaatcactcgctattgaaacgctaatcctcctgcgctcgatagcagaaccgggcaaaac

SEQ ID NO: 190615 - DNA, 75 bp, synthetic construct
  source 1..75: mol_type = other DNA
gatttgaagcacttgaacaagactaccacgaagtcatctcgacaaagtatatgggaagaagcgcgttcagtcatg

SEQ ID NO: 190616 - DNA, 75 bp, synthetic construct
  source 1..75: mol_type = other DNA
gaacgaaatgcggcgatggtcatttggcggacagccatagatagccgtccggctgtgtgtaacgatgaggaagga

SEQ ID NO: 190617 - DNA, 75 bp, synthetic construct
  source 1..75: mol_type = other DNA
gcgaccctctccggaaattccggtatcactgactacgtaccgcccgggagtgattatgaatcaacaggcgtataa

SEQ ID NO: 190618 - DNA, 75 bp, synthetic construct
  source 1..75: mol_type = other DNA
ttgaggatcttgaaaggcaagttcgatttcttgaaacgcggcttgtgtatctaaaaaagctgaaagccttagctc

SEQ ID NO: 190619 - DNA, 75 bp, synthetic construct
  source 1..75: mol_type = other DNA
agcgacgccctgcgccctctcaccagtagcgtagccgatttcctcaacctgaccgggaaaggcgaaatcctgcca

SEQ ID NO: 190620 - DNA, 75 bp, synthetic construct
  source 1..75: mol_type = other DNA
ggaaaaagacgtggcgattatcgatcgtgtgattggcgtgaaatgcgccatctctgatcaccgttctgccgcacc

SEQ ID NO: 190621 - DNA, 75 bp, synthetic construct
  source 1..75: mol_type = other DNA
caccattacgggttctgtggaaaaggatgtggcgattatcgatcgcgtgattggtgtgaaatgtgccatctctga

SEQ ID NO: 190622 - DNA, 75 bp, synthetic construct
  source 1..75: mol_type = other DNA
tggactacgagattttatttactggcgtcctgatgctgctgggactggtgttgaagctgtttatgtgatgcttaa

SEQ ID NO: 190623 - DNA, 75 bp, synthetic construct
  source 1..75: mol_type = other DNA
ccgcgcacatcaggactgcgacatgctggtatgttttgtgtacgatcctgacggctgggtgaaaaacccgaaagg

SEQ ID NO: 190624 - DNA, 75 bp, synthetic construct
  source 1..75: mol_type = other DNA
gtgaagaaattacttgaagacagttatggcaaggaatctgattactacatagattttaatgatacaaaaaagatt

SEQ ID NO: 190625 - DNA, 75 bp, synthetic construct
  source 1..75: mol_type = other DNA
ctgaaggtttatgaagagcgcggagaagctggtttacgcgcgctcaagattggcaccaaaagaacattgcaatat

SEQ ID NO: 190626 - DNA, 75 bp, synthetic construct
  source 1..75: mol_type = other DNA
gaaaaaggtttaattcccaaacctaaaggcgttagtgctgatccagagttgcgcattaaggtcgtgaaagccgtg

SEQ ID NO: 190627 - DNA, 75 bp, synthetic construct
  source 1..75: mol_type = other DNA
aaaccggttgaaatgccggtaacgacgattactccagtctctgatgccggtggacttcgagattttatttactgg

SEQ ID NO: 190628 - DNA, 75 bp, synthetic construct
  source 1..75: mol_type = other DNA
ggatatccgcatcccgtatgccacggacccggcaggtaaccgcctgcccgacccggagctgcacccggacagcac

SEQ ID NO: 190629 - DNA, 75 bp, synthetic construct
  source 1..75: mol_type = other DNA
atcagccatatcagcgaagggcaccgggtgacggtgcattacgggtatgatgagaaaggccggctgaccggtgag

SEQ ID NO: 190630 - DNA, 75 bp, synthetic construct
  source 1..75: mol_type = other DNA
atagatgatattggaatatttgcattggcaatgtgtaatggagaatcaattaacgagaataaagaatatggtggg

SEQ ID NO: 190631 - DNA, 75 bp, synthetic construct
  source 1..75: mol_type = other DNA
cacaggtgcgcagctttacttacgatgataaataccggggccggatggtggcgcaccgtcacacgggccgaccgg

SEQ ID NO: 190632 - DNA, 75 bp, synthetic construct
  source 1..75: mol_type = other DNA
cgttcaaatttgccctgttggtcgtcgggcgtttgattcttggctttggtgaaagccagttactgacaggcgctc

SEQ ID NO: 190633 - DNA, 75 bp, synthetic construct
  source 1..75: mol_type = other DNA
cgccggtgacctgaccaccgtcattgccccggacggcagcagaaacgggacacagtacgatgcgtggggaaaggc

SEQ ID NO: 190634 - DNA, 75 bp, synthetic construct
  source 1..75: mol_type = other DNA
ccagactgaaccggttgccgctgacggcaaactactgctgatccaggcaaaagacggaaccgtgtactctattac

SEQ ID NO: 190635 - DNA, 75 bp, synthetic construct
  source 1..75: mol_type = other DNA
tgaatgcggatgacggtaaagaaatctggtctgtcaaccttgcggagaaagacggttggttctcaaaagcgccag

SEQ ID NO: 190636 - DNA, 75 bp, synthetic construct
  source 1..75: mol_type = other DNA
atgagaatcatgaggccggtaataaatacatcccttacgggaaaatggcttcctggctggttgagtggaaaaatg

SEQ ID NO: 190637 - DNA, 75 bp, synthetic construct
  source 1..75: mol_type = other DNA
cggacagcaccctcagcatgtggccggataaccgtatcgcccgtgacgcgcactatctttactggtatgaccgtc

SEQ ID NO: 190638 - DNA, 75 bp, synthetic construct
  source 1..75: mol_type = other DNA
gctggtcttctggtttgttcgtgtcaatgacgaagggtatccggaaatagcccgctgcacggagcgggagtttgc

SEQ ID NO: 190639 - DNA, 75 bp, synthetic construct
  source 1..75: mol_type = other DNA
aacgaaaacctgcacctcaaagaagcaaacttccccgctatgtcgtgaagcttcacgacgatgacttctttgacg

SEQ ID NO: 190640 - DNA, 75 bp, synthetic construct
  source 1..75: mol_type = other DNA
cggtgaatggtgaaaccgcagaacagtggcggtacgacgaacgcggctggctgacacaaatcagccatctcagcg

SEQ ID NO: 190641 - DNA, 75 bp, synthetic construct
  source 1..75: mol_type = other DNA
ggcaggcgctgccggaagagctacgcctaagtccgcatcgttatctggcgacgaacagtccgcaggggccgtggt

SEQ ID NO: 190642 - DNA, 75 bp, synthetic construct
  source 1..75: mol_type = other DNA
ggcaggcgctgccggaagaactgcgcgtaagtccgcatcgttatctggcgacgaacagtccgcaggggccgtggt

SEQ ID NO: 190643 - DNA, 75 bp, synthetic construct
  source 1..75: mol_type = other DNA
atctggatatccgcatcccgtatgccacggacccggcaggtaaccgcctgcccgacccggagctgcacccggaca

SEQ ID NO: 190644 - DNA, 75 bp, synthetic construct
  source 1..75: mol_type = other DNA
tgacgaacgcggctggctgacagacatcagccatatcagcgaagggcaccgggtgacggtgcattacgggtatga

SEQ ID NO: 190645 - DNA, 75 bp, synthetic construct
  source 1..75: mol_type = other DNA
agttctgttttacatatgtttacacttagatcatgtaaagagggaacgtttggacaatgttattgtgctatgtat

SEQ ID NO: 190646 - DNA, 75 bp, synthetic construct
  source 1..75: mol_type = other DNA
ggcaggcgctgccggaagagctccgcataagtccgcatcgttatctggcgacgaacagtccgcaggggccgtggt

SEQ ID NO: 190647 - DNA, 75 bp, synthetic construct
  source 1..75: mol_type = other DNA
ccagatggacccggtatacacgccggcgcgaaaaatccacctgtaccactgcgaccatcgcggcctgccgctggc

SEQ ID NO: 190648 - DNA, 75 bp, synthetic construct
  source 1..75: mol_type = other DNA
ccggctggaaagtgaaatcctggctgaccgggtgagtgaggaaagccgccgctggctggcatcgtgcggcctgac

SEQ ID NO: 190649 - DNA, 75 bp, synthetic construct
  source 1..75: mol_type = other DNA
gatatccgcatcccgtataccacagacccggcaggtaaccgcctgcccgacccggagctgcacccggacagcacc

SEQ ID NO: 190650 - DNA, 75 bp, synthetic construct
  source 1..75: mol_type = other DNA
tagattcaatgggactggcatcaaaatatggacacttaaataatggcggatatggagcgagacccaacaaaccgc

SEQ ID NO: 190651 - DNA, 75 bp, synthetic construct
  source 1..75: mol_type = other DNA
ggcagcatgagaccagacacgcttacaacgcgcaggggctggcgaaccgctgtataccggacagcctgcccgccg

SEQ ID NO: 190652 - DNA, 75 bp, synthetic construct
  source 1..75: mol_type = other DNA
acaacgccgccggtgacctgaccgccgtcattgccccggacggcagcagaaacgggacacagtacgatgcgtggg

SEQ ID NO: 190653 - DNA, 75 bp, synthetic construct
  source 1..75: mol_type = other DNA
ggtggcctccaacccaggtcctggtctggggctgctgctggcgtttaccttgtttggtaaagggatgagtaaacg

SEQ ID NO: 190654 - DNA, 75 bp, synthetic construct
  source 1..75: mol_type = other DNA
tccgtgccacagattgccgaaatgctgcaggtcaagcgcccgaccgtgcagagctggaagcagcgcgacggctgg

SEQ ID NO: 190655 - DNA, 75 bp, synthetic construct
  source 1..75: mol_type = other DNA
aaccgcaatggtgctcaaggcaaaagacgttatccgccgtggctgtctggaatatgacgtcagcgccaccgacat

SEQ ID NO: 190656 - DNA, 75 bp, synthetic construct
  source 1..75: mol_type = other DNA
ctgtctggaatacgacgtcagcgccaccgacatcaccagctcgtttatggctatccgcaagaccatgaccagcag

SEQ ID NO: 190657 - DNA, 75 bp, synthetic construct
  source 1..75: mol_type = other DNA
aagagaaatatattgaggatcttacttgtaagtatcctcttcatcgttttttgatattattcatggtaattttct

SEQ ID NO: 190658 - DNA, 75 bp, synthetic construct
  source 1..75: mol_type = other DNA
ttaccccttctggtctggcgagctgttcaacaaggggcgcagccgtattgccgaccgcatcgaaatcgacatcag

SEQ ID NO: 190659 - DNA, 75 bp, synthetic construct
  source 1..75: mol_type = other DNA
gcccggtctggattggctacgacccgtcacacactggcgacagcgccgggtgcgtcgtactcgcgccgccggtgg

SEQ ID NO: 190660 - DNA, 75 bp, synthetic construct
  source 1..75: mol_type = other DNA
ctgacatttgtacagggggcaatcctcggcctgtaaccttgacggatatccagcagctttatcgtcaaatgtatt

SEQ ID NO: 190661 - DNA, 75 bp, synthetic construct
  source 1..75: mol_type = other DNA
tctctggtggcaagttccgcatgctggagcgccaccagtggaagggcatggattttgcagcacaggcagagggca

SEQ ID NO: 190662 - DNA, 75 bp, synthetic construct
  source 1..75: mol_type = other DNA
actttgccaaagaagttgaggtggagctgaaaggcgatcctatggtgctacctaatggcgcagcattgtactttc

SEQ ID NO: 190663 - DNA, 75 bp, synthetic construct
  source 1..75: mol_type = other DNA
gatttcaacggccaggcggagaaggtcgaatgcgagcactcaacagacggttcaaagacagctacggcgtcccag

SEQ ID NO: 190664 - DNA, 75 bp, synthetic construct
  source 1..75: mol_type = other DNA
agtgcccaacccgacaattactgtcgtcaaagaagggcttggtgtattccagagtagcggtgcggattacctgat

SEQ ID NO: 190665 - DNA, 75 bp, synthetic construct
  source 1..75: mol_type = other DNA
atatggtcgtcacttactgttgacttccagaaatccccgatggagagataaatatgcaagacgcgttattcaaaa

SEQ ID NO: 190666 - DNA, 75 bp, synthetic construct
  source 1..75: mol_type = other DNA
atgacgaaatatacccttatcgggttgctcgccgtgtgcgccacggtgttgtgtttttcactgatattcagggaa

SEQ ID NO: 190667 - DNA, 75 bp, synthetic construct
  source 1..75: mol_type = other DNA
cttcaacggccagccagcagccaccgaagccgcgcagttgacggtcatcgccggagagatgtcatcagcgaactc

SEQ ID NO: 190668 - DNA, 75 bp, synthetic construct
  source 1..75: mol_type = other DNA
ttcggtgcggcgcgtaacgtggaagagggcggcagcctaaccattatcgcgacggcgcttatcgataccggttct

SEQ ID NO: 190669 - DNA, 75 bp, synthetic construct
  source 1..75: mol_type = other DNA
actgcacctctctcgtaagatcgctgaaaaacgcgtcttcccggcaatcgactacaaccgttccggtacccgtaa

SEQ ID NO: 190670 - DNA, 75 bp, synthetic construct
  source 1..75: mol_type = other DNA
gtgaaattcaaggcggatttcagtaccggtcaggcgagtctggaggttgatagcgccgcgccaaaagtggcaaac

SEQ ID NO: 190671 - DNA, 75 bp, synthetic construct
  source 1..75: mol_type = other DNA
ggcttcgttaaacctggaaccgaatggcactgcgacaacgaatgagcaagggcaggctattttcaccgctaccac

SEQ ID NO: 190672 - DNA, 75 bp, synthetic construct
  source 1..75: mol_type = other DNA
gttgcaggtgacgcatctaaggctgagattcgtgatatgacagtgaaggttaataaccaactggctaatggacaa

SEQ ID NO: 190673 - DNA, 75 bp, synthetic construct
  source 1..75: mol_type = other DNA
cgtaagcaagattgggggaaaatcggtaaacgtttgggccatgaaaaacaatggtcactacacgaccttagaaga

SEQ ID NO: 190674 - DNA, 75 bp, synthetic construct
  source 1..75: mol_type = other DNA
gagctttgttttcttctacaggttagcaggtggccgggctgctccggtctggctaacgttgggtaaatatcctga

SEQ ID NO: 190675 - DNA, 75 bp, synthetic construct
  source 1..75: mol_type = other DNA
gcatcattaaagccattggcgaggaaacaagagacaccatagcgccattgatggaaaagatcgcagagcttgaga

SEQ ID NO: 190676 - DNA, 75 bp, synthetic construct
  source 1..75: mol_type = other DNA
ccagagcattgcctacaaccatccagactgtgtactgatggttctgctgatcgacgaacgtccagaagaagtgac

SEQ ID NO: 190677 - DNA, 75 bp, synthetic construct
  source 1..75: mol_type = other DNA
gagctgcagaaaatgtggatcctgcgcaaaatcattcacccgatgggcgaaatcgacgcaatggaattcctcatt

SEQ ID NO: 190678 - DNA, 75 bp, synthetic construct
  source 1..75: mol_type = other DNA
aacttgaggtgcttaatatgtgggttaattaccttaatacgatagcaggatttaacaacaacgttatcgagctta

SEQ ID NO: 190679 - DNA, 75 bp, synthetic construct
  source 1..75: mol_type = other DNA
atctcgatccccgtcggcaggccatgctgctgtactttcaggggtaccgcgtagcccgcattgctgaaatgctgg

SEQ ID NO: 190680 - DNA, 75 bp, synthetic construct
  source 1..75: mol_type = other DNA
caataaaaggattgcgaacaatctcaacaaagctaaaaaagagtttactccagagctaataaacagcgttgtatt

SEQ ID NO: 190681 - DNA, 75 bp, synthetic construct
  source 1..75: mol_type = other DNA
ggcaccgccggtggtggccggtggcaaattcagaatacttgagcgtcaccagtggaaaggcatggactttgccac

SEQ ID NO: 190682 - DNA, 75 bp, synthetic construct
  source 1..75: mol_type = other DNA
cgcgcagagccataacggcgatctgtatgtcgatgaaatattctggatcccgaattttcagaaactgcgcaaagt

SEQ ID NO: 190683 - DNA, 75 bp, synthetic construct
  source 1..75: mol_type = other DNA
ttaaccccaacgtcgccaaccgcaacaaaggggagcgcaaaaagccgaaaaagaattttttcagcgacgaggcta

SEQ ID NO: 190684 - DNA, 75 bp, synthetic construct
  source 1..75: mol_type = other DNA
cgttgaatacatcgggattgatgccaccggcctcggtgtcggcgtgttccagctcgtgcgctcgttctatcccgc

SEQ ID NO: 190685 - DNA, 75 bp, synthetic construct
  source 1..75: mol_type = other DNA
gagttggaacggcaggaagcatggctattggatcactggcagaggccgcaaatcagaaaggtgatttcgcacaaa

SEQ ID NO: 190686 - DNA, 75 bp, synthetic construct
  source 1..75: mol_type = other DNA
tgctgggaacaggctcaaagcgagctgagcagtatgcaaaaagaagtcagctagttaaaaaacagcttgagaaat

SEQ ID NO: 190687 - DNA, 75 bp, synthetic construct
  source 1..75: mol_type = other DNA
tctgtcccccggcctgctgtgcgcagacgggcagtaccgccagatagtcaccgtggaagatgcggtgcggggcgg

SEQ ID NO: 190688 - DNA, 75 bp, synthetic construct
  source 1..75: mol_type = other DNA
catgtgtgaatttgttgacgacaaggcgtcggtgtttccgttcgaggagctgcaacgctgcatggtcgacacgct

SEQ ID NO: 190689 - DNA, 75 bp, synthetic construct
  source 1..75: mol_type = other DNA
tctacagcaaacagcaaggtcagacatcgcaaatgttgtaactcagacagggcaatcgcaagccaacaggataag

SEQ ID NO: 190690 - DNA, 75 bp, synthetic construct
  source 1..75: mol_type = other DNA
cacgctctgttaaatgagccactcaccgccggtatcagcaccccgctgacatccaccattctggagttttactga

SEQ ID NO: 190691 - DNA, 75 bp, synthetic construct
  source 1..75: mol_type = other DNA
cgacctgaccggcgacccgattgtcatcggcaacaacggcgcaaagctgatatttctcggcaccaactcaaacac

SEQ ID NO: 190692 - DNA, 75 bp, synthetic construct
  source 1..75: mol_type = other DNA
tccgcctgcggcaaagacgcgctctatttctccctgcgctatttgcccgtcgcgcgtggcatcctcgagtattaa

SEQ ID NO: 190693 - DNA, 75 bp, synthetic construct
  source 1..75: mol_type = other DNA
tggacatcgacctgtcccacagcaatctggcccccggccagctgtgcgctgacgggcagtaccgccagatagtca

SEQ ID NO: 190694 - DNA, 75 bp, synthetic construct
  source 1..75: mol_type = other DNA
caggaacgccagcctatgaaagaacgctgaataacgctgcgaatgccatcaggccgctgcttgccactgaggcaa

SEQ ID NO: 190695 - DNA, 75 bp, synthetic construct
  source 1..75: mol_type = other DNA
gcgccgacgattttaaaaacctgttcatgtgtgaatttgttgatgacaaggcatcggtgttcccgttcgaggagc

SEQ ID NO: 190696 - DNA, 75 bp, synthetic construct
  source 1..75: mol_type = other DNA
tttaagcgtgccgcagctgcgcaacaggctggcctgaagctgattgtcgggctgaatgccgatccggaatttttt

SEQ ID NO: 190697 - DNA, 75 bp, synthetic construct
  source 1..75: mol_type = other DNA
gcgcaacaggctggcctgaagctgattgtcgggctgaacgccgatccggaattttttatgcaccagaaacagtcg

SEQ ID NO: 190698 - DNA, 75 bp, synthetic construct
  source 1..75: mol_type = other DNA
acgactggcacgggtcaaccgttacagtcagaccggcaacgaggcagaccttaatccgaacgtcgctaaccgcaa

SEQ ID NO: 190699 - DNA, 75 bp, synthetic construct
  source 1..75: mol_type = other DNA
gcccggtatggattggttacgacccgtcacaccgtggcgacagtgccggatgcgtggtgctggcaccgccggtgg

SEQ ID NO: 190700 - DNA, 75 bp, synthetic construct
  source 1..75: mol_type = other DNA
gtcacataccggcgacagcgcaggctgcgcggtactggctccgccactggttgccggtggcaagttccgcatcct

SEQ ID NO: 190701 - DNA, 75 bp, synthetic construct
  source 1..75: mol_type = other DNA
tctttcctgccgtccgggagtttgtctataaccccaatgttaaaaatgccctggtactcaaggcctacgacatta

SEQ ID NO: 190702 - DNA, 75 bp, synthetic construct
  source 1..75: mol_type = other DNA
gcagcctttagaacagcaagatggatttatgtctgaccttggcgaggcagtaaaagagactggtcgcggactggt

SEQ ID NO: 190703 - DNA, 75 bp, synthetic construct
  source 1..75: mol_type = other DNA
ttaaaaatgccctggtactcaaggcctacgacattatcagtcaccgccgtctggagtttgacgccggacacaccg

SEQ ID NO: 190704 - DNA, 75 bp, synthetic construct
  source 1..75: mol_type = other DNA
gggaatatctgatgaacaaaaaggccagtatataaacgctttgcaaactttcgtgacatctctgagtgaggttga

SEQ ID NO: 190705 - DNA, 75 bp, synthetic construct
  source 1..75: mol_type = other DNA
gagaagggcggctagaaaagaaagtgttgaaaataaatttaatggtaaaatagaagaaattaatgagcttatatc

SEQ ID NO: 190706 - DNA, 75 bp, synthetic construct
  source 1..75: mol_type = other DNA
acaggatatatcagcattgatagcaagtcctaatgatgtttctgaaccgttactaaaaaacctgtttgtcgcaga

SEQ ID NO: 190707 - DNA, 75 bp, synthetic construct
  source 1..75: mol_type = other DNA
cacggaccattcgtgtatttaattttcttgaagatacaaaagaatttatcggcagtggtgacgcttatataccgc

SEQ ID NO: 190708 - DNA, 75 bp, synthetic construct
  source 1..75: mol_type = other DNA
cagaaaattacgaataaagttaaatcgtattcaaccggaaaatgcaccagatatcgactggtcagactttgaata

SEQ ID NO: 190709 - DNA, 75 bp, synthetic construct
  source 1..75: mol_type = other DNA
taaatcaatgttgaaacagttactggaaaatagcaccgttgccagtatcgttggcgctggcgcttctgcgctatt

SEQ ID NO: 190710 - DNA, 75 bp, synthetic construct
  source 1..75: mol_type = other DNA
agaaagcggcaggacttgccggaggcgtccggtttggtggggacggagggcgtgagattttatcgtctgcggatg

SEQ ID NO: 190711 - DNA, 75 bp, synthetic construct
  source 1..75: mol_type = other DNA
cctcgacagaacattgccccatggctacatcattgcgcagcaggacaataacagtcaggctatgcagtggctgac

SEQ ID NO: 190712 - DNA, 75 bp, synthetic construct
  source 1..75: mol_type = other DNA
cgtacggtttggtggggacggagggcgtgagattttatcgtctgcggatgtgcggatgtcagcgaggatgatgtc

SEQ ID NO: 190713 - DNA, 75 bp, synthetic construct
  source 1..75: mol_type = other DNA
cttatcgaatcctataagaaaagtcattcaaatataaagtttgttcatatctcacttgctcatttcagatcgatt

SEQ ID NO: 190714 - DNA, 75 bp, synthetic construct
  source 1..75: mol_type = other DNA
acaggatatatcagcattgatagcaagtcctaatgatgtttctgaaccgttactaaaaaaacctgtttgtcgcag

SEQ ID NO: 190715 - DNA, 75 bp, synthetic construct
  source 1..75: mol_type = other DNA
aaaagttaacgccgttcagcgatgttgagctgggtgtatataaaaatgcgatagattttgtttttgccaataacg

SEQ ID NO: 190716 - DNA, 75 bp, synthetic construct
  source 1..75: mol_type = other DNA
cacaaaccattcgtgtatttaattatctcgatggcacaaatgaatttattggcgaaagcgacgcatatattccac

SEQ ID NO: 190717 - DNA, 75 bp, synthetic construct
  source 1..75: mol_type = other DNA
atgagtcgtaaacaactggcgctattcgaaccaacacttgtcgttcaggcgctgaaagaagcggtgaaaaaatta

SEQ ID NO: 190718 - DNA, 75 bp, synthetic construct
  source 1..75: mol_type = other DNA
agaatataaagctcaggtgaagcagcttattgaaatgaaccggatcaccattgccaatggcgatattggttttaa

SEQ ID NO: 190719 - DNA, 75 bp, synthetic construct
  source 1..75: mol_type = other DNA
gcgctcagtgccgaagagcaggatgaagacgacccgtatgccgacttcaaagtgcctgatgatttgatgtggtaa

SEQ ID NO: 190720 - DNA, 75 bp, synthetic construct
  source 1..75: mol_type = other DNA
atcgcaataataaatctttagcggaaatagactgggcaaaattacaagcaatttttcatcaaccatatgaaatac

SEQ ID NO: 190721 - DNA, 75 bp, synthetic construct
  source 1..75: mol_type = other DNA
gaaggctgcaaacgttgcctgaatcctggcggtatcttcgtcgcacaaaacggcgtctgctttttacagcaggaa

SEQ ID NO: 190722 - DNA, 75 bp, synthetic construct
  source 1..75: mol_type = other DNA
tgttgcttcttgcagccattattcttgctgcatgtcaggcaaactatatccgtgatgttcagggcgggactgtat

SEQ ID NO: 190723 - DNA, 75 bp, synthetic construct
  source 1..75: mol_type = other DNA
aatggggtttggttcatcaggtgggtacgacggttttccgtattgcaatataagtggttcagaccgacgaataaa

SEQ ID NO: 190724 - DNA, 75 bp, synthetic construct
  source 1..75: mol_type = other DNA
atatataacgcagcaatattccgtttcggcggtcaaacaacatcaggggagcgacatctttttggacatattaga

SEQ ID NO: 190725 - DNA, 75 bp, synthetic construct
  source 1..75: mol_type = other DNA
atattgatgctttattgacttacataaacgacgatatggaaagaattggaggaactataaaggacacgtactggg

SEQ ID NO: 190726 - DNA, 75 bp, synthetic construct
  source 1..75: mol_type = other DNA
caacaacagcgacaaccgccgccgattcagctaagacatacagagacgaggcccacgaatacgccaatcagacgg

SEQ ID NO: 190727 - DNA, 75 bp, synthetic construct
  source 1..75: mol_type = other DNA
gcgcaaaacgccaaatgcagcgccacgtgtttttgaaaccagcggtaatcaaaccggagcagctattattcttgg

SEQ ID NO: 190728 - DNA, 75 bp, synthetic construct
  source 1..75: mol_type = other DNA
atgatttacacaacaggcacgatagccgttagcggaaacacagttaccggaaaggggactgaattcaacgccgca

SEQ ID NO: 190729 - DNA, 75 bp, synthetic construct
  source 1..75: mol_type = other DNA
tacagcaacagtattgtggacacgcccacgtactttgcctttgcaaaaggggccgggctgatgggggaagccgga

SEQ ID NO: 190730 - DNA, 75 bp, synthetic construct
  source 1..75: mol_type = other DNA
caacagagcagcttgctgttgagcagtcccgtctggcacagatgcaggaaaaagcgcagtccattcaggatgtgc

SEQ ID NO: 190731 - DNA, 75 bp, synthetic construct
  source 1..75: mol_type = other DNA
caacagagcagtttgctgttgagcagtcccgcctggcacagatgcaggaaaaagcgcagtccattcaggatgtgc

SEQ ID NO: 190732 - DNA, 75 bp, synthetic construct
  source 1..75: mol_type = other DNA
tgaagcagctcattgaaatgaatcgtatcaccattgccaatggcgatatcggttttaacttcactgacggtaatc

SEQ ID NO: 190733 - DNA, 75 bp, synthetic construct
  source 1..75: mol_type = other DNA
agtgcgggtctggtgtattccccggtgtaccacattgccattcagaatgacggcgctaacgggcagatagggccg

SEQ ID NO: 190734 - DNA, 75 bp, synthetic construct
  source 1..75: mol_type = other DNA
aggtggaaaacgcctttatggcctgggtgggcggtgcgaatgaggccagcggggtgacaaaaacgctctccggcg

SEQ ID NO: 190735 - DNA, 75 bp, synthetic construct
  source 1..75: mol_type = other DNA
caatgcaaaaggcggcgtgtatacctcggcaaacctgagtgcgtacagcaacagcattgtggacacgcccacgta

SEQ ID NO: 190736 - DNA, 75 bp, synthetic construct
  source 1..75: mol_type = other DNA
ggggactgaaaacacagattgctgactatcagcgctggctgcaggaaaatccacagggtggttcaggtgtggaga

SEQ ID NO: 190737 - DNA, 75 bp, synthetic construct
  source 1..75: mol_type = other DNA
ctaaattcgttgcggatgataaaaatgcggtactcaccgcatcatctgatatgcaatctctggtggcggatggga

SEQ ID NO: 190738 - DNA, 75 bp, synthetic construct
  source 1..75: mol_type = other DNA
ctggcgaagctgaagtaccagacagcgctgggtgaactgaaaaccctgacggagatacagaagcaggaactgctg

SEQ ID NO: 190739 - DNA, 75 bp, synthetic construct
  source 1..75: mol_type = other DNA
atagggccggaggcggcaggcagtcttgtgcagctgattgaccagcgggtgcaggcggtgatgctgtccatgcga

SEQ ID NO: 190740 - DNA, 75 bp, synthetic construct
  source 1..75: mol_type = other DNA
ccgggaggaggccctgaaaaatgataatgcagacgcaagggcatcaaatgacgctgagctgctggggtacgggca

SEQ ID NO: 190741 - DNA, 75 bp, synthetic construct
  source 1..75: mol_type = other DNA
ccagcagtatcgtattacacagcgcactcagcgctgaagagcaggatgaagaagatccgtatgccgatttcaaag

SEQ ID NO: 190742 - DNA, 75 bp, synthetic construct
  source 1..75: mol_type = other DNA
gttcctgcggaagtcatcagcaaactggcaaatgccgggattgtggtttctgccggtcactccaacgcgacgttg

SEQ ID NO: 190743 - DNA, 75 bp, synthetic construct
  source 1..75: mol_type = other DNA
ttaggtctgcatctggaaggtccgtggctgaatctggtaaaaaaaggcacccataatccgaattttgtgcgtaag

SEQ ID NO: 190744 - DNA, 75 bp, synthetic construct
  source 1..75: mol_type = other DNA
taagatgcagacatttgaacagggactgattgatgtctggcggaaattgtcatgggattacagaaccaataatcc

SEQ ID NO: 190745 - DNA, 75 bp, synthetic construct
  source 1..75: mol_type = other DNA
ccggatgaggaagacatgctgatgcagaaagcggcaggacttgccggaggcgtccggttcggtggggagggaggg

SEQ ID NO: 190746 - DNA, 75 bp, synthetic construct
  source 1..75: mol_type = other DNA
atgaatcagactttacccactgctgacctgaatactgccggcacgacagatattattccgtctgtggccatcgac

SEQ ID NO: 190747 - DNA, 75 bp, synthetic construct
  source 1..75: mol_type = other DNA
cgtccggttcggaggggacgggggacgcgatatttcaccttctgcggatgtggtggatgtcagcgaggatgatgt

SEQ ID NO: 190748 - DNA, 75 bp, synthetic construct
  source 1..75: mol_type = other DNA
atgatgcagtgcaatttccttatttatataacgacatattgtttttatatactttctgaaatgtgctgtctggtt

SEQ ID NO: 190749 - DNA, 75 bp, synthetic construct
  source 1..75: mol_type = other DNA
tcaggttcctgcagaaaacagtggtgttaatcctggatgatctggagcctctgacaaaccagcagtgcaatgacc

SEQ ID NO: 190750 - DNA, 75 bp, synthetic construct
  source 1..75: mol_type = other DNA
gacatatacactcacggcgaaagtggaacaggccaacggtcaggtatcgacgaaaactgctgaatctaaattcgt

SEQ ID NO: 190751 - DNA, 75 bp, synthetic construct
  source 1..75: mol_type = other DNA
gcgagaggaagagcagacggagatgccggatgaggaagaaattctgatgcagaaagcggcaggacttgccggagg

SEQ ID NO: 190752 - DNA, 75 bp, synthetic construct
  source 1..75: mol_type = other DNA
tggcggatgtcatggtggatgatgccgcattaatgatggcttcagcggggattccaggaggtgtgagatatgtcc

SEQ ID NO: 190753 - DNA, 75 bp, synthetic construct
  source 1..75: mol_type = other DNA
gaaatcgttacggtcagtgatgacatgcggagcagtacagaggatgaagccatgctgatgatggtgtctgaggga

SEQ ID NO: 190754 - DNA, 75 bp, synthetic construct
  source 1..75: mol_type = other DNA
atgaattcactacgtccggaattattagaactgacgccgcaggctctgacggcgttaagcaatgccggttttgtt

SEQ ID NO: 190755 - DNA, 75 bp, synthetic construct
  source 1..75: mol_type = other DNA
actgaagggggaggaaaaagagcgggcccgtctggggtatgcggcggatgacctgggttttgtgggggatccgta

SEQ ID NO: 190756 - DNA, 75 bp, synthetic construct
  source 1..75: mol_type = other DNA
actgaatggggaggaaaaagagcgggcccggctggggtatgcggcggatgacctgggttttgtgggggatccgta

SEQ ID NO: 190757 - DNA, 75 bp, synthetic construct
  source 1..75: mol_type = other DNA
agataatgaagggcgaacacgggaggcgctgacagagcagaaccggctgattgatgagcaggccagccgggtgaa

SEQ ID NO: 190758 - DNA, 75 bp, synthetic construct
  source 1..75: mol_type = other DNA
atcagtgaggatttttacaggcaggcgctggcgcagaatgcgcagtatctgagtgaacgactgaaagagcaggaa

SEQ ID NO: 190759 - DNA, 75 bp, synthetic construct
  source 1..75: mol_type = other DNA
gaaaatcagagacggaaaaagcggaagacagtttttcccggctactgaagcagcagaaagagcaactggcactgg

SEQ ID NO: 190760 - DNA, 75 bp, synthetic construct
  source 1..75: mol_type = other DNA
actgaagggggaggaaaaagagcgggcccggctggggtatgcggcggatgaccttggttttgtgggggatccgta

SEQ ID NO: 190761 - DNA, 75 bp, synthetic construct
  source 1..75: mol_type = other DNA
tgaacagaaatattgctgccagaatcgctgcccagaatgggctgaacagtacaacggcggtgggctcacgtctga

SEQ ID NO: 190762 - DNA, 75 bp, synthetic construct
  source 1..75: mol_type = other DNA
tgaacagaaatattgctgccagaaacgcggcccagaatgggctgaacagtacaacggcggtgggctcacgtctga

SEQ ID NO: 190763 - DNA, 75 bp, synthetic construct
  source 1..75: mol_type = other DNA
gacgcagattgccacggcgcgggcaagtgcagccgtgtaccgtgctcagcaggcagtggcggcagcccgcgggac

SEQ ID NO: 190764 - DNA, 75 bp, synthetic construct
  source 1..75: mol_type = other DNA
attagccttagaagccgctggggcacagctgctggtgctggaatgcgtgccggttgaactggcaaaacgtattac

SEQ ID NO: 190765 - DNA, 75 bp, synthetic construct
  source 1..75: mol_type = other DNA
tgaacagaaatattgctgccagaagcgcggcccagaatgagctgaacagtacaacggcggtgggctcacgtctga

SEQ ID NO: 190766 - DNA, 75 bp, synthetic construct
  source 1..75: mol_type = other DNA
tgaacagaaatattgctgccagaagcgcagcccagaatgggctgaacagtacaacggcggtgggctcacgtctga

SEQ ID NO: 190767 - DNA, 75 bp, synthetic construct
  source 1..75: mol_type = other DNA
caagatttgtttgattcgttaactcttggagaaagagcgtatttggcattcgctgtagccgctaataaccagcta

SEQ ID NO: 190768 - DNA, 75 bp, synthetic construct
  source 1..75: mol_type = other DNA
caggcggaaagggggttggagccagaacgctcgaactggcactggcggaacaacgtccggtcgtcgctgtcgttc

SEQ ID NO: 190769 - DNA, 75 bp, synthetic construct
  source 1..75: mol_type = other DNA
gctctggttgccgtcggggtagcccgatattttggcaatatggcgtcgtctgctggatctgcaactgccggatta

SEQ ID NO: 190770 - DNA, 75 bp, synthetic construct
  source 1..75: mol_type = other DNA
agagcagccgtgtaccgtgctcagcaggccgtggcggcagcccgcgggacggagatgcagattgcagcagaggcc

SEQ ID NO: 190771 - DNA, 75 bp, synthetic construct
  source 1..75: mol_type = other DNA
gctgagacagtaccagaccggagaaatcgaagaagccctgtggaaacaggaaaaaacgctgaatgaaaaatatct

SEQ ID NO: 190772 - DNA, 75 bp, synthetic construct
  source 1..75: mol_type = other DNA
gtggcgacattacgtgaactgattattaaaatctcggcaaactcccggtccttccagtcggagatcgcccgggct

SEQ ID NO: 190773 - DNA, 75 bp, synthetic construct
  source 1..75: mol_type = other DNA
aaagcgcaatccattcaggatgtgcttgccgggctggaggagcggcgggttgcgttgatccgtcaacaggcggcg

SEQ ID NO: 190774 - DNA, 75 bp, synthetic construct
  source 1..75: mol_type = other DNA
gacagcgttatatcagtaatgctctggaagcctggcgtaataacgaggcgaacaaacctaaatcccggggtggaa

SEQ ID NO: 190775 - DNA, 75 bp, synthetic construct
  source 1..75: mol_type = other DNA
tgttgatcatgaatgggcagcataccgagtttaatcgccttctcgggcttggtaatgaattacttcagcagcgac

SEQ ID NO: 190776 - DNA, 75 bp, synthetic construct
  source 1..75: mol_type = other DNA
ggtaatgaattacttcagcagcgacaggggctggtgaatgtaccgttacggctaccacaggcaaccctggatgat

SEQ ID NO: 190777 - DNA, 75 bp, synthetic construct
  source 1..75: mol_type = other DNA
agggtgtgttgcgcggtgaggaatttaattcggtcaatgaaagtggtgaccggatcattcgtgcactggctgcag

SEQ ID NO: 190778 - DNA, 75 bp, synthetic construct
  source 1..75: mol_type = other DNA
ctcggcaaacctgagtgcgtacagcaacagtattgtggatacgcccacgtactttgcctttgcaaaaggggccgg

SEQ ID NO: 190779 - DNA, 75 bp, synthetic construct
  source 1..75: mol_type = other DNA
cagaaagagcaactggcactggcgggtcagaatacagaactggcgaagctgaagtaccagactgcgcagggagaa

SEQ ID NO: 190780 - DNA, 75 bp, synthetic construct
  source 1..75: mol_type = other DNA
ctaatgagtgataacaccgttcgtaaatatatgcgggttatcttcgaagctttcaggtgggctgatggagaaggt

SEQ ID NO: 190781 - DNA, 75 bp, synthetic construct
  source 1..75: mol_type = other DNA
gatgtctgggtgagtatcaaaaattggatagagaaaagttggtaagcagtgcgcctgctttggctggcgaaggaa

SEQ ID NO: 190782 - DNA, 75 bp, synthetic construct
  source 1..75: mol_type = other DNA
gcgataatgccgttcgtaaatatatgcgaattctcttcgaggctttccagtgggctgatggagagggcattttta

SEQ ID NO: 190783 - DNA, 75 bp, synthetic construct
  source 1..75: mol_type = other DNA
agatttgtttgattcgttaactcttggagaaagagcgtatttggcattcgctgtagccgctaataaccagctaca

SEQ ID NO: 190784 - DNA, 75 bp, synthetic construct
  source 1..75: mol_type = other DNA
gctaggtctaccggaagttgctccatttgtttgcgaagatggtgtggttgctgtagctgatgcgctacggattaa

SEQ ID NO: 190785 - DNA, 75 bp, synthetic construct
  source 1..75: mol_type = other DNA
actcggtgaaaatgagcgagttatgtgaaaaatatattcgctacaagcgcgggggaaaattcacgggaaaggcag

SEQ ID NO: 190786 - DNA, 75 bp, synthetic construct
  source 1..75: mol_type = other DNA
gaatacgtttctatatttaataatgcaacgattgcactgattacagcattacaatctttgagaattacaggcgaa

SEQ ID NO: 190787 - DNA, 75 bp, synthetic construct
  source 1..75: mol_type = other DNA
tcaattttaagctttcatgcaacaaaagtttttaacacatttgaggggggggcgataatatgtcctgatctaaaa

SEQ ID NO: 190788 - DNA, 75 bp, synthetic construct
  source 1..75: mol_type = other DNA
atccatgcgaagtcaatgaaattcaaaggattgctgataattatggactaaaagtaatatacgatgcagctcatg

SEQ ID NO: 190789 - DNA, 75 bp, synthetic construct
  source 1..75: mol_type = other DNA
acggactcgcttttctggctagtgaagcaatattgcggcgctacgctcaatgaaacatttaaatactatacgaca

SEQ ID NO: 190790 - DNA, 75 bp, synthetic construct
  source 1..75: mol_type = other DNA
attcctctggctttttcaattgctaaaaaaaccaatacctcattgttaaagctggcgattccgctgtgtaccgcg

SEQ ID NO: 190791 - DNA, 75 bp, synthetic construct
  source 1..75: mol_type = other DNA
gtcttgagttttcatgcaacaaaagtgtttaatacttttgaaggtggtgcgattatctgtcaggatgcaaaacta

SEQ ID NO: 190792 - DNA, 75 bp, synthetic construct
  source 1..75: mol_type = other DNA
atatggtcaaaattgaaggcggcgcatggctggtagagactgtgcaaatgcttaccgaacgcgctgtaccagtgt

SEQ ID NO: 190793 - DNA, 75 bp, synthetic construct
  source 1..75: mol_type = other DNA
tctggacgtggcctgcgcgcgtaagcctgaccacaaaagagaatcgctggaaaggaagatagccataacgccaca

SEQ ID NO: 190794 - DNA, 75 bp, synthetic construct
  source 1..75: mol_type = other DNA
ggtacggtgttcccgcctaacgttgaaggtggtcgttttgtctcatggctggcaagtcaggaacgtaaagcgttt

SEQ ID NO: 190795 - DNA, 75 bp, synthetic construct
  source 1..75: mol_type = other DNA
ggcaagccaggaacgtaaagcgtttcactggatggcgagccataagcctgatctggtcatcaaactcaatgttga

SEQ ID NO: 190796 - DNA, 75 bp, synthetic construct
  source 1..75: mol_type = other DNA
cacgcagattgccacggcgcgggcaagcgcagccgtgtaccgtgcgcagcaggcagtggcggcagcccgcgggac

SEQ ID NO: 190797 - DNA, 75 bp, synthetic construct
  source 1..75: mol_type = other DNA
tacgcagattgccacggcgcgggcaagtgcagccgtgtaccgtgcacagcaggcagtggcggcagcccgcgggac

SEQ ID NO: 190798 - DNA, 75 bp, synthetic construct
  source 1..75: mol_type = other DNA
aacgcagattgccacggcgcgggcaagagcagccgtgtaccgtgcccagcaggcagtggcggcagcccgcgggac

SEQ ID NO: 190799 - DNA, 75 bp, synthetic construct
  source 1..75: mol_type = other DNA
cctgaagccattatgcccctgacccgggcggcggatggctcgctgggtgtgcgagcggtgggcagtatgaacggt

SEQ ID NO: 190800 - DNA, 75 bp, synthetic construct
  source 1..75: mol_type = other DNA
atgaaaccgaccaccatctccttactgcagaagtacaaacaggaaaaaaaacgtttcgcaaccatcaccgcttac

SEQ ID NO: 190801 - DNA, 75 bp, synthetic construct
  source 1..75: mol_type = other DNA
tcacaccgccgccgtgcgtcgcggcgccccaaactgcctgctactggctgacctgccatttatggcctatgccac

SEQ ID NO: 190802 - DNA, 75 bp, synthetic construct
  source 1..75: mol_type = other DNA
cctgaccataaaagagagtccctggcgaggaaaattgccatcacgccacagttaacctttggcggcgcgcaattg

SEQ ID NO: 190803 - DNA, 75 bp, synthetic construct
  source 1..75: mol_type = other DNA
atctgcacgccagtatgccgcaaaaatcgacgaaattcgccagaaaacgtcggcaatgtcgcttcctgaagcgtc

SEQ ID NO: 190804 - DNA, 75 bp, synthetic construct
  source 1..75: mol_type = other DNA
acgtgatgaatatgcggcaatgcctgatacggtttcatcctctgcaaccaaagttgaaaacgcctttatggcctg

SEQ ID NO: 190805 - DNA, 75 bp, synthetic construct
  source 1..75: mol_type = other DNA
tgagcgcatttgaacagaacgcgctggaaggtatgctggatacgctcaagaaagatatcgccctgggcgaagagt

SEQ ID NO: 190806 - DNA, 75 bp, synthetic construct
  source 1..75: mol_type = other DNA
tgttggaagaatttcttttggaagtgttaatgcaattctgggtagcgtggcattaatactgaattgtcatcatca

SEQ ID NO: 190807 - DNA, 75 bp, synthetic construct
  source 1..75: mol_type = other DNA
gtcagagggatagatccagaggaagggcggtttaataatctacggcttattgttgaacgaaataatttatatgtg

SEQ ID NO: 190808 - DNA, 75 bp, synthetic construct
  source 1..75: mol_type = other DNA
acaacgttcactgaacggggccattctctcccccggttttatcgatgtgcagttaaacggctgcggcggcgtgca

SEQ ID NO: 190809 - DNA, 75 bp, synthetic construct
  source 1..75: mol_type = other DNA
cgaatcagcaatgtgctcccggagtatcggggagaggatggtgtcagagtggggagaatatcctttaataatata

SEQ ID NO: 190810 - DNA, 75 bp, synthetic construct
  source 1..75: mol_type = other DNA
gatctgaccaaacgcatccagaacgcgggtactgaagtggttgaagcgaaagccggtggcgggtctgcaaccctg

SEQ ID NO: 190811 - DNA, 75 bp, synthetic construct
  source 1..75: mol_type = other DNA
ctcttgcggaagcgcaacttcgggggacacagatagcaacagccagggcgcgtgcggcggtttatcgtgcgcaac

SEQ ID NO: 190812 - DNA, 75 bp, synthetic construct
  source 1..75: mol_type = other DNA
gccggggcttttgctaccggtcatcttatttctctcgccgatgagtggaattcagtaaatgcccgtctgaagcag

SEQ ID NO: 190813 - DNA, 75 bp, synthetic construct
  source 1..75: mol_type = other DNA
ccgcagctaggcaaagatttaattaaagtgctcaacgcgatggataccggcgtacaactgctcagtaaagaaaaa

SEQ ID NO: 190814 - DNA, 75 bp, synthetic construct
  source 1..75: mol_type = other DNA
atgtttttttatcgctttgctgatttttcacatgttacctttccaggtacaacagcggttacattgtctggtgac

SEQ ID NO: 190815 - DNA, 75 bp, synthetic construct
  source 1..75: mol_type = other DNA
caacgcaggtacgctccctcaactttgccctgctgatggccgcacaggatgcggagcgtcttgaaggcactgccg

SEQ ID NO: 190816 - DNA, 75 bp, synthetic construct
  source 1..75: mol_type = other DNA
aactggcacgaattgcactggtatcgctggaagcagagccggttgtgttctggtttgaaaaatatcaagaagggg

SEQ ID NO: 190817 - DNA, 75 bp, synthetic construct
  source 1..75: mol_type = other DNA
cggggattacctttgccacccatctgtacaacgcgatgccgtatattaccggtcgtgaaccgggcctggcgggcg

SEQ ID NO: 190818 - DNA, 75 bp, synthetic construct
  source 1..75: mol_type = other DNA
ccgttcgcattcagcacagaagccttcaccgccgaaaccatgcagtccatgctaccccagaacgttcagggggga

SEQ ID NO: 190819 - DNA, 75 bp, synthetic construct
  source 1..75: mol_type = other DNA
tttgcacgtgaggcactgttacaggcactgaagaccggccacaaccagatatttttgtcggccagtaagacgcaa

SEQ ID NO: 190820 - DNA, 75 bp, synthetic construct
  source 1..75: mol_type = other DNA
tcactgtcacagcagaagccttacgcttcagacagatacagagagaatttcgtcaggtactgtctgaaactgctc

SEQ ID NO: 190821 - DNA, 75 bp, synthetic construct
  source 1..75: mol_type = other DNA
tacgcaaaacggcgacagcgccggatgcgtagtggtggcaccgccagccgtgccgggcggtaagttccgcattct

SEQ ID NO: 190822 - DNA, 75 bp, synthetic construct
  source 1..75: mol_type = other DNA
acaccggagcatgtcagcagcatcatcggtgtactgacagcaaaaccatcccgtaaacgtcgtaaaaaccgtaca

SEQ ID NO: 190823 - DNA, 75 bp, synthetic construct
  source 1..75: mol_type = other DNA
tcccctatatctgtatccttgacgaagtcggtgcctactacacagaccgcattgctgtggaggccacccaggtac

SEQ ID NO: 190824 - DNA, 75 bp, synthetic construct
  source 1..75: mol_type = other DNA
tgagcgtcaccagtggaaagggatggattttgcgacacaggccgaggctatccgcgagctgaccgggaaatattg

SEQ ID NO: 190825 - DNA, 75 bp, synthetic construct
  source 1..75: mol_type = other DNA
cagcgccggatgcgtggtactggcaccgccggtggtggccggtggcaaattcagaatacttgagcgtcaccagtg

SEQ ID NO: 190826 - DNA, 75 bp, synthetic construct
  source 1..75: mol_type = other DNA
gtgatgaggactttaagaacctgtttatgtgcgagtttgtcgacgataaagcgtcggtattcccgttcgaggagc

SEQ ID NO: 190827 - DNA, 75 bp, synthetic construct
  source 1..75: mol_type = other DNA
tcccacaggacaataaccacccgacagggcgtcctgtaaactggtttcatcagaaaaaaaacaaccgtccggact

SEQ ID NO: 190828 - DNA, 75 bp, synthetic construct
  source 1..75: mol_type = other DNA
aaatcagatatcagtgagagcagaaagagcaggtataaacctgttaacgcttccacaggacaataaccacccgac

SEQ ID NO: 190829 - DNA, 75 bp, synthetic construct
  source 1..75: mol_type = other DNA
tccgcaaactgaccgagaaatacaacgtcgaatacatcggcattgacgcaaccggcctcggtctcggcgtgttcc

SEQ ID NO: 190830 - DNA, 75 bp, synthetic construct
  source 1..75: mol_type = other DNA
ggctgccgcagcggcccgggagcagcggcgcgccctggcggagctgaacagtcagctgacggagatccgcgcttc

SEQ ID NO: 190831 - DNA, 75 bp, synthetic construct
  source 1..75: mol_type = other DNA
agttgcggaatccggttcggtgatcacccagttcagccaggcactggcacagggtgtactgcgtggcgaagaatt

SEQ ID NO: 190832 - DNA, 75 bp, synthetic construct
  source 1..75: mol_type = other DNA
atatggttacagtgctgatgatgtgctgaaggtgacggaggccatttcgacaggactgaaactgtcaggggctgg

SEQ ID NO: 190833 - DNA, 75 bp, synthetic construct
  source 1..75: mol_type = other DNA
aggcagcacagcttgcgacggagggtatctcagggatggtgaataacatcacggagatgctgaacgggaataaag

SEQ ID NO: 190834 - DNA, 75 bp, synthetic construct
  source 1..75: mol_type = other DNA
cccgctcggcagcctcaatgcgtgaatatggttacagtgctgatgatgtgctgaaggtgacggaggccatttcga

SEQ ID NO: 190835 - DNA, 75 bp, synthetic construct
  source 1..75: mol_type = other DNA
accagaatcaggagcaggccagggagtctgcgcgccagtatgcactgacgattgatgaaatcgcacataaaatgc

SEQ ID NO: 190836 - DNA, 75 bp, synthetic construct
  source 1..75: mol_type = other DNA
cccgttcggctgcctcgatgcgtgaatatggttacagtgctgatgatgtgctgaaggtgacggaggccatttcca

SEQ ID NO: 190837 - DNA, 75 bp, synthetic construct
  source 1..75: mol_type = other DNA
ttccgtgaatgcccgactgaaacaggcgtcgcagtcatcggatgaattttcgtcatcacagaaagtgctgatgga

SEQ ID NO: 190838 - DNA, 75 bp, synthetic construct
  source 1..75: mol_type = other DNA
aaagagcgtgcccggctggggtatgcggcggatgaccttggttttgtgggggattcgtatcaggaggcgagacag

SEQ ID NO: 190839 - DNA, 75 bp, synthetic construct
  source 1..75: mol_type = other DNA
gacgggactaacggacagatagggccggaggcggcaggcagtcttgtgcagctgattgaccagcgggtgcaggcg

SEQ ID NO: 190840 - DNA, 75 bp, synthetic construct
  source 1..75: mol_type = other DNA
gagattcagaagcaggagctgctgcgcaatgctgccctgattgaccagaagaaaatccgggagcagttacgggcc

SEQ ID NO: 190841 - DNA, 75 bp, synthetic construct
  source 1..75: mol_type = other DNA
acagtgaggatttttacagacaggcgctggcgcagaatgcacagtatctgagtgaacgtctgaaagagcaggaag

SEQ ID NO: 190842 - DNA, 75 bp, synthetic construct
  source 1..75: mol_type = other DNA
gattgccacggcgcgggcaagggcagccgtgtaccgtgcacagcaggctgtggcggcagcccgcgggacggagat

SEQ ID NO: 190843 - DNA, 75 bp, synthetic construct
  source 1..75: mol_type = other DNA
tgaatttgtttgtctggagatttttcgaaagatacgtagttagtagctttcttataaagggaaaggagtttagtt

SEQ ID NO: 190844 - DNA, 75 bp, synthetic construct
  source 1..75: mol_type = other DNA
gcttcgcctacctggcagagctttccaaaaacacgcccagtgccgccaatatcattccctacgcgcaatacattg

SEQ ID NO: 190845 - DNA, 75 bp, synthetic construct
  source 1..75: mol_type = other DNA
ctcgacgatctcccgctcgctgaaagcactggcgaaggaactgaactgcccggtactagcgctgtcgcagcttaa

SEQ ID NO: 190846 - DNA, 75 bp, synthetic construct
  source 1..75: mol_type = other DNA
gagtacccggaagtgctgaatgtcgacaacaaaggcttgcgcgatcatatcgaactggcgacccgctggctgtgg

SEQ ID NO: 190847 - DNA, 75 bp, synthetic construct
  source 1..75: mol_type = other DNA
aaaccgctgccgctgaaagtggtttatcacactccgtgccatatggaaaaaatgggctggacgctctacaccctg

SEQ ID NO: 190848 - DNA, 75 bp, synthetic construct
  source 1..75: mol_type = other DNA
cgaactggcaacccgctggctgtggcgcaagctggacgaaggaaaaaccttgccactgaagccactgccgctaaa

SEQ ID NO: 190849 - DNA, 75 bp, synthetic construct
  source 1..75: mol_type = other DNA
ggtactttggcaatatggcctccggagcgatgtctgccacggcaggacttgtgacggctgcacgtaatgaagttg

SEQ ID NO: 190850 - DNA, 75 bp, synthetic construct
  source 1..75: mol_type = other DNA
gaacaaaataaagcgtatcagtccctgttgatcatgaatggtcagtacactgagtttaatcaccttctcgggctt

SEQ ID NO: 190851 - DNA, 75 bp, synthetic construct
  source 1..75: mol_type = other DNA
cccgctctgcagcttccatgcgggagtatggctacagttctgaggaggtactgaaagtcaccgaggcgatctcca

SEQ ID NO: 190852 - DNA, 75 bp, synthetic construct
  source 1..75: mol_type = other DNA
cagattggcatcagtgccagcatcctgatgaacgaatggaaagatcgcctgctgctcgacgattccgggatcctc

SEQ ID NO: 190853 - DNA, 75 bp, synthetic construct
  source 1..75: mol_type = other DNA
acctcggttttgtgggtgatccgtatcaggaggcgagacagcgttatatcagtaatgccctggaagcctggcgca

SEQ ID NO: 190854 - DNA, 75 bp, synthetic construct
  source 1..75: mol_type = other DNA
gaagctgcgggcagccttgtgcagctgattgaccagcgggtgcaggcggtgatgctgtccatgcgacgtgacgga

SEQ ID NO: 190855 - DNA, 75 bp, synthetic construct
  source 1..75: mol_type = other DNA
gacaatgttttctgcaatgacgtttgatccacgcttgtcgtgggatcgtcaacctgaatcagtgcatgaggagtc

SEQ ID NO: 190856 - DNA, 75 bp, synthetic construct
  source 1..75: mol_type = other DNA
cgtcctgaagcgtctggagcaggcggtgctacgcggccaccgtatagtggtctcggccatcacctactctgaaat

SEQ ID NO: 190857 - DNA, 75 bp, synthetic construct
  source 1..75: mol_type = other DNA
caaccacggaggttaaggtggcgctgcgcctcgccggcacaccgatcggtccaaacgacacggcgatcgccgggc

SEQ ID NO: 190858 - DNA, 75 bp, synthetic construct
  source 1..75: mol_type = other DNA
atgtaatccgtaatcagttagcaaaaacaggaataaccgagattttaggttatgacggtttaacagaagtagcta

SEQ ID NO: 190859 - DNA, 75 bp, synthetic construct
  source 1..75: mol_type = other DNA
gctttctttgttggatataaaagttacttcaatttaataaatggtattcctttaattatttctacaggacagtag

SEQ ID NO: 190860 - DNA, 75 bp, synthetic construct
  source 1..75: mol_type = other DNA
ccctggtgtttattttgtgtcctgcaactgcgcgcttttcagtgcgttgatcgtcgctggttatgggacgatatc

SEQ ID NO: 190861 - DNA, 75 bp, synthetic construct
  source 1..75: mol_type = other DNA
acgccatcgccgccggggcaatactggtgacgaataatatgcgggaatttgagcgggtgccgggactggtactcg

SEQ ID NO: 190862 - DNA, 75 bp, synthetic construct
  source 1..75: mol_type = other DNA
cgagcagccggaagcggtgctgacgcgcctggagcaggcagtactgcgcggccatcgtatcgtgatctcggccat

SEQ ID NO: 190863 - DNA, 75 bp, synthetic construct
  source 1..75: mol_type = other DNA
atgctatagctgcaggggccattctggtgaccaataatacgcgagagtttgagcgggtgcctgacctggtgctag

SEQ ID NO: 190864 - DNA, 75 bp, synthetic construct
  source 1..75: mol_type = other DNA
cgcctggagctggcggtgctgcgcggccagcgcatcgttgtctcggccatcacttattctgaaatgcgcttcggg

SEQ ID NO: 190865 - DNA, 75 bp, synthetic construct
  source 1..75: mol_type = other DNA
caaccacggaggttaaggtggcgctgcgcctcgccagcacgccgatcggtccaaacgacacggcgatcgccgggc

SEQ ID NO: 190866 - DNA, 75 bp, synthetic construct
  source 1..75: mol_type = other DNA
cagcggacgggaggcactggatgacctggtacgtccgttttatctgctggaggggcgcaacgttcctgacttccg

SEQ ID NO: 190867 - DNA, 75 bp, synthetic construct
  source 1..75: mol_type = other DNA
acgataaccctgctgctgtgtatagccgactttcatcactgatcaaggaatcaaaggtaggtacaacgcttgatt

SEQ ID NO: 190868 - DNA, 75 bp, synthetic construct
  source 1..75: mol_type = other DNA
tgcagcatcgctccgtcgtccggaacgcctaaaacaacaaacccgcaaaaaacggcatcagcgttggacagaggt

SEQ ID NO: 190869 - DNA, 75 bp, synthetic construct
  source 1..75: mol_type = other DNA
tctggcgcttgtcgcggtcttcacgggtggcctctccacctacaagaaggggtggatcgcgctcaagaaccgtaa

SEQ ID NO: 190870 - DNA, 75 bp, synthetic construct
  source 1..75: mol_type = other DNA
tattgatgcttctcatgctgaaggcaaatggactggcatgtgtggtgagcttgctggcgatgaacgtgctacact

SEQ ID NO: 190871 - DNA, 75 bp, synthetic construct
  source 1..75: mol_type = other DNA
ggaacaacaacttcaggttctcttgctgccaaaagatcctgatgacgaacgcaacgccttcctcgaagtgcgtgc

SEQ ID NO: 190872 - DNA, 75 bp, synthetic construct
  source 1..75: mol_type = other DNA
agctaaagcgctttcagtgctgggggcacgtattcatgcggcagaaatggcgaaacgccagcaggcggaagcatc

SEQ ID NO: 190873 - DNA, 75 bp, synthetic construct
  source 1..75: mol_type = other DNA
atggttattttttgtcgacatagacaatttgctccagcaaggttgtcttgatagcctgcattcaatgattttgtc

SEQ ID NO: 190874 - DNA, 75 bp, synthetic construct
  source 1..75: mol_type = other DNA
atgatggcgctggcagatattgaaaaaccagagattctgccgggggaaaatatccttgccgtgaaagagccacgc

SEQ ID NO: 190875 - DNA, 75 bp, synthetic construct
  source 1..75: mol_type = other DNA
cgcttttttaagaaaagcgtagaaatgaagctgaatcatatcatggtgggtgctacgggtagcggtaaaaccacc

SEQ ID NO: 190876 - DNA, 75 bp, synthetic construct
  source 1..75: mol_type = other DNA
cgcttatcttctttgattaaagagtctaaagttggttccactctggattacagccttattactaatactgtagcc

SEQ ID NO: 190877 - DNA, 75 bp, synthetic construct
  source 1..75: mol_type = other DNA
gcagagcttgctaaactgaaagatctgccagctattacgctggacggtcaccaggtagaagtgtgcgctaacatc

SEQ ID NO: 190878 - DNA, 75 bp, synthetic construct
  source 1..75: mol_type = other DNA
aaggtcaggcttctgccctggaagaactggatgatgaatacctgaaagagcgtgcggctgacgtgcgtgatatcg

SEQ ID NO: 190879 - DNA, 75 bp, synthetic construct
  source 1..75: mol_type = other DNA
aatcaagttaggtcgtatgtcccgatggcgtgctggtgactactatgcttggcgtgatagtcattcttcagagta

SEQ ID NO: 190880 - DNA, 75 bp, synthetic construct
  source 1..75: mol_type = other DNA
aattgccggaatacactatcgagcagatagaaagaattatttacaataaaaatacaaccattgaagaatatgctg

SEQ ID NO: 190881 - DNA, 75 bp, synthetic construct
  source 1..75: mol_type = other DNA
cgtttctgttgagttttactggtgtggcaatggcgcaaagtgtcaccgttgatgtgccgagcggatacaaagtgg

SEQ ID NO: 190882 - DNA, 75 bp, synthetic construct
  source 1..75: mol_type = other DNA
ggaaaagctgatgtggttgcgggaacagatgcaacagacaagccagtgctggacactgaaagagctggcaaaaaa

SEQ ID NO: 190883 - DNA, 75 bp, synthetic construct
  source 1..75: mol_type = other DNA
ttgatgaggggctgaaaggccagcttgcctgcgacagcaagatttccgccatcaaatataaaaagtatcttgatg

SEQ ID NO: 190884 - DNA, 75 bp, synthetic construct
  source 1..75: mol_type = other DNA
caatgcaggaatatgagctgcaagtggttgctgctcaggatcgtattgccaaaccagaacattatttcagcgcaa

SEQ ID NO: 190885 - DNA, 75 bp, synthetic construct
  source 1..75: mol_type = other DNA
aaaatacaaccattgaagaatatgttgtttcagttattcttgaaaaagccgatcaggatttccgtcgaattgtaa

SEQ ID NO: 190886 - DNA, 75 bp, synthetic construct
  source 1..75: mol_type = other DNA
caatcgaggtctctgggacaggtaggcagctctcctgtgagtctggggctgaaggcttcttatgctctgaccggt

SEQ ID NO: 190887 - DNA, 75 bp, synthetic construct
  source 1..75: mol_type = other DNA
aaagagctgatgataaccgccgcattgccgggcagtggcgaatggggaactcagcgtgaagcgctggcattcgaa

SEQ ID NO: 190888 - DNA, 75 bp, synthetic construct
  source 1..75: mol_type = other DNA
gcggcggcgctgggggatatcggcaagctgttcccggataccgatccggcatttaaaggtgccgacagccgcgag

SEQ ID NO: 190889 - DNA, 75 bp, synthetic construct
  source 1..75: mol_type = other DNA
ctgaacagcaagatcagactgctgaggataaaggccaggggataccgaaaccgggaacgctttaaactgggagtt

SEQ ID NO: 190890 - DNA, 75 bp, synthetic construct
  source 1..75: mol_type = other DNA
tctgggagccgacgattatctgtgtaaaccttttgcgttgatagaagttgccgccagactggaagctctgatgcg

SEQ ID NO: 190891 - DNA, 75 bp, synthetic construct
  source 1..75: mol_type = other DNA
caccgttctggctggctgctctggcgtctgtgcatttatatcctgctgggttggggtatctggcgtatcgcgcat

SEQ ID NO: 190892 - DNA, 75 bp, synthetic construct
  source 1..75: mol_type = other DNA
accgactgcatccactgaaaaagttcggtctgctgattgattatcgcggtattctgatcttacccagcaatagtg

SEQ ID NO: 190893 - DNA, 75 bp, synthetic construct
  source 1..75: mol_type = other DNA
tgggttaagcgaagcgcaaaaagccgaccttaagcgtaaatatgcccgtaaaggtgaggtctacagtgcagatga

SEQ ID NO: 190894 - DNA, 75 bp, synthetic construct
  source 1..75: mol_type = other DNA
ctaatatctgctcattcatcatgcgtgagcagccggaggccgtgatcagacgcttagagcaagcggtgctgcgca

SEQ ID NO: 190895 - DNA, 75 bp, synthetic construct
  source 1..75: mol_type = other DNA
tttttctttacgggtttgaagactgcgtgactgattccgttcgtcgcatggataaaccggaagaagcgaaaagga

SEQ ID NO: 190896 - DNA, 75 bp, synthetic construct
  source 1..75: mol_type = other DNA
cgcaccgcgctgcagaacgccgcgtcgatcgcgggcctgatgatcaccaccgaagcgatggtggccgaggccccg

SEQ ID NO: 190897 - DNA, 75 bp, synthetic construct
  source 1..75: mol_type = other DNA
tgggttaagcgaagcgcaaaaagccgaccttaagcgtaaatatgcccgtaagggtgaggtttatagtgcagatga

SEQ ID NO: 190898 - DNA, 75 bp, synthetic construct
  source 1..75: mol_type = other DNA
ggtactggtgcctaaaatggaagaacgtgacggagagatggtcgatatccatcagaaaacccgtgatgatttctt

SEQ ID NO: 190899 - DNA, 75 bp, synthetic construct
  source 1..75: mol_type = other DNA
cttatccaggcgattgcgcgggtgaaccgactgcatccactgaaaaagttcggtctgctgattgattatcgcggt

SEQ ID NO: 190900 - DNA, 75 bp, synthetic construct
  source 1..75: mol_type = other DNA
cgatgatcaggttcaggataaatggacgaagctggctttcgaagtggacactattattgtcaaagcggtttcgga

SEQ ID NO: 190901 - DNA, 75 bp, synthetic construct
  source 1..75: mol_type = other DNA
atgcctggtttgaccgcattaccgatggtctgagcgatgcgcaaaaggctgacctcaagcgtaagtatgctcgta

SEQ ID NO: 190902 - DNA, 75 bp, synthetic construct
  source 1..75: mol_type = other DNA
agcaggtgaaaaaactgctggataagcatgtcaccggcgttgaggttcgtgaaccggatggcgtgtatgaagtcg

SEQ ID NO: 190903 - DNA, 75 bp, synthetic construct
  source 1..75: mol_type = other DNA
gggattaaagcgctgctggaagtggcaaatcgcgatgcgcaaaaactcgccgccagcgatttaggttttgcgctg

SEQ ID NO: 190904 - DNA, 75 bp, synthetic construct
  source 1..75: mol_type = other DNA
catgcccgtggcgcgcagttaattgtcacggtggataacggtatttcctcccatgcgggggttgaacacgctcgc

SEQ ID NO: 190905 - DNA, 75 bp, synthetic construct
  source 1..75: mol_type = other DNA
agggctggtttgatgagcgcggcatcgcaattcctaatctggcagaactgctggatctggtcgcgttggggacag

SEQ ID NO: 190906 - DNA, 75 bp, synthetic construct
  source 1..75: mol_type = other DNA
ggagttgatgagcatcattctgcaaaaccggttttgcagcagtttacgccaactacgcttgtggatatgcccacc

SEQ ID NO: 190907 - DNA, 75 bp, synthetic construct
  source 1..75: mol_type = other DNA
ggcggcccgctgctggacggcattgcctttaacgttgataccgccctttggccggataacggcgtgcgcgaagtg

SEQ ID NO: 190908 - DNA, 75 bp, synthetic construct
  source 1..75: mol_type = other DNA
gagccaccagcacagcccttagcgtgctggcgatgcgttctctcggctgtgacaacatcgactatctggtgccaa

SEQ ID NO: 190909 - DNA, 75 bp, synthetic construct
  source 1..75: mol_type = other DNA
ggacgatctgcgggtggatgaaaaagattcagcttataccttaccagccgcagcagcagagtttgactccctggc

SEQ ID NO: 190910 - DNA, 75 bp, synthetic construct
  source 1..75: mol_type = other DNA
ataggcactgcacatggcttgtatgcgaatgaaccacgtctggattttgcccggctggaacaaattcgtcagtta

SEQ ID NO: 190911 - DNA, 75 bp, synthetic construct
  source 1..75: mol_type = other DNA
ctacacttctcgccctgcgtcagcggccggagattttacgccagattgaccgtcttccctggctgcgctttgaac

SEQ ID NO: 190912 - DNA, 75 bp, synthetic construct
  source 1..75: mol_type = other DNA
tccgtcggtgtggcgctgttgctgtgcgacaacatcggcgaagcgcgcgtgctggcaaatgaactcgatgcgcta

SEQ ID NO: 190913 - DNA, 75 bp, synthetic construct
  source 1..75: mol_type = other DNA
cgtgactgattccgttcggtgcatggataaaccggaagaagcgaaaaagaatatcacccgtcttgccgaccgtaa

SEQ ID NO: 190914 - DNA, 75 bp, synthetic construct
  source 1..75: mol_type = other DNA
gaaatcaccctggacaatgtactggcaacattccgccatcttaataccagcaagatgcagacgtttgaacaggga

SEQ ID NO: 190915 - DNA, 75 bp, synthetic construct
  source 1..75: mol_type = other DNA
tttgtggctggattacctggacgcactggaactggtggatacctccagtgctccagatattgaatggcctacacc

SEQ ID NO: 190916 - DNA, 75 bp, synthetic construct
  source 1..75: mol_type = other DNA
aacaactttgggccggagcgattgacactgtcggcgacaaggtgctggcaaaagtgctggcacaaatgaattacg

SEQ ID NO: 190917 - DNA, 75 bp, synthetic construct
  source 1..75: mol_type = other DNA
tccactggtcgagtctgaattataaagatgcgctggcgattaccggtaaaggaaaaatcatccgtaattttccga

SEQ ID NO: 190918 - DNA, 75 bp, synthetic construct
  source 1..75: mol_type = other DNA
cgttttcatgccggtcaggacgtgttgctcactggctggggcgttggtgaaaaccactggggtgggctggcggaa

SEQ ID NO: 190919 - DNA, 75 bp, synthetic construct
  source 1..75: mol_type = other DNA
taaccaccgtcggcgctgccgagagaactttaaccccacaacaacagcgtatgacctcctgtaatcagcaggcga

SEQ ID NO: 190920 - DNA, 75 bp, synthetic construct
  source 1..75: mol_type = other DNA
ggagatctgcgaagcgcaatcaccttctcggaaaccctcgcgaaatttcgcagtcgcgacggcactgttgcaaag

SEQ ID NO: 190921 - DNA, 75 bp, synthetic construct
  source 1..75: mol_type = other DNA
gaaccttcaaaagctgaagtcgggcactgttgcaaagttagcgatgaggcagccttttgtcttattcaaaggcct

SEQ ID NO: 190922 - DNA, 75 bp, synthetic construct
  source 1..75: mol_type = other DNA
atcgcccgccccacgctggaagctcatgattatgatcgtgaggcactatggagcaaatgggataaagccagcgat

SEQ ID NO: 190923 - DNA, 75 bp, synthetic construct
  source 1..75: mol_type = other DNA
caaaatgtgttggttaaacacctggcgcgagctggctacagccgtgaccgttttgaaatgctgctggtcaccgcc

SEQ ID NO: 190924 - DNA, 75 bp, synthetic construct
  source 1..75: mol_type = other DNA
accagtttgtcgattgttggcgagatgacgttaactatcgaccattgtttgttggtctccggcacgactgattta

SEQ ID NO: 190925 - DNA, 75 bp, synthetic construct
  source 1..75: mol_type = other DNA
tattcatccgcaggatggcgaaattgtcgttacgggcgccagcggcggcgtcggcagtacggccgtagcactgtt

SEQ ID NO: 190926 - DNA, 75 bp, synthetic construct
  source 1..75: mol_type = other DNA
cagccgtattctgccgcgcgatgagtttgctgaatcccgtcccctggaaaaacaactctgggcaggcgcaattga

SEQ ID NO: 190927 - DNA, 75 bp, synthetic construct
  source 1..75: mol_type = other DNA
cgccttgcgacggagcggggtcgctgccgaccggctcatcctcgatccggggatgggatttttcttgagccccgc

SEQ ID NO: 190928 - DNA, 75 bp, synthetic construct
  source 1..75: mol_type = other DNA
ggcagcaaaaaatcgctaccgacttcatcgctgattttgccgaaggcaggatggtgtctctcggcgagtttggcg

SEQ ID NO: 190929 - DNA, 75 bp, synthetic construct
  source 1..75: mol_type = other DNA
ctctttgcctcaggaggttcgtgatgttacatcccgcctgagtgcggactacttaatccatgatttgcagacggg

SEQ ID NO: 190930 - DNA, 75 bp, synthetic construct
  source 1..75: mol_type = other DNA
tcgctgattttgccgaaggcaggatggtgtctctcggcgagtttggcgaccagtggctcccccagcagtcgctgc

SEQ ID NO: 190931 - DNA, 75 bp, synthetic construct
  source 1..75: mol_type = other DNA
gggccgattttccggtgctctcgcgagaggtgaatggtctgcctctggcttatctcgacagtgccgccagcgccc

SEQ ID NO: 190932 - DNA, 75 bp, synthetic construct
  source 1..75: mol_type = other DNA
ttaatccatgatttgcagacgggccacttcgtgacagtactgcgttttatttcgccactgatggttcgtcttggc

SEQ ID NO: 190933 - DNA, 75 bp, synthetic construct
  source 1..75: mol_type = other DNA
tactgaaagcccgtcgcgggctgagcgccagtgacctgattaatcttaatgccgaccgcctgcaatgcctgctga

SEQ ID NO: 190934 - DNA, 75 bp, synthetic construct
  source 1..75: mol_type = other DNA
cattatacagatgttggcttcgcaatagttctgtataccggtgatgatgctggcaatacggaagcagaggctggg

SEQ ID NO: 190935 - DNA, 75 bp, synthetic construct
  source 1..75: mol_type = other DNA
atttacaaataattgaagagttacaaaaactgaaggacaggttacggagcgaggttctccctgcatatgactcgc

SEQ ID NO: 190936 - DNA, 75 bp, synthetic construct
  source 1..75: mol_type = other DNA
acctgtcctgaaatcaccctggacaatgtactggcaacattccgccatctgaatgccagcaagatgcagacattt

SEQ ID NO: 190937 - DNA, 75 bp, synthetic construct
  source 1..75: mol_type = other DNA
catttatggcttatggttattgtatgcctctggtccaatgcacttgctgttatccgttgttctgtatgcgccggg

SEQ ID NO: 190938 - DNA, 75 bp, synthetic construct
  source 1..75: mol_type = other DNA
aggaatacatcacaatttaccgtccttttattacggtcaaaggtaaacggatctttgctcgtcaaaaaggcttgg

SEQ ID NO: 190939 - DNA, 75 bp, synthetic construct
  source 1..75: mol_type = other DNA
ccaggcggcaaaagagatatctctggcagaggcaccgaagtttgccgaggccatcattaataaccagatccaggg

SEQ ID NO: 190940 - DNA, 75 bp, synthetic construct
  source 1..75: mol_type = other DNA
gcatggcgcaaaagtgctggtggatggcgctcaggcagtgatgcatcatccggtggatgtgcaggcgctggattg

SEQ ID NO: 190941 - DNA, 75 bp, synthetic construct
  source 1..75: mol_type = other DNA
ggacgaagaagctatggtcaagggccgactcaataaagtatctgtaggtacttcgggccagatgatcatcgatga

SEQ ID NO: 190942 - DNA, 75 bp, synthetic construct
  source 1..75: mol_type = other DNA
gtattgcactgttcatgcaggcgatggaatgcctggcgacagcgcgcaggattctgcttgatgcgtcaggtgata

SEQ ID NO: 190943 - DNA, 75 bp, synthetic construct
  source 1..75: mol_type = other DNA
ggaattcccgtcaggaaaactagcaaccttagagtgggggagtgcatttaactggccggaacattatgtcatcat

SEQ ID NO: 190944 - DNA, 75 bp, synthetic construct
  source 1..75: mol_type = other DNA
atgataaggcaggttatccagcgaataagcaaccctgaagcaagtatcgagagcttgcaggaacggcgtttttgg

SEQ ID NO: 190945 - DNA, 75 bp, synthetic construct
  source 1..75: mol_type = other DNA
cgtgactgactccgttcgatgcatggataaaccggaagaagcgaaaaggaatatcacccgtcttgccgaccggaa

SEQ ID NO: 190946 - DNA, 75 bp, synthetic construct
  source 1..75: mol_type = other DNA
cgactcaataaagtatctgtaggtacttcgggccagatgatcatcgatgatgctttaactggcactgttgcaaat

SEQ ID NO: 190947 - DNA, 75 bp, synthetic construct
  source 1..75: mol_type = other DNA
gtatgtttcggcgctggggcttaacaacattgccgagtatgaacaaaatctgatgcattacgcattgtcgcagtt

SEQ ID NO: 190948 - DNA, 75 bp, synthetic construct
  source 1..75: mol_type = other DNA
gggggcggttctatgatcgccaccgtcagcctgagtgaaggcactacctggaccaaagcgccgtggcggtttgaa

SEQ ID NO: 190949 - DNA, 75 bp, synthetic construct
  source 1..75: mol_type = other DNA
gcgatttttacgtgttttccgggcataaactgtatggccccaccgggattggcattctttatgtcaaagaagcct

SEQ ID NO: 190950 - DNA, 75 bp, synthetic construct
  source 1..75: mol_type = other DNA
agagtttgcgtcaggaaaaattgcgacattagaatggggaagtgcttttaactggccagaacattatgtaattat

SEQ ID NO: 190951 - DNA, 75 bp, synthetic construct
  source 1..75: mol_type = other DNA
catgagttagattgtgttcagcatttacttggagaaataccagagacggttactatgattggtggaaatttggcc

SEQ ID NO: 190952 - DNA, 75 bp, synthetic construct
  source 1..75: mol_type = other DNA
gaatttctcgggaacggcgataatgtcggtgagttgtttgaaggggaatattttacggtgcgtggctaccagaaa

SEQ ID NO: 190953 - DNA, 75 bp, synthetic construct
  source 1..75: mol_type = other DNA
ttgtggcgaccgccgaaacataaccggacggtgagggtggtgtgccgggagtggagcgtcacggataacgtccgg

SEQ ID NO: 190954 - DNA, 75 bp, synthetic construct
  source 1..75: mol_type = other DNA
aagcgggcgtcgatgattttctcgccgaagcgacaccggaggccaagctggcattgatccgtcagtatcaggcgg

SEQ ID NO: 190955 - DNA, 75 bp, synthetic construct
  source 1..75: mol_type = other DNA
caaagcaggaacaccagcctatgaaagagcgctaaataacgctgcgaatgccatcagaccgctgtttgccactga

SEQ ID NO: 190956 - DNA, 75 bp, synthetic construct
  source 1..75: mol_type = other DNA
acacatgcaactcaaacgcgccttaaaaacgttctaaacaaaggagatttaactcccgaggctgtaaataccatt

SEQ ID NO: 190957 - DNA, 75 bp, synthetic construct
  source 1..75: mol_type = other DNA
acgaatctgtagatgccacccgttgtcagggtaaaggcggctgccagggcggggataaatgcctgacccacgcgc

SEQ ID NO: 190958 - DNA, 75 bp, synthetic construct
  source 1..75: mol_type = other DNA
ctgactggctggtgattgagtgtagcgttaaccccggtgagacatttctggatcggatgatcgcgatggtggaag

SEQ ID NO: 190959 - DNA, 75 bp, synthetic construct
  source 1..75: mol_type = other DNA
gtactgttcgctaatttcgccgaggcgctggcagaaggccgcagtaaagcgcaggccaacagtcttaaaggggtg

SEQ ID NO: 190960 - DNA, 75 bp, synthetic construct
  source 1..75: mol_type = other DNA
gctgcagatgaccatgctgcagtagtgacagcagacggagaatgcttacaggaaacgcaggtgttgattgataat

SEQ ID NO: 190961 - DNA, 75 bp, synthetic construct
  source 1..75: mol_type = other DNA
ttcccggtaacagcaatgccagcagtgctgagacaaccgccccggaagccgcacgtcagccggaacacctgccgg

SEQ ID NO: 190962 - DNA, 75 bp, synthetic construct
  source 1..75: mol_type = other DNA
gcgtgatcccgaccaaaggggcgattattccggcggcggtgggcgtggatatcggctgtggaatgaacgcgctgc

SEQ ID NO: 190963 - DNA, 75 bp, synthetic construct
  source 1..75: mol_type = other DNA
cttctggtacgcaccacgcgcaagttatcgctcacccatgccggcgagttattctatcgaaacgtcgaatctgga

SEQ ID NO: 190964 - DNA, 75 bp, synthetic construct
  source 1..75: mol_type = other DNA
atggctttaggttataagtgcagccttttaactgatgtttattattttgtatatacatctcttatactttttgcg

SEQ ID NO: 190965 - DNA, 75 bp, synthetic construct
  source 1..75: mol_type = other DNA
gtgaatttgttgaatggctcagacatggactggattcgggagatatcccggtgaatcagcctgatgccagagttc

SEQ ID NO: 190966 - DNA, 75 bp, synthetic construct
  source 1..75: mol_type = other DNA
gcaacggcagtgggtctccgttgcagtgctgatactcttcttcgcagggttatcaataccccggagacgaaacag

SEQ ID NO: 190967 - DNA, 75 bp, synthetic construct
  source 1..75: mol_type = other DNA
gctgtgcggaaatttgcatccatttccacttctgtgcggcataacttctccggctctctggatacggcagaagat

SEQ ID NO: 190968 - DNA, 75 bp, synthetic construct
  source 1..75: mol_type = other DNA
gcgctgaaagccgcgacgggtgtcgatgcgctcactcatgctattgaggggtatattacccgtggcgcgtgggcg

SEQ ID NO: 190969 - DNA, 75 bp, synthetic construct
  source 1..75: mol_type = other DNA
ggttggtgcatggtatggcgcatccactgggcgcgttttataacactccacacggtgttgcgaacgccatcctgt

SEQ ID NO: 190970 - DNA, 75 bp, synthetic construct
  source 1..75: mol_type = other DNA
cctcttgctgtatggcataactattctgccgggccggatactgccgaagattattatgcaacatactcaccatta

SEQ ID NO: 190971 - DNA, 75 bp, synthetic construct
  source 1..75: mol_type = other DNA
tcttcgcagggttatcaataccccggagacgaaacagtcaggcgcgcctcatgtcggtattgatgagtgggcgtg

SEQ ID NO: 190972 - DNA, 75 bp, synthetic construct
  source 1..75: mol_type = other DNA
tgaacaataaccagggtcgtttcgtatttccggatacctggtttggcccattactgggggagtttgaagaagtgc

SEQ ID NO: 190973 - DNA, 75 bp, synthetic construct
  source 1..75: mol_type = other DNA
cttttattttccgtccgccactggtactgccgtaacccggcttgttcacgtaaaatttttgccgagtcgcttgct

SEQ ID NO: 190974 - DNA, 75 bp, synthetic construct
  source 1..75: mol_type = other DNA
ccacttgctgtgcggcataacttctccggctctctggatacggcagaagattactatgcaacatactcaccatta

SEQ ID NO: 190975 - DNA, 75 bp, synthetic construct
  source 1..75: mol_type = other DNA
gtatggatgaatttagtattgctcgctggtctggacgtaagcttatttctcaaaatgtttcttatgaccacagat

SEQ ID NO: 190976 - DNA, 75 bp, synthetic construct
  source 1..75: mol_type = other DNA
tggcgctcgggcagtatgttgcggggatgggcttctccaacgttgggttagggctggtgcatggtatggcgcatc

SEQ ID NO: 190977 - DNA, 75 bp, synthetic construct
  source 1..75: mol_type = other DNA
taccgcatgtcatgcgctataacgctgactttaccggtgagaagtaccgcgatatcgcgcgcgttatgggcgtga

SEQ ID NO: 190978 - DNA, 75 bp, synthetic construct
  source 1..75: mol_type = other DNA
ataccacccgttatgggggcaatatccggaagcattgctgtttgtaagctggctctataatcattcctctgtgct

SEQ ID NO: 190979 - DNA, 75 bp, synthetic construct
  source 1..75: mol_type = other DNA
ctgactggctcgatgtaacagaaaacgctttattcaaccgccttcgtgcagatggcgatcagattttcccgctgg

SEQ ID NO: 190980 - DNA, 75 bp, synthetic construct
  source 1..75: mol_type = other DNA
gtggagccacacgagcagacagcaattaatgatgaattgtatctgtcaatttcgaagctccaggagcatgcggca

SEQ ID NO: 190981 - DNA, 75 bp, synthetic construct
  source 1..75: mol_type = other DNA
ccggcaccatcacactcggtaaccgtcaggcgtcggagtttatccccgcgcagggcgtggatgaaaaaacgctgg

SEQ ID NO: 190982 - DNA, 75 bp, synthetic construct
  source 1..75: mol_type = other DNA
ctgagtggctagatgtaacagagaacgctttattcaaccgccttcgtgcagatggcgatcagattttcccgctgg

SEQ ID NO: 190983 - DNA, 75 bp, synthetic construct
  source 1..75: mol_type = other DNA
gtgggtaagcatcactggaaaatagaaaaacagcctgagtggtacgtgaaagctgtcagaaaaacgatcgcggcg

SEQ ID NO: 190984 - DNA, 75 bp, synthetic construct
  source 1..75: mol_type = other DNA
ttcgaagctgcaggagcatgcagcacttgtctacaaaattttttgcatttcagaaagtaatgacgcccgcgagtg

SEQ ID NO: 190985 - DNA, 75 bp, synthetic construct
  source 1..75: mol_type = other DNA
ttgttataacgactcaatggcggcaggcgcgatgggcgtgctcaatgacaatgggattgatgtaccgggtgaaat

SEQ ID NO: 190986 - DNA, 75 bp, synthetic construct
  source 1..75: mol_type = other DNA
gaattccgcggtcagggtaaaaaagctgaacagtgggcaactggtctgaagtatgacgcgaacaacatctacctg

SEQ ID NO: 190987 - DNA, 75 bp, synthetic construct
  source 1..75: mol_type = other DNA
ccgtaccaacctgcaagaagctcaacctaacctcttggcaacggtaaaaaagctgaacagtgggctactggtctg

SEQ ID NO: 190988 - DNA, 75 bp, synthetic construct
  source 1..75: mol_type = other DNA
gtggtcacttccctgccgacgtcgatcaaaaagtcgatcaagtagcacgcctgggggcaacaccgctggtcgtgg

SEQ ID NO: 190989 - DNA, 75 bp, synthetic construct
  source 1..75: mol_type = other DNA
atcccggatgccgatttagcctcattgatgaaacaaatgcctggcatggtattgatcaaccgcatcctccccggc

SEQ ID NO: 190990 - DNA, 75 bp, synthetic construct
  source 1..75: mol_type = other DNA
atggtattgatgtaccgggtgagatttcattgattggctttgatgatgtgctggtatcgcgctatgttcgtccgc

SEQ ID NO: 190991 - DNA, 75 bp, synthetic construct
  source 1..75: mol_type = other DNA
cactgttatttcgtgttttttgtgcgccggaaaatagtaacgcccgcgagtgtgcagctccgggcgtcgtggcgt

SEQ ID NO: 190992 - DNA, 75 bp, synthetic construct
  source 1..75: mol_type = other DNA
caaaggtgaccgctaccacaacacgaaaaatggcatcaacgccgacatcggcgccagcatggacctggatgacaa

SEQ ID NO: 190993 - DNA, 75 bp, synthetic construct
  source 1..75: mol_type = other DNA
attttcctttaattcaactgcagcaacttcatattttgaagcccgcaatgatgcaatgggtggaaccggggtggc

SEQ ID NO: 190994 - DNA, 75 bp, synthetic construct
  source 1..75: mol_type = other DNA
cgcggcactgatcactgatgtgggtattgctctggctacggaactggaaacggccgggcagaaatggtctctggg

SEQ ID NO: 190995 - DNA, 75 bp, synthetic construct
  source 1..75: mol_type = other DNA
ttgcggcactgccgaatgacacgctgccagttgccctgatggtgaaatcctacggtacggtcagcgttgacggca

SEQ ID NO: 190996 - DNA, 75 bp, synthetic construct
  source 1..75: mol_type = other DNA
acatgttcactacagcactggatgttgacctgaccccagccagtggcttcacatcagacagtaaacgtcagtttg

SEQ ID NO: 190997 - DNA, 75 bp, synthetic construct
  source 1..75: mol_type = other DNA
ctggaaatgggcacagctgcgcgccggttaccgtcagaatctggccggtaacgacggcagtggcattcacggccg

SEQ ID NO: 190998 - DNA, 75 bp, synthetic construct
  source 1..75: mol_type = other DNA
aagcgggtgtcgatgattttctcgccgaagcaacaccggaggccaagctggcattgattcgtcagtatcaggcag

SEQ ID NO: 190999 - DNA, 75 bp, synthetic construct
  source 1..75: mol_type = other DNA
attgccctgactatcgtctttttactggcaaccgccacgctgtggccgttttccgcgtggggcggcaacgcggtc

SEQ ID NO: 191000 - DNA, 75 bp, synthetic construct
  source 1..75: mol_type = other DNA
acgctgcttttccgtgtgttttgtgcgccggaaaaaggtgacgcccgcgagtgtgcagctccgggcgtcgtggca

SEQ ID NO: 191001 - DNA, 75 bp, synthetic construct
  source 1..75: mol_type = other DNA
acctcatattctgaagcccgtaatgatgcaatgggcggaaccggcgtcgcctcctctcactatggcgtggcaccg

SEQ ID NO: 191002 - DNA, 75 bp, synthetic construct
  source 1..75: mol_type = other DNA
gtttccttttgtgaatatgaacgttgcgggagtcaccagtgaaattacattactggaaattcccggcgtgctttt

SEQ ID NO: 191003 - DNA, 75 bp, synthetic construct
  source 1..75: mol_type = other DNA
atgtgcgaacatcatcatgccgcgaagcacatcctgtgctcgcagtgtgacatgctggtggcgttaccgcgcctt

SEQ ID NO: 191004 - DNA, 75 bp, synthetic construct
  source 1..75: mol_type = other DNA
cttctggaaagatagtggcattgcggttgatctgacgtcagcgggaatgcgcgtagagatgggctcgttgacaac

SEQ ID NO: 191005 - DNA, 75 bp, synthetic construct
  source 1..75: mol_type = other DNA
cgatttgcttgattcaccaccgctggctccgccggatgcgaaagggattcgggtgatgctcgacagtaaaaaagc

SEQ ID NO: 191006 - DNA, 75 bp, synthetic construct
  source 1..75: mol_type = other DNA
ttgatctcgatttctatccaaatacgcctgcaataaccggtattcgtgaatttaatggttatcagattatcccga

SEQ ID NO: 191007 - DNA, 75 bp, synthetic construct
  source 1..75: mol_type = other DNA
ataaggcgtacatcagggttaaacctgagccgccaaaattgccacgcagaccgcgagttaaaaaagacagtcatg

SEQ ID NO: 191008 - DNA, 75 bp, synthetic construct
  source 1..75: mol_type = other DNA
gaattcattaaaattgagcatccatgctcaaagtctgaatccagaatcgatggtgactacatcattagtggagga

SEQ ID NO: 191009 - DNA, 75 bp, synthetic construct
  source 1..75: mol_type = other DNA
acaaccggctggcagaactgacaattaacaaactttacgatcgcgcgccggcttccgtctggaaatatgtcacct

SEQ ID NO: 191010 - DNA, 75 bp, synthetic construct
  source 1..75: mol_type = other DNA
atggaagttaaaaccaaagaagactggttgtatcagttccgtcgttgttcatcccaggagacactggaaaaggtg

SEQ ID NO: 191011 - DNA, 75 bp, synthetic construct
  source 1..75: mol_type = other DNA
gacaaacttgcctttatggctgcgacagctgacgcgcagttgctgaattatgtcgcctggccgcaggcaacgctt

SEQ ID NO: 191012 - DNA, 75 bp, synthetic construct
  source 1..75: mol_type = other DNA
ttcttgggttaccggaagaagaaaagcgcgatctggcagcacttcaggacaccgcaagggaacggcagaagcaga

SEQ ID NO: 191013 - DNA, 75 bp, synthetic construct
  source 1..75: mol_type = other DNA
ggcagccagtggcacctaaaacagctttcgttttgtatgatgatcagaagagcattcaggattcgttgtacaccg

SEQ ID NO: 191014 - DNA, 75 bp, synthetic construct
  source 1..75: mol_type = other DNA
aaatccagaaagtgaagaactggtctcccgtgtggatatttcctatcgtcacggcgctcattggggcctgggttc

SEQ ID NO: 191015 - DNA, 75 bp, synthetic construct
  source 1..75: mol_type = other DNA
ctctgcggtcgatcaccggctggcagaactgacgatgaacaagctttacgatcgtgttcccgcttccgtctggaa

SEQ ID NO: 191016 - DNA, 75 bp, synthetic construct
  source 1..75: mol_type = other DNA
ttatctgcagtatctggaagctgtcatgaaggtggtaaatggctcactggccaccaaagactacccgggcgccaa

SEQ ID NO: 191017 - DNA, 75 bp, synthetic construct
  source 1..75: mol_type = other DNA
ggacggtgagggttgtgtgccgtgagtggagtgtcacggataatgcccggtacagtgatttcaggtgcacgatag

SEQ ID NO: 191018 - DNA, 75 bp, synthetic construct
  source 1..75: mol_type = other DNA
cagactgaagacgtttcaggcggtgttccgggtgacggatgaaccaacccggcgctggctggatgaatttttatc

SEQ ID NO: 191019 - DNA, 75 bp, synthetic construct
  source 1..75: mol_type = other DNA
gaacggtgagggttgtgtgccgtgagtggagtgtcacggataatgcccggtacagtgatttcagttgcacgattg

SEQ ID NO: 191020 - DNA, 75 bp, synthetic construct
  source 1..75: mol_type = other DNA
ttgtgtgccgtgagtggagtgtcacggataatgcccggtacagtgatttcagttgcacgatagagcaggtggtga

SEQ ID NO: 191021 - DNA, 75 bp, synthetic construct
  source 1..75: mol_type = other DNA
acggttatgaacagcgccgccccacagggctgaatcctcaactgaagacgtttcaggcggtgttccgggtgacgg

SEQ ID NO: 191022 - DNA, 75 bp, synthetic construct
  source 1..75: mol_type = other DNA
ggatggtcagggtggtatgccgggagtggagcgtcacggataacgtccggtacagtgatttcagctgtacgattg

SEQ ID NO: 191023 - DNA, 75 bp, synthetic construct
  source 1..75: mol_type = other DNA
atggactatgaaaatggttcctggtggcaggagctggatgcggacaataaggtcaccaccaaagtctgggacggc

SEQ ID NO: 191024 - DNA, 75 bp, synthetic construct
  source 1..75: mol_type = other DNA
tgccgggagtggagcatcacagataacgccaggcacagtgatttcagttgtacgattgagcaggtggtgaactga

SEQ ID NO: 191025 - DNA, 75 bp, synthetic construct
  source 1..75: mol_type = other DNA
caatctgatgtgggatgcgctcggcaacagctcgctcagcagcaatgcagagttgcgtcagttcgccatgagcat

SEQ ID NO: 191026 - DNA, 75 bp, synthetic construct
  source 1..75: mol_type = other DNA
acaaaatgtcagacacagtaaaaaagactgggtaatcaacccacacgtctattgcaaaagagaggggaattatgt

SEQ ID NO: 191027 - DNA, 75 bp, synthetic construct
  source 1..75: mol_type = other DNA
taaaaactgtaagatttggtgatggttatgagcaacgaagtccaaatggacttaatcattctctgcgcgttttca

SEQ ID NO: 191028 - DNA, 75 bp, synthetic construct
  source 1..75: mol_type = other DNA
gtgcgtgatgcctgggcacccgatggcgcggacgggattgtttataccgttgactgggaaggaaaaccggtggtc

SEQ ID NO: 191029 - DNA, 75 bp, synthetic construct
  source 1..75: mol_type = other DNA
gaaatgcagaacatggcggggagaagaagtctggccctggatattgccgttttcagcggcaggaatgaaacatac

SEQ ID NO: 191030 - DNA, 75 bp, synthetic construct
  source 1..75: mol_type = other DNA
ccggctctccggatactgctgaagattattatgtaacatactccccattatggggagaatacccggaggcactgc

SEQ ID NO: 191031 - DNA, 75 bp, synthetic construct
  source 1..75: mol_type = other DNA
tggtatgaacttggtcttctgcattttcttaatggggaacaggtaaaagctgcaactgcatttcgtcgcggattt

SEQ ID NO: 191032 - DNA, 75 bp, synthetic construct
  source 1..75: mol_type = other DNA
gttgattcgttcgcgtctggtgcttggtaaaacggtggacgatctcgacctcgatattacagtgagcaaaaacac

SEQ ID NO: 191033 - DNA, 75 bp, synthetic construct
  source 1..75: mol_type = other DNA
tgccttttatgaaaattaattcaaaggcatatctgtacaaccgtgaaaaaacgctgagcgaagctactttcattg

SEQ ID NO: 191034 - DNA, 75 bp, synthetic construct
  source 1..75: mol_type = other DNA
cgacttcatcccgaccgattctggcaaagcaagcatctactgcctgcatctgtcagaagagaacggcgttactgg

SEQ ID NO: 191035 - DNA, 75 bp, synthetic construct
  source 1..75: mol_type = other DNA
tttctgaacggggaacatgttaaggccgccacagcttttcgccatggctttgccacaaacacttacatcgcagaa

SEQ ID NO: 191036 - DNA, 75 bp, synthetic construct
  source 1..75: mol_type = other DNA
gtgcctgcagcatcgctccgtcgtcctgtaaccaggcgctggcagcaagctttgccgatactgatgtttatttca

SEQ ID NO: 191037 - DNA, 75 bp, synthetic construct
  source 1..75: mol_type = other DNA
aatgccccgcgtaaggcactgaacgctgctcttaaaggactggcagcaggtaatcgtctcatcccggaaagtttc

SEQ ID NO: 191038 - DNA, 75 bp, synthetic construct
  source 1..75: mol_type = other DNA
gtaaatacggcgtcggcacactggtgcaactggggcagctgattatctgcttctacatcacctgtatcctgtttg

SEQ ID NO: 191039 - DNA, 75 bp, synthetic construct
  source 1..75: mol_type = other DNA
ttcttccgagtcagcgctgccgcgtatgctcgacaagatggagaaactcggttgccggaaatcggtggtggggtt

SEQ ID NO: 191040 - DNA, 75 bp, synthetic construct
  source 1..75: mol_type = other DNA
tgctgtgcggaaatttgcatccatttccacttgctgtgcggcataacttctccggctgtctggatacggcagaag

SEQ ID NO: 191041 - DNA, 75 bp, synthetic construct
  source 1..75: mol_type = other DNA
gtagcgagaaagacgttcaactctacgcgcaagttgtcgattaccagtccggtaatgtggtcacactcaacgaca

SEQ ID NO: 191042 - DNA, 75 bp, synthetic construct
  source 1..75: mol_type = other DNA
ggtctgccattccccgggggatctccctgactttcgccctgttcgcggagcttgctggccgggacagggcgacca

SEQ ID NO: 191043 - DNA, 75 bp, synthetic construct
  source 1..75: mol_type = other DNA
tggaaaatgatgattttcgcgccaccgtttccgacgatgaagcgcatgcacagtctattggcctcagcggtgttc

SEQ ID NO: 191044 - DNA, 75 bp, synthetic construct
  source 1..75: mol_type = other DNA
cgtgtgaggcgattcgctggtggattaaggacggtggcagagactgccgtattcgttcaaacaactgctacggtc

SEQ ID NO: 191045 - DNA, 75 bp, synthetic construct
  source 1..75: mol_type = other DNA
gcagtttatgatatcaatgagtttgtcgatagcgttgccaagatttatcacacaccgccacccgccttaaaacag

SEQ ID NO: 191046 - DNA, 75 bp, synthetic construct
  source 1..75: mol_type = other DNA
ttatgcctacgcgtcggacagtcagcaacgaggattaaaaccgccgccacgatctattccgttatcgattctacc

SEQ ID NO: 191047 - DNA, 75 bp, synthetic construct
  source 1..75: mol_type = other DNA
ctctgcggttgatcaccggctggcagaactgaccatgaacaaactttacgatcgtgttcccgcttctgtctggaa

SEQ ID NO: 191048 - DNA, 75 bp, synthetic construct
  source 1..75: mol_type = other DNA
ttccagaatccgaacgatacatggctgtttccgtgggtatcgaatgatgtcgtctacgtcgctgagtattacgag

SEQ ID NO: 191049 - DNA, 75 bp, synthetic construct
  source 1..75: mol_type = other DNA
cgcgcaagttgtagattaccagtccggcaatgtggtcacactcaacgacattcgcggtcgctatgagtgctatac

SEQ ID NO: 191050 - DNA, 75 bp, synthetic construct
  source 1..75: mol_type = other DNA
attcactccatgagcaagaatggctggaaggatttcgctgagaaatacgacctcgacgccgaagacatcccctcg

SEQ ID NO: 191051 - DNA, 75 bp, synthetic construct
  source 1..75: mol_type = other DNA
cagcgaggaggaaaaaatcgaggtgttcggctgcgtccccatgttgtcggacgtagtgaacatcagcgcaggtga

SEQ ID NO: 191052 - DNA, 75 bp, synthetic construct
  source 1..75: mol_type = other DNA
cgaagaaaaaatcgaggtgtttggctgtgttccgacgctgtccgacatcgtcaacatcaaccccaacgaggccag

SEQ ID NO: 191053 - DNA, 75 bp, synthetic construct
  source 1..75: mol_type = other DNA
gacgaatggcatgaccatcctgagaactgcgctatctgcatgaagaaacgcaaaaagcaggaaggcgaaagctaa

SEQ ID NO: 191054 - DNA, 75 bp, synthetic construct
  source 1..75: mol_type = other DNA
attaggtagccgttggatgcctgatcggctgggattggtgctacgtgacgcgcattttctttatatcgatgggca

SEQ ID NO: 191055 - DNA, 75 bp, synthetic construct
  source 1..75: mol_type = other DNA
gtaccggcgatattgttaacgcaggggagattcgctttgataatcagacgacaccggatgccgcgctgagccgtg

SEQ ID NO: 191056 - DNA, 75 bp, synthetic construct
  source 1..75: mol_type = other DNA
ataatcagacgacacaggatgccgtcctgagccgtgctgttgcaaaaggcgactccccggtaacgttccataaac

SEQ ID NO: 191057 - DNA, 75 bp, synthetic construct
  source 1..75: mol_type = other DNA
tcacaccgccgctgtgcgtcgcggcgcgccaaactgccttctgctggctgacctgccatttatggcgtatgccac

SEQ ID NO: 191058 - DNA, 75 bp, synthetic construct
  source 1..75: mol_type = other DNA
ctctcaccggtaacggcagcgtggaaaaatcaggaagtggcacactcactgtcagcaacaccacactcacccaga

SEQ ID NO: 191059 - DNA, 75 bp, synthetic construct
  source 1..75: mol_type = other DNA
acacggttgtgaataccggcgcggaagggggaccggatgcggaaaatggtgataccgggcagaccgtctacggag

SEQ ID NO: 191060 - DNA, 75 bp, synthetic construct
  source 1..75: mol_type = other DNA
aacggcggtgagcagtgggtacatgaaggcgggattgcaacgggtaccgtcattaatgagaagggctggcaggcc

SEQ ID NO: 191061 - DNA, 75 bp, synthetic construct
  source 1..75: mol_type = other DNA
ggcggcacactggcgggcaccaccacgctgaataacggcgccacacttaccctttccggtaagcgtcaacggagc

SEQ ID NO: 191062 - DNA, 75 bp, synthetic construct
  source 1..75: mol_type = other DNA
ctggcccgctcacggggaaaacgcaccggtgtggcggttgcactgtctcttgcggctgtcacgtcagttccggca

SEQ ID NO: 191063 - DNA, 75 bp, synthetic construct
  source 1..75: mol_type = other DNA
gtcatcggcggtatctgtaacaactccggcggctcgctggtgcagcgtggcccggcgtataccgaaatgtcgtta

SEQ ID NO: 191064 - DNA, 75 bp, synthetic construct
  source 1..75: mol_type = other DNA
ctgaataacagaggcgagcagtgggttcatgagggcggggttgccaccggtacaattatcaaccgcgacggttac

SEQ ID NO: 191065 - DNA, 75 bp, synthetic construct
  source 1..75: mol_type = other DNA
ggcaccaccacgctgaataacggcgccacacttaccctttccggtaagcgtcaacggagcaccgtattgacgctt

SEQ ID NO: 191066 - DNA, 75 bp, synthetic construct
  source 1..75: mol_type = other DNA
ctaatacccgtgtggatgatggcggaacgctggatatccgcaacggtggtgccgccaccaccgtatccatgggga

SEQ ID NO: 191067 - DNA, 75 bp, synthetic construct
  source 1..75: mol_type = other DNA
gaacgccggcaacagtgcgtcggggctggcgaccagcggtaagggtattcaggtggtggaagccattaacggtgc

SEQ ID NO: 191068 - DNA, 75 bp, synthetic construct
  source 1..75: mol_type = other DNA
ccatcagtaccgggctggagtatgggccggacaatgaggccaataccggcggtcaatgggtacaggatggcggta

SEQ ID NO: 191069 - DNA, 75 bp, synthetic construct
  source 1..75: mol_type = other DNA
tacagccttctgttatccgcaccttcagctcccggggagacatgagcatgggtacagccgcagccggcagtaaca

SEQ ID NO: 191070 - DNA, 75 bp, synthetic construct
  source 1..75: mol_type = other DNA
acagaggttgccggtatgtctctgacgacaggggtgcatggtgccgcaggccattcttccgttgatgttaaggat

SEQ ID NO: 191071 - DNA, 75 bp, synthetic construct
  source 1..75: mol_type = other DNA
gggcaaactgcaggtgaatgccagtggtgttgctgttgatgttactcagcatcagggaggggcactggttaccag

SEQ ID NO: 191072 - DNA, 75 bp, synthetic construct
  source 1..75: mol_type = other DNA
cggaaaaaccatcctgaacctggtgaacgctggcaacagtgcgtcggggctggcgaccagcggtaagggtattca

SEQ ID NO: 191073 - DNA, 75 bp, synthetic construct
  source 1..75: mol_type = other DNA
ggtgaacaacgataccctgaccatccgtgaaggcgatgcactcctgcagggaggctctctcaccggtaacggcag

SEQ ID NO: 191074 - DNA, 75 bp, synthetic construct
  source 1..75: mol_type = other DNA
gtatgcgctcggtggggatcggcacgagcttaaccggggcgcaactgttgctgccctcaacggaatctctgacct

SEQ ID NO: 191075 - DNA, 75 bp, synthetic construct
  source 1..75: mol_type = other DNA
aaccggacccggaaatctttctcgccgcctgtgccgggctgggcgtgccgccgcaggcatgtatcggcattgaag

SEQ ID NO: 191076 - DNA, 75 bp, synthetic construct
  source 1..75: mol_type = other DNA
tgatgctggagccacaactgcagtatacctggcagggactttccctggatgacggccaggataacgccggttatg

SEQ ID NO: 191077 - DNA, 75 bp, synthetic construct
  source 1..75: mol_type = other DNA
gaactggtgggtacaaccttctgttatccgcaccttcagctcccggggggacatgagcatgggtacagctgcagc

SEQ ID NO: 191078 - DNA, 75 bp, synthetic construct
  source 1..75: mol_type = other DNA
cagctcccggggtgacatgagcatgggtacagccgccgccggcagtaacatgacgttctcaccgtcccggaatgg

SEQ ID NO: 191079 - DNA, 75 bp, synthetic construct
  source 1..75: mol_type = other DNA
agggaacaacagagccacacgtcagaaacttccatcagccggatctgcggcactgtaacccttcacctgcaggta

SEQ ID NO: 191080 - DNA, 75 bp, synthetic construct
  source 1..75: mol_type = other DNA
gaatggcacttcactggatctgcaggccggactggaagcccgtgtccgggaaaatatcaccctgggcgttcaggc

SEQ ID NO: 191081 - DNA, 75 bp, synthetic construct
  source 1..75: mol_type = other DNA
aaaatagcgtcgagatgatgatagctaaccttgacggtgtcgaaattccactgggtataattagtcagtatttgc

SEQ ID NO: 191082 - DNA, 75 bp, synthetic construct
  source 1..75: mol_type = other DNA
aaccgtgacagcgatgaagactggtacctgcgcagtgaaaatgcatatcgttctgaagtcccccagtatgcctcc

SEQ ID NO: 191083 - DNA, 75 bp, synthetic construct
  source 1..75: mol_type = other DNA
ctgatgctggagccacaactgcagtacacctggcagggactctccctggatgacggccaggataacgccggttat

SEQ ID NO: 191084 - DNA, 75 bp, synthetic construct
  source 1..75: mol_type = other DNA
gggtggcaccatgaaccgccccgggtttcctggagagtattttatctgtgaactcaggctgccagatcattattt

SEQ ID NO: 191085 - DNA, 75 bp, synthetic construct
  source 1..75: mol_type = other DNA
gctgcggaaagtgtggcgacagattgccagcgtgagcaactgagctatgtcattggcaccgaagttccggttccg

SEQ ID NO: 191086 - DNA, 75 bp, synthetic construct
  source 1..75: mol_type = other DNA
agggcgaacaggtgctggcctatccgggcaccacgctctattcactggaaaaagccctcaaaccgctgggacgcg

SEQ ID NO: 191087 - DNA, 75 bp, synthetic construct
  source 1..75: mol_type = other DNA
cggagatcgacagccagctggtgcacaagctctattacggccattttatgtgctatgtcttccatcaggattaca

SEQ ID NO: 191088 - DNA, 75 bp, synthetic construct
  source 1..75: mol_type = other DNA
gaacttatcgcgccggaaaatcgcagcagttgtcttgacgtgattgaagaagtcatgctcgacgaaccgcaatac

SEQ ID NO: 191089 - DNA, 75 bp, synthetic construct
  source 1..75: mol_type = other DNA
gttgggtttgcacgcgaacgcattattctcggcggcgatcatctggggccaaactgctggcagcaagaaaatgcg

SEQ ID NO: 191090 - DNA, 75 bp, synthetic construct
  source 1..75: mol_type = other DNA
gcctttattgcccgtgggctgacagaggcgttaacacgcgtgattgccatcgtggtgcagccgggtgtggaattt

SEQ ID NO: 191091 - DNA, 75 bp, synthetic construct
  source 1..75: mol_type = other DNA
aaccgtgacagcgatgaagactggtacctgcgcagtgaatatgcttatcgttctgaagtccccccgtatgcctcc

SEQ ID NO: 191092 - DNA, 75 bp, synthetic construct
  source 1..75: mol_type = other DNA
cggagattatggtgattggcggtggacgcgtatacgagcagttcctgccgaaagcacagaagctgtatctgacgc

SEQ ID NO: 191093 - DNA, 75 bp, synthetic construct
  source 1..75: mol_type = other DNA
accttcaactcccggggagatatgcgtgtggggacttccactgcaggcagcgggatgacgttctctccctcacag

SEQ ID NO: 191094 - DNA, 75 bp, synthetic construct
  source 1..75: mol_type = other DNA
gacggtacacggagaggcacataacacccggctggagggaggaaaccagtatgtgcacaaatacggacttgcgct

SEQ ID NO: 191095 - DNA, 75 bp, synthetic construct
  source 1..75: mol_type = other DNA
tcagaccggtgtaagcggtgaaaataacagcgtccgtctcagcattcagggcggtcatctcgggcacgataacaa

SEQ ID NO: 191096 - DNA, 75 bp, synthetic construct
  source 1..75: mol_type = other DNA
gtgggtacagccttctgttatccgcaccttcagctcccggggtgacatgagcatggggacagccgcagccggcag

SEQ ID NO: 191097 - DNA, 75 bp, synthetic construct
  source 1..75: mol_type = other DNA
ctggctgctgacacggttgtacaggcaggagaaaccgtgaacggcggaacactgacaaatcatgacaaccagatt

SEQ ID NO: 191098 - DNA, 75 bp, synthetic construct
  source 1..75: mol_type = other DNA
acaccctgaaccgtgacagcgatgaagactggtacctgcgcagtgaaaatgcttatcgtgctgaagtccccctgt

SEQ ID NO: 191099 - DNA, 75 bp, synthetic construct
  source 1..75: mol_type = other DNA
taacaacggtggtattgcccgtggagccacgccggaaagcagcggcagctatggcttcgtccgtctggagggtga

SEQ ID NO: 191100 - DNA, 75 bp, synthetic construct
  source 1..75: mol_type = other DNA
aaccgtgacagcgatgaagactggtacctgcgcagtgaatatgcctatcgttctgaagtccccctgtatgcctcc

SEQ ID NO: 191101 - DNA, 75 bp, synthetic construct
  source 1..75: mol_type = other DNA
gtgcgtgaactgccggtgaactggtgggtacagccttctgttatccgcaccttcagttcccggggggacatgagc

SEQ ID NO: 191102 - DNA, 75 bp, synthetic construct
  source 1..75: mol_type = other DNA
tcttcggggatagcccgggacactctcatttacacaggaggtgaccagacggtacacggagaggcacataacacc

SEQ ID NO: 191103 - DNA, 75 bp, synthetic construct
  source 1..75: mol_type = other DNA
tacggttaatgccgggggacaggccagcaacaccactgtcggacatcgtggaacactgatgctggctgccggggg

SEQ ID NO: 191104 - DNA, 75 bp, synthetic construct
  source 1..75: mol_type = other DNA
cacgccggaaagcagcggcagctatggcttcgtccgtctggagggtgacctgctcagaacagaggttgccggtat

SEQ ID NO: 191105 - DNA, 75 bp, synthetic construct
  source 1..75: mol_type = other DNA
gaccggattctggcaggctcccgcagccatcagaccggtgtaaacggtgaaaataacagcgtccgtctcagcatt

SEQ ID NO: 191106 - DNA, 75 bp, synthetic construct
  source 1..75: mol_type = other DNA
cgtgctgttgcaaaaggcgactccccggtaacgttccataaactgacaaccagtaacctcaccggtcagggtggc

SEQ ID NO: 191107 - DNA, 75 bp, synthetic construct
  source 1..75: mol_type = other DNA
ccacagaagaaggtgcgtttgccctgagtcgcccgcttcaggccggcgcctttaactacaccctgaaccgtgaca

SEQ ID NO: 191108 - DNA, 75 bp, synthetic construct
  source 1..75: mol_type = other DNA
aagccgtcaacctgaatgaaggcacgctgacgctgaacgacagtaccgtcaccacggatgtcattgctcagcgcg

SEQ ID NO: 191109 - DNA, 75 bp, synthetic construct
  source 1..75: mol_type = other DNA
tatcaagacagatttaggtccagcttctcaggaagtggatctgaggtgtactggcaatagcggacactaccattt

SEQ ID NO: 191110 - DNA, 75 bp, synthetic construct
  source 1..75: mol_type = other DNA
tggcacgtcactggacctgcaggccggactggaagcccgtatccgggaaaatatcaccctgggcgttcaggccgg

SEQ ID NO: 191111 - DNA, 75 bp, synthetic construct
  source 1..75: mol_type = other DNA
tcatttacgccggcggtgaccagacggtacacggagaggcacataacacccggctggagggaggaaaccagtatg

SEQ ID NO: 191112 - DNA, 75 bp, synthetic construct
  source 1..75: mol_type = other DNA
gagaagggctggcaggccatcaaatccggcgcagtggcaaccgacacggttgtgaataccggcgcggaaggggga

SEQ ID NO: 191113 - DNA, 75 bp, synthetic construct
  source 1..75: mol_type = other DNA
atgagacattcactgccctaccgcatgttacgcaaacgcccgatgaaactcagcaccacggctatcttaatggtc

SEQ ID NO: 191114 - DNA, 75 bp, synthetic construct
  source 1..75: mol_type = other DNA
tgtgcgtgccggtttccgtctgggcagccacaacgatatgagctttggtgaaggcacctcatcccgtgacaccct

SEQ ID NO: 191115 - DNA, 75 bp, synthetic construct
  source 1..75: mol_type = other DNA
ttcagtatcactgacaatctgatgctggagccgcaactgcagtacacctggcagggactctccctggatgacggc

SEQ ID NO: 191116 - DNA, 75 bp, synthetic construct
  source 1..75: mol_type = other DNA
ccgtatccatgggaaatggcggcgtactgctggccgattccggtgccgctgtcagtggtacccggagcgacggaa

SEQ ID NO: 191117 - DNA, 75 bp, synthetic construct
  source 1..75: mol_type = other DNA
ttcaggccggttatgcccacagcatcaacggcagcagcgctgaaggttataacagtcaggccacactgaatgtga

SEQ ID NO: 191118 - DNA, 75 bp, synthetic construct
  source 1..75: mol_type = other DNA
aaaatatcaccctgggcgttcaggccggttatgcccacagtgtcagcggcaacagcgctgaaggctataacggtc

SEQ ID NO: 191119 - DNA, 75 bp, synthetic construct
  source 1..75: mol_type = other DNA
gcgcgacagtgcaaaacaccgtgtgcgtgaactgccggtgaactggtgggtacagccttctgttatccgcacttt

SEQ ID NO: 191120 - DNA, 75 bp, synthetic construct
  source 1..75: mol_type = other DNA
gtgaaggcacctcatcccgtgacaccctgcgcgacagtgcaaaaacaccgtgtgcgtgaactgccggtgaactgg

SEQ ID NO: 191121 - DNA, 75 bp, synthetic construct
  source 1..75: mol_type = other DNA
tgtctcgacaaaaggaagtgaacgaggcgtcggtctggcacttgtcaaacaacaggttgaaaatctcggcggcag

SEQ ID NO: 191122 - DNA, 75 bp, synthetic construct
  source 1..75: mol_type = other DNA
ttgctgatcaacaccgtcccagtacgcagtaatggcgtcatcatcggggccatctcttccttccgggataaaacg

SEQ ID NO: 191123 - DNA, 75 bp, synthetic construct
  source 1..75: mol_type = other DNA
ctggtcacccgtgaaggcgatgcgcttctgcaggggggcgtactcaccggtaacggcagggtggaaaaatcagga

SEQ ID NO: 191124 - DNA, 75 bp, synthetic construct
  source 1..75: mol_type = other DNA
ctggcccgctcacggggaaaaggcgccggtgtggcggttgctctgtctcttgctgctgtcatgtcagtcccggca

SEQ ID NO: 191125 - DNA, 75 bp, synthetic construct
  source 1..75: mol_type = other DNA
tcagcgcggtacagccctgaagctgaccggcagcactgtgctgaacggtgccattgaccccacgaatgtcactct

SEQ ID NO: 191126 - DNA, 75 bp, synthetic construct
  source 1..75: mol_type = other DNA
cagtacagctgcaaccgtcaccggtacaaaccgcctgggagcattctccgttgtggcgggtaaggctgataatgt

SEQ ID NO: 191127 - DNA, 75 bp, synthetic construct
  source 1..75: mol_type = other DNA
atgaactttggtaaaggcacctcatcccgtgacaccctgcgcgacagtgcaaaacacagtgtgcgtgaactgccg

SEQ ID NO: 191128 - DNA, 75 bp, synthetic construct
  source 1..75: mol_type = other DNA
acaacatgtgcgtgccggtttccgtctgggcagccacaacgatatgacctttggcgaaggcacctcatcccgtgc

SEQ ID NO: 191129 - DNA, 75 bp, synthetic construct
  source 1..75: mol_type = other DNA
gtcttcggtacgaccaacggaatgaccatcagtaccgggctggagtataggccggataacgaggccaataccggc

SEQ ID NO: 191130 - DNA, 75 bp, synthetic construct
  source 1..75: mol_type = other DNA
aaggcacctcatcccgtgacaccctgcgcgacagtgcaaaacacagtgtgcgtgaactgccggtgaactggtggg

SEQ ID NO: 191131 - DNA, 75 bp, synthetic construct
  source 1..75: mol_type = other DNA
gctggatgtccgcaacggtggcaccgccaccaccgtatccatgggaaatggcggtgtactgctggccgattccgg

SEQ ID NO: 191132 - DNA, 75 bp, synthetic construct
  source 1..75: mol_type = other DNA
gtctcttgccgcagtcacgtcactcccggtgctggctgctgacatcgttgtgcacccgggtgaaacagtgaatgg

SEQ ID NO: 191133 - DNA, 75 bp, synthetic construct
  source 1..75: mol_type = other DNA
gcggtaagggtattcaggtggttgaagccattaacggtgccaccacggaggaaggggcctttgtccaggggaaca

SEQ ID NO: 191134 - DNA, 75 bp, synthetic construct
  source 1..75: mol_type = other DNA
ggattctggcaggctcccgcagccatcagaccagtgtaagcggtgaaaataacagcgtccgtctcagcattcagg

SEQ ID NO: 191135 - DNA, 75 bp, synthetic construct
  source 1..75: mol_type = other DNA
cacacccgtgccattcacaacatcgacaccgatattaagctcaaccgcgcattgtgggtaatggcagaaacgctg

SEQ ID NO: 191136 - DNA, 75 bp, synthetic construct
  source 1..75: mol_type = other DNA
atgttactcaccgatctccttcacggtaatacgcagctggagccacaactgcagtacacctggcaggggctctcc

SEQ ID NO: 191137 - DNA, 75 bp, synthetic construct
  source 1..75: mol_type = other DNA
gcgtgactgtcagtaccgggcttgagctggggccggactctgatgacaacaccggcggtcagcagatagcccggg

SEQ ID NO: 191138 - DNA, 75 bp, synthetic construct
  source 1..75: mol_type = other DNA
gcaaaacctggcttgcgtttacaaatgtcggaaacagtaacctcggggtggcaacctccggacagggtatccggg

SEQ ID NO: 191139 - DNA, 75 bp, synthetic construct
  source 1..75: mol_type = other DNA
cggcgggctccagtttgtaggtgccgggggaaaggctacagacacaataatcaatgaaggaggcggacaaagtct

SEQ ID NO: 191140 - DNA, 75 bp, synthetic construct
  source 1..75: mol_type = other DNA
ctggcccgctcacgggggaaacgtactggcgtggcgctggcgctgtctcttgccaccgccacttcagtcccggcc

SEQ ID NO: 191141 - DNA, 75 bp, synthetic construct
  source 1..75: mol_type = other DNA
gatgctggagccacaactgcagtatacctggcagggactttccctggatgacggccaggataacgccggttatgt

SEQ ID NO: 191142 - DNA, 75 bp, synthetic construct
  source 1..75: mol_type = other DNA
gccggtgtggcggttgcgctgtctcttgctgctgtcacatcagtcccggcactggctgctgacacggttgtacag

SEQ ID NO: 191143 - DNA, 75 bp, synthetic construct
  source 1..75: mol_type = other DNA
gggcaccctggtggtggcttccgaactggcccgctcacggggaaaacgcgccggtgtggcggttgtgctgtctct

SEQ ID NO: 191144 - DNA, 75 bp, synthetic construct
  source 1..75: mol_type = other DNA
gacaacgccggttatgtgaagttcgggcatggcagtgcacagaatgtgcgtgccggtttccgtctgggcagccac

SEQ ID NO: 191145 - DNA, 75 bp, synthetic construct
  source 1..75: mol_type = other DNA
tgctgctgtcacatcagtcccggcactggctgctgacaaggttgtacaggcgggagaaaccgtgaacgatggaac

SEQ ID NO: 191146 - DNA, 75 bp, synthetic construct
  source 1..75: mol_type = other DNA
cagacaccgttgtgaataccggcgcagaaggaggaccggatgcggaaaatgctgatatcagaccatccaggagaa

SEQ ID NO: 191147 - DNA, 75 bp, synthetic construct
  source 1..75: mol_type = other DNA
acaccgtgtgcgtgaactgccggtgaactggtgggtacagccttctgttatccgcaccttcagctcccggggtga

SEQ ID NO: 191148 - DNA, 75 bp, synthetic construct
  source 1..75: mol_type = other DNA
gtgtgagtgaactgccggtgaactggtgggtacagccttctgttatccgcaccttcagctcccggggagacatga

SEQ ID NO: 191149 - DNA, 75 bp, synthetic construct
  source 1..75: mol_type = other DNA
acaaaccgcctggggcatttctccgtgggaaatggcatggcagataacgtcgttctggaaaatggcggtcgcctg

SEQ ID NO: 191150 - DNA, 75 bp, synthetic construct
  source 1..75: mol_type = other DNA
aactgaccaccagtaacctcaccggccagggcggcaccatcaatatgcgtgtcagccttgatggcagtaatgcct

SEQ ID NO: 191151 - DNA, 75 bp, synthetic construct
  source 1..75: mol_type = other DNA
aatggcgcgagggaaagctgctattaccttcttcagagagcccccagctacttcctgtgactcttgatgcagttg

SEQ ID NO: 191152 - DNA, 75 bp, synthetic construct
  source 1..75: mol_type = other DNA
tccggcacgggacgctccgcttcaatggcaatgtcagcgaaaagctcctgactctgctgatacaggaactgaagc

SEQ ID NO: 191153 - DNA, 75 bp, synthetic construct
  source 1..75: mol_type = other DNA
acgaggacaacattatgacactggctgaacaactgaagcagagcgggcgtgaagaaggtatcgctctgggcctgg

SEQ ID NO: 191154 - DNA, 75 bp, synthetic construct
  source 1..75: mol_type = other DNA
tggctttggctgttgaacccgacaaaagcagaagtgccgatattttcatggattcttgggctgattctattttcg

SEQ ID NO: 191155 - DNA, 75 bp, synthetic construct
  source 1..75: mol_type = other DNA
tgaaaacggtgaagagccgattaaagagcatctgctgttgacgcgctacaatccaggccgcgtgagcagagggga

SEQ ID NO: 191156 - DNA, 75 bp, synthetic construct
  source 1..75: mol_type = other DNA
atttcgctgatgaggccattattaccaccaacccggaagtctcctcagtgcgtgactctgaccgtattttaggta

SEQ ID NO: 191157 - DNA, 75 bp, synthetic construct
  source 1..75: mol_type = other DNA
ttgtggcgccagcctggacgccggggcgggaggatgtcctgctttccctcgccggtgatatcgaggacgaggaca

SEQ ID NO: 191158 - DNA, 75 bp, synthetic construct
  source 1..75: mol_type = other DNA
aatgatagtgctgggaaatacggcatcaccggggaccatcccgaaacgactggtgcatctgcgggtactctggaa

SEQ ID NO: 191159 - DNA, 75 bp, synthetic construct
  source 1..75: mol_type = other DNA
accattatggaacgcgccaaagagatcggtttgatgaaagcgctgggtgcgcgacagtggcaaattatgctgctg

SEQ ID NO: 191160 - DNA, 75 bp, synthetic construct
  source 1..75: mol_type = other DNA
agcaaagcgcggagagcgtgccggagtacggcaaagcggtcaatatcaaaaccaaacgcggcgtaattaagccgc

SEQ ID NO: 191161 - DNA, 75 bp, synthetic construct
  source 1..75: mol_type = other DNA
gaaaaagacgataccgcccaggtggtcgtcaacaacaatgatcccacctataaaagcgagcatacggacacgctc

SEQ ID NO: 191162 - DNA, 75 bp, synthetic construct
  source 1..75: mol_type = other DNA
atggcaccgactaccgcacagatcatgacggaaaacaccgcaggccagacttaccgggcaacctattcacccgat

SEQ ID NO: 191163 - DNA, 75 bp, synthetic construct
  source 1..75: mol_type = other DNA
tttatgaagtcaaacctgaataatacaaatgaaccatatcagtcgagaattgagaaagctgaaagctggctgaat

SEQ ID NO: 191164 - DNA, 75 bp, synthetic construct
  source 1..75: mol_type = other DNA
aggctgatgcaacagcaattgcagcagactgtgatgactcacggctggatttacaccgacgctcagctgttacgc

SEQ ID NO: 191165 - DNA, 75 bp, synthetic construct
  source 1..75: mol_type = other DNA
gcaacttattgaaccaatggcaaatgaaattgatcgaaaatcgaatttatcagtattaaaaatggggcgtgaata

SEQ ID NO: 191166 - DNA, 75 bp, synthetic construct
  source 1..75: mol_type = other DNA
ggaaataattgcgaaacaaaatgcgaagagcattgaggagaagaatattgaaaaaaacaagaaagaaacaaatcc

SEQ ID NO: 191167 - DNA, 75 bp, synthetic construct
  source 1..75: mol_type = other DNA
atggtggcgaaaattaatcgattattacggctcgggcctgtcttacttctgtgcacatcatttttcgcacaatct

SEQ ID NO: 191168 - DNA, 75 bp, synthetic construct
  source 1..75: mol_type = other DNA
ttaaagattttaacgatcgcttattgtaaaaataatagcaaagaaaattgtaagatacagaccgtaaataaaaac

SEQ ID NO: 191169 - DNA, 75 bp, synthetic construct
  source 1..75: mol_type = other DNA
tggcttgaatcagaaatcgatgaatggttgttacatcgtagtcttattaattaattctaaagaggagttagatag

SEQ ID NO: 191170 - DNA, 75 bp, synthetic construct
  source 1..75: mol_type = other DNA
aacacaatggcttcacagggccagttgtggttacaactgtcgggagcagcaatcgcattccttgaaatgtttgct

SEQ ID NO: 191171 - DNA, 75 bp, synthetic construct
  source 1..75: mol_type = other DNA
ggcggtaagcatgcgacttcgggcatgggtactaccagcgacaaactgaataatatgtacggagataaccagata

SEQ ID NO: 191172 - DNA, 75 bp, synthetic construct
  source 1..75: mol_type = other DNA
ccagcatgttggcggacaaactgagtctggtgttacgccgtacaatgtggacaaggtcagcaaagaagatattca

SEQ ID NO: 191173 - DNA, 75 bp, synthetic construct
  source 1..75: mol_type = other DNA
cgggcagagtattgaagtgtcctatattttcactgataccatagataataaatctgatggaaaattatgcttaaa

SEQ ID NO: 191174 - DNA, 75 bp, synthetic construct
  source 1..75: mol_type = other DNA
tcgatcataaacagttgaaaaatcacataaggcaacttgaggagtgggcccttcttgaaaagttttatgataaca

SEQ ID NO: 191175 - DNA, 75 bp, synthetic construct
  source 1..75: mol_type = other DNA
tttcatttccggaaatgaaaacttagtaaacatttcagcggaaaaaatcgatgaaataaaaaatagcaaagattt

SEQ ID NO: 191176 - DNA, 75 bp, synthetic construct
  source 1..75: mol_type = other DNA
catcgcaacaatgcaccagctacgccagaaaaccggattatcagcggaatacgacgaagccggatgcttgccgga

SEQ ID NO: 191177 - DNA, 75 bp, synthetic construct
  source 1..75: mol_type = other DNA
accggaaaaataacggcctgctgccggataaaccagtatttgagatcgaaaaacttaatggtgaaactggattgg

SEQ ID NO: 191178 - DNA, 75 bp, synthetic construct
  source 1..75: mol_type = other DNA
caaatctccggttatcgctggttttttaatcagcaagattaaccgcgcgaccgatttaggccatacgctaatttt

SEQ ID NO: 191179 - DNA, 75 bp, synthetic construct
  source 1..75: mol_type = other DNA
atcttccccgcatttataagttcgataagatactttccgaccgcactgaattcagagggcgaattgccaactgga

SEQ ID NO: 191180 - DNA, 75 bp, synthetic construct
  source 1..75: mol_type = other DNA
gcatggctatgcgccgtggtgatcagagtgatattcctgaggtttcacaagcagccgccagaatccgccccattt

SEQ ID NO: 191181 - DNA, 75 bp, synthetic construct
  source 1..75: mol_type = other DNA
atttgcgaggtatggattctcctcaaagcattggtgcagctcaggttttcaataccacactcgatcaggaacagc

SEQ ID NO: 191182 - DNA, 75 bp, synthetic construct
  source 1..75: mol_type = other DNA
tggtgaagatacaaaatcatcagattggtggcttaatcatcccaaagaagcgacggagaaatataaggagtgtaa

SEQ ID NO: 191183 - DNA, 75 bp, synthetic construct
  source 1..75: mol_type = other DNA
agaaggtgaagagctggatctcgaaactctggccgccgcactgctgaaaatggcacagggtgaacgtactctgat

SEQ ID NO: 191184 - DNA, 75 bp, synthetic construct
  source 1..75: mol_type = other DNA
cccgcgtggtgaccgtgaagatcgtccgcgtcgtgaacgtcgtgatgttggcgatatgcagctgtaccgcattga

SEQ ID NO: 191185 - DNA, 75 bp, synthetic construct
  source 1..75: mol_type = other DNA
gcacaagaattgctgaattaccgtaagtcgcaggacgatgagaaactgtcgacgctaagccactcgtggtcacag

SEQ ID NO: 191186 - DNA, 75 bp, synthetic construct
  source 1..75: mol_type = other DNA
ctggttaaggtactgaaaaaaatccttttcggcctggaaccctacgaaatctccacgctgtttgagcaacgccag

SEQ ID NO: 191187 - DNA, 75 bp, synthetic construct
  source 1..75: mol_type = other DNA
cagcaacaaaatattattaaaattatttattacaaacaggaaaataaaggtaaaactcaggctcttaatgcaggt

SEQ ID NO: 191188 - DNA, 75 bp, synthetic construct
  source 1..75: mol_type = other DNA
gtgtgctggaggtaatgcgttatacccagcagcatgagagcgatgaattgattttgccgccgctgttagaagcat

SEQ ID NO: 191189 - DNA, 75 bp, synthetic construct
  source 1..75: mol_type = other DNA
gtgaggggcttcattgtcagggcatcgatatcaaagaagatccaaaagagggaggtttgcgctacgacagtttat

SEQ ID NO: 191190 - DNA, 75 bp, synthetic construct
  source 1..75: mol_type = other DNA
acggatacccgtcattgaaacaggttgttggtaaggtcgttaatgtcgttcatagcgatgatattacttgcatga

SEQ ID NO: 191191 - DNA, 75 bp, synthetic construct
  source 1..75: mol_type = other DNA
tgttggtaaggtcgttaatgtcgttcatagcgatgatgtcacttgcatgattaacggtgctgatttaatcgccgc

SEQ ID NO: 191192 - DNA, 75 bp, synthetic construct
  source 1..75: mol_type = other DNA
ctgccaccggtttactgcccgctgcgttaccggcgattcgtgccctgatatctggcttgccagacacctcgattc

SEQ ID NO: 191193 - DNA, 75 bp, synthetic construct
  source 1..75: mol_type = other DNA
atcgaaatcaatcgccgcgataaccactttaaactgaccggccgtccgatttgcgtcaccgctgcggcagacatt

SEQ ID NO: 191194 - DNA, 75 bp, synthetic construct
  source 1..75: mol_type = other DNA
tttagcttggctgaaatgacggaatatgtcccggcaaaggaggttaatggtcgatacattcgtgatgaaacaatg

SEQ ID NO: 191195 - DNA, 75 bp, synthetic construct
  source 1..75: mol_type = other DNA
tggtaagaattgccgcgatcttgacaacgccattgccgcagcaaaaagtctgctttcagagacattaaaatgggt

SEQ ID NO: 191196 - DNA, 75 bp, synthetic construct
  source 1..75: mol_type = other DNA
ggtgattaccagcgcctccggtaatgaagaaaatcaggagatgcaggtggtggtggtcagtgccgacagcgtgaa

SEQ ID NO: 191197 - DNA, 75 bp, synthetic construct
  source 1..75: mol_type = other DNA
atgagtagtttgttgttgtttaacgataagagcagggcgctgcaggcggatatcgtcgccgtgcagtcgcaggta

SEQ ID NO: 191198 - DNA, 75 bp, synthetic construct
  source 1..75: mol_type = other DNA
aaacagtacctggttcatctggagaaggccgttatcgtgctgctgttcttcatcgcggcaaaactgggcctgaat

SEQ ID NO: 191199 - DNA, 75 bp, synthetic construct
  source 1..75: mol_type = other DNA
cgactgaaacggtcattgttttcattgcgctttcagtcggtgccatctttattgacctgtttatgcaccgtgatg

SEQ ID NO: 191200 - DNA, 75 bp, synthetic construct
  source 1..75: mol_type = other DNA
gtcatcactcgaatacatttttccgtgatgaaactgcaatacctctttttcatgagcagattaagaagctactga

SEQ ID NO: 191201 - DNA, 75 bp, synthetic construct
  source 1..75: mol_type = other DNA
gacacaggcaatggactatgaccggattctggcaggctcccgcagccatcagaccggtgtaaacggtgaaaataa

SEQ ID NO: 191202 - DNA, 75 bp, synthetic construct
  source 1..75: mol_type = other DNA
cctcatcccgtgcccccctgcgtgacagtgcaaaacacagtgtgcgtgaactgccggtgaactggtgggtacagc

SEQ ID NO: 191203 - DNA, 75 bp, synthetic construct
  source 1..75: mol_type = other DNA
agacacttctacagttaccttgcggatggcgatgcagtcaacaaattattagccctgacggtataaccctccatc

SEQ ID NO: 191204 - DNA, 75 bp, synthetic construct
  source 1..75: mol_type = other DNA
ctccaaagcgagggcttctggacccatggagggagtggttaaaagagcaacgagaatgtggtaattataactccg

SEQ ID NO: 191205 - DNA, 75 bp, synthetic construct
  source 1..75: mol_type = other DNA
gtctcagcattcagggcggccatctcggtcacgataacaacggcggtattgcccgtggggccacgccggaaagca

SEQ ID NO: 191206 - DNA, 75 bp, synthetic construct
  source 1..75: mol_type = other DNA
tacaggctggtatggaatcacatgacgggcgctttcgtggttgcctccgaactggcccgcgcacggggtaaacgt

SEQ ID NO: 191207 - DNA, 75 bp, synthetic construct
  source 1..75: mol_type = other DNA
agttgtcgtcggcgccggatacagcatctaccctgctcagggcagacgctatggcttgtattttccgtccgccac

SEQ ID NO: 191208 - DNA, 75 bp, synthetic construct
  source 1..75: mol_type = other DNA
atgtacagacatatgcctctgatacgtcttgttgtcagagagttatcactgaataaatcacctgagccagaaata

SEQ ID NO: 191209 - DNA, 75 bp, synthetic construct
  source 1..75: mol_type = other DNA
gagatcttctctgcacaagcagcggaagagttgaaagacagcattatgacaccagcagaatacgagctgcttgtg

SEQ ID NO: 191210 - DNA, 75 bp, synthetic construct
  source 1..75: mol_type = other DNA
taaaaatggtcgtcagattgtggctgttgaaggaacagcaaataccactgtggttggcactgttgcaaatagtcg

SEQ ID NO: 191211 - DNA, 75 bp, synthetic construct
  source 1..75: mol_type = other DNA
agtttgcgctgccagcgggtagcagtaagactgtgcgctttgttgcaatggaaccagagcaaaaagaaaaaaatt

SEQ ID NO: 191212 - DNA, 75 bp, synthetic construct
  source 1..75: mol_type = other DNA
catccggtggtgccctgattgcagacagtggtgccactgttgaggggaccaatgccagcggtaagttcagtattg

SEQ ID NO: 191213 - DNA, 75 bp, synthetic construct
  source 1..75: mol_type = other DNA
cttgttgtcagagagttatcactgaagaaatcacctgagccagaaatatctgtgcctgtagcatcgctccgtcgt

SEQ ID NO: 191214 - DNA, 75 bp, synthetic construct
  source 1..75: mol_type = other DNA
atattgaagccgacacacccgcacgttataacgccgacccggatcgcctgtttgaatcctccggttgcgccggaa

SEQ ID NO: 191215 - DNA, 75 bp, synthetic construct
  source 1..75: mol_type = other DNA
ggtcatctcggtcacgataacaatggcggtattgcccgtggggccacgccggaaagcagcggcagctatggcttc

SEQ ID NO: 191216 - DNA, 75 bp, synthetic construct
  source 1..75: mol_type = other DNA
acactgaatggcggttaccagtatgtgcacaacggaggcacagcctctgacacggttgtaaacagtgacggctgg

SEQ ID NO: 191217 - DNA, 75 bp, synthetic construct
  source 1..75: mol_type = other DNA
cacgataacaacggcggtattgcccgtggggccacgccggaaagcagcggcagctatggcttcgtccgtctggag

SEQ ID NO: 191218 - DNA, 75 bp, synthetic construct
  source 1..75: mol_type = other DNA
tcagggcgacgcgctggctgtcgttttccctggctcactactggaattgtggcgggtgctgaaagcctgcgtcac

SEQ ID NO: 191219 - DNA, 75 bp, synthetic construct
  source 1..75: mol_type = other DNA
gggctggcgaccagcggtaagggtattcaggtggttgaggccattaacggtgccaccacggaggaaggggccttt

SEQ ID NO: 191220 - DNA, 75 bp, synthetic construct
  source 1..75: mol_type = other DNA
cttgatactcaccgtcccctcgtcctgcttcccgaccgtgatcagcgtacgctggcgacctggttcagaaaatat

SEQ ID NO: 191221 - DNA, 75 bp, synthetic construct
  source 1..75: mol_type = other DNA
ttgtctcgcgtgatcgcagtggagtctatgcgacagcagcacgagaaggtgcacctcaggccagacaggtggccg

SEQ ID NO: 191222 - DNA, 75 bp, synthetic construct
  source 1..75: mol_type = other DNA
gaaaattatgcttcccgatttattagtctgatgtgtgaaaaagaacctgagctgaaaatagcgcagcaactggca

SEQ ID NO: 191223 - DNA, 75 bp, synthetic construct
  source 1..75: mol_type = other DNA
gaagttttatcgcgagaacgatccgaccaacagtatgaaccctgggatcggtaagaccagtaagcggaaaaactg

SEQ ID NO: 191224 - DNA, 75 bp, synthetic construct
  source 1..75: mol_type = other DNA
tgatcgcgatgtcatgatcatcagcaccctgcgtctcgataaactgcatattctcggcaagggcgaacaggttct

SEQ ID NO: 191225 - DNA, 75 bp, synthetic construct
  source 1..75: mol_type = other DNA
atcgatggcacctgctaaaaaatattggcgatgcgcttgaacgaatgatgtacagacatatgcctctgatacgtc

SEQ ID NO: 191226 - DNA, 75 bp, synthetic construct
  source 1..75: mol_type = other DNA
acagcgaatcattattcgttgggaggacgagatgtttgctgtgcactggcagataagaggaaaacacatcataac

SEQ ID NO: 191227 - DNA, 75 bp, synthetic construct
  source 1..75: mol_type = other DNA
cctccggtttgggtatagaaatattggacgcaaatatgcgtccggtgaaactgaatgatcttcatgccgggatgc

SEQ ID NO: 191228 - DNA, 75 bp, synthetic construct
  source 1..75: mol_type = other DNA
ctgacgcgcggctgaaaattgaggttatcgagtttttcgacgaccagagcggctatgagcgcggactgacgctgc

SEQ ID NO: 191229 - DNA, 75 bp, synthetic construct
  source 1..75: mol_type = other DNA
ccggtgcaggtccccctgcgcaccctgcacggcgtcattaccggctttaaacacctctcctcgtcacaggacgaa

SEQ ID NO: 191230 - DNA, 75 bp, synthetic construct
  source 1..75: mol_type = other DNA
tcaggataatattttgccttactcggcccgtttgaagtcaacacaaaagtccgtcaatccaggactggttagcgc

SEQ ID NO: 191231 - DNA, 75 bp, synthetic construct
  source 1..75: mol_type = other DNA
ctgaaactggatgaaggaagcaattctgcttccggtttgggtattgaaattctggacggaaatatgcgcccagta

SEQ ID NO: 191232 - DNA, 75 bp, synthetic construct
  source 1..75: mol_type = other DNA
aatttttatcgaaagggaaatagataagatttctaaaataatatatttctttgatgatgatcttcttgatgaata

SEQ ID NO: 191233 - DNA, 75 bp, synthetic construct
  source 1..75: mol_type = other DNA
accaaacttaagagcaaatatatcttatggtgcacgaagagtccaaatatcttcagatcactaccctgtgagtat

SEQ ID NO: 191234 - DNA, 75 bp, synthetic construct
  source 1..75: mol_type = other DNA
gaaacgctgtggcctttagaccatttccgctacaagcaggaattgtatacggagccagaaggactcagatgtctt

SEQ ID NO: 191235 - DNA, 75 bp, synthetic construct
  source 1..75: mol_type = other DNA
gtttctcaggactataaaaaagcagcggaatattataagaacggcgataaacataatgatattacggcgcagtat

SEQ ID NO: 191236 - DNA, 75 bp, synthetic construct
  source 1..75: mol_type = other DNA
aatccggtgtgtggagaacttccggttcctctaacggtagttacagtaatcttggatcacacagaggatcattta

SEQ ID NO: 191237 - DNA, 75 bp, synthetic construct
  source 1..75: mol_type = other DNA
aagcacctgtatctcctgacaaaacccctgcatctcctgtcaggacaccagtttcctctgacaagttacctcaaa

SEQ ID NO: 191238 - DNA, 75 bp, synthetic construct
  source 1..75: mol_type = other DNA
atgatatttatcaattcaccatagaaccccgcagcggatttgcgctgattgatacgtggctttctggcgatcgcg

SEQ ID NO: 191239 - DNA, 75 bp, synthetic construct
  source 1..75: mol_type = other DNA
ctactggtgatgctgattgcgcttgtccagacgctgcgtggcaaaatcgaccagcatcgctgggtgctgaaaatg

SEQ ID NO: 191240 - DNA, 75 bp, synthetic construct
  source 1..75: mol_type = other DNA
aatggcaaacggaaccggcacctgcgccgttccatgtggttgcctggccggaacaggatcaagaacgcaatgcgt

SEQ ID NO: 191241 - DNA, 75 bp, synthetic construct
  source 1..75: mol_type = other DNA
ggctatgagcgcgggctgacgttgccactgcgccatccttcagggctacacgacggcgccacggaagcggtatgg

SEQ ID NO: 191242 - DNA, 75 bp, synthetic construct
  source 1..75: mol_type = other DNA
gcagccacaacgatatgacctttggtgaaggcacctcatcccgtgacaccctacgcgacagtgcaaaacacagtg

SEQ ID NO: 191243 - DNA, 75 bp, synthetic construct
  source 1..75: mol_type = other DNA
cggtattgcccgtggagccacgccggaaagcagcggcagctatggcttcgtccgtctggagggtgacctgctcag

SEQ ID NO: 191244 - DNA, 75 bp, synthetic construct
  source 1..75: mol_type = other DNA
acacaggcaatggactatgaccggattctggcaggctcccgcagccatcagaccggtgtaaacggtgaaaataac

SEQ ID NO: 191245 - DNA, 75 bp, synthetic construct
  source 1..75: mol_type = other DNA
aacgttggcacttattgtcggtgctactatcggcgtcattgccggtgtactttgcgcccgttatgttggttcgcc

SEQ ID NO: 191246 - DNA, 75 bp, synthetic construct
  source 1..75: mol_type = other DNA
tgaaatggcgatgtaaacgtcctctgctcgcactgttgcagggattgtttaccgttgctctgacgctgctcggcc

SEQ ID NO: 191247 - DNA, 75 bp, synthetic construct
  source 1..75: mol_type = other DNA
accccgcagcggatttgcgctgattgatacgtggctttctggcgatcgcgaggcatttaccaatgcaatcaacca

SEQ ID NO: 191248 - DNA, 75 bp, synthetic construct
  source 1..75: mol_type = other DNA
cgctgctgacccgcagccgccagaatgccatctaccagaatctgacggtaccgcaaatcgtcgaaaaaatcctgc

SEQ ID NO: 191249 - DNA, 75 bp, synthetic construct
  source 1..75: mol_type = other DNA
gaccagagcggctacgagcgcgggctgacactgccgcttcgccatccttcagggctgtttgatggtgaaacggaa

SEQ ID NO: 191250 - DNA, 75 bp, synthetic construct
  source 1..75: mol_type = other DNA
gcccgtacagggaatgccggtgatgacgcccctgcgcaccctgtacggcgtcattaccggctttaagcatctctc

SEQ ID NO: 191251 - DNA, 75 bp, synthetic construct
  source 1..75: mol_type = other DNA
aaacatttaatgctgcaagagatgtggcaaatgaactgcgcttaatgagagggcagatagaaatatacaataaca

SEQ ID NO: 191252 - DNA, 75 bp, synthetic construct
  source 1..75: mol_type = other DNA
gtgcctctcgcggatatcgggctttcgttgccggcctcaggtactgtcaacgcagctctcttgttcaggatatag

SEQ ID NO: 191253 - DNA, 75 bp, synthetic construct
  source 1..75: mol_type = other DNA
gcaactggactgtgttcgtcaggtacagaaagcacatgacatcacccgtagccaacatggtttgagcagcgcatt

SEQ ID NO: 191254 - DNA, 75 bp, synthetic construct
  source 1..75: mol_type = other DNA
gacttagcttgtcagacagaagcattgctggaaaaagctgattttgccaaatctagaatcgattttttgtctaaa

SEQ ID NO: 191255 - DNA, 75 bp, synthetic construct
  source 1..75: mol_type = other DNA
tttctgctggtgaaaaacagatttatgcaattgctattcttgaggcgctggcgaaaacctctggccgtgatttac

SEQ ID NO: 191256 - DNA, 75 bp, synthetic construct
  source 1..75: mol_type = other DNA
tcacacgattgatctggctccaagaaagcggccacatgaagtaaaccctcgtccgattgtgctgtttggcggttt

SEQ ID NO: 191257 - DNA, 75 bp, synthetic construct
  source 1..75: mol_type = other DNA
gtgcattttcccaccatcagccgtaaagacctgatggtgaccgggcagtctgcgcgggtgccagtggtgtttcag

SEQ ID NO: 191258 - DNA, 75 bp, synthetic construct
  source 1..75: mol_type = other DNA
cgacatttgtgctgagcagcggcaacaatgatctgcattttaatgcctggctacaggcaaaaagcgggcgggatg

SEQ ID NO: 191259 - DNA, 75 bp, synthetic construct
  source 1..75: mol_type = other DNA
atgaatctgactcgcacacattaccgctacgcggcgctggcggcgctgctggcgtacggcggcatggcgcaggcg

SEQ ID NO: 191260 - DNA, 75 bp, synthetic construct
  source 1..75: mol_type = other DNA
tgtcgtgataagtctgctaattattctgatcattcgcattgctgtccgtcaggggcacctgccacttcgtaatgt

SEQ ID NO: 191261 - DNA, 75 bp, synthetic construct
  source 1..75: mol_type = other DNA
cgacatgctgttcctggcacaggcggacaataatcagctgatacctgacagggttcggtttgacctcagagcaga

SEQ ID NO: 191262 - DNA, 75 bp, synthetic construct
  source 1..75: mol_type = other DNA
ataattttcgggtatttaacggtacacataccattgatctggcacccagaaagcgtccgcacgatttgaatccac

SEQ ID NO: 191263 - DNA, 75 bp, synthetic construct
  source 1..75: mol_type = other DNA
gataaagacaacttcgagtaccactatccgcgtggtttcgatgattgcttcactattgaaccagatctgccgttc

SEQ ID NO: 191264 - DNA, 75 bp, synthetic construct
  source 1..75: mol_type = other DNA
actgtgctgatgacgtaccattcattggaccgaaaacctgcgttgatttgtggattggctggggcgtaccgaaag

SEQ ID NO: 191265 - DNA, 75 bp, synthetic construct
  source 1..75: mol_type = other DNA
aatactctgaagctggaagtcagccgctcaaccattgatagcctgattacgaaagatcgtatgcgcgtcgatgta

SEQ ID NO: 191266 - DNA, 75 bp, synthetic construct
  source 1..75: mol_type = other DNA
tggattggctggggcgtaccgaaagagcgttgcatcgtggtcaaaccgggcgatgtagtaaaagtgaaagacatt

SEQ ID NO: 191267 - DNA, 75 bp, synthetic construct
  source 1..75: mol_type = other DNA
atgagtaaagtgaaaagtatcacccgtgaatcctggatcctgagcaccttcccggagtggggtagctggctgaac

SEQ ID NO: 191268 - DNA, 75 bp, synthetic construct
  source 1..75: mol_type = other DNA
ctgccggacggcatggacgatcgcgcggtgaactatctgttcaaaacgcctggcggctccctgtatcacagcggc

SEQ ID NO: 191269 - DNA, 75 bp, synthetic construct
  source 1..75: mol_type = other DNA
gcaactcattactttgcgccgaagcgtgctaaaacttaccggcgatgtactgaatgacgacccgcgcgatctgca

SEQ ID NO: 191270 - DNA, 75 bp, synthetic construct
  source 1..75: mol_type = other DNA
aagaacatctggaaaaagcactgagacaagaatgcgatggctcgctaccttatgcgcttgcgcccactattttgt

SEQ ID NO: 191271 - DNA, 75 bp, synthetic construct
  source 1..75: mol_type = other DNA
tgcagagcttgaaaaacaaagtaaagaattggcctgccagactgaagagatactggaaagagccgattttgccaa

SEQ ID NO: 191272 - DNA, 75 bp, synthetic construct
  source 1..75: mol_type = other DNA
tgaatcgtggtggtactgcgggggatgcaaacacgggtaatgtggggggcggaaacctggcggaacaagcattat

SEQ ID NO: 191273 - DNA, 75 bp, synthetic construct
  source 1..75: mol_type = other DNA
tgcaggcggcggcgatcgttgagttagccgaagctacgcgtaaaaaagcctggcggaagcagaagcacaacgtgc

SEQ ID NO: 191274 - DNA, 75 bp, synthetic construct
  source 1..75: mol_type = other DNA
accagccttaaattcaaactggcattattgcaggcgctgcctgcggtaattgagaaatccgttgagccgatgaag

SEQ ID NO: 191275 - DNA, 75 bp, synthetic construct
  source 1..75: mol_type = other DNA
ctggcggaagcagaagcacaacgtgcgctgaacgatgctatcaacgtactttctgatgaacaaaccagccttaaa

SEQ ID NO: 191276 - DNA, 75 bp, synthetic construct
  source 1..75: mol_type = other DNA
cgtgctaaacaagttgccctaatcgctgccgcgcaggatgcagaaaccaaagcggttgaactgaccgtgcgggcg

SEQ ID NO: 191277 - DNA, 75 bp, synthetic construct
  source 1..75: mol_type = other DNA
acaacagtcgcaggcggaagcgcgtgctaaccttgctcttgcggaagccgtaagcgcacaacaaaacgtggaaac

SEQ ID NO: 191278 - DNA, 75 bp, synthetic construct
  source 1..75: mol_type = other DNA
taagcgcccagcaaaacgtggaaacaactcgtcagaccgccgaagccgatcgtgccaagcaggttgctctgattg

SEQ ID NO: 191279 - DNA, 75 bp, synthetic construct
  source 1..75: mol_type = other DNA
agaacatttcaacccgaataatgcctttgacgctgagggtttgaccaagctgacccaggaaacagaacgtcgccg

SEQ ID NO: 191280 - DNA, 75 bp, synthetic construct
  source 1..75: mol_type = other DNA
ttgttatgcctatcttccatgaaataatccccatcaatatgaatacattgaaactggaagtcagtcgctcgacaa

SEQ ID NO: 191281 - DNA, 75 bp, synthetic construct
  source 1..75: mol_type = other DNA
catgagttacaggatacccgcgagaacttcgtgcagggcgtacaaaataccgtagctgaagatctgtcgaaaaac

SEQ ID NO: 191282 - DNA, 75 bp, synthetic construct
  source 1..75: mol_type = other DNA
aatgaaattggcgtttcaggcggctcactggcggcattgacttcatccttaagctcaacaactcccgtcgaagaa

SEQ ID NO: 191283 - DNA, 75 bp, synthetic construct
  source 1..75: mol_type = other DNA
gacggcatcaagattattcaggtcgatggattaaaccgaggtggtgctgcggggaatgcggcatcaggcagcgtt

SEQ ID NO: 191284 - DNA, 75 bp, synthetic construct
  source 1..75: mol_type = other DNA
aagataaattcgttgatgccctgcgcgccaccgcggcgcaaatgactatgcatgagttacaggatacccgcgaaa

SEQ ID NO: 191285 - DNA, 75 bp, synthetic construct
  source 1..75: mol_type = other DNA
cgtagctgaagatctgtcgaaaaacggcctggaactggaaagcgtttcacttaccaactttaaccagacgtcgaa

SEQ ID NO: 191286 - DNA, 75 bp, synthetic construct
  source 1..75: mol_type = other DNA
gccaaccttgcacttgcagaagcggtaagcgcccagcaaaacgtagaaaccactcgccagaccgcagaagccgat

SEQ ID NO: 191287 - DNA, 75 bp, synthetic construct
  source 1..75: mol_type = other DNA
aaagtggttatgagcggcggcgcaattgttatgccgattttccatgaaatcattcctatcaatatgaacaccctg

SEQ ID NO: 191288 - DNA, 75 bp, synthetic construct
  source 1..75: mol_type = other DNA
cgattatgattttcaaaaatggtcaggttgttgacatgctcaacggcgcagtgccgaaagcaccgttcgatagct

SEQ ID NO: 191289 - DNA, 75 bp, synthetic construct
  source 1..75: mol_type = other DNA
cgattatgattttcaagaatggtcagattgtcgacatgcttaatggcgcagtgccgaaagcgccgtttgatagct

SEQ ID NO: 191290 - DNA, 75 bp, synthetic construct
  source 1..75: mol_type = other DNA
agtgaacaaccgggttttctggcactggatacatcatcttctgcccaaggagtggggattggtatggaaaagacc

SEQ ID NO: 191291 - DNA, 75 bp, synthetic construct
  source 1..75: mol_type = other DNA
ctccaggcgaaaagcggccgggaagtgacgatgggtgaatttaccgcttctttaaccgcaacgtttgagtacctt

SEQ ID NO: 191292 - DNA, 75 bp, synthetic construct
  source 1..75: mol_type = other DNA
gtgcatttccccaccgttagccgcaaagacctgatggtgaccgggcagtcggcgcgggtgccggtagtgtttcag

SEQ ID NO: 191293 - DNA, 75 bp, synthetic construct
  source 1..75: mol_type = other DNA
cgatcatgattttcaaaaatggtcaggttgtcgacatgcttaacggcgcagtgccgaaagcaccgtttgatagct

SEQ ID NO: 191294 - DNA, 75 bp, synthetic construct
  source 1..75: mol_type = other DNA
taatgctacgtggtcagtcagagcgtgtgccattagtctttcagttgaaagattgcaaaagtgccacggcgttta

SEQ ID NO: 191295 - DNA, 75 bp, synthetic construct
  source 1..75: mol_type = other DNA
aaagattgcaaaggcccggcggattaccaggtcaaagtcacgctgaccggtacggaagacagcgaacagccagga

SEQ ID NO: 191296 - DNA, 75 bp, synthetic construct
  source 1..75: mol_type = other DNA
aatctgcatttttacggcaatttattgagtaaatcctgcaccctggtggtggatggcgaactgctggcggaagtg

SEQ ID NO: 191297 - DNA, 75 bp, synthetic construct
  source 1..75: mol_type = other DNA
cgctccccctgaatcagggaaataacagcctaaattttaatacctggctacagacgaagagcgggcggaatgtaa

SEQ ID NO: 191298 - DNA, 75 bp, synthetic construct
  source 1..75: mol_type = other DNA
taatggtagccagttggcagaagtacattttcctgccattgccgccagcgatttaatgaaccttgggcagtcaga

SEQ ID NO: 191299 - DNA, 75 bp, synthetic construct
  source 1..75: mol_type = other DNA
tcagtaaatcgtgtacgccagtgattaatggtagccagttggcagaagtacattttcctgccattgccgccagcg

SEQ ID NO: 191300 - DNA, 75 bp, synthetic construct
  source 1..75: mol_type = other DNA
tttcaaatggctcagactctggcaaaacgaagggcgtatatcgcggcgtcttccggtaacaacctcttctgacac

SEQ ID NO: 191301 - DNA, 75 bp, synthetic construct
  source 1..75: mol_type = other DNA
caacctggagcttgtgttgcacagattgcacgtgaaaatggcgtcaatgataatgttattttcgagcctgtttaa

SEQ ID NO: 191302 - DNA, 75 bp, synthetic construct
  source 1..75: mol_type = other DNA
gtaacgacctcttctgacactggcgttgaattattacctgtagaaataacgccggatgagcagaaagaacctgtg

SEQ ID NO: 191303 - DNA, 75 bp, synthetic construct
  source 1..75: mol_type = other DNA
atgatcggcagaaataatctgcgtggtatcgtcggcgcactgaaaaaaggcgaagccgtgtggttcgcccccgac

SEQ ID NO: 191304 - DNA, 75 bp, synthetic construct
  source 1..75: mol_type = other DNA
aaaaaaaaaaacaaaaaaaagaaaagaaaaaaaaaaaaaaaaaaaaaataataaataaagaaaaaaaaaatacaa

SEQ ID NO: 191305 - DNA, 75 bp, synthetic construct
  source 1..75: mol_type = other DNA
attcaaacttcgtatggtggaactggcatcacaaccaggagcctctgttgcccgtattgccggggaacacgatat

SEQ ID NO: 191306 - DNA, 75 bp, synthetic construct
  source 1..75: mol_type = other DNA
gtcgggacagggctgtatgacgatattctcggactgatgcgacgttaccatttgacgcccgtcatcactcaggag

SEQ ID NO: 191307 - DNA, 75 bp, synthetic construct
  source 1..75: mol_type = other DNA
aacacagcgttaccggagacgcttgaacacgcagtcatcgtccatgaaccgcttatggcgatgatcccgcacgat

SEQ ID NO: 191308 - DNA, 75 bp, synthetic construct
  source 1..75: mol_type = other DNA
tcgcagtgtattgctgacggcagcaggaaaacagtttcttgcagatagtcggcaaatcctgtctatggtggatga

SEQ ID NO: 191309 - DNA, 75 bp, synthetic construct
  source 1..75: mol_type = other DNA
taacatgacgccggaaaatccttcaccagagctgctcacggtgttgatccgtgaactgaacaggaggggaagatg

SEQ ID NO: 191310 - DNA, 75 bp, synthetic construct
  source 1..75: mol_type = other DNA
ggtactttgttgccgttgcggaagagctgcattttggacgcgcggctgcccgcctgaacatttcgcaaccgccgc

SEQ ID NO: 191311 - DNA, 75 bp, synthetic construct
  source 1..75: mol_type = other DNA
tggagagctacgtattggctttacgtcgtcagcaccctttattcgtgcagtgtcagatacattatcgctatttcg

SEQ ID NO: 191312 - DNA, 75 bp, synthetic construct
  source 1..75: mol_type = other DNA
agatgtcgcgacgactaacggtacctatgtgctctctcgtctttctggcgcagccatgctaaccgtaacgatggt

SEQ ID NO: 191313 - DNA, 75 bp, synthetic construct
  source 1..75: mol_type = other DNA
acacctcactggcaacaggaggtaaaattatatttagtataagcggaaaggatcaggcaaccttgtcttcgtcag

SEQ ID NO: 191314 - DNA, 75 bp, synthetic construct
  source 1..75: mol_type = other DNA
attgatgggtttggagttgagggtgttacaggtgatcatgttcttgatttttctgagttagaaataaacagtaga

SEQ ID NO: 191315 - DNA, 75 bp, synthetic construct
  source 1..75: mol_type = other DNA
tgcggtaggtgtgacgcacttcatatcattgccaactaatgaacagaatggaccaacacaagttaggatatcatc

SEQ ID NO: 191316 - DNA, 75 bp, synthetic construct
  source 1..75: mol_type = other DNA
acatctggtttttctattaaaaaatctcgtcttgaatctggtgagcttaaggatgcaggaacgtggcatcctgac

SEQ ID NO: 191317 - DNA, 75 bp, synthetic construct
  source 1..75: mol_type = other DNA
ccgactttcacgctgccagtaactttcatcgctttgtttgacccattcacggaggtttcaggagctatcgccgca

SEQ ID NO: 191318 - DNA, 75 bp, synthetic construct
  source 1..75: mol_type = other DNA
ctatttttatagaccagcctatatatattggtaacactcaaattgacattagccagtttagatgggaaggcatca

SEQ ID NO: 191319 - DNA, 75 bp, synthetic construct
  source 1..75: mol_type = other DNA
tctttgtggataaggagtccggtgtgagtttttatgtttttcatgtgctttccgtttcgttctctgtgacagctg

SEQ ID NO: 191320 - DNA, 75 bp, synthetic construct
  source 1..75: mol_type = other DNA
cattcagaatcttactgaaaatgtgccatttgtgggcaccggtgatcaatcctgtattcaggttctgtgtcacag

SEQ ID NO: 191321 - DNA, 75 bp, synthetic construct
  source 1..75: mol_type = other DNA
cagccatgttgaccgtaacgatggtaagaaaagcggattacagcggatatcgtttgtacatcaccccagagatgg

SEQ ID NO: 191322 - DNA, 75 bp, synthetic construct
  source 1..75: mol_type = other DNA
gtctaaatctatatgggattaatccacaaaaaagtattgtttatacatcaggaagtggtggttttgttatgggaa

SEQ ID NO: 191323 - DNA, 75 bp, synthetic construct
  source 1..75: mol_type = other DNA
cgccttaatcgagcaagttattttcgcccgtttatctggggacgaagccgcattatctcaaatgaccgtgaaagg

SEQ ID NO: 191324 - DNA, 75 bp, synthetic construct
  source 1..75: mol_type = other DNA
cgccttaatcgagcaagttattttcgcccgtttatctggggacgaagccgcattatctgcaatgacaataaaagg

SEQ ID NO: 191325 - DNA, 75 bp, synthetic construct
  source 1..75: mol_type = other DNA
gtaagtgtgatgcagctggttgcaccgctggtcatttttgtccccgtatttgcctttctcggcgtcaatggcgta

SEQ ID NO: 191326 - DNA, 75 bp, synthetic construct
  source 1..75: mol_type = other DNA
ttcggtgatgtcgctggcgaatgccgcatggatttgggtgccgctactggcgattgctacgatcgccgcctggtc

SEQ ID NO: 191327 - DNA, 75 bp, synthetic construct
  source 1..75: mol_type = other DNA
tgccgaccagctccctgtcttacaacgcctgcatctctggctgctgagcctgctttaccttgccaccttcggttc

SEQ ID NO: 191328 - DNA, 75 bp, synthetic construct
  source 1..75: mol_type = other DNA
cgtattgaagaactaaaccgagagcgccttgagcgagtacaggttgatgctgattacgttcttcgccaagccgta

SEQ ID NO: 191329 - DNA, 75 bp, synthetic construct
  source 1..75: mol_type = other DNA
gtcaaaaatgaagtgactggtgctgacggaggaccagtcagaacagaaattaccaacttaacgccggagcaggct

SEQ ID NO: 191330 - DNA, 75 bp, synthetic construct
  source 1..75: mol_type = other DNA
acattcgctcatcttctgcccactttcttccgccacatctttcggtgatacatcatgaatacgggaatatgatga

SEQ ID NO: 191331 - DNA, 75 bp, synthetic construct
  source 1..75: mol_type = other DNA
acgccaccggtagagaagtacaatccacgctggtgagcaaggcgcagaaccatccgaatattcgtgtgctggagc

SEQ ID NO: 191332 - DNA, 75 bp, synthetic construct
  source 1..75: mol_type = other DNA
gattcccactactctaactactatgcgaagcacggtaacgagcatcagatcgacgtggcattaggttcatacggt

SEQ ID NO: 191333 - DNA, 75 bp, synthetic construct
  source 1..75: mol_type = other DNA
gcatggccggcgtgaaaaaactgcaaccaaacctgcgtactacaccgtttgtccttgatccgtttgcgattcgcc

SEQ ID NO: 191334 - DNA, 75 bp, synthetic construct
  source 1..75: mol_type = other DNA
atttccatgtggctggcgcaggcggctaactgtctgctgggtatgggagaaaatctgcaccgcagagtctggttt

SEQ ID NO: 191335 - DNA, 75 bp, synthetic construct
  source 1..75: mol_type = other DNA
gtgagcagtacagctatggtgcggataccgtgcgtgacggtgtctccttcagcaaggtggaagaagaccgctatc

SEQ ID NO: 191336 - DNA, 75 bp, synthetic construct
  source 1..75: mol_type = other DNA
gaggctatgcgacaggatgaacgtaacctggtgagtcaccagacgcatgaagcgcgtgaacaggatgatgatcgc

SEQ ID NO: 191337 - DNA, 75 bp, synthetic construct
  source 1..75: mol_type = other DNA
cgcaagtggctatctaccatgcgccggacatcaacgcttttgcaaccggtgcgcgccgtgatgcctctctggttg

SEQ ID NO: 191338 - DNA, 75 bp, synthetic construct
  source 1..75: mol_type = other DNA
gtaaatcgtgacggtctggcgcaggtgtttgcctggcttccggcggtacaaaaagcggcagcacaacagttgtgg

SEQ ID NO: 191339 - DNA, 75 bp, synthetic construct
  source 1..75: mol_type = other DNA
cctgtgatgcacgactggcatcagtgttgtcttcggggcggcaggtggatatttacctggttgacagtcagggca

SEQ ID NO: 191340 - DNA, 75 bp, synthetic construct
  source 1..75: mol_type = other DNA
acaggcgctgcagcaacaggccgctcagtggggagtcactgaggaggattaccgtcgataccgggctctgatgga

SEQ ID NO: 191341 - DNA, 75 bp, synthetic construct
  source 1..75: mol_type = other DNA
gggtacctattgctgaagaagatgcggtttctgaaatgtggctggtctggcctaagcatcatgagcaaagcccgg

SEQ ID NO: 191342 - DNA, 75 bp, synthetic construct
  source 1..75: mol_type = other DNA
atgagccgaaagaaccggtggctgttctttattcactcaggctactgtcagtgccagctcctgcaaggtggagtt

SEQ ID NO: 191343 - DNA, 75 bp, synthetic construct
  source 1..75: mol_type = other DNA
tggaccaactgacggtcatcgaacttgaccgcgatctggcggcacgtctgcaaacgcatccattcttaggcccga

SEQ ID NO: 191344 - DNA, 75 bp, synthetic construct
  source 1..75: mol_type = other DNA
atcgccgaactgaaagcgcaacgcaatgatcttgttggtattaatgcagaatatgtacttaatcgccttcttgaa

SEQ ID NO: 191345 - DNA, 75 bp, synthetic construct
  source 1..75: mol_type = other DNA
tagtgcagcactcctgaagaaaatcaaatggcctgataaggttaaaaacctcgaacttcttggtaagcatgtttc

SEQ ID NO: 191346 - DNA, 75 bp, synthetic construct
  source 1..75: mol_type = other DNA
tgaacaccttcgttatctttatttctcgtattctcgcgcaactggccgctggcttcatgggcggtaaccgtgacg

SEQ ID NO: 191347 - DNA, 75 bp, synthetic construct
  source 1..75: mol_type = other DNA
caattgagaaagacgagatgaaccgggtgtttatcttcgggaaagttattgggagcatgccgcagacctacagga

SEQ ID NO: 191348 - DNA, 75 bp, synthetic construct
  source 1..75: mol_type = other DNA
tggtactggacttgctcgtgctttgcttgctggcacagaagagaaactgaatgcacttacgagggaggaacgata

SEQ ID NO: 191349 - DNA, 75 bp, synthetic construct
  source 1..75: mol_type = other DNA
tctaatgacagtagtcctcgatgtgagaagctagctgagtacataccgggtactttactacaatggtcgctggtt

SEQ ID NO: 191350 - DNA, 75 bp, synthetic construct
  source 1..75: mol_type = other DNA
aagataaatttgtcgatgccctccgtgcaacagcggcacaaatgaccatgcatgagttacaggatacccgcgaga

SEQ ID NO: 191351 - DNA, 75 bp, synthetic construct
  source 1..75: mol_type = other DNA
ctatattatcatgaccaagctcaaaacattatacaaagacatcaagatggttcagggaatcaaaacattgacata

SEQ ID NO: 191352 - DNA, 75 bp, synthetic construct
  source 1..75: mol_type = other DNA
ttgagccaaacaggaaaatcaacacaacttgttattatgtcgcacggtggatggaaagagatctcccatccacaa

SEQ ID NO: 191353 - DNA, 75 bp, synthetic construct
  source 1..75: mol_type = other DNA
tctttgaatattataagtattttatctgtggtagctaattttggctttaatactatgatattaaaacaggttagt

SEQ ID NO: 191354 - DNA, 75 bp, synthetic construct
  source 1..75: mol_type = other DNA
aagtaataaatgattcaggagtacaatatgatgtaattcattttggtgcttgtcgagtaaatagggatgagcaat

SEQ ID NO: 191355 - DNA, 75 bp, synthetic construct
  source 1..75: mol_type = other DNA
agaagaagaaatgaaatcacaagctatatatagaaaagaatgcgcaacaggtaatgagaagataaaaaactatgc

SEQ ID NO: 191356 - DNA, 75 bp, synthetic construct
  source 1..75: mol_type = other DNA
agtaataaatgattcaggagtacaatatgatgtaattcattttggtgcttgtcgagtaaatagggatgagcaata

SEQ ID NO: 191357 - DNA, 75 bp, synthetic construct
  source 1..75: mol_type = other DNA
tatgggcatggcggggctgggcgatctggtgcttacctgtaccgacaaccagtcgcgtaaccgccgttttggcat

SEQ ID NO: 191358 - DNA, 75 bp, synthetic construct
  source 1..75: mol_type = other DNA
tgtccgcgaactggcgcatcgcttcggcgttgaaatgccaataaccgaggaaatttatcaagtattatattgcgg

SEQ ID NO: 191359 - DNA, 75 bp, synthetic construct
  source 1..75: mol_type = other DNA
ttgaaaaggtgcacccgccatcgatatcagcatgggtagacagaaagatgagagagccggcgcaagccggttttt

SEQ ID NO: 191360 - DNA, 75 bp, synthetic construct
  source 1..75: mol_type = other DNA
ggtttatgtgcgcagttactgccgcatacgtttcggtgagctcgaacatgttcgtcagcacttccgctcttatcc

SEQ ID NO: 191361 - DNA, 75 bp, synthetic construct
  source 1..75: mol_type = other DNA
aggttgtcggcgttcatctcacgcagggtctgcacggctgccagcacgccttgcgcggccggcccgtgctgttcc

SEQ ID NO: 191362 - DNA, 75 bp, synthetic construct
  source 1..75: mol_type = other DNA
gttttggggcgaatgcgcgaacggcgctgatcacccgtggcctggctgaaatgtcgcgtctgggcacggcgttgg

SEQ ID NO: 191363 - DNA, 75 bp, synthetic construct
  source 1..75: mol_type = other DNA
aatataagaccacatccatcaccaaacctcgacgtaacaagtcatcatcgtgtattccagaaagacggaatagga

SEQ ID NO: 191364 - DNA, 75 bp, synthetic construct
  source 1..75: mol_type = other DNA
ttcgacattaaaacagcacaggccggagtcaatccgtcaatgaaagcatggattgtcctgaataagtgttcaact

SEQ ID NO: 191365 - DNA, 75 bp, synthetic construct
  source 1..75: mol_type = other DNA
gttcaggggcacgactccacactcccggtaaccgttcaagatatcgcctaccacactgctgccgtacgtcgtggc

SEQ ID NO: 191366 - DNA, 75 bp, synthetic construct
  source 1..75: mol_type = other DNA
ctgaaataccgtatttcgagtgctacacagatattccggcaatggcacgaaaactggctgcccgctttgattatg

SEQ ID NO: 191367 - DNA, 75 bp, synthetic construct
  source 1..75: mol_type = other DNA
aactacgcaatcaacttaatgatgatcctgactggcttcctgttccacgtcagcgcatctatatgcgcactgcgc

SEQ ID NO: 191368 - DNA, 75 bp, synthetic construct
  source 1..75: mol_type = other DNA
ggcataaaggcggcataggaaaaagtactgtactttgctccttatgtgtgtgtgtcatcagaaaagggaaaacag

SEQ ID NO: 191369 - DNA, 75 bp, synthetic construct
  source 1..75: mol_type = other DNA
aactgcgccgacaactcaatgatgatcctgactggcttccggttccccgccagcgtatctatatgcgtactgcgc

SEQ ID NO: 191370 - DNA, 75 bp, synthetic construct
  source 1..75: mol_type = other DNA
ctggaacgcctatctaggcaatggcaggaagagagcgttgaatttatttcaaatcagatgaatattctaaaaaat

SEQ ID NO: 191371 - DNA, 75 bp, synthetic construct
  source 1..75: mol_type = other DNA
aacgccggattcagcaaaaataacacagcccggcgcatgatatatgcccgaaaaatccacaaccggtatttcaga

SEQ ID NO: 191372 - DNA, 75 bp, synthetic construct
  source 1..75: mol_type = other DNA
cctaagacttgatttttatacaaaagacaacgacttcacaaagggactaagcgttctttcagaggtaaacaaacg

SEQ ID NO: 191373 - DNA, 75 bp, synthetic construct
  source 1..75: mol_type = other DNA
aacccaggattctcagaggaatccattaaggagctggctgataccattaaagcgcgtggcgtgaaaatgcctgtc

SEQ ID NO: 191374 - DNA, 75 bp, synthetic construct
  source 1..75: mol_type = other DNA
cctgatgaagtgcaaaagctgcttgaagaaaatgaaggtgaagatattacccgcagtgcagtgaaggttttccgt

SEQ ID NO: 191375 - DNA, 75 bp, synthetic construct
  source 1..75: mol_type = other DNA
tcagatcgcgttgatttggtcaattgcattactgctgaagtaagaaatattaaagacattaatgcttatacattc

SEQ ID NO: 191376 - DNA, 75 bp, synthetic construct
  source 1..75: mol_type = other DNA
ataccggcggacaatggatacaaaatggcggtatcgccaacaacactactgtcaccggtggtggtcttcagagag

SEQ ID NO: 191377 - DNA, 75 bp, synthetic construct
  source 1..75: mol_type = other DNA
tgtacaaacttacatcaagagtaatttcaaacattctgaaggagtcaggagcatatgagcagaaggggtacacag

SEQ ID NO: 191378 - DNA, 75 bp, synthetic construct
  source 1..75: mol_type = other DNA
cgtagggatgcagttattgaaggtgcaagtgtgataaatcaccataaattgtataggcgtttgtatcttgctcaa

SEQ ID NO: 191379 - DNA, 75 bp, synthetic construct
  source 1..75: mol_type = other DNA
aagaaaacaccggtgggcaatggatacagaatggcgggatagccggaaacaccactgtcaccacaaatggtcgtc

SEQ ID NO: 191380 - DNA, 75 bp, synthetic construct
  source 1..75: mol_type = other DNA
tcagaggccggttcagcgacgcggatgcgtaccatctggaccaggcctttccgctgctgatgaaacaactggaac

SEQ ID NO: 191381 - DNA, 75 bp, synthetic construct
  source 1..75: mol_type = other DNA
cactgttgtaaacagtgacggctggcaggtagtgaaggatggggcagtggctgaaaataccaccgttaaccagaa

SEQ ID NO: 191382 - DNA, 75 bp, synthetic construct
  source 1..75: mol_type = other DNA
aaaacactggtggatgacggcggtaccctggcagtgtctgccggtggtaaggcaacagatgtcaccatgacatcc

SEQ ID NO: 191383 - DNA, 75 bp, synthetic construct
  source 1..75: mol_type = other DNA
caaatttcaccaccgttaaccagaaaggcaaactgcaggtgaacgccggtggtacagccacgaatgtcaccctga

SEQ ID NO: 191384 - DNA, 75 bp, synthetic construct
  source 1..75: mol_type = other DNA
ggattctggcaggctcccgcagccatcagaccggtgtaaacggtgaaaataacagcgtccgtctcagcattcagg

SEQ ID NO: 191385 - DNA, 75 bp, synthetic construct
  source 1..75: mol_type = other DNA
aaattttagaaggggcattgaaggcaaacgcgtcaatgtctaataattatgctggccttctagctgacaaactcg

SEQ ID NO: 191386 - DNA, 75 bp, synthetic construct
  source 1..75: mol_type = other DNA
tgttaacgcaggagagattcactttgataatcagacgacaccggatgccgcgctgagccgtgctgttgcaaaagg

SEQ ID NO: 191387 - DNA, 75 bp, synthetic construct
  source 1..75: mol_type = other DNA
cactgacgctggctgccgggggaagtctgagtggcagaacacagctcagtaaaggcgccagcatggtactgaatg

SEQ ID NO: 191388 - DNA, 75 bp, synthetic construct
  source 1..75: mol_type = other DNA
tcaccctgggcgttcaggcaggttatggccacagcgtcagcggcagcagcgctgaaggctataacggtcaggcca

SEQ ID NO: 191389 - DNA, 75 bp, synthetic construct
  source 1..75: mol_type = other DNA
cgctatggaatgtatccgatacaccgcaatgcggtcactgaatgacgctaaaaatattcttgttgctgattgtga

SEQ ID NO: 191390 - DNA, 75 bp, synthetic construct
  source 1..75: mol_type = other DNA
agataaacaccaagtcgatatagctacttatatggagcgtaatcattatttgttagtttgttgggattacaatga

SEQ ID NO: 191391 - DNA, 75 bp, synthetic construct
  source 1..75: mol_type = other DNA
cggggatgtgttattcagtcggcagtgctacgcgccaggggagcagttcgccgacccggtttatcggccagtcgg

SEQ ID NO: 191392 - DNA, 75 bp, synthetic construct
  source 1..75: mol_type = other DNA
gtggtttcttatacctgatgtcattgaaggaacggaggaagaaaacgatgagcagttagcattagttccacactg

SEQ ID NO: 191393 - DNA, 75 bp, synthetic construct
  source 1..75: mol_type = other DNA
gcgactggatgaaagcattaaagaaaggcactccggtagactggagtaagagacgagcaaaattctacgactttg

SEQ ID NO: 191394 - DNA, 75 bp, synthetic construct
  source 1..75: mol_type = other DNA
atcagacttgataacggcgcgttttcagcatgggataaagccaaaaagaaaaagaaaacggtggactgggggaag

SEQ ID NO: 191395 - DNA, 75 bp, synthetic construct
  source 1..75: mol_type = other DNA
tcaccctgggcgttcaggcgggttatgaccacagcgtcagcggcagcagcgctgaaggctataacggtcaggcca

SEQ ID NO: 191396 - DNA, 75 bp, synthetic construct
  source 1..75: mol_type = other DNA
tcaccctgggcgttcaggccggttatgcccacagcgtcagcggcagcagcgctgaaggatataacggtcaggcca

SEQ ID NO: 191397 - DNA, 75 bp, synthetic construct
  source 1..75: mol_type = other DNA
tcaccctgggcgttcaggctggttatgtccacagcgtcagcggcagcagcgctgaaggctataacggtcaggcca

SEQ ID NO: 191398 - DNA, 75 bp, synthetic construct
  source 1..75: mol_type = other DNA
ctggctgggctcactggaaaccggtctgcccttcagtatcactgacaacctgatgctggagccacggctgcagta

SEQ ID NO: 191399 - DNA, 75 bp, synthetic construct
  source 1..75: mol_type = other DNA
ctgtcagtaccgggcttgagctggggccggactctgatgacaacaccggcggtcagcagatagcccggggtggca

SEQ ID NO: 191400 - DNA, 75 bp, synthetic construct
  source 1..75: mol_type = other DNA
caggtgaaaccgtgaacggcggaacactggaaaatcatgacaaccagattgtcttcggtacggccaacggaatga

SEQ ID NO: 191401 - DNA, 75 bp, synthetic construct
  source 1..75: mol_type = other DNA
atggataaacctacagactggcgctccggaacccgccggatattttctaatgaatttaaacttcaaatggttaaa

SEQ ID NO: 191402 - DNA, 75 bp, synthetic construct
  source 1..75: mol_type = other DNA
atattatcgatttcccatcaacccgcgtggcgatgttgccgcatcgctgtagccctgagttgctcaactacagcg

SEQ ID NO: 191403 - DNA, 75 bp, synthetic construct
  source 1..75: mol_type = other DNA
gtgttatcgatttcccatcaacccgcgtggcgatgttgccgcatcgcggtagcccggatttgctcaactacagtg

SEQ ID NO: 191404 - DNA, 75 bp, synthetic construct
  source 1..75: mol_type = other DNA
ggtatcgcggcgtcatatggacagatgggtgccggtatttacccagggcgaactgatgtttgatgatattgactt

SEQ ID NO: 191405 - DNA, 75 bp, synthetic construct
  source 1..75: mol_type = other DNA
aaacttctgccggtactggcgggaatgatgtcagatttcgggagcattcgctcccgtttgcctgctgatggcaaa

SEQ ID NO: 191406 - DNA, 75 bp, synthetic construct
  source 1..75: mol_type = other DNA
taacatgacgctggaaaatccttcaccagagctgctcacgatgttaatccgcgaactgagcgggaggggaagatg

SEQ ID NO: 191407 - DNA, 75 bp, synthetic construct
  source 1..75: mol_type = other DNA
catgaacaccctgaagctggaagtcagtcgtgcagcggctgaaagtctcataacccgcgaccgcatgcgtgttga

SEQ ID NO: 191408 - DNA, 75 bp, synthetic construct
  source 1..75: mol_type = other DNA
gttccatcacggtaaaatgacgctgaaaaatccttcaccagagctgctcacggtgttgaaccgtgaactgagcgg

SEQ ID NO: 191409 - DNA, 75 bp, synthetic construct
  source 1..75: mol_type = other DNA
agtcaccgcaggaaatcgaggacattgtgaaacttaacgaggcgatcacagctgccgatgtaacgatgcgtaccg

SEQ ID NO: 191410 - DNA, 75 bp, synthetic construct
  source 1..75: mol_type = other DNA
ggtgaacgcattgtgattaaaaatcctgaatacttttcaacatatatgcaggaagaactaaaagcactggtctaa

SEQ ID NO: 191411 - DNA, 75 bp, synthetic construct
  source 1..75: mol_type = other DNA
ggtgaacgctctgtgattaaaaatcctgaatacttttcaacatatatgcaggaagaactaaaagcactggtctga

SEQ ID NO: 191412 - DNA, 75 bp, synthetic construct
  source 1..75: mol_type = other DNA
tgacacgtccactggtcatgccagccccggaaaaggtcccggatgtcagcgaaccggtaaccgctccggataact

SEQ ID NO: 191413 - DNA, 75 bp, synthetic construct
  source 1..75: mol_type = other DNA
gcgcgggtggtcgccgacagcctgggaaattttttgaaagaactccccggcagcgggacgcctacccagccatag

SEQ ID NO: 191414 - DNA, 75 bp, synthetic construct
  source 1..75: mol_type = other DNA
atgtccgatccgatttccggtactgggctggctggtggtgtcctgacgggggccagcgtctatggatttctgtcc

SEQ ID NO: 191415 - DNA, 75 bp, synthetic construct
  source 1..75: mol_type = other DNA
ttttaattacctgaaagaaaaaacattttttattacaataatatcatttgcaataaccaggttatctccgcgatt

SEQ ID NO: 191416 - DNA, 75 bp, synthetic construct
  source 1..75: mol_type = other DNA
ggttagctggtggagccctaacgggcgctagtatttatggactgctgaccggaactgattacggcgttgtatttg

SEQ ID NO: 191417 - DNA, 75 bp, synthetic construct
  source 1..75: mol_type = other DNA
cgggcgaaagcagagaaagaagccgcagagatgcaggcggcggcaatcgttgagttagccgaagctacgcgtaaa

SEQ ID NO: 191418 - DNA, 75 bp, synthetic construct
  source 1..75: mol_type = other DNA
cgcgcagctatcaggctaacgttgaagtgcttaatacggtgaaaagcatgatgctgaaaaccctcacgctcggtc

SEQ ID NO: 191419 - DNA, 75 bp, synthetic construct
  source 1..75: mol_type = other DNA
tggcggacgcgaagggttacgtgaaaatgccaaacgtggatgtggttggggagatggttaacaccatgtcggcat

SEQ ID NO: 191420 - DNA, 75 bp, synthetic construct
  source 1..75: mol_type = other DNA
tcggtaagccattccgcgatcttggggaagtcagtggtgattcttgccaggcctctaatcaggattctccgccga

SEQ ID NO: 191421 - DNA, 75 bp, synthetic construct
  source 1..75: mol_type = other DNA
atgagcagaaaaacctgtggcggccattgtgccgtctttatccacttccactcagaccagagtcagtgccagttc

SEQ ID NO: 191422 - DNA, 75 bp, synthetic construct
  source 1..75: mol_type = other DNA
ggtggtcgccgattcgctgggaaattttttgcaaggacttcctaccagcgagacgaacacccagcctgcggaata

SEQ ID NO: 191423 - DNA, 75 bp, synthetic construct
  source 1..75: mol_type = other DNA
tctgctggcttgatgaatttgccgagcctgctatagcccgcaaaatatattcatcagcgtttccgtgcatttatt

SEQ ID NO: 191424 - DNA, 75 bp, synthetic construct
  source 1..75: mol_type = other DNA
atctggaatatttgtgcgaagaagatatcgccgcaatggcacgccatgggacggcagcggtgctgctgccgggcg

SEQ ID NO: 191425 - DNA, 75 bp, synthetic construct
  source 1..75: mol_type = other DNA
tggcgtgacgcttaacggcgcgaaggcgctggggctggatacagtttgcggttctctggaagccggaaaagaggc

SEQ ID NO: 191426 - DNA, 75 bp, synthetic construct
  source 1..75: mol_type = other DNA
ctcgatatggaactgcagcgtgcgacgcgcgggtttcatagcccacacgcgcccgataaccacaccttttccagc

SEQ ID NO: 191427 - DNA, 75 bp, synthetic construct
  source 1..75: mol_type = other DNA
tctatctcggggccgattacggtgaggtcagcggtaacagcaccactcagagtgatttaaccggacaacatctgg

SEQ ID NO: 191428 - DNA, 75 bp, synthetic construct
  source 1..75: mol_type = other DNA
tgaaaaccaaaattgttaaaggcaaaactacaaaacaggacgtgttagcatcgttcggtgaacctgacagccgtt

SEQ ID NO: 191429 - DNA, 75 bp, synthetic construct
  source 1..75: mol_type = other DNA
atgcgtaaaacagtggcttttggctttgtcggtaccgtgctggattatgccggacgcggcagtcagcgctggtcg

SEQ ID NO: 191430 - DNA, 75 bp, synthetic construct
  source 1..75: mol_type = other DNA
ttaaaacagcgtcatattttgggctgggggaatggttacacctgggtgaagcgttcccgtcgtggtgaagtttcc

SEQ ID NO: 191431 - DNA, 75 bp, synthetic construct
  source 1..75: mol_type = other DNA
ttcgctgtggttcggtaagaacggtatacatgactatacccgcgtcaatgatgatgtggcggcacagcaagctac

SEQ ID NO: 191432 - DNA, 75 bp, synthetic construct
  source 1..75: mol_type = other DNA
ggattgacccggacatccgtgcacttgtggccgcgatgaacgttcacggattccgtacatatgcgtcctgtcagg

SEQ ID NO: 191433 - DNA, 75 bp, synthetic construct
  source 1..75: mol_type = other DNA
gggaagcatcaaggatttcatcgaggaacgtaaaaccaacgaccggctgtctgaaataccgtatttcgagtgcta

SEQ ID NO: 191434 - DNA, 75 bp, synthetic construct
  source 1..75: mol_type = other DNA
atgggaaaaatcattacagttgcaggacacaaaggcggcataggaaaaagcaccgtgctttgttccttatgtgta

SEQ ID NO: 191435 - DNA, 75 bp, synthetic construct
  source 1..75: mol_type = other DNA
atacgactttaattatcgcaactcaaaaaaataaaattgaatatatgaaaaaacatattttggctacgctggatg

SEQ ID NO: 191436 - DNA, 75 bp, synthetic construct
  source 1..75: mol_type = other DNA
atggtcttcgagagaaaattcatgtcactgaaggacagacaccgtttaaaagttcagtaacaatctcatccggaa

SEQ ID NO: 191437 - DNA, 75 bp, synthetic construct
  source 1..75: mol_type = other DNA
tggtctgtttttgcgtcatttaacagtgatttccaccttgtctggcgactgcaaccggaaggagcacattactgg

SEQ ID NO: 191438 - DNA, 75 bp, synthetic construct
  source 1..75: mol_type = other DNA
taaggacagctggggctggcttaaagatcagtggcagaaggcatcgcaggcgttacgcagccaggaaaacaaaac

SEQ ID NO: 191439 - DNA, 75 bp, synthetic construct
  source 1..75: mol_type = other DNA
ggatatagtatgagttttgtttctgacagcaaaaaactactggaatacatgaacgctgagaaagagcaattggat

SEQ ID NO: 191440 - DNA, 75 bp, synthetic construct
  source 1..75: mol_type = other DNA
aaaggcaacgagcgcttaaaggtgaggtcatcaataaaattctacctttctggctagaacgaaaacagaataagt

SEQ ID NO: 191441 - DNA, 75 bp, synthetic construct
  source 1..75: mol_type = other DNA
catattccgcgcactctgcattaactacgggtcagttggctttctcactgatcatgatcgtcgggctttataccc

SEQ ID NO: 191442 - DNA, 75 bp, synthetic construct
  source 1..75: mol_type = other DNA
accggtggctgctcttactccgtctttatctactcagaccacagtcagtgccagctcctgtaaggttgagttccg

SEQ ID NO: 191443 - DNA, 75 bp, synthetic construct
  source 1..75: mol_type = other DNA
cgatttcgttcgcgaaggactcaatcagatattcaaatttcacaacccgaaagcccagaatgaatgtggctgtgg

SEQ ID NO: 191444 - DNA, 75 bp, synthetic construct
  source 1..75: mol_type = other DNA
cttaggcgtgaagcaaacaggctgcgcgggctttggctatgtgctcgacagtgttagcgagccggacaaagacga

SEQ ID NO: 191445 - DNA, 75 bp, synthetic construct
  source 1..75: mol_type = other DNA
gctccgtgggaccccacaggagcgtgcgcagttctatcactttgccattacagatggctggatgagtctgtcacg

SEQ ID NO: 191446 - DNA, 75 bp, synthetic construct
  source 1..75: mol_type = other DNA
ccgtggccaatattacttgaccactacaatgtcagtccggaaacatccatgaagctggctgctgtctatgcctgt

SEQ ID NO: 191447 - DNA, 75 bp, synthetic construct
  source 1..75: mol_type = other DNA
agccagggcatttgaggatatgaacccggttgacggtctggatgaaatgctggtcagcgtaaatgcagcaaatcc

SEQ ID NO: 191448 - DNA, 75 bp, synthetic construct
  source 1..75: mol_type = other DNA
atgcgaggcgctatcccgcaggttgctccggtattctggagcttccgtatcatggtgggctgcggctcgctgctg

SEQ ID NO: 191449 - DNA, 75 bp, synthetic construct
  source 1..75: mol_type = other DNA
cctttgtcgggcttttcttcttcggctggcagcggctgaataaataccagcacctgctggtgacgtggctggtgg

SEQ ID NO: 191450 - DNA, 75 bp, synthetic construct
  source 1..75: mol_type = other DNA
gcgcagttctatcactttgccattacagatggctggatgagccggaatgaagccagggcatttgaggatatgaac

SEQ ID NO: 191451 - DNA, 75 bp, synthetic construct
  source 1..75: mol_type = other DNA
ctctgttctctgcaaccatgccggaagcgattcgtcgcattacccgccgctttatgaaagatccgcaggaagtgc

SEQ ID NO: 191452 - DNA, 75 bp, synthetic construct
  source 1..75: mol_type = other DNA
ccagttttcgatggcgcatcaggatgttcgctattacttaaacggtatgctgtttgaaaccgaaggtgaagaact

SEQ ID NO: 191453 - DNA, 75 bp, synthetic construct
  source 1..75: mol_type = other DNA
atgtcagcgaaaaccagctgaaaatcaccgccaacaacccggaacaggaagaagcggaagagatcctcgacgtta

SEQ ID NO: 191454 - DNA, 75 bp, synthetic construct
  source 1..75: mol_type = other DNA
ttaccaacctttacggcggaacaatgatcttccctggtacttcaggctatctgaaaatggggaactgtctcatgt

SEQ ID NO: 191455 - DNA, 75 bp, synthetic construct
  source 1..75: mol_type = other DNA
tatttagcggtaagattcacttgtcaaataagacaggagaaaccgaaaacgcttatagcgagatgtacaccagaa

SEQ ID NO: 191456 - DNA, 75 bp, synthetic construct
  source 1..75: mol_type = other DNA
gtatgccctatgctggtgtcattgcacaggaagctctggaagcaattccagaagttgtaggttccgcaatgaaat

SEQ ID NO: 191457 - DNA, 75 bp, synthetic construct
  source 1..75: mol_type = other DNA
tgcccgtgcggcaattctctctaacgagaaattccgcggcgtgcgcctgtatgtcagcgaaaaccagctgaaaat

SEQ ID NO: 191458 - DNA, 75 bp, synthetic construct
  source 1..75: mol_type = other DNA
acggctgcaaagtaccgtttaaatcagagcgcatcaaagaagcgattctgcgtgcagctaaagcagcggaagtcg

SEQ ID NO: 191459 - DNA, 75 bp, synthetic construct
  source 1..75: mol_type = other DNA
ctaaaaaatattggcgatgcgcttgaacgaatgatgtacagacatatacctctgatacgtcttgttgccagtgag

SEQ ID NO: 191460 - DNA, 75 bp, synthetic construct
  source 1..75: mol_type = other DNA
ggtcgcttgctcccttcgccggttcacaccaacagtcttcacaggcgttacaaaatttacaacgtcaactgggat

SEQ ID NO: 191461 - DNA, 75 bp, synthetic construct
  source 1..75: mol_type = other DNA
agcctgatggcactattgcctttgtggtcgatttcaccggcgcagaaatgaaaaaactgccagaggatacgccgg

SEQ ID NO: 191462 - DNA, 75 bp, synthetic construct
  source 1..75: mol_type = other DNA
catgaaatacgcggactatcagcagatccagtttaatcatgacaaagcgtactggaacaatctgaagaccccatt

SEQ ID NO: 191463 - DNA, 75 bp, synthetic construct
  source 1..75: mol_type = other DNA
gtgatttctcccgctttgaagatctcgatgatcgttacgatctccgtccaagcgcatgggtgactccgaaagggg

SEQ ID NO: 191464 - DNA, 75 bp, synthetic construct
  source 1..75: mol_type = other DNA
gtcagacgacagaataacagcactggaagaagaaaatgcagaattaagacaaagattatctgcaattgaggcggc

SEQ ID NO: 191465 - DNA, 75 bp, synthetic construct
  source 1..75: mol_type = other DNA
gctgattcagggagaaacgggaaccggtaaagagctggcggctcaggcgatacatcgggaatactttgcccgcca

SEQ ID NO: 191466 - DNA, 75 bp, synthetic construct
  source 1..75: mol_type = other DNA
cgttgcagacccggctgctgcgggtgctggaagaaaaagaggtcacccgcgtcggcgggcatcagcctgttccgg

SEQ ID NO: 191467 - DNA, 75 bp, synthetic construct
  source 1..75: mol_type = other DNA
cgttgcagactcgcctgctgcgggtactggaagaaaaagaggtcacccgcgtcggcgggcatcaaccgattccgg

SEQ ID NO: 191468 - DNA, 75 bp, synthetic construct
  source 1..75: mol_type = other DNA
cgctgtttttaagtgtggaaccgacgccggatttaacgccgcagtttttgcagctgctactgccggaactggcgc

SEQ ID NO: 191469 - DNA, 75 bp, synthetic construct
  source 1..75: mol_type = other DNA
ctggagaaatttaatggcgataaaacagccgcggcgaattatttaggtatcagccgaacgacattctggcggcgg

SEQ ID NO: 191470 - DNA, 75 bp, synthetic construct
  source 1..75: mol_type = other DNA
acgacaaaccggttatctggacagtatcggtgacgcgcctgttcgagctgtttcgcgatatcagcctcgagtttg

SEQ ID NO: 191471 - DNA, 75 bp, synthetic construct
  source 1..75: mol_type = other DNA
gccgcattacgccagggattacaggcaagcgaaaccgtgctggtgcactacgactggccgggcaatattcgagaa

SEQ ID NO: 191472 - DNA, 75 bp, synthetic construct
  source 1..75: mol_type = other DNA
cagtgcgacgacttgagtcagcaggtgcagagattagtcgagcaggtggaccacttgagtcggttatttatcacg

SEQ ID NO: 191473 - DNA, 75 bp, synthetic construct
  source 1..75: mol_type = other DNA
atcagattatcgccgtgattaaatcgcttgaatacgggcgaactgttaaagatgtctgccgggaggcaggcttct

SEQ ID NO: 191474 - DNA, 75 bp, synthetic construct
  source 1..75: mol_type = other DNA
acctacatccgcaagaaactggcaaacgaacgctgtgacgccatcatcgccgctggctctaacggcgcgtacctg

SEQ ID NO: 191475 - DNA, 75 bp, synthetic construct
  source 1..75: mol_type = other DNA
caagcgaaaccgtgctggtgcactacgactggccgggcaatattcgtgaactgcgcaatatgatggagcgactgg

SEQ ID NO: 191476 - DNA, 75 bp, synthetic construct
  source 1..75: mol_type = other DNA
aacggcgccgaagcggtagttggtgctgggctaattaccgatctggcagaagaagccgggatgaccggcgttttt

SEQ ID NO: 191477 - DNA, 75 bp, synthetic construct
  source 1..75: mol_type = other DNA
atgcaagtcgacctgctgagttccgcgcaatcagcgcacgcgttaaacctcttttaccaacactctcctcttgtg

SEQ ID NO: 191478 - DNA, 75 bp, synthetic construct
  source 1..75: mol_type = other DNA
tgcgcattatcggcagttgttgctgcctgttgtgcattaccaggcgatcagttgaaaaatgtcgcatctgcctgt

SEQ ID NO: 191479 - DNA, 75 bp, synthetic construct
  source 1..75: mol_type = other DNA
ggcgctcggtgcatcgccagcgatggttatcgaaaccgaagaggccagtcagtttgcggctatcgccagtgcctt

SEQ ID NO: 191480 - DNA, 75 bp, synthetic construct
  source 1..75: mol_type = other DNA
ttaccgcgactgcgaaggtgtgctggttgcgttggttaagcgctccacaacgcttatccatgcttgaggaactga

SEQ ID NO: 191481 - DNA, 75 bp, synthetic construct
  source 1..75: mol_type = other DNA
ggatttctttcacgactcgtataaccggcaaaggtcagcagtggcttatgaagcgattgcttgatgctggtgtgc

SEQ ID NO: 191482 - DNA, 75 bp, synthetic construct
  source 1..75: mol_type = other DNA
cggtgtggattccaccgacgccgcagccaacgcgttacccgcagcacaaacactggcgaatgaaaccggggctgt

SEQ ID NO: 191483 - DNA, 75 bp, synthetic construct
  source 1..75: mol_type = other DNA
tcgcgcaccaaacagcgcctgtggaccaagggtgaaacctccggccacttcctcaatgtggtaagcatcgcgccc

SEQ ID NO: 191484 - DNA, 75 bp, synthetic construct
  source 1..75: mol_type = other DNA
aactggactgggaaaaaaccgacggactgatgccggtgattgtgcaacacgcggtatccggcgaagtgttaatgc

SEQ ID NO: 191485 - DNA, 75 bp, synthetic construct
  source 1..75: mol_type = other DNA
atgttaacagaacaacaacgtcgcgaactggactgggaaaaaaccgacggactgatgccggtaattgtgcaacac

SEQ ID NO: 191486 - DNA, 75 bp, synthetic construct
  source 1..75: mol_type = other DNA
ggtgaagaaggcgttgagaccgcgctggccgcgacggtgcatgaccgcgaagagctgaccaacgaagcgtctgat

SEQ ID NO: 191487 - DNA, 75 bp, synthetic construct
  source 1..75: mol_type = other DNA
agcattacgccggattgtgacaacgatactctgctggttctggctaaccccatcggtccgacctgccataaaggt

SEQ ID NO: 191488 - DNA, 75 bp, synthetic construct
  source 1..75: mol_type = other DNA
caccaaacgcatcgcacagaaagtaggagaagaaggcgtggaaaccgcactggccgcgacagtacatgaccgctt

SEQ ID NO: 191489 - DNA, 75 bp, synthetic construct
  source 1..75: mol_type = other DNA
cactggcgctgcgtgcatcgcaggggtcagcaaccgtagcaatcctgacaaccggcgggttactctcagaagcgg

SEQ ID NO: 191490 - DNA, 75 bp, synthetic construct
  source 1..75: mol_type = other DNA
ttaattgaattaccctttggcgaaccgtcgcagaccattacggcaatgtgcgctcaccatgccggaaaagcggtt

SEQ ID NO: 191491 - DNA, 75 bp, synthetic construct
  source 1..75: mol_type = other DNA
cggggttttttatcgcgtagggaatgatgatgccctgaaccgacgagaattgggtgagcaatcgctggtgctggt

SEQ ID NO: 191492 - DNA, 75 bp, synthetic construct
  source 1..75: mol_type = other DNA
taaaaactgtggttgaagagggatcattcttgcgcgcatcgcaaaaattgtgttgtacgcaatcgacggtaacct

SEQ ID NO: 191493 - DNA, 75 bp, synthetic construct
  source 1..75: mol_type = other DNA
gaagttgtaggttccgcaatgaaatatcaggacggtgcgagcggatcggaaggtgaagaaggtgaacgttattac

SEQ ID NO: 191494 - DNA, 75 bp, synthetic construct
  source 1..75: mol_type = other DNA
caaaaaacggcatcagcgttggacagaggttatggccctgcataacaaggaatgtagtttcagggaaatatcccg

SEQ ID NO: 191495 - DNA, 75 bp, synthetic construct
  source 1..75: mol_type = other DNA
taactacccgctgattttgtgtgaggcgctatcgattggcgtgccggtgattgccacccatagcgacgcggcgcg

SEQ ID NO: 191496 - DNA, 75 bp, synthetic construct
  source 1..75: mol_type = other DNA
tgcgcaagcggtatttgacacgtcccttaccgcattcagtcagcgcagtcgggtggcatacagtgggcaacagat

SEQ ID NO: 191497 - DNA, 75 bp, synthetic construct
  source 1..75: mol_type = other DNA
gtctggccgaaggcggcgcggcgggcgtggcgctggatctgcatcagcgcgcactccgtcaggggctgtcgtcaa

SEQ ID NO: 191498 - DNA, 75 bp, synthetic construct
  source 1..75: mol_type = other DNA
accggcgggttactctcagaagcggtgatgggattaaatccgattcagtgcgtattggtgacgctggcagcctgc

SEQ ID NO: 191499 - DNA, 75 bp, synthetic construct
  source 1..75: mol_type = other DNA
ttaatcgaattgccttttggcgaacagtcgcagaccattacggcaatgtgcgctcaccatgccggaaaagcggtt

SEQ ID NO: 191500 - DNA, 75 bp, synthetic construct
  source 1..75: mol_type = other DNA
ccgggaagacataacgcctgtagctttattatcaacgaaccacaatgtgtcttccggcagatatttgagagcacg

SEQ ID NO: 191501 - DNA, 75 bp, synthetic construct
  source 1..75: mol_type = other DNA
accttcgtctggaccctgcacgatcactggagcgtgaccgggcgctgtgcctttaccgatggctgcgaaggctgg

SEQ ID NO: 191502 - DNA, 75 bp, synthetic construct
  source 1..75: mol_type = other DNA
acactgataatatggctcgtaatgtgcgcgatgcgtttaccggattgtatttctgtgcgtctgtaaataaacacg

SEQ ID NO: 191503 - DNA, 75 bp, synthetic construct
  source 1..75: mol_type = other DNA
aagtatttgatggcaacaccaacggctccttcgtggtgtcagccctcacaaaagagtgggatacagataatcgcc

SEQ ID NO: 191504 - DNA, 75 bp, synthetic construct
  source 1..75: mol_type = other DNA
aatatgctcctgccgatttccggtcaggaactgcccattcgctggcttgcgcaacatggcagcgaaaaaccggta

SEQ ID NO: 191505 - DNA, 75 bp, synthetic construct
  source 1..75: mol_type = other DNA
aacgttcatcaggcattacttaaaaatctggaaacagagttatttgatggcaacaccaacggctccttcagtgtg

SEQ ID NO: 191506 - DNA, 75 bp, synthetic construct
  source 1..75: mol_type = other DNA
cgaaattccggcggaatacctggcaagagtccatcaggcattgcttaaaaatctggaaacagaattatttgatgg

SEQ ID NO: 191507 - DNA, 75 bp, synthetic construct
  source 1..75: mol_type = other DNA
atggttattcagcaacaaagctgctgccctggaagctgcggcctgtatttgcgacctgctaaggacagaccgcaa

SEQ ID NO: 191508 - DNA, 75 bp, synthetic construct
  source 1..75: mol_type = other DNA
gcactgctgcaattacgggaatttatcgacgaaaactccggtgaattttttgttcaggtctggggtaacggtgca

SEQ ID NO: 191509 - DNA, 75 bp, synthetic construct
  source 1..75: mol_type = other DNA
caacaagaaccagaaaaagtttgcaccacatgtggtcagaccggtggcggcaactgtcctgactgtagtgcggtg

SEQ ID NO: 191510 - DNA, 75 bp, synthetic construct
  source 1..75: mol_type = other DNA
ctcatgaagccattgagattttgaaaaacgatggtgtcatcacaggtggcagtgtcactgaaatggctgttgaaa

SEQ ID NO: 191511 - DNA, 75 bp, synthetic construct
  source 1..75: mol_type = other DNA
ccctgcccatggcgttacaccaatgatcgcgatgtaagaacgatggttgctctgggactggtgatggatttcgat

SEQ ID NO: 191512 - DNA, 75 bp, synthetic construct
  source 1..75: mol_type = other DNA
gttggatgacgcactgttgcaattacgggaatttatcgacgaaaactccggtgaattttttgttcaggtctgggg

SEQ ID NO: 191513 - DNA, 75 bp, synthetic construct
  source 1..75: mol_type = other DNA
aatattcttctgccggtttcaggtcagcttctgcctgttagatggctggcacagcacggcagcgaaaaacctgtc

SEQ ID NO: 191514 - DNA, 75 bp, synthetic construct
  source 1..75: mol_type = other DNA
ctccttcgtggtgtcagccctcacaaaagagtgggatacagataatcgccggaatgttgctacatggttattcag

SEQ ID NO: 191515 - DNA, 75 bp, synthetic construct
  source 1..75: mol_type = other DNA
taactacccgctgattttgtgtgaggcgctatcgattggtgtgccggtgattgccacccatagcgatgcggcgcg

SEQ ID NO: 191516 - DNA, 75 bp, synthetic construct
  source 1..75: mol_type = other DNA
accttcggtaagttctcgccgtttagcgcaggcaacgtggtcaatcacggttttgaaaccgacaaacgtaagctg

SEQ ID NO: 191517 - DNA, 75 bp, synthetic construct
  source 1..75: mol_type = other DNA
attacggcaccaacacaccgatcgatgaatgctacgagtgtggctttaccggcgagtttgagtgcaccagcaaag

SEQ ID NO: 191518 - DNA, 75 bp, synthetic construct
  source 1..75: mol_type = other DNA
aataagcgccaatatgcgatgtcggtggaagtactggagcagatgcaactggctccagccagtgagggaaacgca

SEQ ID NO: 191519 - DNA, 75 bp, synthetic construct
  source 1..75: mol_type = other DNA
tgcagcgaaaataatcaataagcgccaatatgcgatgtcggtggaagtactggaacagatgcaactggctccggc

SEQ ID NO: 191520 - DNA, 75 bp, synthetic construct
  source 1..75: mol_type = other DNA
gattttggttactggtgctggaggggtatttggcaaagtgctggtggaatcgggcgtcggcaaagcccttgccaa

SEQ ID NO: 191521 - DNA, 75 bp, synthetic construct
  source 1..75: mol_type = other DNA
gctaatggcgctggtttttgtgctggcagcagcgccaatcagccagggattgtttggtaataccgactatcaggg

SEQ ID NO: 191522 - DNA, 75 bp, synthetic construct
  source 1..75: mol_type = other DNA
ggcgtactggcgggagcgggtatctttaacggtgtaactaagtacgttgcccagcaccatgataatccgcagcag

SEQ ID NO: 191523 - DNA, 75 bp, synthetic construct
  source 1..75: mol_type = other DNA
taaacgtatccggatgcatgaacaaatgagcaggataatccggaagactggcacagacgaaatactctttccttg

SEQ ID NO: 191524 - DNA, 75 bp, synthetic construct
  source 1..75: mol_type = other DNA
tattgctattgttgagcgtctgcgtcaggcggtggatcagtggaaagaagaaactggctacggtttcagcctcta

SEQ ID NO: 191525 - DNA, 75 bp, synthetic construct
  source 1..75: mol_type = other DNA
agtggtgaagtcgctgaaattcgttctaccggcggtggcagcggcgagttttacagtctggttgctgcgtgactt

SEQ ID NO: 191526 - DNA, 75 bp, synthetic construct
  source 1..75: mol_type = other DNA
attacgtcggtgaccttgcccgttgcttacatcatgatgcgtaaactgctggcggcgcagtatagctgggatgaa

SEQ ID NO: 191527 - DNA, 75 bp, synthetic construct
  source 1..75: mol_type = other DNA
cgctggtattcagttctcgcgtcgataactacccgctgattttgtgtgaggcgttatcgattggcgtgccggtga

SEQ ID NO: 191528 - DNA, 75 bp, synthetic construct
  source 1..75: mol_type = other DNA
agcaactggtgcgtgagatgatggcgctgggcgacaaaatcgaactgcatacctttggtaagttctcgccgttca

SEQ ID NO: 191529 - DNA, 75 bp, synthetic construct
  source 1..75: mol_type = other DNA
acggtccagggcgttgccggattatcaataacggtattgatatggcaaccgaagcgattctggcggatctgcctc

SEQ ID NO: 191530 - DNA, 75 bp, synthetic construct
  source 1..75: mol_type = other DNA
atgtggtggtcgggatcggcggtggcagcgtgttggatgtggcgaagctgctatcggtgctttgccatccacaat

SEQ ID NO: 191531 - DNA, 75 bp, synthetic construct
  source 1..75: mol_type = other DNA
ggcgcaccggcagttccggagccggaaggtatcgcgggtgaggggagtgcttcatatggcggtgaccccacacct

SEQ ID NO: 191532 - DNA, 75 bp, synthetic construct
  source 1..75: mol_type = other DNA
gcagacagattgacaaaagggccgctgagaaaatcagcgccagtcagtcagccggaagcaaacccgaagagccgc

SEQ ID NO: 191533 - DNA, 75 bp, synthetic construct
  source 1..75: mol_type = other DNA
aaagaggcgaaagatgccgaaatcccggtcttcttgctcgaccgttccatcgatgtgaaagacaaatctctctat

SEQ ID NO: 191534 - DNA, 75 bp, synthetic construct
  source 1..75: mol_type = other DNA
aacgtggtggaactgcagggcaccgttggggccagcgtcgccattgaccgtaagaaaggctttgccgaagccatt

SEQ ID NO: 191535 - DNA, 75 bp, synthetic construct
  source 1..75: mol_type = other DNA
atgtggaaacgcttacttgtagtctctgcagtctcggcagccatgtcgtctatggcgttggccgctccattaacc

SEQ ID NO: 191536 - DNA, 75 bp, synthetic construct
  source 1..75: mol_type = other DNA
gcaagccgatgaagatcttggcttcttacctggagatatcgcagaaaagtttgctccctattttcgcccggtcta

SEQ ID NO: 191537 - DNA, 75 bp, synthetic construct
  source 1..75: mol_type = other DNA
atgccagtgacatttgaagaagtccagcaacataaaaagcttcatgattttgatgatctggaaaccacgacagta

SEQ ID NO: 191538 - DNA, 75 bp, synthetic construct
  source 1..75: mol_type = other DNA
atgaggatcttggcttcttacctggagatatcgcagaaaagtttgctccttattttcgcccggtctacgacgtgc

SEQ ID NO: 191539 - DNA, 75 bp, synthetic construct
  source 1..75: mol_type = other DNA
cgtagcgataacccatgcgggcacgcatctcgttcatgcgctctcctacccgttaggtggcaaatatcatctgcc

SEQ ID NO: 191540 - DNA, 75 bp, synthetic construct
  source 1..75: mol_type = other DNA
ctagcaggttattgagcgctacaaaaacgatgtcacttggtgcaaataaaaattcaatcagaatactttatggca

SEQ ID NO: 191541 - DNA, 75 bp, synthetic construct
  source 1..75: mol_type = other DNA
gttaaagaagaaaattcttttgagtgacggagtgaatttgcatttctataaaatgaaggcgcagcaaaaaataac

SEQ ID NO: 191542 - DNA, 75 bp, synthetic construct
  source 1..75: mol_type = other DNA
attctctcgttcatccaccagcaggatattgcatcactggtgtccggtctgttctcccgcctgcggggcggagga

SEQ ID NO: 191543 - DNA, 75 bp, synthetic construct
  source 1..75: mol_type = other DNA
cgcgccggacataacgcgcatcgggaaaatcccgctggcgttatcgcaagtctggcgcagatcttgcgtttctga

SEQ ID NO: 191544 - DNA, 75 bp, synthetic construct
  source 1..75: mol_type = other DNA
cttgccgccatgctggaggcgacttctctcgccgtccagcctgatttacgtgctaaccttagcgcccgcacattt

SEQ ID NO: 191545 - DNA, 75 bp, synthetic construct
  source 1..75: mol_type = other DNA
acccggaatccagttttcgaaatattgacttcaaccgcatcatgagtgtgctgcataaccttggatatttcgtct

SEQ ID NO: 191546 - DNA, 75 bp, synthetic construct
  source 1..75: mol_type = other DNA
ggtggcctggctacaggcattagtcaatcaactcaagctacccaacaatctcgcggatctcggcgtaccgccaga

SEQ ID NO: 191547 - DNA, 75 bp, synthetic construct
  source 1..75: mol_type = other DNA
gcactgaacgtgaagcgccttatgaacaatgtgccgtgccagcttgatctacaggacgtacaggccatttaccaa

SEQ ID NO: 191548 - DNA, 75 bp, synthetic construct
  source 1..75: mol_type = other DNA
aacgatcctcaggatctgcgcgcaaaactggaaatgctgtgggcgtcttactatggcggcgtagcgataacccat

SEQ ID NO: 191549 - DNA, 75 bp, synthetic construct
  source 1..75: mol_type = other DNA
taagatatagcgcaaaacatatgcttaaaaaacatagatatctaaaaggatttagcaactatcttttttatttta

SEQ ID NO: 191550 - DNA, 75 bp, synthetic construct
  source 1..75: mol_type = other DNA
gtgcaggcgcatgagcgtggcgatattcactatcacgatctcgattactcgccgttcttcccgatgttcaactgc

SEQ ID NO: 191551 - DNA, 75 bp, synthetic construct
  source 1..75: mol_type = other DNA
ggcgtaccagcggttcctgagccggaaggtatcgcgggtgacgggagtgcttcagatggcggtgaacctacacct

SEQ ID NO: 191552 - DNA, 75 bp, synthetic construct
  source 1..75: mol_type = other DNA
ttaatgtaccatctatatcaaggaaaagaaatcgttcaggttatttatcatggagtgaaaaggctgaaaatggtc

SEQ ID NO: 191553 - DNA, 75 bp, synthetic construct
  source 1..75: mol_type = other DNA
ttaccattcatagcattttggactggatcgaggacaacctggaatcaccactgtcactggagaaagtgtcagagc

SEQ ID NO: 191554 - DNA, 75 bp, synthetic construct
  source 1..75: mol_type = other DNA
ctgaaggaaagtaacgagccgatactctatctggcagaacgatatggcttcgagtcgcaacaaactctgacccga

SEQ ID NO: 191555 - DNA, 75 bp, synthetic construct
  source 1..75: mol_type = other DNA
acgccagaaagagggtattgaactggctaaacggcaaggccggtatcaggggcgaactgcagatctacggcttca

SEQ ID NO: 191556 - DNA, 75 bp, synthetic construct
  source 1..75: mol_type = other DNA
gtcgatgtcgcctcgttcaaggcgtgggatgattttgccgcggataaacacagtctctattttgaaggcaagcgc

SEQ ID NO: 191557 - DNA, 75 bp, synthetic construct
  source 1..75: mol_type = other DNA
atgcactatcgcaatgtggtttgtttgttgtcttgtttgttgtcttgtttgttgtcttgttcgttgtttttatcg

SEQ ID NO: 191558 - DNA, 75 bp, synthetic construct
  source 1..75: mol_type = other DNA
atctaacaaccgactacctctatgaaggcgcacaagcctggtatcctcattactcctggcatagcgatggccgca

SEQ ID NO: 191559 - DNA, 75 bp, synthetic construct
  source 1..75: mol_type = other DNA
gccgccggaggagctgaagcagcgcgtgaaggatgcggcacaactcaacattccggtggttatccggggaatggt

SEQ ID NO: 191560 - DNA, 75 bp, synthetic construct
  source 1..75: mol_type = other DNA
atctgtaacgcgcctgttcgagctgtttcgcgatatcagcctcgagtttgatcacctggcgaatatcacccctat

SEQ ID NO: 191561 - DNA, 75 bp, synthetic construct
  source 1..75: mol_type = other DNA
gttgattgagggggaaacggggacgggcaaagagctggcggcccaggcgattcatcgggaatatttttcccgcca

SEQ ID NO: 191562 - DNA, 75 bp, synthetic construct
  source 1..75: mol_type = other DNA
acgccagaaagagggcattgagctggctaaacggcaaggccggtatcaggggcgaactgcagatctacggctcca

SEQ ID NO: 191563 - DNA, 75 bp, synthetic construct
  source 1..75: mol_type = other DNA
atgaaacgagtaatggtatcgctggtcctgcttctggtcagcggagtcggaatggcgaatgaccatacggagagc

SEQ ID NO: 191564 - DNA, 75 bp, synthetic construct
  source 1..75: mol_type = other DNA
agagcaataccggtggggtacagatagacccgaccacgtttcgtaaatacaacattaccgccgtgccggtgctga

SEQ ID NO: 191565 - DNA, 75 bp, synthetic construct
  source 1..75: mol_type = other DNA
ggggtaaattacaaaacgggatatctggacggaaaaattaccgatgacggcgaatttattcctgccccgcgcaat

SEQ ID NO: 191566 - DNA, 75 bp, synthetic construct
  source 1..75: mol_type = other DNA
atgcggtgtgtttgatgctttagccatccgtgaactgcgcctttctgacggggcgttacgcgaaggcgtactgta

SEQ ID NO: 191567 - DNA, 75 bp, synthetic construct
  source 1..75: mol_type = other DNA
gcaacaaccacgccgccgactttaacgctgattaccgatgacagccactggacgctgcgttttcctcatgactgg

SEQ ID NO: 191568 - DNA, 75 bp, synthetic construct
  source 1..75: mol_type = other DNA
gcaaaacgttcgctcaggatctgactaaccagaaaggcgaagatgcgtggcctatcacctctaccacgttcattc

SEQ ID NO: 191569 - DNA, 75 bp, synthetic construct
  source 1..75: mol_type = other DNA
gaagggaaagaagcgttgcgatcactggttagccagactctaggaataggtctgcaatatatgtctcgtggtctt

SEQ ID NO: 191570 - DNA, 75 bp, synthetic construct
  source 1..75: mol_type = other DNA
cactgattcagctattgcgccttggcgtattactcaacaatcaacgtcaggcaaccaccacaccgccaacattaa

SEQ ID NO: 191571 - DNA, 75 bp, synthetic construct
  source 1..75: mol_type = other DNA
cgtattgctcaacaatcaacgtcaggcgactaccacgccgccaacattaacgctgattaccgatgacagccactg

SEQ ID NO: 191572 - DNA, 75 bp, synthetic construct
  source 1..75: mol_type = other DNA
ggcaacgctggaccgccagcgcagcatcgaagtggatgcggtaattgccgccaccggactgcgcccggaaaccgc

SEQ ID NO: 191573 - DNA, 75 bp, synthetic construct
  source 1..75: mol_type = other DNA
ggcgggaatgcttcagcggtgaccgtgatgcggtgcgtcgtcaggctactgcgtatgcattgcagaccttgtggc

SEQ ID NO: 191574 - DNA, 75 bp, synthetic construct
  source 1..75: mol_type = other DNA
agcggctcgtgctgattatgccgtgtctattagtggtatcgccgggccggatggcggcagtgaagagaagcctgt

SEQ ID NO: 191575 - DNA, 75 bp, synthetic construct
  source 1..75: mol_type = other DNA
ggcgacatctacctgggcaaaatcaagaagtgggatgatgaagccatcgccaaattgaatccgggcttaaaactg

SEQ ID NO: 191576 - DNA, 75 bp, synthetic construct
  source 1..75: mol_type = other DNA
ccagcgcctttgtcccgccagtgcctgggcgtgagttaatgctgacgttaaatagtcagcaagagtatcgcgcct

SEQ ID NO: 191577 - DNA, 75 bp, synthetic construct
  source 1..75: mol_type = other DNA
ccgccgacagcatggatgagtacaacaaacctgacctcagccatgtgatcagtcaggggcaacgtgccgacgacc

SEQ ID NO: 191578 - DNA, 75 bp, synthetic construct
  source 1..75: mol_type = other DNA
actgttcaaaatatggagttgattttatatctgttaataaaaacatcaactttaatgaaaaactttatttcaatt

SEQ ID NO: 191579 - DNA, 75 bp, synthetic construct
  source 1..75: mol_type = other DNA
aataatcagttgaaacctgtgctacttcgtgatgagtttagtattaccaaaaagaacaattcaactatcgacagt

SEQ ID NO: 191580 - DNA, 75 bp, synthetic construct
  source 1..75: mol_type = other DNA
aagctcggcgttgtaaatatgcatgtaacgctggcagatgagcggcactatgcttgtgccacggtaattattgaa

SEQ ID NO: 191581 - DNA, 75 bp, synthetic construct
  source 1..75: mol_type = other DNA
atgccatccttcagcttaatcagcgcagcaatgaacgtctttataaccctcaaaccggtttttatgcacaacaag

SEQ ID NO: 191582 - DNA, 75 bp, synthetic construct
  source 1..75: mol_type = other DNA
tgagtatacgcagcagtttgatgctcaggtcgaacaactggctatgtcgctgccggatgaacaggctcgtaatgc

SEQ ID NO: 191583 - DNA, 75 bp, synthetic construct
  source 1..75: mol_type = other DNA
tagacgatgatttattatatctatgtggtcacggtggagatcatattttcggacaaaatccttcagaactttttg

SEQ ID NO: 191584 - DNA, 75 bp, synthetic construct
  source 1..75: mol_type = other DNA
tgacgcacattttctttatatcgatgggcaccgttttgataacccggagagtttttccgtggtcgcgcaaaaatc

SEQ ID NO: 191585 - DNA, 75 bp, synthetic construct
  source 1..75: mol_type = other DNA
atctgatcatcaataaacgttttaatgccggaaggcatcatggctatttactcacccgatcaacaaattgggacg

SEQ ID NO: 191586 - DNA, 75 bp, synthetic construct
  source 1..75: mol_type = other DNA
ttgacgatcagctttatcgcacgccctccccctgtccggcgaaaacacgcgtcagagaagagaatgtgcgtgaag

SEQ ID NO: 191587 - DNA, 75 bp, synthetic construct
  source 1..75: mol_type = other DNA
accgatgacaatggcggagaaaatagtctagatattaaaacgctgcatcaggtgaaattccgttccccctggaaa

SEQ ID NO: 191588 - DNA, 75 bp, synthetic construct
  source 1..75: mol_type = other DNA
atttttgctattgatggaccattgaaaaccaccgaacgtttcgcttatgacaatcgctatgtttatacctggatc

SEQ ID NO: 191589 - DNA, 75 bp, synthetic construct
  source 1..75: mol_type = other DNA
gtttggtgattgataaacgttttaacgcgggaagaactcacggctatttactgaccaaattacaagttgatggcg

SEQ ID NO: 191590 - DNA, 75 bp, synthetic construct
  source 1..75: mol_type = other DNA
cactatgcgttaaaactcgatgcttacggaaaattgtctgcattgcttcagagatcaaatgaagcaattcaggcg

SEQ ID NO: 191591 - DNA, 75 bp, synthetic construct
  source 1..75: mol_type = other DNA
cactggcaccggaaaccaacggtcaggtagccgtgaaagcctgggctgccctgagcgaatttaccggtcgtgacc

SEQ ID NO: 191592 - DNA, 75 bp, synthetic construct
  source 1..75: mol_type = other DNA
cagaaaacagcggacacaccacgtaatccgttcaggagcacaaccggaacggctgcagaccaggcacaggtacca

SEQ ID NO: 191593 - DNA, 75 bp, synthetic construct
  source 1..75: mol_type = other DNA
tgtggctggcagaacagaaagatgtgcttagcacgattctgaaaactggtaaattaccgtctccccaggtggtcg

SEQ ID NO: 191594 - DNA, 75 bp, synthetic construct
  source 1..75: mol_type = other DNA
ggcgtcagccgggctttgccctgggcggcgtcggctcacatttctttgttgaatttgaaattgccgatctggacc

SEQ ID NO: 191595 - DNA, 75 bp, synthetic construct
  source 1..75: mol_type = other DNA
gcgcaggcaatagggcaactggagcaggagcttggccgcaatgccacagaaactgaagtggcagaacgtttaggg

SEQ ID NO: 191596 - DNA, 75 bp, synthetic construct
  source 1..75: mol_type = other DNA
attgatgcggcagagatgatcctgacactggcaccggaaaccaacggtcaggtagccgtgaaagcctgggctgcc

SEQ ID NO: 191597 - DNA, 75 bp, synthetic construct
  source 1..75: mol_type = other DNA
gtgttctggcgtaaagggcctgcttgtaaacaggaagaattatccggactcgatcctgaacagttccaccccatc

SEQ ID NO: 191598 - DNA, 75 bp, synthetic construct
  source 1..75: mol_type = other DNA
taacccgcaatggaaaccagactggctaggtttgattctccgtgacaagcactatctttacgcaaatggtcagcg

SEQ ID NO: 191599 - DNA, 75 bp, synthetic construct
  source 1..75: mol_type = other DNA
gcactggcgtaaaaaagctcactcccgccagagccgccatcgctgaactggtgcgtcgctactgggtattgggga

SEQ ID NO: 191600 - DNA, 75 bp, synthetic construct
  source 1..75: mol_type = other DNA
atgtagaagagagcgaggaaggaaatacccgggtctattacctgaaatatgctaaagccacgaatctggttgatg

SEQ ID NO: 191601 - DNA, 75 bp, synthetic construct
  source 1..75: mol_type = other DNA
gctgcttgctggcagcactactcatgccttgtgcaggacacgctgagaacgaacaatacggcgctaacttcaata

SEQ ID NO: 191602 - DNA, 75 bp, synthetic construct
  source 1..75: mol_type = other DNA
attccagtttacacgtgtttgaatctgacggaccgctgatcttactggataaccgctctccggatgaacgcgaag

SEQ ID NO: 191603 - DNA, 75 bp, synthetic construct
  source 1..75: mol_type = other DNA
tctgatgattgtcgatttaatgcgtaatgatatcggtcgtgttgccgtagccggttcggtaaaagtaccagagct

SEQ ID NO: 191604 - DNA, 75 bp, synthetic construct
  source 1..75: mol_type = other DNA
gtatggcgaaaaatttcgtcaggtgcaggaatatttgcacagtggcgactgttaccaggtgaatctcgcccagcg

SEQ ID NO: 191605 - DNA, 75 bp, synthetic construct
  source 1..75: mol_type = other DNA
tgaaagcgaaaaacgcacaacgaccactgatgacccgctacaggtgctccagcaggtgctggatcgcgcagacat

SEQ ID NO: 191606 - DNA, 75 bp, synthetic construct
  source 1..75: mol_type = other DNA
gtacggcgaaaaatttcgccaagtacaggaatatctgcacagcggtgattgctatcaggtgaatctcgcccagcg

SEQ ID NO: 191607 - DNA, 75 bp, synthetic construct
  source 1..75: mol_type = other DNA
ccggaactgtttgtggtggaaccttttcccgctgtgcaccacctggtgagcaccattacagctcaactacccgaa

SEQ ID NO: 191608 - DNA, 75 bp, synthetic construct
  source 1..75: mol_type = other DNA
atggaaattatcgacgaactggaacctcagcgacgcaacgcctggtgtggcagcattggctatttaagtttttgc

SEQ ID NO: 191609 - DNA, 75 bp, synthetic construct
  source 1..75: mol_type = other DNA
atagagatcttcacaacttctttagaaagcatcgcacatcacatacagagtttcagagagtccgagaatggtttg

SEQ ID NO: 191610 - DNA, 75 bp, synthetic construct
  source 1..75: mol_type = other DNA
tgaggaagcgaaagagattttaatagaattttaccgcgataatggttatacagacgttcacaacttctttaagaa

SEQ ID NO: 191611 - DNA, 75 bp, synthetic construct
  source 1..75: mol_type = other DNA
attttgacattaagcgattctatcgagtagatgacggtcctatctatcggttgcagtggacaccgattagggaag

SEQ ID NO: 191612 - DNA, 75 bp, synthetic construct
  source 1..75: mol_type = other DNA
acagtctataacctcttcgggcaaccaacctggaaaaatttatatcttcttgatatgtttaacctaaaagaatta

SEQ ID NO: 191613 - DNA, 75 bp, synthetic construct
  source 1..75: mol_type = other DNA
atgctaattaatcagcaacaaagagatgaattagaattagcattttcttattgtaccggtcatgaatatcgttta

SEQ ID NO: 191614 - DNA, 75 bp, synthetic construct
  source 1..75: mol_type = other DNA
ttcacaacttctttaagaagcatagaacatcacatacagagtttcggagagtccgagattggtttgattttgata

SEQ ID NO: 191615 - DNA, 75 bp, synthetic construct
  source 1..75: mol_type = other DNA
caatgctacagcgtggctttgatttgcagttgattatggaaatgaccgggctttctcaggaagacctttatcaat

SEQ ID NO: 191616 - DNA, 75 bp, synthetic construct
  source 1..75: mol_type = other DNA
ttatattgcgacaggaagttcgctacgttacgcattatggggcggtttaatgtccactcgcgctatgcatcttaa

SEQ ID NO: 191617 - DNA, 75 bp, synthetic construct
  source 1..75: mol_type = other DNA
ttcagttgatgcgtacgcagttatttactgccgttgttggcgatattcttgataccaaaggatatttgcatcagt

SEQ ID NO: 191618 - DNA, 75 bp, synthetic construct
  source 1..75: mol_type = other DNA
tgcaaacgctggaccggatcggctggcttgaaaaaacctgtgcgcacggattcagagccgcattcagcacagcag

SEQ ID NO: 191619 - DNA, 75 bp, synthetic construct
  source 1..75: mol_type = other DNA
aaagcgcagtttgagtatctgttcgtatccaaagtgagcgcactaacaatcggtgatctttaccggctctatgat

SEQ ID NO: 191620 - DNA, 75 bp, synthetic construct
  source 1..75: mol_type = other DNA
gagaaggcaattcttgctttgaaaaaatactatgtcgatggggtcatcaggaaaattgatcctacccacgtaatg

SEQ ID NO: 191621 - DNA, 75 bp, synthetic construct
  source 1..75: mol_type = other DNA
agaggtattcgggcgactgacgcacaaatacaaaaagatggcagaaggtgaacatgaaccgccccgggtttcctg

SEQ ID NO: 191622 - DNA, 75 bp, synthetic construct
  source 1..75: mol_type = other DNA
ggtgacatctacctgggcaaaatcaaaaagtgggatgacgaagccatcgctaaactcaatccgggtctgaaactg

SEQ ID NO: 191623 - DNA, 75 bp, synthetic construct
  source 1..75: mol_type = other DNA
agaaaaaaaatgtcagataaactgaatgaacgggctgcaaatattattattgaggaactaagtaaacatccctgt

SEQ ID NO: 191624 - DNA, 75 bp, synthetic construct
  source 1..75: mol_type = other DNA
gtttacaccaggcactaaagaataatgatattgaggcagggtggttggcaggcctcgatgagggattgaataatg

SEQ ID NO: 191625 - DNA, 75 bp, synthetic construct
  source 1..75: mol_type = other DNA
tgtttacctgtcagcaccagttatcgccatccttcgcacattgtatacacccggatcgctgccggacagttatat

SEQ ID NO: 191626 - DNA, 75 bp, synthetic construct
  source 1..75: mol_type = other DNA
tgagcagggtgtagaagtgctgaagttcttcgactgggcgtacaaaaccggggctaaacaggctaacgacctgga

SEQ ID NO: 191627 - DNA, 75 bp, synthetic construct
  source 1..75: mol_type = other DNA
gggctaaacaggcgaacgacctggattacgccagcctgccggatagtgtagttgaacaggttcgcgctgcgtgga

SEQ ID NO: 191628 - DNA, 75 bp, synthetic construct
  source 1..75: mol_type = other DNA
cctgtcaaagcttccgggcaaacattgcagacgattttttctcgtaacgaagagtttattagaatttcacaaaga

SEQ ID NO: 191629 - DNA, 75 bp, synthetic construct
  source 1..75: mol_type = other DNA
catgccttgtaatcttttctttatttaaaggtaatgatagaagagtattaaatgcttctatgatcatccttggca

SEQ ID NO: 191630 - DNA, 75 bp, synthetic construct
  source 1..75: mol_type = other DNA
gtcagaaacggatcggttacccacattgagcaccacaaatcaggctcagttataaccacagaatgggcaattcac

SEQ ID NO: 191631 - DNA, 75 bp, synthetic construct
  source 1..75: mol_type = other DNA
ttttatgtttcgcgaaataccgtttattcccgtgaaatctgccgggaaaaatcaggcgctacattttgtttttaa

SEQ ID NO: 191632 - DNA, 75 bp, synthetic construct
  source 1..75: mol_type = other DNA
gttcatgtttcgtgaaataccgtttattcctgtgaaatctgccgggaaaaatcaggcgttacgttttgtgtttaa

SEQ ID NO: 191633 - DNA, 75 bp, synthetic construct
  source 1..75: mol_type = other DNA
tgagatctccatgaatgaaattgaaattccgccattgcgcaaacgtcgtgaagatctcaagcaaatgattgacga

SEQ ID NO: 191634 - DNA, 75 bp, synthetic construct
  source 1..75: mol_type = other DNA
ccctggaaaacgaactggatggcttcaccttcgaagacaataaagacgaccagttcgctgtcggtgcccaggctg

SEQ ID NO: 191635 - DNA, 75 bp, synthetic construct
  source 1..75: mol_type = other DNA
ccgcgtttgaaatgcatatcctgaagcgtccaggcgcagaagcggattacaccgaagaagaaattgctcaggctg

SEQ ID NO: 191636 - DNA, 75 bp, synthetic construct
  source 1..75: mol_type = other DNA
catcagcagcccgcgccatacccggagttacagctacagcaccaccggcaggctgaccggcgttcacaccaccac

SEQ ID NO: 191637 - DNA, 75 bp, synthetic construct
  source 1..75: mol_type = other DNA
ctcaccctggacaccgccaaagagctggctatggtcgaacgcaacgaaaaaggccgccagatccgccgatacttc

SEQ ID NO: 191638 - DNA, 75 bp, synthetic construct
  source 1..75: mol_type = other DNA
tcggcagaagctaaaagatgcagagaaaggtttgctggatattgtctaccgaataagcgaaggctcaagccaagc

SEQ ID NO: 191639 - DNA, 75 bp, synthetic construct
  source 1..75: mol_type = other DNA
aaaacagattatcgctaacaccgttgatttcggtgcttctgacgcgccgctgtctgacgaaaaactggctcagga

SEQ ID NO: 191640 - DNA, 75 bp, synthetic construct
  source 1..75: mol_type = other DNA
gcttcggacatcagtgtgttggtgcgcagccgtcaggaggccgccctggtgcgcgatgccttaacgctgctggac

SEQ ID NO: 191641 - DNA, 75 bp, synthetic construct
  source 1..75: mol_type = other DNA
ccgcaacaagggatttacgcgacccgccccgatgccgggttgattgccctgatggatgagatgtttgctggtatg

SEQ ID NO: 191642 - DNA, 75 bp, synthetic construct
  source 1..75: mol_type = other DNA
gcagccgccaggaggccgcccaggtgcgcgatgccttaacgttgctggaaatcccttccgtttacctttcgaacc

SEQ ID NO: 191643 - DNA, 75 bp, synthetic construct
  source 1..75: mol_type = other DNA
cggctttgaatcgcagtgggaaccggtgttgaccgagtggatcacggctgtcctccaggcacctctcaatgaaac

SEQ ID NO: 191644 - DNA, 75 bp, synthetic construct
  source 1..75: mol_type = other DNA
agaacaccctgcgtagtgcgctggcaacgtcaatgatggggctgaatgcgctggatattgaaacgctgaataatg

SEQ ID NO: 191645 - DNA, 75 bp, synthetic construct
  source 1..75: mol_type = other DNA
acaacgattgcccggcgataactggcgtgtcaccagctactccggtttgcagcagcgtggtcacggtatcgctca

SEQ ID NO: 191646 - DNA, 75 bp, synthetic construct
  source 1..75: mol_type = other DNA
tgaatcagctttccgatcgcgataaacaggtggagatggagttttacctgccgattagtgaaccgcttatcgcca

SEQ ID NO: 191647 - DNA, 75 bp, synthetic construct
  source 1..75: mol_type = other DNA
ttggcggcgttatttatctgttcctgcgtggcgttgataaagaacatccgcaacaggggatttacacaacccgac

SEQ ID NO: 191648 - DNA, 75 bp, synthetic construct
  source 1..75: mol_type = other DNA
atgaatttcaggataccgacccccagcagtaccgaatttttcgccgtatctggcaccatcagccggaaaccgcat

SEQ ID NO: 191649 - DNA, 75 bp, synthetic construct
  source 1..75: mol_type = other DNA
aaactggaacttggcggctttgaaccgcagtgggaaccggtgttgactgagtggatcaccgctattcttcaggcg

SEQ ID NO: 191650 - DNA, 75 bp, synthetic construct
  source 1..75: mol_type = other DNA
ctgtattgaagcgttatgcgatgatgatattgcctggcaaacggcacaaactggtgataaccagccctggcaggt

SEQ ID NO: 191651 - DNA, 75 bp, synthetic construct
  source 1..75: mol_type = other DNA
ttacacccaacaggctatggcagcggcgatgcaggcacaccgctatgatctgcaatatcagctttataccctggc

SEQ ID NO: 191652 - DNA, 75 bp, synthetic construct
  source 1..75: mol_type = other DNA
actgatgacgcgttcatgtttcgcgaaataccgtttattccagtgaaatcagccgggaaaaatcaggcgttacgt

SEQ ID NO: 191653 - DNA, 75 bp, synthetic construct
  source 1..75: mol_type = other DNA
aatttcgggtgccgacctgacgcgcccgttaagcgataatcagtttgaacagctttaccatgcggtgctgcgcca

SEQ ID NO: 191654 - DNA, 75 bp, synthetic construct
  source 1..75: mol_type = other DNA
gaagcaatggcgaaaaaactggcgaaaggcattgaagtgaagccaggcgaaattgtcattccgtttactgattaa

SEQ ID NO: 191655 - DNA, 75 bp, synthetic construct
  source 1..75: mol_type = other DNA
atgggcgcagctgtattcctcgcaagtccggcttcaaattatgtcaatgggcatttattagtggtcgatggtggt

SEQ ID NO: 191656 - DNA, 75 bp, synthetic construct
  source 1..75: mol_type = other DNA
gaattgttgatgtcagcgagaaagagagcgaagccttgttaggttttttgtttgcccatatcaccaaaccggagt

SEQ ID NO: 191657 - DNA, 75 bp, synthetic construct
  source 1..75: mol_type = other DNA
gagtgaagcattgttaggttttttattcactcatattaccaaaccggaatttcaggtgcgctggcgttggcagcc

SEQ ID NO: 191658 - DNA, 75 bp, synthetic construct
  source 1..75: mol_type = other DNA
gccattacgccgcagcagcaacgcgcgctggcccagcgttttggcgagctgcatattcatcctgtttaccctcat

SEQ ID NO: 191659 - DNA, 75 bp, synthetic construct
  source 1..75: mol_type = other DNA
cagggctgtttcaacggcgaatgctctactggcaccgctttgccccagaaagccgcatgatgcgtaaagtcactg

SEQ ID NO: 191660 - DNA, 75 bp, synthetic construct
  source 1..75: mol_type = other DNA
cgtggtttatcggcggattcttcgcggtgctgtacctcaaggtggacatcatggcgatggcgattttcggcacct

SEQ ID NO: 191661 - DNA, 75 bp, synthetic construct
  source 1..75: mol_type = other DNA
gtactacgtttcccagtggtgttcgccgccaactacttcggccagaacgtagtggaaagtttcctcaagctgatg

SEQ ID NO: 191662 - DNA, 75 bp, synthetic construct
  source 1..75: mol_type = other DNA
aggtaatgtgtattcgcggactttagtgctttctgcggtgttttgtcttagtgcaactgctctccacttgttcgg

SEQ ID NO: 191663 - DNA, 75 bp, synthetic construct
  source 1..75: mol_type = other DNA
tatttccccaacggtgtaacgcgttctgcattgctgaaagcgccagtcgtcgcctttgaccatcttgacgatatg

SEQ ID NO: 191664 - DNA, 75 bp, synthetic construct
  source 1..75: mol_type = other DNA
cgcctttgaccatcttgacgatatgcaccaggcctttttgcagcaaaacttcgatctgcccccaggcagcgtacc

SEQ ID NO: 191665 - DNA, 75 bp, synthetic construct
  source 1..75: mol_type = other DNA
atgagaaacggcttcaacggcctggcggcaaaggtgcagacgacgctgaaagacgatccgatgtcaggtcacgtt

SEQ ID NO: 191666 - DNA, 75 bp, synthetic construct
  source 1..75: mol_type = other DNA
gaacgggtacagctttttgatatgttcccgcacactgcgcattacgaagtgctgacactgctggttaagcaataa

SEQ ID NO: 191667 - DNA, 75 bp, synthetic construct
  source 1..75: mol_type = other DNA
gctgaactgggcttaacgcgtttgcaatttcaggcgctggactccacgcagtttgccaccgcccagggggaagtg

SEQ ID NO: 191668 - DNA, 75 bp, synthetic construct
  source 1..75: mol_type = other DNA
tttgtgactgcccgctttatccagcctcatttgcgcccgtttttgcggcgctaaaaccgtttatcgcccgtgcgg

SEQ ID NO: 191669 - DNA, 75 bp, synthetic construct
  source 1..75: mol_type = other DNA
ggcgctggctgagcgttttaacgatgtgccgctgtggatccgtccgcaaagtttcttccagactaatccggcggt

SEQ ID NO: 191670 - DNA, 75 bp, synthetic construct
  source 1..75: mol_type = other DNA
attgaacgggtgcagcttttcgatatgttcccgcacaccgcgcattatgaagtgttgacactgctggtaaaaatt

SEQ ID NO: 191671 - DNA, 75 bp, synthetic construct
  source 1..75: mol_type = other DNA
aggcacaattgccgcagctaaaagttatcaccgtcaatattcagccggtacatatggcgattatggaaggggaga

SEQ ID NO: 191672 - DNA, 75 bp, synthetic construct
  source 1..75: mol_type = other DNA
gctggcgatgctccttgaaggtatcgactggcggcagcctaaaagactgcttacgtccctgtgtcaacgccacga

SEQ ID NO: 191673 - DNA, 75 bp, synthetic construct
  source 1..75: mol_type = other DNA
agtgttccttacgcaggcgcagctggcgatgctgctggaaggtatcgactggcgacagcccaagcggctgctgac

SEQ ID NO: 191674 - DNA, 75 bp, synthetic construct
  source 1..75: mol_type = other DNA
agacgatccgatgtcaggtcacgtttttatcttccgtgggcgtaatggcagtcaggtaaagctcctctggtctac

SEQ ID NO: 191675 - DNA, 75 bp, synthetic construct
  source 1..75: mol_type = other DNA
ttattgatggcgaaatctggctgcgtgcgctggtcggcgcgccggacggttcgcagattattcgcggtgaacgcc

SEQ ID NO: 191676 - DNA, 75 bp, synthetic construct
  source 1..75: mol_type = other DNA
gtattgaatgccgccttgatgatgcacgcactcgcgagctgcttgccgcgctgaatcaccacgaaactgcactgc

SEQ ID NO: 191677 - DNA, 75 bp, synthetic construct
  source 1..75: mol_type = other DNA
gtgccgattggtagctatgccgaacttatcaatggcgaaatctggctgcgtgcgctggttggcgcaccggacggt

SEQ ID NO: 191678 - DNA, 75 bp, synthetic construct
  source 1..75: mol_type = other DNA
gccgtaagcgtggatgtgcaggtacaaccacagacagttctggttactgcgataaacatcgtggtgaaggatggg

SEQ ID NO: 191679 - DNA, 75 bp, synthetic construct
  source 1..75: mol_type = other DNA
cgatgcagacagtaatctgcagagcctgtgctggccgtgccataaggcgaagacggcccgtgaacggctgaagtg

SEQ ID NO: 191680 - DNA, 75 bp, synthetic construct
  source 1..75: mol_type = other DNA
agttctcgtcagcgccggatacagcatctaccctgctccgggcagacgctatggcttgtattttccgtccgccac

SEQ ID NO: 191681 - DNA, 75 bp, synthetic construct
  source 1..75: mol_type = other DNA
tgatgccgaccgtaatctgcagagtctgtgctggccgtgtcataaggcgaagacggcccgtgaacggttgaagtg

SEQ ID NO: 191682 - DNA, 75 bp, synthetic construct
  source 1..75: mol_type = other DNA
gttatgtctgcgtgctggtgtggtgcgtgaggcgaaaaccgttgatcacatcatccctaaagcgcatggcggcac

SEQ ID NO: 191683 - DNA, 75 bp, synthetic construct
  source 1..75: mol_type = other DNA
catcagtctctaatatggtcgacatgaaaactacgcatacctccctcccctttgccggacatacgctgcattttg

SEQ ID NO: 191684 - DNA, 75 bp, synthetic construct
  source 1..75: mol_type = other DNA
ttgcaaaagcggaatcagtaaccagggtaatattgatcttggcgtcgttggggtgggatatttttcaggtaatgt

SEQ ID NO: 191685 - DNA, 75 bp, synthetic construct
  source 1..75: mol_type = other DNA
ctgaccaaacggctggagcgtgggcgcttcgcctggccgtcagcccgtgatggcaaagtgttccttacacaggcg

SEQ ID NO: 191686 - DNA, 75 bp, synthetic construct
  source 1..75: mol_type = other DNA
aagtgaaagtagaaactcagggctcgattggtctggaaaatgaactgactgcggaagacgtggcgagcgccgata

SEQ ID NO: 191687 - DNA, 75 bp, synthetic construct
  source 1..75: mol_type = other DNA
ggcaagaccatcgtgcgcgtcaacatcagcgatgcggtaaaacgtgctgatgccattatgagcaaaattgaagct

SEQ ID NO: 191688 - DNA, 75 bp, synthetic construct
  source 1..75: mol_type = other DNA
cggatgacatgaatggttcatcctggaaatttagcacccgaatagactggccccctgaatctccagacaaccaat

SEQ ID NO: 191689 - DNA, 75 bp, synthetic construct
  source 1..75: mol_type = other DNA
tctcgttccgtgtatccagtaatgacttctgccctgcataattcttcatggaaattttatgccagaatgggcttt

SEQ ID NO: 191690 - DNA, 75 bp, synthetic construct
  source 1..75: mol_type = other DNA
cacgactgacccgtcaggctattgcgaaagccacaaaagcaaaggctggaagcaatacaagccaggccagtcccg

SEQ ID NO: 191691 - DNA, 75 bp, synthetic construct
  source 1..75: mol_type = other DNA
ccatcagcgtggttatggttcgaagtgggacggtatccgcgcgcgtgtcctgaagcgtgacaaaggtctgtgtca

SEQ ID NO: 191692 - DNA, 75 bp, synthetic construct
  source 1..75: mol_type = other DNA
gccgtgttcgcggctgccgatcgacaaccactgacccgtcaggctactgcgagcaacacaaaggcgaaggctggc

SEQ ID NO: 191693 - DNA, 75 bp, synthetic construct
  source 1..75: mol_type = other DNA
atgcccccacgaaccccaaaagcctgccgcgttcgcggctgccgccaaaccaccactgatccgtcaggctattgt

SEQ ID NO: 191694 - DNA, 75 bp, synthetic construct
  source 1..75: mol_type = other DNA
agcgtatcagctgcgcggaacggtagcaaaatcgttagtggtattgccgctggcattgctgagcaaagaggctgc

SEQ ID NO: 191695 - DNA, 75 bp, synthetic construct
  source 1..75: mol_type = other DNA
tcatcccgaaagcacatggcggaacagatgcagacagcaacctgcagagtctgtgctggccctgccacaaagcga

SEQ ID NO: 191696 - DNA, 75 bp, synthetic construct
  source 1..75: mol_type = other DNA
ggcggcactgatgccgatattaatctgcagagcctgtgctggccgtgtcataaggcgaagacggcccgtgaacga

SEQ ID NO: 191697 - DNA, 75 bp, synthetic construct
  source 1..75: mol_type = other DNA
cgacgttatcattgagccgaaccgaatcgagtatgttgcgaatgtggatggcagtcagggaaccattcaaatctc

SEQ ID NO: 191698 - DNA, 75 bp, synthetic construct
  source 1..75: mol_type = other DNA
gaccgtttcatcgcataaaggtaatattaaacgtaagataaaacgcataataaacaggttatctaccatgtcgtc

SEQ ID NO: 191699 - DNA, 75 bp, synthetic construct
  source 1..75: mol_type = other DNA
gccgcgttcgcggatgcagctttacaacgacagacccatcaggttactgcgaaaatcacaaaggcgaaggctgga

SEQ ID NO: 191700 - DNA, 75 bp, synthetic construct
  source 1..75: mol_type = other DNA
tcatccctaaagcgcatggcggcacagatgccgacagtaatctgcagagcctgtgctggccgtgtcataaggcga

SEQ ID NO: 191701 - DNA, 75 bp, synthetic construct
  source 1..75: mol_type = other DNA
tcatccctaaagcgcatggcggcactgatgctgactgtaatctgcagagtctgtgctggccgtgtcataaggcga

SEQ ID NO: 191702 - DNA, 75 bp, synthetic construct
  source 1..75: mol_type = other DNA
cactacagacccgtcaggctactgcgaaagccacaaaaacgaaggctggaaacaatacaagccggggcaatctcg

SEQ ID NO: 191703 - DNA, 75 bp, synthetic construct
  source 1..75: mol_type = other DNA
gtccggatgccacataattctgaaatcccgggtaaacacctcagaagtggtgatgtgcactgttgctgatgtggt

SEQ ID NO: 191704 - DNA, 75 bp, synthetic construct
  source 1..75: mol_type = other DNA
caccacaccaaccccaccggacgatgctgccggtctggaaacagcgaacgcggcatttgtccgcaaactgctcgc

SEQ ID NO: 191705 - DNA, 75 bp, synthetic construct
  source 1..75: mol_type = other DNA
accggcgaggcaaaagccagcgccgaagcggcagcaaaaagcgagcagaacgcgaaacagcacagggacgaggcg

SEQ ID NO: 191706 - DNA, 75 bp, synthetic construct
  source 1..75: mol_type = other DNA
acaggccacagtggaagccatgcgtaatgagcttgagctgaaaagcgcagcggtaagggacatacagacagacct

SEQ ID NO: 191707 - DNA, 75 bp, synthetic construct
  source 1..75: mol_type = other DNA
cgccggagcgcgttcaattattgccagcgatatggcgactgtagccagaaccgctcacaacctgcacccgggacg

SEQ ID NO: 191708 - DNA, 75 bp, synthetic construct
  source 1..75: mol_type = other DNA
gtgcgtatggttacggaatgacggacgccggagcgcgttcaattattgccagcgatatggcgactgtagccagaa

SEQ ID NO: 191709 - DNA, 75 bp, synthetic construct
  source 1..75: mol_type = other DNA
gaagtggttatctggttgggtgggagaacctgaaggttgatgaggcttcactcagggcgctgattgaaacccgcg

SEQ ID NO: 191710 - DNA, 75 bp, synthetic construct
  source 1..75: mol_type = other DNA
tcagaaaaagcccgcgcattactggcgctggacacgtctgaggccatgcgcacggagcttgaactgaaagcggct

SEQ ID NO: 191711 - DNA, 75 bp, synthetic construct
  source 1..75: mol_type = other DNA
cctggcacatacctcgctttatcaggaggcccggatgtcacgttttatgatcgggggctggtttctttgtttgtg

SEQ ID NO: 191712 - DNA, 75 bp, synthetic construct
  source 1..75: mol_type = other DNA
gaatgacggacgccggaagtacggcaattattgccagcgatatggcgactgtagccagaactgcgcacaacctgc

SEQ ID NO: 191713 - DNA, 75 bp, synthetic construct
  source 1..75: mol_type = other DNA
gatgtagtgaaacgctttgaggaaatggtggcgcaggcgcagcagagcgcggaagcggcagcggaaagcgaacga

SEQ ID NO: 191714 - DNA, 75 bp, synthetic construct
  source 1..75: mol_type = other DNA
gcaggattttactggcgcagttgtcagaaaaagcccgcgcattactggcactggacacacctgaagccatgcgca

SEQ ID NO: 191715 - DNA, 75 bp, synthetic construct
  source 1..75: mol_type = other DNA
gacgctggcggataacgtagcgcagaacgcagaagacgttgctgaagacaaaaagcaggtggcgctgctggcatc

SEQ ID NO: 191716 - DNA, 75 bp, synthetic construct
  source 1..75: mol_type = other DNA
ataaaagtgaatccatcacaaacaaaaaacgaaccgaagatacttccggtaacacttcagatcatcaagctgcat

SEQ ID NO: 191717 - DNA, 75 bp, synthetic construct
  source 1..75: mol_type = other DNA
agcggcgctgggcaatgacccgaactttgcaacaacggtcactaacgcactggcaggtaaacagccgcttaatga

SEQ ID NO: 191718 - DNA, 75 bp, synthetic construct
  source 1..75: mol_type = other DNA
cggaaagcgaacgacaggccgggcaacatgtcgctgatgcgcaacaaattaagagcgactgcgagacgctggcgg

SEQ ID NO: 191719 - DNA, 75 bp, synthetic construct
  source 1..75: mol_type = other DNA
tgggcgatgcacagccgcatactggcggtgagcgtcgtggcggtggtcgtggtttcggtggcgaacgtcgtgaag

SEQ ID NO: 191720 - DNA, 75 bp, synthetic construct
  source 1..75: mol_type = other DNA
aaccgcgagcgtcgtctgctgcgcaacattgaacgtactatgaagctgaccattccagaagtagaactgccgaac

SEQ ID NO: 191721 - DNA, 75 bp, synthetic construct
  source 1..75: mol_type = other DNA
atgttaggagtgaagtagcttcagccatgaaaacatcggttcaagtgattcatgataaactgttggaagtgtctg

SEQ ID NO: 191722 - DNA, 75 bp, synthetic construct
  source 1..75: mol_type = other DNA
tattgacctgcgcccggaagccctgaagaaattcgaggaactggcgcaacaggcgcagcaaagcgcagaaaaagc

SEQ ID NO: 191723 - DNA, 75 bp, synthetic construct
  source 1..75: mol_type = other DNA
ttccgcaccgagtgcaggagctacagggtacactttcccggggcgttatatggcgctatccggggtcagggactc

SEQ ID NO: 191724 - DNA, 75 bp, synthetic construct
  source 1..75: mol_type = other DNA
ggctcatatttcaaatacccggcagtgggtgttccggtgctggctgtttatcgcggaacaacttccggggataaa

SEQ ID NO: 191725 - DNA, 75 bp, synthetic construct
  source 1..75: mol_type = other DNA
agcggctgcgacgatggaaccccagaccgatatccgtgaccgcacacccggcaggctggcgctaccgggcgcttt

SEQ ID NO: 191726 - DNA, 75 bp, synthetic construct
  source 1..75: mol_type = other DNA
gatgtggtcgccctttgataacgatgagtcggacacaatacgcaaattcaaaacactgctgtgttttaaccagta

SEQ ID NO: 191727 - DNA, 75 bp, synthetic construct
  source 1..75: mol_type = other DNA
cgcatcatcagcagcgaccagttcagaactgtcggcaaatgcggcgctggggcacaaaaacagtgccgccgaata

SEQ ID NO: 191728 - DNA, 75 bp, synthetic construct
  source 1..75: mol_type = other DNA
aagagtcgccgcaagggagcgatttatgtcattaaaatccgtcttcatattatttgcgatgtccctgatgaactt

SEQ ID NO: 191729 - DNA, 75 bp, synthetic construct
  source 1..75: mol_type = other DNA
aattattttcagggatacggcacattgctattaatattttgatgaatgataaggtatccagggcagggttaagac

SEQ ID NO: 191730 - DNA, 75 bp, synthetic construct
  source 1..75: mol_type = other DNA
cgttcaacggagcaggtgtccgcgatacctcaaggacactcaaaattggaataaataccgtcatccgcactttaa

SEQ ID NO: 191731 - DNA, 75 bp, synthetic construct
  source 1..75: mol_type = other DNA
aatgctatctgcacggtacgagcatttattaccgtggcggctgaaacccttctgcaggaagatgcactatacagg

SEQ ID NO: 191732 - DNA, 75 bp, synthetic construct
  source 1..75: mol_type = other DNA
gccggggacgaagacgcagatgacgatacggtcgaagacctataaaggaagcgggtttaacgagctgcgctttga

SEQ ID NO: 191733 - DNA, 75 bp, synthetic construct
  source 1..75: mol_type = other DNA
cggggccggggttcggtaacctggcgataccgcgtgtgggtcaggaagtgatagtggacttcctgaacggggacc

SEQ ID NO: 191734 - DNA, 75 bp, synthetic construct
  source 1..75: mol_type = other DNA
agatctggctggtcgctggcatcaccgatatgagaaacggcttcaacggcctagcggcaaaggtgcagacgacgc

SEQ ID NO: 191735 - DNA, 75 bp, synthetic construct
  source 1..75: mol_type = other DNA
aaatctggctggttgccggtatcaccgacatgcgcaacggcttcaacgggctggcggcaaaagtgcagacggcac

SEQ ID NO: 191736 - DNA, 75 bp, synthetic construct
  source 1..75: mol_type = other DNA
actgctgtggtccaccggtgacggtctgtgcctcctgaccaaacggctggagcgtgggcgcttcgcctggccgtc

SEQ ID NO: 191737 - DNA, 75 bp, synthetic construct
  source 1..75: mol_type = other DNA
cccgttgtcagtctgttcaggtttatcatcatggacagaatccgaaaggacatgcccggtttcgttgccgtgact

SEQ ID NO: 191738 - DNA, 75 bp, synthetic construct
  source 1..75: mol_type = other DNA
cgcagtgaagccctgaagcttgctgaacgcatcggtgttactgccgcagcccgtgaactcagcctgtatgaatca

SEQ ID NO: 191739 - DNA, 75 bp, synthetic construct
  source 1..75: mol_type = other DNA
gtgaacgccttatccggcctacaaaattgttccaattcaaatatattgcaggaccacgtaggcctgataagcgta

SEQ ID NO: 191740 - DNA, 75 bp, synthetic construct
  source 1..75: mol_type = other DNA
tgattaatggcgctggcattccgatggcggaatgcaaaatttatttagatgcactggttaataccagtgaagtgg

SEQ ID NO: 191741 - DNA, 75 bp, synthetic construct
  source 1..75: mol_type = other DNA
atagcggcagcagtgatgtcacattacttcgtacacaatatgtgccgggatcaaggctccggcaggtggtcttcg

SEQ ID NO: 191742 - DNA, 75 bp, synthetic construct
  source 1..75: mol_type = other DNA
ctgctcgccgcactggttgactcgtcgccggaagccctggacacgctgaacgagctggcagcggcgctgggcaat

SEQ ID NO: 191743 - DNA, 75 bp, synthetic construct
  source 1..75: mol_type = other DNA
cgcgaaacagcacagggacgaggcgcaacggatagtcgatgacctgaaaggaaccagcgccagcacgacgcaaaa

SEQ ID NO: 191744 - DNA, 75 bp, synthetic construct
  source 1..75: mol_type = other DNA
gtgctggtttcaaaatcaatgtctccggcgagactaccagaagcatggtcgcggttattctggtcacgcgacaga

SEQ ID NO: 191745 - DNA, 75 bp, synthetic construct
  source 1..75: mol_type = other DNA
ttgtagatatagaaatacgaagtggaatgcacactaacagcaccgaaagcgatggtcggtgtataacctttcatg

SEQ ID NO: 191746 - DNA, 75 bp, synthetic construct
  source 1..75: mol_type = other DNA
accgcaccgcaggccgtctggcgttacccggtgcattcggatacgggcatttattctcttcgtcggaagtcgtgt

SEQ ID NO: 191747 - DNA, 75 bp, synthetic construct
  source 1..75: mol_type = other DNA
ggaatattttaggtctggttattccacttatcatggcgatccccgttatggggatcttagctcggttattaggtg

SEQ ID NO: 191748 - DNA, 75 bp, synthetic construct
  source 1..75: mol_type = other DNA
agaggagatgcagcggtcgtatttcgcatattgttaattggatttgtttttaattcaatagcacaaatatgtttt

SEQ ID NO: 191749 - DNA, 75 bp, synthetic construct
  source 1..75: mol_type = other DNA
acagcccggccttcaccggcaccccaaccaccccaaccccaccggatgatgccgccggtctggaagcagcgaacg

SEQ ID NO: 191750 - DNA, 75 bp, synthetic construct
  source 1..75: mol_type = other DNA
agttttcccggtcgttatcaggccctgtcaggttatcgtggaacgtatggcgacagaggctttatctgtttgttc

SEQ ID NO: 191751 - DNA, 75 bp, synthetic construct
  source 1..75: mol_type = other DNA
aatagcaatattaacttatttaatatcgccacacttagttgtttttttgaaagtgtcacagaatattcgacatga

SEQ ID NO: 191752 - DNA, 75 bp, synthetic construct
  source 1..75: mol_type = other DNA
agtgtttttgatggtggtatatctcgtgcagttattcgatttgtatctatttatagaaatgacaatgaaaaagta

SEQ ID NO: 191753 - DNA, 75 bp, synthetic construct
  source 1..75: mol_type = other DNA
ctatatggcagcagaggcgctggaaagtgccgcgaaagcgaaaggctgggaagtgaaagtagaaacccagggctc

SEQ ID NO: 191754 - DNA, 75 bp, synthetic construct
  source 1..75: mol_type = other DNA
ctgagtttggcgtggtgccgggcgtgaccgataaaggttactacaccaacagtttccacctcgatgtggagaaga

SEQ ID NO: 191755 - DNA, 75 bp, synthetic construct
  source 1..75: mol_type = other DNA
tatcgcgattgttgaacgtctgcgtcaggcagtggatcagtggaaagaagaaacgggttatggtttcagtctcta

SEQ ID NO: 191756 - DNA, 75 bp, synthetic construct
  source 1..75: mol_type = other DNA
tgtaacctttggttttggtctgggcaccagctgggaatcgcgcctgattcaggaatctatcctgcgtaaccgtat

SEQ ID NO: 191757 - DNA, 75 bp, synthetic construct
  source 1..75: mol_type = other DNA
atgaaacaggatatcgaagcgagcgttatcggtggcctgctgattggtggattaacaccaactgccagtgacgtt

SEQ ID NO: 191758 - DNA, 75 bp, synthetic construct
  source 1..75: mol_type = other DNA
tgcgtgaaccaattcagagcggaaccatcgacgcatcgagtcaggcgatggatgagcttgtaaagcgtctttcag

SEQ ID NO: 191759 - DNA, 75 bp, synthetic construct
  source 1..75: mol_type = other DNA
tcgccgctcgtcctggtatggggaaaaccgaactggcgctgaagattgccgaaggtgtggcaagccgcgttattc

SEQ ID NO: 191760 - DNA, 75 bp, synthetic construct
  source 1..75: mol_type = other DNA
ggatcaactggcgtcgtcgccgtaccgcggcggtggcggtgatcaccggagtgaactacggcagtgcgtccggcg

SEQ ID NO: 191761 - DNA, 75 bp, synthetic construct
  source 1..75: mol_type = other DNA
acagtaccacgccgtccccggtggagctggtttccatgttccagacaggcagcgtggccatccgtgcggagcgct

SEQ ID NO: 191762 - DNA, 75 bp, synthetic construct
  source 1..75: mol_type = other DNA
atagacgatgcgaagagagctgtgaaagccttcgcaaatgcgctgggggatcatcgtgacattgtgggctcactg

SEQ ID NO: 191763 - DNA, 75 bp, synthetic construct
  source 1..75: mol_type = other DNA
gttagcgtgctgcgaaatcctgcatcgatggatgacgaaggctgggcgcgtgttgctaacggcatgagtcagctt

SEQ ID NO: 191764 - DNA, 75 bp, synthetic construct
  source 1..75: mol_type = other DNA
ccagtatgtgggtgaccagctggtactggtgaatgcgccggatatttatctggcggatgacggtggtgtggcggt

SEQ ID NO: 191765 - DNA, 75 bp, synthetic construct
  source 1..75: mol_type = other DNA
cagatgtctcccctgcgtccatcacccatgatgtgaagggcacggcgtcaagcggtaatccggatgcggatgccg

SEQ ID NO: 191766 - DNA, 75 bp, synthetic construct
  source 1..75: mol_type = other DNA
cacactgcatgtagctcaacagttagtgctgaaatttcatatcaaaccttcagagattttgcagaaaataaaggg

SEQ ID NO: 191767 - DNA, 75 bp, synthetic construct
  source 1..75: mol_type = other DNA
gacagataaactgtcagtacaggcaaaagtgaacagcagttttgatggttactttaagaccgatgctgaagggat

SEQ ID NO: 191768 - DNA, 75 bp, synthetic construct
  source 1..75: mol_type = other DNA
ggtatggtcggataccgtgagttgtctgaagactactccactcagggagagttgagtgacctgtccggcagggtg

SEQ ID NO: 191769 - DNA, 75 bp, synthetic construct
  source 1..75: mol_type = other DNA
gacggtggtgcatgggccatgacaggatacagtcagggcggatatgacgacttcagcctgaaccagagcggactg

SEQ ID NO: 191770 - DNA, 75 bp, synthetic construct
  source 1..75: mol_type = other DNA
gactctggcatctgcaccggtcggaacttctcacgggtatttctcctttgccagcctgaacagggggtttactgt

SEQ ID NO: 191771 - DNA, 75 bp, synthetic construct
  source 1..75: mol_type = other DNA
ggaggactgggagaaccgcagttttacctttgacaggctgtcactgaagaacactgattttggtcttggtcgcaa

SEQ ID NO: 191772 - DNA, 75 bp, synthetic construct
  source 1..75: mol_type = other DNA
agacacatataagtggcgcatatggctatctgacaggaggaacacttcctgcatctttttattcccatggtggtg

SEQ ID NO: 191773 - DNA, 75 bp, synthetic construct
  source 1..75: mol_type = other DNA
ccctgtacttttctctgcaggaagtcttgcgggaacggtcaataatgaactcggatatcagttatttcgtgattt

SEQ ID NO: 191774 - DNA, 75 bp, synthetic construct
  source 1..75: mol_type = other DNA
gtgtcatttaactccgattgtaagaattattgtgatgataaaaaatatgctacaaattggttaggatcaatcgat

SEQ ID NO: 191775 - DNA, 75 bp, synthetic construct
  source 1..75: mol_type = other DNA
caatatccgtttcggagtggaggcggaaaaatctatattaggaaactataatatagatcattctatcaatgtaaa

SEQ ID NO: 191776 - DNA, 75 bp, synthetic construct
  source 1..75: mol_type = other DNA
taatacagagagtacagggagcactgaggcagatggtgttgtgtctgaagggaataacagcagcggtgtgacgcc

SEQ ID NO: 191777 - DNA, 75 bp, synthetic construct
  source 1..75: mol_type = other DNA
ttgtcgcgccggagtcactggaatatgacgaaaagctccacgctggattcgttcagaagcaaaggcgggacgctc

SEQ ID NO: 191778 - DNA, 75 bp, synthetic construct
  source 1..75: mol_type = other DNA
tttaacagcagcaccggagctggtgcgctgacacagggaagcaccacatatgccatgcacgggcagcagggaaat

SEQ ID NO: 191779 - DNA, 75 bp, synthetic construct
  source 1..75: mol_type = other DNA
ccggtcaggaggtggctatccgttggcttgctcaacacggcagcgaaaaaccagtaacacacgtttcaagagatg

SEQ ID NO: 191780 - DNA, 75 bp, synthetic construct
  source 1..75: mol_type = other DNA
cctttctggtgtgagaaccttaaggaaacaacatgttgggtggagcggacaatccaaatggtgaattaccgtctt

SEQ ID NO: 191781 - DNA, 75 bp, synthetic construct
  source 1..75: mol_type = other DNA
tcgatccgcagaccggggaaatcgggccaacattttatatcgttatcagcctggttgacgctatggacacgggtg

SEQ ID NO: 191782 - DNA, 75 bp, synthetic construct
  source 1..75: mol_type = other DNA
atagccatgtcatttctgacgtcaaagttaccgtccacgggaaaggcgaaaaaggcgttgaaatcagctatcacg

SEQ ID NO: 191783 - DNA, 75 bp, synthetic construct
  source 1..75: mol_type = other DNA
aaaccgctggccagcaagctgctgaaaccggttgatgctaacggtaagccaattacctgtaacgaaaatggcctg

SEQ ID NO: 191784 - DNA, 75 bp, synthetic construct
  source 1..75: mol_type = other DNA
accaggaaacactcgatgaagaaaatcaggctgaagctcaggaagaaatggaaggctctggcggcgatcactacc

SEQ ID NO: 191785 - DNA, 75 bp, synthetic construct
  source 1..75: mol_type = other DNA
gtaattcagacctgggactgatgactgcttttttcgaagcctacctgggcgctgactacaccgatcgcggtctgc

SEQ ID NO: 191786 - DNA, 75 bp, synthetic construct
  source 1..75: mol_type = other DNA
atgagcgctgataaagaagaaattgcactatattacgaagccaaaaatgacaaagtcagaaaacgtcttgggatt

SEQ ID NO: 191787 - DNA, 75 bp, synthetic construct
  source 1..75: mol_type = other DNA
tggtactggctccggaatcagtcagtgaaatgcaggactatattccggaaaaccgctgtcaccgtgcaaccatgg

SEQ ID NO: 191788 - DNA, 75 bp, synthetic construct
  source 1..75: mol_type = other DNA
atgggtgaaggggattgaaacccgcgattctgtgaaccagaaccagcaagaaacggaacagaacgaccagaaagc

SEQ ID NO: 191789 - DNA, 75 bp, synthetic construct
  source 1..75: mol_type = other DNA
ctggactattcccgcgcagctatttttgcacttatccggagcgcccaccctgagttttatcactacccgggacgc

SEQ ID NO: 191790 - DNA, 75 bp, synthetic construct
  source 1..75: mol_type = other DNA
agaatggctattccattcgaaggcgtaccccacaatgcgctggacgatgcccgtcaccaggcaaaacaagtttca

SEQ ID NO: 191791 - DNA, 75 bp, synthetic construct
  source 1..75: mol_type = other DNA
tcgtagccggaactgtggcgataaccctgggtttgtcagcatcgggggtgatggctgcgggttttaaaccagcac

SEQ ID NO: 191792 - DNA, 75 bp, synthetic construct
  source 1..75: mol_type = other DNA
taagtcaggaggctgaacgcctgttacagctttctcgccaacagttgcagttactggaaaaaatacctctctctg

SEQ ID NO: 191793 - DNA, 75 bp, synthetic construct
  source 1..75: mol_type = other DNA
gctacctggcgaatcgggcgcgccatgagttagccaacaacggtaagttaccaccgccagagcaacaacgctggg

SEQ ID NO: 191794 - DNA, 75 bp, synthetic construct
  source 1..75: mol_type = other DNA
tttttcgcgctggttgaatcagcccgactggggacggggaaatgagaaatccccgacagagacggttgattacag

SEQ ID NO: 191795 - DNA, 75 bp, synthetic construct
  source 1..75: mol_type = other DNA
tgactacgaacgacggcggcgagtacatgggcacgatgtcacgacgtcaacctgagttggttaacggctttgtgc

SEQ ID NO: 191796 - DNA, 75 bp, synthetic construct
  source 1..75: mol_type = other DNA
gcaaggtgcaccttactccggcccagttatccatgcttcttgagggcatcgactggaaacacccgaaacgaacgg

SEQ ID NO: 191797 - DNA, 75 bp, synthetic construct
  source 1..75: mol_type = other DNA
ggtatccattacccgctcgcaactggcaatgctcctcgataagctggactggcgtcagccaaaaacatccagccg

SEQ ID NO: 191798 - DNA, 75 bp, synthetic construct
  source 1..75: mol_type = other DNA
tcaactccatcgcctatgacgcaaaagacgactcaatcatcctctcttctcgtcaccagggtgttgtgaaaattg

SEQ ID NO: 191799 - DNA, 75 bp, synthetic construct
  source 1..75: mol_type = other DNA
tgtagggccaggccgcaactgggcgcacgtgaactctatcgcctatgacgcaaaagatgactctatcatcctctc

SEQ ID NO: 191800 - DNA, 75 bp, synthetic construct
  source 1..75: mol_type = other DNA
tattacctgtaacgaaaacggtctgtgtgaaaactcggacttcgattttacctacacccagcataccgcctggat

SEQ ID NO: 191801 - DNA, 75 bp, synthetic construct
  source 1..75: mol_type = other DNA
actggaaatggtgctggcgattgtcggtaccatgaaagcagggaaatcaaccaccattaatgccattgttggtac

SEQ ID NO: 191802 - DNA, 75 bp, synthetic construct
  source 1..75: mol_type = other DNA
atgatatctctccctgccggttcgcgtatctggctggttgcaggtatcaccgatatgcgaaatggctttaacggc

SEQ ID NO: 191803 - DNA, 75 bp, synthetic construct
  source 1..75: mol_type = other DNA
aaatttggctggttgccggtatcaccgatatgagaaatggcttcaacggcctggctgcgaaagtacaaacggagc

SEQ ID NO: 191804 - DNA, 75 bp, synthetic construct
  source 1..75: mol_type = other DNA
atgccgcttaagcagttgattaacttactggagcaagcctggggcggtagccaggcttatgaaattgctcatctg

SEQ ID NO: 191805 - DNA, 75 bp, synthetic construct
  source 1..75: mol_type = other DNA
gtggtgggcgtacttattcatggggattccgcgttgggcggcctcggcgtcaaccaaaccacgtttaacttatcg

SEQ ID NO: 191806 - DNA, 75 bp, synthetic construct
  source 1..75: mol_type = other DNA
gcagcatgggataaaaaaaatataaaaccgggggattattactctgtgcaggctgtttctatgtttacgacaaac

SEQ ID NO: 191807 - DNA, 75 bp, synthetic construct
  source 1..75: mol_type = other DNA
acataactgatatggattcaattctgggatggattgaacaacataaagtcactcacgcaacaattgtaggggggg

SEQ ID NO: 191808 - DNA, 75 bp, synthetic construct
  source 1..75: mol_type = other DNA
atactggcaagatttttggtgcacagatatccggccaaaagggcattgataaaagaattgatatattgtctgtag

SEQ ID NO: 191809 - DNA, 75 bp, synthetic construct
  source 1..75: mol_type = other DNA
caggcagtggatgctcaccctggtacgctcgcccgttatggtgaatctcttgcccgccgcggcctgttaactcag

SEQ ID NO: 191810 - DNA, 75 bp, synthetic construct
  source 1..75: mol_type = other DNA
tgggaaataaagaagataagtacctaaaaaacaaagcggcactcgataacacgccaggaattgaagatttaacca

SEQ ID NO: 191811 - DNA, 75 bp, synthetic construct
  source 1..75: mol_type = other DNA
taaaaaacatagtttcatccccggagtcaattaaatcaactttagataaccataagttaagattagaatggcaac

SEQ ID NO: 191812 - DNA, 75 bp, synthetic construct
  source 1..75: mol_type = other DNA
aggccttagcttatggatatggggaatagttattcctgaactcaccggtaaatttaaaccagataagaaagatga

SEQ ID NO: 191813 - DNA, 75 bp, synthetic construct
  source 1..75: mol_type = other DNA
cggaatatggtcgtaaatcctggctggcagaagtgattcgcttcattaacgacattctgctctccgcgccgtcga

SEQ ID NO: 191814 - DNA, 75 bp, synthetic construct
  source 1..75: mol_type = other DNA
cttaaattggtttataaaaaatatatatcctggattaaataggaaaataagaatagttgtaacaggaaaggcatc

SEQ ID NO: 191815 - DNA, 75 bp, synthetic construct
  source 1..75: mol_type = other DNA
atgaataactctgaattagaaacactgatccgcaatattctgcgtgaacaacttgtccccgctacaccacgaatg

SEQ ID NO: 191816 - DNA, 75 bp, synthetic construct
  source 1..75: mol_type = other DNA
acgtgttcagatctatcttgtcattccgttgtctattgctttactggtgcatcttcaggtaattccactggagat

SEQ ID NO: 191817 - DNA, 75 bp, synthetic construct
  source 1..75: mol_type = other DNA
atcgcaggttggggggggcttgtccgttacctgattgatgtgaagaagagtaaagcaacgtggagctggataaat

SEQ ID NO: 191818 - DNA, 75 bp, synthetic construct
  source 1..75: mol_type = other DNA
cggatgacatgaatggttcgtcctggaaatttagcacccgaatgcaaaaaattgatcctgtattgagtgttacat

SEQ ID NO: 191819 - DNA, 75 bp, synthetic construct
  source 1..75: mol_type = other DNA
attttgtttccgcgaagcatggaaaggctggcgtgcaggcgcgattgataaacgggttaaaaatgcaccggaacc

SEQ ID NO: 191820 - DNA, 75 bp, synthetic construct
  source 1..75: mol_type = other DNA
cgtgtccatctggtgttgcccatacttatatggcggcagaggcgctggaaagtgccgcgaaagcgaaaggctggg

SEQ ID NO: 191821 - DNA, 75 bp, synthetic construct
  source 1..75: mol_type = other DNA
aattttcgcgcacttagtggcgtaatggcgacaggttccagtcaaatattcgctaatgaagacaacgccggggct

SEQ ID NO: 191822 - DNA, 75 bp, synthetic construct
  source 1..75: mol_type = other DNA
actgattcagtggcgcagcggcagccggaaaaaaccgcagccggaggctgctgctttaactcactatacaacaaa

SEQ ID NO: 191823 - DNA, 75 bp, synthetic construct
  source 1..75: mol_type = other DNA
atccgtcatgaagtgatgtcagtagacccggttaataagatggtgacggttaaaaatctgacctccggggaggtc

SEQ ID NO: 191824 - DNA, 75 bp, synthetic construct
  source 1..75: mol_type = other DNA
ttcagataagagtgttaatttcaaagtgatagctgaactggctttcatgtcatattttatttttattctgacaat

SEQ ID NO: 191825 - DNA, 75 bp, synthetic construct
  source 1..75: mol_type = other DNA
gttctctggggatatttcagtcgtctggatcgactggatattttctttgatgtgatgaatattaaaagcatcttg

SEQ ID NO: 191826 - DNA, 75 bp, synthetic construct
  source 1..75: mol_type = other DNA
atgtgaaaaaacaaagacctgttaatctggacctacagaccatccggttccccatcacggcgatagcgtccattc

SEQ ID NO: 191827 - DNA, 75 bp, synthetic construct
  source 1..75: mol_type = other DNA
tcctcagtaccggcgccgctccggttgtccctcctttgcccgggctacaggaagagggtgtctttacgctgcgaa

SEQ ID NO: 191828 - DNA, 75 bp, synthetic construct
  source 1..75: mol_type = other DNA
atcttactgacatggatgctatcctagggtggattgagcaacataacgtcactcacaccacgcttgtcggggggg

SEQ ID NO: 191829 - DNA, 75 bp, synthetic construct
  source 1..75: mol_type = other DNA
ggaaagacgacgctgaacatcatgaatgcaacctttaatggtgatatcagcggtcataccggctcgcatgtggaa

SEQ ID NO: 191830 - DNA, 75 bp, synthetic construct
  source 1..75: mol_type = other DNA
aatgcgggcacgacggtgaatggcagtacgctgtttaagggctcggataacacatctcttctgaagaaagcgcgt

SEQ ID NO: 191831 - DNA, 75 bp, synthetic construct
  source 1..75: mol_type = other DNA
aaacgacggtaacggtacgacctttacgctggaagaaggcacatcagaggctgtgaaggatgcagaccgtagcgt

SEQ ID NO: 191832 - DNA, 75 bp, synthetic construct
  source 1..75: mol_type = other DNA
attactgactctgtttctcccaccgccgctctggtggcagatattgcaaggagtcacccggatgaattctatttt

SEQ ID NO: 191833 - DNA, 75 bp, synthetic construct
  source 1..75: mol_type = other DNA
tacatatagcgctgcctatggttctggcattactcaaggaactgctatcaatattacccttgatcaggctgcttc

SEQ ID NO: 191834 - DNA, 75 bp, synthetic construct
  source 1..75: mol_type = other DNA
tccggatgttaaggtgaccccatgggaagttaaagtaggcgatgcggtaaaaggtctggatgcaaagatcaataa

SEQ ID NO: 191835 - DNA, 75 bp, synthetic construct
  source 1..75: mol_type = other DNA
cgctgacacagggaagcaccacatatgccatgcacgggcagcagggaaatgacctgaatgctggtaagaacctga

SEQ ID NO: 191836 - DNA, 75 bp, synthetic construct
  source 1..75: mol_type = other DNA
ctgtggctgcctctgctgcagtatccggttctgcgatggcatggactcagaacggcactggtggttctgttgact

SEQ ID NO: 191837 - DNA, 75 bp, synthetic construct
  source 1..75: mol_type = other DNA
tgggcgacagccgggtctttattgacaaaaacgacggtaacggtacggcctttacgctggaagaaggcacatcag

SEQ ID NO: 191838 - DNA, 75 bp, synthetic construct
  source 1..75: mol_type = other DNA
ttggtgatagtgaaaaccgttacaatatagtagaccggaataatgcgacttcactggatttccatgctcccagac

SEQ ID NO: 191839 - DNA, 75 bp, synthetic construct
  source 1..75: mol_type = other DNA
ccgggggcacagcagcacagatggctaccgggatgatttcagcctgtggggcgtgcatgttctggcgggcaaatc

SEQ ID NO: 191840 - DNA, 75 bp, synthetic construct
  source 1..75: mol_type = other DNA
agtacgctgtttaagggctcggataacacatctcttctgaagaaagcgcgtgccatgtttgccgcccgtgagttc

SEQ ID NO: 191841 - DNA, 75 bp, synthetic construct
  source 1..75: mol_type = other DNA
aggacgtccccctaaagccttattcactgccgcttgtggattactggaaggcgttctgcgctatatgagccaata

SEQ ID NO: 191842 - DNA, 75 bp, synthetic construct
  source 1..75: mol_type = other DNA
gtcagtcgctgggtgcgttcaggaacattccctgaaatgtcaacccgacctccaaagcgagggcttctggaccca

SEQ ID NO: 191843 - DNA, 75 bp, synthetic construct
  source 1..75: mol_type = other DNA
caggctgaatcattttaaggagatgaccgaaaccatcattgccacaccggggcgtctggtcagtgagctgtcaac

SEQ ID NO: 191844 - DNA, 75 bp, synthetic construct
  source 1..75: mol_type = other DNA
ctgccgcattgctggcatggcgcgagcatggtgacaccagccgacgggatgaaatcgtgcagcgtaaccgcctgc

SEQ ID NO: 191845 - DNA, 75 bp, synthetic construct
  source 1..75: mol_type = other DNA
cccaatacgttatttatcgtttttatggcaattgccaatgttcattttgatgaatatctattggtcagaaaaaat

SEQ ID NO: 191846 - DNA, 75 bp, synthetic construct
  source 1..75: mol_type = other DNA
ctgcggcgctggctgaatctcgccgcaaaatgcaggcgcgtcgccgcctcaagaaccgtattgcgctgacgctct

SEQ ID NO: 191847 - DNA, 75 bp, synthetic construct
  source 1..75: mol_type = other DNA
gtatgtcgctggcgctgttcactgaaatgacgccgccgcccaatacggaaggcggtggtctggcgaacgccctgg

SEQ ID NO: 191848 - DNA, 75 bp, synthetic construct
  source 1..75: mol_type = other DNA
aaacagcggtctttggctggcagcgcgcggtgctaagtccgctcagcgagagcaacaagtcaaaaataaagcgtg

SEQ ID NO: 191849 - DNA, 75 bp, synthetic construct
  source 1..75: mol_type = other DNA
atattctgcatgaattagagagtaatgcgctgaagattgacgatgctcaggctgcacagtttatttcgcaaatca

SEQ ID NO: 191850 - DNA, 75 bp, synthetic construct
  source 1..75: mol_type = other DNA
tgtccgtgtggagtggtgaaaatcatgatttagactttcttgatgccgccgcgttgctcgatacagatgggaaaa

SEQ ID NO: 191851 - DNA, 75 bp, synthetic construct
  source 1..75: mol_type = other DNA
atgacaatgagtaacggcaaatgggacgagctgcgcgacgcatcgtttcgcggtgttcccttctttctggtggat

SEQ ID NO: 191852 - DNA, 75 bp, synthetic construct
  source 1..75: mol_type = other DNA
caggctgaaccattttaaggagatggccggaaccattattgccacgccggggcgtctggtcagtgagctgtcaac

SEQ ID NO: 191853 - DNA, 75 bp, synthetic construct
  source 1..75: mol_type = other DNA
gttatgtcataaccggtattgtcgcttttctgatgtgtattcaggcgaaacaggtattgttatcgtttgttccgg

SEQ ID NO: 191854 - DNA, 75 bp, synthetic construct
  source 1..75: mol_type = other DNA
taacatcaatatcattggctctaatggaaaaatgagcgaagttaatgctgctttcggcttgctacaattagaaca

SEQ ID NO: 191855 - DNA, 75 bp, synthetic construct
  source 1..75: mol_type = other DNA
ggcgctggtcaaatccccgctgaacgtccgtaccatcccgtatccggtggagagtgtccgggaaatggcggactc

SEQ ID NO: 191856 - DNA, 75 bp, synthetic construct
  source 1..75: mol_type = other DNA
gctcgacgtggatcagtgtcaggcgctgagtctggagaacgatccggtgcgtcaggtggagatttacgagcgcgt

SEQ ID NO: 191857 - DNA, 75 bp, synthetic construct
  source 1..75: mol_type = other DNA
ctcagattgaaatggtgccgctgtcggcgctcgtcaaatccccgctgaacgtccgtattattccgtacccggttg

SEQ ID NO: 191858 - DNA, 75 bp, synthetic construct
  source 1..75: mol_type = other DNA
tggccgccgactgaccgctctgcaactgctcgcgcaggagagccgccttgcaggtgaccacagcgtgatggtgaa

SEQ ID NO: 191859 - DNA, 75 bp, synthetic construct
  source 1..75: mol_type = other DNA
gtggacggtgtccaggctcgcgacaacggacacacctcgcgtagcccactcgattcggttgaggcagcaatcgga

SEQ ID NO: 191860 - DNA, 75 bp, synthetic construct
  source 1..75: mol_type = other DNA
ccaggagggtgatggtacggcagatggtgtgctggtcgaacgactggtgcaggagaagcttgagtccgccgcact

SEQ ID NO: 191861 - DNA, 75 bp, synthetic construct
  source 1..75: mol_type = other DNA
gctgaacaatggctctccggtacgcgctgggttcctgcctggatgcggtcacctgatgcgcaacctgacgccgct

SEQ ID NO: 191862 - DNA, 75 bp, synthetic construct
  source 1..75: mol_type = other DNA
cagaaatgaagctgatgcgctgtatagcgaaggtcagggcgtggacgccggaaatgcgtgccggaagcggtgtgg

SEQ ID NO: 191863 - DNA, 75 bp, synthetic construct
  source 1..75: mol_type = other DNA
gtgcagacccgcgatatggggcacacctcgcgcagtaccctcgatgcggtcgaggcggcaatcggcttccacctg

SEQ ID NO: 191864 - DNA, 75 bp, synthetic construct
  source 1..75: mol_type = other DNA
gcgctgaaggaggcaggattgtttgatgcagcatcagatgcggagaaaatgaagaagggcgatgcggccagccat

SEQ ID NO: 191865 - DNA, 75 bp, synthetic construct
  source 1..75: mol_type = other DNA
ggcgctattgccggagggttgggagaaggattacaccaccttctttacgctggacggacagactttgatgagcct

SEQ ID NO: 191866 - DNA, 75 bp, synthetic construct
  source 1..75: mol_type = other DNA
gtgcagttgtgttttcgattacagcaacaccacctgtcatccgttcgtaatgcgtcttgaggtacatcaccttgg

SEQ ID NO: 191867 - DNA, 75 bp, synthetic construct
  source 1..75: mol_type = other DNA
gttcgcactatcccgtacccggttgagagtgtccgggaactggctgaatccattgagaccattggtctgattcag

SEQ ID NO: 191868 - DNA, 75 bp, synthetic construct
  source 1..75: mol_type = other DNA
gcaggtaaaactacattcgcaaatgcttgtcttgagttcatacctcaccacctgcgctgcatatcaatcgaagat

SEQ ID NO: 191869 - DNA, 75 bp, synthetic construct
  source 1..75: mol_type = other DNA
cgttcagatcgttatccctccggcgactgaaaaagatactgtatctataacaatacgaaaaccatcaagcgtttt

SEQ ID NO: 191870 - DNA, 75 bp, synthetic construct
  source 1..75: mol_type = other DNA
ggatacacaggcaggcggcagttccacagtcttgggcaagcaatcgactgggcaaagtcatcagttggcgattcc

SEQ ID NO: 191871 - DNA, 75 bp, synthetic construct
  source 1..75: mol_type = other DNA
tacctgcagagcgcgaagctattgaaggagtaaagcattcacagcgtggttcaaaaatgcgtacgcctcatctgg

SEQ ID NO: 191872 - DNA, 75 bp, synthetic construct
  source 1..75: mol_type = other DNA
caatcccggcggaacgagaagctatagaaggtgttaagcattcgcaacgtggttctaaaatgcgtacacctcact

SEQ ID NO: 191873 - DNA, 75 bp, synthetic construct
  source 1..75: mol_type = other DNA
tggcggcgttctttaccggaattccacagttctcgctgcacgcttggttctttgccatcgccactgccattggtt

SEQ ID NO: 191874 - DNA, 75 bp, synthetic construct
  source 1..75: mol_type = other DNA
atgaaggatgcggcgaacagacatattgtttacgaaatagtagatgaatacttccaccactggcttaatgaagtt

SEQ ID NO: 191875 - DNA, 75 bp, synthetic construct
  source 1..75: mol_type = other DNA
tccaccttaaatgataatagtgactccttgagaagacgctatgaggaaatgatcaaaggtaaaaggttagtatat

SEQ ID NO: 191876 - DNA, 75 bp, synthetic construct
  source 1..75: mol_type = other DNA
gccacgggatacgaaaaaatcgggttcgacaacgacgcccgataccgatgctgataacgaagacaacacggcttg

SEQ ID NO: 191877 - DNA, 75 bp, synthetic construct
  source 1..75: mol_type = other DNA
tgacggtggttctgtgactcctgaatatcccctgcgttccgccacgcttccgggtggagaacgtgttcaggttgt

SEQ ID NO: 191878 - DNA, 75 bp, synthetic construct
  source 1..75: mol_type = other DNA
atgaaggatgcagagaacagacatattgtttatgaaataatagatgaatacttccaccactggcttaatgaagtc

SEQ ID NO: 191879 - DNA, 75 bp, synthetic construct
  source 1..75: mol_type = other DNA
atcggcctgatgaactgtttgttaaagtgagtgggaaatggcagcagcatgaattaaaaatggattttaaagatt

SEQ ID NO: 191880 - DNA, 75 bp, synthetic construct
  source 1..75: mol_type = other DNA
ggtatcgctgcacgatcataacgtgtcgcagaaagtgaaggtgattgttgagcacttccgcaagcatgtgatgca

SEQ ID NO: 191881 - DNA, 75 bp, synthetic construct
  source 1..75: mol_type = other DNA
tgtattcaatgcgacaggcgatcgaagaagagtttattctggatgttctgaaaaattacaccagctatgggcagg

SEQ ID NO: 191882 - DNA, 75 bp, synthetic construct
  source 1..75: mol_type = other DNA
gccaaaacgcagttgagtaagggaaggtgcgaacaagttcctgatatgagatcatcatattcatccggagcgcat

SEQ ID NO: 191883 - DNA, 75 bp, synthetic construct
  source 1..75: mol_type = other DNA
ctgaaagcgaagaaagagagcctgattttcccgcgttatcatcagtgggatgtggtcaacaaactgctggaggcc

SEQ ID NO: 191884 - DNA, 75 bp, synthetic construct
  source 1..75: mol_type = other DNA
ctaaatcggaaaagctggccagtgcgctggaaaactcgcaaccgattattattgtgaccatccagactttcccgt

SEQ ID NO: 191885 - DNA, 75 bp, synthetic construct
  source 1..75: mol_type = other DNA
attttcctgtggaacgaagtggagcagttctgcgaagcgttcttcagcaaaaacaaatccaacgcggccattagt

SEQ ID NO: 191886 - DNA, 75 bp, synthetic construct
  source 1..75: mol_type = other DNA
tacccgcaaggaagccacgcgtgcgatcggtaaaatcatttttaccaaaaacaaccagaatgacagtgtgaccgt

SEQ ID NO: 191887 - DNA, 75 bp, synthetic construct
  source 1..75: mol_type = other DNA
gccatacagtcgcttttcattctcgcaactgggacgcgaactgcatgacacctttcctctggtgggatccgtgac

SEQ ID NO: 191888 - DNA, 75 bp, synthetic construct
  source 1..75: mol_type = other DNA
ctgaacatgcactttgtttctaacgtcgatgggactcacatcgcggaagtgctgaaaaaagtaaacccggaaacc

SEQ ID NO: 191889 - DNA, 75 bp, synthetic construct
  source 1..75: mol_type = other DNA
gagaaaaacttcactgaaggatttagagaaaacatatcctgattttgattttattatacataaacaccatcttga

SEQ ID NO: 191890 - DNA, 75 bp, synthetic construct
  source 1..75: mol_type = other DNA
atactgaggcattaattgaaaccgatgcctttaaaacatcattgcttcgtgaaggtggctccagtaaagcatttc

SEQ ID NO: 191891 - DNA, 75 bp, synthetic construct
  source 1..75: mol_type = other DNA
acgatgcctgggactttgcccgccactatatgaaaacagagcttagcttcggttatgcctgctacaaagacgata

SEQ ID NO: 191892 - DNA, 75 bp, synthetic construct
  source 1..75: mol_type = other DNA
gagtttatgtcgcaaatcgttgagtacgatgacaaggatctggaaaagctaagcctgtttgcgcgccatttacgc

SEQ ID NO: 191893 - DNA, 75 bp, synthetic construct
  source 1..75: mol_type = other DNA
ctggggtcattaaagcctttcgcgaacttttccccgaagtgcgactcgagcttatccaggggacgccgcaggaaa

SEQ ID NO: 191894 - DNA, 75 bp, synthetic construct
  source 1..75: mol_type = other DNA
atgactgaaccgggcaaagcattactggtcattgcagaacgtattctgaatgaagccagtaatgttcgtcggctt

SEQ ID NO: 191895 - DNA, 75 bp, synthetic construct
  source 1..75: mol_type = other DNA
gtgaatttccaacaactaaagataatccgcgaggctgcacgtcaggattacaacctgacagaggttgcgaatatg

SEQ ID NO: 191896 - DNA, 75 bp, synthetic construct
  source 1..75: mol_type = other DNA
tcgcgtgggtacagcgacagaagcctgacaccctgatcacccgcatcattctggttcagggcaacattccgcaga

SEQ ID NO: 191897 - DNA, 75 bp, synthetic construct
  source 1..75: mol_type = other DNA
attacggggcgctcacgcattgatgacgcatttgcccgcaaaggtttgctggcagatattgtattaagtgcgcag

SEQ ID NO: 191898 - DNA, 75 bp, synthetic construct
  source 1..75: mol_type = other DNA
acgcatttgcccgcaaaggtttgccggcagatattgtattaagtgcacaggattctgatgtcattaaaacctatg

SEQ ID NO: 191899 - DNA, 75 bp, synthetic construct
  source 1..75: mol_type = other DNA
cgcggccgacctgcaaagcgttgccagcatctacacgaagtcgcaggccttgggccgccaaatccagaacatgga

SEQ ID NO: 191900 - DNA, 75 bp, synthetic construct
  source 1..75: mol_type = other DNA
tgcaatatctatccgatccagcgcgcgcaaaaggatttgcttatctgatgtttgatatgctaacagggaaaattg

SEQ ID NO: 191901 - DNA, 75 bp, synthetic construct
  source 1..75: mol_type = other DNA
ccactgctgcatgagcaacgtctggaagaggatgaaattgatctcagtaatgtggagatgagtcactatcgttta

SEQ ID NO: 191902 - DNA, 75 bp, synthetic construct
  source 1..75: mol_type = other DNA
aatgccgaccatggccgtgacaggcgtgggcaaagatatggtgcgcgatcagcgttatttctcgctcgcgactcg

SEQ ID NO: 191903 - DNA, 75 bp, synthetic construct
  source 1..75: mol_type = other DNA
aatcgccgctgaaatgggggcgcaaattatcaaaacctattatgtcgaaaaaggggttccgtgggaatttctgcg

SEQ ID NO: 191904 - DNA, 75 bp, synthetic construct
  source 1..75: mol_type = other DNA
attcaagccgggaacgagattgcggcgcagaacgtgcagcagctccagaaactgcgcgatctggtggccacgcaa

SEQ ID NO: 191905 - DNA, 75 bp, synthetic construct
  source 1..75: mol_type = other DNA
ctgctttggtttttataaatttagctaaacaaataattggtgcgtcagtgatggtgtcgggtactctatgtagag

SEQ ID NO: 191906 - DNA, 75 bp, synthetic construct
  source 1..75: mol_type = other DNA
tgttttattaaggatgcaaaattcttctttttgtcaccgacaattggtgcagtatatcaatatggcgatcaaata

SEQ ID NO: 191907 - DNA, 75 bp, synthetic construct
  source 1..75: mol_type = other DNA
ttttcattattcattggagagcttttggtttttattttattatctacaatgcattatataaatataaagcgaagg

SEQ ID NO: 191908 - DNA, 75 bp, synthetic construct
  source 1..75: mol_type = other DNA
gcttgtctgagaggagaggccggtgaaattgcagaatatgtacagccatccatcagcccggaaaaagccagagaa

SEQ ID NO: 191909 - DNA, 75 bp, synthetic construct
  source 1..75: mol_type = other DNA
gactggtatgagtgtctgcccttgttttcgccggatacgctgaaagtggtttataacagtgcaggggttatcact

SEQ ID NO: 191910 - DNA, 75 bp, synthetic construct
  source 1..75: mol_type = other DNA
cgcacattgcggtgatgggcatggagcgtatcgcaccgacctttgccgaggtggatgtgctgattaccatgctgg

SEQ ID NO: 191911 - DNA, 75 bp, synthetic construct
  source 1..75: mol_type = other DNA
gaacagccaagccaacagataagcaatataagctgactgatggtggcggtatgcatctgcttgtccatccaaatg

SEQ ID NO: 191912 - DNA, 75 bp, synthetic construct
  source 1..75: mol_type = other DNA
gcggtacagaacggcttaattgattacaatcctgcacaagagatcgctggtgcgatcgcaacagctaaacgaaag

SEQ ID NO: 191913 - DNA, 75 bp, synthetic construct
  source 1..75: mol_type = other DNA
gctgcttacattcataaagcagaacatctggaagaacgccgcttgatgctacaatggtgggccgattttctggat

SEQ ID NO: 191914 - DNA, 75 bp, synthetic construct
  source 1..75: mol_type = other DNA
ctttattgaacgcaatgtttttagaaaaatatggtgcaactttttcgcttttttcattattcattggagagcttt

SEQ ID NO: 191915 - DNA, 75 bp, synthetic construct
  source 1..75: mol_type = other DNA
gcgctacgggtgatgggttatgacactaaggttgaagtttgcggccacggcttccgtacaatggcctgtagttcg

SEQ ID NO: 191916 - DNA, 75 bp, synthetic construct
  source 1..75: mol_type = other DNA
ggttgcttcctgtaatcgacaacatcgtcccgcgcttgaattaaagcgcatccctgagttgcttacaaaaataga

SEQ ID NO: 191917 - DNA, 75 bp, synthetic construct
  source 1..75: mol_type = other DNA
gcggggaaactgccggaggcgtttttctggacggatgcggaaaacaatgatgtgcaggtgacagcagaagagctt

SEQ ID NO: 191918 - DNA, 75 bp, synthetic construct
  source 1..75: mol_type = other DNA
gctggcagcgatttgccgaaagcggcgaaacgtgccgtgcgcgcgagctggaacagtgtctggaagatttttatg

SEQ ID NO: 191919 - DNA, 75 bp, synthetic construct
  source 1..75: mol_type = other DNA
ccacctatgtgcagatgatgccgcacaccaccgctgttaatactggcctctttttcggcctgcgcgggcgggtga

SEQ ID NO: 191920 - DNA, 75 bp, synthetic construct
  source 1..75: mol_type = other DNA
tccattatcttgccaatcataaaaaatctaaggtttgatgttaaagatgatggaagagatagcgattttgtgaag

SEQ ID NO: 191921 - DNA, 75 bp, synthetic construct
  source 1..75: mol_type = other DNA
gcagttaaccgaaaaaggttttgctaatcaagggggagtggcaagggattcatatgttgctctgaaaaccgtgaa

SEQ ID NO: 191922 - DNA, 75 bp, synthetic construct
  source 1..75: mol_type = other DNA
ggcgcgaccatttacggtgaaatcgtcggctttgcgactaactgcgacgcggcacatattacccagccgcagcgc

SEQ ID NO: 191923 - DNA, 75 bp, synthetic construct
  source 1..75: mol_type = other DNA
tgcgcaaaatgccggagtggcaggtctacgatggtctgcacaccctgcttggcgcgcctgttgatgatttcacgc

SEQ ID NO: 191924 - DNA, 75 bp, synthetic construct
  source 1..75: mol_type = other DNA
ttttctgtctatattgctgcttttgctttttcctgctctggagttttctgtaattcatcggcatgttgcgctaga

SEQ ID NO: 191925 - DNA, 75 bp, synthetic construct
  source 1..75: mol_type = other DNA
ttttctggcgatattattgctttttgttccgcctgctctggagttttcagtaattcatcgacgcgttgcgccaga

SEQ ID NO: 191926 - DNA, 75 bp, synthetic construct
  source 1..75: mol_type = other DNA
aaatccacattcgccagcgcaccatgaagaaggacctggaatcgctgagcagtgcggatgagatcctggcataca

SEQ ID NO: 191927 - DNA, 75 bp, synthetic construct
  source 1..75: mol_type = other DNA
gtctttcaaacttaaatatagttgagcatttaacaaaacaagtactgtattcaaatttctatccgatatactctt

SEQ ID NO: 191928 - DNA, 75 bp, synthetic construct
  source 1..75: mol_type = other DNA
actcttcactttttgttgcttatatgggctgtctaggatggggaagcgcttatttctatggatggggtacttcat

SEQ ID NO: 191929 - DNA, 75 bp, synthetic construct
  source 1..75: mol_type = other DNA
ttttctagcaatattgttgcttcttgtccctcctgctctggagttttcagtaattcatcggcacattacgctagg

SEQ ID NO: 191930 - DNA, 75 bp, synthetic construct
  source 1..75: mol_type = other DNA
gcccatgagtgagaatacggttaacaaggctctgcgagtgatgggctatgacacgaaaacggaagtgtgtggaca

SEQ ID NO: 191931 - DNA, 75 bp, synthetic construct
  source 1..75: mol_type = other DNA
ccacatggagcgaaattcagtgagggccgcgtatatccataaagcagagcatctggaagaacgccgcttgatgct

SEQ ID NO: 191932 - DNA, 75 bp, synthetic construct
  source 1..75: mol_type = other DNA
ccgggcggggtcgcggcgacggtaggcgctgtgcagccgctgatggtcgtgttcatctctgccgctctgctaggt

SEQ ID NO: 191933 - DNA, 75 bp, synthetic construct
  source 1..75: mol_type = other DNA
acgcgatacggcgaggaagctgatagctgagggaactgacccgtgcgaacagaaacggatcaaaaagtctgtgcc

SEQ ID NO: 191934 - DNA, 75 bp, synthetic construct
  source 1..75: mol_type = other DNA
ggacggtgttaaacattctcagcgtggttcgaagatgcgaactccccatcttgtacccttatcgcggcaggcctt

SEQ ID NO: 191935 - DNA, 75 bp, synthetic construct
  source 1..75: mol_type = other DNA
atggctctgagtgatgtgaaggttcgttcggcaaagcctgaagcaaaagcctataaacttactgatggtgaaggc

SEQ ID NO: 191936 - DNA, 75 bp, synthetic construct
  source 1..75: mol_type = other DNA
tgatcactattctggcaggccgttaacccgactggcggttgaactcactttgttggttttcatccgttcaagcga

SEQ ID NO: 191937 - DNA, 75 bp, synthetic construct
  source 1..75: mol_type = other DNA
gccgttcagagcggcttaatcgactacaaccccgcgcaagagattgccggtgcggttgctacggcgaaaagacag

SEQ ID NO: 191938 - DNA, 75 bp, synthetic construct
  source 1..75: mol_type = other DNA
atgaatgggaaccgagagctgattttcgtgggcgatcacgatccgcgtaaacccatgagtgagaacacggttaat

SEQ ID NO: 191939 - DNA, 75 bp, synthetic construct
  source 1..75: mol_type = other DNA
gctgtacagagtggattaatcgactacaaccccgctcaagagattgctggtgcggtagctacggcgaaaagacag

SEQ ID NO: 191940 - DNA, 75 bp, synthetic construct
  source 1..75: mol_type = other DNA
agcatcttggggagcgtaggctgatgctgcagtggtgggctgattatctggatgcgaatcgggagaagggggtta

SEQ ID NO: 191941 - DNA, 75 bp, synthetic construct
  source 1..75: mol_type = other DNA
gttgcagtggtgggcggattatctggatgcgaatatgcaagaagttatctctccctttgactatgccaaaactaa

SEQ ID NO: 191942 - DNA, 75 bp, synthetic construct
  source 1..75: mol_type = other DNA
cgcagttgcttccagtaaccgtgtccatcgccctgcacttgagctgaaacgtctacctgaactgctccaccgaat

SEQ ID NO: 191943 - DNA, 75 bp, synthetic construct
  source 1..75: mol_type = other DNA
tgctaatcgcgtaaaaaagagcctggaggacaatatcttcccggcaattggtgctcgcaatattgctgaactggg

SEQ ID NO: 191944 - DNA, 75 bp, synthetic construct
  source 1..75: mol_type = other DNA
ggatcaaagatgcgtacacctcatctggtgccgctttcaaagcaggcgctggcgatcctgaagcagataaaacag

SEQ ID NO: 191945 - DNA, 75 bp, synthetic construct
  source 1..75: mol_type = other DNA
gttgcagtggtgggctgattttctggatgccaatcgggagagagcgattacgccgtttgactatgcgaagatcaa

SEQ ID NO: 191946 - DNA, 75 bp, synthetic construct
  source 1..75: mol_type = other DNA
taatcgatacgaaccctgcagcaaaccttggcggcgtgaccacacctcctgtcagacggcactatcctgccctgc

SEQ ID NO: 191947 - DNA, 75 bp, synthetic construct
  source 1..75: mol_type = other DNA
gttgcagtggtgggctgattttctggatgctaacagggaacagagtgtcagcccttttgactatgcaaaaattaa

SEQ ID NO: 191948 - DNA, 75 bp, synthetic construct
  source 1..75: mol_type = other DNA
ttttgtggtgataagcatgagctgatttttattggcgatcacgatccgcgtaagccaatgagtgaaaacaccgta

SEQ ID NO: 191949 - DNA, 75 bp, synthetic construct
  source 1..75: mol_type = other DNA
acacaaccgtggaagtctgtggacatggattcagggctatggcttgtagtgccttgattgaatccggcttgtggt

SEQ ID NO: 191950 - DNA, 75 bp, synthetic construct
  source 1..75: mol_type = other DNA
taccagagatcttatcgcccctatcaaggccgttgaagcttctggacgactggaagttgcttcccgactacagca

SEQ ID NO: 191951 - DNA, 75 bp, synthetic construct
  source 1..75: mol_type = other DNA
accgatgagcgaaaatacggtgaacaaggcgctgcgcgtgatgggatacgacacgaaggttgaggtttgcgggca

SEQ ID NO: 191952 - DNA, 75 bp, synthetic construct
  source 1..75: mol_type = other DNA
tttttattggcgatcacgatccccgcaaaccgatgagtgaaaacacggtgaacagtgcgctgcgggtgatgggtt

SEQ ID NO: 191953 - DNA, 75 bp, synthetic construct
  source 1..75: mol_type = other DNA
gttcagagtggtttacttgattacaatcccgcacaggaaatggttggtgctgttgcttcaagtaacaggcagcat

SEQ ID NO: 191954 - DNA, 75 bp, synthetic construct
  source 1..75: mol_type = other DNA
aaggtagttgaggcgagcggacgatatgaagttgcctctcgtcttcaacaacgtacaactgctatcatgcgtttc

SEQ ID NO: 191955 - DNA, 75 bp, synthetic construct
  source 1..75: mol_type = other DNA
ttggcatctggtacaacaatttctttggcgcggaaactgaagcgattctgccgtatgaccagtatatgcaccgtt

SEQ ID NO: 191956 - DNA, 75 bp, synthetic construct
  source 1..75: mol_type = other DNA
cactccagatggcgctaaagcagccactggatgcaagcgagttgacggtattatcgacgtatgttgagcaaaagt

SEQ ID NO: 191957 - DNA, 75 bp, synthetic construct
  source 1..75: mol_type = other DNA
ccgatgatggacacgttgcaaaacatggcaacgcgtcccgcgctgtggatactattagtcgcgattatcctgatg

SEQ ID NO: 191958 - DNA, 75 bp, synthetic construct
  source 1..75: mol_type = other DNA
tcaggcacgatattggtctgtcgggagattcaccgctgctttcgcgtcacttccctgccgctgagcacaatctgg

SEQ ID NO: 191959 - DNA, 75 bp, synthetic construct
  source 1..75: mol_type = other DNA
gataacgacatcctcagtgatatctaccagcaaacgatcaattatgtggtcagtggccagcaccctacgctttaa

SEQ ID NO: 191960 - DNA, 75 bp, synthetic construct
  source 1..75: mol_type = other DNA
atgaagtgactggcgctgacggaggaccagtcagaacagaaattaccaaattaacgcctgagcaggccgcagagg

SEQ ID NO: 191961 - DNA, 75 bp, synthetic construct
  source 1..75: mol_type = other DNA
gctattcgcgcaggctacgcctccaggcgagcacatgttacgggggctgaactatacggtaaacctgagatacgc

SEQ ID NO: 191962 - DNA, 75 bp, synthetic construct
  source 1..75: mol_type = other DNA
tatttatatcgctaaccaccagaacaactatgacatggtgacagcatcgaacattgtgcaaccgccgacggtgac

SEQ ID NO: 191963 - DNA, 75 bp, synthetic construct
  source 1..75: mol_type = other DNA
atgtttgacagcgtgctggcgagactccgtaaatcagttagaggagccgccaaaatggctatatcaacacgccct

SEQ ID NO: 191964 - DNA, 75 bp, synthetic construct
  source 1..75: mol_type = other DNA
gtatgaatgacagggcgcgggcaacagaattactggcagattatgcactcagtcggtgcgatcgtgtggcggcgt

SEQ ID NO: 191965 - DNA, 75 bp, synthetic construct
  source 1..75: mol_type = other DNA
tctgctacaagaagggaagatggttatcccacagccgcaacagcgccaggcgaccgagcgacctttattaccagc

SEQ ID NO: 191966 - DNA, 75 bp, synthetic construct
  source 1..75: mol_type = other DNA
accatcagctacaccctggtcaacaacgacacgggcgaaaaacaggaaggcaccttcatgccgatggttgccagc

SEQ ID NO: 191967 - DNA, 75 bp, synthetic construct
  source 1..75: mol_type = other DNA
ctcgctgacgtccaggcgcgcattgactggctgaaagccgcactgcgcgaagtggaaccggtgctggatggcgga

SEQ ID NO: 191968 - DNA, 75 bp, synthetic construct
  source 1..75: mol_type = other DNA
gcaatgaagaggtaggtatagacgctgcctatgtattgcgacggctgactgaaatagaccagatggacgtgctgg

SEQ ID NO: 191969 - DNA, 75 bp, synthetic construct
  source 1..75: mol_type = other DNA
catggcctcgctgcgcctgctgccgtcctatctgcgcgatccgcttattcgccacctctcctccctgcgcaaaaa

SEQ ID NO: 191970 - DNA, 75 bp, synthetic construct
  source 1..75: mol_type = other DNA
gcacagcacggtgttgtcactgaagatgacattctcatggagctgaccaaatgggttgaagcttctgataacgac

SEQ ID NO: 191971 - DNA, 75 bp, synthetic construct
  source 1..75: mol_type = other DNA
atgacattctcatggagctgaccaaatgggtggaagcttctgataacgacatcctcagtgatatctaccagcaaa

SEQ ID NO: 191972 - DNA, 75 bp, synthetic construct
  source 1..75: mol_type = other DNA
cggggccaacattattttcctgtccgtgctggtcgccgtcagaggcaatgtggcacgtctggttgatgctgttca

SEQ ID NO: 191973 - DNA, 75 bp, synthetic construct
  source 1..75: mol_type = other DNA
cgaccacctgctgcttgatggcggtattttcaccaatatttacaacaactacgacaagtttaagtcttcgctgtt

SEQ ID NO: 191974 - DNA, 75 bp, synthetic construct
  source 1..75: mol_type = other DNA
ccagatattaatttttcccgcctttggcgcattgccaatttagccaataaacaagattcccggttactgtccgat

SEQ ID NO: 191975 - DNA, 75 bp, synthetic construct
  source 1..75: mol_type = other DNA
ccgcaaacaaggtgaaaaaggcaagctgggtctgaaatccattctgacggtattcagaacgctgtcagaacagtc

SEQ ID NO: 191976 - DNA, 75 bp, synthetic construct
  source 1..75: mol_type = other DNA
gcaggcagcgctgccgcgcagcaggttacgggagcggcaggaacgctggcgaatgccgggcgtactgtcagcaga

SEQ ID NO: 191977 - DNA, 75 bp, synthetic construct
  source 1..75: mol_type = other DNA
agctgtttgcccgtgagtacctgaaagatttaaacgccacacaggcagctatcagggcgggttacagcgagaaga

SEQ ID NO: 191978 - DNA, 75 bp, synthetic construct
  source 1..75: mol_type = other DNA
cagaatacgacatatcattatctgacgatgaaaactatgacgatgactattatcgtgaacgcccgtgtccggggg

SEQ ID NO: 191979 - DNA, 75 bp, synthetic construct
  source 1..75: mol_type = other DNA
tatcgtgaacgcccgtgtccgggagaagttttcggctatgataatactgaggataatgatgaggcggcatctgat

SEQ ID NO: 191980 - DNA, 75 bp, synthetic construct
  source 1..75: mol_type = other DNA
atgtataattgtggtgaatcatattcagaatacgacatatcattatctgacgatgaaaactatgacgatgactat

SEQ ID NO: 191981 - DNA, 75 bp, synthetic construct
  source 1..75: mol_type = other DNA
ggggttcataacgtgcggtaagcgttcttatgaagctgtaggctcactgggatgtacggtatatggcgacagtga

SEQ ID NO: 191982 - DNA, 75 bp, synthetic construct
  source 1..75: mol_type = other DNA
gtgaagaaaatggtttttgtggcggcattgctgaccgttacccaacaggcttcagcagttattgtggcatctgcc

SEQ ID NO: 191983 - DNA, 75 bp, synthetic construct
  source 1..75: mol_type = other DNA
tgcaagccaacaggcgaatagagcagccaatgcatcggttagtactccatcgatcgctattaaggccagtaagca

SEQ ID NO: 191984 - DNA, 75 bp, synthetic construct
  source 1..75: mol_type = other DNA
atgcatacagtttctgaaaacaagtgcggtaaatacgcattactgctgcaacaggccagagccgaagcacatgcc

SEQ ID NO: 191985 - DNA, 75 bp, synthetic construct
  source 1..75: mol_type = other DNA
gagcacctggtacatgggtctgggtactgatatcgacactggactgccgatgagcctgtccatgaacgtgtatgc

SEQ ID NO: 191986 - DNA, 75 bp, synthetic construct
  source 1..75: mol_type = other DNA
cagaactgaacttcggcaacggcaacttcaacgttcgctctaccggctggggtggttacctggtagtaggttaca

SEQ ID NO: 191987 - DNA, 75 bp, synthetic construct
  source 1..75: mol_type = other DNA
aacatggtcgggcgctgtgcattccctctttttgcactggtcagcggctgcaacatggcgggtaaaaccttacgt

SEQ ID NO: 191988 - DNA, 75 bp, synthetic construct
  source 1..75: mol_type = other DNA
gaattgtccaagaagttaaatataaaaactatcgcggaaggagttgaaaatatggagttagtaaataaattaatg

SEQ ID NO: 191989 - DNA, 75 bp, synthetic construct
  source 1..75: mol_type = other DNA
tatgaagacgttcagggcatcaaatgcagactcctttctgacacttgcagactggatcccaggtatcagtggaca

SEQ ID NO: 191990 - DNA, 75 bp, synthetic construct
  source 1..75: mol_type = other DNA
aaaacgtggcccggatatgttctcggctcgaagctccctgccagctatgaagtaaacgccgtatcgtttgatcac

SEQ ID NO: 191991 - DNA, 75 bp, synthetic construct
  source 1..75: mol_type = other DNA
tacaacctgtcaggccggtcctgaatttctccgcgctgcagcgcgatgttatccggatggtcgcgtttgtggcga

SEQ ID NO: 191992 - DNA, 75 bp, synthetic construct
  source 1..75: mol_type = other DNA
atgggctggtaccggctcccggacgacgcctgcaggccggacggtggtttgcaccagcgtatgccctccatctgc

SEQ ID NO: 191993 - DNA, 75 bp, synthetic construct
  source 1..75: mol_type = other DNA
gaataataacggcaaagacttgtattgttgccgatgagtctaaaaatttcacagttaacatgcctgatgttccca

SEQ ID NO: 191994 - DNA, 75 bp, synthetic construct
  source 1..75: mol_type = other DNA
gcggactgccgttacaggtgccggatgcggtaaaaagccgtgcggatctgctgaatttctatcagcagtggcagc

SEQ ID NO: 191995 - DNA, 75 bp, synthetic construct
  source 1..75: mol_type = other DNA
ctatgtcgcctttattccggaaaaacaggtggcgattgtgattctggcgaataaaaactacccgaataccgaaag

SEQ ID NO: 191996 - DNA, 75 bp, synthetic construct
  source 1..75: mol_type = other DNA
tgatctggcaaaaatcatgtcgcagatggttatgatgcaggcagtgaaggggattggttcggcgtttggctgggg

SEQ ID NO: 191997 - DNA, 75 bp, synthetic construct
  source 1..75: mol_type = other DNA
atttatgagattaaaattaagtctgtaataccagggagcaccattaataccgtactttttgctgaagatgtaacg

SEQ ID NO: 191998 - DNA, 75 bp, synthetic construct
  source 1..75: mol_type = other DNA
tttctgctgcagatgtaacagatattcacgcccgtctgtcttctctgggcaccggtaaaactcaggttggtggcg

SEQ ID NO: 191999 - DNA, 75 bp, synthetic construct
  source 1..75: mol_type = other DNA
aggagttgtctcgacagtaggcgctgatggaaaaacatattcaagacatattcctgaaattagtgaatatattta

SEQ ID NO: 192000 - DNA, 75 bp, synthetic construct
  source 1..75: mol_type = other DNA
cgctggaaagcctttctcagatccgcgccggacgtcaggagtgggaacgcaggcttgccgcgatggtgagccgca

SEQ ID NO: 192001 - DNA, 75 bp, synthetic construct
  source 1..75: mol_type = other DNA
agttgccgaacaatccagcggcgaacaagaggaagagaatttaatccgtctggatacgcggcatcttttcgatgc

SEQ ID NO: 192002 - DNA, 75 bp, synthetic construct
  source 1..75: mol_type = other DNA
gtgagcacagaagaagccagagaaatgatacagcggtaccgtgaagcggaaatggccgtactggagggaaagtct

SEQ ID NO: 192003 - DNA, 75 bp, synthetic construct
  source 1..75: mol_type = other DNA
ccgtaatgatgaggccacccggttattgctgcagtacagtcagcaacaggcacaggtggaaggacagattgctgc

SEQ ID NO: 192004 - DNA, 75 bp, synthetic construct
  source 1..75: mol_type = other DNA
aaggacagattgctgctgccagacagtctgaaccgccccggaaatcctggagactaaactccctgagaaagaggt

SEQ ID NO: 192005 - DNA, 75 bp, synthetic construct
  source 1..75: mol_type = other DNA
gcgtattcagcaacagatccgacaggccagaaacagtggcgggattggtcagcaggattatctggcgctgatttc

SEQ ID NO: 192006 - DNA, 75 bp, synthetic construct
  source 1..75: mol_type = other DNA
ggaagatattgccggacgtaaagggaatatagaaactgtcgccgcaatccgaaaaaatattattttatatgcgcc

SEQ ID NO: 192007 - DNA, 75 bp, synthetic construct
  source 1..75: mol_type = other DNA
ctttacgatcgccgtaatgacccaaatgaaatgcataacctgatcgatgatatccattttgccgacgttcgcagc

SEQ ID NO: 192008 - DNA, 75 bp, synthetic construct
  source 1..75: mol_type = other DNA
acccgtcgatttgcagaatggctacaaaccgatgaagcggcgcctgcattcaaaaaatatggctggactaggaaa

SEQ ID NO: 192009 - DNA, 75 bp, synthetic construct
  source 1..75: mol_type = other DNA
atgaataagtttgaagatattcgcggcgtcgcttttgatctcgatggtacgctggtggacagtgctcctggcttg

SEQ ID NO: 192010 - DNA, 75 bp, synthetic construct
  source 1..75: mol_type = other DNA
gatgtaatttatcagtctatcaatgaccttctgcccgcattagggcttccgcatagcgaaaatcaggaatcgaaa

SEQ ID NO: 192011 - DNA, 75 bp, synthetic construct
  source 1..75: mol_type = other DNA
gatgacctggtggcctcactggatatgaaagccgctgatgccggggccacacactaccgcatcaccagtgccacc

SEQ ID NO: 192012 - DNA, 75 bp, synthetic construct
  source 1..75: mol_type = other DNA
gaattcgacatgattggcctagacattaccttcccgaaagagggaatagcgccaggggtgcaggagactgccgat

SEQ ID NO: 192013 - DNA, 75 bp, synthetic construct
  source 1..75: mol_type = other DNA
tcatgtggcgatgaatattcacatgccgggctggcttcgtcgcggtgatgaagtactcgacattgtgttaggtga

SEQ ID NO: 192014 - DNA, 75 bp, synthetic construct
  source 1..75: mol_type = other DNA
agtcgtggtcgcggcctgctaccgttcaagactggagcatttcacgcggcaattgcggcgggcgtcccgattatt

SEQ ID NO: 192015 - DNA, 75 bp, synthetic construct
  source 1..75: mol_type = other DNA
taatatttctgtcttctgctgcttatgcagatatcaatttgtatggacctggtggtccacatacagccttgctcg

SEQ ID NO: 192016 - DNA, 75 bp, synthetic construct
  source 1..75: mol_type = other DNA
gttgttgaaattgattctgaatatactatatggcgtgatctaaatattgttgtccgtaaagatgcgaacagcgat

SEQ ID NO: 192017 - DNA, 75 bp, synthetic construct
  source 1..75: mol_type = other DNA
gccgtcgctcatctcattgagttgggatacgccgatcagcttgttctcagccacgatgtcttccttaaacaaatg

SEQ ID NO: 192018 - DNA, 75 bp, synthetic construct
  source 1..75: mol_type = other DNA
aaagcggcaggttgcccatcagttggcttaacctacggatataactacggcgaggctatcgatctcagccagcct

SEQ ID NO: 192019 - DNA, 75 bp, synthetic construct
  source 1..75: mol_type = other DNA
cgcagcatgattgccagcgtgctgggcctgagcattgatcgcatctactttttgcacgatgccccgcgtgggccg

SEQ ID NO: 192020 - DNA, 75 bp, synthetic construct
  source 1..75: mol_type = other DNA
atgactgagaaacccgacattgattttgaaaaagtgctgaatgacagcgggatgcccgcgacagaggccgaaatt

SEQ ID NO: 192021 - DNA, 75 bp, synthetic construct
  source 1..75: mol_type = other DNA
tgacggtatgcaggaacatattgattatcagattgagaaatatcagttcagggccaggaatgagtcaccgcgact

SEQ ID NO: 192022 - DNA, 75 bp, synthetic construct
  source 1..75: mol_type = other DNA
gctctcaaccaatgccaaagccgttggcgagtttggtattgataccgccaacatgttcgagttctgggactgggt

SEQ ID NO: 192023 - DNA, 75 bp, synthetic construct
  source 1..75: mol_type = other DNA
ggcgctgatcggtatctggtacaacaatttcttcggtgctgaaaccgaagcgatcctgccgtatgaccagtatat

SEQ ID NO: 192024 - DNA, 75 bp, synthetic construct
  source 1..75: mol_type = other DNA
cgttcaaagtgttcgaaggcaaccgtccaaccaactctattctgctgcgcgaaatcactccgttcagcctcggtg

SEQ ID NO: 192025 - DNA, 75 bp, synthetic construct
  source 1..75: mol_type = other DNA
tcaaagacgaagggcttatcaccaacacatcccgcatgtcgccgttctggcgactgattacagccatcaccacaa

SEQ ID NO: 192026 - DNA, 75 bp, synthetic construct
  source 1..75: mol_type = other DNA
ggtaacggcgcagatgttctgatggaacgagcactgacctgggcgcgtcaggaacgtgcgaccctgcgtaaaacg

SEQ ID NO: 192027 - DNA, 75 bp, synthetic construct
  source 1..75: mol_type = other DNA
accgcatccggacccgctgttactggtggctgagcggatgggaattgccccacaacagatgctgtttgtcggcga

SEQ ID NO: 192028 - DNA, 75 bp, synthetic construct
  source 1..75: mol_type = other DNA
tgttgcgtttgctggcctgggcggtgaacgtcacggcaaaaccggcgagcgctgcacagggggtgatccgcttct

SEQ ID NO: 192029 - DNA, 75 bp, synthetic construct
  source 1..75: mol_type = other DNA
tgtggtgatcgcttctggtgcggccagcgcattactgccggtgaaagccaccggcaccgggggtgcgtataacct

SEQ ID NO: 192030 - DNA, 75 bp, synthetic construct
  source 1..75: mol_type = other DNA
gaacgtgacggcgaaacctgccagcgctgcgcagggtgtgatccgtttctttaaggaagatgccagagccgttgt

SEQ ID NO: 192031 - DNA, 75 bp, synthetic construct
  source 1..75: mol_type = other DNA
gtgacagaaaccataccgggcaacaaatttctgttcgtcagaattttttcctgctggtgctgtatgttctccccg

SEQ ID NO: 192032 - DNA, 75 bp, synthetic construct
  source 1..75: mol_type = other DNA
agattgttcacagatcaactactcagccgcacgttttggtgaactacttcaacgtaaccgcgttaaagcacttca

SEQ ID NO: 192033 - DNA, 75 bp, synthetic construct
  source 1..75: mol_type = other DNA
tgcaccgggtactattcaggaattgccggaaggggcaacgatcaaggcaattcagagcgccaaagcggtgatgac

SEQ ID NO: 192034 - DNA, 75 bp, synthetic construct
  source 1..75: mol_type = other DNA
atgctaaacacctacgtagcagaaggtaaagcggcttccgcaaaattaatcaggtcaacccttgttgacgttttt

SEQ ID NO: 192035 - DNA, 75 bp, synthetic construct
  source 1..75: mol_type = other DNA
gacgagatgcgcaggcattacgagaagtcgcattaaaaacaggtctgaatattgttgcttcctccggtccctacc

SEQ ID NO: 192036 - DNA, 75 bp, synthetic construct
  source 1..75: mol_type = other DNA
tattctggcctgcgtgatgacggtgtatatttatgtcaaaaagtgtcagtgatgaaattcacatcagaagggaag

SEQ ID NO: 192037 - DNA, 75 bp, synthetic construct
  source 1..75: mol_type = other DNA
ctgctggtaatggctgaacgtgagcgcgttatgggtggtgagtgcttcatcgttttaaccaaagaaaacaatgag

SEQ ID NO: 192038 - DNA, 75 bp, synthetic construct
  source 1..75: mol_type = other DNA
cggattgtgttgattggtcagatcagcgcaccttagataacggtaatgtcgtttacgctggcatcgaatatgaag

SEQ ID NO: 192039 - DNA, 75 bp, synthetic construct
  source 1..75: mol_type = other DNA
gtaatgtcatcactggcagcattaacagcgcgattaaggggtccgcatcacgtctatacaatcaaggccgttatc

SEQ ID NO: 192040 - DNA, 75 bp, synthetic construct
  source 1..75: mol_type = other DNA
aaacgatgaagcccgtggcatactggtttcgtaaagtcaacctactgactcagacctacactggtgataactatc

SEQ ID NO: 192041 - DNA, 75 bp, synthetic construct
  source 1..75: mol_type = other DNA
ccggaaggggcaacgattaaatcaatccaatctactcaatcaggcgatgattttaacagcttcaatgatgcgatg

SEQ ID NO: 192042 - DNA, 75 bp, synthetic construct
  source 1..75: mol_type = other DNA
tctctgcgtggtgtgactgacttcctgccagtgatcaaggatattgcgcatcaagacgcattccgcgaaaccgcg

SEQ ID NO: 192043 - DNA, 75 bp, synthetic construct
  source 1..75: mol_type = other DNA
cagagacagccgcggacgggaatgggacaaaattgaaataacaaatgattttattttgaccaataatgacctgcc

SEQ ID NO: 192044 - DNA, 75 bp, synthetic construct
  source 1..75: mol_type = other DNA
acccgtcagtttgcagcatggctgcaaactgacgaagcggcacctgcatttaaaaaatatggctggacaaaaaaa

SEQ ID NO: 192045 - DNA, 75 bp, synthetic construct
  source 1..75: mol_type = other DNA
tacgggcctcaacataaatggaatgaagaggcaagaaaaaacgcggatattttatttggtgcgtcagaacagtca

SEQ ID NO: 192046 - DNA, 75 bp, synthetic construct
  source 1..75: mol_type = other DNA
aagatgccaagaagaatgcggatatcttgtttggtgcatcagaacaatctgctctggctatcattagggaccata

SEQ ID NO: 192047 - DNA, 75 bp, synthetic construct
  source 1..75: mol_type = other DNA
agtgggtaaaaagagtttgctgtggatccccttctttgggcagttgtactggttaaccggcaacttattgatcga

SEQ ID NO: 192048 - DNA, 75 bp, synthetic construct
  source 1..75: mol_type = other DNA
ctgtgtattcggctccatttactgccttttcagcccgcgtaacccgaaacatgtggccacctttgggcatatgtt

SEQ ID NO: 192049 - DNA, 75 bp, synthetic construct
  source 1..75: mol_type = other DNA
cagacgctgaaagctacggcaatgctatctatatcgctaaccaccagaacaactatgacatggtgacggcatcga

SEQ ID NO: 192050 - DNA, 75 bp, synthetic construct
  source 1..75: mol_type = other DNA
ctcaacatctcactggttgatacactacagaaatgcagggaggccagcggcagtgaaactgtaatcgcctcaacg

SEQ ID NO: 192051 - DNA, 75 bp, synthetic construct
  source 1..75: mol_type = other DNA
tttgctcaacgccttcttgggcataaatctgattctatggcggcgaggtatagggacagccgagggagagaatgg

SEQ ID NO: 192052 - DNA, 75 bp, synthetic construct
  source 1..75: mol_type = other DNA
cggattaggccgagacaggaggatagcaatcactgaagcaatacaggccaacattgagttgctatcagacagcgg

SEQ ID NO: 192053 - DNA, 75 bp, synthetic construct
  source 1..75: mol_type = other DNA
gaaggtggctacacgatgaacatcgcacagcttgccagaatgaaagatgaaaagctggttgacagctacacaatt

SEQ ID NO: 192054 - DNA, 75 bp, synthetic construct
  source 1..75: mol_type = other DNA
tctactcgactacgccagcaaaatcagggcaatccgaagaaaattgccggacaaaccgctcactgacatatcaac

SEQ ID NO: 192055 - DNA, 75 bp, synthetic construct
  source 1..75: mol_type = other DNA
tttgctcaacgtcttctcgggcataaatcagattcaatggcggcgcggtatagggacagccgagggagagaatgg

SEQ ID NO: 192056 - DNA, 75 bp, synthetic construct
  source 1..75: mol_type = other DNA
tttctccggcgtgaagcctctggttgctcaggtgaaagggcatctctttccctatagccgctattttacgctgag

SEQ ID NO: 192057 - DNA, 75 bp, synthetic construct
  source 1..75: mol_type = other DNA
ttttcttccatatcgtgatgatgccggtgcctccagtgaagaagagatttttgttaatgatgtcgcgaatatgga

SEQ ID NO: 192058 - DNA, 75 bp, synthetic construct
  source 1..75: mol_type = other DNA
agacaatctggaagacgtctggcgtagacaacctcgcctgttgatggagtatggttcaaagctcgcccatgcaga

SEQ ID NO: 192059 - DNA, 75 bp, synthetic construct
  source 1..75: mol_type = other DNA
tgccgggcacgagatttttgtcattagcgatgaagtttacgagcatatcaacttttcacagcaggaccatgccag

SEQ ID NO: 192060 - DNA, 75 bp, synthetic construct
  source 1..75: mol_type = other DNA
aggcacttactttttgctggtggattacagcgcggtttcttcgctggatgacgttgagttttgccagtggctgac

SEQ ID NO: 192061 - DNA, 75 bp, synthetic construct
  source 1..75: mol_type = other DNA
gactgagcaaagtattaataaattacttagtgaggcagaaaaaaggccttatcagtctttaacagaaatacatca

SEQ ID NO: 192062 - DNA, 75 bp, synthetic construct
  source 1..75: mol_type = other DNA
aacaccgttaatcaaaagcggcttactgaaagagattatttgtaaagcacttcccctgcccgtagacgataaatc

SEQ ID NO: 192063 - DNA, 75 bp, synthetic construct
  source 1..75: mol_type = other DNA
tgaaagctatcaaatcactcatggatgaacatggtatatctctggaagatttttatcgtgaatttggcaaaaaat

SEQ ID NO: 192064 - DNA, 75 bp, synthetic construct
  source 1..75: mol_type = other DNA
attacataaactattataatcgactgaggataaaggaaaaacttggcggtcttagcccggtacaatatcgattga

SEQ ID NO: 192065 - DNA, 75 bp, synthetic construct
  source 1..75: mol_type = other DNA
attcgtatctccagtaacagggggttgtattgtattttattgtaccggttcaggtgtgcgtttcccggcgcgtct

SEQ ID NO: 192066 - DNA, 75 bp, synthetic construct
  source 1..75: mol_type = other DNA
ttgtggcgcagcggcgctgtttattgccgcgctcatcagcacagtgcaattatttaagctgcaaacggcgacttc

SEQ ID NO: 192067 - DNA, 75 bp, synthetic construct
  source 1..75: mol_type = other DNA
cgccagcgccgggatgttgattttcggctcgacgctcatcatgcaacatacccgccatccttttgtacttgcggc

SEQ ID NO: 192068 - DNA, 75 bp, synthetic construct
  source 1..75: mol_type = other DNA
agcgatgaagtctacgagcacatcaatttttcacaacagggccatgccagcgtgctggcgcatccgcaattgcgt

SEQ ID NO: 192069 - DNA, 75 bp, synthetic construct
  source 1..75: mol_type = other DNA
atgcgggccgcggccaggtgacggtttacgaaccacagcaagttaccgcacatagcgcacaagcagcgatgtcac

SEQ ID NO: 192070 - DNA, 75 bp, synthetic construct
  source 1..75: mol_type = other DNA
ctgcgttccagcgacgtgctggcgcgactcggtggggatgaatttggtctgctgctaccagactgtaatgttgaa

SEQ ID NO: 192071 - DNA, 75 bp, synthetic construct
  source 1..75: mol_type = other DNA
ctaatgaagcgggtgggattggcatctgggagtgggaactgaagccggatatttttagttgggataagcggatgt

SEQ ID NO: 192072 - DNA, 75 bp, synthetic construct
  source 1..75: mol_type = other DNA
tgccggatcgtgctcagtcaggtgggacgcgacctgcaaatcttcaacgcactgaacgcgaatatggcagattat

SEQ ID NO: 192073 - DNA, 75 bp, synthetic construct
  source 1..75: mol_type = other DNA
tttcatcattgtcttgctgatgtggagcgctgtgcgtttgccgcggatggaagcttttttgatattcctcaccac

SEQ ID NO: 192074 - DNA, 75 bp, synthetic construct
  source 1..75: mol_type = other DNA
ctggacggcaatcaacattgttgaagccgtggttggcgcaatgctgctgcggaaattgttaccgtggcataaccc

SEQ ID NO: 192075 - DNA, 75 bp, synthetic construct
  source 1..75: mol_type = other DNA
gcgaagatttaaagatgtggttaattattgaccatctggaatacaaccgccactgtggcgtaaaaggggcgcata

SEQ ID NO: 192076 - DNA, 75 bp, synthetic construct
  source 1..75: mol_type = other DNA
gtgaagacctcaaggtatggttaatcatcgatcatcttgaatataacaggcactgcggcgtcaaaggtgcgcata

SEQ ID NO: 192077 - DNA, 75 bp, synthetic construct
  source 1..75: mol_type = other DNA
cgactggcgtatcacgttgcccagggcgcaaatcaatacgcgccaatgaccggcgtacaggcactgcgcgaggcg

SEQ ID NO: 192078 - DNA, 75 bp, synthetic construct
  source 1..75: mol_type = other DNA
aagcgattttagatcacgcagaaagcgtgcaaaaactgcggctggcgggatgtcggatagtgctcagccaggtgg

SEQ ID NO: 192079 - DNA, 75 bp, synthetic construct
  source 1..75: mol_type = other DNA
gccgcagatcccacactgcttgctacaccgcgaacgtacctgatgagccatatgccgtggctaccctttttactg

SEQ ID NO: 192080 - DNA, 75 bp, synthetic construct
  source 1..75: mol_type = other DNA
ggccacgcccagcggttgggcgtaaaaaccatcgctgggcctgtggcgttgccgctggtgatggatacactttcc

SEQ ID NO: 192081 - DNA, 75 bp, synthetic construct
  source 1..75: mol_type = other DNA
gcatctcacaggattaccaactattgccgatgcaaccctttcattactttctgttggattacctggtacgggaaa

SEQ ID NO: 192082 - DNA, 75 bp, synthetic construct
  source 1..75: mol_type = other DNA
gtgggccaatgacgtgcgcacaatgcggatgctggatggaagaagtcacagacaaatttgcgaaatgttcagccg

SEQ ID NO: 192083 - DNA, 75 bp, synthetic construct
  source 1..75: mol_type = other DNA
gaaaaatgggatgaactggttatccgcctggggcgttcgcctgcgcagcgttgcgtgaatcacatttctgaaccg

SEQ ID NO: 192084 - DNA, 75 bp, synthetic construct
  source 1..75: mol_type = other DNA
ggtaacggcggcggccagcaacaaaaatttatggcgctggggtctggcgttattattgatgccgataaaggctat

SEQ ID NO: 192085 - DNA, 75 bp, synthetic construct
  source 1..75: mol_type = other DNA
ccagaacccgaaaaacctgaccgcaattaagatggcggattctgatgcactgcgcgtgggtgattacaccgtagc

SEQ ID NO: 192086 - DNA, 75 bp, synthetic construct
  source 1..75: mol_type = other DNA
ttttacacgattaattacgagagtgagcttttagatggtggcaaagtgagcgaatccatcaggtcaaaatgcacc

SEQ ID NO: 192087 - DNA, 75 bp, synthetic construct
  source 1..75: mol_type = other DNA
gatcaacgcgaagactgtaacctatgacttcgaacgtctgatggaaggcgctaaactgctgaaatgttcagagtt

SEQ ID NO: 192088 - DNA, 75 bp, synthetic construct
  source 1..75: mol_type = other DNA
aagccgcagacctgattgttaaaggtatggaaggcgcaatcaacgcgaaaaccgtaacctatgacttcgaacgtc

SEQ ID NO: 192089 - DNA, 75 bp, synthetic construct
  source 1..75: mol_type = other DNA
gacttcgaacgtctgatggaaggcgctaagctgctgaaatgttcagagtttggtgaagcgatcatcgaaaacatg

SEQ ID NO: 192090 - DNA, 75 bp, synthetic construct
  source 1..75: mol_type = other DNA
ggcacaacgggatccgttctggataaaaaacatcaagagcccggaaaaactccgtgagaaatgggatgaactggt

SEQ ID NO: 192091 - DNA, 75 bp, synthetic construct
  source 1..75: mol_type = other DNA
gacttcgaacgtctgatggaaggcgctaagctgctgaaatgttcagagtttggtgaggcgatcatcaagaaaatg

SEQ ID NO: 192092 - DNA, 75 bp, synthetic construct
  source 1..75: mol_type = other DNA
gacttcgaacgtctgatggaaggcgctaagctgctgaaatgttcagagtttggtgaagcgatcatcaagaagatg

SEQ ID NO: 192093 - DNA, 75 bp, synthetic construct
  source 1..75: mol_type = other DNA
tgggcagcaaactgaccctgggcttactgcgcgacggtaagcaggttaacgtgaacctggaactgcagcagagca

SEQ ID NO: 192094 - DNA, 75 bp, synthetic construct
  source 1..75: mol_type = other DNA
ggggcgttcgcccgcgcagcgttgcgtgaatcatatttctgaaccggataccgaaattccgccggggttcagggg

SEQ ID NO: 192095 - DNA, 75 bp, synthetic construct
  source 1..75: mol_type = other DNA
gatacagaactattactttattaacccaggctatatgtttaatggtcatcgcttgacctatatgaagacctatta

SEQ ID NO: 192096 - DNA, 75 bp, synthetic construct
  source 1..75: mol_type = other DNA
ggcgcggggatgagcaccgtcagaacggctatcgcacggctggaagcagaaggctggttaacgcgtaaggcgcgt

SEQ ID NO: 192097 - DNA, 75 bp, synthetic construct
  source 1..75: mol_type = other DNA
actgtgtaaaacatccgccagtctggctgacatataaaaagtgtggacggttcgttaccctcaattactatcggg

SEQ ID NO: 192098 - DNA, 75 bp, synthetic construct
  source 1..75: mol_type = other DNA
attgatattcatgaagcagcgctcccggtggcacgccgccaggagcttgctgaatgggctgaatctattgtgccg

SEQ ID NO: 192099 - DNA, 75 bp, synthetic construct
  source 1..75: mol_type = other DNA
acagaagttggtactgctgtcgaaatattcactggacgctgcgcttaaagagaaaagcacgcgcgatacccaaca

SEQ ID NO: 192100 - DNA, 75 bp, synthetic construct
  source 1..75: mol_type = other DNA
tgggtaaaaaacatcatgagtccggcaaaactccgggaaaaatgggatgaactggttattcgcctggggcgttcg

SEQ ID NO: 192101 - DNA, 75 bp, synthetic construct
  source 1..75: mol_type = other DNA
cgtaaggtcggtgggcgtaacgtaagcaatatctatcggcttaatgtggaaaaacttgaagcagctgcagcggcg

SEQ ID NO: 192102 - DNA, 75 bp, synthetic construct
  source 1..75: mol_type = other DNA
ttgcgttatctgttaatcgagactgaaatacatgaaaaaaccacattagcactgagtgcactggctctgagttta

SEQ ID NO: 192103 - DNA, 75 bp, synthetic construct
  source 1..75: mol_type = other DNA
atggcccgtcttgcagattacagcaatgacgagggggtgtcatggcctgctatggaaacgatccggcgtcagatc

SEQ ID NO: 192104 - DNA, 75 bp, synthetic construct
  source 1..75: mol_type = other DNA
tgcctgggccaatgacgtgcgtacaatgcggatgctggatggcagaagccacagacaaatttgcgaaatgtttgg

SEQ ID NO: 192105 - DNA, 75 bp, synthetic construct
  source 1..75: mol_type = other DNA
acggatcgtgggtctctacgaacaggccgccagtgatgatggcgagatcatgcgaccaaaagagcctaactggac

SEQ ID NO: 192106 - DNA, 75 bp, synthetic construct
  source 1..75: mol_type = other DNA
aagccggtgaaacaattggcgggtatctcctgccaattggtacagcggcaaaagctgctggagcgccagcaaagc

SEQ ID NO: 192107 - DNA, 75 bp, synthetic construct
  source 1..75: mol_type = other DNA
ttgaaacctatattcacactgaagctgagttgcgtgtggatcaagacaaacttgaacaggatcttaccgacgcag

SEQ ID NO: 192108 - DNA, 75 bp, synthetic construct
  source 1..75: mol_type = other DNA
ctggatgctggtttatccaacgtcacatcaacagtgttaaatgcaattgccaactcaacatcaggtgccattgtt

SEQ ID NO: 192109 - DNA, 75 bp, synthetic construct
  source 1..75: mol_type = other DNA
ctggcgatctatctcgagttgttgagtcatctgcatttttcgctgggagaggggacggttcctgcgcgaagaatc

SEQ ID NO: 192110 - DNA, 75 bp, synthetic construct
  source 1..75: mol_type = other DNA
ttgaggcggggatggaaaccagcggcaatttcaacgaaccgtcagatcatctggcaatctatctggagttgttaa

SEQ ID NO: 192111 - DNA, 75 bp, synthetic construct
  source 1..75: mol_type = other DNA
gccgtaaaagcaatacgcgatgctattggtagcgatgaattcaatcgcttgtcgagagctggtattgtcgcctcg

SEQ ID NO: 192112 - DNA, 75 bp, synthetic construct
  source 1..75: mol_type = other DNA
gatgtggcagactccccgcatttaattgaacgcttcacggcacttttcgacgcgcaccatatgaacattgcggag

SEQ ID NO: 192113 - DNA, 75 bp, synthetic construct
  source 1..75: mol_type = other DNA
gccaccagattcacgggttcctgggatttatggcgctttatggggttggtgtttcagatcaggcgattgacgtat

SEQ ID NO: 192114 - DNA, 75 bp, synthetic construct
  source 1..75: mol_type = other DNA
aaaatcccttcaatcatcgtcagctaaaggtcttaatggtcctgctggattccattctatgatccgcgcgctgcc

SEQ ID NO: 192115 - DNA, 75 bp, synthetic construct
  source 1..75: mol_type = other DNA
aatcagagcgtgttcctgctatatcatcaatgttgcaggatgctatctcgcatggtgtacgtggtggcaaagctg

SEQ ID NO: 192116 - DNA, 75 bp, synthetic construct
  source 1..75: mol_type = other DNA
atcttgatcagatgaaggatgccgagcgcgcggcatgggatgacgtgcggtcaacaatgccaaatcaaaaagcaa

SEQ ID NO: 192117 - DNA, 75 bp, synthetic construct
  source 1..75: mol_type = other DNA
gacagctttggtttttacgcggcactaagccagttattgctggtgttagttgagggcgaccaccaaaacagataa

SEQ ID NO: 192118 - DNA, 75 bp, synthetic construct
  source 1..75: mol_type = other DNA
catgtaccagttgggcgtgatgggaacggcggatttgtggctgacggaccatctgctgaccaccggtagcctgtt

SEQ ID NO: 192119 - DNA, 75 bp, synthetic construct
  source 1..75: mol_type = other DNA
gaaaaatccgctctgttcagccagtgacaaatattgctatcgcgataacagctacaaacaagcgggatctatcga

SEQ ID NO: 192120 - DNA, 75 bp, synthetic construct
  source 1..75: mol_type = other DNA
acgacggaaaccgatgtcgccagcttgaaaaatcatctcgccggggagccgctgggccatgaaacgaaggtggcg

SEQ ID NO: 192121 - DNA, 75 bp, synthetic construct
  source 1..75: mol_type = other DNA
cattattcacaagactcttttattactgaagtgaagtcgttacgtgtgctaccgcgtattaatggtatttacttt

SEQ ID NO: 192122 - DNA, 75 bp, synthetic construct
  source 1..75: mol_type = other DNA
atcttccgtaaaggctatcagtggccgttccacgctacgcgagtgatggatttcggctcaagcctgttggacatg

SEQ ID NO: 192123 - DNA, 75 bp, synthetic construct
  source 1..75: mol_type = other DNA
acgcagccattgcagtttgccatgaataatcagcacatgaatggcggcattgaagtggatatctggggacaaaca

SEQ ID NO: 192124 - DNA, 75 bp, synthetic construct
  source 1..75: mol_type = other DNA
ggcgagacggcaaagcgcacaggagctggcgagccacgccagagcctacggtgactggctggcaaatccgctgtc

SEQ ID NO: 192125 - DNA, 75 bp, synthetic construct
  source 1..75: mol_type = other DNA
gaaagagtggctggaccgggtattaagccgtggttttgccagcgggccgggaggaaaccaactggcgggaaagta

SEQ ID NO: 192126 - DNA, 75 bp, synthetic construct
  source 1..75: mol_type = other DNA
ccactctgacagtacgtgacgatgcccgtctggaactggccgctgacttttgcggtctgtttctgatgaccgaca

SEQ ID NO: 192127 - DNA, 75 bp, synthetic construct
  source 1..75: mol_type = other DNA
cgaaagaggagtacggcgaaggggacttcaccaaaggcgtgtatgtctcggtaccgttggatctcttctcgtctg

SEQ ID NO: 192128 - DNA, 75 bp, synthetic construct
  source 1..75: mol_type = other DNA
gcagccgcaggatgccattttgcagcattcggtggtggcgaatcagttaacgctgttgaaatacaatgccggact

SEQ ID NO: 192129 - DNA, 75 bp, synthetic construct
  source 1..75: mol_type = other DNA
acataaatgttcaaccagaggatgaagcaaaactgaaccactttgccggaaacttcagggtgcatacccgtgatg

SEQ ID NO: 192130 - DNA, 75 bp, synthetic construct
  source 1..75: mol_type = other DNA
gctttggctggctatgggcagcaaaacgttggggggctttgccttgcctgacggcgaatttgctggtgcaggcta

SEQ ID NO: 192131 - DNA, 75 bp, synthetic construct
  source 1..75: mol_type = other DNA
cgccagcgactcgcctctcttgcttatcatcagcagtattggttttggcagtacctttatgggcacgacatctct

SEQ ID NO: 192132 - DNA, 75 bp, synthetic construct
  source 1..75: mol_type = other DNA
actggaggaatgtccggtcggggtggaaggagagatttgcattggcgggatggggctggcacaaggctacctgaa

SEQ ID NO: 192133 - DNA, 75 bp, synthetic construct
  source 1..75: mol_type = other DNA
cgtaccttacactccagaatcagcagacttcctgatccatcgtttcttcgaagataccatttacattgaaagtgc

SEQ ID NO: 192134 - DNA, 75 bp, synthetic construct
  source 1..75: mol_type = other DNA
gaagaggcccgttacctggatatacccgatgaggtaaaggttgcactcggcgatattatctcgtacatcacctgg

SEQ ID NO: 192135 - DNA, 75 bp, synthetic construct
  source 1..75: mol_type = other DNA
aacgtttttctttcagcaccgcgttattcgggatgctggttctgaccctaggtatgggtttaggccgctttctct

SEQ ID NO: 192136 - DNA, 75 bp, synthetic construct
  source 1..75: mol_type = other DNA
ttccaggaaaaagagcgcctacacattacgctggattccatcggtgaagcagttgtctgtattgatctggcaatg

SEQ ID NO: 192137 - DNA, 75 bp, synthetic construct
  source 1..75: mol_type = other DNA
gaaacgcgttttcgcaacgccatggaatattccgccattggcatggcgttagttggcaccgagggtcaatggctg

SEQ ID NO: 192138 - DNA, 75 bp, synthetic construct
  source 1..75: mol_type = other DNA
gatatcgcttgatgaacagtggcggatgattaaagagaatcagttgatgatgatcgcccacggcatcgcttcgcc

SEQ ID NO: 192139 - DNA, 75 bp, synthetic construct
  source 1..75: mol_type = other DNA
atgccgtctggctgcatgattttaacgtccgctggcgagtcaccgagactggttttgaagtctttgcgctggaag

SEQ ID NO: 192140 - DNA, 75 bp, synthetic construct
  source 1..75: mol_type = other DNA
gcagaaccgtctgaaatatatgggttgtgtgtgggcaatgtaaagaaacataaaaacattttacctttaatagat

SEQ ID NO: 192141 - DNA, 75 bp, synthetic construct
  source 1..75: mol_type = other DNA
ccgccgtgattgtggcgctgggtgtctcgctggctcctgaagcactgcgcacctcacaggaggcacagataaaaa

SEQ ID NO: 192142 - DNA, 75 bp, synthetic construct
  source 1..75: mol_type = other DNA
gaacagcttctgaagatgctgttggctgaaaaatcacgtctgaatattaatatcagccacgttggtaacaaacct

SEQ ID NO: 192143 - DNA, 75 bp, synthetic construct
  source 1..75: mol_type = other DNA
aatgtattgttttatgtctcactggaaaagtttcctgttgataatccttattatggagaatttcttggtattcct

SEQ ID NO: 192144 - DNA, 75 bp, synthetic construct
  source 1..75: mol_type = other DNA
aaaaaatcgaaaagtattacgaaaaatacgcaaacgcaggcaccaatgagtggcacatcgatgaaagtaaaaaag

SEQ ID NO: 192145 - DNA, 75 bp, synthetic construct
  source 1..75: mol_type = other DNA
ataatcagcacatgaatggcggcattgaagtcgatatctggggacaaacatctctgcccggttgttttgcggtgg

SEQ ID NO: 192146 - DNA, 75 bp, synthetic construct
  source 1..75: mol_type = other DNA
cggattattaatcctcgcgatggcgtggctaccgccgttttttctggttttcatcattcgctttctggcgggagt

SEQ ID NO: 192147 - DNA, 75 bp, synthetic construct
  source 1..75: mol_type = other DNA
ttctgttggtttctgccctggcgagcgggttgttgatcctcgcaatggcatggttgccgccatttattctggtgt

SEQ ID NO: 192148 - DNA, 75 bp, synthetic construct
  source 1..75: mol_type = other DNA
gctggtgggtaatgatgccaacgctccggcgctggagatcacgctcggtcagttaacggttgagttcgaaacaga

SEQ ID NO: 192149 - DNA, 75 bp, synthetic construct
  source 1..75: mol_type = other DNA
gtcctcaggcgacttgctacgtttctatcaaaactggcaacccacctgggcaccaggaacacagcgtctgtatgc

SEQ ID NO: 192150 - DNA, 75 bp, synthetic construct
  source 1..75: mol_type = other DNA
gcgacctacaccgctggcggcctgccattgcaggtgccggatgacgttaaatcctcaagcgacttgctgcgcttc

SEQ ID NO: 192151 - DNA, 75 bp, synthetic construct
  source 1..75: mol_type = other DNA
tgaccgacaaacaagcggcgctgccgtatgcatcggcctacaaacaggacgagcaagagattaaacgcttgttag

SEQ ID NO: 192152 - DNA, 75 bp, synthetic construct
  source 1..75: mol_type = other DNA
gtgcatgtttcgccaggggcgttagatgctgaagcttatggtgtgaagtcgaccattgaagatatggcccgctgg

SEQ ID NO: 192153 - DNA, 75 bp, synthetic construct
  source 1..75: mol_type = other DNA
ggcctgaacttaccgctaaacagtggaatgggatcacactattacatcttgcgacctacaccgctggcggcctgc

SEQ ID NO: 192154 - DNA, 75 bp, synthetic construct
  source 1..75: mol_type = other DNA
gggattgtgatgctggctaacaaaaactatcccaatccagcgagagtcgctgccgcctggcagattctcaacgct

SEQ ID NO: 192155 - DNA, 75 bp, synthetic construct
  source 1..75: mol_type = other DNA
gacttcgaacgtctgatggaaggtgctaaactgctgaaatgcagcgagtttggtgatgcgatcatcaagaacatg

SEQ ID NO: 192156 - DNA, 75 bp, synthetic construct
  source 1..75: mol_type = other DNA
ccagcagcggctgaaattaaacctgtccggaaggctggcaataaaaattattgcagagccaccggataagcgccg

SEQ ID NO: 192157 - DNA, 75 bp, synthetic construct
  source 1..75: mol_type = other DNA
gcgctggcgaaactggtgagcgaaggtgtgctgctcagtcgacgcggcggcgggacgtttattcgctggcgtcat

SEQ ID NO: 192158 - DNA, 75 bp, synthetic construct
  source 1..75: mol_type = other DNA
aatgcgcgccacacctggcgacaaagaaaagattcagctttgctttgaagcaacgctaagtgaagacccggatat

SEQ ID NO: 192159 - DNA, 75 bp, synthetic construct
  source 1..75: mol_type = other DNA
aagatcaggctcgccacgcacggattacccgcctgcccggtgagcattatgagcattcgagggagaaaaacgcat

SEQ ID NO: 192160 - DNA, 75 bp, synthetic construct
  source 1..75: mol_type = other DNA
cgagcagtttgatgaaatcaatattgtacgcggtcagcgcgttcctggcgggcggctggggataaaaatcacaga

SEQ ID NO: 192161 - DNA, 75 bp, synthetic construct
  source 1..75: mol_type = other DNA
gcaccgctggatgcactgatgcatgcggggcttctcatagacgacgagcagtttgatgaaatcaatattgtgcgc

SEQ ID NO: 192162 - DNA, 75 bp, synthetic construct
  source 1..75: mol_type = other DNA
gatctgatttattatcctcgcgatgacagggaagatagtcctgaagggattgtcaaggaaattaaagaatggcga

SEQ ID NO: 192163 - DNA, 75 bp, synthetic construct
  source 1..75: mol_type = other DNA
ctgataatgagccgaaaaccgaagcacagccagaacaaccagacccggctcagcccggaactgacagcaccatga

SEQ ID NO: 192164 - DNA, 75 bp, synthetic construct
  source 1..75: mol_type = other DNA
gtattccggtgaagtaaataagttgctgaaagcgcaggtccgcaaggattttgaggcacaaatcgacacttacgt

SEQ ID NO: 192165 - DNA, 75 bp, synthetic construct
  source 1..75: mol_type = other DNA
taccggaagagtttccgctcacctttgatttatcaaaacaaacacagtcggtcatgctgaaaacaccagacgatg

SEQ ID NO: 192166 - DNA, 75 bp, synthetic construct
  source 1..75: mol_type = other DNA
ttgcagaaccaccggataagcgccgccgtgacctggacaacattctgaaagcaccgctggatgcgctgacgcatg

SEQ ID NO: 192167 - DNA, 75 bp, synthetic construct
  source 1..75: mol_type = other DNA
cgccatattggcggtcatggatatggctctatttatccagggccaattggtgcggtgatttctccgctacttggc

SEQ ID NO: 192168 - DNA, 75 bp, synthetic construct
  source 1..75: mol_type = other DNA
gtttgatgaaattaatattgtgcgcggtctgcctgttcctggtggtcggttgggcgtgaaaatttacgaaataat

SEQ ID NO: 192169 - DNA, 75 bp, synthetic construct
  source 1..75: mol_type = other DNA
cgagcagtttgatgaaatcaatattgtgcgcggtcagcgcgttcctgggggggggcggctgggcgtgaagattta

SEQ ID NO: 192170 - DNA, 75 bp, synthetic construct
  source 1..75: mol_type = other DNA
tattttgtatcaaaagccggtgagcgttatcgccgtgatgtggcgctcattgttcgccagcagcgactgaaatta

SEQ ID NO: 192171 - DNA, 75 bp, synthetic construct
  source 1..75: mol_type = other DNA
ccagcagcaactgaaattaaacctgtccggaaggctggcaataaaaattattgcagagccaccggataagcgccg

SEQ ID NO: 192172 - DNA, 75 bp, synthetic construct
  source 1..75: mol_type = other DNA
aaatttatctgtgatcgtccgctggaagtccgtccggtggagtttcataacccactgaaaggccacgtcgcagcc

SEQ ID NO: 192173 - DNA, 75 bp, synthetic construct
  source 1..75: mol_type = other DNA
attgccaccatcgaccattcgatgtggttccatcggccatttaatttaaatgagtggctgttgtataacgtggag

SEQ ID NO: 192174 - DNA, 75 bp, synthetic construct
  source 1..75: mol_type = other DNA
gtatcaaaagccggggagcgttatcgccgggcagtggcgcttattgttcgccagcagcgactgaaattaagcctg

SEQ ID NO: 192175 - DNA, 75 bp, synthetic construct
  source 1..75: mol_type = other DNA
ctgaaagcaccactggatgtgctgacgcatgccggacttctcatagacgacgagcagtttgatgaaatcaatatt

SEQ ID NO: 192176 - DNA, 75 bp, synthetic construct
  source 1..75: mol_type = other DNA
taaccatctcaccgctcagaacgtgccgaatctgtttgcccgtaacgaacgcgtgatttgccttttcgataccga

SEQ ID NO: 192177 - DNA, 75 bp, synthetic construct
  source 1..75: mol_type = other DNA
gtttgatgaaatcaatattgtacgtggtcagcttgttcctggtggtcggctgggtgtgaggatttacaaaattga

SEQ ID NO: 192178 - DNA, 75 bp, synthetic construct
  source 1..75: mol_type = other DNA
gtttgatgaaatcaatattgtgcgcggtcaactcgttcctggtgggcggttggggataaaaatcacagaactgga

SEQ ID NO: 192179 - DNA, 75 bp, synthetic construct
  source 1..75: mol_type = other DNA
tcatcgcagacgttccagactcccgccgccgcgacctcgataacatcctgaaaggtttactcgactctcttatcc

SEQ ID NO: 192180 - DNA, 75 bp, synthetic construct
  source 1..75: mol_type = other DNA
tccggaaggctggcaataaaaattactgcagagccaccggataaacgccgtcgtgacctggacaatattctgaaa

SEQ ID NO: 192181 - DNA, 75 bp, synthetic construct
  source 1..75: mol_type = other DNA
cgggcgagctggccattctgctgcggcagatagacactttcttagcaggtaatgtgaggttgcatgatgccgaga

SEQ ID NO: 192182 - DNA, 75 bp, synthetic construct
  source 1..75: mol_type = other DNA
gcatcaagtgtaaatttcattatcgacttaaaaaacttaaatacaaagaaacgattatcggaaaaacttgatgga

SEQ ID NO: 192183 - DNA, 75 bp, synthetic construct
  source 1..75: mol_type = other DNA
tattttttttgctaatgttgagctatttacagcttatagctctctatattgtgattgcatctaatgttaatttta

SEQ ID NO: 192184 - DNA, 75 bp, synthetic construct
  source 1..75: mol_type = other DNA
atgtcacaccccgcgttaacgcaactgcgtgcgctgcgctattttaaagagatccctgccctggatccgcaactg

SEQ ID NO: 192185 - DNA, 75 bp, synthetic construct
  source 1..75: mol_type = other DNA
tctctcttgatggctctattcagtcggagggcgatcaggtttcaatcggcattacccaaaaatcaccccgatcag

SEQ ID NO: 192186 - DNA, 75 bp, synthetic construct
  source 1..75: mol_type = other DNA
atggaaaagaaaacgatttctgactataccgaggcggagtttctggagttcgtcagaaaaatctgccgggctgaa

SEQ ID NO: 192187 - DNA, 75 bp, synthetic construct
  source 1..75: mol_type = other DNA
gattacgtggctgctcatggttatggtgagccttccagtgaagcctatgaactggcggagcggtggttctggcag

SEQ ID NO: 192188 - DNA, 75 bp, synthetic construct
  source 1..75: mol_type = other DNA
attcagcttggtacagtagctgctaatggcactggtgaagatattccgtttactttgaaagctacatctaacgct

SEQ ID NO: 192189 - DNA, 75 bp, synthetic construct
  source 1..75: mol_type = other DNA
tggcttcgagtttacggctcagctgaagggtggcgatactcctggtgacttccagtctgcagcagcttacgcggt

SEQ ID NO: 192190 - DNA, 75 bp, synthetic construct
  source 1..75: mol_type = other DNA
tgagtttccgaaatggaataaagcaggcggcaaggtgttgccggggctggttaagcgccgggaagccgagcgcac

SEQ ID NO: 192191 - DNA, 75 bp, synthetic construct
  source 1..75: mol_type = other DNA
actcctccaggtatgtctcgggaaatgctggagcaagccgtcaaagaggggtactcagagcgagatgtcgtaagg

SEQ ID NO: 192192 - DNA, 75 bp, synthetic construct
  source 1..75: mol_type = other DNA
catcgcattctggagtgccctgtcggttggttcatggaagctgatggcaaggcatttgatcatgaagtgttccac

SEQ ID NO: 192193 - DNA, 75 bp, synthetic construct
  source 1..75: mol_type = other DNA
gcaatacgcgaatgtcacctcgccgattacgggcgtcagcgggaaatcgtcggtgaccgtcggcgcactcgttac

SEQ ID NO: 192194 - DNA, 75 bp, synthetic construct
  source 1..75: mol_type = other DNA
acagggaagatagtcctgaagggattgttaaagagattaaagaatggcgatccgctaacggtaagtcaggattta

SEQ ID NO: 192195 - DNA, 75 bp, synthetic construct
  source 1..75: mol_type = other DNA
tctgagccatgatcaaactcttcaatttaaaagtttgacgctcaaagaattaaactttgtaatgaattacgtgtt

SEQ ID NO: 192196 - DNA, 75 bp, synthetic construct
  source 1..75: mol_type = other DNA
actcttcaatttaaaagtttgatgctcaaagaattaaacttcgtaatgaattacgtgttcactcctgagacttgg

SEQ ID NO: 192197 - DNA, 75 bp, synthetic construct
  source 1..75: mol_type = other DNA
gaattacccggcagaactgtaccttatgaggttgccgagattcgcccccaggtgggtggcattatcattaagcgc

SEQ ID NO: 192198 - DNA, 75 bp, synthetic construct
  source 1..75: mol_type = other DNA
ttacccacaacgctcagggtaaagcgacggcgctcattctggataaagacgatgtcgtgcagttacgcgaaattg

SEQ ID NO: 192199 - DNA, 75 bp, synthetic construct
  source 1..75: mol_type = other DNA
atggatcgtcactgccggattgcaggccggtgaccgggtgatcgtctcgggtttgcaacgcattcatccgggcat

SEQ ID NO: 192200 - DNA, 75 bp, synthetic construct
  source 1..75: mol_type = other DNA
gatttaatatattacccaaaagaaggtgatgatgactcaccttcaggtattgtaaacacagtaaaacaatggcga

SEQ ID NO: 192201 - DNA, 75 bp, synthetic construct
  source 1..75: mol_type = other DNA
cgcgatcctcgtctgctggtagtatgtggcccttgttccattcatgatccggaaactgctctggaatatgctcgt

SEQ ID NO: 192202 - DNA, 75 bp, synthetic construct
  source 1..75: mol_type = other DNA
gtaaccgatgcctgcattagctgggaaatgactgatgccttgctgcgtgagatccatcatgatctcaaagggcaa

SEQ ID NO: 192203 - DNA, 75 bp, synthetic construct
  source 1..75: mol_type = other DNA
gactccagaacaggctgataacataagaaaaatactgcacactcagggaatacgcagcggtacccgtcccataga

SEQ ID NO: 192204 - DNA, 75 bp, synthetic construct
  source 1..75: mol_type = other DNA
cactctggatgatgtggtgtcatcctgtcgcgattgcgttcttagtccgtggctattgcaccaccatcatgctaa

SEQ ID NO: 192205 - DNA, 75 bp, synthetic construct
  source 1..75: mol_type = other DNA
tagtgtcatcctgtcgcgattgcgttcttagtccgtggttattgcaccaccatcatgctaaagggacagctaagc

SEQ ID NO: 192206 - DNA, 75 bp, synthetic construct
  source 1..75: mol_type = other DNA
gtaccactgtcggctggaaagggttaattaacgatccccatatggatggctcttttgatgtagaagccgggctgc

SEQ ID NO: 192207 - DNA, 75 bp, synthetic construct
  source 1..75: mol_type = other DNA
ttgcagagccaccggataagcgccgtcgtgacctggacaatatcctgaaagcaccactggatgtgctgacgcatg

SEQ ID NO: 192208 - DNA, 75 bp, synthetic construct
  source 1..75: mol_type = other DNA
ccgacggtgaacacctactggcgacgtcgtggcagcacatattttgtatcaaaagccggtgagcgttatcgccgg

SEQ ID NO: 192209 - DNA, 75 bp, synthetic construct
  source 1..75: mol_type = other DNA
ccagcagcggctgaaattaaatctgcccggaaggctggcgataaaggttatcgccgagccaccggataagcgtcg

SEQ ID NO: 192210 - DNA, 75 bp, synthetic construct
  source 1..75: mol_type = other DNA
atggcgcgcccgcgaaaatataaaaccgatgttccgggattatctccgtattttgacaaaagaaataacaaagtt

SEQ ID NO: 192211 - DNA, 75 bp, synthetic construct
  source 1..75: mol_type = other DNA
gtgcgcggtcagcctgtatctggtggacggctgggcgtgaagatttaccagataatgcatgaagggcaggctaaa

SEQ ID NO: 192212 - DNA, 75 bp, synthetic construct
  source 1..75: mol_type = other DNA
gtttgatgaaatcaatattgtgcgcggtctgcctgttcctggtgggcggctggggataaaaatcacagagctgga

SEQ ID NO: 192213 - DNA, 75 bp, synthetic construct
  source 1..75: mol_type = other DNA
gcaaacgggcgatgtcccgccaggctttaaccctgcagaatcggcaaaaaaaccccaggtacggatatcacggca

SEQ ID NO: 192214 - DNA, 75 bp, synthetic construct
  source 1..75: mol_type = other DNA
ttcatccggcatttccagaagaatcggtgcgtattgaccctctgcgtaacttcacccgagtgactgaaatcgcta

SEQ ID NO: 192215 - DNA, 75 bp, synthetic construct
  source 1..75: mol_type = other DNA
aaagtggtgggttacaaaggtcgggtggtttttgatgccagcaaaccggatggcacaccgcgcaaactgctggat

SEQ ID NO: 192216 - DNA, 75 bp, synthetic construct
  source 1..75: mol_type = other DNA
atgaaagaaaacgcatatgagatgccctggcgcacgaactatgaagccatggcagcagcaggttggctggttggt

SEQ ID NO: 192217 - DNA, 75 bp, synthetic construct
  source 1..75: mol_type = other DNA
gacttcgaacgtctgatggaaggcgctaagctgctgaaatgttcagagtttggcgatgcgatcatcaagaacatg

SEQ ID NO: 192218 - DNA, 75 bp, synthetic construct
  source 1..75: mol_type = other DNA
atgggttggactgaagcggctgacctgattgttaaaggtatggaaggcgcaatcaacgccaagaccgtaacctat

SEQ ID NO: 192219 - DNA, 75 bp, synthetic construct
  source 1..75: mol_type = other DNA
caaggacacgccggacgatatgtggcttggtagtgggttcctgtgggaaaaccgccatgcccagcgcgtgtttga

SEQ ID NO: 192220 - DNA, 75 bp, synthetic construct
  source 1..75: mol_type = other DNA
ggccattcgaatcaaaaaatgaccgatatttacaacgatgcacgcggtaaggaatggaaaaaactggtcatttga

SEQ ID NO: 192221 - DNA, 75 bp, synthetic construct
  source 1..75: mol_type = other DNA
tgatcgatgttttccgggaggctcaacaaacgggtgatgtcccgccaggctttaacccggctgaatcggcaaaaa

SEQ ID NO: 192222 - DNA, 75 bp, synthetic construct
  source 1..75: mol_type = other DNA
actcaacacgctgaaacagaaagcggcccctctcagggtatttgatgaacgttttggcaccagaccgttagatgc

SEQ ID NO: 192223 - DNA, 75 bp, synthetic construct
  source 1..75: mol_type = other DNA
cagctccctaaccttgagtacatcgccaagctttcaggtggccgcgtgatcaaaggccgcattcctattttaatc

SEQ ID NO: 192224 - DNA, 75 bp, synthetic construct
  source 1..75: mol_type = other DNA
atttgaacattatcttgattatattattgataataaaaaccttatccctatccaagaagtgatgcctatcattgg

SEQ ID NO: 192225 - DNA, 75 bp, synthetic construct
  source 1..75: mol_type = other DNA
aattactcagtgcctgttataagcagcaattaattatgattgatgcctacatcacaacaaaaactgatttaacaa

SEQ ID NO: 192226 - DNA, 75 bp, synthetic construct
  source 1..75: mol_type = other DNA
ccgaaagaagatccggttccactgccagaattaccgtgcgaaaaatcggatgcttattttgtgcttcgtgacggt

SEQ ID NO: 192227 - DNA, 75 bp, synthetic construct
  source 1..75: mol_type = other DNA
ttgatcgtgttaatgcccagcaggcgcgtcgctttatggaccgtgtggtgggatatatggtttcgccgctgctgt

SEQ ID NO: 192228 - DNA, 75 bp, synthetic construct
  source 1..75: mol_type = other DNA
gcgtcgctttatggaccgcgtggtggggtatatggtttcgccgctgctatggaaaaagatcgctcgtggtctgtc

SEQ ID NO: 192229 - DNA, 75 bp, synthetic construct
  source 1..75: mol_type = other DNA
agggcggtatgcggccgaaccagatggttctgaccagtatcgattgcccgacctgtggccgcaaaatgggtattc

SEQ ID NO: 192230 - DNA, 75 bp, synthetic construct
  source 1..75: mol_type = other DNA
ggacgaaagtgatgcctgcactgcgtaaaggcgatgaagatcgtatcttaccggcagtcgataaaggcgatgctt

SEQ ID NO: 192231 - DNA, 75 bp, synthetic construct
  source 1..75: mol_type = other DNA
tggcgttgcaggtgactcatcaaaacgacaaacctttccgcccggttaataaagaacagactcaggcggcactga

SEQ ID NO: 192232 - DNA, 75 bp, synthetic construct
  source 1..75: mol_type = other DNA
gctttgtgcgcggtgagttttatacccaggacggcgtgctggttgcctcgaccgttcaggaaggggtaatgcgta

SEQ ID NO: 192233 - DNA, 75 bp, synthetic construct
  source 1..75: mol_type = other DNA
cggttttctcgagccggggatccagattgccaccatcgaccattcgatgtggttccatcgtccgtttaatctgaa

SEQ ID NO: 192234 - DNA, 75 bp, synthetic construct
  source 1..75: mol_type = other DNA
tgtttggcggccaggtcgtgggtcaggccttgtatgctgcaaaagagaccgtccctgacgagcggctggtacatt

SEQ ID NO: 192235 - DNA, 75 bp, synthetic construct
  source 1..75: mol_type = other DNA
ccagcagcggctgaaattaagcctgtccggaacgctggcgataaaggtgattgcagagccaccggataagcgtcg

SEQ ID NO: 192236 - DNA, 75 bp, synthetic construct
  source 1..75: mol_type = other DNA
agcctgtccggaaggttggcaataaaaattattgcagaaccaccggataagcgccgccgtgatctggacaatatt

SEQ ID NO: 192237 - DNA, 75 bp, synthetic construct
  source 1..75: mol_type = other DNA
attattgcagagccaccggataagcgccgccgtgacctggacaatattctgaaagcaccgctggatgcgctgacg

SEQ ID NO: 192238 - DNA, 75 bp, synthetic construct
  source 1..75: mol_type = other DNA
cgagatcgaagagggcgaattccgcattaaaggttatgacggcccgatcgttgagtgtgaaaaatgtggttctga

SEQ ID NO: 192239 - DNA, 75 bp, synthetic construct
  source 1..75: mol_type = other DNA
gtttgatgaaatcaatattgtacgtggccagccagtatcaggtggacggctggagataaaaattacagaggtggg

SEQ ID NO: 192240 - DNA, 75 bp, synthetic construct
  source 1..75: mol_type = other DNA
taagtgggccaatcgtggtggcgcgcgatatcgcccacgcaaaaattaaagagcgactggataacggtgaaccga

SEQ ID NO: 192241 - DNA, 75 bp, synthetic construct
  source 1..75: mol_type = other DNA
cgtctgccacgccacggcggctcctgcccaattgccatggcgctctcctgttccgccgatcgcaatattaaggcc

SEQ ID NO: 192242 - DNA, 75 bp, synthetic construct
  source 1..75: mol_type = other DNA
gcgacgtcgtggcagcacatattttatctcggaggagggaacgcgttatcgccgggctgtggcgcttattgttcg

SEQ ID NO: 192243 - DNA, 75 bp, synthetic construct
  source 1..75: mol_type = other DNA
gtttgatgaaatcaatattgtgcgcggccagctcgtttctggtgggcggctgggcgtgaagatttacaaaattga

SEQ ID NO: 192244 - DNA, 75 bp, synthetic construct
  source 1..75: mol_type = other DNA
atgaccgaacgcatagaatttgttttgccttacccgccaacggtgaacacctactggcgacgtcgtggcagcaca

SEQ ID NO: 192245 - DNA, 75 bp, synthetic construct
  source 1..75: mol_type = other DNA
cgacaaaccgttccgcccggtcaacaaagaacaaactcaggctgcggtaagtctgctggaaaaagcgcgctacag

SEQ ID NO: 192246 - DNA, 75 bp, synthetic construct
  source 1..75: mol_type = other DNA
ccggctgtcgataaaggtgactccctgtcgcttgttgaactgacgcctgcgcagcactttaccaagccgccagcc

SEQ ID NO: 192247 - DNA, 75 bp, synthetic construct
  source 1..75: mol_type = other DNA
ttggttttggcgtgaaaaaaaccatgatgatggcgcagcgtttgtatgaagcaggctatatcacttacatgcgta

SEQ ID NO: 192248 - DNA, 75 bp, synthetic construct
  source 1..75: mol_type = other DNA
tattacgacaatttgcccaccagcggaaacgagcagggacaagcattccgtgatattgagctggaaaaagtgttg

SEQ ID NO: 192249 - DNA, 75 bp, synthetic construct
  source 1..75: mol_type = other DNA
aagggggcggctccgccaataaagccgcgctttatcaggaaaccaaatccttattgcaaccagaaaaactgaccg

SEQ ID NO: 192250 - DNA, 75 bp, synthetic construct
  source 1..75: mol_type = other DNA
taaaggcgatgaagatcgtatcttaccggcagtcgataaaggcgatgctctgacgctcgttgaactgacaccagc

SEQ ID NO: 192251 - DNA, 75 bp, synthetic construct
  source 1..75: mol_type = other DNA
cctatggtgccgcactttcgacgccacgggaaatccatcaggccattaattccctgatttttctttatccgggga

SEQ ID NO: 192252 - DNA, 75 bp, synthetic construct
  source 1..75: mol_type = other DNA
tatttgcgttgcaacaacatgaaaagggacttaacgataggcatctacgttactggcttgatcatctacatggtg

SEQ ID NO: 192253 - DNA, 75 bp, synthetic construct
  source 1..75: mol_type = other DNA
cattcatcggcacgtgcagggccacgatattatgctcccgctggctaacgaaggtgtgccgttgcgcgtgtgctg

SEQ ID NO: 192254 - DNA, 75 bp, synthetic construct
  source 1..75: mol_type = other DNA
ctcagcgagatcgccggacaggcgcagatcacgctctggtttgagggcgaccgctttcagaatggcaaccccgcg

SEQ ID NO: 192255 - DNA, 75 bp, synthetic construct
  source 1..75: mol_type = other DNA
ctgctgaccgcaccgaaactgcatcgcatgactcaggacgatgctgcagacaaagcagcgaaagctgccgtagca

SEQ ID NO: 192256 - DNA, 75 bp, synthetic construct
  source 1..75: mol_type = other DNA
ggctatgcgctggttgcgtggtctggtcacgacgcaggtatcgtctatatgggtatggcggcaattgctgtcggt

SEQ ID NO: 192257 - DNA, 75 bp, synthetic construct
  source 1..75: mol_type = other DNA
aacattataatgaagatgaaattagtgcgaaattaccactagcatatgattacattttaaataaaaaagaatcaa

SEQ ID NO: 192258 - DNA, 75 bp, synthetic construct
  source 1..75: mol_type = other DNA
caataggatatcttgaatatcaagaggttaagaaaggtagagatatccagttccagatttttaaaagaagtccaa

SEQ ID NO: 192259 - DNA, 75 bp, synthetic construct
  source 1..75: mol_type = other DNA
ttcataaacgcatctggcgatgccctgaatgtggagcagagcacgaccgcgatatcaatgcggcactcaacatcc

SEQ ID NO: 192260 - DNA, 75 bp, synthetic construct
  source 1..75: mol_type = other DNA
ttcccgacgtttaaacgtaaacacggaaaacaatcgagctatcactgtgtcggagttaaggtgctggataatgcc

SEQ ID NO: 192261 - DNA, 75 bp, synthetic construct
  source 1..75: mol_type = other DNA
cggttagcattgctgtgccgcagccttcttactccggtaaagaggaggttcggcagcgcattctggaggagtttc

SEQ ID NO: 192262 - DNA, 75 bp, synthetic construct
  source 1..75: mol_type = other DNA
tgtcatcctgcgcggcgctgccgggacacgtcggccacggcgttcacctgcgcactactctgccggtcagcgctg

SEQ ID NO: 192263 - DNA, 75 bp, synthetic construct
  source 1..75: mol_type = other DNA
atgcaaaccatcagtgtactttacaacggacaagacggttctctcctgcgtgagttttcgctacctagaagtttg

SEQ ID NO: 192264 - DNA, 75 bp, synthetic construct
  source 1..75: mol_type = other DNA
ctttcagctcttttggtataagttgccatagagaaaactccttcaggaactctttccgagggaagaatgatgagg

SEQ ID NO: 192265 - DNA, 75 bp, synthetic construct
  source 1..75: mol_type = other DNA
tacagcttaaaccgggtgaatcagcgtttattgccgccaacgaatcaccggtgactgtcaaaggccacggccgtt

SEQ ID NO: 192266 - DNA, 75 bp, synthetic construct
  source 1..75: mol_type = other DNA
caagagcagttcacgtgtgcacaacgccgccggagaggttgtttcactgcgcgatgtaattgaaagcaataaatc

SEQ ID NO: 192267 - DNA, 75 bp, synthetic construct
  source 1..75: mol_type = other DNA
tcctggcgaagcgatgttcctgttcgctgaaacaccgcacgcttacctgcaaggcgtggcgctggaagtgatggc

SEQ ID NO: 192268 - DNA, 75 bp, synthetic construct
  source 1..75: mol_type = other DNA
gtttattgccgccaatgagtcaccagtcaaggtcaaaggccatggccgtttagcccgggtttacaacaaactgta

SEQ ID NO: 192269 - DNA, 75 bp, synthetic construct
  source 1..75: mol_type = other DNA
tcgtttaatttctgaattttacccggaagacagcggtctgttctccccgctgttgctgaatgtggtgaaattgaa

SEQ ID NO: 192270 - DNA, 75 bp, synthetic construct
  source 1..75: mol_type = other DNA
gccgaaacgccacatgcctatctgcaaggcgtggcgctggaagtgatggcgaattccgataacgtgctacgtgcg

SEQ ID NO: 192271 - DNA, 75 bp, synthetic construct
  source 1..75: mol_type = other DNA
aacctacgccaagtgggatgagaaatggggttatgactacaacggcgatagcaaggttaacccgaactacggcaa

SEQ ID NO: 192272 - DNA, 75 bp, synthetic construct
  source 1..75: mol_type = other DNA
cgtcgcgcaacagaatgactgggaagctaccgatccggccttccgtgaagcaaacgtgcagggtaaaaacctgat

SEQ ID NO: 192273 - DNA, 75 bp, synthetic construct
  source 1..75: mol_type = other DNA
agcaacccgttcctctgaagctggtggttcttcctctttcgccagcaataatatttatgactataccaacgaaac

SEQ ID NO: 192274 - DNA, 75 bp, synthetic construct
  source 1..75: mol_type = other DNA
cggcattaatgaactgattgatgacctgatggagcacatcagcctggaaaataatgtgctgttcccgcgcgcact

SEQ ID NO: 192275 - DNA, 75 bp, synthetic construct
  source 1..75: mol_type = other DNA
agctgttccggcgaacttcgaaggcggtagtttcggtcgtggcgatagcgatgagtggaccttcggtgcccagat

SEQ ID NO: 192276 - DNA, 75 bp, synthetic construct
  source 1..75: mol_type = other DNA
agccgttcctgctgatttcaacggcggcagcttcggccgtggtgacagcgacgagtggaccttcggtgcccagat

SEQ ID NO: 192277 - DNA, 75 bp, synthetic construct
  source 1..75: mol_type = other DNA
ccctggtggccgggattatttgacggtgacacaccccggcttctggcctgcggtatccgggacgtgttactggaa

SEQ ID NO: 192278 - DNA, 75 bp, synthetic construct
  source 1..75: mol_type = other DNA
aagcgtatgcgacagcgcgtctggcgaaaatccgccgtcagaaccggataaaggctgagctgcaagccgtgcttg

SEQ ID NO: 192279 - DNA, 75 bp, synthetic construct
  source 1..75: mol_type = other DNA
tgtgtgccatgaaagccggtgcctgccggtatgacacggaagggtatgtgacggagcatatttctcaggaggaag

SEQ ID NO: 192280 - DNA, 75 bp, synthetic construct
  source 1..75: mol_type = other DNA
gccatcacccgttcagaaagctatctgtgtgccatgagagccggtgcctgccggtatgacacggaagggtatgtg

SEQ ID NO: 192281 - DNA, 75 bp, synthetic construct
  source 1..75: mol_type = other DNA
aagtgtatgcggcagagcgtctggagaaaatccgccgccagaaccggataaaggcagaacttcaggccgtgcttg

SEQ ID NO: 192282 - DNA, 75 bp, synthetic construct
  source 1..75: mol_type = other DNA
gcagagcgtctggcaaaaattcgtcgccagaaccggaaaaaagccgaacttcaggctgtgctggatgaacagtaa

SEQ ID NO: 192283 - DNA, 75 bp, synthetic construct
  source 1..75: mol_type = other DNA
aaagcacacctattggatatgcattttcaatacatggataatttaacggaagaaccaataccagttgaagatgat

SEQ ID NO: 192284 - DNA, 75 bp, synthetic construct
  source 1..75: mol_type = other DNA
ccatattagtaataatattaacataaaaaaattacagaatgatgtaggaagctacatttcccaggcaaatgccat

SEQ ID NO: 192285 - DNA, 75 bp, synthetic construct
  source 1..75: mol_type = other DNA
cgcatccgaaactgaaacgagagtacaaaggtcggctggtcagaactactcgggtactaaaaaacggctgggggt

SEQ ID NO: 192286 - DNA, 75 bp, synthetic construct
  source 1..75: mol_type = other DNA
atgacagaacagaagcgaccggtactgacactgaagcggaagacagagggaacagcgcctgtccgcagccggaaa

SEQ ID NO: 192287 - DNA, 75 bp, synthetic construct
  source 1..75: mol_type = other DNA
gaatcttcgtcagcttctggaaaactctgtttcttcatgctttttgactgagcaaagtattaataaattacttag

SEQ ID NO: 192288 - DNA, 75 bp, synthetic construct
  source 1..75: mol_type = other DNA
aagcttgatgtgcaaaataacgatgccaaagttttactgatcaaagtaactgactatctttcgagcaacagaatg

SEQ ID NO: 192289 - DNA, 75 bp, synthetic construct
  source 1..75: mol_type = other DNA
tgtgtgccatgagagccggtgcctgccggtatgacacggaagggtatgtgacggagcatatttctcaggaggagg

SEQ ID NO: 192290 - DNA, 75 bp, synthetic construct
  source 1..75: mol_type = other DNA
atcaatgtcaccacgccaccaaagtggaaggtgaaaaagcagaagctggccgagaaagcggcccgggaagcagag

SEQ ID NO: 192291 - DNA, 75 bp, synthetic construct
  source 1..75: mol_type = other DNA
actggcggagaaggctgcccgggaagcagagctggcggcgaagaaagcacaggccagacaggcgctgtccattta

SEQ ID NO: 192292 - DNA, 75 bp, synthetic construct
  source 1..75: mol_type = other DNA
ttcacggcaggaaaagcgggaactggcacagaggctaagtgacgatgtgcgaagtaagcggaaaaaacggccacc

SEQ ID NO: 192293 - DNA, 75 bp, synthetic construct
  source 1..75: mol_type = other DNA
tagcttcatcacaaggctggagtacaaggcggcggaaaaaggcgctcacctggtaaaactcgaccagtggtttgc

SEQ ID NO: 192294 - DNA, 75 bp, synthetic construct
  source 1..75: mol_type = other DNA
cgggacgtgttactggaagatgtatcaaagcggaatatcccgctctcgcataaaaaactgcgccgggcactgaaa

SEQ ID NO: 192295 - DNA, 75 bp, synthetic construct
  source 1..75: mol_type = other DNA
aagcatatgcaacagcgcgtctggcgaaaatccgccgtcagaaccggataaaggctgagctgcaagccgtgcttg

SEQ ID NO: 192296 - DNA, 75 bp, synthetic construct
  source 1..75: mol_type = other DNA
actacgcatccatcctttgtgaagacggtattcccacaccagcgaaacctgcgtatctggaggaagaaaagatta

SEQ ID NO: 192297 - DNA, 75 bp, synthetic construct
  source 1..75: mol_type = other DNA
tctgaacctgccctcactggatgaggccgtgaatactctgaagccctggtggccgggattatttgacggtgacac

SEQ ID NO: 192298 - DNA, 75 bp, synthetic construct
  source 1..75: mol_type = other DNA
cgcagcggaatatcccgctctcgcataaaaaactgcgccgggcgctgaaggccatcacccgttcagaaagctatc

SEQ ID NO: 192299 - DNA, 75 bp, synthetic construct
  source 1..75: mol_type = other DNA
agcggaagacgaaaagccggaacgcagtaagctgctgcgtcgccgtctggcttctcttccgcagtatatccgccg

SEQ ID NO: 192300 - DNA, 75 bp, synthetic construct
  source 1..75: mol_type = other DNA
cacgcaccggagatcctgagttcgcggcgctttctggctatggccgtattgcgtcgctggcggtgcatctgaaaa

SEQ ID NO: 192301 - DNA, 75 bp, synthetic construct
  source 1..75: mol_type = other DNA
cagttcgaaaacgtgtcattgttgtggttacaagatgtcggaaatgccacttcataaacgcatctggcgatgccc

SEQ ID NO: 192302 - DNA, 75 bp, synthetic construct
  source 1..75: mol_type = other DNA
cgaactctgcgttgaagttggcggcagcatcagtggggaacatggcatcgggcgagaaaaaatcaatcaaatgtg

SEQ ID NO: 192303 - DNA, 75 bp, synthetic construct
  source 1..75: mol_type = other DNA
cccaggctgttgcgtcgcataatctctattacgcgccggatccttcctcacaaatcgcctgttccattggcggca

SEQ ID NO: 192304 - DNA, 75 bp, synthetic construct
  source 1..75: mol_type = other DNA
cgtgattacccgtgaacccgccggtactggcggctttggttatgatccgattttctttgtgccttccgaaggtaa

SEQ ID NO: 192305 - DNA, 75 bp, synthetic construct
  source 1..75: mol_type = other DNA
tagacagatcatcaattcgtatggctgagctattaaaatcacgaggtttatatcgtgcaacaaaaccaaataata

SEQ ID NO: 192306 - DNA, 75 bp, synthetic construct
  source 1..75: mol_type = other DNA
agcatgaattatatcctcttctaagcgagtatgcttcgagttcattaaacgtgcttgttcgtcgtgtagatgaaa

SEQ ID NO: 192307 - DNA, 75 bp, synthetic construct
  source 1..75: mol_type = other DNA
gagcgcgggattggtgacgtgctgatcgcctgggaaaacgaagcactgctggcaacgaatgaactggggaaagat

SEQ ID NO: 192308 - DNA, 75 bp, synthetic construct
  source 1..75: mol_type = other DNA
tagcctggcgtgtcatatctcatcccgccagctaaaccacgtggaagcggcagaactgctgcgtgtgactgctga

SEQ ID NO: 192309 - DNA, 75 bp, synthetic construct
  source 1..75: mol_type = other DNA
ccaaaaccggaccggatgacgcagggcttaatattttactgacagaggctcgtctggaagaacgccgggcaaggg

SEQ ID NO: 192310 - DNA, 75 bp, synthetic construct
  source 1..75: mol_type = other DNA
cgtcagctaaaccatgtggaagcggcagaactgctgcgtgtgactgctgaagcaacccagaacgaagcgcaggag

SEQ ID NO: 192311 - DNA, 75 bp, synthetic construct
  source 1..75: mol_type = other DNA
cgacgactctggtctggcggtagatgcgctgggtggcgcgccgggtatttactccgcgcgttattccggtgaaga

SEQ ID NO: 192312 - DNA, 75 bp, synthetic construct
  source 1..75: mol_type = other DNA
gcttaatattttactgacagaggttcgtctggaagaacgctgggcaagggctgaagcaatggcagctcgccttga

SEQ ID NO: 192313 - DNA, 75 bp, synthetic construct
  source 1..75: mol_type = other DNA
tagcctggcgtgtcatattacatcccgccagctaaaccacgtcgaagcggcagaactgctgcgtgtgactgctga

SEQ ID NO: 192314 - DNA, 75 bp, synthetic construct
  source 1..75: mol_type = other DNA
gccgggcgttgaatacgctggaaatgatggcggatatggccgaaatcgatggcagcggcaaacgtgttctaaagc

SEQ ID NO: 192315 - DNA, 75 bp, synthetic construct
  source 1..75: mol_type = other DNA
tcctgacacggggcgggcattctccgcggcactcctcaatgagccagtcgatcagctccttggcgtccttctgct

SEQ ID NO: 192316 - DNA, 75 bp, synthetic construct
  source 1..75: mol_type = other DNA
tccgttttacggggggattcaggaaacaacgaatgtcagacttggtgatgatgcttacagaacattgattttttg

SEQ ID NO: 192317 - DNA, 75 bp, synthetic construct
  source 1..75: mol_type = other DNA
aaatcattgtgcttctgggcatgttggcagcctttatgctgtctgactttgcacgggcaggggtggaatggcaga

SEQ ID NO: 192318 - DNA, 75 bp, synthetic construct
  source 1..75: mol_type = other DNA
tcactctctaatagcatatccagaaagttttgatattcgcgggcttactgatgaattttctgttgcggagaaact

SEQ ID NO: 192319 - DNA, 75 bp, synthetic construct
  source 1..75: mol_type = other DNA
cttctgaaaccggaacacatcaaacgttatgaaaaacacaaatcgctgatctggagcgcgtgggaggctgcatga

SEQ ID NO: 192320 - DNA, 75 bp, synthetic construct
  source 1..75: mol_type = other DNA
tatactattacggagccggctacagcacagatattaccggcacaaatcatactggctggtgataatgaccatccg

SEQ ID NO: 192321 - DNA, 75 bp, synthetic construct
  source 1..75: mol_type = other DNA
gacaaaaattaataaatagatatataatgtttcgaaactgtttcgcacatccttcaataatgttcagaaaagatt

SEQ ID NO: 192322 - DNA, 75 bp, synthetic construct
  source 1..75: mol_type = other DNA
tgagcgcagtgcccgcttcgataacaaaggcgatcgcttttacgatctgatttccgcgctgcataaatctgtgcg

SEQ ID NO: 192323 - DNA, 75 bp, synthetic construct
  source 1..75: mol_type = other DNA
accgcgtttaaagccgcgctggccgatgctcgcgaacgtccggattatgacgtgccggttcatttgcgtaatgcg

SEQ ID NO: 192324 - DNA, 75 bp, synthetic construct
  source 1..75: mol_type = other DNA
catggcacttctgatgccaacggcacggccaccatcacggtgagccaaccgaatggccctggcgtcaaaacgcca

SEQ ID NO: 192325 - DNA, 75 bp, synthetic construct
  source 1..75: mol_type = other DNA
accgatatgataaatatgttgatatttcaattgatagtatcttaaatcagacatactctgactttgagttaataa

SEQ ID NO: 192326 - DNA, 75 bp, synthetic construct
  source 1..75: mol_type = other DNA
gatttgtggttaagaatgcgaagcttaaaaccacgttgggataatatggaagagcctttgttaaattaccgtgtt

SEQ ID NO: 192327 - DNA, 75 bp, synthetic construct
  source 1..75: mol_type = other DNA
caacagcgcttcggtaaaaaatgtgaaacgctggctggtatgcaacgctccctgttcgaagaggatgttgatgtc

SEQ ID NO: 192328 - DNA, 75 bp, synthetic construct
  source 1..75: mol_type = other DNA
cgcttactgctatggcacttaccatggtacaaaaagtcatgtcggagaatgccgaaaaagagcgggaattactgg

SEQ ID NO: 192329 - DNA, 75 bp, synthetic construct
  source 1..75: mol_type = other DNA
tggcaaacaaagtgccggagatcacgctggccggatgctgggcccatgtcagtcatgccagtgaaactggtgatg

SEQ ID NO: 192330 - DNA, 75 bp, synthetic construct
  source 1..75: mol_type = other DNA
gctggtcaaccgtaccacgctgtggggtcggctatcaacgatatgcacccacgcaacggcgctgattacttcact

SEQ ID NO: 192331 - DNA, 75 bp, synthetic construct
  source 1..75: mol_type = other DNA
atcctgaacacgaagaaaggcggtaaatcctgctccggttatctgtgggcatacgtcagtggagaaaggacggga

SEQ ID NO: 192332 - DNA, 75 bp, synthetic construct
  source 1..75: mol_type = other DNA
gaatattgcagaacttcagaaccgtatccgcatcctggaagagcagatgaagctcgcacgccagcagcgtttcgg

SEQ ID NO: 192333 - DNA, 75 bp, synthetic construct
  source 1..75: mol_type = other DNA
aatgccgaccccggacgaccagctgccggtgatcctgccggaagatgtggtgatggacggcattaccagcccgat

SEQ ID NO: 192334 - DNA, 75 bp, synthetic construct
  source 1..75: mol_type = other DNA
ctgtagatatgatattaaaaatttcagcactggacggtattagatttaactcagattttgggttaggagctaaat

SEQ ID NO: 192335 - DNA, 75 bp, synthetic construct
  source 1..75: mol_type = other DNA
acattttctttaaaactgatgtgccatcagggtatggtccacatcgaccgcaggatattatcggtcaaactgttc

SEQ ID NO: 192336 - DNA, 75 bp, synthetic construct
  source 1..75: mol_type = other DNA
gggcagaaaatcgtggctcttcgccggttcacggatagcgggagagcgtgcggcccggataatgagtctgctgga

SEQ ID NO: 192337 - DNA, 75 bp, synthetic construct
  source 1..75: mol_type = other DNA
ttctgacacgggatgttattcatgcagatgaaacgtccctgaggctccctgatacccggaaaggcggtaaatcct

SEQ ID NO: 192338 - DNA, 75 bp, synthetic construct
  source 1..75: mol_type = other DNA
catgctgggcaaaaacgttctgcagccaatcggctgggacgcatttggtctgcctgcggaaggcgcggcggtgaa

SEQ ID NO: 192339 - DNA, 75 bp, synthetic construct
  source 1..75: mol_type = other DNA
gcgaccgacacctttgacatcgctctgccggttaaccagtcctttgatgtatgggcaaccatcattcgggtaatg

SEQ ID NO: 192340 - DNA, 75 bp, synthetic construct
  source 1..75: mol_type = other DNA
ttaagcagctggggtgcattgctgagtgatggcgcgaactcgatggaagtctctccatggttactgttgttccca

SEQ ID NO: 192341 - DNA, 75 bp, synthetic construct
  source 1..75: mol_type = other DNA
tctgctggtacgtgttgcaattggtgggcgtatctcactcatggtcggggttgctgcggcgctggtggctgtagt

SEQ ID NO: 192342 - DNA, 75 bp, synthetic construct
  source 1..75: mol_type = other DNA
tggcttgatatggcgcgtattgtacgcgggcagacacttagtctgaaacgtaaggaatttatcgaagcggcgcag

SEQ ID NO: 192343 - DNA, 75 bp, synthetic construct
  source 1..75: mol_type = other DNA
aaattcgtgttccacattttggttatgccgaccgcattcaggaaattcacattaaagtgatccatatcctgatcc

SEQ ID NO: 192344 - DNA, 75 bp, synthetic construct
  source 1..75: mol_type = other DNA
cggtatcaatgaattgattgatgacctgatggatcacattagtctggaaaataatgtactgttcccgcgcgcgct

SEQ ID NO: 192345 - DNA, 75 bp, synthetic construct
  source 1..75: mol_type = other DNA
gatatggattactgctgcggcggtaagcagacgctggcgcgcgcggcggcacgtaaagagctggatgttgaggtc

SEQ ID NO: 192346 - DNA, 75 bp, synthetic construct
  source 1..75: mol_type = other DNA
atgcagagttctgaaaataaacaagaggagaatttagcgttattgttaactaattacatttcatatcagaatata

SEQ ID NO: 192347 - DNA, 75 bp, synthetic construct
  source 1..75: mol_type = other DNA
tttaccggtcaggaaaccgtcgagccggagccgcaaccgcagccaatgcccgttgacgatggcgggctgggctgt

SEQ ID NO: 192348 - DNA, 75 bp, synthetic construct
  source 1..75: mol_type = other DNA
aattagtgcaggccagccaaccgacagaagaatcattaatgccgattgtgagccgccttgatgcagaagatcgtt

SEQ ID NO: 192349 - DNA, 75 bp, synthetic construct
  source 1..75: mol_type = other DNA
gtctgctgcggtaagtgcagccgagggtgatgaatcagtaacgaccactgttaatggcggtgttattcattttaa

SEQ ID NO: 192350 - DNA, 75 bp, synthetic construct
  source 1..75: mol_type = other DNA
taacgattttggtttcaacgatattttctcccgttacgttgaagcggtaggtcgcgaaggcgatgtactactggg

SEQ ID NO: 192351 - DNA, 75 bp, synthetic construct
  source 1..75: mol_type = other DNA
gatggcttcaattttggcagcttcgtggttgccgttattggcgcgattgtcgtgctgtttatctacagaaagatt

SEQ ID NO: 192352 - DNA, 75 bp, synthetic construct
  source 1..75: mol_type = other DNA
gatgcattgaagacgatgtgctgcgcgcactattccatcaggagatgatcaagcgggtatcggagtaccactccg

SEQ ID NO: 192353 - DNA, 75 bp, synthetic construct
  source 1..75: mol_type = other DNA
cggtattaggcgaatcccgctacgtggttctggcgcgtgagcttaccaaaacctgggaaaccattcatggcgcgc

SEQ ID NO: 192354 - DNA, 75 bp, synthetic construct
  source 1..75: mol_type = other DNA
gaaggataccgttctgaaaaggaatatttgcaactccgccgccgagattttcaatacgagtaccgacatcgggcg

SEQ ID NO: 192355 - DNA, 75 bp, synthetic construct
  source 1..75: mol_type = other DNA
acctgggaaaccattcacggcgcgcctgttggcgagctgctggcgtgggtaaaggaagatgaaaaccgtcgcaaa

SEQ ID NO: 192356 - DNA, 75 bp, synthetic construct
  source 1..75: mol_type = other DNA
atgcgtttcgtgcagcccagaaccgaatctcagcaggcaatgcgagctctgcatcgtgtccgtgaatccctggtt

SEQ ID NO: 192357 - DNA, 75 bp, synthetic construct
  source 1..75: mol_type = other DNA
ccagaaacaaccctagctgaattaaaacctgtcgcctttgagctgagtctgatttactgggccgggaacaacata

SEQ ID NO: 192358 - DNA, 75 bp, synthetic construct
  source 1..75: mol_type = other DNA
ccgactgggtcagggagttgttgtgtcggaaaagcaactttgtcgtcacctgtgctctggcaaacaagctggcca

SEQ ID NO: 192359 - DNA, 75 bp, synthetic construct
  source 1..75: mol_type = other DNA
tcgatctgggtaaaaattctttccacgttcattgtcaggaccgacatggtaaagtggtttaccgtaaaaagttta

SEQ ID NO: 192360 - DNA, 75 bp, synthetic construct
  source 1..75: mol_type = other DNA
gatttactgggccgggaacaacataaatgttcaaccagaggatgaagcaaaactgaaccactttgccggaaactt

SEQ ID NO: 192361 - DNA, 75 bp, synthetic construct
  source 1..75: mol_type = other DNA
cacaagtcagctatgatcccctgactcgtcagctcgtttaccagcttcaggcgcgttactctgaattccagttgg

SEQ ID NO: 192362 - DNA, 75 bp, synthetic construct
  source 1..75: mol_type = other DNA
gccgctacccgggccgtgtgctgctatcactgcgttaagcgccgcgggtttaccatccgatcgtttttgttatga

SEQ ID NO: 192363 - DNA, 75 bp, synthetic construct
  source 1..75: mol_type = other DNA
tcccactgaatgatgcgcttcttcagtgggagcatgattcagaagaaaataaatgcgatgatccatttattggat

SEQ ID NO: 192364 - DNA, 75 bp, synthetic construct
  source 1..75: mol_type = other DNA
cgctgggggacgaacgggctgatatccgggctgcccagattgtttcagctgtttacggtgcgcagggggtcaaag

SEQ ID NO: 192365 - DNA, 75 bp, synthetic construct
  source 1..75: mol_type = other DNA
ggtcagggagttgttgtgtcggaaaagcaactttgtcgtcacctgtgctctggcaaacaagctggccagaatagc

SEQ ID NO: 192366 - DNA, 75 bp, synthetic construct
  source 1..75: mol_type = other DNA
cttcactctggcgctgacaccgctaagcgtggcggataaattcaaagaattaatggaacaaaagcctggtagctg

SEQ ID NO: 192367 - DNA, 75 bp, synthetic construct
  source 1..75: mol_type = other DNA
gtgaacgacgatctgcatcatttcacctcgcggcttggcattgaacaggcagagtcgttgctgttacccagcccg

SEQ ID NO: 192368 - DNA, 75 bp, synthetic construct
  source 1..75: mol_type = other DNA
agagtcgttgctgttacccagcccgtttgattacagccgccaggcgttactctgtgtgccgcgcaacctgccgca

SEQ ID NO: 192369 - DNA, 75 bp, synthetic construct
  source 1..75: mol_type = other DNA
atggtttgaaaataattgaacctcaggtacatatggataatagaggtttttttcttgaaacttattcagaggaaa

SEQ ID NO: 192370 - DNA, 75 bp, synthetic construct
  source 1..75: mol_type = other DNA
atgtggatggagtttgacagggtttccccgctgggtgatgagcgcggggatatccgtaatgcacagatcgtgaaa

SEQ ID NO: 192371 - DNA, 75 bp, synthetic construct
  source 1..75: mol_type = other DNA
ggcgacatgtccagctacaaccatcgcaatggaagcctgtggtggttctcactttatggcccgtaagcaggaaga

SEQ ID NO: 192372 - DNA, 75 bp, synthetic construct
  source 1..75: mol_type = other DNA
tattcattgccaggatcgtcgcgggaaggctgtttaccgtaaaaaatttacccggtcaaagttgatcgaattttt

SEQ ID NO: 192373 - DNA, 75 bp, synthetic construct
  source 1..75: mol_type = other DNA
aggggatgaatgttgcactgaaggacgccatgctctgctggggcgaggatgaggataagccggaggtggatccgt

SEQ ID NO: 192374 - DNA, 75 bp, synthetic construct
  source 1..75: mol_type = other DNA
ttgctgcgtcaggcactggaactgatcgctgatgcagagtcggccagaaaaagtagcccgccggaaattcgcttt

SEQ ID NO: 192375 - DNA, 75 bp, synthetic construct
  source 1..75: mol_type = other DNA
tttctggcggatatggtggtgaaagagagtggatttggcgaactgatcccggaagctgacgtcatgatcttcgac

SEQ ID NO: 192376 - DNA, 75 bp, synthetic construct
  source 1..75: mol_type = other DNA
tgtggtggtggtaaaccatcatctctttctggcggatatggtggttaaagagagtggatttggcgagttgatccc

SEQ ID NO: 192377 - DNA, 75 bp, synthetic construct
  source 1..75: mol_type = other DNA
tcgatctgggtaaaaactcttttcatattcattgccaggatcgtcgcggaaaggctgtttaccgtaaaaaattta

SEQ ID NO: 192378 - DNA, 75 bp, synthetic construct
  source 1..75: mol_type = other DNA
cgtcagtggtggcagaagcgtcgtatcacggtgaacagcggcgatgagcacgatcagcaagcattagattatgcg

SEQ ID NO: 192379 - DNA, 75 bp, synthetic construct
  source 1..75: mol_type = other DNA
ctgatgcgacaaccgataatgtagcaccgcgtttgctggcaaatattttaatgctgctaaacaaccctgtcgtag

SEQ ID NO: 192380 - DNA, 75 bp, synthetic construct
  source 1..75: mol_type = other DNA
gcctatttcacaggctatgcatgaattcaccgatacccgcgatgaaaacaccctggatgagatctggttggtaga

SEQ ID NO: 192381 - DNA, 75 bp, synthetic construct
  source 1..75: mol_type = other DNA
cgagatgcagatcctcaagcaggcagatgtggtgatgctcaattacatgctgccggagcagttctcagcggcatc

SEQ ID NO: 192382 - DNA, 75 bp, synthetic construct
  source 1..75: mol_type = other DNA
cgcgtagcggcgaagaagagacgccggaatttgccgccattaacattcgtaccgggctgcggcaaaaagtggcct

SEQ ID NO: 192383 - DNA, 75 bp, synthetic construct
  source 1..75: mol_type = other DNA
cagtttggctgtagcgacgatgcgtttatccatcgcgccgaaatgttccttaaagaactgcggctgccagaaatt

SEQ ID NO: 192384 - DNA, 75 bp, synthetic construct
  source 1..75: mol_type = other DNA
cagtcagaggcgttttcccttacgtcctggttttatattcattattagtcgtatttgtttttattcccgatctca

SEQ ID NO: 192385 - DNA, 75 bp, synthetic construct
  source 1..75: mol_type = other DNA
ggttgtctgccaggttcagggacgtactcataccctgagttatccgctggtggcgtttcagtccggaaaaatgtt

SEQ ID NO: 192386 - DNA, 75 bp, synthetic construct
  source 1..75: mol_type = other DNA
agtcgataccgcaccgcatagcgcattctatgaagtgccttatgacgcaactacctcattactggatgcgctggg

SEQ ID NO: 192387 - DNA, 75 bp, synthetic construct
  source 1..75: mol_type = other DNA
acgccgcaaactgggtgtacgtgagctggtgactttgctcgaacaaacagtggtgaataccctggctgaactgga

SEQ ID NO: 192388 - DNA, 75 bp, synthetic construct
  source 1..75: mol_type = other DNA
caggcagggaaagccgagcatattttaatgccaggcgatattccggtaattcagagcgatcgcggtggtcaggta

SEQ ID NO: 192389 - DNA, 75 bp, synthetic construct
  source 1..75: mol_type = other DNA
taacgccgacggtattaattcttaccccggtattaatgcctttagttaaagaggcaggaatcgatccgatttatt

SEQ ID NO: 192390 - DNA, 75 bp, synthetic construct
  source 1..75: mol_type = other DNA
tgcaagtcgtcgttttgtttcgacagatcaactgccgctgatcgcgctggaaatcagtattaccccgctggacgc

SEQ ID NO: 192391 - DNA, 75 bp, synthetic construct
  source 1..75: mol_type = other DNA
atgtcctgttctcattcagttgtattactgaataacgccttaaaaatcgccgttatggaaaatggtgatttgtct

SEQ ID NO: 192392 - DNA, 75 bp, synthetic construct
  source 1..75: mol_type = other DNA
accctaaaccggaagatgaatctcgcgtcagtgcctcattacgttcagcaattcaaaaatccggcatggtattgc

SEQ ID NO: 192393 - DNA, 75 bp, synthetic construct
  source 1..75: mol_type = other DNA
agcgccgttgaaaattatctcgacagtctgacgcaggttttgcaggttcccggcccaacgggtgccagcacggct

SEQ ID NO: 192394 - DNA, 75 bp, synthetic construct
  source 1..75: mol_type = other DNA
ttacattttatcgtggaacacgctaaatataccctgctctcatggccagaattttatcgccaacatgcacagaga

SEQ ID NO: 192395 - DNA, 75 bp, synthetic construct
  source 1..75: mol_type = other DNA
caagcaaatttcctccgtggatgaactgacaaaattaacgacagaacttgtcatttattgcgctgatgtatctag

SEQ ID NO: 192396 - DNA, 75 bp, synthetic construct
  source 1..75: mol_type = other DNA
cttattcaacttggtcttgataaagaaaaacgcgaaataactgagtctgttatcgcgatttatcagaatgaatta

SEQ ID NO: 192397 - DNA, 75 bp, synthetic construct
  source 1..75: mol_type = other DNA
acacgccatcacgcgatacggtatttcgactgacgatcccaacaaatggcgttattacctcgattcggtggaagt

SEQ ID NO: 192398 - DNA, 75 bp, synthetic construct
  source 1..75: mol_type = other DNA
gggattgtttggcgaaaacgatcaggaacagatcaacaatatttcactcggtattatcgacctggtctatcccgc

SEQ ID NO: 192399 - DNA, 75 bp, synthetic construct
  source 1..75: mol_type = other DNA
cggtggtactgagcgcagcattttccggcccggcgttggccgaaggtatcaatagtttttctcaggcgaaagccg

SEQ ID NO: 192400 - DNA, 75 bp, synthetic construct
  source 1..75: mol_type = other DNA
ctgctttgctggcctgctcactacttgcgggatggctgataaaagtgcgatccagacggcgtcaactgccctgga

SEQ ID NO: 192401 - DNA, 75 bp, synthetic construct
  source 1..75: mol_type = other DNA
tatcaacgtcatcgcaccaggatgatggagattcaggcctattatgaaagctgcctgaatccgcaactgattacc

SEQ ID NO: 192402 - DNA, 75 bp, synthetic construct
  source 1..75: mol_type = other DNA
gagaataccgttgaactgattcataccgattcgctgccgctggttatttcactcaacggtcatacgctgcaggag

SEQ ID NO: 192403 - DNA, 75 bp, synthetic construct
  source 1..75: mol_type = other DNA
cgtcctcgacagcggcatcactgacgaaatgtatcaggagcttgagcgactgattgaagacgccaaaccggcaag

SEQ ID NO: 192404 - DNA, 75 bp, synthetic construct
  source 1..75: mol_type = other DNA
tttttgccggtgcgggatgctatcacggcgacgccctgacggtttatccctacaccccagaggccattattgtcg

SEQ ID NO: 192405 - DNA, 75 bp, synthetic construct
  source 1..75: mol_type = other DNA
cgcgtgccggtaccgctgcgcaccctgtggaactggcgcacctgcccggtaaagctgctgccgtatctggcgtgg

SEQ ID NO: 192406 - DNA, 75 bp, synthetic construct
  source 1..75: mol_type = other DNA
ctcatcgcccgcaatggtgagattgaagggcttcgaaggcgggctgctgaactggaaaaaatcgccacggactat

SEQ ID NO: 192407 - DNA, 75 bp, synthetic construct
  source 1..75: mol_type = other DNA
cgtacgggagtgcatggatgtacgtttatcaacgacccgtcgatggattaaagctaattgaaagcggcgactggt

SEQ ID NO: 192408 - DNA, 75 bp, synthetic construct
  source 1..75: mol_type = other DNA
gaaatgtatcaggaacttgagcgcctgattgaagacgccaaaccggcaagtcgtcacctgacggggctggctatc

SEQ ID NO: 192409 - DNA, 75 bp, synthetic construct
  source 1..75: mol_type = other DNA
gcgctgtcggtcgacaggtgggatgagaaatggccggaggcgacaaagcgtagcgtctgcgcgtcctcgtttttc

SEQ ID NO: 192410 - DNA, 75 bp, synthetic construct
  source 1..75: mol_type = other DNA
gtggagcgccctaacctggtcaaactggtcgaaaacctctttagccgcgaaagtttcgctcgcaccgaaccgcca

SEQ ID NO: 192411 - DNA, 75 bp, synthetic construct
  source 1..75: mol_type = other DNA
atttaacccgttagggaaagtgccggtgctggtgaccgaagagggcgaatgctggtttgattcgccgatcatcgc

SEQ ID NO: 192412 - DNA, 75 bp, synthetic construct
  source 1..75: mol_type = other DNA
ggcggcagcgttaccgcgtctgaagtgattcgcgctgaactggcagcagcccgggcagcgggtaagcctgtggtt

SEQ ID NO: 192413 - DNA, 75 bp, synthetic construct
  source 1..75: mol_type = other DNA
gtccatcagcacaaaggcaccatcagcgcattgcgtcgggtggttgagccgctcggttttctgattgaggtgcgc

SEQ ID NO: 192414 - DNA, 75 bp, synthetic construct
  source 1..75: mol_type = other DNA
agaagtggccggaggcgacaaagcgcagcgtctgcgcgtcttcgtttttcgtccatcagcacaaaggcaccatca

SEQ ID NO: 192415 - DNA, 75 bp, synthetic construct
  source 1..75: mol_type = other DNA
acccgttgaccaggcaccgaccaccgcattagcaactgaactgcggtatggcaaacagcagtctttgattattac

SEQ ID NO: 192416 - DNA, 75 bp, synthetic construct
  source 1..75: mol_type = other DNA
cggcattaaaacggccactttacaggcatccgtcagcgtgaaactggatacgcccgtcgtggaatgcacaaacct

SEQ ID NO: 192417 - DNA, 75 bp, synthetic construct
  source 1..75: mol_type = other DNA
gcatccgtcagcgtgacactggatacgcccgtcgtggaatgcacagaccttctgagaacagcgacgcttgacgtc

SEQ ID NO: 192418 - DNA, 75 bp, synthetic construct
  source 1..75: mol_type = other DNA
gacctccaacggcatcacggtacacagccacgtacacggcggagtcagaagcggcggagacacaagcggaggtcc

SEQ ID NO: 192419 - DNA, 75 bp, synthetic construct
  source 1..75: mol_type = other DNA
gtatcaagcgtccaaaacgttttcacactctttccggcggtaaaccgcaggttgaaggtgctgaagactatacgg

SEQ ID NO: 192420 - DNA, 75 bp, synthetic construct
  source 1..75: mol_type = other DNA
ccccgctcgttgagtgcacacagcacctgaaaacgcgcacatttgaactgacagatggcggcacactgaaaggtg

SEQ ID NO: 192421 - DNA, 75 bp, synthetic construct
  source 1..75: mol_type = other DNA
atatcacgcacagcggcggcaatttcacctcaaacggcattaccgtgcatacgcataaacacggtggcgttaaag

SEQ ID NO: 192422 - DNA, 75 bp, synthetic construct
  source 1..75: mol_type = other DNA
cggaatcagaaccgccaccattcaggccggaacgggcgtgacgctggacacccccaccgtcacctgcacaaatca

SEQ ID NO: 192423 - DNA, 75 bp, synthetic construct
  source 1..75: mol_type = other DNA
ccttactttatttacagactgaagatactgctcattatagcattctccaggaaaacctaatgactgtgagtgcac

SEQ ID NO: 192424 - DNA, 75 bp, synthetic construct
  source 1..75: mol_type = other DNA
gcatctgtcagcgtgacactggacacgcccgtcgtggaatgcacaaaccttctgaaaacagccgagattgacgtc

SEQ ID NO: 192425 - DNA, 75 bp, synthetic construct
  source 1..75: mol_type = other DNA
gaacaccacacgcgcgggagcctttaacgtgtggcttccgccatcacccggcgaacaggtggtcattgcctgcat

SEQ ID NO: 192426 - DNA, 75 bp, synthetic construct
  source 1..75: mol_type = other DNA
acaaaagggggaaagatgagcggcaatatcacgcacagcggcggcgatttcacctcaaacggcatcacagtgcat

SEQ ID NO: 192427 - DNA, 75 bp, synthetic construct
  source 1..75: mol_type = other DNA
ccaatccggcccccggcaaaagcctgaaagaaatcgtggtcagcgcgccggatggcgcggtgttccgctacgacg

SEQ ID NO: 192428 - DNA, 75 bp, synthetic construct
  source 1..75: mol_type = other DNA
gatgtgaatattgcgtggcccctccctctttccataatatcagagaaagataaaagaggacattccttatcagaa

SEQ ID NO: 192429 - DNA, 75 bp, synthetic construct
  source 1..75: mol_type = other DNA
tgacaaagtggtattggaagtaccggcatcagcagacggcattctggatgcggttctggaagatgaaggtacaac

SEQ ID NO: 192430 - DNA, 75 bp, synthetic construct
  source 1..75: mol_type = other DNA
agagaaagcgtccactccggcgcaacgccagcaggcatctctggaagagcaaaacaacgatgcgttaagcccggc

SEQ ID NO: 192431 - DNA, 75 bp, synthetic construct
  source 1..75: mol_type = other DNA
gatttgaagccatttgtctggaagaacgaaattggtcccagctcatacgctcaaacgagggggtgccacaacctg

SEQ ID NO: 192432 - DNA, 75 bp, synthetic construct
  source 1..75: mol_type = other DNA
cagagattttttcacagaagtgatggatacaacggacagggaaattctggagaaagagctgagaccaattctgat

SEQ ID NO: 192433 - DNA, 75 bp, synthetic construct
  source 1..75: mol_type = other DNA
cagaatattatgatcctgaggatgagtgttgtttattatggaatgatccagaactcaatattcaatggcctttaa

SEQ ID NO: 192434 - DNA, 75 bp, synthetic construct
  source 1..75: mol_type = other DNA
gcacgctcagggcaaactggttcgctgcgtggaaggtgaggtatttgacgtggcggtggatatccgacgttcatc

SEQ ID NO: 192435 - DNA, 75 bp, synthetic construct
  source 1..75: mol_type = other DNA
cctgaactacaaattaagtggccggtagatggagagttaaatctttctacaaaagatatgaaacaacctaacttt

SEQ ID NO: 192436 - DNA, 75 bp, synthetic construct
  source 1..75: mol_type = other DNA
tcattaacaaatacaatgaaataagagaaaaatacaacaatagtcaatcaggacaacaggagtatttgaatcaac

SEQ ID NO: 192437 - DNA, 75 bp, synthetic construct
  source 1..75: mol_type = other DNA
gcactggtgtcggtggtcgtctgacccgtgaagatgtggaaaaacatctggcgaaagccccggcgaaagagtctg

SEQ ID NO: 192438 - DNA, 75 bp, synthetic construct
  source 1..75: mol_type = other DNA
ttatgtccttctacgtgaaagcggtggttgaagccctgaaacgttacccggaagtgaatgcttctatcgacggcg

SEQ ID NO: 192439 - DNA, 75 bp, synthetic construct
  source 1..75: mol_type = other DNA
tgaagccctgaaacgttacccggaagtgaacgcttctattgacggcgatgatgtggtttaccacaactatttcga

SEQ ID NO: 192440 - DNA, 75 bp, synthetic construct
  source 1..75: mol_type = other DNA
atgcgctatgtgtcatgcaaatgtggtgcccaaggaccagaaaaacgaactaaatctgaagcgatttcttcatgg

SEQ ID NO: 192441 - DNA, 75 bp, synthetic construct
  source 1..75: mol_type = other DNA
ataatggaattatttacgacatccagcccctcccggagatgaatatttccatcatcacctgggctccaacgaaaa

SEQ ID NO: 192442 - DNA, 75 bp, synthetic construct
  source 1..75: mol_type = other DNA
tgatttcaggtgtacttatactttcagtactgctgcctgttggcttaagcgtctggttggcccatcagcaggtag

SEQ ID NO: 192443 - DNA, 75 bp, synthetic construct
  source 1..75: mol_type = other DNA
atttacaggatctggatgtcgacattctgaagatcgataaatctttcgttgatgcgctggaatataaaaatgtca

SEQ ID NO: 192444 - DNA, 75 bp, synthetic construct
  source 1..75: mol_type = other DNA
ctggagttttacgaagctgaggcgaaaaagcaggcgaagcagtttttcatggatattgctgccgggttatgtgaa

SEQ ID NO: 192445 - DNA, 75 bp, synthetic construct
  source 1..75: mol_type = other DNA
acattgaacaaatcttccctgagctttcgaacttaattgatattattaataaatggctttcccatggaaacattg

SEQ ID NO: 192446 - DNA, 75 bp, synthetic construct
  source 1..75: mol_type = other DNA
cataaaacagaggcattatctcagaataataaatataatgaagaaaagtcggctcaggaaagaatgcccggggct

SEQ ID NO: 192447 - DNA, 75 bp, synthetic construct
  source 1..75: mol_type = other DNA
actaaaggatgggacgtttttacggggagagcaggttaaagagacggtacgaaaaaatgtatctccccttgagcg

SEQ ID NO: 192448 - DNA, 75 bp, synthetic construct
  source 1..75: mol_type = other DNA
ttgctctgttgctatccgtcattgtcgggcgatggcagttactttttcgcgttaaaggatgggacgtttttacgg

SEQ ID NO: 192449 - DNA, 75 bp, synthetic construct
  source 1..75: mol_type = other DNA
tttacccggcctgatttctggaacagcggtttttttgctgatacacctggaaaaatgggattgcttgctgtttat

SEQ ID NO: 192450 - DNA, 75 bp, synthetic construct
  source 1..75: mol_type = other DNA
gcccttaccagagatgaatatttccatcatcacctgggcttcaacgaaaacgttgcaaaaaggctggcatcggca

SEQ ID NO: 192451 - DNA, 75 bp, synthetic construct
  source 1..75: mol_type = other DNA
tgacgctactgattataagaagcgtctttgaagatatgggcgactggctgcgtcagcatccacagcagcatattt

SEQ ID NO: 192452 - DNA, 75 bp, synthetic construct
  source 1..75: mol_type = other DNA
accagatagttttattccgctggcacagcaaacgggcctttctgagccattgacgctactgattataagaagcgt

SEQ ID NO: 192453 - DNA, 75 bp, synthetic construct
  source 1..75: mol_type = other DNA
ttgcgcgatatccacactctgcaatgggttgcccgccgtcattttggcgcgacctcgctggatgagatggttgga

SEQ ID NO: 192454 - DNA, 75 bp, synthetic construct
  source 1..75: mol_type = other DNA
aagcaaaccgctggtactgcttagcccgcaggctacgcgtggaggcaccgagatttttatctggagcccggaccg

SEQ ID NO: 192455 - DNA, 75 bp, synthetic construct
  source 1..75: mol_type = other DNA
ggatgatcaggcgcaaaaagtgggcgagctgttaacgctgctctgggatgtgaagctggaagtcggtcatagcgt

SEQ ID NO: 192456 - DNA, 75 bp, synthetic construct
  source 1..75: mol_type = other DNA
tgaagctggaagtcggtcatagcgtgcggacacttgaagaatgcatcctggaagggttatcggatttaaccgtag

SEQ ID NO: 192457 - DNA, 75 bp, synthetic construct
  source 1..75: mol_type = other DNA
aagctggaagtcggtcatagtgtgcgcacgcttgaagagtgcatgctggaagggttatcggatttaaccgtcgcc

SEQ ID NO: 192458 - DNA, 75 bp, synthetic construct
  source 1..75: mol_type = other DNA
tttttgccgatttgggaatttcgcttcatggcgcccgaattacaaccattggcgagcgagtagaagatttattca

SEQ ID NO: 192459 - DNA, 75 bp, synthetic construct
  source 1..75: mol_type = other DNA
cacgcgatccggttggaagcggtggtgttcctcgtgtgctccgggaaatcaggagaatgagcactactgtcattc

SEQ ID NO: 192460 - DNA, 75 bp, synthetic construct
  source 1..75: mol_type = other DNA
taacgctggctttatgcggcattgccggaagtgcaatatataaattaccttatcttcgggaaacctattacgacg

SEQ ID NO: 192461 - DNA, 75 bp, synthetic construct
  source 1..75: mol_type = other DNA
ctgggataagcggtttttattatgcgacattcccttcgtataccatgatctgtttgttacatgcactttgggccg

SEQ ID NO: 192462 - DNA, 75 bp, synthetic construct
  source 1..75: mol_type = other DNA
tatattgtggcgtattcgctttgccctgcatctggtcgtcagccgttacgataatcgcctgttattcgatcgcca

SEQ ID NO: 192463 - DNA, 75 bp, synthetic construct
  source 1..75: mol_type = other DNA
accttcatcgtgctggagccagatggcagccctctgtccactgatcgccatgaagttattcgttttggtctggag

SEQ ID NO: 192464 - DNA, 75 bp, synthetic construct
  source 1..75: mol_type = other DNA
gacaggagtggcgacagctggcagacctgttgcccgccactttgacgatgggctgacactggaggtcaatcgtac

SEQ ID NO: 192465 - DNA, 75 bp, synthetic construct
  source 1..75: mol_type = other DNA
caaacaccgctctccccaccctgcccggtcaaccgcaaaatccatgtgcctggccccgtgatgaattaaccgtct

SEQ ID NO: 192466 - DNA, 75 bp, synthetic construct
  source 1..75: mol_type = other DNA
tctcgtttctcgcgacggtaagcacgttgttccatcgctatggaaaccggaaattttcaatctgattaaacttgc

SEQ ID NO: 192467 - DNA, 75 bp, synthetic construct
  source 1..75: mol_type = other DNA
ctgccgatacagtccgaacattatcaggtgatgcgtaccgaccagcgtcgctattttggacacccggatctggtg

SEQ ID NO: 192468 - DNA, 75 bp, synthetic construct
  source 1..75: mol_type = other DNA
cggcaggaacagcagaacaggtgttctcgtcagccttcagcaacatgggaaatggcctggcaacttttgtcacta

SEQ ID NO: 192469 - DNA, 75 bp, synthetic construct
  source 1..75: mol_type = other DNA
attatcaggaacagcagaaacgccggaatgctgaaaatgctgcgctgaaccggatgaatgaaacggaagcggcgc

SEQ ID NO: 192470 - DNA, 75 bp, synthetic construct
  source 1..75: mol_type = other DNA
acagaaaggccgagcaggcgctgacggagagcctgaaccgacaactgaatgagaatcgccgttactggcaacagc

SEQ ID NO: 192471 - DNA, 75 bp, synthetic construct
  source 1..75: mol_type = other DNA
tgcgcaggacgaagatgttacccgcatttttgttaatccggcgattaaacaacaactttgtctggatgcaggcac

SEQ ID NO: 192472 - DNA, 75 bp, synthetic construct
  source 1..75: mol_type = other DNA
atgaaaaaagtagttttaacgacccttctggctgttgccctaggggttgctgggactgcctccgcatatcagcac

SEQ ID NO: 192473 - DNA, 75 bp, synthetic construct
  source 1..75: mol_type = other DNA
cgccaaattacgtcactttactgttgaaaccgaagtgacgtttttgccgacccataccgaccgaaaatcattcct

SEQ ID NO: 192474 - DNA, 75 bp, synthetic construct
  source 1..75: mol_type = other DNA
accttcattgtgctggagccggatggcagcccgctatccgcagatcgccatgaggttattcgctttggtctggag

SEQ ID NO: 192475 - DNA, 75 bp, synthetic construct
  source 1..75: mol_type = other DNA
catcagcgacctggacgggaaaaaactgacggcagatgaaaagagtgtgctggcccgtaaagatgaactgattca

SEQ ID NO: 192476 - DNA, 75 bp, synthetic construct
  source 1..75: mol_type = other DNA
ttggttgaagctcatgaccatctgctgctgggcaaagtaggccgctatattgaagagccgattaaagctcgtgta

SEQ ID NO: 192477 - DNA, 75 bp, synthetic construct
  source 1..75: mol_type = other DNA
cgatttcccacgtaagaaatccggtccgccgcgtattttgatccttaccccgactcgcgaactggcgatgcaggt

SEQ ID NO: 192478 - DNA, 75 bp, synthetic construct
  source 1..75: mol_type = other DNA
tcgttgaaggtggaaacagagccttcgactgcaagatagaagatgttgaaataattggaaaaattataagtttaa

SEQ ID NO: 192479 - DNA, 75 bp, synthetic construct
  source 1..75: mol_type = other DNA
atctgcgacagtctccccccgtcctgcggggagaaagctcttttaacgctgaccgaaaaatcggtcatcgtcctg

SEQ ID NO: 192480 - DNA, 75 bp, synthetic construct
  source 1..75: mol_type = other DNA
acagttctcttgtaccatcgactatgtacagtcgttacgcgagttgtataccgacgttattgaagagttttactg

SEQ ID NO: 192481 - DNA, 75 bp, synthetic construct
  source 1..75: mol_type = other DNA
cgaccctggttccagcatcgcgcgcatatgcatgtacgattacgttgtcctgccgatagtctggagtgtgaggat

SEQ ID NO: 192482 - DNA, 75 bp, synthetic construct
  source 1..75: mol_type = other DNA
atgtttatccagcgtctgagtcgccaggtgagcaatctgggcatgggtacggtgctgattggcgatatggggatg

SEQ ID NO: 192483 - DNA, 75 bp, synthetic construct
  source 1..75: mol_type = other DNA
gcgtgacgtatttcctgctgactgggtaattcagtgtgcaattgaaacgggtgcatctatcgaatggctctcatt

SEQ ID NO: 192484 - DNA, 75 bp, synthetic construct
  source 1..75: mol_type = other DNA
agtctaacggtttacgttacgcccttagctacctggctaaacaggatcagaaagaacacggtattattctgatgc

SEQ ID NO: 192485 - DNA, 75 bp, synthetic construct
  source 1..75: mol_type = other DNA
tcacgtgacccgccaattgttgtcgcaactgagtgggctgctcagtcaggggaataatcgccaggctgtcagcga

SEQ ID NO: 192486 - DNA, 75 bp, synthetic construct
  source 1..75: mol_type = other DNA
ttgataaagaaaattacacaatagcattgtggcctaaagatatttatgaatatctttcaagaaagttgaattcac

SEQ ID NO: 192487 - DNA, 75 bp, synthetic construct
  source 1..75: mol_type = other DNA
gttgctatcgccagttcgaataaacagcgttttgccgacgataaaccctggactacggccgcaccaggcggtcat

SEQ ID NO: 192488 - DNA, 75 bp, synthetic construct
  source 1..75: mol_type = other DNA
tctatcacgttatcgaaccggatcgctgggctgctatgtgcgcacgagtcagcggggtaaaaagtggcggcattt

SEQ ID NO: 192489 - DNA, 75 bp, synthetic construct
  source 1..75: mol_type = other DNA
tatgattaaaattacaagtacagagaatagctttgaatgtgcattttctgatattgaagtagttgcttgtataag

SEQ ID NO: 192490 - DNA, 75 bp, synthetic construct
  source 1..75: mol_type = other DNA
ctttccgccatcgtaggcagtatggatattatggcgtggtttattccgtttctgctgttcctgggtatcgcgact

SEQ ID NO: 192491 - DNA, 75 bp, synthetic construct
  source 1..75: mol_type = other DNA
attgtcacccctggtgccgttatcgaccacatcatcgtttcacaggagagcaaataatggatgcgaaacaatgta

SEQ ID NO: 192492 - DNA, 75 bp, synthetic construct
  source 1..75: mol_type = other DNA
ctgggccgcagcagccgctggtacaaaagtgaagtggagcagtggatgcagcagcgaattgaggagtcacgagga

SEQ ID NO: 192493 - DNA, 75 bp, synthetic construct
  source 1..75: mol_type = other DNA
ggttttacaggctgatcagtgaagggcattttcctaaacccatcaagctggggcgcagcagccgctggtacaaaa

SEQ ID NO: 192494 - DNA, 75 bp, synthetic construct
  source 1..75: mol_type = other DNA
ctggggcgcagcagccgctggtacaaaagcgaagtggagcagtggatgcaacagcgaatcgaagagtcacgagga

SEQ ID NO: 192495 - DNA, 75 bp, synthetic construct
  source 1..75: mol_type = other DNA
ctggcgctaattcgcgctcatcgttgcgacacacttggcaacctgacctatcaacttagcgcccgcaactttaac

SEQ ID NO: 192496 - DNA, 75 bp, synthetic construct
  source 1..75: mol_type = other DNA
tcacatatcggcaccaacccggaaaccggacggcgcatgatttctggcgaaatggaggtcgttctcgtaccgcaa

SEQ ID NO: 192497 - DNA, 75 bp, synthetic construct
  source 1..75: mol_type = other DNA
acgctgaaaaatataacgagtgggtgaaaaagttctcagagcagatttttaaaattactggcgatgagaatgcgg

SEQ ID NO: 192498 - DNA, 75 bp, synthetic construct
  source 1..75: mol_type = other DNA
atgtcaaatacacagaaaaccattaacgcggaaaaatataacgagtgggtgagaaaattctctgagcagattttt

SEQ ID NO: 192499 - DNA, 75 bp, synthetic construct
  source 1..75: mol_type = other DNA
agcatattgagctgactgatgccgggagcgggcgattcacccttcaggtccgtgatgatgaaaaacaacatacag

SEQ ID NO: 192500 - DNA, 75 bp, synthetic construct
  source 1..75: mol_type = other DNA
cctgatcgacatgaactacatcaccagtttcaccggcatgaccgataaatggttttacaagctgatcagtgaagg

SEQ ID NO: 192501 - DNA, 75 bp, synthetic construct
  source 1..75: mol_type = other DNA
tctgctgttcctgggtatcgccacgccacccgttgccggaatttatatcgctgactttttcctttatcgccgtaa

SEQ ID NO: 192502 - DNA, 75 bp, synthetic construct
  source 1..75: mol_type = other DNA
atggcggtattcggtgcggttctgcctgcggcgctgttgttgattttcgcctgcgtcaccggtaacgcgggcaat

SEQ ID NO: 192503 - DNA, 75 bp, synthetic construct
  source 1..75: mol_type = other DNA
atagaagacatgcactaatgtttgggcaagtattcctgcaaatttatggttccacgtcaacaaaagaagatgctg

SEQ ID NO: 192504 - DNA, 75 bp, synthetic construct
  source 1..75: mol_type = other DNA
tgaagtggcaaaagaactgcaattaagcacggtttcaatgggctatattttctccgcttttggttgggcctacct

SEQ ID NO: 192505 - DNA, 75 bp, synthetic construct
  source 1..75: mol_type = other DNA
tggcttccaccatcatcttatgtaactacaccaacaacaccacgctggtggtcatgctgatggcgctggcttttt

SEQ ID NO: 192506 - DNA, 75 bp, synthetic construct
  source 1..75: mol_type = other DNA
gctttggcccgttcccggggcattgatattaccgtggtgacggataaaaactgcaatatagcgcatgtcgatgat

SEQ ID NO: 192507 - DNA, 75 bp, synthetic construct
  source 1..75: mol_type = other DNA
tatatgaaaaaatcagcaaggcggggtttagccgttcatttatacgcaaagtcttaccttcatggtgggacgaca

SEQ ID NO: 192508 - DNA, 75 bp, synthetic construct
  source 1..75: mol_type = other DNA
agatatattctaaattcggccgggccgggtttaatctctcttacatccgcaggttgttgcctgactggtgggatg

SEQ ID NO: 192509 - DNA, 75 bp, synthetic construct
  source 1..75: mol_type = other DNA
tgatgatggtttgctgtgcgtgggatcgttcaactggtttagtgcgacacgggaagcgcgatatgaacgatacga

SEQ ID NO: 192510 - DNA, 75 bp, synthetic construct
  source 1..75: mol_type = other DNA
atcacggcgaaatgatgggcgcacataagctgatcagtaaaggagcggcgacaggtcgatacgccagtcagtcat

SEQ ID NO: 192511 - DNA, 75 bp, synthetic construct
  source 1..75: mol_type = other DNA
ccgcagttaccaatggagtctgcgtccgtggcgtaacgatgcgcaaccgcgctggatgggcgcgttccgtccacg

SEQ ID NO: 192512 - DNA, 75 bp, synthetic construct
  source 1..75: mol_type = other DNA
tctcggattatctgatcaaacgcggtttgtccctgaccctggcacgtaagctaccgattgtgctgggaatgttgc

SEQ ID NO: 192513 - DNA, 75 bp, synthetic construct
  source 1..75: mol_type = other DNA
gatgcaggcactgcgtgcagatggtttaggaacggcggatcatagcgccctggcgtgctactacgaaaaactggc

SEQ ID NO: 192514 - DNA, 75 bp, synthetic construct
  source 1..75: mol_type = other DNA
gcttggctggctgactttcgcctggggctgggagcacgtcttcaccgttatgggggtgattggttttgtgctgac

SEQ ID NO: 192515 - DNA, 75 bp, synthetic construct
  source 1..75: mol_type = other DNA
tctgtgccgggtatggaaggcgcggcgagcatgggcggcggccccccaccgcaaatgcctgacagcgatgagggt

SEQ ID NO: 192516 - DNA, 75 bp, synthetic construct
  source 1..75: mol_type = other DNA
taaagacgaatttccccgaagctgatttctggattgttcgtcgaggctctttaaaaagcgtgggaaagcctaccc

SEQ ID NO: 192517 - DNA, 75 bp, synthetic construct
  source 1..75: mol_type = other DNA
gaagatggtgatttttcttctctccgcatctgcgcgaaagtgctggtaagccagtcaagggcatacagatttcat

SEQ ID NO: 192518 - DNA, 75 bp, synthetic construct
  source 1..75: mol_type = other DNA
tatttgaagtactttctatcggtgataccgatttcagtaagttggaggttgatactaaacagagtagaataattg

SEQ ID NO: 192519 - DNA, 75 bp, synthetic construct
  source 1..75: mol_type = other DNA
gtggacagactttcccgactgtcaggggaagactggaatacgctgaagaaaatgatccgtcagaaagatatccgg

SEQ ID NO: 192520 - DNA, 75 bp, synthetic construct
  source 1..75: mol_type = other DNA
ggagatgagatctttgttgatgtatccataacctattttgatggcgatggcatttatgtgtttgtatacgggaaa

SEQ ID NO: 192521 - DNA, 75 bp, synthetic construct
  source 1..75: mol_type = other DNA
tggctatgctgattatgacggtatcacggtaaatcatctatcaagatcaaatgattcttatcgtgttgatgtatt

SEQ ID NO: 192522 - DNA, 75 bp, synthetic construct
  source 1..75: mol_type = other DNA
gcagatgcggataatgcggcaggcactgctgagcagatgcttacagcggcatttaacagtgctggtaatgcactg

SEQ ID NO: 192523 - DNA, 75 bp, synthetic construct
  source 1..75: mol_type = other DNA
ccgatcaggctgtcagggatgcggcgatacaacgtgaaaatgaacgttacgagaaagccattaagaaaaaaacat

SEQ ID NO: 192524 - DNA, 75 bp, synthetic construct
  source 1..75: mol_type = other DNA
ggacggcatcatcttctcaggttgaatacgatcagcagcgtcttaacgagcttcaggagaaaaaacgccagaagg

SEQ ID NO: 192525 - DNA, 75 bp, synthetic construct
  source 1..75: mol_type = other DNA
agataaaatagttgaaattattaaggatattcaggcccgcaatcctactttagaacaaggagatatagcagtcat

SEQ ID NO: 192526 - DNA, 75 bp, synthetic construct
  source 1..75: mol_type = other DNA
ggcgcatgtcgtttcgttttcaatcgtgctctggcgcttcagaatgagaatcatgaggccggtaataaatacatc

SEQ ID NO: 192527 - DNA, 75 bp, synthetic construct
  source 1..75: mol_type = other DNA
cgccggtgtgctggcgcaggtggtgggcagcggggcgtttaatggcagtgatgtcccgatggtggcgaaagcggc

SEQ ID NO: 192528 - DNA, 75 bp, synthetic construct
  source 1..75: mol_type = other DNA
gtgggtatgggtgatcagcagcgacagcgatatcaggtacaactgagtcttcgccagaaataccagcaacagctg

SEQ ID NO: 192529 - DNA, 75 bp, synthetic construct
  source 1..75: mol_type = other DNA
ttttgcaaaaggcgcgggggtgatgggagaagcaggccctgaagccattctgccactgcgtcgaggtgctgacgg

SEQ ID NO: 192530 - DNA, 75 bp, synthetic construct
  source 1..75: mol_type = other DNA
atacgaccagcagcgccttgatgaacttcaggagaaaaagcgccagaaagatttacaggatgcaaaagcgcaggc

SEQ ID NO: 192531 - DNA, 75 bp, synthetic construct
  source 1..75: mol_type = other DNA
agccattctgccactgcgtcgtggtgctgacggtaagctgggggttgtggcggatattgggggttcaggtatggc

SEQ ID NO: 192532 - DNA, 75 bp, synthetic construct
  source 1..75: mol_type = other DNA
tcagtacacgccccgatgctgaactggtcaacactatgctggatagcgctgtcaaaacgttaaatgctggcgaac

SEQ ID NO: 192533 - DNA, 75 bp, synthetic construct
  source 1..75: mol_type = other DNA
attctctcaggaatttcaggatctgccagacggtgctgagacgacgcttacaacttttgtcactaccggcaaact

SEQ ID NO: 192534 - DNA, 75 bp, synthetic construct
  source 1..75: mol_type = other DNA
gcactgacgttgctggatgcaaaacagcaggagctgcagaagcagactgccctcaatgacctgaagaaaaagacc

SEQ ID NO: 192535 - DNA, 75 bp, synthetic construct
  source 1..75: mol_type = other DNA
acagcggcatttaacagcgcaggtaatgcactggcgacgttctgtaccaccggaaaactgaacttcaaatctttt

SEQ ID NO: 192536 - DNA, 75 bp, synthetic construct
  source 1..75: mol_type = other DNA
cagcgtcagcaacacgatctggacgttgccatggcaggaatgggcgatcagcaacggcagcggtaccagtcgcag

SEQ ID NO: 192537 - DNA, 75 bp, synthetic construct
  source 1..75: mol_type = other DNA
gtctatggtctgggtaaagcctggtatgacggtcagaaggagggggaagaatttaaccgccagctgtcgctgacg

SEQ ID NO: 192538 - DNA, 75 bp, synthetic construct
  source 1..75: mol_type = other DNA
gccatgcaggcggtttacaacctggggaaaagggctgcagcagattttatgcaacaacagtcccgtgatggcggg

SEQ ID NO: 192539 - DNA, 75 bp, synthetic construct
  source 1..75: mol_type = other DNA
tcagaacgggcagattgggccggaagccatgcaggcggtttacaacctggggaaaagggctgcagcagattttat

SEQ ID NO: 192540 - DNA, 75 bp, synthetic construct
  source 1..75: mol_type = other DNA
ttggtcgtgaagactcgctggatgaacagattgccgctttacaggagaaagtgtcgcgggcgaaaagactcccct

SEQ ID NO: 192541 - DNA, 75 bp, synthetic construct
  source 1..75: mol_type = other DNA
taaatgccgtgaaggctctggacaatgagctgcattttcttaccgccactcagctcgagcagatacgtgtccttg

SEQ ID NO: 192542 - DNA, 75 bp, synthetic construct
  source 1..75: mol_type = other DNA
tttacaggagaaagtgtcgcgggcgaaaagactcccctggacggcatcatcttctcaggttgaatacgatcagca

SEQ ID NO: 192543 - DNA, 75 bp, synthetic construct
  source 1..75: mol_type = other DNA
gatgaaaagagtgtgctggcccgtaaagatgaactgattcaggcactgacgctgctggatgtaaaacagcaggag

SEQ ID NO: 192544 - DNA, 75 bp, synthetic construct
  source 1..75: mol_type = other DNA
caatggcctaaacagcgttgaggatttacaggcgaaccatattgacgaaaccttcacctgggcgcaccgcatcag

SEQ ID NO: 192545 - DNA, 75 bp, synthetic construct
  source 1..75: mol_type = other DNA
tgctgcctggcgtttaccagcagagccctgggttatccctgcactgatgtgctcgctcgctgggttaatgaactt

SEQ ID NO: 192546 - DNA, 75 bp, synthetic construct
  source 1..75: mol_type = other DNA
caagtggatgcttacatcagatggtataacgagcggcgtataaaattatcgctgggtgccgtcagtcccaaaatg

SEQ ID NO: 192547 - DNA, 75 bp, synthetic construct
  source 1..75: mol_type = other DNA
ggggggcggctatcagaaaaggttgtacgcagacttatggtggaagaacagcttgtcgtcagccgtaaccgtcgt

SEQ ID NO: 192548 - DNA, 75 bp, synthetic construct
  source 1..75: mol_type = other DNA
aatacgccgccggcagatggagctggatattctgaaaaaggcggaggaaatcataaaaaaagacccgggcatcag

SEQ ID NO: 192549 - DNA, 75 bp, synthetic construct
  source 1..75: mol_type = other DNA
gcgtattggtgtcagtcgtgcggtattgtataaatggaaagataaaattatcggcaacagtgcttaccagactat

SEQ ID NO: 192550 - DNA, 75 bp, synthetic construct
  source 1..75: mol_type = other DNA
tacagtcagcaacaggcacaggtggaaggacagattgctgctgccagacagtcagcaggcattgccacggaaagg

SEQ ID NO: 192551 - DNA, 75 bp, synthetic construct
  source 1..75: mol_type = other DNA
atgggaaatagtctggcaacctttgtgactaccggcaagttcagcttcaagtcttttacttcatcagtgctgtca

SEQ ID NO: 192552 - DNA, 75 bp, synthetic construct
  source 1..75: mol_type = other DNA
ttttttgcttttgcaaaaggcgcgggtgtgatgggggaagcgggacctgaagccattctgcctctgcgtcgtggt

SEQ ID NO: 192553 - DNA, 75 bp, synthetic construct
  source 1..75: mol_type = other DNA
cgtctaccaggatgatctggtaacggcgtttcgcgatatttcgccgcaagcgccaacgcatattctgatcattcc

SEQ ID NO: 192554 - DNA, 75 bp, synthetic construct
  source 1..75: mol_type = other DNA
tggtgacgctggaagacggtaccgtaatgccgaccccggacgaccagctgccggtgatcctgccggaagatgtgg

SEQ ID NO: 192555 - DNA, 75 bp, synthetic construct
  source 1..75: mol_type = other DNA
cgttgactgtggtgatttgccgctggcgctgcgtatcggtgagtacgtggtgcgccataacctcagcacaccgga

SEQ ID NO: 192556 - DNA, 75 bp, synthetic construct
  source 1..75: mol_type = other DNA
cccaggccgttgcgccgcataatctctattacgcgccggatccttcctcacaaatcgcctgttccattggcggca

SEQ ID NO: 192557 - DNA, 75 bp, synthetic construct
  source 1..75: mol_type = other DNA
ccagcgcgactacgagtttgcctctaaatacggcctgaacatcaaaccggttatcctggcggctgacggctctga

SEQ ID NO: 192558 - DNA, 75 bp, synthetic construct
  source 1..75: mol_type = other DNA
catgctgggcaaaaacgttctgcagccgatcggctgggacgcgtttggtctgcctgcggaaggcgcggcggtgaa

SEQ ID NO: 192559 - DNA, 75 bp, synthetic construct
  source 1..75: mol_type = other DNA
ccgcttcctgaaacgtgtctggaaactggtttacgagcacacaacgaaaggtgatgctccggcgctgaacgttga

SEQ ID NO: 192560 - DNA, 75 bp, synthetic construct
  source 1..75: mol_type = other DNA
atgactggtttgaaggccgttttgtcatttattggcacaattatattggttgcattcggcgcgtttggttttggt

SEQ ID NO: 192561 - DNA, 75 bp, synthetic construct
  source 1..75: mol_type = other DNA
gcgtaagcaagcacgtgagctctataacatatatgatgataaccgggtgccggatgaagattatggacctgctta

SEQ ID NO: 192562 - DNA, 75 bp, synthetic construct
  source 1..75: mol_type = other DNA
tcagccgtcacaacggcaaatgagtgcctattacaaccataacggttccctgacaaatctgtcagccagtttctc

SEQ ID NO: 192563 - DNA, 75 bp, synthetic construct
  source 1..75: mol_type = other DNA
cggcgtgaccaccgaagtgacggtaaaactgctgccgaagccccccgtggcacgggttctgttagccagctttga

SEQ ID NO: 192564 - DNA, 75 bp, synthetic construct
  source 1..75: mol_type = other DNA
tctttcatgccggagacggcaacatgcacccgttaatccttttcgatgccaacgaacccggtgaatttgcccgcg

SEQ ID NO: 192565 - DNA, 75 bp, synthetic construct
  source 1..75: mol_type = other DNA
ccgttgatgccgaagcgattttattgtgcgagctggacggcgtggagtctgacgtacaggaagattgtgaacggg

SEQ ID NO: 192566 - DNA, 75 bp, synthetic construct
  source 1..75: mol_type = other DNA
agattgtcacagaccaggacatgccggacgaagtgcgcgccaaattatgcaaggcgtgcgcctttgcccgtcgtg

SEQ ID NO: 192567 - DNA, 75 bp, synthetic construct
  source 1..75: mol_type = other DNA
aaggcgcgggcattttcacggcgcgcatcaggcagtacggaagacatgactgtgtcacttggtctgctgcgtgaa

SEQ ID NO: 192568 - DNA, 75 bp, synthetic construct
  source 1..75: mol_type = other DNA
ctcatcactgaagctgctgcgcgaagcgatgcacctgaacccgagcgcaggtgtgaaacgcgagattgcaaccct

SEQ ID NO: 192569 - DNA, 75 bp, synthetic construct
  source 1..75: mol_type = other DNA
gtgctgaccgaagaaatctgcaacccggtactgacgcaggccgggacggatgccgacgcggatttgtccgccttt

SEQ ID NO: 192570 - DNA, 75 bp, synthetic construct
  source 1..75: mol_type = other DNA
atggagattaaacaattccagcgtgctgctggtattagcgaggcgctggccgaacgctggttcttgcatataact

SEQ ID NO: 192571 - DNA, 75 bp, synthetic construct
  source 1..75: mol_type = other DNA
tgattatcaatggtggcaggaatggcatcgacgaccggcgcgcgcggtacgtcactgccagtaaggtgctggcgg

SEQ ID NO: 192572 - DNA, 75 bp, synthetic construct
  source 1..75: mol_type = other DNA
cggctcgtagcgcggcctggttcttctccagcaaaggctgcatgaagtataccggagatattgcacgtgtaactc

SEQ ID NO: 192573 - DNA, 75 bp, synthetic construct
  source 1..75: mol_type = other DNA
atctgcgttggatctccgccctgctttaccgcaatggcgtgattgaagaaaccggcgtcgccgcaggtgtgctca

SEQ ID NO: 192574 - DNA, 75 bp, synthetic construct
  source 1..75: mol_type = other DNA
ttcaacgcgtcatggctgaacgccatggcaaggcagatgatctgtcagaaacagcgcgtactgcgcacgagcaaa

SEQ ID NO: 192575 - DNA, 75 bp, synthetic construct
  source 1..75: mol_type = other DNA
ttcagaaagtgatggctgatcgacgcggagacagcgccgcacagcatggcgttgttcgcaccgcgcatgagcaaa

SEQ ID NO: 192576 - DNA, 75 bp, synthetic construct
  source 1..75: mol_type = other DNA
gcgcacagcagacgcaggacgaaagcagcaaaagtaaaaagacaacgcggaagcctgcaacacgaaaaaccaccg

SEQ ID NO: 192577 - DNA, 75 bp, synthetic construct
  source 1..75: mol_type = other DNA
cccggttccggcgcgtaagggcgataccttccacgtcgattacggcaacatgggctccattagctgccgctttgt

SEQ ID NO: 192578 - DNA, 75 bp, synthetic construct
  source 1..75: mol_type = other DNA
atcgccgaaggccgtacgctgaaaggccacaaaatcggtctgacctcgaaagcgatgcaggccagctcacaaatc

SEQ ID NO: 192579 - DNA, 75 bp, synthetic construct
  source 1..75: mol_type = other DNA
aatattatcttgccagttttgccaacaaaatctggctatcaccacaaggcgtggttgatctgcatggttttgcga

SEQ ID NO: 192580 - DNA, 75 bp, synthetic construct
  source 1..75: mol_type = other DNA
cactcgcggatgtttccattaccaaagctctaccgccggaggcgcagcagatgatgcagttgagcatcgagaacg

SEQ ID NO: 192581 - DNA, 75 bp, synthetic construct
  source 1..75: mol_type = other DNA
ggcggcagcgttacagcttctgaggtgattcgctctgaactggcggcagccagagccgcaggcaaaccagtggtt

SEQ ID NO: 192582 - DNA, 75 bp, synthetic construct
  source 1..75: mol_type = other DNA
ggcctgtatttgcgaccggagaggcatcctgggggctcagtaaccagtggtcgctgtatggcggggctgtgcttg

SEQ ID NO: 192583 - DNA, 75 bp, synthetic construct
  source 1..75: mol_type = other DNA
tttcgtgggatgttcagcgctgatggcgatggtctgctacctcttcgtagtcggcgacattaaacgtatggaatt

SEQ ID NO: 192584 - DNA, 75 bp, synthetic construct
  source 1..75: mol_type = other DNA
ggccaattacattgtggctaaccccagcactctgaccggttctatcggtatcttcggcgtgatcactaccgtaga

SEQ ID NO: 192585 - DNA, 75 bp, synthetic construct
  source 1..75: mol_type = other DNA
aaccggtggcgataccgcgaaatatgcactggaaaacaagctggtcgatgcactggcatcgagtgccgaaatcga

SEQ ID NO: 192586 - DNA, 75 bp, synthetic construct
  source 1..75: mol_type = other DNA
caaaaaatgatcttaatgctcttgaaaataagtctgtacttacctatgatcgcagtactgtccaagaaagcggac

SEQ ID NO: 192587 - DNA, 75 bp, synthetic construct
  source 1..75: mol_type = other DNA
aacaagctcagatgatcatcactacgattaagacggtgattaacgaaatctaccattcagttggtgtagctggtg

SEQ ID NO: 192588 - DNA, 75 bp, synthetic construct
  source 1..75: mol_type = other DNA
gctataaacgctttatcacgctggttgctgatgcgcgtcattcgacgccggagcagattgataaaatcgcccagg

SEQ ID NO: 192589 - DNA, 75 bp, synthetic construct
  source 1..75: mol_type = other DNA
cggtttagtaaattaagccgccaactgcttggtgccagttccgatcgtctgcaggaaaactcactgtttgatatc

SEQ ID NO: 192590 - DNA, 75 bp, synthetic construct
  source 1..75: mol_type = other DNA
tgctgatgcgcgtcattcgacgccggagcaaattgataaaatcgcccagggccacgtctggaccggtcaggatgc

SEQ ID NO: 192591 - DNA, 75 bp, synthetic construct
  source 1..75: mol_type = other DNA
ctattctgctttatccgcagatagcgttattaaaattagcgggcgcgtcctcgattatggctgcacagtctcatc

SEQ ID NO: 192592 - DNA, 75 bp, synthetic construct
  source 1..75: mol_type = other DNA
acgccggtgtgagcagtggcggcggtcagccatcgcagagtcagatgagcgcgtactacaaccacagcagtccgc

SEQ ID NO: 192593 - DNA, 75 bp, synthetic construct
  source 1..75: mol_type = other DNA
gaccgaggcatctctggagaaagtcacatactggaataacgggcagtgtgcggacctcagtcaattggcgggggt

SEQ ID NO: 192594 - DNA, 75 bp, synthetic construct
  source 1..75: mol_type = other DNA
cggacatctgactattacacgctgtcggtgaaccgctacttcgatgcgttcagctttaagaatatcgcgctgggg

SEQ ID NO: 192595 - DNA, 75 bp, synthetic construct
  source 1..75: mol_type = other DNA
ttcgggataagtgcatcggggggcgcgacggtcacgatgaaaggagccgctttacattctggagggatgaacgga

SEQ ID NO: 192596 - DNA, 75 bp, synthetic construct
  source 1..75: mol_type = other DNA
tcaggatatttcaccatcggcatttcagattgcgtttcttgaaccacctttttcggattcggataacgagaaacc

SEQ ID NO: 192597 - DNA, 75 bp, synthetic construct
  source 1..75: mol_type = other DNA
accgggataacgattcggcatttgtacgtctgtccgtgccgtggggaaccggtacggccagctacagcggcagca

SEQ ID NO: 192598 - DNA, 75 bp, synthetic construct
  source 1..75: mol_type = other DNA
ggacactccatacattgagttatttgcaggcagtcagcaggtatccacgacgctggtacattttgccgctgatgc

SEQ ID NO: 192599 - DNA, 75 bp, synthetic construct
  source 1..75: mol_type = other DNA
gggatattcaatattgccgccgttaactggcctgagagcgtcgacaccgatgcgaaaaaatgcgccgcctttgcg

SEQ ID NO: 192600 - DNA, 75 bp, synthetic construct
  source 1..75: mol_type = other DNA
gggatatttaatatcgccgccgtaaactggcctgagagcgccgacactgacgcgaaaaaatgcgccgcctttgcg

SEQ ID NO: 192601 - DNA, 75 bp, synthetic construct
  source 1..75: mol_type = other DNA
ggaaccggtacggccagctacagcggcagtatgagcaatgaccgttacaccaatacggtgggatacagcgattcc

SEQ ID NO: 192602 - DNA, 75 bp, synthetic construct
  source 1..75: mol_type = other DNA
atgacgatggaccagtacctcaatgcccgttaccggaatgattttacgggacgtgagaaggagctgtacaccgtc

SEQ ID NO: 192603 - DNA, 75 bp, synthetic construct
  source 1..75: mol_type = other DNA
gagcacaccatggaggggccggtctttgctgccggtgaggcatcctggggtatcagtaacacgtggtcgctttat

SEQ ID NO: 192604 - DNA, 75 bp, synthetic construct
  source 1..75: mol_type = other DNA
cgggtatcgcaccggagcatattccacggctgaccgagcgtttttatcgtgttgataaagcgcgttcccgacaaa

SEQ ID NO: 192605 - DNA, 75 bp, synthetic construct
  source 1..75: mol_type = other DNA
tctgacaggttcggttgacatcccacgagatctgttcaatttcttccctacacctgagaatttagtcacagatat

SEQ ID NO: 192606 - DNA, 75 bp, synthetic construct
  source 1..75: mol_type = other DNA
aaaggagccaaaaggtgtaaattccgatgcggttaaagctctactgcctgagcttattcctgatgttgcagataa

SEQ ID NO: 192607 - DNA, 75 bp, synthetic construct
  source 1..75: mol_type = other DNA
actgggcaatctcatcaaacgctttcgtagcggcgcggagtcgctgcccgatgcggtggtgctgaccacggaaga

SEQ ID NO: 192608 - DNA, 75 bp, synthetic construct
  source 1..75: mol_type = other DNA
ccggcggtagcggattagggttagcgatcgtgaaacatgcggtgaatcatcacgaaagtcgcctgaatattgaga

SEQ ID NO: 192609 - DNA, 75 bp, synthetic construct
  source 1..75: mol_type = other DNA
gctacgcagtgcgatttcgaacctggtctataacgccgtgaatcatactccagaaggcacgcatatcaccgtacg

SEQ ID NO: 192610 - DNA, 75 bp, synthetic construct
  source 1..75: mol_type = other DNA
tggacattatttgcgttgttcatattcttattcgccatggatctgctgacgggttattactggcaaagcgaggcc

SEQ ID NO: 192611 - DNA, 75 bp, synthetic construct
  source 1..75: mol_type = other DNA
cgctgatttatcaggatcgccgtaaggctgaactggttgcccagaccaaagtcgatgaaggtcgcgcattcaccg

SEQ ID NO: 192612 - DNA, 75 bp, synthetic construct
  source 1..75: mol_type = other DNA
tccccgttgttccaggagatgggacgcgctgcggcggcacaaccggatgaactggtctttgctgcactgcgtgac

SEQ ID NO: 192613 - DNA, 75 bp, synthetic construct
  source 1..75: mol_type = other DNA
aaaattggtaagctggaagctattttttctgctggagcaataggaagcatgcacgctagaactttagcaggtcac

SEQ ID NO: 192614 - DNA, 75 bp, synthetic construct
  source 1..75: mol_type = other DNA
ggcgttcatgatgatgcgccgcgcgataaatgcactctatcttgtgcgataaatggcatccacgcggcgtttcat

SEQ ID NO: 192615 - DNA, 75 bp, synthetic construct
  source 1..75: mol_type = other DNA
aggatgagcgtacacttcaccagccaggggcaaataaaaatggttgtttcagaaaaagcgctagtccgggcataa

SEQ ID NO: 192616 - DNA, 75 bp, synthetic construct
  source 1..75: mol_type = other DNA
caggagggaagtcttactgcggtgactgctggggaacagatcgttcctgcctctgaacttgctgctgccataagg

SEQ ID NO: 192617 - DNA, 75 bp, synthetic construct
  source 1..75: mol_type = other DNA
ttagtggatgtcaggtttaatacctacccttctgattctggcgtttttacaaccagcgtcatcggagatgcttca

SEQ ID NO: 192618 - DNA, 75 bp, synthetic construct
  source 1..75: mol_type = other DNA
tggtgagtttattcgtggctgggatgatgaacgtggtgtggatagtgggcgaactctgctttcatcgcaaggaga

SEQ ID NO: 192619 - DNA, 75 bp, synthetic construct
  source 1..75: mol_type = other DNA
ccagtattatcaaaatcagcttaacggtgctggtgataggttatgctctcggaaaaatcgcgatgttgtttagct

SEQ ID NO: 192620 - DNA, 75 bp, synthetic construct
  source 1..75: mol_type = other DNA
atgtcgtggcagaagaaactatattcagcaaaattattcgtcgtgagatccgtctaccaggatgatctggtaacg

SEQ ID NO: 192621 - DNA, 75 bp, synthetic construct
  source 1..75: mol_type = other DNA
aaaagtgaagttacgcgaaacgccgacaacctggtgtgttggtccgaaagaaacatatcgcaaggaagatggccg

SEQ ID NO: 192622 - DNA, 75 bp, synthetic construct
  source 1..75: mol_type = other DNA
cctgttccgtggcctttagccactccaccaacaggatggctgaaatgtaacggcgctccatttgcagctgaaaat

SEQ ID NO: 192623 - DNA, 75 bp, synthetic construct
  source 1..75: mol_type = other DNA
tgtgtcatcccgaaaccgatccgcaagggtttaaagcattacgccaggcctatgaagaggccctgcgactggcgg

SEQ ID NO: 192624 - DNA, 75 bp, synthetic construct
  source 1..75: mol_type = other DNA
cgcaacggttgtactgtggcgagggggaaagcctgcttgccgatctctgcgcataccgggagagttacccatcta

SEQ ID NO: 192625 - DNA, 75 bp, synthetic construct
  source 1..75: mol_type = other DNA
tatccgaaattaggtgcagtttatccggctggcgtattacccgacttacgcggcgagtttattcgcggctgggat

SEQ ID NO: 192626 - DNA, 75 bp, synthetic construct
  source 1..75: mol_type = other DNA
tgttatgggcggaaatattacatagcggtaaattatcgccgttgggtcaatcatttatcgagtcgctgttttaca

SEQ ID NO: 192627 - DNA, 75 bp, synthetic construct
  source 1..75: mol_type = other DNA
tgctgtgggcggaaattttgcacagcggtaaattatcgccgttagggcaatcatttatcgaatcactgttttaca

SEQ ID NO: 192628 - DNA, 75 bp, synthetic construct
  source 1..75: mol_type = other DNA
agagcgaacgttttcaaccatcggcctggcagaaatttattcagcagttgaatacctacaacatggaggatgtcg

SEQ ID NO: 192629 - DNA, 75 bp, synthetic construct
  source 1..75: mol_type = other DNA
agatcatcaatggtgggcagaacggtatcgacgaccgtcgcgcgcggtacattaccgccagcaaggtgcttttat

SEQ ID NO: 192630 - DNA, 75 bp, synthetic construct
  source 1..75: mol_type = other DNA
cttatccagattaccggtttgaataactatcgtgattgcggaaacggcctgaaagtggacctgctggagaatcct

SEQ ID NO: 192631 - DNA, 75 bp, synthetic construct
  source 1..75: mol_type = other DNA
tgattatcaatggtggccggaacggcatcgacgaccggcgcgcgcggtacgtcactgccagtaaggtgctggcta

SEQ ID NO: 192632 - DNA, 75 bp, synthetic construct
  source 1..75: mol_type = other DNA
attctgcgccggttgaatgacgtatattcagtcggatatcgtgtaggtgatgcagcccgccgccgcgccatcaaa

SEQ ID NO: 192633 - DNA, 75 bp, synthetic construct
  source 1..75: mol_type = other DNA
acctatcccatcatacgatgaacaactttatatcgtcgccacgatggataaattttacaacctgacaaactccat

SEQ ID NO: 192634 - DNA, 75 bp, synthetic construct
  source 1..75: mol_type = other DNA
accggagatattgcacgtgtaactctgcttatcaatggtggccggaacggcattgatgaccggcgcgcgcgatac

SEQ ID NO: 192635 - DNA, 75 bp, synthetic construct
  source 1..75: mol_type = other DNA
aattttaatgattcgtcatgcgtgagtacaaatactatcacccctatgagttcgtcggatattattgttgggctt

SEQ ID NO: 192636 - DNA, 75 bp, synthetic construct
  source 1..75: mol_type = other DNA
tcactcgctggctgaaatgaaagcttcttatgcgatcgttgccgcacgcgatgccatttccgctaccagcggtgt

SEQ ID NO: 192637 - DNA, 75 bp, synthetic construct
  source 1..75: mol_type = other DNA
ggcttcccagctttcccgttcacaattaggtgatatcgcagaaggcgctatcaatgctaaatactcccgtgataa

SEQ ID NO: 192638 - DNA, 75 bp, synthetic construct
  source 1..75: mol_type = other DNA
tattgctcaagtcgggcatgagtctggtggcttcaccaggttgcaggagaatttcaactacagcgttaccggact

SEQ ID NO: 192639 - DNA, 75 bp, synthetic construct
  source 1..75: mol_type = other DNA
agatcatcaatggcgggcagaacggcatcgacgaccggcgtgcgcgttacatcactgccagtaaggtgctggcgg

SEQ ID NO: 192640 - DNA, 75 bp, synthetic construct
  source 1..75: mol_type = other DNA
tgggccgtcgtgctggtgagccatcgttaccgctggagcgccagcgtgcgatcgccaatctggtgtatagcaagc

SEQ ID NO: 192641 - DNA, 75 bp, synthetic construct
  source 1..75: mol_type = other DNA
acttacaaaaatgtgaaagcaaaattaagcagaaaatgggtaatgactccaacttactgatagtgttttatgttc

SEQ ID NO: 192642 - DNA, 75 bp, synthetic construct
  source 1..75: mol_type = other DNA
cgtgaggggaatgcgctgctgaaagagcaggccattctcgaaaaggagatgaccggactcaaaaaagcacgccct

SEQ ID NO: 192643 - DNA, 75 bp, synthetic construct
  source 1..75: mol_type = other DNA
ccacactgccgcaggaatgcgggaacgcatgggagatgacaccggagttcgtggcgatgaacgggaaggcaaacg

SEQ ID NO: 192644 - DNA, 75 bp, synthetic construct
  source 1..75: mol_type = other DNA
gcgccggaactcccagctggcaagggagattgaacttgccattccccgtgagatttcccgcgaggccgcacggga

SEQ ID NO: 192645 - DNA, 75 bp, synthetic construct
  source 1..75: mol_type = other DNA
gaatgtgaaacgccggtgcgtaaggcgaaacatggtgattccagcggcgtacgcggcgctgcatggttatggcca

SEQ ID NO: 192646 - DNA, 75 bp, synthetic construct
  source 1..75: mol_type = other DNA
aatcagacctggcatgagtggaagcgggacgaacagcacaggcaacaacaacgccgccccgggcacttccggggc

SEQ ID NO: 192647 - DNA, 75 bp, synthetic construct
  source 1..75: mol_type = other DNA
gcctctccgctgccgtcagcgcaccgggtggacgtcaccgcttatgcggcaccggagcaactcatgcccgttgtc

SEQ ID NO: 192648 - DNA, 75 bp, synthetic construct
  source 1..75: mol_type = other DNA
acaccagaaaaacagccggatcatctgttccgctctctgggtttcaatcgtacctgggatgaatggcggcgcgag

SEQ ID NO: 192649 - DNA, 75 bp, synthetic construct
  source 1..75: mol_type = other DNA
attattgtcatatccattgccaggtctctctggggcgcttgatcaactttccagaacaacccgagtttagcgaag

SEQ ID NO: 192650 - DNA, 75 bp, synthetic construct
  source 1..75: mol_type = other DNA
actattgtcatatccattgccaggtctctctggggcgcttgatcaactttccagaacaacctgagtttagcgaag

SEQ ID NO: 192651 - DNA, 75 bp, synthetic construct
  source 1..75: mol_type = other DNA
cgaaaaagggcaggcatgggtagccaatgcaattactgaagaatatctgcgccaggagggcggcgaattgcccct

SEQ ID NO: 192652 - DNA, 75 bp, synthetic construct
  source 1..75: mol_type = other DNA
agctgcgtcaccgactctgcatcttcgataccctggaacgccgtgcattactggcggcgcaggaagcgttaagta

SEQ ID NO: 192653 - DNA, 75 bp, synthetic construct
  source 1..75: mol_type = other DNA
cgaaaaagggcaggcgtgggttgccaacgcactgactgaagaatatctgcgccaggggggcggtgaattgtctct

SEQ ID NO: 192654 - DNA, 75 bp, synthetic construct
  source 1..75: mol_type = other DNA
tgcgggatttatttgccatgccgataaagtccgacgcgccactcgtgatgccctgctattgagtgaatttgtgca

SEQ ID NO: 192655 - DNA, 75 bp, synthetic construct
  source 1..75: mol_type = other DNA
agatacttgcgctattttgcgcaatgtcattcctaatgtatgtggaccgagtaaacttatcagctactgcggggt

SEQ ID NO: 192656 - DNA, 75 bp, synthetic construct
  source 1..75: mol_type = other DNA
ctggcttcgaaggtgcagaacacgctgaaagatgacccgttctccgggcatatctttgtcttccggggccgcaat

SEQ ID NO: 192657 - DNA, 75 bp, synthetic construct
  source 1..75: mol_type = other DNA
ccacggtcgagctcgctggttatatagtgagcattgcgcattcaaagaaaagctcctgaaccgcaacgatgggta

SEQ ID NO: 192658 - DNA, 75 bp, synthetic construct
  source 1..75: mol_type = other DNA
tgcgaaggacgcgatcctggggatctgacgaccattgatgatcctgcgtcgttggatcagatccgccaggcgatg

SEQ ID NO: 192659 - DNA, 75 bp, synthetic construct
  source 1..75: mol_type = other DNA
gactggcagacgccctttacgcaaacgctcgaccacagcaatccgccgtttgcccgttggttttgtgaaggccga

SEQ ID NO: 192660 - DNA, 75 bp, synthetic construct
  source 1..75: mol_type = other DNA
tccatggagagccctgataaaacgaatgggaccgacaatgggagtttatttctgttacggatggacaagttggtt

SEQ ID NO: 192661 - DNA, 75 bp, synthetic construct
  source 1..75: mol_type = other DNA
atgcaacacgaactacaacctgattcactggttgatttgaaattcatcatggccgatactggcttcggtaaaacc

SEQ ID NO: 192662 - DNA, 75 bp, synthetic construct
  source 1..75: mol_type = other DNA
atgagtaaaaagtttaacaaggaagatattgaattcgttctcgataaaataaatggctgggaaggcgatttaacc

SEQ ID NO: 192663 - DNA, 75 bp, synthetic construct
  source 1..75: mol_type = other DNA
ccatgttcgtaaaactgcgcaccgcccgctacctgaaagcccgtgcagatgcttccggtgtgacggtgggttaca

SEQ ID NO: 192664 - DNA, 75 bp, synthetic construct
  source 1..75: mol_type = other DNA
ctgaaaactcagggtgctgcggcattcgaaggtgcggtaatcgcttacgaaccagtatgggcaatcggtactggc

SEQ ID NO: 192665 - DNA, 75 bp, synthetic construct
  source 1..75: mol_type = other DNA
accggaaatgtacatcgatatggcgaagcgtgaagctgaaggcagccacatcatgctgggtgcgcaaaacgtgga

SEQ ID NO: 192666 - DNA, 75 bp, synthetic construct
  source 1..75: mol_type = other DNA
ggtgaaacttctgccgctatgctgaaagacatcggcgctcagtacatcatcatcggccactctgaacgtcgtact

SEQ ID NO: 192667 - DNA, 75 bp, synthetic construct
  source 1..75: mol_type = other DNA
ttcactcggtggtatttggtggatttgcttcgcacagcgtggcggcgcgaatcgacgacgccaaaccggtgctga

SEQ ID NO: 192668 - DNA, 75 bp, synthetic construct
  source 1..75: mol_type = other DNA
gcttcccgctggaagagcgtatttatcgtatgcgctgcgtggaagcgtggtcgatggtggtgccgtggattggtt

SEQ ID NO: 192669 - DNA, 75 bp, synthetic construct
  source 1..75: mol_type = other DNA
aacgtcaatccacatgttgatcatccccgttggtcgcaggctaccgaacggtttatcggttcaggtggcattctt

SEQ ID NO: 192670 - DNA, 75 bp, synthetic construct
  source 1..75: mol_type = other DNA
tatccggcgagaacgtctgccaaaagaactgggctatgcgctgaaacaacaactgaggattgtgataaagcgatg

SEQ ID NO: 192671 - DNA, 75 bp, synthetic construct
  source 1..75: mol_type = other DNA
cagcctggtgcagggtaaacaggcatcaggccgtccctggtggtaccggcaccgcacagaattaccccgtgaatg

SEQ ID NO: 192672 - DNA, 75 bp, synthetic construct
  source 1..75: mol_type = other DNA
ctgttttatctgcgctgattgtcctttccccatccgtttttgccgctaatgaacaaaccatgattgtgagtgcca

SEQ ID NO: 192673 - DNA, 75 bp, synthetic construct
  source 1..75: mol_type = other DNA
gaacagaccatgattgtcagtgccacgccgcaggtggtttcagaactggataccccagcagccgttagcgtggtg

SEQ ID NO: 192674 - DNA, 75 bp, synthetic construct
  source 1..75: mol_type = other DNA
atgaagattttttccgtccgacagaccgttttgcccgcactacttgccctttcccccgttgtttttgccgctgat

SEQ ID NO: 192675 - DNA, 75 bp, synthetic construct
  source 1..75: mol_type = other DNA
atttgcgaaggacgcgatcctggagatctgacgaccattgatgatccagcgtcgttggatcagatccgccaggcg

SEQ ID NO: 192676 - DNA, 75 bp, synthetic construct
  source 1..75: mol_type = other DNA
tggctataacgtgcagttgctcaatgaagtcaccggcgaaccgtgtggcgtcaacgagaaagggatgctggtggt

SEQ ID NO: 192677 - DNA, 75 bp, synthetic construct
  source 1..75: mol_type = other DNA
ccgttgaaaacctcagccgtatcagtaaaacggcggtgccggctgcttcagcaatggccattaaccgcgtggcca

SEQ ID NO: 192678 - DNA, 75 bp, synthetic construct
  source 1..75: mol_type = other DNA
cgccggaaactggttaaggaacggtccagactgaaactggccacggtcagaaatccgaatgccagaattatcgtt

SEQ ID NO: 192679 - DNA, 75 bp, synthetic construct
  source 1..75: mol_type = other DNA
atctcgactcagttgaaaaactattttgacctggttgcacgcgcaggcgttactttccgctataccgagaatggt

SEQ ID NO: 192680 - DNA, 75 bp, synthetic construct
  source 1..75: mol_type = other DNA
ggctcagcctgatcatccgtgacgtggaaatatctgctgcagtatacggggtgaaccacacggagattgtccacg

SEQ ID NO: 192681 - DNA, 75 bp, synthetic construct
  source 1..75: mol_type = other DNA
cactggtcggcgactatgcgctctatgccgtacagcgcccgagcacaatcaccttattgggcgctgtctccgggg

SEQ ID NO: 192682 - DNA, 75 bp, synthetic construct
  source 1..75: mol_type = other DNA
taatttttgcatctctttcattgggagcatctcctgtatcagcagaaaataactccattctttattttaataaaa

SEQ ID NO: 192683 - DNA, 75 bp, synthetic construct
  source 1..75: mol_type = other DNA
cattaagggttggtgatgctaagaaattcgcggccagacttggtgtatcgccatcttacttatcgcaaatggcgt

SEQ ID NO: 192684 - DNA, 75 bp, synthetic construct
  source 1..75: mol_type = other DNA
ggctgataaatgactctgcacttcggtttatccttcagccagcgctgggtttcccggcctttgtggataatgtag

SEQ ID NO: 192685 - DNA, 75 bp, synthetic construct
  source 1..75: mol_type = other DNA
ctggatggcgaactggttggtgcactgcgtccgagcgatgcgccgctgactccacgtcagcaggaagctctggcg

SEQ ID NO: 192686 - DNA, 75 bp, synthetic construct
  source 1..75: mol_type = other DNA
cctggctgcaaatccgattccggtactggatggcgaactggttggtgcactgcatccgagcgatgcgccgctgac

SEQ ID NO: 192687 - DNA, 75 bp, synthetic construct
  source 1..75: mol_type = other DNA
atgagttactttggccttaatccagtaaaccagaatcagcagcttgacgaagcagcatcaaatccagcgggcttt

SEQ ID NO: 192688 - DNA, 75 bp, synthetic construct
  source 1..75: mol_type = other DNA
ggcagtgatgccccttgcggcgaaggttctcaaaaaggtgatggtgaataccggagggaacaaaaggcaggtccc

SEQ ID NO: 192689 - DNA, 75 bp, synthetic construct
  source 1..75: mol_type = other DNA
cgtgaacggagccagcggagctgtctccgcccaggcgggcttccatccctgacgcaaaaccccgggcttacagcg

SEQ ID NO: 192690 - DNA, 75 bp, synthetic construct
  source 1..75: mol_type = other DNA
gcgcttcacgtcgttgcggcgggtgcctgcccgttgttatgtccggtgccattcacctgtttaagcccctgtcgc

SEQ ID NO: 192691 - DNA, 75 bp, synthetic construct
  source 1..75: mol_type = other DNA
cgttggataagagacatgtatttgccgcagggagccgagcttgaaggtaagatggttcgctttgtttcgtatgcc

SEQ ID NO: 192692 - DNA, 75 bp, synthetic construct
  source 1..75: mol_type = other DNA
ataattcggtcaccggctataaccgctatcgcgcgggagaggtcgatctcacctgggttccggcgcagcaaattc

SEQ ID NO: 192693 - DNA, 75 bp, synthetic construct
  source 1..75: mol_type = other DNA
atgaatgaacttaaaaagcgtttgcaacagctcagctcacgggaacgcagattgcttaccgggggggggggacta

SEQ ID NO: 192694 - DNA, 75 bp, synthetic construct
  source 1..75: mol_type = other DNA
ccggacggtaaccggtggcccgcccgtaaaaaacgtgtattccgtgtccaggcaggtgtggtgttcatctggaac

SEQ ID NO: 192695 - DNA, 75 bp, synthetic construct
  source 1..75: mol_type = other DNA
cgctgtttgccgcactggatatcaacgccaaaatgcatgaaggtgtcagcggtcgtaatatgtggatggattgtg

SEQ ID NO: 192696 - DNA, 75 bp, synthetic construct
  source 1..75: mol_type = other DNA
gggtgcacaggtgacgctgcgcacaatggagtggaaaacctatcttgatgcccgacgagccggtgatttcatgct

SEQ ID NO: 192697 - DNA, 75 bp, synthetic construct
  source 1..75: mol_type = other DNA
ggtagttaacgaaaagattactgcacgcaaaaatccaaagtaccgcgatgcgcaacatacagtattgcaacaggt

SEQ ID NO: 192698 - DNA, 75 bp, synthetic construct
  source 1..75: mol_type = other DNA
gggcagttgcgattcagactggctaatcaccgggctaacaacactgtaatgaataagttccatattaacgtgcca

SEQ ID NO: 192699 - DNA, 75 bp, synthetic construct
  source 1..75: mol_type = other DNA
gatatcaagattggagcaccgggtgagctgttgttgcatacaattgatatcgggatgttgaccactccccgggat

SEQ ID NO: 192700 - DNA, 75 bp, synthetic construct
  source 1..75: mol_type = other DNA
atgaagtcgggcataacttcggtcttggtcattatgtgggtggcttcagggggtccgtgcatcgcagcgctgacc

SEQ ID NO: 192701 - DNA, 75 bp, synthetic construct
  source 1..75: mol_type = other DNA
ctgaaactttcgttagccgattagatatgttacgagctctggatgatcgcggctcgacccggaggctctatcttg

SEQ ID NO: 192702 - DNA, 75 bp, synthetic construct
  source 1..75: mol_type = other DNA
ctacgcccggatcgtgaaacaatgagttacggtgtactgacaccagaagatttagtgagggcttactattactat

SEQ ID NO: 192703 - DNA, 75 bp, synthetic construct
  source 1..75: mol_type = other DNA
tgatccttgcctctctggcgatgggagcatttgctgcaactgctgctgataataattcagccatttatttcaata

SEQ ID NO: 192704 - DNA, 75 bp, synthetic construct
  source 1..75: mol_type = other DNA
gatgaaaacgttgaccgtatccggcgtgaacgcctgcccggagaactggcatatgcgctgaaacaacaactgagg

SEQ ID NO: 192705 - DNA, 75 bp, synthetic construct
  source 1..75: mol_type = other DNA
ccattgatgtggtgaaaatcccgatggcggccccactgaaacaggcatttgatgagaatgttgaccgtatccggt

SEQ ID NO: 192706 - DNA, 75 bp, synthetic construct
  source 1..75: mol_type = other DNA
taaaaacgccattcctgctgcttcagcaatggccattaaccgcgtggccacaacggcaataaatcagtctgcgtc

SEQ ID NO: 192707 - DNA, 75 bp, synthetic construct
  source 1..75: mol_type = other DNA
gggctttacacgcaacctttttcccctggaatgcgccgtgggagaaaagcgccggtggcgggcatactgaatggt

SEQ ID NO: 192708 - DNA, 75 bp, synthetic construct
  source 1..75: mol_type = other DNA
cgtttggcaatagttaatcttgagcgggctttacacgcaacctttttcccctggaatgcgccgtgggagaaaagc

SEQ ID NO: 192709 - DNA, 75 bp, synthetic construct
  source 1..75: mol_type = other DNA
tgcctgcatttatggcttatggttattgtacgcctctggcccaatgcacctgctgttgtccgtcgttctgtatgc

SEQ ID NO: 192710 - DNA, 75 bp, synthetic construct
  source 1..75: mol_type = other DNA
acgtactgaaccgtcaggaaatggtgctgattggcatgctgttaattgcctcagttccggcgacctggatgctgg

SEQ ID NO: 192711 - DNA, 75 bp, synthetic construct
  source 1..75: mol_type = other DNA
gggtattcattggcgtggaaggtgcagtggtggtttctgcgcgagcgcgtaataaacatgatgtcggcaaagcaa

SEQ ID NO: 192712 - DNA, 75 bp, synthetic construct
  source 1..75: mol_type = other DNA
aaagtgccggacccgaaattctcctcccagaccaaagacaaactggtttcttctgaggtgaaatcggcggttgaa

SEQ ID NO: 192713 - DNA, 75 bp, synthetic construct
  source 1..75: mol_type = other DNA
aaagcgacactgctggcggttctctccgctctgggcgtttacttgctggtaacgctgctttcgctgggcgtggtg

SEQ ID NO: 192714 - DNA, 75 bp, synthetic construct
  source 1..75: mol_type = other DNA
tgtggtggtttcggcgcgcgcacgtaataaacgtgacgttggcaaggcgacgctactggcggtgctttcggcgct

SEQ ID NO: 192715 - DNA, 75 bp, synthetic construct
  source 1..75: mol_type = other DNA
aatctcgttacccggtagaagtggtgaaaatacctctgtccacccccctgactactgcattcaaagaagaacttc

SEQ ID NO: 192716 - DNA, 75 bp, synthetic construct
  source 1..75: mol_type = other DNA
aaatccgaatgccagaattatcgttaaccgcggtgatctccctgtgattaagctggggatcaggatgctggggcg

SEQ ID NO: 192717 - DNA, 75 bp, synthetic construct
  source 1..75: mol_type = other DNA
gaatgagtggctggcagaggtggttacccggaaattgcaggacagcttttatataacgtttcctgggatgcgctg

SEQ ID NO: 192718 - DNA, 75 bp, synthetic construct
  source 1..75: mol_type = other DNA
gtggcgacgtagtgggtatgtctgtagtgcctgaagtgattagcgcacgtcattgcgaaatgaaagtcgttgccg

SEQ ID NO: 192719 - DNA, 75 bp, synthetic construct
  source 1..75: mol_type = other DNA
ggtgtgcctgtagcctgcatgaaaggtcgcggtcatttttatgagggccggggaatgacagtcatgactgatgct

SEQ ID NO: 192720 - DNA, 75 bp, synthetic construct
  source 1..75: mol_type = other DNA
caaaacggcggtgcccggtgccgccgcaatggccattagccaggtaacacagtgttatgacagcccgccggttca

SEQ ID NO: 192721 - DNA, 75 bp, synthetic construct
  source 1..75: mol_type = other DNA
ggtcagcatcgttatcagcgggcattcatccagcgattaaataatgggcgctggcatgttatgcaacgtttgcca

SEQ ID NO: 192722 - DNA, 75 bp, synthetic construct
  source 1..75: mol_type = other DNA
atccggcgtgaacgcctgcctaaagaactggcatacgcgctgaaacaacaactgaggattgcgataaaacgatga

SEQ ID NO: 192723 - DNA, 75 bp, synthetic construct
  source 1..75: mol_type = other DNA
tccagcgattaaataatgggcgctggcatgttatgcaacgtcttccccaggccagatatgaggagggcaatgacg

SEQ ID NO: 192724 - DNA, 75 bp, synthetic construct
  source 1..75: mol_type = other DNA
cgcacgccacacctgacgggcatctggttaaacaaaccggtaaacacacctggctgattaatgatgccggaattg

SEQ ID NO: 192725 - DNA, 75 bp, synthetic construct
  source 1..75: mol_type = other DNA
ctactgggatattccggctggacagtccgcaccctctgtatacgtctgtacagcctgcttcagggtaagcaggca

SEQ ID NO: 192726 - DNA, 75 bp, synthetic construct
  source 1..75: mol_type = other DNA
agcaacatccgctacagcctgagcgagacgcacgcaacacctgatggccacacagtaaaacaaattggcgaacac

SEQ ID NO: 192727 - DNA, 75 bp, synthetic construct
  source 1..75: mol_type = other DNA
tcgggcaggatttcacattatacgaagcacttcgcacggttgatcgtctgcttcgcggacaaagttttattaaac

SEQ ID NO: 192728 - DNA, 75 bp, synthetic construct
  source 1..75: mol_type = other DNA
actccaaatttcgtaatggcgtagaacgccatgctaaccgtttcgctaccagcgcatcacgtagcagctctcgct

SEQ ID NO: 192729 - DNA, 75 bp, synthetic construct
  source 1..75: mol_type = other DNA
ccgatccatggacactgaaaatcagcggcgaagtggcaaaaccattgaccctcgatcacgatgatttaacccgtc

SEQ ID NO: 192730 - DNA, 75 bp, synthetic construct
  source 1..75: mol_type = other DNA
atacgccacgctgcgaagcctcaaccaaatcattacctacgacgcgtaccatatggcggaggtttacctgaccca

SEQ ID NO: 192731 - DNA, 75 bp, synthetic construct
  source 1..75: mol_type = other DNA
ggttgggaaaacaatgtgaaatctattgatgccctgccatacgttgacgcgggttcaaacgcccgaaccagcgat

SEQ ID NO: 192732 - DNA, 75 bp, synthetic construct
  source 1..75: mol_type = other DNA
ctggcatgttatgcaacgtctgccagaagcccggtatgcgaagggcaatgacgataagggaaggaaaaagcgtaa

SEQ ID NO: 192733 - DNA, 75 bp, synthetic construct
  source 1..75: mol_type = other DNA
tatccgacgcgaacgtctgccaaaagaactgagctatgcgctgaaacaacaactgagtattgcgataaaacgatg

SEQ ID NO: 192734 - DNA, 75 bp, synthetic construct
  source 1..75: mol_type = other DNA
agccaacgctactgtttaatggttacgccgaccaggtggcatcgctgtatcgtggcctgaatttgcgggagaatt

SEQ ID NO: 192735 - DNA, 75 bp, synthetic construct
  source 1..75: mol_type = other DNA
tccgcaacggggcggaacgccacgctaaccgcttcgctaccagtgcatcacgtagcagctctcgctacagcctga

SEQ ID NO: 192736 - DNA, 75 bp, synthetic construct
  source 1..75: mol_type = other DNA
tcggggaaacccggttccgcatggcggacggctcattgctctgcaaggacgtgccgattgccagaacgggatctc

SEQ ID NO: 192737 - DNA, 75 bp, synthetic construct
  source 1..75: mol_type = other DNA
cacagccttacctgagggaaatcgcaccactacggacgaaggcgatccgaacaaaggcaaaaccggcaccggcga

SEQ ID NO: 192738 - DNA, 75 bp, synthetic construct
  source 1..75: mol_type = other DNA
tcaccatcaacattccttcacaggccacagccttacctgagggaaatcgcaccactacggacgaaggcgatccga

SEQ ID NO: 192739 - DNA, 75 bp, synthetic construct
  source 1..75: mol_type = other DNA
accggttccgattacaacacgttgctgaccatcgcctcagaaatgattctggtgccctatttcctggtcggcgcg

SEQ ID NO: 192740 - DNA, 75 bp, synthetic construct
  source 1..75: mol_type = other DNA
gccggacatgccatctgacggcatgggttccatccccggcgtaaccatcaacatgaacgtgccttcacaggctac

SEQ ID NO: 192741 - DNA, 75 bp, synthetic construct
  source 1..75: mol_type = other DNA
gaacttcgcggagctggcccatggccatatccagaacgtccgccgcggcaccggcgataaaaccgacctgttgat

SEQ ID NO: 192742 - DNA, 75 bp, synthetic construct
  source 1..75: mol_type = other DNA
ccccgtaaaacaaattggtgaacacacttggctgattgagaaagctggaatcgtgatccacaaatgcccacgcaa

SEQ ID NO: 192743 - DNA, 75 bp, synthetic construct
  source 1..75: mol_type = other DNA
tcgtggttcacagatgcccacgcaatccgtttaccggaaaccgcatttttgcactaagcagcggcgataatcagt

SEQ ID NO: 192744 - DNA, 75 bp, synthetic construct
  source 1..75: mol_type = other DNA
agtgcatcacgtagtaacagtcgctataacctgaacgagacgcatgcaacaccggatggccacgctgtaaaacaa

SEQ ID NO: 192745 - DNA, 75 bp, synthetic construct
  source 1..75: mol_type = other DNA
tgacgcgcagtacaagcagctggcacccggtaagggcaagcaataccaaatcacaggtaaccacctcgctgtcgg

SEQ ID NO: 192746 - DNA, 75 bp, synthetic construct
  source 1..75: mol_type = other DNA
gtgaactattcattacgccatagccagttagaaagcgtaagcagttttattgcctatcggcaaaagcaaatgcat

SEQ ID NO: 192747 - DNA, 75 bp, synthetic construct
  source 1..75: mol_type = other DNA
acctggctgattgaaaaagctggaatcgtggttcagagatgccaacgcaacccatttaccggaaaccgcattttt

SEQ ID NO: 192748 - DNA, 75 bp, synthetic construct
  source 1..75: mol_type = other DNA
agacaggtttaccagtctgaaatcgctaatagccaacgaattattgaaaatctcactgaacagcgtgcacaaatt

SEQ ID NO: 192749 - DNA, 75 bp, synthetic construct
  source 1..75: mol_type = other DNA
catcttcatatgatcctggtgttattaccagggcaaacaccctggattcacagatgcttagtaaaggcacaaatg

SEQ ID NO: 192750 - DNA, 75 bp, synthetic construct
  source 1..75: mol_type = other DNA
cctcttatccagagggggcattagtaacgtttgataggccatttgaaataattgccaattcatatgaagaatacc

SEQ ID NO: 192751 - DNA, 75 bp, synthetic construct
  source 1..75: mol_type = other DNA
gagcagcttactactcaacacgatcaggctactgcgcaggtgcataataaacaggaaatttattgtataaacttt

SEQ ID NO: 192752 - DNA, 75 bp, synthetic construct
  source 1..75: mol_type = other DNA
gtaaagatggtattaagattgatgattctattattacgagttttaaagcctctaaagatgttggaatttcaaatg

SEQ ID NO: 192753 - DNA, 75 bp, synthetic construct
  source 1..75: mol_type = other DNA
gtctaagaatccagctaacttttcaggaaattaacttcaaagctattgtagggcaaactgatgtttctgctgcta

SEQ ID NO: 192754 - DNA, 75 bp, synthetic construct
  source 1..75: mol_type = other DNA
gcgacttagaaagagagcttaatacctggatccgtcagtatgttgccgaccaggaaaacccgcctgcagacgtgc

SEQ ID NO: 192755 - DNA, 75 bp, synthetic construct
  source 1..75: mol_type = other DNA
ggggaaggtggtctttatcaccttgcggtcgctggtaagcatggcttagagcgtggtgatgcagttgccagagtg

SEQ ID NO: 192756 - DNA, 75 bp, synthetic construct
  source 1..75: mol_type = other DNA
ttcaggagcacgggcttaaccaggatgatatcttaatcacacctgtaacaagagaagaaatcgcctttaaaggaa

SEQ ID NO: 192757 - DNA, 75 bp, synthetic construct
  source 1..75: mol_type = other DNA
cccgcgtgctggcagccattgacgcgcgaatgggcgaagtttactgggccgaatatcagcgtgatgaaaacggta

SEQ ID NO: 192758 - DNA, 75 bp, synthetic construct
  source 1..75: mol_type = other DNA
aacaggccaccgaacaggaacaggccaccgaacaggcacagaccacagagcaagcacaggccaccgagcaagcac

SEQ ID NO: 192759 - DNA, 75 bp, synthetic construct
  source 1..75: mol_type = other DNA
aaagaattttgcaatattgttaatgaattaggaattgacagaacacaggctttgattcaggagcagcttacttct

SEQ ID NO: 192760 - DNA, 75 bp, synthetic construct
  source 1..75: mol_type = other DNA
ggagcgtcatgaaattgagaaagcacagggacgggattgcacgccggaagacggcaagattcttgaggcaattga

SEQ ID NO: 192761 - DNA, 75 bp, synthetic construct
  source 1..75: mol_type = other DNA
gtcagtaatagttttcctgacggtcgtgataaagaacgagcgcaggggcgtctgccctttattgagccaggggaa

SEQ ID NO: 192762 - DNA, 75 bp, synthetic construct
  source 1..75: mol_type = other DNA
atgtcgctcaaacaattctcggacagctggggagccagcgatttgttgttatgaccggcgctaaaaatctggctt

SEQ ID NO: 192763 - DNA, 75 bp, synthetic construct
  source 1..75: mol_type = other DNA
aactgggagaaatcgcccacgacaaactggagcacctggaaatcatctctggcggtacaccgtgtaatgtgtttg

SEQ ID NO: 192764 - DNA, 75 bp, synthetic construct
  source 1..75: mol_type = other DNA
agtaaagagcataccattgctaatggtcttcgtattcagatgaccttccaaggtgtagagtttcgttcaatcgta

SEQ ID NO: 192765 - DNA, 75 bp, synthetic construct
  source 1..75: mol_type = other DNA
cacaattctcaggatgcggatgagtttctcgaagaggccggacgggcgttgcaggccgccattaagggattgctg

SEQ ID NO: 192766 - DNA, 75 bp, synthetic construct
  source 1..75: mol_type = other DNA
tacgccggaatgtcactggcaggtacaggaccgggcgggaagcattgctgcgcgtgcctgtaccgttatccggca

SEQ ID NO: 192767 - DNA, 75 bp, synthetic construct
  source 1..75: mol_type = other DNA
tatcggagcgcgaggggatttattgcgatcagctgcagtggctttttacccgggagaccgggctgtatacacgac

SEQ ID NO: 192768 - DNA, 75 bp, synthetic construct
  source 1..75: mol_type = other DNA
ttccattattacgagttttaaagcctctaaagatgttggtatttcaaatggtctaagaatccagctaacttttca

SEQ ID NO: 192769 - DNA, 75 bp, synthetic construct
  source 1..75: mol_type = other DNA
cagaaacaaattatttcagtgatttgtaaagatggtatcaagattgatgactcaattattaccaactttaaagcc

SEQ ID NO: 192770 - DNA, 75 bp, synthetic construct
  source 1..75: mol_type = other DNA
caggggatgagtaaagttgcgctggtgaacgccgaactggggtggggaatttacgagaaattcgacaccatgcag

SEQ ID NO: 192771 - DNA, 75 bp, synthetic construct
  source 1..75: mol_type = other DNA
acgggttcagttctattaaccagacaggggcaacttgtagaaacctttatttctacggttgaacaatggcgagac

SEQ ID NO: 192772 - DNA, 75 bp, synthetic construct
  source 1..75: mol_type = other DNA
ctccattattacaagctttaaagcctctaaagatgttggtatttcaaatggtctaagaatccagctaacttttca

SEQ ID NO: 192773 - DNA, 75 bp, synthetic construct
  source 1..75: mol_type = other DNA
acagtggcaaagatggcgtttacttccatctacaaggccaaccagataatttcttgtcactatcagctactgaga

SEQ ID NO: 192774 - DNA, 75 bp, synthetic construct
  source 1..75: mol_type = other DNA
taatcagttcagtcggtttgctgactggaatgacgacaggaaccggcctgtttcaatgatgggattcagaaaagt

SEQ ID NO: 192775 - DNA, 75 bp, synthetic construct
  source 1..75: mol_type = other DNA
gtgaaaacaccgtctgtatccacaatttcaggggctgcaattggccgttggccttatatcctgtcagcattaggt

SEQ ID NO: 192776 - DNA, 75 bp, synthetic construct
  source 1..75: mol_type = other DNA
tctgttgtttctgtctaccggggaactgtcactggtagagcatgcggcaagcgccggggaacgtacgtatgccgg

SEQ ID NO: 192777 - DNA, 75 bp, synthetic construct
  source 1..75: mol_type = other DNA
tagccagagaacggagaggcctgacacaaagagctttagctgaagctacagaattgactagtaagacgatttcga

SEQ ID NO: 192778 - DNA, 75 bp, synthetic construct
  source 1..75: mol_type = other DNA
aatgctgaacgttgccgcacgccgcgctgccgcgttgaaggctgacaatgtgcactgggttcaacgcgcctggga

SEQ ID NO: 192779 - DNA, 75 bp, synthetic construct
  source 1..75: mol_type = other DNA
ctggtcgccaaaattgatctacaaggcgcagagtcactatttgatatgggctgtgggccgggcaccgtatcactg

SEQ ID NO: 192780 - DNA, 75 bp, synthetic construct
  source 1..75: mol_type = other DNA
gcagccagtgtggcaatggtgacggtctggatctggttaagctcgtaaccggttacaacgtcagaaaggctgcgc

SEQ ID NO: 192781 - DNA, 75 bp, synthetic construct
  source 1..75: mol_type = other DNA
ctgcagacaaccattcgcccgccagagatgaatccccgcagactctatgtcttcaacagcgaggtgccgggttaa

SEQ ID NO: 192782 - DNA, 75 bp, synthetic construct
  source 1..75: mol_type = other DNA
cagccgcactggctggcatggtcaggtttacgtcctgcaggatgaggtcagcggtgaaggtgcagagggtgtcat

SEQ ID NO: 192783 - DNA, 75 bp, synthetic construct
  source 1..75: mol_type = other DNA
tataggccgttattgcataaagaatgcccgtcttgcctttgcggtgagtctggcatttgctgccccccttctgaa

SEQ ID NO: 192784 - DNA, 75 bp, synthetic construct
  source 1..75: mol_type = other DNA
gacgctgcatggcaaagggcagacccgtttaccagaagggttccggctgacaaaagaatatttgtggtacgacaa

SEQ ID NO: 192785 - DNA, 75 bp, synthetic construct
  source 1..75: mol_type = other DNA
tcccttgctgtcacagcctttgaatctggccggaataacattttcctccggttcattactgctgccgttgacgga

SEQ ID NO: 192786 - DNA, 75 bp, synthetic construct
  source 1..75: mol_type = other DNA
tcgaatgtttgcgcacctgactaaccgctcactcagctttatcactctcgcctgcgtcacagttatcatgctccc

SEQ ID NO: 192787 - DNA, 75 bp, synthetic construct
  source 1..75: mol_type = other DNA
caccgcaacgagccaggcgcaatatgtgaaccgggtgctggagcgcgatctgttctacgcaattgatatgccatt

SEQ ID NO: 192788 - DNA, 75 bp, synthetic construct
  source 1..75: mol_type = other DNA
cactgtcagcccacaacacttttatctggtcaccccggcgtccgcggaagatgaacaggtgtccggagaacgggt

SEQ ID NO: 192789 - DNA, 75 bp, synthetic construct
  source 1..75: mol_type = other DNA
ctggagcagctgcggttgatgagcgcggggatcaacatcataagcgctaacttaagggttgtggtattacgcctg

SEQ ID NO: 192790 - DNA, 75 bp, synthetic construct
  source 1..75: mol_type = other DNA
gcaagcctggccggatctcggtaaagagagcgggctggttttgcgcgatggcgaagtgttactgcccgccgcaga

SEQ ID NO: 192791 - DNA, 75 bp, synthetic construct
  source 1..75: mol_type = other DNA
caagcgccggccgcgggaagttcttcattgagggcggtggcgttattgcctggagtcagtgcgaaagttaccggc

SEQ ID NO: 192792 - DNA, 75 bp, synthetic construct
  source 1..75: mol_type = other DNA
atggagcgcagcgccatgcgctttatcagcgcgctgaccatggagagcatcatcaaccatatttcggtgctcaac

SEQ ID NO: 192793 - DNA, 75 bp, synthetic construct
  source 1..75: mol_type = other DNA
agcgcgctacctgaaacacgttggtatttacgcttatcgtcgcgatgtgctgcaaaactacagccagttaccgga

SEQ ID NO: 192794 - DNA, 75 bp, synthetic construct
  source 1..75: mol_type = other DNA
gggcgttgcggaagtttgggtggcaacagacgatcagcgtgttgaaaaggccgtgcaggcatttggcgggaaagc

SEQ ID NO: 192795 - DNA, 75 bp, synthetic construct
  source 1..75: mol_type = other DNA
gtcggcaaaccgatgatccagcatgtttacgagcgtgcgttacaggtggcgggcgtcgcagaagtttgggtggca

SEQ ID NO: 192796 - DNA, 75 bp, synthetic construct
  source 1..75: mol_type = other DNA
acattaacctgcagggcgacgaaccaatgattcgcccgcgggatgtagaaacgctgttacaaggaatgcgtgatg

SEQ ID NO: 192797 - DNA, 75 bp, synthetic construct
  source 1..75: mol_type = other DNA
tccggcaccgatcggctggtcgaggtgatgcataaagtcgaggcagatatctacattaacctgcagggcgacgaa

SEQ ID NO: 192798 - DNA, 75 bp, synthetic construct
  source 1..75: mol_type = other DNA
gccgggtaagccactactcgatattgttggcaaaccgatgatccagcatgtttacgagcgtgcgttacaggtggc

SEQ ID NO: 192799 - DNA, 75 bp, synthetic construct
  source 1..75: mol_type = other DNA
cgctctctattcgtcacatcactggcaaaccgatcaagttcctcggtgttggcgagaaaaccgaggcgctggagc

SEQ ID NO: 192800 - DNA, 75 bp, synthetic construct
  source 1..75: mol_type = other DNA
aagagaaagcggttggtcatgaagttaataagagcctgacgccggggcaggagttcgtcaaaatcgtccgtaacg

SEQ ID NO: 192801 - DNA, 75 bp, synthetic construct
  source 1..75: mol_type = other DNA
agcgccggacggctgaatggtcagtgagtaacaccggattaaccggatatatagaaggctataacgactgtttac

SEQ ID NO: 192802 - DNA, 75 bp, synthetic construct
  source 1..75: mol_type = other DNA
ggccggccatgacggtggcatcagcgccgcaggtggtgaaggtgaaactgggagacggttatgaacagcgtcgtc

SEQ ID NO: 192803 - DNA, 75 bp, synthetic construct
  source 1..75: mol_type = other DNA
tattcaccgggtataaatacaattaccacaatttaactgtggatttatttggtcgtgtcgataatttattcgata

SEQ ID NO: 192804 - DNA, 75 bp, synthetic construct
  source 1..75: mol_type = other DNA
aaacatgggcggcatggccagcctgatgggcaaactgccgggtatggggcagatcccggagaacgtgaagtcgca

SEQ ID NO: 192805 - DNA, 75 bp, synthetic construct
  source 1..75: mol_type = other DNA
ggtatcgaagcagtccagccgtatttccgcgcgcgggatccttgagagtaaattccttgagctgaagcagaagtt

SEQ ID NO: 192806 - DNA, 75 bp, synthetic construct
  source 1..75: mol_type = other DNA
gggcggtgagcatcgtctgcatgaccgctttttgtaccagcgtgaaaatgaggcgtggaaaatcgatcgtctcgc

SEQ ID NO: 192807 - DNA, 75 bp, synthetic construct
  source 1..75: mol_type = other DNA
aaatcgcgcatctgcgccgtgaatacaccaaaggcgggttacgccgtcgcgatcttcccgccgatccattaaccc

SEQ ID NO: 192808 - DNA, 75 bp, synthetic construct
  source 1..75: mol_type = other DNA
tttaccgccagttgattaacgagcttgcggatacggcccgatattacgccggaacacaacagctacgcgggcggc

SEQ ID NO: 192809 - DNA, 75 bp, synthetic construct
  source 1..75: mol_type = other DNA
atgactatggacaaggccatcaagcgccgttcggctgattggtcagttagtaatactgggttaaccggatacatt

SEQ ID NO: 192810 - DNA, 75 bp, synthetic construct
  source 1..75: mol_type = other DNA
aaatcgcgcatctgcgccgtgaatacaccaaaggcgggttacgccgccgcgatcttcctgccgatccattaaccc

SEQ ID NO: 192811 - DNA, 75 bp, synthetic construct
  source 1..75: mol_type = other DNA
gccctgatatgactgtggcatcggaaccgaaggtgttgacggtaaagctgggggatggctatgagcagcggcgac

SEQ ID NO: 192812 - DNA, 75 bp, synthetic construct
  source 1..75: mol_type = other DNA
gccaccacgaagaagctaaccgggcagcgattgtggagtcgcttcgtgtcctgctggatgctttctcaccacaaa

SEQ ID NO: 192813 - DNA, 75 bp, synthetic construct
  source 1..75: mol_type = other DNA
catgaactgcgccagccgctggatgatgccggagcatggcaaatgtacagccattattacgaagaactggcctcc

SEQ ID NO: 192814 - DNA, 75 bp, synthetic construct
  source 1..75: mol_type = other DNA
gcccatttatgccagccccggcgatcgtaatgatgacgtctctgtggcagaaatggcgcaacgccaccttgcggt

SEQ ID NO: 192815 - DNA, 75 bp, synthetic construct
  source 1..75: mol_type = other DNA
aggcaggagatattgatctgcgcatagctgaagactcgctgcttgaatcacctgacatgataatcaccgtgctgg

SEQ ID NO: 192816 - DNA, 75 bp, synthetic construct
  source 1..75: mol_type = other DNA
tgcttcttctttctgcaagttcatttgcacaacaattccattatcagtgtgaaggacgagatttaaagataatgc

SEQ ID NO: 192817 - DNA, 75 bp, synthetic construct
  source 1..75: mol_type = other DNA
gacaccgctgtccgatccagcaactaatggcgggatcaatactccgtttatggatctgccacccatttatgccag

SEQ ID NO: 192818 - DNA, 75 bp, synthetic construct
  source 1..75: mol_type = other DNA
gggcttctctgagtttgagaaattgactgctcagggcgtagatttcaggaccgctcaggaagctggtctggtgca

SEQ ID NO: 192819 - DNA, 75 bp, synthetic construct
  source 1..75: mol_type = other DNA
tttcagtggacgccaccttatgactggaagccgatcagggtggtttgtcgtaaatggtcggcaagcgtgggggcg

SEQ ID NO: 192820 - DNA, 75 bp, synthetic construct
  source 1..75: mol_type = other DNA
tacatcaagccggggatgagcgttgaagcaatccagggcatcatcgccagcatgaaaggtgactatgaagatcgt

SEQ ID NO: 192821 - DNA, 75 bp, synthetic construct
  source 1..75: mol_type = other DNA
ttggtccccggcttgaggacatggtcagggaaggaaattatgttcgcagcgtcgcgctgatgcgtaacagtatcc

SEQ ID NO: 192822 - DNA, 75 bp, synthetic construct
  source 1..75: mol_type = other DNA
tgatggtggttttcgcgcgcatcacaacgccctgatttatgccgctaatgaattggaagatgccctggctttcgg

SEQ ID NO: 192823 - DNA, 75 bp, synthetic construct
  source 1..75: mol_type = other DNA
gactatcaggctgcgatcgacatcttgcgcgacagagctgctcgcgaacttgatggtggttttcgcgcgcatcac

SEQ ID NO: 192824 - DNA, 75 bp, synthetic construct
  source 1..75: mol_type = other DNA
tctactaatcttggactatcatttagatggagaggactctggatattgtaaaaaatctatagatattattaaaaa

SEQ ID NO: 192825 - DNA, 75 bp, synthetic construct
  source 1..75: mol_type = other DNA
gctaggagacagctactataacgatctaatggagtatgctgtgcccctcgataatcgggcgctcatggcattaaa

SEQ ID NO: 192826 - DNA, 75 bp, synthetic construct
  source 1..75: mol_type = other DNA
acctataacggccagcccgtcgaacagtttgatgcctggatcaaagatggtgacgcgaagcagctcacgctatgg

SEQ ID NO: 192827 - DNA, 75 bp, synthetic construct
  source 1..75: mol_type = other DNA
ccatatcagaattactttctgttaatagaaaatatgttgttccaagatttcaacgcgaatattcttgggtaaaag

SEQ ID NO: 192828 - DNA, 75 bp, synthetic construct
  source 1..75: mol_type = other DNA
ataaaattaggcaaataattgctagtcgtaatggtgtcggttctatcgagacatttatccgtcattggtgggtgt

SEQ ID NO: 192829 - DNA, 75 bp, synthetic construct
  source 1..75: mol_type = other DNA
tgggaaatcgaagatccaagtatcagggaagatctaattaattcagtttctacattagatttacttttcttgatt

SEQ ID NO: 192830 - DNA, 75 bp, synthetic construct
  source 1..75: mol_type = other DNA
cctgtccgtaccgcgtgcgctttatccatccggtcacgaagacggcggacaaatgcgatttctgccgtaagacca

SEQ ID NO: 192831 - DNA, 75 bp, synthetic construct
  source 1..75: mol_type = other DNA
gagtggaaggatgtggaaatccagacgctggggactgccagtgcaccgtcgcatgaaaaggaactgcgtatttcc

SEQ ID NO: 192832 - DNA, 75 bp, synthetic construct
  source 1..75: mol_type = other DNA
aatcaggagtttgtgtttgcagagtgttactccaccgccatagcagcactgattctggctgccgtcaccctgtat

SEQ ID NO: 192833 - DNA, 75 bp, synthetic construct
  source 1..75: mol_type = other DNA
ccaaaaggcagcagaaagccatcgatacagcggctctaatccggcaggaaccgccgcagggtgatgatatggcgt

SEQ ID NO: 192834 - DNA, 75 bp, synthetic construct
  source 1..75: mol_type = other DNA
cttttcgcgatgctgccagcgggattgtcgatgttaacccggatctctgcgtcggttgtcagtactgcatcgccg

SEQ ID NO: 192835 - DNA, 75 bp, synthetic construct
  source 1..75: mol_type = other DNA
atcctaacagtgagatttcgcaactgctgcgccagaagcctacttaccgctacaagctggcgctgggaaccaaac

SEQ ID NO: 192836 - DNA, 75 bp, synthetic construct
  source 1..75: mol_type = other DNA
atgtcctgaaaataaaaaaacacgcttcggggcgttatttcttgatgagtgtgcgacatggctgaatacccgtgg

SEQ ID NO: 192837 - DNA, 75 bp, synthetic construct
  source 1..75: mol_type = other DNA
tattgaaggtatcgcgttaagcaatattcgcaaagccgcgttatctatgtgcgcaggtggtgtaggatattaccc

SEQ ID NO: 192838 - DNA, 75 bp, synthetic construct
  source 1..75: mol_type = other DNA
agcactgacagaccgctattccgaacggaaagcggccggccacgtcatcgacgaggccaccgatctttcatccat

SEQ ID NO: 192839 - DNA, 75 bp, synthetic construct
  source 1..75: mol_type = other DNA
atgatggacgtatgggcactgttgcaaagttagcgatgaggcagccttttgtcttattcaaaggccttacatttc

SEQ ID NO: 192840 - DNA, 75 bp, synthetic construct
  source 1..75: mol_type = other DNA
atgactatggacaaggccatcaaacgccgttcggctgattggtcagttagcaacactgggataactggatacatt

SEQ ID NO: 192841 - DNA, 75 bp, synthetic construct
  source 1..75: mol_type = other DNA
accttgtgagagggatgagagtggttttctggtatctggttattgggaagatgccgaatttgaggcaatgggatt

SEQ ID NO: 192842 - DNA, 75 bp, synthetic construct
  source 1..75: mol_type = other DNA
gcgggatgagcgtggccttatggtatctggttattgggaagatgctggatttgaggcaatgggattcaaaagaga

SEQ ID NO: 192843 - DNA, 75 bp, synthetic construct
  source 1..75: mol_type = other DNA
agagccagagccagagccagagccagagccagagccagagccagagccagaagaaaaacagcgtaaaaagcctgg

SEQ ID NO: 192844 - DNA, 75 bp, synthetic construct
  source 1..75: mol_type = other DNA
tacaccgtttcgaccacgcgttttacaactcacggctatcgtgaccatagcggcgcacagaaaaatttagccaat

SEQ ID NO: 192845 - DNA, 75 bp, synthetic construct
  source 1..75: mol_type = other DNA
tcgttgataaagcggcgcttgaacacagccgaaaccatatcggatgcgtaatgttattgcccgctgacatttctg

SEQ ID NO: 192846 - DNA, 75 bp, synthetic construct
  source 1..75: mol_type = other DNA
tgagcaaaaaatggggataccgacaatatctcacccccctcgtatactaatgctttatggctcagttcgcgagcg

SEQ ID NO: 192847 - DNA, 75 bp, synthetic construct
  source 1..75: mol_type = other DNA
gagtgaaggcgcggttcgtccttcgcagggcaagacacttgcagtgatgcaggtttgcggcggttcgcagtcctt

SEQ ID NO: 192848 - DNA, 75 bp, synthetic construct
  source 1..75: mol_type = other DNA
aaaggaattttgatggtctgcccggtgcaaaagatatcattctgggcgagttgaccaggagggttcaccgtatct

SEQ ID NO: 192849 - DNA, 75 bp, synthetic construct
  source 1..75: mol_type = other DNA
tgttcagtacggcacgggaactgcgggatgtggcggcagggcgtgccgttctccgtcaggcgggacttgccgggg

SEQ ID NO: 192850 - DNA, 75 bp, synthetic construct
  source 1..75: mol_type = other DNA
tgccatcaccggtggtcgcgtgtggggggatattccggataacagcgttcagccgggtgccggaaacggtgaacc

SEQ ID NO: 192851 - DNA, 75 bp, synthetic construct
  source 1..75: mol_type = other DNA
ccgcatgcaggatggcagtaacaagcatcgtcccggctacgacctgaccttctccgcccccaaaagtgtctccat

SEQ ID NO: 192852 - DNA, 75 bp, synthetic construct
  source 1..75: mol_type = other DNA
gattacattgacgcagtgacggcaacagataccagcaccgcgccgaatgtcatctggcctgaactgccggaggcg

SEQ ID NO: 192853 - DNA, 75 bp, synthetic construct
  source 1..75: mol_type = other DNA
ccgggcggaagctgacgcaggcagaaacaacccgacttaatgctgtgctggattacattgacgcagtgacggcaa

SEQ ID NO: 192854 - DNA, 75 bp, synthetic construct
  source 1..75: mol_type = other DNA
agtctgattcagctgaaattacaggccggacgtaaactgacgcaggcagaaacaacccgccttaacgctgtgctg

SEQ ID NO: 192855 - DNA, 75 bp, synthetic construct
  source 1..75: mol_type = other DNA
aattgtccgtaaaatggcagagaacaaacctgaccagctggacgacaaaacagagcggactgtcagggatattgc

SEQ ID NO: 192856 - DNA, 75 bp, synthetic construct
  source 1..75: mol_type = other DNA
cacgctgtcggacggacagcagacccgggtgattcgccccggtcaggagcgggcagagcaacatattgacctggc

SEQ ID NO: 192857 - DNA, 75 bp, synthetic construct
  source 1..75: mol_type = other DNA
cgggcagcgaaccggtacaggcagtgcgctgatggccatgaaggatgccggggtgaacacatatcgctggcaggg

SEQ ID NO: 192858 - DNA, 75 bp, synthetic construct
  source 1..75: mol_type = other DNA
gagacagtcctgcacggtttattgcaccggggcgcaaatatccacagccgtatgtggcactgccggcgtttgacc

SEQ ID NO: 192859 - DNA, 75 bp, synthetic construct
  source 1..75: mol_type = other DNA
cggccggaagtgccgggaactattataccgacaaggataattactatgtgctgggcagcatgggagaacgctggg

SEQ ID NO: 192860 - DNA, 75 bp, synthetic construct
  source 1..75: mol_type = other DNA
atgccgtacagaaagggactgcccacgatgtgctggagccgaaagctgaccgggaggtcatgaatgcagagcggc

SEQ ID NO: 192861 - DNA, 75 bp, synthetic construct
  source 1..75: mol_type = other DNA
acttaacgccgtgctggattacattgacgcggtggcggcaacagataccagcaccgcgccggatgtcatctggcc

SEQ ID NO: 192862 - DNA, 75 bp, synthetic construct
  source 1..75: mol_type = other DNA
atgtttgattacaagatttccaaacatccgcattttgatgaagcctgtagagtctttgcactacgccacaatatg

SEQ ID NO: 192863 - DNA, 75 bp, synthetic construct
  source 1..75: mol_type = other DNA
gtgcggtatctggcaatgtaaaaaccagtgcaggtcgtcgtgatgctatcagcagcattaactctgtaacacgac

SEQ ID NO: 192864 - DNA, 75 bp, synthetic construct
  source 1..75: mol_type = other DNA
actggttgatggatttctggctcagattcactgcctgccatgtataccggtaaatgaggtggcaaaagagagact

SEQ ID NO: 192865 - DNA, 75 bp, synthetic construct
  source 1..75: mol_type = other DNA
cgtgaactcggcgagctggcgagcggtgcggtatctgatgaacgtctgacctctgcccgtaagcacaacatgatt

SEQ ID NO: 192866 - DNA, 75 bp, synthetic construct
  source 1..75: mol_type = other DNA
tgctgtcattgtcggcgctggcgttacaggctcgcctccaggctaacccggcaatgtcgagcgtcgtcgacacca

SEQ ID NO: 192867 - DNA, 75 bp, synthetic construct
  source 1..75: mol_type = other DNA
gtgccgtatcgggtgatgtgaaaaccaccgcaggccgccgcgatgttatcagcagcattaactctgttactcgtc

SEQ ID NO: 192868 - DNA, 75 bp, synthetic construct
  source 1..75: mol_type = other DNA
atgaataaaattgtcttaaataacgaactcattgccataaaagcgggagacataaccgtttataattatgatggt

SEQ ID NO: 192869 - DNA, 75 bp, synthetic construct
  source 1..75: mol_type = other DNA
gacgcggtaacggcaacagataccagcaccgcgccggatgtcatctggcctgaactgccggagactgcgcaataa

SEQ ID NO: 192870 - DNA, 75 bp, synthetic construct
  source 1..75: mol_type = other DNA
aggagaatcgaaagaaatcacagctctgggtgattaccctgaaaatacaaccactatcgccccgttaacgccata

SEQ ID NO: 192871 - DNA, 75 bp, synthetic construct
  source 1..75: mol_type = other DNA
acgacttggcccggacaatgggtattactggaacgatagatcagtccgcaattacagaagaaattctcagaaagt

SEQ ID NO: 192872 - DNA, 75 bp, synthetic construct
  source 1..75: mol_type = other DNA
aaatgaacaggccgacatgatcactttgaacgagatttctgataccgaaaaagcattctgctggtttgaaacttc

SEQ ID NO: 192873 - DNA, 75 bp, synthetic construct
  source 1..75: mol_type = other DNA
tactggaacgatagatcagtccgcaattacagaagaaattctcagaaagtttaatcagttcgtaaagcctctact

SEQ ID NO: 192874 - DNA, 75 bp, synthetic construct
  source 1..75: mol_type = other DNA
ataatacaaccactatcgccccgttaacgccatacgataaatggaatggtgagaaatgggtgacggataccgagg

SEQ ID NO: 192875 - DNA, 75 bp, synthetic construct
  source 1..75: mol_type = other DNA
atggactggctacagtgccgggcgatatgcgttgtttttattatgatgctgaaacatctgagtatacgggctggt

SEQ ID NO: 192876 - DNA, 75 bp, synthetic construct
  source 1..75: mol_type = other DNA
gaccatcgcggtgaaacggtctatagcaccgaaacaggagaatcaaaagaaatcaccgctccgggtgattaccct

SEQ ID NO: 192877 - DNA, 75 bp, synthetic construct
  source 1..75: mol_type = other DNA
atgtataacgccatcttgaatagtaaatttattgccacaaaggcaggagagattaccgtttataactatgacagt

SEQ ID NO: 192878 - DNA, 75 bp, synthetic construct
  source 1..75: mol_type = other DNA
cggcattccggcatgttcatgtttagatgctcctggctcatacaaaactgggtatgcaatctgccgttctgcaga

SEQ ID NO: 192879 - DNA, 75 bp, synthetic construct
  source 1..75: mol_type = other DNA
gtgctggattacattgacgcggtgacggcaacagataccagcaccgcgccgaatgtcatctggcctgaactgccg

SEQ ID NO: 192880 - DNA, 75 bp, synthetic construct
  source 1..75: mol_type = other DNA
gcacagcacggcgcagcagtagatgcagcagaagcactgcgccagtcgctgattcatactgcaatggcctccatc

SEQ ID NO: 192881 - DNA, 75 bp, synthetic construct
  source 1..75: mol_type = other DNA
atggatagcgctgtattaaatagcgagtttattgccacgaaggcggggaatattactgtctataattatgatggt

SEQ ID NO: 192882 - DNA, 75 bp, synthetic construct
  source 1..75: mol_type = other DNA
taacgccattcgataaatgggatggtaagaaatgggtgaccgacactgaggcacagcatagcgccgcagtaaacg

SEQ ID NO: 192883 - DNA, 75 bp, synthetic construct
  source 1..75: mol_type = other DNA
gactacatcgacgcagtgacggcaacagatatcagcactgctcctgatattgcctggcccgaactaccagaattt

SEQ ID NO: 192884 - DNA, 75 bp, synthetic construct
  source 1..75: mol_type = other DNA
cggcagaaacacagcgtcggtcactgattgatactgcaatggcttccgttagtttgattcaactgaaattacggg

SEQ ID NO: 192885 - DNA, 75 bp, synthetic construct
  source 1..75: mol_type = other DNA
gaaaatacgaccacttttgcaccattaacgccatacgataaatgggatggtgagaaatgggtaacagatatcgag

SEQ ID NO: 192886 - DNA, 75 bp, synthetic construct
  source 1..75: mol_type = other DNA
aattgattgctactgcggcagggaatattaccgtttataactatgattgtgaaacacgagaatatatttccacat

SEQ ID NO: 192887 - DNA, 75 bp, synthetic construct
  source 1..75: mol_type = other DNA
gattgatgctgcaatggcttccattagtctgattcaactgaaattacaggccggacgtaaactgacgcaggcaga

SEQ ID NO: 192888 - DNA, 75 bp, synthetic construct
  source 1..75: mol_type = other DNA
ggcagaaacaacccgccttaacgctgtgctggattacattgacgcggtgacggcaactgataccagcaccgcgcc

SEQ ID NO: 192889 - DNA, 75 bp, synthetic construct
  source 1..75: mol_type = other DNA
tgagaaatgggtgacagataccaaggcacagcacggcgcagcagtagatgcagcagaagcacagcgccagtcgct

SEQ ID NO: 192890 - DNA, 75 bp, synthetic construct
  source 1..75: mol_type = other DNA
gctgaaaacacagggcgtgctcggacacccggaggtaaccatgaccgccctgtcaccggtctggctggacagccg

SEQ ID NO: 192891 - DNA, 75 bp, synthetic construct
  source 1..75: mol_type = other DNA
tggtgaaccggtcacggcagaggtactggcacagcggcaggctgaagaggccatccgccgtgaaacggaacgccg

SEQ ID NO: 192892 - DNA, 75 bp, synthetic construct
  source 1..75: mol_type = other DNA
gatgcgcttcacgaagagtgaccgggagcgcggttatgtggccaacagcgtctggacggtgacagcggtttccgg

SEQ ID NO: 192893 - DNA, 75 bp, synthetic construct
  source 1..75: mol_type = other DNA
tattactgtttataactatgatggtgagacgcgagagtatactactacatcaactgaatatcttgctgtgggtgt

SEQ ID NO: 192894 - DNA, 75 bp, synthetic construct
  source 1..75: mol_type = other DNA
tgacctgccgtttatggcgtatgccacgccggaacaagccttcgaaaacgccgcaacggttatgcgtgccggtgc

SEQ ID NO: 192895 - DNA, 75 bp, synthetic construct
  source 1..75: mol_type = other DNA
gatgcccctggtacacataaggctggttatgcaatctgccgttctgcagattttaactcatgggaatatgtgcca

SEQ ID NO: 192896 - DNA, 75 bp, synthetic construct
  source 1..75: mol_type = other DNA
cggtatccctgcatattcctgtttagatgcccctggcacacataaggcgggttatgctatctgccgttcgataga

SEQ ID NO: 192897 - DNA, 75 bp, synthetic construct
  source 1..75: mol_type = other DNA
gattatattgacgcggtgacggcaacagataccagcaccgcgcctgatgtcatctggcctgaactgccggaggcg

SEQ ID NO: 192898 - DNA, 75 bp, synthetic construct
  source 1..75: mol_type = other DNA
gtgccagaccatcgcggtgaaacggtctatagcactgaaacaggagaatcaaaagaaatcacagctccgggtgat

SEQ ID NO: 192899 - DNA, 75 bp, synthetic construct
  source 1..75: mol_type = other DNA
ctgatttaatggctgcaaccttaatttccagtggtatgtcagaacaagatgtaaattattttctggataatgttg

SEQ ID NO: 192900 - DNA, 75 bp, synthetic construct
  source 1..75: mol_type = other DNA
tgctacagcgaatgagtaaagagctattcaacactgaattaattttaaaatccgggggacataatgaatcgcaca

SEQ ID NO: 192901 - DNA, 75 bp, synthetic construct
  source 1..75: mol_type = other DNA
atatacggaaaatgagactttcttctcttatcgtcgcgacaagaccaccgggcgtatggcaagtttcatttggct

SEQ ID NO: 192902 - DNA, 75 bp, synthetic construct
  source 1..75: mol_type = other DNA
attctcgaccaactttgccctggtttgctggcgctcggtctgacgctactaatggttcgtctgctcaacaaaaaa

SEQ ID NO: 192903 - DNA, 75 bp, synthetic construct
  source 1..75: mol_type = other DNA
gaaaacaccgatgcgccagaccccgttccccggcattgtgccggacgagagcgatcgcgcggcagaaacccagtc

SEQ ID NO: 192904 - DNA, 75 bp, synthetic construct
  source 1..75: mol_type = other DNA
aactcatcaaggcaattagtgaacgattgaaagaacaacccaacaaaccaaaacgaatcaaatcatccacctcta

SEQ ID NO: 192905 - DNA, 75 bp, synthetic construct
  source 1..75: mol_type = other DNA
ccctcatcctaatagtctggctttcgatacggagaaaaaatatctgttcctcaccgtgaagaatgacgaaacgtt

SEQ ID NO: 192906 - DNA, 75 bp, synthetic construct
  source 1..75: mol_type = other DNA
gacgggtcacaacagcggcgtgatccatgccggggtctattacacgcccggcagcctaaaggcgcagttttgcct

SEQ ID NO: 192907 - DNA, 75 bp, synthetic construct
  source 1..75: mol_type = other DNA
tagccggcgcacagtcaggtaagacaacggttgagaataatgcgctcagtctgccatcaggaatggtgagttatg

SEQ ID NO: 192908 - DNA, 75 bp, synthetic construct
  source 1..75: mol_type = other DNA
tttaaacaggtgcaacgcaacaagccgctcattcaccctgaaaccacattaagtcacattctcacaatagaagat

SEQ ID NO: 192909 - DNA, 75 bp, synthetic construct
  source 1..75: mol_type = other DNA
gaaaaaggggctttgaaatgtgtggggcaattttgccatgacaacgatgctgagtctttatcagcgatggcgatc

SEQ ID NO: 192910 - DNA, 75 bp, synthetic construct
  source 1..75: mol_type = other DNA
actcgcaaacgcaggttggaaaaagtactaccagggtttcgctataacgtcgtgggcataaccttggatcaccag

SEQ ID NO: 192911 - DNA, 75 bp, synthetic construct
  source 1..75: mol_type = other DNA
cgcgagccaacggtgcagaaatagatgacggcaccattaacggcatcaaagtcggcctgatgggaccgctggcag

SEQ ID NO: 192912 - DNA, 75 bp, synthetic construct
  source 1..75: mol_type = other DNA
gcgtctgccccagcttaccgggttgctgtttaatgaccacacaccgtttatcagtgagcagacgaaacaatggct

SEQ ID NO: 192913 - DNA, 75 bp, synthetic construct
  source 1..75: mol_type = other DNA
gccttacggtatctggatacgttacccgccggtgaaccccgcgaccagttccaccggcagtattttggcgcgcag

SEQ ID NO: 192914 - DNA, 75 bp, synthetic construct
  source 1..75: mol_type = other DNA
tactgatgatctttttgccctttaccagcgtgcgtttaatcgtgcggcaccggctccagcccccactccggcggc

SEQ ID NO: 192915 - DNA, 75 bp, synthetic construct
  source 1..75: mol_type = other DNA
aagctgacccagcattaaataattttcgttatatgtggaacatcctgatgtatgtcattccgtatacgttatggg

SEQ ID NO: 192916 - DNA, 75 bp, synthetic construct
  source 1..75: mol_type = other DNA
tttgatgcctgtattgattcgtggaaaacggacccggaattaaataattcgatttatatgtggaatatcctgata

SEQ ID NO: 192917 - DNA, 75 bp, synthetic construct
  source 1..75: mol_type = other DNA
caaaggtaaggatatggctcgtattcttgagattagtcctgcgcttatgtcctcgatcctttcaggtaaacgtgc

SEQ ID NO: 192918 - DNA, 75 bp, synthetic construct
  source 1..75: mol_type = other DNA
cgatatggcgctgtggcagcaggtggaaaaaagtgtgcttctggccccctactggctggacggtcactacatttc

SEQ ID NO: 192919 - DNA, 75 bp, synthetic construct
  source 1..75: mol_type = other DNA
tttgaaacaggtattgaaggcttttcacagaacgcgcctacagcgcagcgcgatgcgctgctgggtgaactggcg

SEQ ID NO: 192920 - DNA, 75 bp, synthetic construct
  source 1..75: mol_type = other DNA
cgttcgcacagcatcgcccgcttgatgataaacgctacgcgctggatcatttccagacaaagttactgaaattac

SEQ ID NO: 192921 - DNA, 75 bp, synthetic construct
  source 1..75: mol_type = other DNA
aaacctgccggaagagaaactggcatcggcgctgaaagatgacaacccggactgggagtatatcgacggcgaaat

SEQ ID NO: 192922 - DNA, 75 bp, synthetic construct
  source 1..75: mol_type = other DNA
ctgctccggtccccactccggcggcctccggtagttcaccacaaaccaccgtcacgtctgaaagcggcgtgacgc

SEQ ID NO: 192923 - DNA, 75 bp, synthetic construct
  source 1..75: mol_type = other DNA
cgtcaagctggggtctctggcccacgctcagcttgatattcccgaactacaacgcagggggctacagcttctggc

SEQ ID NO: 192924 - DNA, 75 bp, synthetic construct
  source 1..75: mol_type = other DNA
gcgaagctggcggaacgtgcaggaatgaacgtccagactctgcgcaacaaactgaacccagaccaaccacatcaa

SEQ ID NO: 192925 - DNA, 75 bp, synthetic construct
  source 1..75: mol_type = other DNA
gccacattacgtcatgagtgcaaccgcagagatcgggcgtgttgctgcaggtgcggtaccgtcggcctcggcacc

SEQ ID NO: 192926 - DNA, 75 bp, synthetic construct
  source 1..75: mol_type = other DNA
aggcgcaggctggcggcgaaagagcaacgatggctgagtatgaagtcccggcaggaaaatatttctgagaactca

SEQ ID NO: 192927 - DNA, 75 bp, synthetic construct
  source 1..75: mol_type = other DNA
ttattaaccgcaccagaaatctggttgcttactgatttgactgaagattcaacgctggtagatggctttctggca

SEQ ID NO: 192928 - DNA, 75 bp, synthetic construct
  source 1..75: mol_type = other DNA
gccgcattacgtcatgagtgcaacagcagagatcgggcgtgtagctgcaggcgcggtatctggcgatgtaaaaac

SEQ ID NO: 192929 - DNA, 75 bp, synthetic construct
  source 1..75: mol_type = other DNA
atgtttgattatcaagtttccaaacatccacattttgacgaagcctgtcgtgcattcgcactgcgccacaacctg

SEQ ID NO: 192930 - DNA, 75 bp, synthetic construct
  source 1..75: mol_type = other DNA
cacccgttccggcagataaacccacaacacgccggtgttcacttctgcggggcgtggcagtgagttccctgattc

SEQ ID NO: 192931 - DNA, 75 bp, synthetic construct
  source 1..75: mol_type = other DNA
tgcatttgcattgcgccacaacttggtgcaactggcagaacgtgcaggtatgaatgtgcagattctgcggaacaa

SEQ ID NO: 192932 - DNA, 75 bp, synthetic construct
  source 1..75: mol_type = other DNA
aaagacattttgatgaagcctgccggaccttcgctttgcgtcacaacatgtcgaagctggcagaacgcgcaggta

SEQ ID NO: 192933 - DNA, 75 bp, synthetic construct
  source 1..75: mol_type = other DNA
ggtcgcagactggcgacattagaacaaaagtggctcaggacgcaggcacagcaggagaatatttctgggcaataa

SEQ ID NO: 192934 - DNA, 75 bp, synthetic construct
  source 1..75: mol_type = other DNA
cggacagctgtcgccggcgtcccacgttatggtctggatggtcaccccaaagggcaggtctcagaatctgaagca

SEQ ID NO: 192935 - DNA, 75 bp, synthetic construct
  source 1..75: mol_type = other DNA
ccctcccactggacccgagagtatactcacgagtgcgtggaaaaaataaagattctgtttcctcatcttcgtgct

SEQ ID NO: 192936 - DNA, 75 bp, synthetic construct
  source 1..75: mol_type = other DNA
aaccctgtttcctcatcttcgtgctgaaggcggtggatttatccccctgaaaattggcatcagcaatgatatttc

SEQ ID NO: 192937 - DNA, 75 bp, synthetic construct
  source 1..75: mol_type = other DNA
cgtctggttcacctggatttagagtacagaaatggcaggtacagcctcagacgacagagcagcccaggtgcgatc

SEQ ID NO: 192938 - DNA, 75 bp, synthetic construct
  source 1..75: mol_type = other DNA
atcaaatcagtcagcctgacatcagaacggtttgaacggagaggccacatccacagtctggtcgctgaagagcgt

SEQ ID NO: 192939 - DNA, 75 bp, synthetic construct
  source 1..75: mol_type = other DNA
atgattctctccatcgacagcaacgacgctaataccgcgcccttgcacaaaaaaacaatcagcagcctgagcggc

SEQ ID NO: 192940 - DNA, 75 bp, synthetic construct
  source 1..75: mol_type = other DNA
atagccggtgagaaagcgaagcgggacccggcagcactgaatcaggcccgcgcagagcttgaggcagcaggaaag

SEQ ID NO: 192941 - DNA, 75 bp, synthetic construct
  source 1..75: mol_type = other DNA
ttgatggcagtgcactgcgtggttcccccacatccggctgctttatatgttgccaataagcttggcgcagatatc

SEQ ID NO: 192942 - DNA, 75 bp, synthetic construct
  source 1..75: mol_type = other DNA
ctccctgccttatctggctgccggcgccggatatcactgcaacgttccccgagtgtttctcgcaactcatcctgg

SEQ ID NO: 192943 - DNA, 75 bp, synthetic construct
  source 1..75: mol_type = other DNA
tgacctatatgcaatgaatatgagatggttgttttggttagtgtttttatttccgggttggatattccaattcac

SEQ ID NO: 192944 - DNA, 75 bp, synthetic construct
  source 1..75: mol_type = other DNA
gccgacatggcgctgtggcagcaggtggaaaaaagcctgctgctggccccgtactggctggacggtcattacctc

SEQ ID NO: 192945 - DNA, 75 bp, synthetic construct
  source 1..75: mol_type = other DNA
gtgcaggggcatgaatccacccttcccgttaccgttgaagatatcgcctatcacaccgccgcggtgcgccgcggt

SEQ ID NO: 192946 - DNA, 75 bp, synthetic construct
  source 1..75: mol_type = other DNA
attaccgcaggctggggaaaaattactggctacgcgggtacccaacaatatatggaagcgatgggtgtcccaggc

SEQ ID NO: 192947 - DNA, 75 bp, synthetic construct
  source 1..75: mol_type = other DNA
aagcgcgcagtctggcgctgggtttctaccacaaactgtcggcgttgtgcagtgaaggcgcacacgatcaggtat

SEQ ID NO: 192948 - DNA, 75 bp, synthetic construct
  source 1..75: mol_type = other DNA
gttcagggacatgattccacccttcccgtaacagttgaagatatcgcctatcacaccgccgccgtgcgtcgcggt

SEQ ID NO: 192949 - DNA, 75 bp, synthetic construct
  source 1..75: mol_type = other DNA
tgagaaatgggtgacggataccaaagcgcaacataacgcagcagtggaaggggctgaactgcaacgccagtcact

SEQ ID NO: 192950 - DNA, 75 bp, synthetic construct
  source 1..75: mol_type = other DNA
ctggctgacgatgaagcgggactacgcatcagactgaaaaacgaattgcgcagggctgataagcccagtgctggc

SEQ ID NO: 192951 - DNA, 75 bp, synthetic construct
  source 1..75: mol_type = other DNA
cactgacccgcgtacctgccttcattgatacggaagtggactctgacaatgctgtctcccgcgtggtggcctccg

SEQ ID NO: 192952 - DNA, 75 bp, synthetic construct
  source 1..75: mol_type = other DNA
accgataccggaaacgatcagaaaagggataatccccccgatgatcagtcaggcacttccgggcaaaacgcatcc

SEQ ID NO: 192953 - DNA, 75 bp, synthetic construct
  source 1..75: mol_type = other DNA
atgaatgctattccttatttcgactatagcctggcacccttctggccatcttatcagaacaaaatcatcggcgtt

SEQ ID NO: 192954 - DNA, 75 bp, synthetic construct
  source 1..75: mol_type = other DNA
accagtcaatcccgatggcaccacaacttaacccgtcgcatgcgggcggcgtgattactctgcaacgccattatc

SEQ ID NO: 192955 - DNA, 75 bp, synthetic construct
  source 1..75: mol_type = other DNA
tattattggcgttgaaggcggggcatattatgtttataaattaggtgctcgtgctgatatgagtacccggtggta

SEQ ID NO: 192956 - DNA, 75 bp, synthetic construct
  source 1..75: mol_type = other DNA
atgttatcgctatcttggtgggaaaacgaatacgcagttctgcaatggaaaaatcatgttttacatgcgaaagct

SEQ ID NO: 192957 - DNA, 75 bp, synthetic construct
  source 1..75: mol_type = other DNA
acgggcgcgaggatagcttctccccggatgcaaaaaccaaacggctgacaactgtttacctcgataaagaccggg

SEQ ID NO: 192958 - DNA, 75 bp, synthetic construct
  source 1..75: mol_type = other DNA
cgcaactaccaggcaactataacctgcggccacgtaaaggggagctgagtagtcagaattttgtggagctggccg

SEQ ID NO: 192959 - DNA, 75 bp, synthetic construct
  source 1..75: mol_type = other DNA
cagccgcaaaatccggcaaaaagctgtcagccctgctggttatggggggcgtgattatcatcgggggcggatacc

SEQ ID NO: 192960 - DNA, 75 bp, synthetic construct
  source 1..75: mol_type = other DNA
gacagtgtcacgcggagaggttgtctccattctgtttgttgagccggtcatgagcaacgatatcagtcccccctc

SEQ ID NO: 192961 - DNA, 75 bp, synthetic construct
  source 1..75: mol_type = other DNA
ctcagcctgctgaccaggccgagggttctggtcaaccatcaacgccccctcaggcagatcaaacagcccgggaaa

SEQ ID NO: 192962 - DNA, 75 bp, synthetic construct
  source 1..75: mol_type = other DNA
gaaaaataacggtgtgtttgattttagtggtgagctgctctgcacacttgaagatgctcataattcaacggtttc

SEQ ID NO: 192963 - DNA, 75 bp, synthetic construct
  source 1..75: mol_type = other DNA
tcagtacggtcatgcggcatttgagcaaggcggcatgggcggcggcggttttggcggcggcgcagacttcagcga

SEQ ID NO: 192964 - DNA, 75 bp, synthetic construct
  source 1..75: mol_type = other DNA
tatttttggtgacgttttcggcgatatttttggcggcggacgtggtcgtcaacgtgcggcgcgcggtgctgattt

SEQ ID NO: 192965 - DNA, 75 bp, synthetic construct
  source 1..75: mol_type = other DNA
cattcagcgattttgcccgcgatcgtcgtggtgtgtgcgatccggaagcccgttgcctcgccggtaatcccggtt

SEQ ID NO: 192966 - DNA, 75 bp, synthetic construct
  source 1..75: mol_type = other DNA
ataccatgtggtgctgtgcgtcagacaggagtatttcgacggccctgagctggaccggctgattcttgatgcctg

SEQ ID NO: 192967 - DNA, 75 bp, synthetic construct
  source 1..75: mol_type = other DNA
tgacccgtcatccagaaaagccggaataccacgtggtgctgtgcgtcagacaggagtatttcgacggccctgaac

SEQ ID NO: 192968 - DNA, 75 bp, synthetic construct
  source 1..75: mol_type = other DNA
aacagataacccgggatgtggtgctggacagtcgttcaccggactgcgaagagagactcaaagagttgatatggg

SEQ ID NO: 192969 - DNA, 75 bp, synthetic construct
  source 1..75: mol_type = other DNA
tccgttttacgttcagccgcaggaaggtggtaaaccccgttttaaccgttacggtgaaccctgcgcaccggtgat

SEQ ID NO: 192970 - DNA, 75 bp, synthetic construct
  source 1..75: mol_type = other DNA
tatcgtgatgaggtcggggtgctgtcttcacagcttgctcttccacgtaacacgcaggttgatcgtgtgattttc

SEQ ID NO: 192971 - DNA, 75 bp, synthetic construct
  source 1..75: mol_type = other DNA
ccggctcccggatacggcggatcctgcttcgtctaccgtgtgaatatgacaataccttcaacagcagaacgacct

SEQ ID NO: 192972 - DNA, 75 bp, synthetic construct
  source 1..75: mol_type = other DNA
cggctcccgggtacggcggatcctgcttcgtctgccgtgggaacatgacaacacctttagttgcagcagaacctg

SEQ ID NO: 192973 - DNA, 75 bp, synthetic construct
  source 1..75: mol_type = other DNA
cctgctcccgaatacggcggatcctgcttcgtctgccgggggaacatggcaacatcttcagcgacagaaaaacct

SEQ ID NO: 192974 - DNA, 75 bp, synthetic construct
  source 1..75: mol_type = other DNA
cgttcagtgatttcgcccgcgatcgtcgtggtgtacgcgatccggaagcccgttaccttgccggtaatccctggt

SEQ ID NO: 192975 - DNA, 75 bp, synthetic construct
  source 1..75: mol_type = other DNA
gccgttaaagtcggttcgaaaatcgataccgaaggcgcgctgctcggcaatatcattttgcaggtgctggaaagt

SEQ ID NO: 192976 - DNA, 75 bp, synthetic construct
  source 1..75: mol_type = other DNA
gttcactggttttgttggcagccgtgagcctgccgctacaggcggcttcccccgttaaagtcggttcaaaaatcg

SEQ ID NO: 192977 - DNA, 75 bp, synthetic construct
  source 1..75: mol_type = other DNA
gccgggcaaggctacgagaaagtcaaaaagctcgatgcagagcaaaacaagttaatctggctgacgcccgcgcct

SEQ ID NO: 192978 - DNA, 75 bp, synthetic construct
  source 1..75: mol_type = other DNA
agcattgcagtggaaggactggatgccaaaaaagtggcagccgactacctgaaacaaaaagggtggacgaagtaa

SEQ ID NO: 192979 - DNA, 75 bp, synthetic construct
  source 1..75: mol_type = other DNA
tatcattttgcaggtgctggaaagtcacggcgttcctacggtaaataaagtgcaactgggaacgactcctgtggt

SEQ ID NO: 192980 - DNA, 75 bp, synthetic construct
  source 1..75: mol_type = other DNA
agtcaaaaaactcgatgcagagcaaaacaagttaatctggctgacgcccgcacctgcaaataacacctggaccat

SEQ ID NO: 192981 - DNA, 75 bp, synthetic construct
  source 1..75: mol_type = other DNA
aagctgggggtaccgttcaccattatcgtgatggcggtttgtgtggtgatgatcccgatgctgtttccgttttga

SEQ ID NO: 192982 - DNA, 75 bp, synthetic construct
  source 1..75: mol_type = other DNA
gtactgatggtggcgttaatgctgaccgatgagatccccaatcctattgcagcaatcatcgcttgtctgctgatg

SEQ ID NO: 192983 - DNA, 75 bp, synthetic construct
  source 1..75: mol_type = other DNA
tttagcgtaacacctattggcctggtcgtgctggtgctgggtattttgtatatgttagtgatgcgtttcatgctg

SEQ ID NO: 192984 - DNA, 75 bp, synthetic construct
  source 1..75: mol_type = other DNA
cacggcgttcctacggtaaataaagtgcaacttggaacgactcctgtggtgcgcggcgcgatcacttctggcgag

SEQ ID NO: 192985 - DNA, 75 bp, synthetic construct
  source 1..75: mol_type = other DNA
gcgaaggctggacgcgtcgaacttttcgcgatcttatccgtgaatatcgacttaccgggcgtgcgcgtcgcctgg

SEQ ID NO: 192986 - DNA, 75 bp, synthetic construct
  source 1..75: mol_type = other DNA
tctcattactggccgttgccatagtcctgttcgctacaggcagagtgcgtatggatgcggtcgctttgtttgtta

SEQ ID NO: 192987 - DNA, 75 bp, synthetic construct
  source 1..75: mol_type = other DNA
gcaatggggcgttcttctttaaagatgaaaacgatgcagcgtggaaaaacgcgcagcaaggttacgagaaagtca

SEQ ID NO: 192988 - DNA, 75 bp, synthetic construct
  source 1..75: mol_type = other DNA
atgaaatccctcaccagaaatgaaccaatgcggttcaatctgattgccgtttggctgagagtgaagggaaaaccg

SEQ ID NO: 192989 - DNA, 75 bp, synthetic construct
  source 1..75: mol_type = other DNA
agagatcatcaaagatgatatcgccccggcagtgattgagcagtgcgggacacagattctggcggcgaaccccaa

SEQ ID NO: 192990 - DNA, 75 bp, synthetic construct
  source 1..75: mol_type = other DNA
ctcatcgcacattcatcagcatgtggttcgttcccctaagagcgatctgtactgcacctgggaattgatgggaac

SEQ ID NO: 192991 - DNA, 75 bp, synthetic construct
  source 1..75: mol_type = other DNA
actggacggtgcgttgctggaaatgctggaaatcaaaagcacactcgataccgcgctggcgcgctatggtgcacg

SEQ ID NO: 192992 - DNA, 75 bp, synthetic construct
  source 1..75: mol_type = other DNA
tgttactgagttcggatgatgacgcggtatcccagcgactggatctggatgtggcgcttgacctgctgacatcag

SEQ ID NO: 192993 - DNA, 75 bp, synthetic construct
  source 1..75: mol_type = other DNA
cccgtatgccgatgaagttagccgtctttactacgcttctgtcggggtgttccggcgtaaccgcctgttcctgac

SEQ ID NO: 192994 - DNA, 75 bp, synthetic construct
  source 1..75: mol_type = other DNA
gaatgagtggctggcagagagaggttatgccggactggcggataaccggaaccgcctggcagaggtggttacccg

SEQ ID NO: 192995 - DNA, 75 bp, synthetic construct
  source 1..75: mol_type = other DNA
atgccactctcaaagctccaggccggttcactggtttttatagccgccgtgagcctgccgctacaggcggcttcc

SEQ ID NO: 192996 - DNA, 75 bp, synthetic construct
  source 1..75: mol_type = other DNA
ctggatatctatccggaatatactggcaatggcgcgtttttctttaaagatgaaaacgatacggcatggaaaaac

SEQ ID NO: 192997 - DNA, 75 bp, synthetic construct
  source 1..75: mol_type = other DNA
ccagtgaagataacctgaaaatattcgatgcaatctggaaagaggatatgaaaccagaagactggaagcaggatt

SEQ ID NO: 192998 - DNA, 75 bp, synthetic construct
  source 1..75: mol_type = other DNA
cttgcagcgattaaacacctggcgcaaaagtaccgccgcccggaatcgttcgcaccgggggcaacgcataaacgg

SEQ ID NO: 192999 - DNA, 75 bp, synthetic construct
  source 1..75: mol_type = other DNA
cttcactgtttgttatgttcctcataaccgcattgaaaaagcagcgatgaagcgcaaatctcctggcgctaaacg

SEQ ID NO: 193000 - DNA, 75 bp, synthetic construct
  source 1..75: mol_type = other DNA
taacgtcatacgataaatgggatggtgagaaatgggtgacggataccgaggcacagcacagcgccgcagtagatg

SEQ ID NO: 193001 - DNA, 75 bp, synthetic construct
  source 1..75: mol_type = other DNA
ctggccattgaaaccgtcgctcatgactatgatgttattgttattgacagtgcgcctaacctggggattggcacg

SEQ ID NO: 193002 - DNA, 75 bp, synthetic construct
  source 1..75: mol_type = other DNA
gccctctctatctgggagcctgtttgcaatgagatttttgatcgtctgattaaaccacgctgggagattagataa

SEQ ID NO: 193003 - DNA, 75 bp, synthetic construct
  source 1..75: mol_type = other DNA
gattgatgctgcaatggcttccatcagtctgattcaactgaaattacaggccgggcggaagctgacgcagccaga

SEQ ID NO: 193004 - DNA, 75 bp, synthetic construct
  source 1..75: mol_type = other DNA
taacgccatacgataaatgggatggtgaaaaatggatgacggatactgaggcacaacacggtgccgaagtagaag

SEQ ID NO: 193005 - DNA, 75 bp, synthetic construct
  source 1..75: mol_type = other DNA
agttctttggcgttccgtccgtcacggcttaccgccagatgcgtacttttcgttcaccgcttgaagcacatcata

SEQ ID NO: 193006 - DNA, 75 bp, synthetic construct
  source 1..75: mol_type = other DNA
tgagaaatgggtgaccgatactgaggcacagcatcacgccgcagtagacgcggcagaagcacagcgtcagtcact

SEQ ID NO: 193007 - DNA, 75 bp, synthetic construct
  source 1..75: mol_type = other DNA
aagtggcagtatttacgggtaagggatggatccatgaagaagaccatcgcaatgagactgtttactcaacagaaa

SEQ ID NO: 193008 - DNA, 75 bp, synthetic construct
  source 1..75: mol_type = other DNA
gattacattgacgcggtgacggcaacagataccagcaccgcgccggatatcaattggcctgctcccccggaggcg

SEQ ID NO: 193009 - DNA, 75 bp, synthetic construct
  source 1..75: mol_type = other DNA
tgctgattgttcccaccccggcagagctgttcgattacacttctgcactgcagtttttcgatatgcttcgtgatc

SEQ ID NO: 193010 - DNA, 75 bp, synthetic construct
  source 1..75: mol_type = other DNA
cggtatccctgcatattcctgtttagatgcccctggcacacataaggcaggttatgctatctgccgttcgatgga

SEQ ID NO: 193011 - DNA, 75 bp, synthetic construct
  source 1..75: mol_type = other DNA
aatcacagcaccgggcgactatcccgaaaatacaaccactatcgccccgttaacgccatacgatgaatgggatgg

SEQ ID NO: 193012 - DNA, 75 bp, synthetic construct
  source 1..75: mol_type = other DNA
ccggacggaacctgacgcaggcagaaaccgcccgacttaacgctgcgctggattacattgacgcggtgacggcaa

SEQ ID NO: 193013 - DNA, 75 bp, synthetic construct
  source 1..75: mol_type = other DNA
atgaaaccaaccactattgcttcattgcaaaaatgcaaacaggaaaaaaaacgtttcgcgaccatcaccgcttac

SEQ ID NO: 193014 - DNA, 75 bp, synthetic construct
  source 1..75: mol_type = other DNA
agtctgattcaactgaaattgcaggccggacgtaaactgacgcaggcagaaacaacccgccttaacgctgtgctg

SEQ ID NO: 193015 - DNA, 75 bp, synthetic construct
  source 1..75: mol_type = other DNA
tattactgtttataactatgatggtgaaacacgggaatatattttcacatcaactgaatatcttgctgtgggtgt

SEQ ID NO: 193016 - DNA, 75 bp, synthetic construct
  source 1..75: mol_type = other DNA
ccgggcggaagttgacgcaggcagaaaccacccggcttaatgccgtgctggattatatagacgcgctgaacgcaa

SEQ ID NO: 193017 - DNA, 75 bp, synthetic construct
  source 1..75: mol_type = other DNA
gagacacgggaatatatttccgaatcaactgaatatcttgctgtgggtgttggtattccggctaattcctgttta

SEQ ID NO: 193018 - DNA, 75 bp, synthetic construct
  source 1..75: mol_type = other DNA
tgagaaatgggtgacagatactgaggcacaacacggtgccgcagtagaagtggcagaagcacaacgccagtcact

SEQ ID NO: 193019 - DNA, 75 bp, synthetic construct
  source 1..75: mol_type = other DNA
ccggacggaagttgacgcaggcagaaacaacccgacttaacgccgtgctggattacattgacgcggtgacggtaa

SEQ ID NO: 193020 - DNA, 75 bp, synthetic construct
  source 1..75: mol_type = other DNA
caaccgaatatcttgttgtgggtgtcggtattccggcgtattcctgtttagatgctcctggtacatataaggctg

SEQ ID NO: 193021 - DNA, 75 bp, synthetic construct
  source 1..75: mol_type = other DNA
tggcagaaacacagcggcagtcgctgattgatgctgcaatggtttccattagtctgattcaactgaaattgcagg

SEQ ID NO: 193022 - DNA, 75 bp, synthetic construct
  source 1..75: mol_type = other DNA
agaaatcacagttccgggtgattaccctgaaaatacaaccactatcgccccgttaacgtcatacgataaatggga

SEQ ID NO: 193023 - DNA, 75 bp, synthetic construct
  source 1..75: mol_type = other DNA
ggtgacagatactgaggcacaacacggtgccgcagtagacgcggcagaagcacagcgccagtcactgattgatgc

SEQ ID NO: 193024 - DNA, 75 bp, synthetic construct
  source 1..75: mol_type = other DNA
tgagaaatgggtgacagatactgaggcacagcatagtgccgcagtagacgcggcagaagcacagcgccagtcact

SEQ ID NO: 193025 - DNA, 75 bp, synthetic construct
  source 1..75: mol_type = other DNA
caggagtatttcgacggccccgaactggatcggttgatactggatgcctggagtaatgtgctgggtttcgcgtca

SEQ ID NO: 193026 - DNA, 75 bp, synthetic construct
  source 1..75: mol_type = other DNA
ttatcagaacaaagtcatcggcgtccttgagcgtgcgctgcgtgagcagtccggctcccggatacgacggatcct

SEQ ID NO: 193027 - DNA, 75 bp, synthetic construct
  source 1..75: mol_type = other DNA
ctcaaccgtgcgctgcgtgaacagtcctgctcccgggtacggcggatcctgcttcgcctgccgggggaacatgac

SEQ ID NO: 193028 - DNA, 75 bp, synthetic construct
  source 1..75: mol_type = other DNA
tttacttaggagaacgcgataacgctgaatatgctataaagccaacatgttggcctgggctagacattatcccta

SEQ ID NO: 193029 - DNA, 75 bp, synthetic construct
  source 1..75: mol_type = other DNA
acgctaatagcgcgcccttgcacaaaaaaacaatcagcagcctgagtggcgcagtggagagtatgatgaaaaaat

SEQ ID NO: 193030 - DNA, 75 bp, synthetic construct
  source 1..75: mol_type = other DNA
agcctacactactgtttaatggttacgctgatcaggtggcatcactatatcgtggtctgaatttgcgggagaatt

SEQ ID NO: 193031 - DNA, 75 bp, synthetic construct
  source 1..75: mol_type = other DNA
atcgccgtccactgtctttccgccactgttctccctgctcagcgaactgctggaagccagcctgccgtcacgggt

SEQ ID NO: 193032 - DNA, 75 bp, synthetic construct
  source 1..75: mol_type = other DNA
gaactccgccgagccggtgctgagtgatttcctgcgctacccggcggttcatcccgaactggtctggcgggagct

SEQ ID NO: 193033 - DNA, 75 bp, synthetic construct
  source 1..75: mol_type = other DNA
ttttgctgatggcacgctgatcgattctgacgtgagcgatgttctgcctctcgcctgcgatctgcacgcgctgac

SEQ ID NO: 193034 - DNA, 75 bp, synthetic construct
  source 1..75: mol_type = other DNA
tcgtggtgtttgtgatccggaagctcgttgccttgccggtaatcccgggtatcccggatctgcaggaccgttctg

SEQ ID NO: 193035 - DNA, 75 bp, synthetic construct
  source 1..75: mol_type = other DNA
ctgaggggacattcctgtcttctcagcagtttcagcagcaggcccgctgggaagcgttcagcaatgacagtattg

SEQ ID NO: 193036 - DNA, 75 bp, synthetic construct
  source 1..75: mol_type = other DNA
ctggagaaccagtattttgcgctggatatgcacagtgacgcggctaaatcgatgctggagtccgggtgctgcatg

SEQ ID NO: 193037 - DNA, 75 bp, synthetic construct
  source 1..75: mol_type = other DNA
tgcgtttgtgacccgttttctgcgtaccgtgcgggaccagcgtctgaatgagtgttgtcgtttgctgggggtgct

SEQ ID NO: 193038 - DNA, 75 bp, synthetic construct
  source 1..75: mol_type = other DNA
ccgggctgggcgcgctggccgatcagattgagaacgctgtcgcaatttcctacgaaaagctgccgggcttcccgg

SEQ ID NO: 193039 - DNA, 75 bp, synthetic construct
  source 1..75: mol_type = other DNA
gcctatgaaagagcgctaaataatgctgcaaatgcgatacgccctatactttcaagccaaattacagcagaacag

SEQ ID NO: 193040 - DNA, 75 bp, synthetic construct
  source 1..75: mol_type = other DNA
tttatcgtccagtagacagaccgacagacccctacgcacaagccggtgaaacaattggtgggtatttagttccag

SEQ ID NO: 193041 - DNA, 75 bp, synthetic construct
  source 1..75: mol_type = other DNA
atgtctcaggttcaattttctcataacacgctgtttttcatagatattatcaagacttataaacctgattttacg

SEQ ID NO: 193042 - DNA, 75 bp, synthetic construct
  source 1..75: mol_type = other DNA
gcggcggaaattcgcatgatgcaaattattggtggggatgttgttggtatgtctgtggtgcctgaggttatttaa

SEQ ID NO: 193043 - DNA, 75 bp, synthetic construct
  source 1..75: mol_type = other DNA
gtggggatgttgttggtatgtctgtggtgcctgaggttatttcagctcgccattgcgaccttaaagtcgttgcgg

SEQ ID NO: 193044 - DNA, 75 bp, synthetic construct
  source 1..75: mol_type = other DNA
gaaagtgatctggaaattaccgaacattacaccgataccgcaggtttcacagagcatgtttttgcactaatgcat

SEQ ID NO: 193045 - DNA, 75 bp, synthetic construct
  source 1..75: mol_type = other DNA
cgcggtaaaggcgtcaagtctgtccgcggtggcgcacagggtgatttgctgtgccgcgttgtcgtcgaaacaccg

SEQ ID NO: 193046 - DNA, 75 bp, synthetic construct
  source 1..75: mol_type = other DNA
tcgccggacgagccgggagcacataagcaccgtatcagtgtgcgaaaaattgacccgctactgggtggttttcgc

SEQ ID NO: 193047 - DNA, 75 bp, synthetic construct
  source 1..75: mol_type = other DNA
gcacagaaacaggagaatcaaaagaaatcacagctccgggtgattaccctgaaaatacaaccactatcgcccctt

SEQ ID NO: 193048 - DNA, 75 bp, synthetic construct
  source 1..75: mol_type = other DNA
ctttttattcattgtacatgtcgctgcacgaagactcacaggtaaaagagtattttattatatctataggggtgt

SEQ ID NO: 193049 - DNA, 75 bp, synthetic construct
  source 1..75: mol_type = other DNA
gtgtacaagctgggctgaataaaggagaagcccgtaatgctcttgcgcgagcggtttttatgcaccggctgggtg

SEQ ID NO: 193050 - DNA, 75 bp, synthetic construct
  source 1..75: mol_type = other DNA
cgactgctggagtgggaagatacatggggagagcgccgccgctgggcgatgccgatggaaatgctcagtggtagc

SEQ ID NO: 193051 - DNA, 75 bp, synthetic construct
  source 1..75: mol_type = other DNA
acttgatgactcacgcgttttttaaagcgctgctgttcctggcatccggttccgtcattctggcctgccatcacg

SEQ ID NO: 193052 - DNA, 75 bp, synthetic construct
  source 1..75: mol_type = other DNA
aagagaaaacgcctgacccagaaattgccgcgctttctgatcgcatctcccggctggagcagcaactcgctgctg

SEQ ID NO: 193053 - DNA, 75 bp, synthetic construct
  source 1..75: mol_type = other DNA
aggagaaagcgactgacccggaaatcgccgcactttctgaccgaatttcccggctggagcatcaactcgccgccg

SEQ ID NO: 193054 - DNA, 75 bp, synthetic construct
  source 1..75: mol_type = other DNA
ccgtggttactggcgggcaaaagggtttgatcgtgatagttgtcaactgtcattatcgcgcggtgagagaaaata

SEQ ID NO: 193055 - DNA, 75 bp, synthetic construct
  source 1..75: mol_type = other DNA
aacgagcttgtcggcaaagacggcggcgcaatccagattgaaacatcaccgatgagtactctattcggaaaatga

SEQ ID NO: 193056 - DNA, 75 bp, synthetic construct
  source 1..75: mol_type = other DNA
ggcgtgcttccgcaaacgacggagctggcgcacggcagcatgttgaccctggaaattacctctggcgtggtcgcg

SEQ ID NO: 193057 - DNA, 75 bp, synthetic construct
  source 1..75: mol_type = other DNA
tgctggaaatcccccccggcactacggctgagacgattgcactgtccggaggccgttttgccaccctcgccggaa

SEQ ID NO: 193058 - DNA, 75 bp, synthetic construct
  source 1..75: mol_type = other DNA
ggaaatctcgccaggttcggctctatattccggatgttgatatttctcagcccctcgggctggtcgtgctgcccg

SEQ ID NO: 193059 - DNA, 75 bp, synthetic construct
  source 1..75: mol_type = other DNA
attcaggaagtgatcagcggcgggcacgatttggtgctaaaaatggcgcaccaacatgaccgtctggaagcggtg

SEQ ID NO: 193060 - DNA, 75 bp, synthetic construct
  source 1..75: mol_type = other DNA
tattccggatgttgatatttctcagcccctcgggctggtcgtgctgcccgatggtgaaacctggtttgatcacct

SEQ ID NO: 193061 - DNA, 75 bp, synthetic construct
  source 1..75: mol_type = other DNA
gtcgccgtggcacgtcccaggccagcacgccagcatttacgccgacaatcatcccgcgcaaggtttccgctcaaa

SEQ ID NO: 193062 - DNA, 75 bp, synthetic construct
  source 1..75: mol_type = other DNA
ccgtggctgtactgggcattgacaacattaatgaacatgaacgcactgagatactcggcgggcgcagcaagctga

SEQ ID NO: 193063 - DNA, 75 bp, synthetic construct
  source 1..75: mol_type = other DNA
tacagaacaaaaaagctcactgctggcaacgctggattaccttgagcagttacgtcggcaaacactggatactgt

SEQ ID NO: 193064 - DNA, 75 bp, synthetic construct
  source 1..75: mol_type = other DNA
ttgcccaacttgcggataacttgcaatctgcactggaacctattctggcagacaagtacttccccgctttgttga

SEQ ID NO: 193065 - DNA, 75 bp, synthetic construct
  source 1..75: mol_type = other DNA
cgcgatcgtgcgcatcagatccgccatgcgtttgatcgcgccacttttgccctgatcgacaagttgaaaaacgat

SEQ ID NO: 193066 - DNA, 75 bp, synthetic construct
  source 1..75: mol_type = other DNA
tctgcagtttattcgtgttaacggtacgctggttggcggatgtattgggctgattttgtatttgctgtcgcagct

SEQ ID NO: 193067 - DNA, 75 bp, synthetic construct
  source 1..75: mol_type = other DNA
taaggaagcggtaaacggggttatcaccctgccgtttgcggcgtcatctgatgcaggtgtggtgacgctgactgc

SEQ ID NO: 193068 - DNA, 75 bp, synthetic construct
  source 1..75: mol_type = other DNA
agtttatgaatgaactgaatagcgggctggatttgcgcattcatctgccgggccgcgaagcacacgcattgcgtg

SEQ ID NO: 193069 - DNA, 75 bp, synthetic construct
  source 1..75: mol_type = other DNA
actatctgccggatgcctttgggccgaaagatctggagattaaaacgctgctgatggacgagcaggatcacggct

SEQ ID NO: 193070 - DNA, 75 bp, synthetic construct
  source 1..75: mol_type = other DNA
accggaacggaaaagatataagcattcagatggaggatgaaacactgcagaatcgtttttgtgaaaatttcaggg

SEQ ID NO: 193071 - DNA, 75 bp, synthetic construct
  source 1..75: mol_type = other DNA
ccactcatcttgagcttgagaaaaaccgtggttactggcgtttgatcgtgatagttgccaactgtcattattgcg

SEQ ID NO: 193072 - DNA, 75 bp, synthetic construct
  source 1..75: mol_type = other DNA
tgctggcgacgctggattacctcgaacagttacgcaggaaagaacccaatacagcaaatagcgttgatattagtc

SEQ ID NO: 193073 - DNA, 75 bp, synthetic construct
  source 1..75: mol_type = other DNA
gaacaagccgcgcaccgcgtcgcgccagagttttccgcattcctgacgcgccatatcagcgatacggtaaaaagc

SEQ ID NO: 193074 - DNA, 75 bp, synthetic construct
  source 1..75: mol_type = other DNA
aaaaacgaaattgcttataacttctaccttgcttccctgcgtcttgatttaaaagccgctaatcgtcaacaaaat

SEQ ID NO: 193075 - DNA, 75 bp, synthetic construct
  source 1..75: mol_type = other DNA
gtcgttacgctgtttttgccgcccaatttttgggtgagcggtgtgaaggcgattgctgaagcggcgatggtcggc

SEQ ID NO: 193076 - DNA, 75 bp, synthetic construct
  source 1..75: mol_type = other DNA
ttgcgctgccgggcattgtcactggtctggcgctattaaccgcctttaaaaccatcaatctggagccgggatttt

SEQ ID NO: 193077 - DNA, 75 bp, synthetic construct
  source 1..75: mol_type = other DNA
taaagatctggaggggcaagtcgagcttgatgcagctttcaccttctcatgccaggccgagatgattatttttga

SEQ ID NO: 193078 - DNA, 75 bp, synthetic construct
  source 1..75: mol_type = other DNA
ctgatgtcgatcgctcaacggtggcgttaaacaccaccaacgcaatcagtacggcgctgggtgatggtctgatga

SEQ ID NO: 193079 - DNA, 75 bp, synthetic construct
  source 1..75: mol_type = other DNA
cgggggagaaaggggggaaaaggcaagatggaagcgagaaaaactcaggttgccaccgataccggaaccagaaat

SEQ ID NO: 193080 - DNA, 75 bp, synthetic construct
  source 1..75: mol_type = other DNA
gcagcgataacgatcagtatcgctcccgtaatgcattaatccgtcgccacattgagaaaatggatgccagtttgc

SEQ ID NO: 193081 - DNA, 75 bp, synthetic construct
  source 1..75: mol_type = other DNA
gtgttgccgaatctcagttcggcgctactggcaggaggaatgctggcgtttgccttgtcgttcgatgaaatcatc

SEQ ID NO: 193082 - DNA, 75 bp, synthetic construct
  source 1..75: mol_type = other DNA
acgccaaagaccgtggcaccctcgaagcgcaactggatgagttgcagatctgggatgcgctgaacgacgtgctga

SEQ ID NO: 193083 - DNA, 75 bp, synthetic construct
  source 1..75: mol_type = other DNA
tttgcgtacctacagcgtggagaagctacgcgagcttatcgcacttggtggtcctgcgtatgaagcgttgctgaa

SEQ ID NO: 193084 - DNA, 75 bp, synthetic construct
  source 1..75: mol_type = other DNA
ctgctgcgctgaccgatttgcgcgagctgtctgacgttaccggcatcggtgcttcaattagcgatgaggatatcc

SEQ ID NO: 193085 - DNA, 75 bp, synthetic construct
  source 1..75: mol_type = other DNA
gatgacattctttcgcagttcgctgagcagatcagcggtgccgtcggcatcccgctggtacgcctgtttggtcaa

SEQ ID NO: 193086 - DNA, 75 bp, synthetic construct
  source 1..75: mol_type = other DNA
ggcgaacggcacaggccaccgctgatggctatgagaactttgttgcccgcgtggggatgcagacacctaaccagc

SEQ ID NO: 193087 - DNA, 75 bp, synthetic construct
  source 1..75: mol_type = other DNA
gtggaatggtcctatcgttcgtcctggatcatcggcgaagcagtcgatgctatcccggatgatatgacccgcaaa

SEQ ID NO: 193088 - DNA, 75 bp, synthetic construct
  source 1..75: mol_type = other DNA
cgccgcactttctgaccgtatttcccggctggagcaccaacttgcagctgaaaaaaagagtgactattccacgtt

SEQ ID NO: 193089 - DNA, 75 bp, synthetic construct
  source 1..75: mol_type = other DNA
aagtttctgcatttcccgtaagcgtaacggaaaatttattcgtgcaacgctggggcgttttcctgatctgagcgt

SEQ ID NO: 193090 - DNA, 75 bp, synthetic construct
  source 1..75: mol_type = other DNA
gtaataactttattgttctggaatacaaagaaaaagatcccctctatgtcactttgtggctgaaagccgacgtca

SEQ ID NO: 193091 - DNA, 75 bp, synthetic construct
  source 1..75: mol_type = other DNA
cactggaacctggtgctgcccgtctggcagtacagctctgacaaagccgaacaaggaaaactcaatacctggcgg

SEQ ID NO: 193092 - DNA, 75 bp, synthetic construct
  source 1..75: mol_type = other DNA
tgcgcaattgctttccgcactggagagcatgagtgatgatgaaaaacgtcgtttactatttgctatagtacaaga

SEQ ID NO: 193093 - DNA, 75 bp, synthetic construct
  source 1..75: mol_type = other DNA
gttccaccgccgactgaaaataaaaaacgctgatgatgttctggtgtttcctggtgtgaagggagtgattcagga

SEQ ID NO: 193094 - DNA, 75 bp, synthetic construct
  source 1..75: mol_type = other DNA
gaactccttggcgaagtcgccacaacggggataaatccgaacatagcaaagcgcactaacaacaaggccatgata

SEQ ID NO: 193095 - DNA, 75 bp, synthetic construct
  source 1..75: mol_type = other DNA
taccgatctttctgttaacgcaacgctgaactaccagtttggtgtcccgctcaaagaccagcttgatcctgacaa

SEQ ID NO: 193096 - DNA, 75 bp, synthetic construct
  source 1..75: mol_type = other DNA
taaatgcatttatctatcgtgtgggggcagctaaacccagcaacctgataggtaaagataaagaaccgctgccgc

SEQ ID NO: 193097 - DNA, 75 bp, synthetic construct
  source 1..75: mol_type = other DNA
caaagaaaaagatccgcttgatgtcaccctgtggttaaaagcggatgccaccaacgagcaccctgagtgcgtcat

SEQ ID NO: 193098 - DNA, 75 bp, synthetic construct
  source 1..75: mol_type = other DNA
acctggtgctgcctgcctggcagtacagttccgatcaagccgaacaagaaaaactcaacacctggcgggtacgcc

SEQ ID NO: 193099 - DNA, 75 bp, synthetic construct
  source 1..75: mol_type = other DNA
gtgtttattgccaaacaagataaagaaaagggaacggtaaccctctccagtacattgccaggcgttttccgctgg

SEQ ID NO: 193100 - DNA, 75 bp, synthetic construct
  source 1..75: mol_type = other DNA
ggcagtacagttctgataaagccgaacaagaaaaactcaatacctggcgggttcgtctggcgctggaagatgaaa

SEQ ID NO: 193101 - DNA, 75 bp, synthetic construct
  source 1..75: mol_type = other DNA
ccagtcgtgtaatggccatcgcctttatatttatgtcggtgcttattgtcctcagcctcgctgttaacgtcattc

SEQ ID NO: 193102 - DNA, 75 bp, synthetic construct
  source 1..75: mol_type = other DNA
tccagtggcagattttaataacccattaaagatctccttaaacatggatttcacgcatcaaccgagcgggttagt

SEQ ID NO: 193103 - DNA, 75 bp, synthetic construct
  source 1..75: mol_type = other DNA
taaaaaaggcagtgatatcccgctggaacacgcccatgaatatgtctggggttatgccacgggtcttgatatgac

SEQ ID NO: 193104 - DNA, 75 bp, synthetic construct
  source 1..75: mol_type = other DNA
ccagtcgcgtactggccattgcctttatatttatgtcgctgttacttgttctcagcctggctgcaaatgtgattc

SEQ ID NO: 193105 - DNA, 75 bp, synthetic construct
  source 1..75: mol_type = other DNA
taaaggctctcttggaattgatacctacacgttgtatatggcggatcgcattagctggcgcaatgtatcatttat

SEQ ID NO: 193106 - DNA, 75 bp, synthetic construct
  source 1..75: mol_type = other DNA
ctgatatcaaacattacatccttattctgaaacgggaaaacggggtgacctggctggataatttcggggaaacag

SEQ ID NO: 193107 - DNA, 75 bp, synthetic construct
  source 1..75: mol_type = other DNA
gtttttatactcaactgcgggagaaactcgctcgtgtcagcgcggtgattgacgccaaaatcctccatcgccagc

SEQ ID NO: 193108 - DNA, 75 bp, synthetic construct
  source 1..75: mol_type = other DNA
attctgtggttcgcgccaataaggtttttggtgaaaaccatatcaccattatttcgcaggaatttcataaccaac

SEQ ID NO: 193109 - DNA, 75 bp, synthetic construct
  source 1..75: mol_type = other DNA
agtcagcgcggtgattgatgcgaaaatcctccatcgccagccgaaatatctcgggccgttggttatgattgggcc

SEQ ID NO: 193110 - DNA, 75 bp, synthetic construct
  source 1..75: mol_type = other DNA
tgaaacgctggcgctgccgtatccggcacagaccgataactaccattacgaaattgaactggtggtggcgattgg

SEQ ID NO: 193111 - DNA, 75 bp, synthetic construct
  source 1..75: mol_type = other DNA
tggcgttctggctgggcggtatcttttgcgcggcactttataaacatcagcgcagttttcataagggggattcat

SEQ ID NO: 193112 - DNA, 75 bp, synthetic construct
  source 1..75: mol_type = other DNA
atgcacagaatgaatagtctttttgttcgcgttatttactcccgctttatgttgtgccagtggtcgtttctggga

SEQ ID NO: 193113 - DNA, 75 bp, synthetic construct
  source 1..75: mol_type = other DNA
aaccttttactgatatcaaacattacatccttattctgaagcgggaaaacggggtgacctggctggataatttcg

SEQ ID NO: 193114 - DNA, 75 bp, synthetic construct
  source 1..75: mol_type = other DNA
cgaaatatatctcgccggggcgtaaatacccgcagccgcacgtggcgctcccggccttcgaccgcaacggcagga

SEQ ID NO: 193115 - DNA, 75 bp, synthetic construct
  source 1..75: mol_type = other DNA
ttgtgcaagaacgcgtcccgtatggatcagaaactccgggctcccgtacctatgacatgggcatttatgatagcg

SEQ ID NO: 193116 - DNA, 75 bp, synthetic construct
  source 1..75: mol_type = other DNA
aatacccccgttgttgcaatttatgctgattacaaaacgcgatggcccgcaatggccgatgtttcggagtcagtc

SEQ ID NO: 193117 - DNA, 75 bp, synthetic construct
  source 1..75: mol_type = other DNA
gatggccatgctcggggggataaacgtcttattgatgcacataaccaggccgtggattttgctgtccgtcaggtg

SEQ ID NO: 193118 - DNA, 75 bp, synthetic construct
  source 1..75: mol_type = other DNA
caccgacaaggataattactatgtgctgggcagcatgggagaacgctgggctggtcagggggctgaacagcttgg

SEQ ID NO: 193119 - DNA, 75 bp, synthetic construct
  source 1..75: mol_type = other DNA
ggctgccggacggggcggatttaagccgcatgcaggatggcagtaacaggcatcgtcccggctacgacctgacct

SEQ ID NO: 193120 - DNA, 75 bp, synthetic construct
  source 1..75: mol_type = other DNA
ggacgtatcggctctgccaccaacaacctcggctttatgtatgagctggatgctatcgcggcgtgcgtggtgggc

SEQ ID NO: 193121 - DNA, 75 bp, synthetic construct
  source 1..75: mol_type = other DNA
aagttattctggctgaagaagcgaagcgtattaaaaacgataacgtgaactcagcatttttccagaccagtgttc

SEQ ID NO: 193122 - DNA, 75 bp, synthetic construct
  source 1..75: mol_type = other DNA
atgccagatggttcaattgaacagtggggacgaattaatttcccgactaacgccgcggcggtatctacaaatgtg

SEQ ID NO: 193123 - DNA, 75 bp, synthetic construct
  source 1..75: mol_type = other DNA
gaagataaagccagggcattagtggattgcttgaggtgtactggcaatagcggacactaccatttgttctttttt

SEQ ID NO: 193124 - DNA, 75 bp, synthetic construct
  source 1..75: mol_type = other DNA
cgctaacaaagtgttcccggagatggcgacgatgccgattgcgctggttattctgattgtttgcgctattggcgc

SEQ ID NO: 193125 - DNA, 75 bp, synthetic construct
  source 1..75: mol_type = other DNA
ggacggtgattggtgtggtgaccggggtgattatttttaccgtcatcaactatggcctgacgtacatcggcgtaa

SEQ ID NO: 193126 - DNA, 75 bp, synthetic construct
  source 1..75: mol_type = other DNA
gattatgttaatcagttacgtgtctttgcggtggttaaccagttccgtcttcagtattcagaggagtcagcataa

SEQ ID NO: 193127 - DNA, 75 bp, synthetic construct
  source 1..75: mol_type = other DNA
atcacaagcaagtacggacgtcacaagctggcaaatgatggtacccgttttggtccggggcaggcgattgtcact

SEQ ID NO: 193128 - DNA, 75 bp, synthetic construct
  source 1..75: mol_type = other DNA
taaggaagcggtaaatggtgttatcaccctgccgtttacggcgtcatctgatgcaggtgtggtgacactgactgc

SEQ ID NO: 193129 - DNA, 75 bp, synthetic construct
  source 1..75: mol_type = other DNA
cggcctctgttaacacgctggtgaccgagatgaacgataccagcggtcgctggagctatgcgcgtcagctgtatg

SEQ ID NO: 193130 - DNA, 75 bp, synthetic construct
  source 1..75: mol_type = other DNA
ccgactatgaggtgatccgcgccgctgaaaccggcctggtacagattcaggcgcggatgggcggcaccggcgaac

SEQ ID NO: 193131 - DNA, 75 bp, synthetic construct
  source 1..75: mol_type = other DNA
cagccaaccggctgaactggcagcccgcctgaaggcgctgaacatcactgccgactatgaagtaatccgcgccgc

SEQ ID NO: 193132 - DNA, 75 bp, synthetic construct
  source 1..75: mol_type = other DNA
gcaacggcgtatgtcgaaagcggggtgctgcgcattcagcgtgatgtcaccacgtacaggaaaaatgcttacggg

SEQ ID NO: 193133 - DNA, 75 bp, synthetic construct
  source 1..75: mol_type = other DNA
gcgccatctggctggcaaaacagtacggcatcgacgctatcggttttaacgcgccagacctcaatatgaagcacg

SEQ ID NO: 193134 - DNA, 75 bp, synthetic construct
  source 1..75: mol_type = other DNA
atcctccatcgccagccgaaatatctcgggccgtcggtcatgattgggccgtttagtgagcatggctgtccggcg

SEQ ID NO: 193135 - DNA, 75 bp, synthetic construct
  source 1..75: mol_type = other DNA
gattatgttaaccagttacgtgtctttgcggtggttaaccagttccgtctccagtattcagaggagtcagcataa

SEQ ID NO: 193136 - DNA, 75 bp, synthetic construct
  source 1..75: mol_type = other DNA
atggccacgtttatacagcaaaactcggaacgctttctgatctggttgccgctggcgatcagcttaaccaacagc

SEQ ID NO: 193137 - DNA, 75 bp, synthetic construct
  source 1..75: mol_type = other DNA
attctgattgcgatattcgcctttaaaatgccgattgatatggcatttgctgctgcgggctatggctttatttat

SEQ ID NO: 193138 - DNA, 75 bp, synthetic construct
  source 1..75: mol_type = other DNA
tgcggggatcgtggaaaactacgaactgtttaagcagtacctggttgtggagcgtgatgccagcgatccgaaccg

SEQ ID NO: 193139 - DNA, 75 bp, synthetic construct
  source 1..75: mol_type = other DNA
acggttacgctgacggtgaccggggcggcaaccgaaaccggcacggtgaatgtctatgtgggacgtacccgcgtg

SEQ ID NO: 193140 - DNA, 75 bp, synthetic construct
  source 1..75: mol_type = other DNA
actggccgatcacacagcacgatttccaccggcttatatcagacagcgagaatatagacattattctctggcatg

SEQ ID NO: 193141 - DNA, 75 bp, synthetic construct
  source 1..75: mol_type = other DNA
ccacccgcatgatgctctccctggacagagagcgaatttgcgaatgcctgctcagtaatcgccagttgcagtcca

SEQ ID NO: 193142 - DNA, 75 bp, synthetic construct
  source 1..75: mol_type = other DNA
gacgccaaaatcctccatcgccagccgaaatatctcgggccatcggtcatgattgggccgtttagtgagcatggc

SEQ ID NO: 193143 - DNA, 75 bp, synthetic construct
  source 1..75: mol_type = other DNA
tttcgtgttattggttctcatcagttattacaagttttatatgtttagccgtagacaggcttccacatcagatga

SEQ ID NO: 193144 - DNA, 75 bp, synthetic construct
  source 1..75: mol_type = other DNA
ctgaaaaatgaggatgtttttgccggtggtgatattgcacttgctacagcggctggagcttggctggggcttgag

SEQ ID NO: 193145 - DNA, 75 bp, synthetic construct
  source 1..75: mol_type = other DNA
atgacgatgagctttaacaccattccgtcgaatacgctggttccgattttttatgcggaaatggataactcggcg

SEQ ID NO: 193146 - DNA, 75 bp, synthetic construct
  source 1..75: mol_type = other DNA
atgccagtagtgcaaccaatattagcgggatgtcacaggggtattatcttgatgtcagcttactggacaatgtga

SEQ ID NO: 193147 - DNA, 75 bp, synthetic construct
  source 1..75: mol_type = other DNA
tcaataccttcttaacacgagtgagcaaacccggggcggttcacttagccgcgtgtccattattgctggataaga

SEQ ID NO: 193148 - DNA, 75 bp, synthetic construct
  source 1..75: mol_type = other DNA
gactatgttaaccagttgcgtgtctttgccgtggttaaccagttccgtcttcagtattcagaggagtccgcataa

SEQ ID NO: 193149 - DNA, 75 bp, synthetic construct
  source 1..75: mol_type = other DNA
agcttgccagcgacggtacccgctttggtcccggtcaggcgattgtcaccccggcggtgatcaaaggggaactgc

SEQ ID NO: 193150 - DNA, 75 bp, synthetic construct
  source 1..75: mol_type = other DNA
cacgtacaggaaaaacgcttacggggttgcggataacagctacctcgacagcgagacgctgcataccagtgcgta

SEQ ID NO: 193151 - DNA, 75 bp, synthetic construct
  source 1..75: mol_type = other DNA
ctgttggcattcctcttgtccgcctgttccgccagtcaccgaagggtttttcaaccggtgacgctgaccttgcga

SEQ ID NO: 193152 - DNA, 75 bp, synthetic construct
  source 1..75: mol_type = other DNA
tacgtagttatctggcagtggcgggggggattgatgttccgtcagtgatggggtcatgcagtaccgatctgaaag

SEQ ID NO: 193153 - DNA, 75 bp, synthetic construct
  source 1..75: mol_type = other DNA
ccccgacgcgctctaccggatgattatggagtccggcgacgtagcggagagccgcgcgaagatgatcgcccgcac

SEQ ID NO: 193154 - DNA, 75 bp, synthetic construct
  source 1..75: mol_type = other DNA
cttggacgcgcaaccggcgcgctggatcaggcgcgtgcgctgtcaatcggctcgaatggttatatctggcgtaca

SEQ ID NO: 193155 - DNA, 75 bp, synthetic construct
  source 1..75: mol_type = other DNA
cacaccgcaaaatgaaagataaatttgtcaggtgggataacccgccaacgctggacggtatgaccggccatgccg

SEQ ID NO: 193156 - DNA, 75 bp, synthetic construct
  source 1..75: mol_type = other DNA
acgccgtctggaccggctggcgcttgccgatgaaagcaggccagcgtttaacccttaaacgtccgcaacatggtg

SEQ ID NO: 193157 - DNA, 75 bp, synthetic construct
  source 1..75: mol_type = other DNA
tgcaagtgccacataacgggcaaccgattgtactgatgaatgatgcgcagaccaccggtggttatccgcgtatcg

SEQ ID NO: 193158 - DNA, 75 bp, synthetic construct
  source 1..75: mol_type = other DNA
cttggcgttgcagaagttatcgccaaagttttcgatgtcaatgaaccattaagtaaaatcaatcaggccaaactc

SEQ ID NO: 193159 - DNA, 75 bp, synthetic construct
  source 1..75: mol_type = other DNA
atggcgactttgttacagattcactttgcatttaatggcccctttggcgatgaaatggccgaacagcttaaaccg

SEQ ID NO: 193160 - DNA, 75 bp, synthetic construct
  source 1..75: mol_type = other DNA
gcgttgaggaagttgtcgccaaagttttcgatgtcaatgtgccactgagtcaaatcaatcaggcaaaacttgcct

SEQ ID NO: 193161 - DNA, 75 bp, synthetic construct
  source 1..75: mol_type = other DNA
tggtcgctacgatggttcaaatgacagtatcacggaaattattgaggcgctggaacgctacagtgaaatcatcac

SEQ ID NO: 193162 - DNA, 75 bp, synthetic construct
  source 1..75: mol_type = other DNA
acatccgtttacttagtgcctttctggtggggataacttggccaataagtctgcctgtagcattactcttttctc

SEQ ID NO: 193163 - DNA, 75 bp, synthetic construct
  source 1..75: mol_type = other DNA
atgaaactggaatataaaaataatcatgatgcctatattatttctttagattatccattacaggattttgtggtt

SEQ ID NO: 193164 - DNA, 75 bp, synthetic construct
  source 1..75: mol_type = other DNA
aggacttatttaccattcgagcggtgaggagggggagatttccccttacattgcagaaatggcgagagaattagc

SEQ ID NO: 193165 - DNA, 75 bp, synthetic construct
  source 1..75: mol_type = other DNA
gtcgcggggcgcggatggttattgatccacaaggtgaatgtctaccacaaactcgtcgcggcgcaaaagaagaat

SEQ ID NO: 193166 - DNA, 75 bp, synthetic construct
  source 1..75: mol_type = other DNA
ccgataaacagacgctgtttaccgccgctaccgcgggcaacggcgataacttcgctaaactggcggaagcactgg

SEQ ID NO: 193167 - DNA, 75 bp, synthetic construct
  source 1..75: mol_type = other DNA
ttgatgcgctgacgcacgtcactttcccgaagggttttgtgtcagcagagccagcgtcaattgtcacggttgaag

SEQ ID NO: 193168 - DNA, 75 bp, synthetic construct
  source 1..75: mol_type = other DNA
caaaacccatctttgaacaatcattcacaattaatagcttacaggcgcaacgtgtcgttgaccgtgtttttagac

SEQ ID NO: 193169 - DNA, 75 bp, synthetic construct
  source 1..75: mol_type = other DNA
cgtacctcaaggttaatggtgaaagtgctgttggaagaagtacagcgcctcgccattccagtgttgaccagtgca

SEQ ID NO: 193170 - DNA, 75 bp, synthetic construct
  source 1..75: mol_type = other DNA
gtgggcgaagttgccgagctgtttatgtggcggcatatggcactgacttctgccgccgtattaacgcaattgacg

SEQ ID NO: 193171 - DNA, 75 bp, synthetic construct
  source 1..75: mol_type = other DNA
ttaataacgcgttgcagcgttaccacttcgaacttgcaaaccggggcgtaactaaggatgaaagccttcgtaact

SEQ ID NO: 193172 - DNA, 75 bp, synthetic construct
  source 1..75: mol_type = other DNA
tcattttcttgagaatcatccgttaatgaaactgactccggctgttcagcatcatcgatacctgaaattacaata

SEQ ID NO: 193173 - DNA, 75 bp, synthetic construct
  source 1..75: mol_type = other DNA
ggattatggccggttgagcgttatctctcactactcactggcgagctgccgcgtttacgcgatgatagcgatggc

SEQ ID NO: 193174 - DNA, 75 bp, synthetic construct
  source 1..75: mol_type = other DNA
caccctggatatgctcaggagtggcgaaagtagtaagagttcgatttttgccaaactttcccgattgatggttga

SEQ ID NO: 193175 - DNA, 75 bp, synthetic construct
  source 1..75: mol_type = other DNA
aaataatcctttcctgcttggatatgttgaaatgaaaacagagtgcggtcaacttagggtagttgataccgggat

SEQ ID NO: 193176 - DNA, 75 bp, synthetic construct
  source 1..75: mol_type = other DNA
atgatcgaagcctacaaaatacttatcaataacgcgttgcaacgttatcactttgaactcgcaaaccggggcgta

SEQ ID NO: 193177 - DNA, 75 bp, synthetic construct
  source 1..75: mol_type = other DNA
gaaatggtgccggagttcattgagaagatggacgaggcgctggcggagatcggattcacgttcggggagcagtgg

SEQ ID NO: 193178 - DNA, 75 bp, synthetic construct
  source 1..75: mol_type = other DNA
ggaccggtatcgacgtaactactatccagcaaggcgacgaggcatggcaccggctgcgcctcggcgttatcaccg

SEQ ID NO: 193179 - DNA, 75 bp, synthetic construct
  source 1..75: mol_type = other DNA
gaggcatcgtgcagtgagcgcgttttgcgtcagcaatttcgccagcagactggaatgaccatcaatcaatatctg

SEQ ID NO: 193180 - DNA, 75 bp, synthetic construct
  source 1..75: mol_type = other DNA
ttcaacgaaatggtgccggagttcatcgagaagatggacgaggcgctggcggaaatcggcttcacgttcggggag

SEQ ID NO: 193181 - DNA, 75 bp, synthetic construct
  source 1..75: mol_type = other DNA
ggtatcggcacaccgcgcagcacgtttccgtggaatttgtccggcacctatgtacaggtgatcccatatatctat

SEQ ID NO: 193182 - DNA, 75 bp, synthetic construct
  source 1..75: mol_type = other DNA
cattattgcaacggtatctttcacgtcagagaaacacctgttcgtgagtttcctattatccgaggtatttggttt

SEQ ID NO: 193183 - DNA, 75 bp, synthetic construct
  source 1..75: mol_type = other DNA
ggtgattaaactgctgcatcaacgcggtgagaatggcgaagatcgcgtggcgggggctatcctcgtaaccggttc

SEQ ID NO: 193184 - DNA, 75 bp, synthetic construct
  source 1..75: mol_type = other DNA
aagaagttacaaaatcccccggccgcatgaaaaaagcggtttatcatattaccggaattagtgatattcagttta

SEQ ID NO: 193185 - DNA, 75 bp, synthetic construct
  source 1..75: mol_type = other DNA
attacacaggcagagaggagaataaccctataatatccttttccgaagttgcatttatcggtggagagcagatgc

SEQ ID NO: 193186 - DNA, 75 bp, synthetic construct
  source 1..75: mol_type = other DNA
atgtttcagctcagaaccggcgataaaatccactgggggccttttggccatttagtccgggaattacattttaac

SEQ ID NO: 193187 - DNA, 75 bp, synthetic construct
  source 1..75: mol_type = other DNA
ctcggcgtcaatgaagtgattgccaaagtgtttgatgtcaatacgtcattgagtcaaatcaatcaggcaaagctc

SEQ ID NO: 193188 - DNA, 75 bp, synthetic construct
  source 1..75: mol_type = other DNA
atggcaactttgttacaacttcattttgcttttaatggcccatttggcgacgcaatggctgagcagcttaaaccg

SEQ ID NO: 193189 - DNA, 75 bp, synthetic construct
  source 1..75: mol_type = other DNA
ataatctttttccaggtgctctttttatttatcttcttgagagaatgacgaatatcgttttatctggcgatgatt

SEQ ID NO: 193190 - DNA, 75 bp, synthetic construct
  source 1..75: mol_type = other DNA
ttgcgggattaaccgaaattttcaatctcgacaaaccggttatcgcagctgtgaacggctatgcctttggcggcg

SEQ ID NO: 193191 - DNA, 75 bp, synthetic construct
  source 1..75: mol_type = other DNA
cccgggatttcatgaaattccggctcggtggtttcgaggcaataaaatcggcttacatggcccaggtgcagtaca

SEQ ID NO: 193192 - DNA, 75 bp, synthetic construct
  source 1..75: mol_type = other DNA
cttttcccgcggggttactggcgctaaatcagtcagaatccctcgccatgaaaatactgctcgacctggctccga

SEQ ID NO: 193193 - DNA, 75 bp, synthetic construct
  source 1..75: mol_type = other DNA
acgaatgggcgcagaagaggcgctgcgttgggggatagtcaaccgcgtggttagccaggcggaactgatggataa

SEQ ID NO: 193194 - DNA, 75 bp, synthetic construct
  source 1..75: mol_type = other DNA
tcttttccgcaggctgggatttaaaagcagcagcagaaggcgaagcaccggatgctgactttggtccgggtggtt

SEQ ID NO: 193195 - DNA, 75 bp, synthetic construct
  source 1..75: mol_type = other DNA
acttatattaattttattctaaaaggttggtcggatggaattaaaagaaattatgggaagtatattggaataagg

SEQ ID NO: 193196 - DNA, 75 bp, synthetic construct
  source 1..75: mol_type = other DNA
tcgtgaagatctggtgcaacagtcgttatatcggctggaacttattgatccgaataacccggacgtcgttgccgc

SEQ ID NO: 193197 - DNA, 75 bp, synthetic construct
  source 1..75: mol_type = other DNA
ttgacagcgacagctatcagctgctcaaggcgtatgacgtgaatatctccggtctggtcagtacgactatgcaga

SEQ ID NO: 193198 - DNA, 75 bp, synthetic construct
  source 1..75: mol_type = other DNA
ggccgatatcaataactatgccgggcagattaaatctgctatcgaaagtaagttctatgacgcatcgtcctatgc

SEQ ID NO: 193199 - DNA, 75 bp, synthetic construct
  source 1..75: mol_type = other DNA
gtggaaggtattgagacactgagtttgcagcttgatgagaatgaaactatggcccttgctcaattagttaaacgt

SEQ ID NO: 193200 - DNA, 75 bp, synthetic construct
  source 1..75: mol_type = other DNA
atgaaagaggaattatttatagactatgtcgatattgaatggtgcctccgagctgcaagtaaaaagtttaacttt

SEQ ID NO: 193201 - DNA, 75 bp, synthetic construct
  source 1..75: mol_type = other DNA
ctggaacccctggaagccgatatattatctccgagctggatactgcaaatacttctccgatacacatcaaattgg

SEQ ID NO: 193202 - DNA, 75 bp, synthetic construct
  source 1..75: mol_type = other DNA
ttatcgttttgtgatgtggcgtgattccaataacgatggcatttatcagcagtcagaaaaactgactgaagaaga

SEQ ID NO: 193203 - DNA, 75 bp, synthetic construct
  source 1..75: mol_type = other DNA
agcccgaaaaatcttgccggtgatgcaaaaccgatccctctgaaatctggttatcgttttgtgatgtggcgtgat

SEQ ID NO: 193204 - DNA, 75 bp, synthetic construct
  source 1..75: mol_type = other DNA
atggatcagaatctccgggctcctgtacccatgacatgggcatttatgatgcgtgaggcgggttttccggcagtc

SEQ ID NO: 193205 - DNA, 75 bp, synthetic construct
  source 1..75: mol_type = other DNA
cagatattccaatagtgatcgtttatggacccaaaggggaagataaagccagggcattagtggattgttataata

SEQ ID NO: 193206 - DNA, 75 bp, synthetic construct
  source 1..75: mol_type = other DNA
ccgttaatgcgttgattaatcaccactacaaaattgttgctgcgtcctggcaggcgaagaacaacgccgcacgca

SEQ ID NO: 193207 - DNA, 75 bp, synthetic construct
  source 1..75: mol_type = other DNA
atgacttaccttatgagatagaacgcgaacctttaagtaacagttttacacccggcgaggcgaatacatatcagc

SEQ ID NO: 193208 - DNA, 75 bp, synthetic construct
  source 1..75: mol_type = other DNA
tcggagcgccagtatcagaaaagtctacaggagatagcgcgtcagtgcggcgcgatagtaactggctcctacgat

SEQ ID NO: 193209 - DNA, 75 bp, synthetic construct
  source 1..75: mol_type = other DNA
gaggcgaccttgaaaaggcgctgatgaagcacctggacatgatacgtcagttccagaccatcgaaggcatgacca

SEQ ID NO: 193210 - DNA, 75 bp, synthetic construct
  source 1..75: mol_type = other DNA
aaggtaatcacgaaccagcaggggattcccccctggaagatccaccatagccgcgttatccgcatggagggcgat

SEQ ID NO: 193211 - DNA, 75 bp, synthetic construct
  source 1..75: mol_type = other DNA
aatttgaaacacattcctattctttcgcgggcctgtctgacctgcttagcgagtttaaagaggatatcgcgggcg

SEQ ID NO: 193212 - DNA, 75 bp, synthetic construct
  source 1..75: mol_type = other DNA
acttgaccgctggatgattaacccgcagctcaccaggcgcattaaggcgcttggccctaacctcggcaagcctga

SEQ ID NO: 193213 - DNA, 75 bp, synthetic construct
  source 1..75: mol_type = other DNA
cgttcctcctggattattggtgccgcagtcgattcgaaagcggacgatatgaccaaaaagggcgtgcggatcacc

SEQ ID NO: 193214 - DNA, 75 bp, synthetic construct
  source 1..75: mol_type = other DNA
caaaaaaactgaagaaaaggtgttacttgaagccacgttcactttttcatatcaggccgagttaattatttttga

SEQ ID NO: 193215 - DNA, 75 bp, synthetic construct
  source 1..75: mol_type = other DNA
gcaaacttatcgttgtatgtagtcagaagggcggaatcgttaaatcgcagtcatccagtgaaatcgcacatgacc

SEQ ID NO: 193216 - DNA, 75 bp, synthetic construct
  source 1..75: mol_type = other DNA
gcaggcccgaaatgcagttggtaaacagcttacttacatgcaaaaaataaaacggaactataatccatcgttgca

SEQ ID NO: 193217 - DNA, 75 bp, synthetic construct
  source 1..75: mol_type = other DNA
tgaccagggggcgcgggtgatactggataaggatataaaaacttccgtttccctgtcgattagacgccgtattct

SEQ ID NO: 193218 - DNA, 75 bp, synthetic construct
  source 1..75: mol_type = other DNA
gagtttacaccctggctaacatacttggctcagggaagcctgtatcggcgcaatccatcaccgcgacgctggcct

SEQ ID NO: 193219 - DNA, 75 bp, synthetic construct
  source 1..75: mol_type = other DNA
aaatatactctgttgtcatggcctgaattttacaggcatcatgcgcagagatggtttgaaatggctaaagggtat

SEQ ID NO: 193220 - DNA, 75 bp, synthetic construct
  source 1..75: mol_type = other DNA
tttttaaattgcaggagatgttgccttttcttaatttgcatatgtcgccggagcgaatactgcagcggatggact

SEQ ID NO: 193221 - DNA, 75 bp, synthetic construct
  source 1..75: mol_type = other DNA
acactgctaagtttatggacaggcattatcgtctggctggggctggaacttatgggcgtacagtttgcgctgatg

SEQ ID NO: 193222 - DNA, 75 bp, synthetic construct
  source 1..75: mol_type = other DNA
cgtttttgctcaactacgtgcccaatatcggcgcggtaatttccgccgtaccgccaatgattcaggtgctgctgt

SEQ ID NO: 193223 - DNA, 75 bp, synthetic construct
  source 1..75: mol_type = other DNA
ccgctggtgcgtggtttaccgcacttatgtgttattcaccgccagttgtatcaggatattttcgactgggcgggc

SEQ ID NO: 193224 - DNA, 75 bp, synthetic construct
  source 1..75: mol_type = other DNA
tgcgcactatccatcgccagctgtatcaggatattttcgactgggcggggcaactgcgtgaagttgatatttatc

SEQ ID NO: 193225 - DNA, 75 bp, synthetic construct
  source 1..75: mol_type = other DNA
gcgtgctgcgaccattgagcttggtccgctggtgcgcggtttaccgcatttgcgcactatccatcgccagctgta

SEQ ID NO: 193226 - DNA, 75 bp, synthetic construct
  source 1..75: mol_type = other DNA
gcctctctggggctgaacgttcccgctgcgatggcgggtgcgtccatgccgtccatcggcctggagcaactgctg

SEQ ID NO: 193227 - DNA, 75 bp, synthetic construct
  source 1..75: mol_type = other DNA
tggtttgtatcgagtcatgtcaagtgaccgaagtgctgctggtaagcgctttcaaaaatggctatttcatgaagt

SEQ ID NO: 193228 - DNA, 75 bp, synthetic construct
  source 1..75: mol_type = other DNA
gttaccgtggtgagactggagaaagtgatctcagaacgttgatccttggcgagatcttatatatctcattgagag

SEQ ID NO: 193229 - DNA, 75 bp, synthetic construct
  source 1..75: mol_type = other DNA
aatcgccactcgtcaagtctggcggtcaattatattgggatattgattcgccatcagaacaacaaccactaaaga

SEQ ID NO: 193230 - DNA, 75 bp, synthetic construct
  source 1..75: mol_type = other DNA
tctgccgccgtcataaaagatgcttttctcgcaataacacctgatacttctgttttacatatgacaagtgcttat

SEQ ID NO: 193231 - DNA, 75 bp, synthetic construct
  source 1..75: mol_type = other DNA
tttaacaatgaaatgttattcctccttatgtaaatcggcgtcgaaaatggaccagtctcttcgggcgccagtacc

SEQ ID NO: 193232 - DNA, 75 bp, synthetic construct
  source 1..75: mol_type = other DNA
aagggtatctgactggtcttgagaaagagatgttcgttgagcgactggcgcattattattgtgaaatcaacgtgc

SEQ ID NO: 193233 - DNA, 75 bp, synthetic construct
  source 1..75: mol_type = other DNA
gaagccgtgcagaaatttggtgcccaaaaacaagatggcgtgcaagggtatggattacgtgtggtttacagcaag

SEQ ID NO: 193234 - DNA, 75 bp, synthetic construct
  source 1..75: mol_type = other DNA
aaaaaggcaaccggcaaaactccggcgtggtggaaatcaccgttcagcaggatcgcaaaattgaactgatcgtca

SEQ ID NO: 193235 - DNA, 75 bp, synthetic construct
  source 1..75: mol_type = other DNA
ttcaaaggaatcctcaacgaatgggattccctcgttgctctgttgaagtctgaaatgaagatacacggaaacaaa

SEQ ID NO: 193236 - DNA, 75 bp, synthetic construct
  source 1..75: mol_type = other DNA
cggtacgggtgataattctgatttaagtgtcaatgtatccctaaattatcagataggtacgccactgaaggatca

SEQ ID NO: 193237 - DNA, 75 bp, synthetic construct
  source 1..75: mol_type = other DNA
ggcgcgaaagcgaatacgataaatgaggatttgattctgccagccaccaacaaggaagccgcatcgaaatttgat

SEQ ID NO: 193238 - DNA, 75 bp, synthetic construct
  source 1..75: mol_type = other DNA
ggattatttaaaattttctggtaactattatcatccgctttcagagtggaaagattcaaaagattttgatttcta

SEQ ID NO: 193239 - DNA, 75 bp, synthetic construct
  source 1..75: mol_type = other DNA
gcgacccgtatctctatcctggcctcgatatcatgcgtaatcggctggatatccgccaacagcagcggctggagc

SEQ ID NO: 193240 - DNA, 75 bp, synthetic construct
  source 1..75: mol_type = other DNA
agaagtatctgactagccttgagaaagataaattcgtcgagcggttggcgcattactattgtgaaatcaacgtgc

SEQ ID NO: 193241 - DNA, 75 bp, synthetic construct
  source 1..75: mol_type = other DNA
gtgacccatatctctacccgggtctcgatatcatgcgtaacaagctcaacatccgccagcagcagcggctggaac

SEQ ID NO: 193242 - DNA, 75 bp, synthetic construct
  source 1..75: mol_type = other DNA
attccctagttgctctgttgaagtctgaaatgaagatacacggaaacaaagcaccagagacttacagaagaatca

SEQ ID NO: 193243 - DNA, 75 bp, synthetic construct
  source 1..75: mol_type = other DNA
ttcaaaggcatcctcaacgaatgggattccctagttgctctgttgaagtctgaaatgaagatacacggaaacaaa

SEQ ID NO: 193244 - DNA, 75 bp, synthetic construct
  source 1..75: mol_type = other DNA
cggcatcagtagcgcaactcttgcctcaatcgcatgtggactgaaaaagaatatctatggtcatcacttcggcgc

SEQ ID NO: 193245 - DNA, 75 bp, synthetic construct
  source 1..75: mol_type = other DNA
caaaggttgtaacaacgctggccactccattttatgttcttgagacaaggagccgtcgtcgacctttgccgccta

SEQ ID NO: 193246 - DNA, 75 bp, synthetic construct
  source 1..75: mol_type = other DNA
gcagctctggcgcgcatggtcagcgttgagcgttccacctggctcagagtgtattcaggccactgggcggctttc

SEQ ID NO: 193247 - DNA, 75 bp, synthetic construct
  source 1..75: mol_type = other DNA
ggtactgctacggttttgaccttagctataagcaccaggtgatgatgtgtgaatacgtctggaaaacttatcaga

SEQ ID NO: 193248 - DNA, 75 bp, synthetic construct
  source 1..75: mol_type = other DNA
cttttcaggcttacagtttgagtgatgcgcaggtgaaaaaactgagcgatcaggcatgccaggagatggacagca

SEQ ID NO: 193249 - DNA, 75 bp, synthetic construct
  source 1..75: mol_type = other DNA
gccgatccgcaactggaagccggccatgaaccgttttatgatcgaatttggtgaccgtttaaatggccaccttta

SEQ ID NO: 193250 - DNA, 75 bp, synthetic construct
  source 1..75: mol_type = other DNA
atgcacctaatcaggctctggcccttatggattccgtggtagagatgaagcgtgctgccatagcggcgcttggca

SEQ ID NO: 193251 - DNA, 75 bp, synthetic construct
  source 1..75: mol_type = other DNA
ctctcagccatgcgattaaggcgctggaggaaaggctaaatatccgcctcttaacccgaactacccgcagcgtgg

SEQ ID NO: 193252 - DNA, 75 bp, synthetic construct
  source 1..75: mol_type = other DNA
tgtcgatattgttgaagggcgttttgatgccgggatacgtctgggtgaaactgttgataatgatatgattgcagt

SEQ ID NO: 193253 - DNA, 75 bp, synthetic construct
  source 1..75: mol_type = other DNA
tgtcgatattgttgaaggccgttttgatgccgggatacgtctgggtgaaactgtcgataaggatatgattgcagt

SEQ ID NO: 193254 - DNA, 75 bp, synthetic construct
  source 1..75: mol_type = other DNA
cggcgttatccggttttggcatcgcctgtatacctgaagacagagtgcaggattatataaagtcaggagagctta

SEQ ID NO: 193255 - DNA, 75 bp, synthetic construct
  source 1..75: mol_type = other DNA
ggaggaaaggctgaatatccgccttctgacccgtacgacccgaagcgttgcccctacagaggccggtgagagaat

SEQ ID NO: 193256 - DNA, 75 bp, synthetic construct
  source 1..75: mol_type = other DNA
tatcaatatgcgcctgccgacagccggtgggctttaccactgggagtttgagaaggaagggaaaccgttacgggt

SEQ ID NO: 193257 - DNA, 75 bp, synthetic construct
  source 1..75: mol_type = other DNA
gaactttggtttaaaaccgtccaccaacgacacaatcgaaatcggcagtaaaacgcgtatcggcgatggcttgtt

SEQ ID NO: 193258 - DNA, 75 bp, synthetic construct
  source 1..75: mol_type = other DNA
tatcgtctcggtgctggtgtttttatttgtgcatatgctgcccggcgatccggcgcgattgattgccgggcccga

SEQ ID NO: 193259 - DNA, 75 bp, synthetic construct
  source 1..75: mol_type = other DNA
gggcgtagttcccgctggcgggaaagtgaagttaaacgctggctgacggaacgtattgaagaatcccgctattaa

SEQ ID NO: 193260 - DNA, 75 bp, synthetic construct
  source 1..75: mol_type = other DNA
cgcagaaactcctgactcctggaaatgggatctgaacaccattcccgtgcgtatcattcccgtggaagaccatgc

SEQ ID NO: 193261 - DNA, 75 bp, synthetic construct
  source 1..75: mol_type = other DNA
tgagcatgtcacccgtgaacgcgctcatagtcgcctatccgatgaggatttggaggtattatgcgaggcttattt

SEQ ID NO: 193262 - DNA, 75 bp, synthetic construct
  source 1..75: mol_type = other DNA
gattgtccgattgaaacaagtgcagtgacggcaatcgtgacaggttcaactgacaatacgggttattacaaaaat

SEQ ID NO: 193263 - DNA, 75 bp, synthetic construct
  source 1..75: mol_type = other DNA
agccgatgcgcaggtcatcgagctggtgcgtcaacaactggggttggataagccactgtatcaccagttctggca

SEQ ID NO: 193264 - DNA, 75 bp, synthetic construct
  source 1..75: mol_type = other DNA
cgatcctcgtttcccaaatgctggtgtggcatggaatgaggcagacgagaatttattgcgagatgttctggagga

SEQ ID NO: 193265 - DNA, 75 bp, synthetic construct
  source 1..75: mol_type = other DNA
gagcccaatattgggcacggggatttgcttcaatgtttcccgaaaagtgtcaacgtaaccggcatcgaactggat

SEQ ID NO: 193266 - DNA, 75 bp, synthetic construct
  source 1..75: mol_type = other DNA
tgccaatgggtgcccctgggagttctctggttgcttatatgcctcatactggcctccttattaacgacgataact

SEQ ID NO: 193267 - DNA, 75 bp, synthetic construct
  source 1..75: mol_type = other DNA
tggcgaaaaaatcaaccgctgcgcacctggtggcgaagctgtgatgttgaaaattgccgagttgcttaatgtcga

SEQ ID NO: 193268 - DNA, 75 bp, synthetic construct
  source 1..75: mol_type = other DNA
tcccgccgttttgcggtggaagacgatccggtcgttgagaaaattgacgaaatcttaccgcagagccagtgtggt

SEQ ID NO: 193269 - DNA, 75 bp, synthetic construct
  source 1..75: mol_type = other DNA
taataaggtcactttggatgataacttgtctgaaggtgaaataattgctatgggtacatttcgagtaccatggga

SEQ ID NO: 193270 - DNA, 75 bp, synthetic construct
  source 1..75: mol_type = other DNA
taccgcccctttactgatggtgaccaccaggcggtgctggagagtgtagttaaagaagtcgatgaattgatttcc

SEQ ID NO: 193271 - DNA, 75 bp, synthetic construct
  source 1..75: mol_type = other DNA
caattacacccactgatttacgccacaatgttgggcactctttggcgatgcaaggtgctagcgctgaagagatag

SEQ ID NO: 193272 - DNA, 75 bp, synthetic construct
  source 1..75: mol_type = other DNA
ctttattatcgcccttttacggatggtgaacatcaggctgtacttgaatgcgtcaaaaaagaagtcgatgaacta

SEQ ID NO: 193273 - DNA, 75 bp, synthetic construct
  source 1..75: mol_type = other DNA
gcgggcacacggcgttaagcaggtactgatcgcctacgacaacgatccggcgggcaatgaggcagcggtgaaact

SEQ ID NO: 193274 - DNA, 75 bp, synthetic construct
  source 1..75: mol_type = other DNA
gtcgggtaaagctgaaaccgtaccagaccagacaccatgcggcttacaggccggagcggtcggggcagaggaaaa

SEQ ID NO: 193275 - DNA, 75 bp, synthetic construct
  source 1..75: mol_type = other DNA
tgcagcacctgaaagccgccgtctccttagtcgccgtggttcaggctcaggggcgacaactggttaagaaaggga

SEQ ID NO: 193276 - DNA, 75 bp, synthetic construct
  source 1..75: mol_type = other DNA
atggtgtcgggcagatttacggcatgtatgtcctgaccggaacgaatacgacccgctccgagtttgatcgctacg

SEQ ID NO: 193277 - DNA, 75 bp, synthetic construct
  source 1..75: mol_type = other DNA
atgctgtccggcttcaaagataaggtgacatcatcccttaatagcgcggccagctcagttaaggggctgctctga

SEQ ID NO: 193278 - DNA, 75 bp, synthetic construct
  source 1..75: mol_type = other DNA
tatcggtgcaggtgatgatcgcatcgtgctttccggtgtgctttatcctgaaattacaggtggcgaagtgtcgct

SEQ ID NO: 193279 - DNA, 75 bp, synthetic construct
  source 1..75: mol_type = other DNA
cagcacattggaaaggtcatccagtagtgggacttgttggtgacgagttgcatgataaaattggtggttgttcca

SEQ ID NO: 193280 - DNA, 75 bp, synthetic construct
  source 1..75: mol_type = other DNA
caactggccaagctggcggcaaaagatttgcgcattgatacccgaaactccgaaaccgagttaatacgctatagc

SEQ ID NO: 193281 - DNA, 75 bp, synthetic construct
  source 1..75: mol_type = other DNA
aatggctacgtcgattcgctatggcgaaaactacagtttgaacaccattcgagatgcagcaattctgggactgac

SEQ ID NO: 193282 - DNA, 75 bp, synthetic construct
  source 1..75: mol_type = other DNA
ccgggtgtcagcgcggaaaccctggctgatggcgaactgatggtagccttaccgggcgaacgctggacgatccgg

SEQ ID NO: 193283 - DNA, 75 bp, synthetic construct
  source 1..75: mol_type = other DNA
gaccccatcaatacacatgccacgttgggccagccgtattctgttggaaataaccgacgtgcgtgtggaacggct

SEQ ID NO: 193284 - DNA, 75 bp, synthetic construct
  source 1..75: mol_type = other DNA
ggggcacgccgtacttgcctgtggagggacggtgcagtcagaccgcccgttgaagcaggaaccagacgctgagca

SEQ ID NO: 193285 - DNA, 75 bp, synthetic construct
  source 1..75: mol_type = other DNA
gttgcgcgtgctgtggtcatacagcgaaagaaaatcgcctgtcacaaagtcaattcagatgccaggtatgtggat

SEQ ID NO: 193286 - DNA, 75 bp, synthetic construct
  source 1..75: mol_type = other DNA
tgtcgatattgttgaaggtcgttttgatgccgggatacgtctgggtgaaactgtggataatgatatgattgcagt

SEQ ID NO: 193287 - DNA, 75 bp, synthetic construct
  source 1..75: mol_type = other DNA
tgtcgatattgttgaaggacgttttgatgccgggatacgtctgggtgaaactgtagataacgatatgattgcagt

SEQ ID NO: 193288 - DNA, 75 bp, synthetic construct
  source 1..75: mol_type = other DNA
gtccgtgaagcgtgggcaatattaggcaatgaggatggttgcagtgtggactggaacggcaacctttgtcatggc

SEQ ID NO: 193289 - DNA, 75 bp, synthetic construct
  source 1..75: mol_type = other DNA
gaaatgccgccgcagacgcggaaactgttaaccctgatccagcaatgggtgagcggcagcggtcaggcgcgtgag

SEQ ID NO: 193290 - DNA, 75 bp, synthetic construct
  source 1..75: mol_type = other DNA
cactaacctgacggcggcctacctggcggcggtatcgcgcaaactggacaggccgctggcggtgctgatccagtc

SEQ ID NO: 193291 - DNA, 75 bp, synthetic construct
  source 1..75: mol_type = other DNA
atcgatgccatgtcgttctgggtcgccgggttccgcaatgtcacggcggcttacggggtgaacggcttcaccgat

SEQ ID NO: 193292 - DNA, 75 bp, synthetic construct
  source 1..75: mol_type = other DNA
cgtgtggtgtggtgggtgagtccaccaacctgacggcggcgtatctggcggcggtgtcgcgcaaactggacaggc

SEQ ID NO: 193293 - DNA, 75 bp, synthetic construct
  source 1..75: mol_type = other DNA
ggcacacggcgttaagcaggtgctgatcgcctacgacaacgatccggcgggcaatgaggcagcggtgaaactggc

SEQ ID NO: 193294 - DNA, 75 bp, synthetic construct
  source 1..75: mol_type = other DNA
atgcatacctttatttttcttgtgctgataaaaaatattaacggtggcggaagctggaatgttaccccatgccaa

SEQ ID NO: 193295 - DNA, 75 bp, synthetic construct
  source 1..75: mol_type = other DNA
atagttctgctgatcattgtggccaaatttactggcaatcttaaactggggtcaggagaaaaaagcaacaggaaa

SEQ ID NO: 193296 - DNA, 75 bp, synthetic construct
  source 1..75: mol_type = other DNA
ggaaagtaatcctttaggagccagtatgaaaactttgacaaaatatgctcaggcctgtggcgcaaccatcaatat

SEQ ID NO: 193297 - DNA, 75 bp, synthetic construct
  source 1..75: mol_type = other DNA
aagtaatcctttaggagccagtatgaaaactttaacaagatatgctcaggcctgtggtgcaaccatcaatattca

SEQ ID NO: 193298 - DNA, 75 bp, synthetic construct
  source 1..75: mol_type = other DNA
tcagccaggtaaagcaaaaactgcttaataccccagaagctgttaaagggtatgaagatgctgacaaagaactgg

SEQ ID NO: 193299 - DNA, 75 bp, synthetic construct
  source 1..75: mol_type = other DNA
ggcatatggatgatatcgatgattacccctatggtctggtttttctcctttcaggacgatgtcatcattcggcgg

SEQ ID NO: 193300 - DNA, 75 bp, synthetic construct
  source 1..75: mol_type = other DNA
ccatgtcttgcctggacactgctgatgatcgttgccatcgttgtcctctggcgatttaccacccatccagggcct

SEQ ID NO: 193301 - DNA, 75 bp, synthetic construct
  source 1..75: mol_type = other DNA
aagcaacattaatgctaacttattagcatctataaaagatacacttgcatatactgctgttaattttagttcagc

SEQ ID NO: 193302 - DNA, 75 bp, synthetic construct
  source 1..75: mol_type = other DNA
gcatgcgtttcttgctctggggctggacggtcgtacggtgagaaatctgtattattatcagcaacgggaaacgcc

SEQ ID NO: 193303 - DNA, 75 bp, synthetic construct
  source 1..75: mol_type = other DNA
acgtccttatgcagggtgctatgtaaacgccgttatcgatatctgggcacaggacaataatttcggtaaacgcat

SEQ ID NO: 193304 - DNA, 75 bp, synthetic construct
  source 1..75: mol_type = other DNA
ccggcagccattcagccgctagctgatgatccggtaatgcgtcaggtcttcgagaatgagagggttattcagcgt

SEQ ID NO: 193305 - DNA, 75 bp, synthetic construct
  source 1..75: mol_type = other DNA
ggtacagcaacaaaagcccatgacctcttcgtgatccctctgtgcagagagtgccacgacgagttacacgccgat

SEQ ID NO: 193306 - DNA, 75 bp, synthetic construct
  source 1..75: mol_type = other DNA
gtgagggctttgttaactcctgaagtagcccatcgcatggggattgtgttgtttcgtcccggcgcggaactgatg

SEQ ID NO: 193307 - DNA, 75 bp, synthetic construct
  source 1..75: mol_type = other DNA
atgatgaaagtaaaaggtgttccgttcagccaggtaaagcaaaaactgcttaatactccggaagctgtcaaaggc

SEQ ID NO: 193308 - DNA, 75 bp, synthetic construct
  source 1..75: mol_type = other DNA
cgaacgttactaccgcgacgccaaaatcatggaaatcatcgaagggacatcgcaaattcatgaaatccaaattgc

SEQ ID NO: 193309 - DNA, 75 bp, synthetic construct
  source 1..75: mol_type = other DNA
gcctggaggataacgggaaaggaaaagcggtaagcatggcaagttacgggctgaacgtataccagagctaccacg

SEQ ID NO: 193310 - DNA, 75 bp, synthetic construct
  source 1..75: mol_type = other DNA
acagactctcgagcagcaaaaccacttccaggtggctgtgttggttgtgccgaccacagggggcaaaaacattaa

SEQ ID NO: 193311 - DNA, 75 bp, synthetic construct
  source 1..75: mol_type = other DNA
cgggctgtgaaccgttttgcactggtggcgatggcgggcgagctggcaacccggctggggattactggctggcct

SEQ ID NO: 193312 - DNA, 75 bp, synthetic construct
  source 1..75: mol_type = other DNA
tggtgattaccgaaggttacgccacggcgctgacggtaagccagctcaccgccggatgcgtagtggcggccatat

SEQ ID NO: 193313 - DNA, 75 bp, synthetic construct
  source 1..75: mol_type = other DNA
gcccgtcattctgcagatgctgcgtattgatgtacctgaaaacggcaggcacggtccctgcccgaaatgtggggg

SEQ ID NO: 193314 - DNA, 75 bp, synthetic construct
  source 1..75: mol_type = other DNA
tgccgcgtgcgtttactgaagcgcaagccgaagcaatggtgacgattgtcttcagtgcgggggccgaggcgttgg

SEQ ID NO: 193315 - DNA, 75 bp, synthetic construct
  source 1..75: mol_type = other DNA
cgccgttcgctggtggaagccgcatttagccaattaagtgctgaacgcagcttcgccagcctgagtttgcgtgaa

SEQ ID NO: 193316 - DNA, 75 bp, synthetic construct
  source 1..75: mol_type = other DNA
gcccatcagccatcagccgcctggaaagcaatcctttaggggcaagcatgaaaactttatcaaaatatgcccaag

SEQ ID NO: 193317 - DNA, 75 bp, synthetic construct
  source 1..75: mol_type = other DNA
agaagcgatacggcgaaggtatcttaattctcgtcgtttggccggaagggctggcgtcaatgaagattggacatg

SEQ ID NO: 193318 - DNA, 75 bp, synthetic construct
  source 1..75: mol_type = other DNA
gtccaggttgctgttttggtaacaccaaccactgaaggtaaaagcattaaactggcggcctcccaggcgtacggg

SEQ ID NO: 193319 - DNA, 75 bp, synthetic construct
  source 1..75: mol_type = other DNA
cacgcattctccatgatgctggcaccaaagaataaaaacaccaaagcaataaaacaaaatacgcctctgcaacat

SEQ ID NO: 193320 - DNA, 75 bp, synthetic construct
  source 1..75: mol_type = other DNA
ggttaaacaaggcgtcaaaattgatgtgttaaatattggagggatggcctggcgaccagggaaaaaacagttaac

SEQ ID NO: 193321 - DNA, 75 bp, synthetic construct
  source 1..75: mol_type = other DNA
ctcgcccacaggatgccttagcaatggttcgccagggggtaaaaataggtaccctaatattggcggcatggcctg

SEQ ID NO: 193322 - DNA, 75 bp, synthetic construct
  source 1..75: mol_type = other DNA
gcgccaccgggaatgaaggttaacgtggtcaatattgaaaaagccgtcgctgtttatcacaacccgcaatatcag

SEQ ID NO: 193323 - DNA, 75 bp, synthetic construct
  source 1..75: mol_type = other DNA
cttaaccatcatgttggtggggttgttgtaaagggaatacgagagacatattttaaaataacatgtcgtcttctt

SEQ ID NO: 193324 - DNA, 75 bp, synthetic construct
  source 1..75: mol_type = other DNA
agttaccaatctgcagatgaataggactatatcatctctacaaacttatatacgctggctggttgggaatgaaat

SEQ ID NO: 193325 - DNA, 75 bp, synthetic construct
  source 1..75: mol_type = other DNA
gttgactcatctaccgtaaaagaacgttgcatggttttaaactctgacgatcttaggcaagaacaagatttgata

SEQ ID NO: 193326 - DNA, 75 bp, synthetic construct
  source 1..75: mol_type = other DNA
tacacctgaaaaacaaagcaatatcaccgcgttggttggtatcgacgttattaaagagaatctctataacctgtc

SEQ ID NO: 193327 - DNA, 75 bp, synthetic construct
  source 1..75: mol_type = other DNA
aagccgtactcagttgaaaaagcaaactaataaattattccagagccttgcagagcttggatataacgttgaaag

SEQ ID NO: 193328 - DNA, 75 bp, synthetic construct
  source 1..75: mol_type = other DNA
cgcccaggatgatcttggtgaagcctacgaatacctgattaaaaagttcgctgatgattccggtcatacggcagc

SEQ ID NO: 193329 - DNA, 75 bp, synthetic construct
  source 1..75: mol_type = other DNA
ttattgaaaacgatcggctcaagcagtttgatgtgatttttgccaacccaccgtactccattaaaaaatggaatc

SEQ ID NO: 193330 - DNA, 75 bp, synthetic construct
  source 1..75: mol_type = other DNA
gctgcgttggtggatatcgacgttattaaggagaatctgtataacctgtcaattccactgtatgtgcaagcacaa

SEQ ID NO: 193331 - DNA, 75 bp, synthetic construct
  source 1..75: mol_type = other DNA
tgctctggggagctgctgagtttcttcgcggccaaatcgacgcatcagactacaagcagtatgtcttccccttgc

SEQ ID NO: 193332 - DNA, 75 bp, synthetic construct
  source 1..75: mol_type = other DNA
ctgaccataaccagtatggtctgggcggtgatatttggtatggcggcgggaattatcgccgccgtctggcgtaat

SEQ ID NO: 193333 - DNA, 75 bp, synthetic construct
  source 1..75: mol_type = other DNA
cttcgctaatgcctacaggctcacacatggtatgaagctgcaacaaaacgtccaggcagtctacatggaatgtaa

SEQ ID NO: 193334 - DNA, 75 bp, synthetic construct
  source 1..75: mol_type = other DNA
aaaccatggatgaccttaaacgtgtgtttgctgacgcctacaaacgcactgcaggcatgaagctgcagcagaacg

SEQ ID NO: 193335 - DNA, 75 bp, synthetic construct
  source 1..75: mol_type = other DNA
tatctctcttggtgttgaaaaggtatcaataagttcagcagctgttgaaaatcctaatcttgttagagaattggc

SEQ ID NO: 193336 - DNA, 75 bp, synthetic construct
  source 1..75: mol_type = other DNA
gatccctatttacaaacccagtggcaactaactgacaaactatcgttggatgctggtgtgcgctacagctccgtg

SEQ ID NO: 193337 - DNA, 75 bp, synthetic construct
  source 1..75: mol_type = other DNA
ccggggtgctgtgcctgttctggtcgtggctggtggcgcgatatctcgaccgtacacagccgtctgtcggcggag

SEQ ID NO: 193338 - DNA, 75 bp, synthetic construct
  source 1..75: mol_type = other DNA
gctggcgtatggtgcctggctgatttatcccccggcggggtttgttgttgccggggcgctgtgcctgttctggtc

SEQ ID NO: 193339 - DNA, 75 bp, synthetic construct
  source 1..75: mol_type = other DNA
aaataaatactatcaatatcagctacctggtgccgggaaaccgcatctgtatcgccggttcggtcaacatttgat

SEQ ID NO: 193340 - DNA, 75 bp, synthetic construct
  source 1..75: mol_type = other DNA
ggggcgtggcgcaaaaacggcgcaacccgcgtgctggcagccattgacgcgcgaatgggcgaagtttactgggcc

SEQ ID NO: 193341 - DNA, 75 bp, synthetic construct
  source 1..75: mol_type = other DNA
atgggcgatacaaaaagtatcgaagaagcccaaatggcagagttaaaagcaatggttgaatccttagggaaggtg

SEQ ID NO: 193342 - DNA, 75 bp, synthetic construct
  source 1..75: mol_type = other DNA
tacaaacacaaagcctaccagcttctgcgtgacgggcagatctcgcgggaggattatgaatccatcaatcgttaa

SEQ ID NO: 193343 - DNA, 75 bp, synthetic construct
  source 1..75: mol_type = other DNA
ggcgatcaactggtactacaaacaccagtccttcaaattgctgcgtggcggcaaaatttcgcggggggaatatga

SEQ ID NO: 193344 - DNA, 75 bp, synthetic construct
  source 1..75: mol_type = other DNA
ttatcacgtatttcatcgccgtcgtgctggcctggctgggcgatttgtccattaaggatgcctcaacgctgggcg

SEQ ID NO: 193345 - DNA, 75 bp, synthetic construct
  source 1..75: mol_type = other DNA
tttttgagctgcgcacgctgccgcatcagcagttacagcaaaacaaaagctggcggcatgtgaaaaatgagcgcg

SEQ ID NO: 193346 - DNA, 75 bp, synthetic construct
  source 1..75: mol_type = other DNA
actgaccacggatgacggaaacgggctgcggggattcagcggtgaaggacgggtgaaaggcagcggggatgcgca

SEQ ID NO: 193347 - DNA, 75 bp, synthetic construct
  source 1..75: mol_type = other DNA
ccggattgccggtatcagcaaggatgacgggctgataaccctggaggatgcggaaggtaacacgcggctgatttc

SEQ ID NO: 193348 - DNA, 75 bp, synthetic construct
  source 1..75: mol_type = other DNA
ccgtggactttgctgttcgtcaggtggaggcgctggcctccacacgggtgatgacggacggacagtcagaaacgg

SEQ ID NO: 193349 - DNA, 75 bp, synthetic construct
  source 1..75: mol_type = other DNA
tatcgtaatatgacaatagatttatttggtcgtgtcgataatttattcgataaagaatatgtcggctcggtgatt

SEQ ID NO: 193350 - DNA, 75 bp, synthetic construct
  source 1..75: mol_type = other DNA
gggacagtcctgcacggtttattgcaccggggcgcaaatatccgcagccgtatgtggcactgccggcgtttgacc

SEQ ID NO: 193351 - DNA, 75 bp, synthetic construct
  source 1..75: mol_type = other DNA
ctgcggggattcagcggtgaaggacgggtgaaaggcagcggggatgcgcagttcgtggccctgcagggtagccgt

SEQ ID NO: 193352 - DNA, 75 bp, synthetic construct
  source 1..75: mol_type = other DNA
ggttcattgagaatgtgtacgctaatcagattgcctttggcaggttctaccgggaaaaactgaaagagcaggttg

SEQ ID NO: 193353 - DNA, 75 bp, synthetic construct
  source 1..75: mol_type = other DNA
cagttccgggcggtgatgtcagccgtgaacatgctgccggagagtgagcgtccccgtgtcgtggggctggggccc

SEQ ID NO: 193354 - DNA, 75 bp, synthetic construct
  source 1..75: mol_type = other DNA
cggcggaacaggtgattgatcatcttcgctgcgatctgttggttgatcctacccacgtaatatggacacaggcct

SEQ ID NO: 193355 - DNA, 75 bp, synthetic construct
  source 1..75: mol_type = other DNA
ccgtagattttgctgtccgtcatcacccgtgtggaggcactggcctccacacgggtgatgacggacggacagtca

SEQ ID NO: 193356 - DNA, 75 bp, synthetic construct
  source 1..75: mol_type = other DNA
cgtcttattgatgcacataaccaggccgtagattttgctgtccgtcatcacccgtgtggaggcactggcctccac

SEQ ID NO: 193357 - DNA, 75 bp, synthetic construct
  source 1..75: mol_type = other DNA
atctggcaacccataccagcgccctgccgcgtgaacagcctggcggtgcagcaaatcgtccggtgtttgtctggc

SEQ ID NO: 193358 - DNA, 75 bp, synthetic construct
  source 1..75: mol_type = other DNA
catctggcccttcctgtgctggaaagtaaaaacctggccttcagcatggtggacctgctgacagaggcgaagtcg

SEQ ID NO: 193359 - DNA, 75 bp, synthetic construct
  source 1..75: mol_type = other DNA
cagggctattgccgggcaggagcaggacagggcttcgtcatcagaacgggaaactgcgctgccggaaagtgtgct

SEQ ID NO: 193360 - DNA, 75 bp, synthetic construct
  source 1..75: mol_type = other DNA
aggccatccgtcgtgaaacggaacgccgtgcggatgagattgtcagaaaaatggcacaggaaaaacctgaccagc

SEQ ID NO: 193361 - DNA, 75 bp, synthetic construct
  source 1..75: mol_type = other DNA
gtggggctggaagcctggggggatgtctccagtgaacgtgctattgttcgcacccgtaacacgcggctgatttcg

SEQ ID NO: 193362 - DNA, 75 bp, synthetic construct
  source 1..75: mol_type = other DNA
actgtttaaccatgacaccagtcgcgatcaggacccacagttacacacgcatgtggtggtggctaatgtcacgca

SEQ ID NO: 193363 - DNA, 75 bp, synthetic construct
  source 1..75: mol_type = other DNA
tttccggatgtccccatgacactgtatgaagccattgtccgcgactataccggcaggacaccggaagcacgggag

SEQ ID NO: 193364 - DNA, 75 bp, synthetic construct
  source 1..75: mol_type = other DNA
tgagccgaaaccggaccgggaggtcatgaatgcgcagcggctgttcagtacggcgcgggagctgcgggacgtggc

SEQ ID NO: 193365 - DNA, 75 bp, synthetic construct
  source 1..75: mol_type = other DNA
ggggatatcccggataacagcgtccggccgggggccggaaatggcgaaccggtcacggcagaggtactggcacag

SEQ ID NO: 193366 - DNA, 75 bp, synthetic construct
  source 1..75: mol_type = other DNA
caccgacaaggataattactatgtgctgggcagcatgggagaacgctgggccggccagggggctgaacagcttgg

SEQ ID NO: 193367 - DNA, 75 bp, synthetic construct
  source 1..75: mol_type = other DNA
gtcgggacagcgtgccgccacccgtatgatactggaaacgtccgaccgtttcacggtggtacaggggtatgccgg

SEQ ID NO: 193368 - DNA, 75 bp, synthetic construct
  source 1..75: mol_type = other DNA
gcttgcaggtggcatccgtcagcgaggacgcgatgacggttgttgtgccgggacgggctgaaccggcctccctgc

SEQ ID NO: 193369 - DNA, 75 bp, synthetic construct
  source 1..75: mol_type = other DNA
ggaaacgggctgcggggattcagtggtgaaggccgtgtgaaaggcagcggggatgcgcagttcgtggccctgcag

SEQ ID NO: 193370 - DNA, 75 bp, synthetic construct
  source 1..75: mol_type = other DNA
tacaggcagtgcgctgatggccatgaaagatgccggggtgaacacatatcgctggcaggggggagaacagcgacc

SEQ ID NO: 193371 - DNA, 75 bp, synthetic construct
  source 1..75: mol_type = other DNA
tatcaagcacgaaatcggttcggcttatccgggcgatgaagtccgtgaaatcgaagttcgtggccgtaacctggc

SEQ ID NO: 193372 - DNA, 75 bp, synthetic construct
  source 1..75: mol_type = other DNA
gttgcccgggaaaatctgctgcaggagcgtctgcagcagatagagcgggatatggttcgtgacctgcagaaagag

SEQ ID NO: 193373 - DNA, 75 bp, synthetic construct
  source 1..75: mol_type = other DNA
tgaagaggccatccgccgtgaaacggaacgccgcgcagatgaaattgtccgtaaaatggcagagaacaaacctga

SEQ ID NO: 193374 - DNA, 75 bp, synthetic construct
  source 1..75: mol_type = other DNA
tatgttcagatcggcgcccgaaccaatatccaggatggcagcgtcttacacgtgacccataaatcaacggctaat

SEQ ID NO: 193375 - DNA, 75 bp, synthetic construct
  source 1..75: mol_type = other DNA
cgcccgttaagtgatgaagagaaggctgggttacgctattccgcaaataactacgtgaaatggaaggacgaatat

SEQ ID NO: 193376 - DNA, 75 bp, synthetic construct
  source 1..75: mol_type = other DNA
cgttgttacgaccatcttgtgaagtgtttcacgttgtcgtctcaacggaggcgcattatagggatcccaattttt

SEQ ID NO: 193377 - DNA, 75 bp, synthetic construct
  source 1..75: mol_type = other DNA
tctggacggtgacagcggtttccggtgacagtgtcacgctgtcagacggacagcagacccgggtgattcgccccg

SEQ ID NO: 193378 - DNA, 75 bp, synthetic construct
  source 1..75: mol_type = other DNA
cggagagtgtgctgcgtgaatcacaacgggagcgggaagcggtccgggaggttgcccgggaaaacctgctgcagg

SEQ ID NO: 193379 - DNA, 75 bp, synthetic construct
  source 1..75: mol_type = other DNA
ttcagcggtgaaggacgggtgaaaggcagcggggatgcgcagttcgtggccctgcagggcagccgtaacggagag

SEQ ID NO: 193380 - DNA, 75 bp, synthetic construct
  source 1..75: mol_type = other DNA
ggggcgcaaagtgctttatatgcgttctgatctcgatgcttatcttgcatccactcgcagaacgcagacggtgta

SEQ ID NO: 193381 - DNA, 75 bp, synthetic construct
  source 1..75: mol_type = other DNA
acccggacagcgggatatcatcaaaacggtggcgctggtgctgatggtactggaccacatcaatctgatattcca

SEQ ID NO: 193382 - DNA, 75 bp, synthetic construct
  source 1..75: mol_type = other DNA
cgggaaaatctgctgcaggagcgtctgcagcagatggagcgggatatggttcgtgacctgcagaaagagaaaacc

SEQ ID NO: 193383 - DNA, 75 bp, synthetic construct
  source 1..75: mol_type = other DNA
gggatctttttccacaaatcggtcaacgagtcatgatcgacagcagtagtgtggttattggtgatgttcgtctgg

SEQ ID NO: 193384 - DNA, 75 bp, synthetic construct
  source 1..75: mol_type = other DNA
cggcggaacaggtgattgatcatcttcgctgcgatctgttggtcattaaacctgaccagtatcagacacccgttg

SEQ ID NO: 193385 - DNA, 75 bp, synthetic construct
  source 1..75: mol_type = other DNA
ccgcggagcaggtaattgatcaccttcgctgtgacctgttggtgattaaacccgatcagtaccagacacctgtcg

SEQ ID NO: 193386 - DNA, 75 bp, synthetic construct
  source 1..75: mol_type = other DNA
ccgctgcgacctgctggtgattaaacctgaccagtaccagacacctgtcgaactggatgacgaagaagacgatta

SEQ ID NO: 193387 - DNA, 75 bp, synthetic construct
  source 1..75: mol_type = other DNA
ccgctgcgatttgctggtgattaaacctgaccagtaccagacgcctgtcgaactggatgacgaagaagacgatta

SEQ ID NO: 193388 - DNA, 75 bp, synthetic construct
  source 1..75: mol_type = other DNA
ccgttgcgacctgctggtaatcaaacccgatcaataccagacgccagttgaactggatgacgaagaagaagacga

SEQ ID NO: 193389 - DNA, 75 bp, synthetic construct
  source 1..75: mol_type = other DNA
aaattaaagcttttttgccgatttatgatttctcatacgaaatgactaccctgctctccccggacgagcgcaccg

SEQ ID NO: 193390 - DNA, 75 bp, synthetic construct
  source 1..75: mol_type = other DNA
cgccgtgaaacggaacgtcgcgcagatgaaattgtccgtaaaatggcagagaacaaacctgacctgccggacggc

SEQ ID NO: 193391 - DNA, 75 bp, synthetic construct
  source 1..75: mol_type = other DNA
ggtgggcaataccgacatggcacgggcatacgccctgattgcggccggtggcggtcgggctgtggccagcggtga

SEQ ID NO: 193392 - DNA, 75 bp, synthetic construct
  source 1..75: mol_type = other DNA
atcatgaaacagaaccgggtgaccgtacatccggagaaaagtgtcccccggacggctggttacagcgatgcggtc

SEQ ID NO: 193393 - DNA, 75 bp, synthetic construct
  source 1..75: mol_type = other DNA
ctgctctccccggacgaacgtaccgctatgcgtcagggcgtcatcagccagcgtacagcctggatccacgagcag

SEQ ID NO: 193394 - DNA, 75 bp, synthetic construct
  source 1..75: mol_type = other DNA
gcgaaatattatcttaacgctggcgttcctattgaaatcaaagtggtctggcataaccgtcctttcgaagccatc

SEQ ID NO: 193395 - DNA, 75 bp, synthetic construct
  source 1..75: mol_type = other DNA
agcggcggcgtctattccacgcctggcgatatgatgcgctggatgcagcagtatttgtcgtctgatttttatcag

SEQ ID NO: 193396 - DNA, 75 bp, synthetic construct
  source 1..75: mol_type = other DNA
tttggaagctattgaatatcttaaattttcagagataaaaaacggcaggaaaatcggcttccagatccataagcg

SEQ ID NO: 193397 - DNA, 75 bp, synthetic construct
  source 1..75: mol_type = other DNA
tatacgtttttcgaagcgttaccttcaaaccctgcgccagtgagtattgagcgccttcgtgccagattgaacctc

SEQ ID NO: 193398 - DNA, 75 bp, synthetic construct
  source 1..75: mol_type = other DNA
tgccggagttcggttaggcgaacaggttgatatggatatgatttccctacctcttgccagagacttccgttttgc

SEQ ID NO: 193399 - DNA, 75 bp, synthetic construct
  source 1..75: mol_type = other DNA
ggattaagtgaacgaaaagtgcagttcacgtacacggacgtgctggccaggacggtcggcatactgccgccggaa

SEQ ID NO: 193400 - DNA, 75 bp, synthetic construct
  source 1..75: mol_type = other DNA
cggatgcgcttcacgaagagtgaccgggagcgcggttatgtggccaacagcgtctggacggtgacagcggtttcc

SEQ ID NO: 193401 - DNA, 75 bp, synthetic construct
  source 1..75: mol_type = other DNA
atgacggacggacagtcagaaacggtactgaccggtaatctggtgatggcactgtttaaccacgacaccagtcgc

SEQ ID NO: 193402 - DNA, 75 bp, synthetic construct
  source 1..75: mol_type = other DNA
aagcgggctgcttttccccgattcaaaaagcggggacagaatgatgcatttcgctacccgcagggcgttaagctc

SEQ ID NO: 193403 - DNA, 75 bp, synthetic construct
  source 1..75: mol_type = other DNA
aaatggcttcctggctggttgagtggaaaaaagccactgaaacgcaatggcttaaagattctcccagtcacagcc

SEQ ID NO: 193404 - DNA, 75 bp, synthetic construct
  source 1..75: mol_type = other DNA
agtttaccctcgtttctgcccagcagctttcaatggccaagcagcagttaggtttgtcgccgcaggacagcttag

SEQ ID NO: 193405 - DNA, 75 bp, synthetic construct
  source 1..75: mol_type = other DNA
gttgatatggatatgatttccctgccccttgccagggacttccgttttgcggtggtcggagcgccctcttatttc

SEQ ID NO: 193406 - DNA, 75 bp, synthetic construct
  source 1..75: mol_type = other DNA
tcggcaatgggggttcctgaaacacctcatgatttgcagcatcatcgctgcattaatatgcgcctgccaacggca

SEQ ID NO: 193407 - DNA, 75 bp, synthetic construct
  source 1..75: mol_type = other DNA
cggcgttagagggctacggcctggcgcatgttccacgcgatattgcggaaaaacacatcgccagcggcgaactga

SEQ ID NO: 193408 - DNA, 75 bp, synthetic construct
  source 1..75: mol_type = other DNA
tggcgctgtttcgccgcgtgccgattccgatcatttctcgtcatacggcgattatcccgcgtaataaagaccgga

SEQ ID NO: 193409 - DNA, 75 bp, synthetic construct
  source 1..75: mol_type = other DNA
gtataccgccaataccaccgatgtcgcgttactcaagcgagcgcacaagaaaatggtgaaagcggtcgatagcgc

SEQ ID NO: 193410 - DNA, 75 bp, synthetic construct
  source 1..75: mol_type = other DNA
ctttccggcgtgctttatcctgaaattacaggtggcgaagtgtcgctttcgttgctgaccacgcaggcatataca

SEQ ID NO: 193411 - DNA, 75 bp, synthetic construct
  source 1..75: mol_type = other DNA
gtatgtgattgagcagatcacgcaaaaccggacggagttttttaaggacgggaaggcaaagaaaattgattttac

SEQ ID NO: 193412 - DNA, 75 bp, synthetic construct
  source 1..75: mol_type = other DNA
tttttcagttaagcacgctgccacaccaacaaatacagcagtcccgtaactggcgccacgtgaagaatgagcgaa

SEQ ID NO: 193413 - DNA, 75 bp, synthetic construct
  source 1..75: mol_type = other DNA
gtgctttctggtgtgctttatcctgaaatcacaggtggcgaagtgtcgctgtcgctgctgaccacgcaggcgtat

SEQ ID NO: 193414 - DNA, 75 bp, synthetic construct
  source 1..75: mol_type = other DNA
tgcgactggtagaagggatgcgtctgagcgattacctcaagcaattgcgtgaggccccgtatatcaagcatacgc

SEQ ID NO: 193415 - DNA, 75 bp, synthetic construct
  source 1..75: mol_type = other DNA
ttgaactcagacgcgccaaaatgctggcgctctcattgctgctgacagcggtcgccacgtttatcgttacgctat

SEQ ID NO: 193416 - DNA, 75 bp, synthetic construct
  source 1..75: mol_type = other DNA
ggcagcgcgagccgatgccgtaaaaagttatctgaaagaagatgaagcttttaaccgctatctcagtgaattgtg

SEQ ID NO: 193417 - DNA, 75 bp, synthetic construct
  source 1..75: mol_type = other DNA
tcgctggtggcattgattcggcgtcatgaaccggcgttattgatcggtaactggtttagtcagccggagaacgcc

SEQ ID NO: 193418 - DNA, 75 bp, synthetic construct
  source 1..75: mol_type = other DNA
tcgatacccaatccctggtggcgttgattcgtcgtcatgaaccggcattgttaatcggcaactggtttagtcagc

SEQ ID NO: 193419 - DNA, 75 bp, synthetic construct
  source 1..75: mol_type = other DNA
cggatgatgcgttacgcgcctcgctgaatggtcatctggagcaggccgcgcaccgggtcgcacctgagttttccg

SEQ ID NO: 193420 - DNA, 75 bp, synthetic construct
  source 1..75: mol_type = other DNA
aaattgttcgctggctggagagcgagcatccactgaaagccaaaattttgcccactgaatggctgggcgaacata

SEQ ID NO: 193421 - DNA, 75 bp, synthetic construct
  source 1..75: mol_type = other DNA
ccggattgcccgtgataatcctgacagtggtgtggtggtaagaatcgccggtgaaggccgtccgtggaatcccgg

SEQ ID NO: 193422 - DNA, 75 bp, synthetic construct
  source 1..75: mol_type = other DNA
taaatttatatatcatgtacactctccattaagagaggggcctttatttttttataattatgagtcaatgggaat

SEQ ID NO: 193423 - DNA, 75 bp, synthetic construct
  source 1..75: mol_type = other DNA
tgtcgatccggagatcaaaatggtcgagtggatgcagacgctgaaggaaaccgggttcgacatccgggcatatcg

SEQ ID NO: 193424 - DNA, 75 bp, synthetic construct
  source 1..75: mol_type = other DNA
atgaaaagacttcacaagaggttcctgttagctacgttttgcacattattcacagcaactctccaggccgccgat

SEQ ID NO: 193425 - DNA, 75 bp, synthetic construct
  source 1..75: mol_type = other DNA
gggcgcatgggcaccggagcactctgtgacggagttcagtcacagccaggaagcgaaactggcagaagcgcagca

SEQ ID NO: 193426 - DNA, 75 bp, synthetic construct
  source 1..75: mol_type = other DNA
atgtggacctgctgacagaggcaaagtcgtttgctgcagaaggaaccagttttgctgacctggggcgggaaatca

SEQ ID NO: 193427 - DNA, 75 bp, synthetic construct
  source 1..75: mol_type = other DNA
cggagaaaagtgtcccccggacggctggttacagcgatgcggtcagtgttctggcacaggaccgtccgtcgctgg

SEQ ID NO: 193428 - DNA, 75 bp, synthetic construct
  source 1..75: mol_type = other DNA
gacggcaaaacagagctggctgtcagggatattgccggacaggagcgtgaccggtctgccatatctgaacgggaa

SEQ ID NO: 193429 - DNA, 75 bp, synthetic construct
  source 1..75: mol_type = other DNA
gctgcgggacgtggcggcaggccgtgccgttctccgtcaggcggggcttgccgggggagacagccctgcacggtt

SEQ ID NO: 193430 - DNA, 75 bp, synthetic construct
  source 1..75: mol_type = other DNA
agatgcgcagttcgtggccctgcagggcagccgtaacggagagagtctgctggctgataacatgcaggatggcgt

SEQ ID NO: 193431 - DNA, 75 bp, synthetic construct
  source 1..75: mol_type = other DNA
gttgcccgggaaaatctgctgcaggaacgacttcagcagatggagcgggatatggttcgtgacctgcagaaagag

SEQ ID NO: 193432 - DNA, 75 bp, synthetic construct
  source 1..75: mol_type = other DNA
gtcgtttgctgcagaaggaaccagttttactgaactgggaggggaaatcaatgcgcagataaaacgcggtgattt

SEQ ID NO: 193433 - DNA, 75 bp, synthetic construct
  source 1..75: mol_type = other DNA
ggtgccggtgggtcagtgggagtctggtcaggcgctggggctgtcgaaatcggctatctttttccgtctggtgat

SEQ ID NO: 193434 - DNA, 75 bp, synthetic construct
  source 1..75: mol_type = other DNA
ggtcacggcagaggtactggcacagcggcaggctgaagaggccatccgccgtgaaacggaacgtcgcgcagatga

SEQ ID NO: 193435 - DNA, 75 bp, synthetic construct
  source 1..75: mol_type = other DNA
aggcagcggggatgcgcagttcgtggccctgcagggcagccgtaacggagaaagcctgctggctgataatatgca

SEQ ID NO: 193436 - DNA, 75 bp, synthetic construct
  source 1..75: mol_type = other DNA
ggcagcgaaccggtacaggcagtgcgctgatggccatgaaggatgccggggtgaacacatatcgctggcaggggg

SEQ ID NO: 193437 - DNA, 75 bp, synthetic construct
  source 1..75: mol_type = other DNA
gaaacgcaatggcttaaagattcgccctcacagccattgcaacagtcactgaaagaccttgagcgggcttacaaa

SEQ ID NO: 193438 - DNA, 75 bp, synthetic construct
  source 1..75: mol_type = other DNA
ggtaataaatacatcccttacgggaaaatggcttcctggttggttgagtggaaaaatgccactgaaacgcaatgg

SEQ ID NO: 193439 - DNA, 75 bp, synthetic construct
  source 1..75: mol_type = other DNA
gacagcagctggtcgctgttccggccggaaaaaatgccggtggcagacggcgagcgtctgagggtgacagggaaa

SEQ ID NO: 193440 - DNA, 75 bp, synthetic construct
  source 1..75: mol_type = other DNA
tatgatcgataacacctgggctgctggcgtactgttcaaagctctggattttggcattgatgtttccatacaggc

SEQ ID NO: 193441 - DNA, 75 bp, synthetic construct
  source 1..75: mol_type = other DNA
tggcagtaaaggtcacgaattctggaaacgagactttacaggcagcagcgggctattttcctttgtgcttaagaa

SEQ ID NO: 193442 - DNA, 75 bp, synthetic construct
  source 1..75: mol_type = other DNA
ctgtagcaaaatcctcagcaaactgggcgtaacgacatcgtggtttgatccgctgattggtgccgatatcgttaa

SEQ ID NO: 193443 - DNA, 75 bp, synthetic construct
  source 1..75: mol_type = other DNA
tatgtggcactgccggcttttgaccgtaacggcaagtccgccggtatctggctgaacccgctgaccacggatgac

SEQ ID NO: 193444 - DNA, 75 bp, synthetic construct
  source 1..75: mol_type = other DNA
ctggaaaccgctatcagtctgcagaaagccgggcttcacacgccggcacagcaggccattcatctggcccttcct

SEQ ID NO: 193445 - DNA, 75 bp, synthetic construct
  source 1..75: mol_type = other DNA
cggtaccggatcgcattgttctgctacccggcggccgtcttgttttcgttgaatgcaaagcacccggcaaagcac

SEQ ID NO: 193446 - DNA, 75 bp, synthetic construct
  source 1..75: mol_type = other DNA
tcagcaacgtcgcaggcgatcgtgtgacttatcggatcaccaaaggtgaagatctgcgtgatcaaggttatatgg

SEQ ID NO: 193447 - DNA, 75 bp, synthetic construct
  source 1..75: mol_type = other DNA
tccggcggttacagtatcaaacagaccgcgtttatggactcgatgaagtccgatatgggcggtgctgcaacggtt

SEQ ID NO: 193448 - DNA, 75 bp, synthetic construct
  source 1..75: mol_type = other DNA
gggtgcgtgacaccatcaacgcaccggcagaagaactggggccatcgcaactggcacagcgtgctgttgatctga

SEQ ID NO: 193449 - DNA, 75 bp, synthetic construct
  source 1..75: mol_type = other DNA
aaaaattcaccgctttattatgcgctcttgggctaatttccatcgttgcaatttatccgcgtcagacggtgaatt

SEQ ID NO: 193450 - DNA, 75 bp, synthetic construct
  source 1..75: mol_type = other DNA
tcactattatcaacgtcgcccggacaatgacggcatggcctggcgcttctggcagcattccgaccgtggacaggt

SEQ ID NO: 193451 - DNA, 75 bp, synthetic construct
  source 1..75: mol_type = other DNA
gtgccgcccaggagaacgaaccgttctggcgtctgccgctggcggagttccaccgtagccagctgccatctaact

SEQ ID NO: 193452 - DNA, 75 bp, synthetic construct
  source 1..75: mol_type = other DNA
cgaaaaccgcgctgggtaatgattatcacgcgctgtttagttttgacgatgcgctggcagggcgtttgctggcga

SEQ ID NO: 193453 - DNA, 75 bp, synthetic construct
  source 1..75: mol_type = other DNA
acgatgatttgctgcgccagatagcctcctacggtcgtggatacacctatttgctgtcgcgtgcgggcgtgactg

SEQ ID NO: 193454 - DNA, 75 bp, synthetic construct
  source 1..75: mol_type = other DNA
acgatgatttgctgcgccagatagcctcctacggtcgtggatacacctatttattgtcacgtgcgggcgtgaccg

SEQ ID NO: 193455 - DNA, 75 bp, synthetic construct
  source 1..75: mol_type = other DNA
acggcggcgggcttcctgtcgcactttgttgagaactatcagcaaggttggctgcatatcgactgttcggcgact

SEQ ID NO: 193456 - DNA, 75 bp, synthetic construct
  source 1..75: mol_type = other DNA
atgacagaagcgatgaagattaccctctcgacccaacctgccgacgcgcgctggggagaaaaagcgacttacagc

SEQ ID NO: 193457 - DNA, 75 bp, synthetic construct
  source 1..75: mol_type = other DNA
tttcttcccaacctgctgatgcgcgttggggagaaaaagcgacttacagcattaataatgatggcattaccctgc

SEQ ID NO: 193458 - DNA, 75 bp, synthetic construct
  source 1..75: mol_type = other DNA
ccgcttacagtttgcttttattaaggctacggaaggcgaaaatctggtagacccgtatttctcgcgtaactggcg

SEQ ID NO: 193459 - DNA, 75 bp, synthetic construct
  source 1..75: mol_type = other DNA
ctggagctgcgcaacgtgccgttcaaacagcaggagcaaatcgcctggtacctgatggatggcctgcccggtctg

SEQ ID NO: 193460 - DNA, 75 bp, synthetic construct
  source 1..75: mol_type = other DNA
ccactaatactaaaaacaagagcatttttacagaaaagagaaacatcattattgttcttctgtcaatgttagttc

SEQ ID NO: 193461 - DNA, 75 bp, synthetic construct
  source 1..75: mol_type = other DNA
attacacctgtgtggttacggattcttcttctccggtcaaaacggttacctcagctgcctgcacccttactatca

SEQ ID NO: 193462 - DNA, 75 bp, synthetic construct
  source 1..75: mol_type = other DNA
agaagatgtttatttcaaaagtggcagaagtctatatgctccaccatacggcagcaatattgaggcgtaaaggag

SEQ ID NO: 193463 - DNA, 75 bp, synthetic construct
  source 1..75: mol_type = other DNA
ggattctgggaagaggacgacgacaaacacatcaagacttacaccatcaaatttcctgactccggctttcgtatt

SEQ ID NO: 193464 - DNA, 75 bp, synthetic construct
  source 1..75: mol_type = other DNA
gcgcctggctgtcccgcgccctgattgagtcccgcatgtcacccgatacgccggtgctgcgcctgacctgcccgg

SEQ ID NO: 193465 - DNA, 75 bp, synthetic construct
  source 1..75: mol_type = other DNA
gtttaagtttgaattatcccaactggtaacaatgcgtatcagtgacgaatggggagaagttaaagcccgtgctca

SEQ ID NO: 193466 - DNA, 75 bp, synthetic construct
  source 1..75: mol_type = other DNA
tcactattatcaacgccgtccagacagtggatcacgattgtggcgtttctggcagcattcggatcgcggtcaggt

SEQ ID NO: 193467 - DNA, 75 bp, synthetic construct
  source 1..75: mol_type = other DNA
cgggtaagtcagtggctaaaaatggtcgaaaaacgtacgggaaaaaagccgattatttactcaggagccgttttt

SEQ ID NO: 193468 - DNA, 75 bp, synthetic construct
  source 1..75: mol_type = other DNA
atgcgtatcagtgatgaatggggtgaggttaaagcccgcgcgcagtatgcggatggcgaaaaccagtacttgatc

SEQ ID NO: 193469 - DNA, 75 bp, synthetic construct
  source 1..75: mol_type = other DNA
ttgcaattggtgctgatgctgctccgtttaagtttgagttgtctcaactggtggagatgcgcatcagtgatgaat

SEQ ID NO: 193470 - DNA, 75 bp, synthetic construct
  source 1..75: mol_type = other DNA
aacttgtcattaccggaatcgtggatggtaagccgagatactctcgcattgaggtaaataacggccacatctgtt

SEQ ID NO: 193471 - DNA, 75 bp, synthetic construct
  source 1..75: mol_type = other DNA
ttgcaggctggatgtacttcatcaactgggcgatgacggggattgtcgatattaccgccgtcgctctgtatatgc

SEQ ID NO: 193472 - DNA, 75 bp, synthetic construct
  source 1..75: mol_type = other DNA
cggtttgctgcctgcgctggtgttgattcagggcgtagtgtttgcttttgcctccattgaaatggtgggtacagc

SEQ ID NO: 193473 - DNA, 75 bp, synthetic construct
  source 1..75: mol_type = other DNA
attaaagtgctcgccattgtgacctttttggtcgtgggtacagtgttcctcggtagtggtcagccgctggatggc

SEQ ID NO: 193474 - DNA, 75 bp, synthetic construct
  source 1..75: mol_type = other DNA
ggacaactgggtggagtgccggcagaacataaaacggacagcctgagggcggcatggaaacaacaaggcaaaaga

SEQ ID NO: 193475 - DNA, 75 bp, synthetic construct
  source 1..75: mol_type = other DNA
ctttcgccattgcttgatgccatcatctctgtacccggttaccaacccacagtatcgatggcatgtttgctgtgg

SEQ ID NO: 193476 - DNA, 75 bp, synthetic construct
  source 1..75: mol_type = other DNA
cattaattgagcaggtttatcatatttttcgtcgttatccggtgccgcagaaatttgtggtttgttgtgaatatt

SEQ ID NO: 193477 - DNA, 75 bp, synthetic construct
  source 1..75: mol_type = other DNA
gccggactggatcttgatttgtggggtgtgcatcgctcagcggttgccgccgccattggcgcgcataatgccgcg

SEQ ID NO: 193478 - DNA, 75 bp, synthetic construct
  source 1..75: mol_type = other DNA
tcatgaagtatttactctacgccgtatcaaccttgccagtaaagaaaattggcgtgcggatgaacgggcaatatt

SEQ ID NO: 193479 - DNA, 75 bp, synthetic construct
  source 1..75: mol_type = other DNA
cgacgttgcggcgtattgatgtcgcggatgtcggtgaaaccgtgctggcagataccgtagggtttattcgccact

SEQ ID NO: 193480 - DNA, 75 bp, synthetic construct
  source 1..75: mol_type = other DNA
cagtccgtcgcgaatatctgccaggctatcacgaaagccgtgacgggcttaaagcactgggcgcagaacgtcacc

SEQ ID NO: 193481 - DNA, 75 bp, synthetic construct
  source 1..75: mol_type = other DNA
cagagaaccgtgttacaggtctggtaactggcgaacgaggcacagccagcgagcagcagttaggcttgctgattg

SEQ ID NO: 193482 - DNA, 75 bp, synthetic construct
  source 1..75: mol_type = other DNA
cagaaaaccgttttgccggattggtaacaggtgaacgccaggcagccagcgatccgcagttaggtttgctggtgg

SEQ ID NO: 193483 - DNA, 75 bp, synthetic construct
  source 1..75: mol_type = other DNA
ccgataatggcggcttcttcccccacggtttgctgcctgcgctggtgttgattcagggcgtagtgtttgcttttg

SEQ ID NO: 193484 - DNA, 75 bp, synthetic construct
  source 1..75: mol_type = other DNA
gcaaaaagccgtcagcgatattgtggcgctggaaaacgcccttgatatgtacaaactcgacaatcatcactatcc

SEQ ID NO: 193485 - DNA, 75 bp, synthetic construct
  source 1..75: mol_type = other DNA
gatgctactgcgacattcagaattaacgtcaagccttcaacaccctttcctatcgggaaagtttcaacgtacctg

SEQ ID NO: 193486 - DNA, 75 bp, synthetic construct
  source 1..75: mol_type = other DNA
aattccccattgttacgtatgaatctaactctaagtaatggcattgattgtgagccggattatatagaaaatgca

SEQ ID NO: 193487 - DNA, 75 bp, synthetic construct
  source 1..75: mol_type = other DNA
gagcagcaatactgagctagtcagtgccgggatgatgaagcagggacgatggaaaattatcgtcactatgttggc

SEQ ID NO: 193488 - DNA, 75 bp, synthetic construct
  source 1..75: mol_type = other DNA
ttgcacttggcgcagctatgatcctaccgctcggtccacaaaatgcttttgtgatgaatcagggcattcgtcgtc

SEQ ID NO: 193489 - DNA, 75 bp, synthetic construct
  source 1..75: mol_type = other DNA
gaaagcggcacgggtaaagaagtcgtcgcgcgtgcaatccataagttgagtggaagacgaaataaaccctttatt

SEQ ID NO: 193490 - DNA, 75 bp, synthetic construct
  source 1..75: mol_type = other DNA
ttccccggttgcgctttcaatcatttaaagcttcaggtccatgggaattccaaccattgggaaaactagcgaaac

SEQ ID NO: 193491 - DNA, 75 bp, synthetic construct
  source 1..75: mol_type = other DNA
aacaccactggctttcatttaattaccgataatggcggtttctttccccacggtttactgcctgctttggtgttg

SEQ ID NO: 193492 - DNA, 75 bp, synthetic construct
  source 1..75: mol_type = other DNA
atccagggggtggtttttgcctttgcatcgattgaactggtaggtactgcggctggtgaatgtaaagatccacag

SEQ ID NO: 193493 - DNA, 75 bp, synthetic construct
  source 1..75: mol_type = other DNA
gtgcatcagttgcagttatggtaatgattaaatttgtgaaacagtacaccggaaagccaatctcactccggcaat

SEQ ID NO: 193494 - DNA, 75 bp, synthetic construct
  source 1..75: mol_type = other DNA
aaagactggaacaagttccatctatcgatcttgcagaacgtctggccaatttttttaagggtgaaatcagcgaaa

SEQ ID NO: 193495 - DNA, 75 bp, synthetic construct
  source 1..75: mol_type = other DNA
agccgtattgcacccagcccatccagcgttatggtggttggtgaaagcggcacgggtaaagaagtcgtcgcccgt

SEQ ID NO: 193496 - DNA, 75 bp, synthetic construct
  source 1..75: mol_type = other DNA
cggccaggccgttaccacttctttggctgttgccaacttcttctccaagcgtcacgacgatgtgctgaaaaagat

SEQ ID NO: 193497 - DNA, 75 bp, synthetic construct
  source 1..75: mol_type = other DNA
tgtcaacggcgatgtatgacgcgccagcgtcttttttatcgtccgcatttgctcacatccagattatggtgggct

SEQ ID NO: 193498 - DNA, 75 bp, synthetic construct
  source 1..75: mol_type = other DNA
cattttggattgttctccagagttttgtgcccgcaattttgcggagacatcaattttggtacgccagcccaacgg

SEQ ID NO: 193499 - DNA, 75 bp, synthetic construct
  source 1..75: mol_type = other DNA
aaacgtactgatatcgttgagacgttatttggtattcgcgagaagtcggctggcaccattacgctgcatggcaaa

SEQ ID NO: 193500 - DNA, 75 bp, synthetic construct
  source 1..75: mol_type = other DNA
aaccagcgtttccctgacaaagaaaacaagccgggcgaagtgattcttgaagtgcgtaacctgacgtcgctgcgc

SEQ ID NO: 193501 - DNA, 75 bp, synthetic construct
  source 1..75: mol_type = other DNA
ggtgcatcaggaattaaacctggtattgcaacgttcggtgatggacaacatgtggctggggcgatatcccactaa

SEQ ID NO: 193502 - DNA, 75 bp, synthetic construct
  source 1..75: mol_type = other DNA
tgcagggatttggtatttccgccccggatcaggtaaaagcagcgattgatgcaggagctgcaggcgcgatttctg

SEQ ID NO: 193503 - DNA, 75 bp, synthetic construct
  source 1..75: mol_type = other DNA
cccagttgaaggaacgcaaagaaggcgcatttgttcctttcgtcaccctcggtgatccgggcgtagagcagtcgc

SEQ ID NO: 193504 - DNA, 75 bp, synthetic construct
  source 1..75: mol_type = other DNA
cccagttgaaggagcgcaaagaaggcgcatttgttcctttcgtgactctcggtgaccctggcattgagcagtcgc

SEQ ID NO: 193505 - DNA, 75 bp, synthetic construct
  source 1..75: mol_type = other DNA
gcccgacgtgggtggaacggcgaaaaccaattctgctggctggttcctgaaggacagtacccggcacgaatggaa

SEQ ID NO: 193506 - DNA, 75 bp, synthetic construct
  source 1..75: mol_type = other DNA
agccagggacgtaactattgctgccagtggcatcattaccacacaagaagaaatcgaccttgaagcagccgactt

SEQ ID NO: 193507 - DNA, 75 bp, synthetic construct
  source 1..75: mol_type = other DNA
ttctcgacttgcacagctgaccgtgatagatgtgctggcgacaggatttactttgcgacgcggtgcaaaattcag

SEQ ID NO: 193508 - DNA, 75 bp, synthetic construct
  source 1..75: mol_type = other DNA
ccggggaatacttgttggaaatgagcggtatcaacaagtcttttcctggtgttaaggcacttgataacgttaatt

SEQ ID NO: 193509 - DNA, 75 bp, synthetic construct
  source 1..75: mol_type = other DNA
actcaatcgctggttccgtgatggaagggggcgtcgcgtccacgttatacgctgggagtctgaaacacagcgggt

SEQ ID NO: 193510 - DNA, 75 bp, synthetic construct
  source 1..75: mol_type = other DNA
gtagtctccggtaacgccaaccctgtacgtctcaccacctctgtgattggcgtcccatgtggtgagttttctaaa

SEQ ID NO: 193511 - DNA, 75 bp, synthetic construct
  source 1..75: mol_type = other DNA
gccgacttcggtcgggccgggttcggtagtctccggtaacgccaaccctgtacgtctcaccacctctgtgattgg

SEQ ID NO: 193512 - DNA, 75 bp, synthetic construct
  source 1..75: mol_type = other DNA
tatttacctgcgtgatggttatccgcatgaatgcttcagcccgctgtggttgtttcgtcgtgattttgttgagtg

SEQ ID NO: 193513 - DNA, 75 bp, synthetic construct
  source 1..75: mol_type = other DNA
aagccagctttatccaatgcttaaggctgttgaatctccgctggccagcaaactgtacgaccgtgttggtgatgc

SEQ ID NO: 193514 - DNA, 75 bp, synthetic construct
  source 1..75: mol_type = other DNA
gagctgtattgatgcattccatgaagctgaaaccgtccaggtacattccgctttccgtcgtcatcaacgggaggt

SEQ ID NO: 193515 - DNA, 75 bp, synthetic construct
  source 1..75: mol_type = other DNA
gctatcaactgtgccgcgattccggagcagcttctggagagcgaactgttcggttatgttaaaggcgcatttact

SEQ ID NO: 193516 - DNA, 75 bp, synthetic construct
  source 1..75: mol_type = other DNA
gcttcacgggtaaacgtgctgcccagttcaaagaggcatacatcaatgcctttaaccagatggagaaactgcttt

SEQ ID NO: 193517 - DNA, 75 bp, synthetic construct
  source 1..75: mol_type = other DNA
tgtggtaccgggtgatgattctccgggagaaaacaaaagccagaccgactactggcaggagctgaaagagggttt

SEQ ID NO: 193518 - DNA, 75 bp, synthetic construct
  source 1..75: mol_type = other DNA
ggattggcgtcctgaaattgattactgagcataaccgcgctcatgcggttttttcgtgtcatgagcattactacg

SEQ ID NO: 193519 - DNA, 75 bp, synthetic construct
  source 1..75: mol_type = other DNA
gatggcttcgcgttcctggcaatgggctttactggcaaacgtgcagcccggttcaaagaggcatacatcaacgcc

SEQ ID NO: 193520 - DNA, 75 bp, synthetic construct
  source 1..75: mol_type = other DNA
gtaaaatattcgcgaccatgatcgataatatggatcagggcgtattagttgttgatgatgaaaatcgggttcagt

SEQ ID NO: 193521 - DNA, 75 bp, synthetic construct
  source 1..75: mol_type = other DNA
gtgtcggagtgataagtttgattgctgttactcatgagcaacaagaacatatcagtgataatttacgcgaatttt

SEQ ID NO: 193522 - DNA, 75 bp, synthetic construct
  source 1..75: mol_type = other DNA
gtgattaactccgggaatggcgcagcgggtccggtggtggacgccattgaagcccgctttaaagccctcggcgca

SEQ ID NO: 193523 - DNA, 75 bp, synthetic construct
  source 1..75: mol_type = other DNA
tcgttatcagcaaatcaatctgcgtgacgcttacgttgatcacctgttcggttatatcaacgtcaaaaacctcac

SEQ ID NO: 193524 - DNA, 75 bp, synthetic construct
  source 1..75: mol_type = other DNA
acggcatgaagctggtgcgcgagaacgcgaagcccatcagcggcgacaccggcctgcgggatatccagcgcctgg

SEQ ID NO: 193525 - DNA, 75 bp, synthetic construct
  source 1..75: mol_type = other DNA
gagcaaaaatttacggaaagatagttataggtgacaattgtgcaataggcgcgaatgcagtcgttaacaaagatt

SEQ ID NO: 193526 - DNA, 75 bp, synthetic construct
  source 1..75: mol_type = other DNA
ctcgttttgatcgcgttataaacgcaaacagaaaatctttcaatctctcacatgcaaacataaagacggaaaccg

SEQ ID NO: 193527 - DNA, 75 bp, synthetic construct
  source 1..75: mol_type = other DNA
gcatacctggtctgcaggaaccaatggtgttgtggctgcaacgttttccctgcgcctgaaaggtaaacctgtgct

SEQ ID NO: 193528 - DNA, 75 bp, synthetic construct
  source 1..75: mol_type = other DNA
agctgtacgattaaagaggttcagtttaccgccgggcagaaacaggatattgatgtcactacgctgtgttctacc

SEQ ID NO: 193529 - DNA, 75 bp, synthetic construct
  source 1..75: mol_type = other DNA
ctcaaaaataatgaacccgcctgaagcgagagccaattgtactggttgcccttcttctcagaatgtctctcattt

SEQ ID NO: 193530 - DNA, 75 bp, synthetic construct
  source 1..75: mol_type = other DNA
tgccgggttatgcggcaattaaaacgactcattagccgcattgcgcctagcccatccagtgttatggtcgttggt

SEQ ID NO: 193531 - DNA, 75 bp, synthetic construct
  source 1..75: mol_type = other DNA
tgctgaaggcattacccgctgaggcccgttctttcctggggcgtgactttggccgcagtggtgacctgtcagtgg

SEQ ID NO: 193532 - DNA, 75 bp, synthetic construct
  source 1..75: mol_type = other DNA
ctgatacctcggcgctggatattcccgtcgttctgatgccctaccagcagcgctgggtggctgacacgtctccgc

SEQ ID NO: 193533 - DNA, 75 bp, synthetic construct
  source 1..75: mol_type = other DNA
gctgtgattcgtgatatgtggagcaatatgcgaccggtgaccccggcagcgttcctggtggaagtgaataccctg

SEQ ID NO: 193534 - DNA, 75 bp, synthetic construct
  source 1..75: mol_type = other DNA
gccgaacaaagacaaagtgggtaaaatttcccgcgctcagctgcagcaaatcgcgcagaccaaagctgccgacat

SEQ ID NO: 193535 - DNA, 75 bp, synthetic construct
  source 1..75: mol_type = other DNA
ggagaaaacaaaagccagaccgactactggcaggagctgaaagagggtttctccgtggttgtcatactgagtaac

SEQ ID NO: 193536 - DNA, 75 bp, synthetic construct
  source 1..75: mol_type = other DNA
gaagaacttgatgaaagcatgcaagttcttgcaaggaatatgagtgtacttcagtcatcaatggataaaaaggag

SEQ ID NO: 193537 - DNA, 75 bp, synthetic construct
  source 1..75: mol_type = other DNA
gaaagctgagactcccggcggcgtatgtggtaccgggtgatgattctccgggagaaaacaaaagccagaccgact

SEQ ID NO: 193538 - DNA, 75 bp, synthetic construct
  source 1..75: mol_type = other DNA
ccggcagatgctctttaaggccctgctgggctggaacccggaagcgtgcggtaacccgattaactatgacggcgg

SEQ ID NO: 193539 - DNA, 75 bp, synthetic construct
  source 1..75: mol_type = other DNA
atgggccttgcccgtaaaaacgattttttatatcacggggagcctctcagaggcgttattacccaacttgaggaa

SEQ ID NO: 193540 - DNA, 75 bp, synthetic construct
  source 1..75: mol_type = other DNA
tgatatggataacgactttaaaacgtgggtgggaataatccacgcgtttgccaaacacaaggtcgttggcgatac

SEQ ID NO: 193541 - DNA, 75 bp, synthetic construct
  source 1..75: mol_type = other DNA
tgatttaattccatcttttctaacttctgggcaacaaaatccggctttcgcaagaaaagtgtcaggtattgttga

SEQ ID NO: 193542 - DNA, 75 bp, synthetic construct
  source 1..75: mol_type = other DNA
gcgtattgatgaggcgctggaattcgcgaatgctgccgttacaggaacaggtagcagtatgaaagtatcatctga

SEQ ID NO: 193543 - DNA, 75 bp, synthetic construct
  source 1..75: mol_type = other DNA
gattctggatggagaagcagagtatcgcgacagcgaaggcaatcatgttcaggccagcgccggtgaggcgttgct

SEQ ID NO: 193544 - DNA, 75 bp, synthetic construct
  source 1..75: mol_type = other DNA
agtgtggacaagcagactacggatggttgcaggcccggtatactttttcctttggacactacttcgacccgaaat

SEQ ID NO: 193545 - DNA, 75 bp, synthetic construct
  source 1..75: mol_type = other DNA
cagaatcttatcaataagataactgagctttctcaggatttaacgcccgagaatatcaaaatgattgagatactt

SEQ ID NO: 193546 - DNA, 75 bp, synthetic construct
  source 1..75: mol_type = other DNA
tcggtcgttctttttgaccatgcattaagcccggcacaggagcgtaaccttgagcgtttgtgcgagtgtcgtgtt

SEQ ID NO: 193547 - DNA, 75 bp, synthetic construct
  source 1..75: mol_type = other DNA
atgaaaaaggtcgtttttgccttaaccgcactggcgttgacttctggctctgtattcgcagcagattctggtgac

SEQ ID NO: 193548 - DNA, 75 bp, synthetic construct
  source 1..75: mol_type = other DNA
atgaaaaaggtcgtttttgccttaaccgcactggcgttaacttctggcactgtattcgcagcagagtctggtgac

SEQ ID NO: 193549 - DNA, 75 bp, synthetic construct
  source 1..75: mol_type = other DNA
attatccaaaacgtcattacagccatgaggaaagtgggattcaagtctaaagattctattatcctcgaagttaat

SEQ ID NO: 193550 - DNA, 75 bp, synthetic construct
  source 1..75: mol_type = other DNA
tttctctggcagcatgactattcccgtccggtgggccagtgtacggtacgccgggtcagtgaaggtctggaaatc

SEQ ID NO: 193551 - DNA, 75 bp, synthetic construct
  source 1..75: mol_type = other DNA
agtctgcaagttcgtatgccgatcgttgactggcgtcgcctctgcaaacaagaaccggcgttgatcgattacttg

SEQ ID NO: 193552 - DNA, 75 bp, synthetic construct
  source 1..75: mol_type = other DNA
tccgttcgcaagaaacgtccgcgccttgcccgtttactcctgtctcttattgacgatgctgggctgaataaactg

SEQ ID NO: 193553 - DNA, 75 bp, synthetic construct
  source 1..75: mol_type = other DNA
cgctgttactggcatttgcaacgtttggcgtgagtttttttatgcgcccgcttggtgggattatcgttggcgcct

SEQ ID NO: 193554 - DNA, 75 bp, synthetic construct
  source 1..75: mol_type = other DNA
ctctgaactgttgccgaaacggattcgggcattgggttttgcgctggtttatagcattggtgtggcaatctttgg

SEQ ID NO: 193555 - DNA, 75 bp, synthetic construct
  source 1..75: mol_type = other DNA
ccgccagatgtgaccgtggagcgttactggaaaaacgatctgtggaagattaaaacagatcgtttcccgggcaat

SEQ ID NO: 193556 - DNA, 75 bp, synthetic construct
  source 1..75: mol_type = other DNA
aaccgtaatggcagaatggggctggcgtgtgccgttttttattggcgtgttattagcacctatcggttgctggtt

SEQ ID NO: 193557 - DNA, 75 bp, synthetic construct
  source 1..75: mol_type = other DNA
ttcaatgtcgctactggtggagtcagctccggcaaatcgtcgcggcttttacagcagttggtcactggcgactca

SEQ ID NO: 193558 - DNA, 75 bp, synthetic construct
  source 1..75: mol_type = other DNA
cactattactggcattcgccaccttcggggtgagcttttttatgcgtccgcttggtggcgttattgtcggagcat

SEQ ID NO: 193559 - DNA, 75 bp, synthetic construct
  source 1..75: mol_type = other DNA
agggctgtgtgcgattgctggcgcacttatcatcactttaatactcttacgtttcgcccgtcgtcatctttcgac

SEQ ID NO: 193560 - DNA, 75 bp, synthetic construct
  source 1..75: mol_type = other DNA
gacatcggcattcatatgctggatgctgcgatgtatgtgctgggctttccggcggtgaaaagcgtgaatgcgcat

SEQ ID NO: 193561 - DNA, 75 bp, synthetic construct
  source 1..75: mol_type = other DNA
atgaataccacatttgcacttgttctgacggtttttcttgtttccggtgaaccggttgacatggttactggcgta

SEQ ID NO: 193562 - DNA, 75 bp, synthetic construct
  source 1..75: mol_type = other DNA
tgacagtttttcttaatacgggcgagcctgttgatctggttattgacatttacggttcaatgaaagaatgcatgg

SEQ ID NO: 193563 - DNA, 75 bp, synthetic construct
  source 1..75: mol_type = other DNA
ctggcctacgactttcaccatcgttttgcccttgatacgcaacaactgcgtgaacaggtgaccaacggcgttttg

SEQ ID NO: 193564 - DNA, 75 bp, synthetic construct
  source 1..75: mol_type = other DNA
tgggatccggcaacctacagcgtcgaagattcgctgtttggcaccattgaatttcaaaatggcggcattctgtgg

SEQ ID NO: 193565 - DNA, 75 bp, synthetic construct
  source 1..75: mol_type = other DNA
atgcttcgtactactgcacccgcaatgatctggaactggtggctgtctgtgacaggccgcctttcccaggcgcag

SEQ ID NO: 193566 - DNA, 75 bp, synthetic construct
  source 1..75: mol_type = other DNA
ggcctggggcagttatcgaaaaacagtgagcttaccgccattcgcagcacggggttttctatcttccgtattgca

SEQ ID NO: 193567 - DNA, 75 bp, synthetic construct
  source 1..75: mol_type = other DNA
cgaccgccaccgcgttgggggaggacgatgacattaccggcaatatgctgtgggccggcgtggtaatgaatttgt

SEQ ID NO: 193568 - DNA, 75 bp, synthetic construct
  source 1..75: mol_type = other DNA
ccgctgcggcggtttttttattttcaggaggctgatgtgactcttaaacgggcctgctccctgctgacggtgaaa

SEQ ID NO: 193569 - DNA, 75 bp, synthetic construct
  source 1..75: mol_type = other DNA
tgacagtttttcttgtttccggagagccagttgatattgcagtcagtgttcacagaacaatgcaggaatgtatgg

SEQ ID NO: 193570 - DNA, 75 bp, synthetic construct
  source 1..75: mol_type = other DNA
tacgctggctgaaatcgacagccgatgacaatcaaatccatcgcatcgcccgcaacgctggcggtcatgcgaccc

SEQ ID NO: 193571 - DNA, 75 bp, synthetic construct
  source 1..75: mol_type = other DNA
aggcgctgctggagcaggtgaatcaggcgattagcgataaaacgccgctggtgattcagggcagcaatagcaaag

SEQ ID NO: 193572 - DNA, 75 bp, synthetic construct
  source 1..75: mol_type = other DNA
tacctcttgatgaaaattgtcaggttggtaaaacgattaatccttacggcacttcaaaatttttttctgaacaaa

SEQ ID NO: 193573 - DNA, 75 bp, synthetic construct
  source 1..75: mol_type = other DNA
ggtgattttgatgtgctggatgttattacgaaaagtagtaaagtgaatggtagcgctacatttagatttactgag

SEQ ID NO: 193574 - DNA, 75 bp, synthetic construct
  source 1..75: mol_type = other DNA
gcggcacagagaaaaactcattgcggaagcgctgtaaatatcgccagaaatcatctggtcctcaaggtactttga

SEQ ID NO: 193575 - DNA, 75 bp, synthetic construct
  source 1..75: mol_type = other DNA
ttcgccattcatgtggcgcatgcccgttcccgtggtctgcgtcggcgcatgccaccggtgctgcgtcgacgggct

SEQ ID NO: 193576 - DNA, 75 bp, synthetic construct
  source 1..75: mol_type = other DNA
gcccttgtcgaacatcatctgttacgtcaggaaagagggcgtttttttcttgggctgaaattgtatgaatggggg

SEQ ID NO: 193577 - DNA, 75 bp, synthetic construct
  source 1..75: mol_type = other DNA
gggacgtgcatcagggagagtaaaagtcaaaggttatttatcagatctcgttaaggatggtattaaagaactcct

SEQ ID NO: 193578 - DNA, 75 bp, synthetic construct
  source 1..75: mol_type = other DNA
acccgctggccaaccgcgtccagtgctccatcactacactggccattgagtgcggactggcgacggagtctgctg

SEQ ID NO: 193579 - DNA, 75 bp, synthetic construct
  source 1..75: mol_type = other DNA
gtcccggggaataaagcgtgcccgtgcgcgtcgtgatgcggacagggaacgtcaggatattgtcaccctggtgaa

SEQ ID NO: 193580 - DNA, 75 bp, synthetic construct
  source 1..75: mol_type = other DNA
agcgtgcccgtgcgcgtcgtgatgcgaacagggaacgtcaggatatcgtcaccctggtgaaacggcagctgacgc

SEQ ID NO: 193581 - DNA, 75 bp, synthetic construct
  source 1..75: mol_type = other DNA
gagcgtcgtgtgaaggagcgcatgattctgtcacgtaaccgcaattacagccggctggccacagcttctccctga

SEQ ID NO: 193582 - DNA, 75 bp, synthetic construct
  source 1..75: mol_type = other DNA
tgatggaaaaggcggtgggcttcacctcccgttttgattttgccgcgcatgttgcgtatgcacgttcgcgtggcc

SEQ ID NO: 193583 - DNA, 75 bp, synthetic construct
  source 1..75: mol_type = other DNA
gtgactgatcttcaacaaacgtattaccgccaggtaaagaatccgaatccggtgttcacaccccgtgaaggtgcc

SEQ ID NO: 193584 - DNA, 75 bp, synthetic construct
  source 1..75: mol_type = other DNA
acgttcctgtcagagctgggactgattacctaccagacggaatatgacccgcttatcgggtgctacattccgacc

SEQ ID NO: 193585 - DNA, 75 bp, synthetic construct
  source 1..75: mol_type = other DNA
gttgccgaaggtagacggttgcaagatgtcactccgggggagtttctttctccagccaccttcaccatcacttac

SEQ ID NO: 193586 - DNA, 75 bp, synthetic construct
  source 1..75: mol_type = other DNA
gccgggctggcagcagccagagcacagggacgcgtaggtggaaggcccaacgcattaaaaacccatgagcgagag

SEQ ID NO: 193587 - DNA, 75 bp, synthetic construct
  source 1..75: mol_type = other DNA
atggccgttattggttatatccgcgtatcaacaatcgaccagaacagcgatttgcagcgtaatgcactcacaagc

SEQ ID NO: 193588 - DNA, 75 bp, synthetic construct
  source 1..75: mol_type = other DNA
attggctgtggaatgaacgcgctgcgtaccgcgttaacgtcgatgctaaatgggctgagctggaagccggttatc

SEQ ID NO: 193589 - DNA, 75 bp, synthetic construct
  source 1..75: mol_type = other DNA
atggctatgaaagtattggttacagcaaatcaaaaaggtggtgttggcaagacttccaccctggttcatctggca

SEQ ID NO: 193590 - DNA, 75 bp, synthetic construct
  source 1..75: mol_type = other DNA
attaactcccagaggaataggttgcggtggttataatgctaactcagccggttttgcaaatgcaaagaatggtgc

SEQ ID NO: 193591 - DNA, 75 bp, synthetic construct
  source 1..75: mol_type = other DNA
tttaatgcctccggtattacctggccattacctgaatcactttcagtcgcccaactcgatgccatactttatgcc

SEQ ID NO: 193592 - DNA, 75 bp, synthetic construct
  source 1..75: mol_type = other DNA
cggtgggcttcacctcccgttttgatttcgccattcatgtggcgcatgcccgttcgcgtggtctgcgtcgacgca

SEQ ID NO: 193593 - DNA, 75 bp, synthetic construct
  source 1..75: mol_type = other DNA
ttgccgcccttgatgtgtctgaggatgcagtggcagctgcgcgccgcagtcgtgttgaatgggaaaacagacagc

SEQ ID NO: 193594 - DNA, 75 bp, synthetic construct
  source 1..75: mol_type = other DNA
gccgggttggcagcagccagagcacagggacgtataggtggaaggcccaacgcattaaagccgcatgagagggaa

SEQ ID NO: 193595 - DNA, 75 bp, synthetic construct
  source 1..75: mol_type = other DNA
gacgcggtgattaacgctattgctatggtgtgtcaggccggacgtaataatgaaattccggtcagtatgtgcggc

SEQ ID NO: 193596 - DNA, 75 bp, synthetic construct
  source 1..75: mol_type = other DNA
aaacgtcccacggtgcgagctgcatcttaaatcaggtgtggtaaaactgtttgaccctctcactccggaaatgtt

SEQ ID NO: 193597 - DNA, 75 bp, synthetic construct
  source 1..75: mol_type = other DNA
caaacgttaatacgtctgaaggttgttttgaaattggtgtcactatcagtaacccagtatttactgaagatgcca

SEQ ID NO: 193598 - DNA, 75 bp, synthetic construct
  source 1..75: mol_type = other DNA
ctgctgcagctgaacagaaaattcccggtaactgttatccggttgataaaatcattcaccaggataataaagaag

SEQ ID NO: 193599 - DNA, 75 bp, synthetic construct
  source 1..75: mol_type = other DNA
atgaatacatcatttgcacttgttctgacagtttttcttgtttccggtgattcttttgattttgttttttgtttt

SEQ ID NO: 193600 - DNA, 75 bp, synthetic construct
  source 1..75: mol_type = other DNA
ctgacgagctggagctgctgacattctgcgttctggtgctgaagaatggctttacggtcaccggggaaagcgcct

SEQ ID NO: 193601 - DNA, 75 bp, synthetic construct
  source 1..75: mol_type = other DNA
cggcgttatatggcgtggcgatccgcctgaaacgtccgcttatcgccagtcttatcagcggttttatttgcggcg

SEQ ID NO: 193602 - DNA, 75 bp, synthetic construct
  source 1..75: mol_type = other DNA
gaaacgactctgaagaatggagacacaaaagcgttcagggtgttcaccagcaattctggtgacatcgacattctg

SEQ ID NO: 193603 - DNA, 75 bp, synthetic construct
  source 1..75: mol_type = other DNA
atgctacgcgagtgtgattacagccaggcgctgctggagcaggtgaatcaggcgattagcgataaaacgccgctg

SEQ ID NO: 193604 - DNA, 75 bp, synthetic construct
  source 1..75: mol_type = other DNA
gccgatgatggatttacccggcgagcaactgatcgactggggcggtgcgttacgctggctgaaatcgacagccga

SEQ ID NO: 193605 - DNA, 75 bp, synthetic construct
  source 1..75: mol_type = other DNA
tgtgtgactgcagcaaccgaacagaaaattcccggtaactgttacccggtcgataaagttattcaccaggataat

SEQ ID NO: 193606 - DNA, 75 bp, synthetic construct
  source 1..75: mol_type = other DNA
ttgttctgacagtttttcttgtttccggagagccagttgatattgcagtcagtgttcacaggacaatgcaggagt

SEQ ID NO: 193607 - DNA, 75 bp, synthetic construct
  source 1..75: mol_type = other DNA
attattaccggcactggtaaacatctgcgttttggcggcgaagtgatgaaaaacgttgccggatacgatctctcg

SEQ ID NO: 193608 - DNA, 75 bp, synthetic construct
  source 1..75: mol_type = other DNA
ttcttctcgttaccaggtaccttatggcgcatttccttacccagcgatgcgccgatgatggatttacccggcgag

SEQ ID NO: 193609 - DNA, 75 bp, synthetic construct
  source 1..75: mol_type = other DNA
agaaatcgggcgcaagattgctcgccagaatgctgtaaacaaaatctggatgctcgaaggttacttgctgaagca

SEQ ID NO: 193610 - DNA, 75 bp, synthetic construct
  source 1..75: mol_type = other DNA
tattatcgtgctggataacccgatgaccttccagtttagtcaattcctcgacagtgcattagggcaaatcgtcgg

SEQ ID NO: 193611 - DNA, 75 bp, synthetic construct
  source 1..75: mol_type = other DNA
cgcatctggcaagcgccaccgcaggtgacggaaccggtgcatcggcttaccggtatgctccataagtatcaacat

SEQ ID NO: 193612 - DNA, 75 bp, synthetic construct
  source 1..75: mol_type = other DNA
acagaaccggacgcgtattgcttaatcaatttgtttctgctgctgtttccgcgatgaccaccaatgtcgcgcgtc

SEQ ID NO: 193613 - DNA, 75 bp, synthetic construct
  source 1..75: mol_type = other DNA
agagagaattagaacctatgtcatgcaaaagagttattctttttggtgtttagctgccacagggaaagatcccgt

SEQ ID NO: 193614 - DNA, 75 bp, synthetic construct
  source 1..75: mol_type = other DNA
tcaatgaccaccaatgttgcgcgtcgtaaagagaaccatctgccagcgctttatcagcagttgtttttgctgatg

SEQ ID NO: 193615 - DNA, 75 bp, synthetic construct
  source 1..75: mol_type = other DNA
tggacgtgtactgcttaatcagtttgtttctgccgctgtttccgcgatgactaccaatgtggcacgtcgtaaaga

SEQ ID NO: 193616 - DNA, 75 bp, synthetic construct
  source 1..75: mol_type = other DNA
gatcctgcacgatcacgctatcgacaccgtgatccacttcgccgggctgaaagccgttggcgaatcggtacaaaa

SEQ ID NO: 193617 - DNA, 75 bp, synthetic construct
  source 1..75: mol_type = other DNA
ggaacaattagcgcctctttcctgtggttctttggtctggctattctcgcagcctggctggcaccgcgcctgcgc

SEQ ID NO: 193618 - DNA, 75 bp, synthetic construct
  source 1..75: mol_type = other DNA
gtgatgaatcagggcattcgtcgtcagtaccacattatgattgccttactttgtgctatcagcgatttggtcctg

SEQ ID NO: 193619 - DNA, 75 bp, synthetic construct
  source 1..75: mol_type = other DNA
tacgctatcgctgacgctgattacccagtcctgcgaaacctatttgattcagaattcgcgcccggaattgatcac

SEQ ID NO: 193620 - DNA, 75 bp, synthetic construct
  source 1..75: mol_type = other DNA
aaaagcaagctgatggtggaacagatccttaccgacctgcaaaaagcccagccggactggagcattgccctgctg

SEQ ID NO: 193621 - DNA, 75 bp, synthetic construct
  source 1..75: mol_type = other DNA
aactgaactggcgcgtaacgcgcacactcgatgaaatggcacaggacacctggcactggcagtcacgccatccac

SEQ ID NO: 193622 - DNA, 75 bp, synthetic construct
  source 1..75: mol_type = other DNA
cgggggcggggggtggtttttctgccggtgctgggggggggggcccccccgccgaattttctcttcctgctgggc

SEQ ID NO: 193623 - DNA, 75 bp, synthetic construct
  source 1..75: mol_type = other DNA
ccgcgtatctggcgggcgggatgtttttacagtggctgctgggaccactgtcggatcgtattggtcgccgtccgg

SEQ ID NO: 193624 - DNA, 75 bp, synthetic construct
  source 1..75: mol_type = other DNA
atggctcctggggccgctgtcggatcgtattggtcgccgtccggtgatgctggcggggtggtgtggtttatcatc

SEQ ID NO: 193625 - DNA, 75 bp, synthetic construct
  source 1..75: mol_type = other DNA
gttaattgcgggtaacttgctgttagcgcgtttgacctcgcgccgcaccgttcgtgcattgatcatcatgggcgg

SEQ ID NO: 193626 - DNA, 75 bp, synthetic construct
  source 1..75: mol_type = other DNA
tggtgggcgccgcgtggatccatgtgctgccctgggaaggcatgtttgtgctgtttgctgcattggcggcgatct

SEQ ID NO: 193627 - DNA, 75 bp, synthetic construct
  source 1..75: mol_type = other DNA
ctgatggcgaacgtggcgctgattgctccgctacttggtccgctggtgggcgcggcgtggatccatgtgctgccc

SEQ ID NO: 193628 - DNA, 75 bp, synthetic construct
  source 1..75: mol_type = other DNA
ttccggcgtttgccccgacattgctcaatatcagcatgattggttttgcgctgtttgccgcgccgtactttaatc

SEQ ID NO: 193629 - DNA, 75 bp, synthetic construct
  source 1..75: mol_type = other DNA
atgaatttattaaaatcgctggccgccgtcagctcgatgaccatgttttcgcgtgtgcttggcttcgcacgagac

SEQ ID NO: 193630 - DNA, 75 bp, synthetic construct
  source 1..75: mol_type = other DNA
cccgctgatcgacatcggcattcatatgctggatgctgcgatgtatgtgctgggctttccggcggtgaaaagcgt

SEQ ID NO: 193631 - DNA, 75 bp, synthetic construct
  source 1..75: mol_type = other DNA
ggcgtttctgttgcgtctggtggtggcggtactggtgatgtctggcgtgcttttaggtatgttacatatcatgcc

SEQ ID NO: 193632 - DNA, 75 bp, synthetic construct
  source 1..75: mol_type = other DNA
cagggatggcaaccgacgccttttttgtcgcttttaaacttcctaacttgttgcgccgtatttttgctgaaggag

SEQ ID NO: 193633 - DNA, 75 bp, synthetic construct
  source 1..75: mol_type = other DNA
ccgtcagctcgatgaccatgttttcgcgtgtgcttggcttcgcacgtgacgcaattgtcgccagaatctttggcg

SEQ ID NO: 193634 - DNA, 75 bp, synthetic construct
  source 1..75: mol_type = other DNA
aacggaattttgtggctgctgctgatgtttatctttttaaaagataaacaaacaggaaattcaaacgacggataa

SEQ ID NO: 193635 - DNA, 75 bp, synthetic construct
  source 1..75: mol_type = other DNA
ggcgtgcgtaccagcaaaatgcgaaaggccaacatgactgagcttatcgaaatcatgttctggttcggctcagag

SEQ ID NO: 193636 - DNA, 75 bp, synthetic construct
  source 1..75: mol_type = other DNA
cagagccgccgtggaacgtttaggcccgttgccggaagcgatactgagcggcaagctgcgctcatcgttttcatc

SEQ ID NO: 193637 - DNA, 75 bp, synthetic construct
  source 1..75: mol_type = other DNA
ggaaacgccgctcattcgcctggcgcaacggcttgataagcagacgattagcggtgcggaggtgattgctttaca

SEQ ID NO: 193638 - DNA, 75 bp, synthetic construct
  source 1..75: mol_type = other DNA
gaaaatatgaaccttatcttctcaataataattccatactctccagaattgcccttattaaacttggtattttcg

SEQ ID NO: 193639 - DNA, 75 bp, synthetic construct
  source 1..75: mol_type = other DNA
atgaaattgtcgcgcccggaagcgatccgtggaatgaggcagccgcagagatctatgtagagagccagctttacg

SEQ ID NO: 193640 - DNA, 75 bp, synthetic construct
  source 1..75: mol_type = other DNA
atgaagcaaatatacatgcttcgcaacgaagcaatcagaaacaacgccatagacgcaatactctcacttccgatc

SEQ ID NO: 193641 - DNA, 75 bp, synthetic construct
  source 1..75: mol_type = other DNA
cacagaacaatgcaggaatgtatggcagcagcaaccgaacagaaaattccaggcaactgttatccggtcgataaa

SEQ ID NO: 193642 - DNA, 75 bp, synthetic construct
  source 1..75: mol_type = other DNA
aagctttccgtactgacaaactggaactgaccagcggcaacatcgctgaccataacggtaacgtagtatctggtg

SEQ ID NO: 193643 - DNA, 75 bp, synthetic construct
  source 1..75: mol_type = other DNA
tgctgcaagtgcctattttcggggcgttaattgcgggtaacttgctgttagcgcgtttgacctcgcgccgcaccg

SEQ ID NO: 193644 - DNA, 75 bp, synthetic construct
  source 1..75: mol_type = other DNA
acactgttaaatccccaatgggaatgtttgattccaatgagattgataacgatctctctttcgtcgatgccactg

SEQ ID NO: 193645 - DNA, 75 bp, synthetic construct
  source 1..75: mol_type = other DNA
tcgtttgataaatttactgagataggccgccacgcatgggaggtgattaaggctgcacaggatgcacctgatgac

SEQ ID NO: 193646 - DNA, 75 bp, synthetic construct
  source 1..75: mol_type = other DNA
ttgattacctgcgtccgcagaccattatcgggcgatttggtcagggcgggatcccggcacttcgtcaggtgccgt

SEQ ID NO: 193647 - DNA, 75 bp, synthetic construct
  source 1..75: mol_type = other DNA
ggtcgccacggcggatgacgtcgcagattgcgatacgctgatttactactggccgaagaacaaaccggaagccca

SEQ ID NO: 193648 - DNA, 75 bp, synthetic construct
  source 1..75: mol_type = other DNA
atgtctgcatttaccccggcaagtgaagtcttgctgcgtcacagtgatgatttcgaacaaagccgtattctgttt

SEQ ID NO: 193649 - DNA, 75 bp, synthetic construct
  source 1..75: mol_type = other DNA
gcgctgcgtaagctgggctactccggtaacaccaccgatccgaaagagattgaagctgcatacaacgagctgaaa

SEQ ID NO: 193650 - DNA, 75 bp, synthetic construct
  source 1..75: mol_type = other DNA
acgatatggagcatcgctgtcgctttgattccgatgtgcttgttgaacgcctgacacgccagacgctgtatcgcg

SEQ ID NO: 193651 - DNA, 75 bp, synthetic construct
  source 1..75: mol_type = other DNA
atgtgtgaccttcgggccaggctgaacgatatggagcatcgctgtcgctttgattccgatgtgcttgttgaacgc

SEQ ID NO: 193652 - DNA, 75 bp, synthetic construct
  source 1..75: mol_type = other DNA
caacccgccgttccacgatgggatgcaaaccagcctggatgcggcgcaaacgctgattcgcggtgcggtgcgtca

SEQ ID NO: 193653 - DNA, 75 bp, synthetic construct
  source 1..75: mol_type = other DNA
caataccatgtgtgaccttcgggccaggctgaacgatatggaacatcgctgtcgctttgattccgatgtgcttgt

SEQ ID NO: 193654 - DNA, 75 bp, synthetic construct
  source 1..75: mol_type = other DNA
acaaccatgaatgagatggagcagcggtacagctttaatgctgacaccctgccggaacgtctggtgcgtcagacg

SEQ ID NO: 193655 - DNA, 75 bp, synthetic construct
  source 1..75: mol_type = other DNA
atgaactatggcggacacgaaaaccttcgcgccgaagtggcggaggtggccaatgccatgtgcgaccttcgggcc

SEQ ID NO: 193656 - DNA, 75 bp, synthetic construct
  source 1..75: mol_type = other DNA
tgccgaaaccatcaaaaatggcgaatggcagagtgacgttggctcagccagcagcatttatgaagagtattatca

SEQ ID NO: 193657 - DNA, 75 bp, synthetic construct
  source 1..75: mol_type = other DNA
ttaactccgataacccggctaacccgtacatggaaggcgaagttaacctcggcatgatctggaacggttctgctt

SEQ ID NO: 193658 - DNA, 75 bp, synthetic construct
  source 1..75: mol_type = other DNA
acgagtcgaacgaaaccatgtacgccaagctgaaaacgtacaaagacggtgcctatgacctggtggttccttcaa

SEQ ID NO: 193659 - DNA, 75 bp, synthetic construct
  source 1..75: mol_type = other DNA
cacctgggagcacagtacccgcgagctggtggacataaccgcagagcagatcgtcaacctgtctgtagatgagga

SEQ ID NO: 193660 - DNA, 75 bp, synthetic construct
  source 1..75: mol_type = other DNA
gggattcgcgtggttagatactggcacttatgatagcttaattgaagcgggcagttttgttgaaacagtgcagaa

SEQ ID NO: 193661 - DNA, 75 bp, synthetic construct
  source 1..75: mol_type = other DNA
tacgataattcagtagttgagatagcaaaaactataaagccttctaaacgcggagaactggaaataacgaccatc

SEQ ID NO: 193662 - DNA, 75 bp, synthetic construct
  source 1..75: mol_type = other DNA
attataacaacacccgaagatcaggaaggatttattcgtcttttaggtgatggaagtcaatttggaattgagttg

SEQ ID NO: 193663 - DNA, 75 bp, synthetic construct
  source 1..75: mol_type = other DNA
tgatggccaccatcgacaaaataaacagggaaggaaggtcaaggatcttcttcgccggagaaggtattgatccgg

SEQ ID NO: 193664 - DNA, 75 bp, synthetic construct
  source 1..75: mol_type = other DNA
atttacgaggtcgccctgtggtcgttctcagcaacaacgacggggcgcttgttgcggtcaatcgcgcggcgaaag

SEQ ID NO: 193665 - DNA, 75 bp, synthetic construct
  source 1..75: mol_type = other DNA
gatatcaagtaatggatcctgagcgatttggtgtcgttgcatttgataataatttcagagcagtaagcattgagg

SEQ ID NO: 193666 - DNA, 75 bp, synthetic construct
  source 1..75: mol_type = other DNA
aggtgaattagagataacatcagtaaatgaagtttacctgactaatagttccttacatgttgaattgttaggccg

SEQ ID NO: 193667 - DNA, 75 bp, synthetic construct
  source 1..75: mol_type = other DNA
aggatttgcgtggcttgatactggaactcatgattctctattagacgcttcgcattttgtagagactgttgagaa

SEQ ID NO: 193668 - DNA, 75 bp, synthetic construct
  source 1..75: mol_type = other DNA
gattgcagccaccagctaaccacccatttctataacggttctgccgttcgcctgtgctggaagcatgatgcggaa

SEQ ID NO: 193669 - DNA, 75 bp, synthetic construct
  source 1..75: mol_type = other DNA
ctggaggagatagcatggcgaaatggttggttaagtaagataaaattgtatgagttaggtcacaaattgagtaaa

SEQ ID NO: 193670 - DNA, 75 bp, synthetic construct
  source 1..75: mol_type = other DNA
atgaaaggaattattttagccggtggttctggaacaaggctttatccaattacaatgggggtttcaaagcagcta

SEQ ID NO: 193671 - DNA, 75 bp, synthetic construct
  source 1..75: mol_type = other DNA
gttatcaagtgaaagaccctgaacgcttcggtgtagttgaatttgatagcgagatgcgggctgtatctattgaag

SEQ ID NO: 193672 - DNA, 75 bp, synthetic construct
  source 1..75: mol_type = other DNA
aattcaccgttggttttgacgaaaccttaaaacccatggttcgtgacgcaaacggcaaagtcctgaaagacttac

SEQ ID NO: 193673 - DNA, 75 bp, synthetic construct
  source 1..75: mol_type = other DNA
gcacatgccattcttaataacacccgggaaggcactcagttgacgattagcggtcatcctgttcttaaaatgtaa

SEQ ID NO: 193674 - DNA, 75 bp, synthetic construct
  source 1..75: mol_type = other DNA
ggcaaggggaaggcccgacatgtcagactgaaggcatgttgtggggaggcaatcttgcgatgctcatttcactga

SEQ ID NO: 193675 - DNA, 75 bp, synthetic construct
  source 1..75: mol_type = other DNA
acccgtacttaccttgtcacccacttccagcaaatagcccaacagcaggcgacaaaacaaacattgtttaccgac

SEQ ID NO: 193676 - DNA, 75 bp, synthetic construct
  source 1..75: mol_type = other DNA
aatcctttggcgactggggtttaaggaatggcgcagaaccggagaagaacaatacgaaaaaaaaataatgccaca

SEQ ID NO: 193677 - DNA, 75 bp, synthetic construct
  source 1..75: mol_type = other DNA
atgatcgctacggtaaacaacctttacttactttttccatgctcgacgacatcaccgccagcgagctgattaacg

SEQ ID NO: 193678 - DNA, 75 bp, synthetic construct
  source 1..75: mol_type = other DNA
cattattcattgatttaggcgtgcagaacgctccggcagtcatttctgttgttggtgcaggggggaaaaccagtc

SEQ ID NO: 193679 - DNA, 75 bp, synthetic construct
  source 1..75: mol_type = other DNA
tgggcgcgaaagtgagcacagaaaatgtccatcgctggtcgcagtttgctgatattaccgggttaacacctgatg

SEQ ID NO: 193680 - DNA, 75 bp, synthetic construct
  source 1..75: mol_type = other DNA
ggaacgtctggtgcgtcagacgctgtttcgcgcaaaccgcctcttgatggaagcatataccgaaattctggaact

SEQ ID NO: 193681 - DNA, 75 bp, synthetic construct
  source 1..75: mol_type = other DNA
ttgccccatcggggttacagcattaaacagcacgccgcgctgcgtggtatccagcgccttaccgacgcggggcat

SEQ ID NO: 193682 - DNA, 75 bp, synthetic construct
  source 1..75: mol_type = other DNA
ttgaacgcctgacacgccagacgctgtatcgcgccaatcgcctgttcatggaggcgtataccgaaattctggaac

SEQ ID NO: 193683 - DNA, 75 bp, synthetic construct
  source 1..75: mol_type = other DNA
cagagttaatgcaacgtttaggcgagttgggcaaactgacccccgagaccatgaaaggcgtggttgccctgggca

SEQ ID NO: 193684 - DNA, 75 bp, synthetic construct
  source 1..75: mol_type = other DNA
atgtacgcgccatagccagccagcagattgatcgtctggaacaggctatgtgccagcgcagacgctggacggcag

SEQ ID NO: 193685 - DNA, 75 bp, synthetic construct
  source 1..75: mol_type = other DNA
atgcggggtgatactcccgaggtgctccatttcgatatctcttcacgcgtgatggccgccattgaagaagagcca

SEQ ID NO: 193686 - DNA, 75 bp, synthetic construct
  source 1..75: mol_type = other DNA
tttaccgacctgccgccgatggaaaaagcaagctgggagagacacttagtccccctcacaccagaacagcaaatt

SEQ ID NO: 193687 - DNA, 75 bp, synthetic construct
  source 1..75: mol_type = other DNA
gtcctcgctcactttctcggcgcttgatgccatcaccgccagcgaactcattaacgatattgaatcactgtttga

SEQ ID NO: 193688 - DNA, 75 bp, synthetic construct
  source 1..75: mol_type = other DNA
tatcgcgccaatcgcctgttcatggaagcgtataccgaaattctggaactggattctgcttcaaagattgagaag

SEQ ID NO: 193689 - DNA, 75 bp, synthetic construct
  source 1..75: mol_type = other DNA
tgaacgatatggagcatcgctgtcgctttgattccgatgtgcttgttgaacgcctgacacgtcagacgctgtatc

SEQ ID NO: 193690 - DNA, 75 bp, synthetic construct
  source 1..75: mol_type = other DNA
caatgccatgtgtgaccttcgggccaggctgaacgatatggagcatcgctgtcgctttgattccgatgtgcttgt

SEQ ID NO: 193691 - DNA, 75 bp, synthetic construct
  source 1..75: mol_type = other DNA
agaagacagcacttacagcgatgcgcaggatgagctattcacgctgccagcaggaaacatcggtattccgcatgt

SEQ ID NO: 193692 - DNA, 75 bp, synthetic construct
  source 1..75: mol_type = other DNA
ttagtcgttcgttgtggcctggaaactaccgttgaaatcgcccttctcgctcttcaacttagatataaaacagta

SEQ ID NO: 193693 - DNA, 75 bp, synthetic construct
  source 1..75: mol_type = other DNA
cgatttttggtgatgcggccattcctgcgtttatgaaatgtctgcaacgtaagccacaacagttatggatattca

SEQ ID NO: 193694 - DNA, 75 bp, synthetic construct
  source 1..75: mol_type = other DNA
gcttgatagcagtggctcgctaatatactggatttcggcccccgcaaattcaccgttggttttgacgaaacctta

SEQ ID NO: 193695 - DNA, 75 bp, synthetic construct
  source 1..75: mol_type = other DNA
ttaaaccagcgagaaacgattgaggaaatcgcccaaggatataatcaacctgatgttttagctgcgctggcaaca

SEQ ID NO: 193696 - DNA, 75 bp, synthetic construct
  source 1..75: mol_type = other DNA
aacgctgggaaacgtctttcatccctttaacgccagaacagcaaatcctttggcgactggggtttaaggaatggc

SEQ ID NO: 193697 - DNA, 75 bp, synthetic construct
  source 1..75: mol_type = other DNA
tctctttatatgaagaagtgtgcgccagatatccgcaggtggcgtttcagtcctccggcggtattggcgacattg

SEQ ID NO: 193698 - DNA, 75 bp, synthetic construct
  source 1..75: mol_type = other DNA
ctggcgctggatgtccgtattgacgagcaaggtaacaagcaggtggcggtgagcggctggcaagagaactcgggc

SEQ ID NO: 193699 - DNA, 75 bp, synthetic construct
  source 1..75: mol_type = other DNA
atgattattccggcattagatttaatcgacggcaccgtggtgcgtctccatcagggcgattacggcaaacagcgc

SEQ ID NO: 193700 - DNA, 75 bp, synthetic construct
  source 1..75: mol_type = other DNA
tccggcaactctgtgaaacgacagactgggttgatgcaggagaaaacgttctgctgttcggagccagcgggttgg

SEQ ID NO: 193701 - DNA, 75 bp, synthetic construct
  source 1..75: mol_type = other DNA
ctggaaaaacgagcactggcagaaggctggacaccatcgcgctatcttctgacgctatgcaatgaagaactcctg

SEQ ID NO: 193702 - DNA, 75 bp, synthetic construct
  source 1..75: mol_type = other DNA
gtgttaatggtcacccatcgacttcgcggactctctcgtttccaacaaataatagtgatggacaacgggcaaatt

SEQ ID NO: 193703 - DNA, 75 bp, synthetic construct
  source 1..75: mol_type = other DNA
catgatctatctgcgtaaccacaacccggccacgtttgtgttgatcccggtatttattgtggtgaccaaagttat

SEQ ID NO: 193704 - DNA, 75 bp, synthetic construct
  source 1..75: mol_type = other DNA
catgctctatctgcgtaaccacaaccccgccacctttgtgttgatcccggtattcatcgtggtgaccaaggttgt

SEQ ID NO: 193705 - DNA, 75 bp, synthetic construct
  source 1..75: mol_type = other DNA
acctgtcgcagagtgcctttacgatgctggctacatagtgtcagtcattaatcctgcactgggtaaagctttcgc

SEQ ID NO: 193706 - DNA, 75 bp, synthetic construct
  source 1..75: mol_type = other DNA
ccaatgaaattgcctttgtggcggaaaacggcggctgggtggtgaacgaaggcaaagatgtttttaatggcgaac

SEQ ID NO: 193707 - DNA, 75 bp, synthetic construct
  source 1..75: mol_type = other DNA
tttgttttgcgccatcgaagcgattcatcgtcacgccacaccctacgggctggtgtggttcgatcgcagttatca

SEQ ID NO: 193708 - DNA, 75 bp, synthetic construct
  source 1..75: mol_type = other DNA
catgctttatctgcgtaaccacaacccggccacgtttgtgttgatcccggtgtttatcgtggtgaccaaagttat

SEQ ID NO: 193709 - DNA, 75 bp, synthetic construct
  source 1..75: mol_type = other DNA
gaccttctggcatagttggcaggggccacttcttgaagggcaacaaagtagccaaaacgctaagcgaatacgact

SEQ ID NO: 193710 - DNA, 75 bp, synthetic construct
  source 1..75: mol_type = other DNA
tgcttcggtattaggggaaatagccgccaactttgcgcaaggtaaaaacaacgattttgatttaacaccttttag

SEQ ID NO: 193711 - DNA, 75 bp, synthetic construct
  source 1..75: mol_type = other DNA
cgccacaacgaagatgatcccatttttgtacgctctggtgtcattaaccttggcccggctgactccgcatttctc

SEQ ID NO: 193712 - DNA, 75 bp, synthetic construct
  source 1..75: mol_type = other DNA
cgccatgcttatggtgagggagaaaagtatgtcccgctggttcttcgcgcacaaatcttgtgggatgagctctcc

SEQ ID NO: 193713 - DNA, 75 bp, synthetic construct
  source 1..75: mol_type = other DNA
gttccgcaagacactaatggtgtaaccgttggtgccatttcggaaataaaaccaggcgtttacagcgccacggtt

SEQ ID NO: 193714 - DNA, 75 bp, synthetic construct
  source 1..75: mol_type = other DNA
gtgaattaatcgtgatgccgcgagtgaacggccaaaatgccgttgcccagcctctggtgctgaatgttgcaggtg

SEQ ID NO: 193715 - DNA, 75 bp, synthetic construct
  source 1..75: mol_type = other DNA
tcagtaaagcaacccacggtctaaaaaatgtgcagtgggaggcgccgtctttgctggctgcgggcggtaaaatta

SEQ ID NO: 193716 - DNA, 75 bp, synthetic construct
  source 1..75: mol_type = other DNA
ggcgaaaaaagcgattgtctgcgcgggaacatgggtaaaagacctgctcccggagctgcctgtccagcccgtacg

SEQ ID NO: 193717 - DNA, 75 bp, synthetic construct
  source 1..75: mol_type = other DNA
gcgattaaaacctggatccaactggcgaaggaagcgggctgtgcgcaactgttcaactgcccggtcaccgcaatt

SEQ ID NO: 193718 - DNA, 75 bp, synthetic construct
  source 1..75: mol_type = other DNA
agtatgtcccgttggtcctccgcgcgcaaacgctgtgggatgaactttcccgccacaacgaagatgatcccattt

SEQ ID NO: 193719 - DNA, 75 bp, synthetic construct
  source 1..75: mol_type = other DNA
cgccatgcttatggtgaaggcgaaaagtatgttccgttggtgcttcgcgcgcaaaccctgtgggatgaactcacc

SEQ ID NO: 193720 - DNA, 75 bp, synthetic construct
  source 1..75: mol_type = other DNA
gcagcggttccgtaggtgctgcagccgggtattatgccactcgggccggtttgaaagtgctgatgaccgacgccc

SEQ ID NO: 193721 - DNA, 75 bp, synthetic construct
  source 1..75: mol_type = other DNA
cgcgtcccggacaactacatcggcttatttgaaactgattccggttttttgcgcagcgaactggcgattaaaacc

SEQ ID NO: 193722 - DNA, 75 bp, synthetic construct
  source 1..75: mol_type = other DNA
tttctctggttcatctgtgggagctgacaagcttgatgaactgggaacttctggtggaaccggtacggctatcaa

SEQ ID NO: 193723 - DNA, 75 bp, synthetic construct
  source 1..75: mol_type = other DNA
tcagctgtttaccctctaccagatccgcaataaacgcatgacctggcgcaccttgctgacgctgctgtcggtgcg

SEQ ID NO: 193724 - DNA, 75 bp, synthetic construct
  source 1..75: mol_type = other DNA
ataagttaatgtttgtattggtttatgataagcctcagtcagtattaatagacagaaaaaacgaaacatatgtag

SEQ ID NO: 193725 - DNA, 75 bp, synthetic construct
  source 1..75: mol_type = other DNA
agtgcgctgggatatgagcagctacgaagctacaccggagggttgccgctgtatgtcgaaagcgcggcgagagtt

SEQ ID NO: 193726 - DNA, 75 bp, synthetic construct
  source 1..75: mol_type = other DNA
caaatccgcgcccagcaattccccatgacgaggttgagcgcagaatggcagaacgctttgctaaaatgcgcaagg

SEQ ID NO: 193727 - DNA, 75 bp, synthetic construct
  source 1..75: mol_type = other DNA
aaaaaagccactggaggcaccctgaaagaaggagacttcactgctgttgctaacttcaatcttacctacgagtaa

SEQ ID NO: 193728 - DNA, 75 bp, synthetic construct
  source 1..75: mol_type = other DNA
attcgtaataagcgcatgacctggaagacgtttctgacgctgctgtcggtgcgcaacggcaaacgctgggtcgac

SEQ ID NO: 193729 - DNA, 75 bp, synthetic construct
  source 1..75: mol_type = other DNA
cacgctggcgctggtgcaggcatcctctgaactgggcgaactgaaacgctatgttgagaacggtgagtttctgat

SEQ ID NO: 193730 - DNA, 75 bp, synthetic construct
  source 1..75: mol_type = other DNA
caatggggatcaaaacggcgctggcgctcgcagagatggatatccgtcttgcacgccggctgtacggtgtgacgc

SEQ ID NO: 193731 - DNA, 75 bp, synthetic construct
  source 1..75: mol_type = other DNA
agaaaaagaaaaagaacgtaattgtttagaaattaaactaggtgagcttgaaaaagaattcaaagccacattaaa

SEQ ID NO: 193732 - DNA, 75 bp, synthetic construct
  source 1..75: mol_type = other DNA
atggcttatccaaaatcctcaaggcgggaaaatctaacgccaagtgatattactacaactatttgtaatgcttat

SEQ ID NO: 193733 - DNA, 75 bp, synthetic construct
  source 1..75: mol_type = other DNA
ccgcgactaaccgcgatctgaaaaaaatggtcgccgaccgagagttccgtagcgatctctattaccgcctgaacg

SEQ ID NO: 193734 - DNA, 75 bp, synthetic construct
  source 1..75: mol_type = other DNA
cagcaattactccagcttgatttggtttcaacaccagaccataaactgcatgaattcttcagcattacacgccag

SEQ ID NO: 193735 - DNA, 75 bp, synthetic construct
  source 1..75: mol_type = other DNA
tgaccacctgaattattggcaacacgatattcccgccgtaatgattactgacaccgctttttatcgtaataaaca

SEQ ID NO: 193736 - DNA, 75 bp, synthetic construct
  source 1..75: mol_type = other DNA
gcacccaacatattcatcgcattatggctaattatatgccgcacaataaacgcagcggtgatttactggcgcgac

SEQ ID NO: 193737 - DNA, 75 bp, synthetic construct
  source 1..75: mol_type = other DNA
ttgaatgctttagcaaagcatatgcttcggagtggataaaagcgcataaactatcgaagcaaatctattttcctg

SEQ ID NO: 193738 - DNA, 75 bp, synthetic construct
  source 1..75: mol_type = other DNA
aaaatggattgctgatgtcggtttcggtgggcagacgctaaccgcgccgattcgtttaatgccggatatcatgca

SEQ ID NO: 193739 - DNA, 75 bp, synthetic construct
  source 1..75: mol_type = other DNA
atgattcgcatgacgatagatctattcatagatttgtttgtgaaaaaaataaattttgcttttattatattattt

SEQ ID NO: 193740 - DNA, 75 bp, synthetic construct
  source 1..75: mol_type = other DNA
ttatattaattctattttcactccctctgattattttttaccaaccctgggtcaatgcattaccgccaacgcccc

SEQ ID NO: 193741 - DNA, 75 bp, synthetic construct
  source 1..75: mol_type = other DNA
attaagccattagagggcgtggaatacgatccttatcgtgatgttgttggtgtatggactgtttgctatggtcac

SEQ ID NO: 193742 - DNA, 75 bp, synthetic construct
  source 1..75: mol_type = other DNA
agacttacacgcaatcagaatgcgatgctttgttaaataaagatctacacaagaccgcaaaagcgattgacccat

SEQ ID NO: 193743 - DNA, 75 bp, synthetic construct
  source 1..75: mol_type = other DNA
gcaggaaaatacctgattgatgaaagaatgaaaaagcgccgtgctgaagcaactgccgaacgtgcattgccaaac

SEQ ID NO: 193744 - DNA, 75 bp, synthetic construct
  source 1..75: mol_type = other DNA
ttttggcggtacaaaaccgcagaatatttctctgctcaacagtgttcgtggtggtcgtatttggttgctgccatc

SEQ ID NO: 193745 - DNA, 75 bp, synthetic construct
  source 1..75: mol_type = other DNA
tttatgctggtggtaaacagtggcaaggtttaatcaatcgccgtgatgttgaatatgccgtttgcgaatggggtg

SEQ ID NO: 193746 - DNA, 75 bp, synthetic construct
  source 1..75: mol_type = other DNA
atatcaaagtcgaagtatcagattttacccgcgcagcactttattcattcgcctataacgtaggcgcaaccaact

SEQ ID NO: 193747 - DNA, 75 bp, synthetic construct
  source 1..75: mol_type = other DNA
gtgacaaccagtgtcaggtgattatcggcaatacggtttcgcaggcctttcaggaagtcgtcagcctgctgccgg

SEQ ID NO: 193748 - DNA, 75 bp, synthetic construct
  source 1..75: mol_type = other DNA
gaggcaacggaagacaggctgcatttacttccaccacctggcaaaggtgcattaacagagcactggaacgagttt

SEQ ID NO: 193749 - DNA, 75 bp, synthetic construct
  source 1..75: mol_type = other DNA
ttgagtattttcaataaacacgcacaccaggaacgtccgtacatcgtcatagtagatattgatgggacgatatca

SEQ ID NO: 193750 - DNA, 75 bp, synthetic construct
  source 1..75: mol_type = other DNA
aacaccattctggacaggtctctgaacagcgcgatacagcctctgttgaccagtgtgaacaggtgattcgtcatc

SEQ ID NO: 193751 - DNA, 75 bp, synthetic construct
  source 1..75: mol_type = other DNA
agatagccagggataaaacacgagcctggttgcgtaagcacgtaacaaatggggctgagcctttgctatctatgc

SEQ ID NO: 193752 - DNA, 75 bp, synthetic construct
  source 1..75: mol_type = other DNA
gcgccagttgtccagcatttacacgctctggtttgtaaccgggcgctgtgagatagccagggataaaacacgagc

SEQ ID NO: 193753 - DNA, 75 bp, synthetic construct
  source 1..75: mol_type = other DNA
agtggcgcgtgttttcaggagtcacggcgtgcttacgttaatggtcagggagtatgaaaacgcgcttctccatca

SEQ ID NO: 193754 - DNA, 75 bp, synthetic construct
  source 1..75: mol_type = other DNA
gtctggctggaagtcgtgcagcgccgcatgaacgaagtgttcaacaagtcaaacctgtatcagtcattgcctgtc

SEQ ID NO: 193755 - DNA, 75 bp, synthetic construct
  source 1..75: mol_type = other DNA
atggtttgcggagatggagttctctggtttgcgcttattaaagtgctcgccattgtgatctttttggtcgtgggt

SEQ ID NO: 193756 - DNA, 75 bp, synthetic construct
  source 1..75: mol_type = other DNA
tagttttgtctcttatgcgcgtgaatttttgggagagaaagccgcttatgttgccggctggatgtatttcatcaa

SEQ ID NO: 193757 - DNA, 75 bp, synthetic construct
  source 1..75: mol_type = other DNA
acgcgttacaccacgaaagtgagcaacgtcccaaccactttccgcgtggtggtaaacaacgtgtttgataaacat

SEQ ID NO: 193758 - DNA, 75 bp, synthetic construct
  source 1..75: mol_type = other DNA
cgtcgtaacaccaagattgttgatcctaccggctcaatggctcagcgcattctgtccagcggcatgatgtccggc

SEQ ID NO: 193759 - DNA, 75 bp, synthetic construct
  source 1..75: mol_type = other DNA
acgcgttctccgaaatgtccggcgtatcgccaaccgtcatcattccgcaggagcaggttcagggcattcgtgaag

SEQ ID NO: 193760 - DNA, 75 bp, synthetic construct
  source 1..75: mol_type = other DNA
actgcacatcggcgacgggctggagaaaggcgtcaccatcgggccgctgatcgatgaaaaagcggtagcaaaagt

SEQ ID NO: 193761 - DNA, 75 bp, synthetic construct
  source 1..75: mol_type = other DNA
ggctcgccaacaacatgacccgttactcatttgcggacatagcgattttaccgccattcagtgcggtcttctggc

SEQ ID NO: 193762 - DNA, 75 bp, synthetic construct
  source 1..75: mol_type = other DNA
atgagaggacttgcatacaatcccggcattcttccggcagaaatgattattcgccaacgcgtaaagccaatgcca

SEQ ID NO: 193763 - DNA, 75 bp, synthetic construct
  source 1..75: mol_type = other DNA
tttccgtttggactgtttggcccgcacaccggcggctttgccgctggggttgcggcgacggcgtatgcagcgaag

SEQ ID NO: 193764 - DNA, 75 bp, synthetic construct
  source 1..75: mol_type = other DNA
tgaagaaaaactcattcccaagcgtgaacgagaacaaattcctgacagcgtggttaaaccagagggcgaagaaat

SEQ ID NO: 193765 - DNA, 75 bp, synthetic construct
  source 1..75: mol_type = other DNA
cgtcgggctactgtattaaacaacacgctgcgctgcgggctatccagcgcctgactgacgcgggacatcaggtca

SEQ ID NO: 193766 - DNA, 75 bp, synthetic construct
  source 1..75: mol_type = other DNA
ctcatttgcggacatagcgattttaccgccattcagtgcggtcttctggcgcaaggcaatgtcatcacctttagc

SEQ ID NO: 193767 - DNA, 75 bp, synthetic construct
  source 1..75: mol_type = other DNA
tcgtggcgcccgggcattgctacggtaacctggaatcagtgtaatggtcctgagtttgctgatggttcctgggct

SEQ ID NO: 193768 - DNA, 75 bp, synthetic construct
  source 1..75: mol_type = other DNA
tatccatgacgcagaatgtattcatgaaattcacgaagccccctgcaggctcccggcattctgcaaaaatacaaa

SEQ ID NO: 193769 - DNA, 75 bp, synthetic construct
  source 1..75: mol_type = other DNA
cctctgtgctatatgcatgacggtcccgttttccgggggcgctatattgatgagctcagcgccgcacggaacaga

SEQ ID NO: 193770 - DNA, 75 bp, synthetic construct
  source 1..75: mol_type = other DNA
tcgccagcgcgtaaagccaatgccatcgagagaggaattgctaaagagaaattcttttccgtcagtgaatcaaaa

SEQ ID NO: 193771 - DNA, 75 bp, synthetic construct
  source 1..75: mol_type = other DNA
cgtcgtaacactaagattattgatcctaccggttcaatggctcagcgcattctgtccagcggcatgatgtccggc

SEQ ID NO: 193772 - DNA, 75 bp, synthetic construct
  source 1..75: mol_type = other DNA
aaaaagaagtctggcatggtcatttggtggtgttaccctgaacgccagattgcctgttgaccttcctaaggggga

SEQ ID NO: 193773 - DNA, 75 bp, synthetic construct
  source 1..75: mol_type = other DNA
aacctgaaattgccatcgttgatggtcaggctgttacttcatccctggctgttgccaacttcttctccaagcgtc

SEQ ID NO: 193774 - DNA, 75 bp, synthetic construct
  source 1..75: mol_type = other DNA
tagtagccgtgaagcgttagtagcaggtttgaaagcggcaccgtggctggtgaaacctaacccgccgcgagctgg

SEQ ID NO: 193775 - DNA, 75 bp, synthetic construct
  source 1..75: mol_type = other DNA
cggtcgtgttgtcaccacatctcttgcagttgctaactactttactaaacgacatgagcgagttttagatagaat

SEQ ID NO: 193776 - DNA, 75 bp, synthetic construct
  source 1..75: mol_type = other DNA
aagggcggaatggcggaacatatgtctgtaaggacctggtgtatgcctatgcaatgtggatcagcccgtcattcc

SEQ ID NO: 193777 - DNA, 75 bp, synthetic construct
  source 1..75: mol_type = other DNA
cgcgtgacggacattatgggcgaaattgcttctgcttctgatgagcagagccgtggtatcgatcaggttggctta

SEQ ID NO: 193778 - DNA, 75 bp, synthetic construct
  source 1..75: mol_type = other DNA
aaggttcttctgcaactccgggctataaacgaactctcaagaaaagaatccgctcaggcgctttatacttttatt

SEQ ID NO: 193779 - DNA, 75 bp, synthetic construct
  source 1..75: mol_type = other DNA
gtcacgacgatgtgctgaaaaagatccgcactctggattgttccccagagttttgtgcccgcaattttgcggaga

SEQ ID NO: 193780 - DNA, 75 bp, synthetic construct
  source 1..75: mol_type = other DNA
caggctgaacgtattcgtttggcggataaggctaattttcatattcaccgtctcctgaatatcagcggagggcat

SEQ ID NO: 193781 - DNA, 75 bp, synthetic construct
  source 1..75: mol_type = other DNA
gcaattttgcggagacatcgatttcggtaaatcaaccgaacggtggtacacgcaagctcccttgctatcaaatca

SEQ ID NO: 193782 - DNA, 75 bp, synthetic construct
  source 1..75: mol_type = other DNA
cagctttatcccatgctggaaaaagctgaatcaccgctggctgtaagtctgtatgaccgaattaacgatgcggca

SEQ ID NO: 193783 - DNA, 75 bp, synthetic construct
  source 1..75: mol_type = other DNA
cactgctcaggcaccttataaagcgggtgccgggcgtggaaacccgaaattcaatatagagcacaaccgcgctca

SEQ ID NO: 193784 - DNA, 75 bp, synthetic construct
  source 1..75: mol_type = other DNA
atccacgctgagcgatgccgcacataacgccagcgtgctttactcccacctgtcggtaatccacaaggtctggct

SEQ ID NO: 193785 - DNA, 75 bp, synthetic construct
  source 1..75: mol_type = other DNA
gctatgccattgatgctcctgctgacgcgcctgatggctcaagtcgccccacgctgtcgctgagtgcactgctga

SEQ ID NO: 193786 - DNA, 75 bp, synthetic construct
  source 1..75: mol_type = other DNA
ccccggacaaggtttataagaacggtgcgcacaccgtgaaagtggagatcctgtccaaccagatcaccgatggaa

SEQ ID NO: 193787 - DNA, 75 bp, synthetic construct
  source 1..75: mol_type = other DNA
ctggactttatgcgccgggagttaaacctgtctaactcatctgtgcttggggcctgtcagaaactccaggaggct

SEQ ID NO: 193788 - DNA, 75 bp, synthetic construct
  source 1..75: mol_type = other DNA
aaagtttctttccagccaacaaactgttgaacttgttcatgaattgaccaacacccagaatttgggtgttgaccc

SEQ ID NO: 193789 - DNA, 75 bp, synthetic construct
  source 1..75: mol_type = other DNA
tttattctgcgtgcattgggtgagctggtgctacaccgcccttccagtggcagttttgtctcttatgcccgtgag

SEQ ID NO: 193790 - DNA, 75 bp, synthetic construct
  source 1..75: mol_type = other DNA
acgctgtcactgagtgcactgctgaagcagtatggtatccgcctgacagctaatcaggcatatcaccagatggcg

SEQ ID NO: 193791 - DNA, 75 bp, synthetic construct
  source 1..75: mol_type = other DNA
atggtattgaagttcgtcgtgatgcttatgggcgttacagcctgaacgatctgcacagggctgccggttctctgg

SEQ ID NO: 193792 - DNA, 75 bp, synthetic construct
  source 1..75: mol_type = other DNA
gtgcactgctgaaacagtatggtatccgccttacggctaatcaggcatatcaccagatggcgaagctggggatcg

SEQ ID NO: 193793 - DNA, 75 bp, synthetic construct
  source 1..75: mol_type = other DNA
attatccggacaggctgctgacaagatgcaggctggcgtgatcctgctggactttatgcgccgggagttaaacct

SEQ ID NO: 193794 - DNA, 75 bp, synthetic construct
  source 1..75: mol_type = other DNA
tcagcaacagcagcgtgaaacatcggctgtagtaaaaaccgtgacgccagctacgccgcgtaaaatggccgtggc

SEQ ID NO: 193795 - DNA, 75 bp, synthetic construct
  source 1..75: mol_type = other DNA
attcaatgaaactacccaaaatttgggtagtaaaccagtcagtaaaatagaagggcggaatggaggaacatatgt

SEQ ID NO: 193796 - DNA, 75 bp, synthetic construct
  source 1..75: mol_type = other DNA
cgcctgacggctaatcaggcatatcaccagatggtgaaactggggatcgtcgagcagcgcgaacgatacagccgt

SEQ ID NO: 193797 - DNA, 75 bp, synthetic construct
  source 1..75: mol_type = other DNA
actgagctggttcaggaattgatcgatacccaaaatttgggtgtcggttcattcaatgaaactacccaaaatttg

SEQ ID NO: 193798 - DNA, 75 bp, synthetic construct
  source 1..75: mol_type = other DNA
gctctttgactgacaccgtcactcatgtccgcgaaggttcagatgccatctatgccggtacccgtgaaattgcgg

SEQ ID NO: 193799 - DNA, 75 bp, synthetic construct
  source 1..75: mol_type = other DNA
tgcagaaacgccgggagcggggaaaacttgctttttcccgtttccggggttggacaactgagcaacgcgaaggcg

SEQ ID NO: 193800 - DNA, 75 bp, synthetic construct
  source 1..75: mol_type = other DNA
acaaaaacgccgggagcgggggaaaacttactttttcccgtttccgggggtggacaactgagcattgcgaacgcg

SEQ ID NO: 193801 - DNA, 75 bp, synthetic construct
  source 1..75: mol_type = other DNA
accggacgcaaagccgctgggggcgttttcgtccgtggcagctatggattgccgtccctattggcattatcggca

SEQ ID NO: 193802 - DNA, 75 bp, synthetic construct
  source 1..75: mol_type = other DNA
cggtgatgggcgcgttcgccgagttcgagcgcgccctgatccgcgagcgtcagggcactgttgcaaagttagcga

SEQ ID NO: 193803 - DNA, 75 bp, synthetic construct
  source 1..75: mol_type = other DNA
atcaccaccgactatttgcaacagtgcctcaaggaacacctcagttttactggcgaagactctccgatggcgaac

SEQ ID NO: 193804 - DNA, 75 bp, synthetic construct
  source 1..75: mol_type = other DNA
cgtcaacaagtgccgggcaggcctcagccagtgccaccgctgccggaaaatcggcagaaagcgccgcatcatccg

SEQ ID NO: 193805 - DNA, 75 bp, synthetic construct
  source 1..75: mol_type = other DNA
ttatggatttatcgcttggcgtgactggtcgcaatcgcgttattactgacgtggcgattaaaaaaacggcctccg

SEQ ID NO: 193806 - DNA, 75 bp, synthetic construct
  source 1..75: mol_type = other DNA
gtccatgatgtgatgggatttagtgccttctgggcggggctggttatcagcctgcaatatttcgccaccttgctg

SEQ ID NO: 193807 - DNA, 75 bp, synthetic construct
  source 1..75: mol_type = other DNA
gttgaacgagttagcggcggcgctgggaaacgacccgaattttgcgaccaccatgactaaagcgcttgcgggtaa

SEQ ID NO: 193808 - DNA, 75 bp, synthetic construct
  source 1..75: mol_type = other DNA
ccggaacgccaacaacaccaactgcgcgacagggaacgaataatacccaaatcgcaagcacggcttatgttatgg

SEQ ID NO: 193809 - DNA, 75 bp, synthetic construct
  source 1..75: mol_type = other DNA
aaaaaccagcagcctgcatttgctttagggcaaacaggacgcagggtcgcaaatgataaagctgttggctggaac

SEQ ID NO: 193810 - DNA, 75 bp, synthetic construct
  source 1..75: mol_type = other DNA
tggatctcttcggtcagggtaatgccgcgcgcggctatcaactgggcgtcggcgtactgtgcgccaccgccgtgg

SEQ ID NO: 193811 - DNA, 75 bp, synthetic construct
  source 1..75: mol_type = other DNA
atttttgtcgatcagcaacacatcggtggctataccgattttgctgcctgggtgaaagagaatcttgacgcctga

SEQ ID NO: 193812 - DNA, 75 bp, synthetic construct
  source 1..75: mol_type = other DNA
cggcaggcgaccagaaaaccttggtggcccgtgacttcggcatcagccgcgaaaccttgtaccagtacctgcggg

SEQ ID NO: 193813 - DNA, 75 bp, synthetic construct
  source 1..75: mol_type = other DNA
ctgtcaggacaccggcgaaatcatgttttttgttaaggtcggttcccgtttcccactgcttggcgagctgcaaag

SEQ ID NO: 193814 - DNA, 75 bp, synthetic construct
  source 1..75: mol_type = other DNA
cgccattatgggcgcgctgtggcctctgctggtaatgaccgggatgcaccgcgtctttacgccaaccatcattca

SEQ ID NO: 193815 - DNA, 75 bp, synthetic construct
  source 1..75: mol_type = other DNA
tccggcgtgctcggtgtggtacgtagtgacaaccagtgtcaggtgattatcggtaatacggtttcgcaggccttt

SEQ ID NO: 193816 - DNA, 75 bp, synthetic construct
  source 1..75: mol_type = other DNA
cggcgttgataacatctcggcagtcacgcactgtatgacgcgtttgcgctttgttatcaaagatgaccagcttat

SEQ ID NO: 193817 - DNA, 75 bp, synthetic construct
  source 1..75: mol_type = other DNA
catcgtcgcggcacactgctggttcatgccgatctcacctttgaaaatctgtctcatacccggagcgcgttatga

SEQ ID NO: 193818 - DNA, 75 bp, synthetic construct
  source 1..75: mol_type = other DNA
ggcatcgccacctcggtggaaaccgccgccgtactctcgcgtaaagccattttgcgcccgattggcagccgccat

SEQ ID NO: 193819 - DNA, 75 bp, synthetic construct
  source 1..75: mol_type = other DNA
ggctgctgggcgcatcgtcgcggcacgctgctggttcatgccgatctcacctttgaaaatctgtctcacacccgg

SEQ ID NO: 193820 - DNA, 75 bp, synthetic construct
  source 1..75: mol_type = other DNA
gccgctcgaaagtgttaatgccatcggaaggctacgaaggggttgtgaaattcgtctttgaaaatatttctactc

SEQ ID NO: 193821 - DNA, 75 bp, synthetic construct
  source 1..75: mol_type = other DNA
aggcagtgaataagttgacggagattgtcgctaactttaccgccatgatttctacccgaatgcctgatgacgtgg

SEQ ID NO: 193822 - DNA, 75 bp, synthetic construct
  source 1..75: mol_type = other DNA
gaagaggcaaccgtcaaagcgccactgcgtcacaatgcggtagaaatttttgacgaagtgaacaccggcaaaaat

SEQ ID NO: 193823 - DNA, 75 bp, synthetic construct
  source 1..75: mol_type = other DNA
gggattcgcgtcaatggtattgcgccaggctggatcgatacaccaatgttgcgtaaggccattgaaggtgatgac

SEQ ID NO: 193824 - DNA, 75 bp, synthetic construct
  source 1..75: mol_type = other DNA
atgaatgctttttctttacataacaaaacagcgctgattacaggggcggccagtggactggggctggcaatggcg

SEQ ID NO: 193825 - DNA, 75 bp, synthetic construct
  source 1..75: mol_type = other DNA
gtttatctggcatcagatgcggcagcgtttgtcagtggccaggtgctggtggttgatggcggcgcattgattggc

SEQ ID NO: 193826 - DNA, 75 bp, synthetic construct
  source 1..75: mol_type = other DNA
atggcattgaatgaagcgcatctggtacagacgaaactgattgaaggcgatgcgggcgaaggtaagatgaaagtg

SEQ ID NO: 193827 - DNA, 75 bp, synthetic construct
  source 1..75: mol_type = other DNA
caagattatgatggataacatagccagagtcagagcaatgtgttcagagataatgaagatgagtgcattaagtca

SEQ ID NO: 193828 - DNA, 75 bp, synthetic construct
  source 1..75: mol_type = other DNA
actattgaaaagattaagcctgctatggagaaatttgttaatgagcaggttggtgttttttttcatgacgatgat

SEQ ID NO: 193829 - DNA, 75 bp, synthetic construct
  source 1..75: mol_type = other DNA
tcgagagaggaattacttaagagaaattattttccgtcagtaaatcaaaacaaatatctgaatgcgatgtggcgc

SEQ ID NO: 193830 - DNA, 75 bp, synthetic construct
  source 1..75: mol_type = other DNA
atgagaggtcttgcatacaatcccggcattcttccggcagaaatgattagccaacgcgtaaagccaatgccatcg

SEQ ID NO: 193831 - DNA, 75 bp, synthetic construct
  source 1..75: mol_type = other DNA
tcgagagaagaattgcttaagagaaagagtttcggttctgttaatgacaacaaatatctgaatgcgatgtggcgc

SEQ ID NO: 193832 - DNA, 75 bp, synthetic construct
  source 1..75: mol_type = other DNA
aaatgcatgatagtcagcggggcgaaggtcattattgctgacctgaacggcgagctggcgcaagcgaccgccgga

SEQ ID NO: 193833 - DNA, 75 bp, synthetic construct
  source 1..75: mol_type = other DNA
cccgcatcctgtcatgctgatttccggttccgaaaatatcgtgaaagaaagcgaatgcgtttctctcccggggct

SEQ ID NO: 193834 - DNA, 75 bp, synthetic construct
  source 1..75: mol_type = other DNA
aacaagcattagcagagaaaaatgctaaatggcttgcagaacaacaagcaaaacaagccgcatatgaggcacagt

SEQ ID NO: 193835 - DNA, 75 bp, synthetic construct
  source 1..75: mol_type = other DNA
aaagccatgatggatcagtcgcggatggccttgaatgaagcgcatctggtacagacgaaactgattgaaggcgac

SEQ ID NO: 193836 - DNA, 75 bp, synthetic construct
  source 1..75: mol_type = other DNA
cattgtcacttacggggcgatggcgatgggtgcgccgttaggcgtcgtgttttatcactggggcggcttgcaggc

SEQ ID NO: 193837 - DNA, 75 bp, synthetic construct
  source 1..75: mol_type = other DNA
tgggttttagcgccttctgggcggggctggttatcagcctgcaatatttcgccaccttgctgagtcgtcctcatg

SEQ ID NO: 193838 - DNA, 75 bp, synthetic construct
  source 1..75: mol_type = other DNA
gaaaaagtgaactgcttgagcagcgggcagagccagttccttcccgcagtgtgccggatggcgttaatttccttg

SEQ ID NO: 193839 - DNA, 75 bp, synthetic construct
  source 1..75: mol_type = other DNA
tttatcacattgttttatgacgctaaaggctgggacggtgcggcttttgcgctgacgctgtttagctgtgcattt

SEQ ID NO: 193840 - DNA, 75 bp, synthetic construct
  source 1..75: mol_type = other DNA
ccgggcgttacgccgatttgctgggacccaaaaagatagtcgtcttcgggttgtgcggctgctttttgagcgggc

SEQ ID NO: 193841 - DNA, 75 bp, synthetic construct
  source 1..75: mol_type = other DNA
ttgggcaaagttttgccggaacgggatcgaccctgtggggcgttggcgtggttggctcgctgcatatcgggcggg

SEQ ID NO: 193842 - DNA, 75 bp, synthetic construct
  source 1..75: mol_type = other DNA
gggggagtaattcaacacaggaagcgcagttctccgtactcgataccatcaccgccagcgagctaattaacgata

SEQ ID NO: 193843 - DNA, 75 bp, synthetic construct
  source 1..75: mol_type = other DNA
gagcgggcgaaagagaaaattgccgacattgccgaaagtcgcgaactgacggtagcggagcttgaagatcggtta

SEQ ID NO: 193844 - DNA, 75 bp, synthetic construct
  source 1..75: mol_type = other DNA
tggctataatgtatttggattcattatcgccgcttatgtttcatacaataccaacagatggttctatgaaaaaga

SEQ ID NO: 193845 - DNA, 75 bp, synthetic construct
  source 1..75: mol_type = other DNA
ccaggccggacgcattgtcgggctggaacgcagaggctggcaacgtctggaagaaagcggcagcgtttatgcgat

SEQ ID NO: 193846 - DNA, 75 bp, synthetic construct
  source 1..75: mol_type = other DNA
cagcgagaaacgattgaggaaatcgcgcaaggatataatcaacctgatgttttagctgcgctggcaacattgttc

SEQ ID NO: 193847 - DNA, 75 bp, synthetic construct
  source 1..75: mol_type = other DNA
agcttgatcgtaacagttacgcgctgacagaagccgagcgcaatgccagcgaactgacacgctgggcaggcagaa

SEQ ID NO: 193848 - DNA, 75 bp, synthetic construct
  source 1..75: mol_type = other DNA
accctgggtatggatgaactgatagcgaaagcctggcgttttgtccgtgagcgtttccgcagttaccagacagag

SEQ ID NO: 193849 - DNA, 75 bp, synthetic construct
  source 1..75: mol_type = other DNA
aaacaggaattttgtgtcggtgccgtccggacaaaattatccctgaatttcactggatcatggacgtgaaaacta

SEQ ID NO: 193850 - DNA, 75 bp, synthetic construct
  source 1..75: mol_type = other DNA
tattaccgtctccgaagtggaatcgacaagataaccgcgcaggttaactacctgcaggagtacatcaggacgcaa

SEQ ID NO: 193851 - DNA, 75 bp, synthetic construct
  source 1..75: mol_type = other DNA
taatcttgatgtcgcgttactggatattaatgatgttgaggggctggctgattttgtggtggagtggatgcaaaa

SEQ ID NO: 193852 - DNA, 75 bp, synthetic construct
  source 1..75: mol_type = other DNA
ctattaaatgctcttgatatgatggacaaagctgtaaatgcttccatgaatactcttcctgaaaaaataaacagc

SEQ ID NO: 193853 - DNA, 75 bp, synthetic construct
  source 1..75: mol_type = other DNA
aaagttgaggacgggaatatagaatcattacgtgagtctctggataaaatgaacgatataaaacttgaaggtcac

SEQ ID NO: 193854 - DNA, 75 bp, synthetic construct
  source 1..75: mol_type = other DNA
caatattcaaacccatctgttgggttcagaggcggcaagtatcgtgcgttatgcccatgtgccggtttttgtggt

SEQ ID NO: 193855 - DNA, 75 bp, synthetic construct
  source 1..75: mol_type = other DNA
gcattactggatattaatgatgttgaggggctggctgattttgtggtggagtggatgcaaaatcaggacggataa

SEQ ID NO: 193856 - DNA, 75 bp, synthetic construct
  source 1..75: mol_type = other DNA
ggtaacgatcgccgttacaagaaaaaggcgctcggcaaaattgggggtaagcagcatgttttttacgtgatgatg

SEQ ID NO: 193857 - DNA, 75 bp, synthetic construct
  source 1..75: mol_type = other DNA
tggtacggaacggcgttaggtatcgccaacgaggcagaggcacacaacgacgggctgttacccctggatgaaata

SEQ ID NO: 193858 - DNA, 75 bp, synthetic construct
  source 1..75: mol_type = other DNA
taccggaaaaactacgcttttgaaaaagctgatcccggcattatgcgccagagggatccgtccggggctgattaa

SEQ ID NO: 193859 - DNA, 75 bp, synthetic construct
  source 1..75: mol_type = other DNA
tactcgcctttgctgcatggagtggcaccggaaaaacaacgctgctgaaaaaattgatcccggcattatgcgcca

SEQ ID NO: 193860 - DNA, 75 bp, synthetic construct
  source 1..75: mol_type = other DNA
ggacatcgaccggaagagttggtgatagacaggcatgtcattgctgtggccagcgatgtatcgcttaatgttgat

SEQ ID NO: 193861 - DNA, 75 bp, synthetic construct
  source 1..75: mol_type = other DNA
gcagaagaactgggggctgatgttgtcgttatcggttcgcgcaacccatcgatttcgacccatctgttaggttct

SEQ ID NO: 193862 - DNA, 75 bp, synthetic construct
  source 1..75: mol_type = other DNA
tgaaagcaaactgacgctgataggcgtcagtggcggagcgccgcgcagtgtccgtttcaccgggccgtgggcgca

SEQ ID NO: 193863 - DNA, 75 bp, synthetic construct
  source 1..75: mol_type = other DNA
cggcttgatcagaacagcagcgatcccatattcgccacccgccagatggcaaaaacactgcctgctccgctcaac

SEQ ID NO: 193864 - DNA, 75 bp, synthetic construct
  source 1..75: mol_type = other DNA
gctaatgcgttcccgtcgtcgcctgacgatcttctctattacaggcggtgtagcagcactgctgctcattatcgg

SEQ ID NO: 193865 - DNA, 75 bp, synthetic construct
  source 1..75: mol_type = other DNA
accagggacgacgtatcgggccttatgtggtagactggccccctgaatctccagacaaccagtatcacttaaata

SEQ ID NO: 193866 - DNA, 75 bp, synthetic construct
  source 1..75: mol_type = other DNA
tgcaacgcggccagatggatgacatctttacccagtccgccgcccgccagtaccggctgggcaataacccactgg

SEQ ID NO: 193867 - DNA, 75 bp, synthetic construct
  source 1..75: mol_type = other DNA
acaaccaggcgttttttctgaaaaactctctgacaaagagcgggaagaagctctggtagagccggactaccagtt

SEQ ID NO: 193868 - DNA, 75 bp, synthetic construct
  source 1..75: mol_type = other DNA
tgaagcgcctgcaacagcttgaaaaaatgcaaaagcaacagcgcgaggaagccgttgatccgctcagcgtggaac

SEQ ID NO: 193869 - DNA, 75 bp, synthetic construct
  source 1..75: mol_type = other DNA
cgctttgcccgtggtgccagcgaattccatgctagtgaaatagcaaaagcacagatcgatgcttatgtaggtagc

SEQ ID NO: 193870 - DNA, 75 bp, synthetic construct
  source 1..75: mol_type = other DNA
gcgaaagaacttgatgcagatgtagtagtgattggttcgcgtaacccatcaatttcaactcatctgttgggttct

SEQ ID NO: 193871 - DNA, 75 bp, synthetic construct
  source 1..75: mol_type = other DNA
aatacaaaagcaacagcgcgaagaggccgttaatccgctcagtgtggaactgaacgcccagcaacgttaccttga

SEQ ID NO: 193872 - DNA, 75 bp, synthetic construct
  source 1..75: mol_type = other DNA
acgctgtatgaagaacagtggctaaaaccgctggctaaccgctggctggcgacggcgatatggggaattattgct

SEQ ID NO: 193873 - DNA, 75 bp, synthetic construct
  source 1..75: mol_type = other DNA
tggcgcgatggtctacaggatacacgctgacaccgaggacaatccattcagtggcgggcttttcagccagttcag

SEQ ID NO: 193874 - DNA, 75 bp, synthetic construct
  source 1..75: mol_type = other DNA
tatccgatataagtcgttttagtgaaaatgtgaagctgaaagtcctgtataaaacgtccccacttgctggagcta

SEQ ID NO: 193875 - DNA, 75 bp, synthetic construct
  source 1..75: mol_type = other DNA
aatggctggcgaaagtcaggaataagcaaaattatcctgacaggaggctgtgtgatgaaactgtcgatgtggcaa

SEQ ID NO: 193876 - DNA, 75 bp, synthetic construct
  source 1..75: mol_type = other DNA
tccacggattatgtctataaaactgagtctgcaggcaacggtaatagctacgttctgtcaacgaaaatgaaaccg

SEQ ID NO: 193877 - DNA, 75 bp, synthetic construct
  source 1..75: mol_type = other DNA
gtggatttgaccgtgaaggcgaactgatgctggttctgtattgtgacggtacgcctgttatccggatatcgtttt

SEQ ID NO: 193878 - DNA, 75 bp, synthetic construct
  source 1..75: mol_type = other DNA
ccgtccttatctgtacaggagcaatgttgtcgggcagcgtgctcaggctgtcctagagcattaccattttgtccg

SEQ ID NO: 193879 - DNA, 75 bp, synthetic construct
  source 1..75: mol_type = other DNA
gtattcgttttccggtctatctggtcgtcaccaagatggatctgctgccgggctttacggagtatttccacgggc

SEQ ID NO: 193880 - DNA, 75 bp, synthetic construct
  source 1..75: mol_type = other DNA
aaaaagtgctcgacgaaggcacacagaaaaacgaccgaaccggaaccggaacgctttccatttttggtcatcaga

SEQ ID NO: 193881 - DNA, 75 bp, synthetic construct
  source 1..75: mol_type = other DNA
gcggcagagcataaacattcggctcataaagcagaacttacctttgtaagtaatgaggacggtatcatcactgta

SEQ ID NO: 193882 - DNA, 75 bp, synthetic construct
  source 1..75: mol_type = other DNA
ctaaccgccaacagcagcacggtgaatatcagcgaacttagcgcatttaccgagaaaggtattctggaagctaca

SEQ ID NO: 193883 - DNA, 75 bp, synthetic construct
  source 1..75: mol_type = other DNA
tcataatttcccctcaaagggcacaattcctgacagaaggaatttctttgaaaatccccggctttataacgggaa

SEQ ID NO: 193884 - DNA, 75 bp, synthetic construct
  source 1..75: mol_type = other DNA
agagacagtaacactgaagccaacgtccacagattatgtctataaaactgtgtctgcaaacaaagataatggcta

SEQ ID NO: 193885 - DNA, 75 bp, synthetic construct
  source 1..75: mol_type = other DNA
acgctttccatctttggccatcagatgcgttttaacctgcaggatggatttccgctggtgacaaccaaacgttgc

SEQ ID NO: 193886 - DNA, 75 bp, synthetic construct
  source 1..75: mol_type = other DNA
actggcgaaaggcgttgctacgtagagatttgtgtcacacacccctgctctcaagacaagatcgaagccggtatc

SEQ ID NO: 193887 - DNA, 75 bp, synthetic construct
  source 1..75: mol_type = other DNA
cggaggcgtttttaaatgcctatgggctgagtagattcgcgccgctgggttatgacccgcgcgatttacccatcc

SEQ ID NO: 193888 - DNA, 75 bp, synthetic construct
  source 1..75: mol_type = other DNA
caggttcaccgtgtaggggcgaggttcgccattctggaggccgctttactgctgggtggcgtggttactggctgg

SEQ ID NO: 193889 - DNA, 75 bp, synthetic construct
  source 1..75: mol_type = other DNA
aaacgggctggaagtcgctacggctgcgtttaacgactcgatgtaccagattcaaggggaagccgttaaaccacg

SEQ ID NO: 193890 - DNA, 75 bp, synthetic construct
  source 1..75: mol_type = other DNA
ggagagcaacaacttgtcgaactggacaacctgcaaatcgtaccggacggacgctatcgcgtgcgtctctatcag

SEQ ID NO: 193891 - DNA, 75 bp, synthetic construct
  source 1..75: mol_type = other DNA
tgcggtggcgggggtaaaggaggcacgttgctacagcggctttgttgaccagcagccggaggactggacaccgcg

SEQ ID NO: 193892 - DNA, 75 bp, synthetic construct
  source 1..75: mol_type = other DNA
tgctaaacagtttgcccgtgtgcttgccggagctggggtgctgaaaccgccagccagcggaagggggtatcagcg

SEQ ID NO: 193893 - DNA, 75 bp, synthetic construct
  source 1..75: mol_type = other DNA
tgtgatttattagttgtttttgaagataatgtgattttattttcagataaggatattaactttaacgaagagatt

SEQ ID NO: 193894 - DNA, 75 bp, synthetic construct
  source 1..75: mol_type = other DNA
agcatacttatgctgatttgctggcacagtatgaaaagaaacgcattacaggctctctggcttatactcctcctg

SEQ ID NO: 193895 - DNA, 75 bp, synthetic construct
  source 1..75: mol_type = other DNA
ttgcctgaattcacttgtgaattatatttcaggcaatctggacgaagcagagcatatttatgctgatttactggc

SEQ ID NO: 193896 - DNA, 75 bp, synthetic construct
  source 1..75: mol_type = other DNA
caaaagggctgaccgggtttaattacccgctaatgccagatggttcgttattgctggagctggtggatgaatccg

SEQ ID NO: 193897 - DNA, 75 bp, synthetic construct
  source 1..75: mol_type = other DNA
gacgacaacgggcgaggtagctttatctgcaatcagtgcggcgcgggcgatgggctggatttaatcaaacgggtt

SEQ ID NO: 193898 - DNA, 75 bp, synthetic construct
  source 1..75: mol_type = other DNA
gggaatttctctttccggcggcgatccgctgcatccgcaaaacgtgccggacattttaaaactggtgcaacgcat

SEQ ID NO: 193899 - DNA, 75 bp, synthetic construct
  source 1..75: mol_type = other DNA
ctccgcctgactgatgcaattaaggcagttttctctatcacgaaaaaacatcagccctatgaatttaagaatttc

SEQ ID NO: 193900 - DNA, 75 bp, synthetic construct
  source 1..75: mol_type = other DNA
catgccaatggcaataatgaaacaggcgagacagcaaatcccttaattaaggtgaacggtcatcgtgaaatcaca

SEQ ID NO: 193901 - DNA, 75 bp, synthetic construct
  source 1..75: mol_type = other DNA
gtgttgagcagaaactggagaaggggattggtttcgcccgctttgccaaatcactggccgcggctaaaggtgtcc

SEQ ID NO: 193902 - DNA, 75 bp, synthetic construct
  source 1..75: mol_type = other DNA
cgcaggaaaaagagcgtccggctggaagtcagagcctgtttcgcgggttgatgctgattgagattttgagcaact

SEQ ID NO: 193903 - DNA, 75 bp, synthetic construct
  source 1..75: mol_type = other DNA
actcggcgtctcctgtattgctgttccggtgtttgatattcatgggcgggtgccgtacgccgtgtcgatttcgct

SEQ ID NO: 193904 - DNA, 75 bp, synthetic construct
  source 1..75: mol_type = other DNA
gcgacaggaacgacttaaagatcgcctgcaccgtgaaattattgagcgtgattatcacctcagcgccgcaatgta

SEQ ID NO: 193905 - DNA, 75 bp, synthetic construct
  source 1..75: mol_type = other DNA
gaaaacctttaatgaagaaaatcagaatgaatatcaggaaaaaggtctggaggaaatggaaggtgctgaacatcc

SEQ ID NO: 193906 - DNA, 75 bp, synthetic construct
  source 1..75: mol_type = other DNA
ccagggccagtaatgcaacaggaagtggaaaaggtttgcaccacatgcagtcagaacggtggcggccattgccct

SEQ ID NO: 193907 - DNA, 75 bp, synthetic construct
  source 1..75: mol_type = other DNA
gggctggattattcccgcgccattgtggtggcttccgtgaaagaagcaccaatcggcattgaggccatcccggca

SEQ ID NO: 193908 - DNA, 75 bp, synthetic construct
  source 1..75: mol_type = other DNA
acccgcgattctgtgaaccagaaccagcccgaatcggaacaaaacgaccagaaagcggaacaaaacagccaaaat

SEQ ID NO: 193909 - DNA, 75 bp, synthetic construct
  source 1..75: mol_type = other DNA
tatttatctggcggatgacggcggtgtggcagtggatatgtcccgtgaagcgtcactggaaatgcagtctgagcc

SEQ ID NO: 193910 - DNA, 75 bp, synthetic construct
  source 1..75: mol_type = other DNA
agtgacgattttgaatcgacctgtgccactctggactacctgatcgttaagtcaggtaaaaaactgagcagctat

SEQ ID NO: 193911 - DNA, 75 bp, synthetic construct
  source 1..75: mol_type = other DNA
aatgagatccagccgctaactcgcaatacaattactggtctgcctgcgatgtacgatgaactggcgcaaattcgt

SEQ ID NO: 193912 - DNA, 75 bp, synthetic construct
  source 1..75: mol_type = other DNA
tggccatacgcagcatggcagaaccgacaactctggataatgccgccctgctccgcctgactgatgcaattaagg

SEQ ID NO: 193913 - DNA, 75 bp, synthetic construct
  source 1..75: mol_type = other DNA
gaatgatccaaaatgggtgaaggggattgaaacccgcgattcggtgaaccataaccagcaagaaacggaacagaa

SEQ ID NO: 193914 - DNA, 75 bp, synthetic construct
  source 1..75: mol_type = other DNA
atctggaaaccgcgggcggagtcatcgatcgggacaccattaagtggtggctgaaacagtcacgggaagcacaat

SEQ ID NO: 193915 - DNA, 75 bp, synthetic construct
  source 1..75: mol_type = other DNA
ttcgatgacaacatcaacggtgaagatgccacaactgctggcgatgacaacgataacctggacggaactattccg

SEQ ID NO: 193916 - DNA, 75 bp, synthetic construct
  source 1..75: mol_type = other DNA
cgtcgtgaatgaccttccaccggaaggcgtgtttgatactgaattctgcaaccgctatgaaaaaggcggggaaga

SEQ ID NO: 193917 - DNA, 75 bp, synthetic construct
  source 1..75: mol_type = other DNA
ggtaaattctgttgatgcgaaatatcagaaactgcgggcagaactccatgaagcccggaaaaacattccgcccaa

SEQ ID NO: 193918 - DNA, 75 bp, synthetic construct
  source 1..75: mol_type = other DNA
atggggccagtgttcaacaaaacaattgatatgaaaacaggtggcggcactgtcaacataagcaccatcgaatgg

SEQ ID NO: 193919 - DNA, 75 bp, synthetic construct
  source 1..75: mol_type = other DNA
atcgtaaaaatcccatcatgcgggcatggcatcacctgatgatcgaccttgaaacgatgggaactggtcccgatg

SEQ ID NO: 193920 - DNA, 75 bp, synthetic construct
  source 1..75: mol_type = other DNA
tgttgttgatgacctcccgccagaaggcgtgtttgatacggaattctgtaaccgatatgaaaaaggcggggaaga

SEQ ID NO: 193921 - DNA, 75 bp, synthetic construct
  source 1..75: mol_type = other DNA
cgcaatctgaggaccctggctgactgcctgaataccgatgaatggccagctattaaaacgttatcactgccccgc

SEQ ID NO: 193922 - DNA, 75 bp, synthetic construct
  source 1..75: mol_type = other DNA
ctccatgaagcccggaaaaacattccatcaaaaaatcctgtcgatgccgataaattgcttgctgcatcacgtgat

SEQ ID NO: 193923 - DNA, 75 bp, synthetic construct
  source 1..75: mol_type = other DNA
atttcagcctggctggataccgaacacattgatcgcggtcttctgacaaaagaatggcgaaaaggaaatcgtgtt

SEQ ID NO: 193924 - DNA, 75 bp, synthetic construct
  source 1..75: mol_type = other DNA
aaaaacatggtgatgaaagagggatgttagtagccctagagcaagccaaaaacattccatttgaaattaaacgtg

SEQ ID NO: 193925 - DNA, 75 bp, synthetic construct
  source 1..75: mol_type = other DNA
gcgcacaaggttactcgtcagttagctattgtagtcaagggagcttgtaaatttcatctggataatggtaaagaa

SEQ ID NO: 193926 - DNA, 75 bp, synthetic construct
  source 1..75: mol_type = other DNA
ggaggttgcactattgcctgcaaaatatgatgattttttaatcagtgattatgtgtcatctcgtaaggacaatca

SEQ ID NO: 193927 - DNA, 75 bp, synthetic construct
  source 1..75: mol_type = other DNA
acagaatgctaattccaggatttgtatctgaagttgcttttgatttattaattgaactctcttctgtgcacagta

SEQ ID NO: 193928 - DNA, 75 bp, synthetic construct
  source 1..75: mol_type = other DNA
tagcagatgcagattatgatgaacttgactatattagagaatatgaaacatttaaaaagattgttagggggataa

SEQ ID NO: 193929 - DNA, 75 bp, synthetic construct
  source 1..75: mol_type = other DNA
gcgggaacggcaggtaaaccgatgctcgcccagctaatgggcagcggcgtcggggaaattaccgctgtggtggtg

SEQ ID NO: 193930 - DNA, 75 bp, synthetic construct
  source 1..75: mol_type = other DNA
attgaacaggctggatccctgcgtggtctgtcgctgtctgatgtgctgaatctgaaagcggataccatgtttaag

SEQ ID NO: 193931 - DNA, 75 bp, synthetic construct
  source 1..75: mol_type = other DNA
ggttcactgcgcgggctgtcactgcttgacgtgctgaacatgaaaacggacgcgatgtttgagttactcccgcgc

SEQ ID NO: 193932 - DNA, 75 bp, synthetic construct
  source 1..75: mol_type = other DNA
gagttacaccgctacctgctggcgatccagaacgcgcctgtacctgggaaatcggcactgaaagccgtgcagtta

SEQ ID NO: 193933 - DNA, 75 bp, synthetic construct
  source 1..75: mol_type = other DNA
tttggtatatccggcattctcctgcagggtcttattattcatctgctgcaggctcctgctccgaacattctcctt

SEQ ID NO: 193934 - DNA, 75 bp, synthetic construct
  source 1..75: mol_type = other DNA
attgaccaggctggatccctgcgtggtctgtcgctgtctgatgtgctgaatctgaaagcggataccatgttaatg

SEQ ID NO: 193935 - DNA, 75 bp, synthetic construct
  source 1..75: mol_type = other DNA
attgatcaggctggatccctgcgtggtctgtcgctgtctgatgtgctgaatctgaaagcggataccatgttaacg

SEQ ID NO: 193936 - DNA, 75 bp, synthetic construct
  source 1..75: mol_type = other DNA
tatttatctggcggatgacggcggcgtggcagtggatatgtcccgcgaggcatcactggaaatgcagtctgagcc

SEQ ID NO: 193937 - DNA, 75 bp, synthetic construct
  source 1..75: mol_type = other DNA
aactcgctgttttgttcagtcgcttacagtgtgctggaacagcctgatgaagatgaaggacgggacgagtattaa

SEQ ID NO: 193938 - DNA, 75 bp, synthetic construct
  source 1..75: mol_type = other DNA
gtgcaggccgtaacgccgatcacccaggcaaacggcgttcaggtgatctttgcctcgctgaccggcgatattctg

SEQ ID NO: 193939 - DNA, 75 bp, synthetic construct
  source 1..75: mol_type = other DNA
cagagtattgaaaccagttcgctacatttaggcttactgggagatatgcagcgtctgaactcgctgttttgttcg

SEQ ID NO: 193940 - DNA, 75 bp, synthetic construct
  source 1..75: mol_type = other DNA
aggcaacggctgaaacagtggaaccggatgcaactgaacatcatcaggacacgcagccgctggatgctcagtcac

SEQ ID NO: 193941 - DNA, 75 bp, synthetic construct
  source 1..75: mol_type = other DNA
ggaataggcgttaccgcactggtacagagcagtaatgctaccaccatgctggtgacctcgtttgtcgctcaggat

SEQ ID NO: 193942 - DNA, 75 bp, synthetic construct
  source 1..75: mol_type = other DNA
gggatcggcgttaccgcactggtgcagagcagtaatgccaccaccatgctggtgacctcgttcgtcgctcaggat

SEQ ID NO: 193943 - DNA, 75 bp, synthetic construct
  source 1..75: mol_type = other DNA
tggtatcacaatgatatttatagcgccctccccctcagttcaggacaaaccagccagcactgacaataccaacgt

SEQ ID NO: 193944 - DNA, 75 bp, synthetic construct
  source 1..75: mol_type = other DNA
ggccgtctttttcggacgaaccagatagtatcacagctcgcttcatattatggggagcaggaaaggtttttctaa

SEQ ID NO: 193945 - DNA, 75 bp, synthetic construct
  source 1..75: mol_type = other DNA
aacttcgcccgtaatcaacacgctacggtgctgattcgtggcctgcgtgcggtggcggattttgaatatgaaatg

SEQ ID NO: 193946 - DNA, 75 bp, synthetic construct
  source 1..75: mol_type = other DNA
caccagcgcccgtcgtttacgccgcagcaagcatcgttttcgcattcttaatcgccgttattcccacgctcacgt

SEQ ID NO: 193947 - DNA, 75 bp, synthetic construct
  source 1..75: mol_type = other DNA
atttgttgacccgatggcacggttttgcaaaacgattattcgcgatgaaccggaactggatacccagctacggcc

SEQ ID NO: 193948 - DNA, 75 bp, synthetic construct
  source 1..75: mol_type = other DNA
cgcgccgggcaactgggccgcgtcggtattggtcttgggctgattttgctggcgctggagttgattgtgcaggcc

SEQ ID NO: 193949 - DNA, 75 bp, synthetic construct
  source 1..75: mol_type = other DNA
tggagtggctcggcaaatctgaatgccgccgctgcgacgttcaatcgcgttgacgtgcgtcgtccgtctctggcg

SEQ ID NO: 193950 - DNA, 75 bp, synthetic construct
  source 1..75: mol_type = other DNA
aaagaccatattgtcatcacgcctctgttcgggttgacgaaaaagagcgtcaggtccgctgtaaaatctgcggtg

SEQ ID NO: 193951 - DNA, 75 bp, synthetic construct
  source 1..75: mol_type = other DNA
catcaacaggtcagggaagatatcgacgctgaacagtctgttaccgaaagcttgtcggaacgactgcaggacttg

SEQ ID NO: 193952 - DNA, 75 bp, synthetic construct
  source 1..75: mol_type = other DNA
aaagaccatattgccatcacgcctctgtccgggttgacgaaaaagagcgtcaggtccgctgtaaaatctgcggtg

SEQ ID NO: 193953 - DNA, 75 bp, synthetic construct
  source 1..75: mol_type = other DNA
gaaataaaaccagaggatgagttaagcaatatcgttttatttccggtaaaagaggatgaccctcgtaatcaggtt

SEQ ID NO: 193954 - DNA, 75 bp, synthetic construct
  source 1..75: mol_type = other DNA
aaagaccatattgccatcacgcctctgtccgggttgagaaaaagagcgtcaggtccgctgtaaaatctgcggtgc

SEQ ID NO: 193955 - DNA, 75 bp, synthetic construct
  source 1..75: mol_type = other DNA
caggtccgctgtaaaaactgcggtgcagttgtggagccgtttgactggatgctctcagtggcgaaaagagaaacc

SEQ ID NO: 193956 - DNA, 75 bp, synthetic construct
  source 1..75: mol_type = other DNA
caaactgtcgatgaacgccagcgagtttatttatggctcgctgcatttatttgatccgattataaacgcagaatt

SEQ ID NO: 193957 - DNA, 75 bp, synthetic construct
  source 1..75: mol_type = other DNA
caacaatatcgcttgatgatttcccgcgtggtttaagcgaaagagaagcaatgctgaaattagcagaatggctac

SEQ ID NO: 193958 - DNA, 75 bp, synthetic construct
  source 1..75: mol_type = other DNA
gggttctatcgggaatgtataatacgctttcaaatacgtatgcttcccccgactcaacctactattataaaggaa

SEQ ID NO: 193959 - DNA, 75 bp, synthetic construct
  source 1..75: mol_type = other DNA
ccatcggaaagaccatattgccatcacgcttctgtccgggttgatgaaaaagagcgtcaggtccgatgcaaaatc

SEQ ID NO: 193960 - DNA, 75 bp, synthetic construct
  source 1..75: mol_type = other DNA
accagactggcagatgatgtaaggatcttgcgccaggaggaacgggaaaggcggagaaatatagaaaagctaatt

SEQ ID NO: 193961 - DNA, 75 bp, synthetic construct
  source 1..75: mol_type = other DNA
atgaaatttattgggaagctgcttctctacattttcatcgctctgttagtggtgatcgctagcctctattttctt

SEQ ID NO: 193962 - DNA, 75 bp, synthetic construct
  source 1..75: mol_type = other DNA
aaagaccatattgccatcacgcttctgtccgggttgacgaaaaagagcgtcaggtccgctgtaaaatttgcggtg

SEQ ID NO: 193963 - DNA, 75 bp, synthetic construct
  source 1..75: mol_type = other DNA
tccataatctgacgcccgggtgggtatcattcaatggtgaaaaaccggagattgccatcgtaccccagagtctgc

SEQ ID NO: 193964 - DNA, 75 bp, synthetic construct
  source 1..75: mol_type = other DNA
cagtccttcctgcaacaacactgtatactgacaattcaggacatcctcaatatgatattgttaatacgcttaaaa

SEQ ID NO: 193965 - DNA, 75 bp, synthetic construct
  source 1..75: mol_type = other DNA
gatcaacttgataatgcggtgcattgggggaataaaatagcatgcctttcaaaagatgaattatttttctatatt

SEQ ID NO: 193966 - DNA, 75 bp, synthetic construct
  source 1..75: mol_type = other DNA
aagttctgaaagctcagttcgaagaagagcgtgttgcactggttgcgaaaatcggtgaaaacatcaacattcgtc

SEQ ID NO: 193967 - DNA, 75 bp, synthetic construct
  source 1..75: mol_type = other DNA
actggcaggctgttctgcatattgccgtcttcatccgggcacaggtaccggattcagagctggatatgtggatgg

SEQ ID NO: 193968 - DNA, 75 bp, synthetic construct
  source 1..75: mol_type = other DNA
acgatggttacgcagggctatgagtatcgtcgtgatgacgatatggcattgtggagttctgctgatctgacttat

SEQ ID NO: 193969 - DNA, 75 bp, synthetic construct
  source 1..75: mol_type = other DNA
aagaaatccgctttcagtgcctggaaggccagattgcgcgagggggtgccaccagagaccatgctggatggtgtg

SEQ ID NO: 193970 - DNA, 75 bp, synthetic construct
  source 1..75: mol_type = other DNA
gctgaaagccgggatcatcgcggagattggctccagcgaagggaagattacgccgctggaagagaaggtgtttat

SEQ ID NO: 193971 - DNA, 75 bp, synthetic construct
  source 1..75: mol_type = other DNA
taaaaatatagaaaagctaatccagattgagcgtaatgcgaaagcgcggatacgcagggcgacaaaaaccaggcc

SEQ ID NO: 193972 - DNA, 75 bp, synthetic construct
  source 1..75: mol_type = other DNA
ggcgcgggtcactgggtccatgctgaaaaaccggatgcggtattacgcgctatccgtcgctatctcaatgattaa

SEQ ID NO: 193973 - DNA, 75 bp, synthetic construct
  source 1..75: mol_type = other DNA
cgctggagacattgctcgacagcatgaatgcccctgtcgcctttactggcttcctggtggctctgttgattctgt

SEQ ID NO: 193974 - DNA, 75 bp, synthetic construct
  source 1..75: mol_type = other DNA
tattttcccggccctggcgctggtggtgctgttcctgtggggaagcagtcagtcactaccagtggtcattggcat

SEQ ID NO: 193975 - DNA, 75 bp, synthetic construct
  source 1..75: mol_type = other DNA
gatgtctacagtaaatatggctggaatcaggaaaatacaggtgattatgggtattattatttcctcaacggatat

SEQ ID NO: 193976 - DNA, 75 bp, synthetic construct
  source 1..75: mol_type = other DNA
catccgcaatctatagctcatgtcagactccagaattcgtgagcggtgtttactttcaggaatatatagcatggg

SEQ ID NO: 193977 - DNA, 75 bp, synthetic construct
  source 1..75: mol_type = other DNA
catcggtaaggttaaacaaaatgaaaataacacaaccttatacgttgcgggaattctcgatgacaaagatccgga

SEQ ID NO: 193978 - DNA, 75 bp, synthetic construct
  source 1..75: mol_type = other DNA
ccagtggcgttatgaaaccgtgaccgcagaagagttgttgtcgccgatggcggataaatcccgttataccggaca

SEQ ID NO: 193979 - DNA, 75 bp, synthetic construct
  source 1..75: mol_type = other DNA
ctttactgaagtgcgttacaaaggcaccaaaactgttgccgtcacgccggactacgctgaaatcgccaaactgtg

SEQ ID NO: 193980 - DNA, 75 bp, synthetic construct
  source 1..75: mol_type = other DNA
cctgcgtctccgcaaacctggggcgagcaaactgacgtaccggaatctgctgactggtacaactccagctacatc

SEQ ID NO: 193981 - DNA, 75 bp, synthetic construct
  source 1..75: mol_type = other DNA
aaccggtcaggcgttactggtagcattaatttctgcggcaatgtatggcgtatttttgctgatccagaccaaaac

SEQ ID NO: 193982 - DNA, 75 bp, synthetic construct
  source 1..75: mol_type = other DNA
cttaccgtacctgtcgtcacgctaattgcctttatgacgggtaacgaattgcagtttgcacttggtgcgccagaa

SEQ ID NO: 193983 - DNA, 75 bp, synthetic construct
  source 1..75: mol_type = other DNA
tcgtaagtttgccacccaatatatgaatctgtttggtatcaagcagtatttaattgcgctgttccccctggcgat

SEQ ID NO: 193984 - DNA, 75 bp, synthetic construct
  source 1..75: mol_type = other DNA
gccatcaaaaataacctggaaaaaaaaggtataaaatgttgggatattgagcttaacagattttctaaaaatgtg

SEQ ID NO: 193985 - DNA, 75 bp, synthetic construct
  source 1..75: mol_type = other DNA
caaccggcgacgccgcgccaacgctaatgcgtgatacgctctattcaatcattatgattgttaccggtgggctgg

SEQ ID NO: 193986 - DNA, 75 bp, synthetic construct
  source 1..75: mol_type = other DNA
tgccatatctccttctccaccggacgtactaacgtgctcaatggcgcagcgcatctggcactgtttgccgcctat

SEQ ID NO: 193987 - DNA, 75 bp, synthetic construct
  source 1..75: mol_type = other DNA
ctttactgaagtgcgttacaaaggcaccaaaactgttgccgtcacaccagactacgctgaaatcgccaaactgtg

SEQ ID NO: 193988 - DNA, 75 bp, synthetic construct
  source 1..75: mol_type = other DNA
gcgactgagccggtagtgaaagcggaagccagtaaagtaaccgtggctgttgcaaccgttgttatcttcgggacc

SEQ ID NO: 193989 - DNA, 75 bp, synthetic construct
  source 1..75: mol_type = other DNA
agccggggcgaaacctctgctgatggcactggtactgtttgcctggctgattgttggtggtggtgcgattaacta

SEQ ID NO: 193990 - DNA, 75 bp, synthetic construct
  source 1..75: mol_type = other DNA
ttgtaaaattagacgttgaaaatttttttgacatgacctctgaacggagtgtatatgaacaatttatattaatag

SEQ ID NO: 193991 - DNA, 75 bp, synthetic construct
  source 1..75: mol_type = other DNA
ggtaactgaggccgatccgcagtgggatgtgtcggtggccgatgaagaaaccgccgatattgtcctgacggttcc

SEQ ID NO: 193992 - DNA, 75 bp, synthetic construct
  source 1..75: mol_type = other DNA
ctggccgcgtggctggatgaggctgacagggaattactggatgaagtcggcctgactgaagctgaaccggactgg

SEQ ID NO: 193993 - DNA, 75 bp, synthetic construct
  source 1..75: mol_type = other DNA
agtcaaatacctaaaaatgttcgtgagggagatgaacaattacattacgcagttgtcagtcgcctcgaaatcgaa

SEQ ID NO: 193994 - DNA, 75 bp, synthetic construct
  source 1..75: mol_type = other DNA
gctggaaaatctacgttaaaaacggtctggtgacctgggaaaaccagcagactgactacccgcgcactcgcccgg

SEQ ID NO: 193995 - DNA, 75 bp, synthetic construct
  source 1..75: mol_type = other DNA
gctggaaaatctacgttaaaaacggtctggtgacctgggaaaaccaccagactgactagccgcgcactcgcccgg

SEQ ID NO: 193996 - DNA, 75 bp, synthetic construct
  source 1..75: mol_type = other DNA
aaagcctacaccccggcgtgggctgagcagatcaccggtgtttctcgtagccagattatccgcattgcccgtgaa

SEQ ID NO: 193997 - DNA, 75 bp, synthetic construct
  source 1..75: mol_type = other DNA
agcagatcaccggtgtttctcgtagccagattatccgcattgcccgtgaatttgccgacaacgctgataagacgc

SEQ ID NO: 193998 - DNA, 75 bp, synthetic construct
  source 1..75: mol_type = other DNA
tgcctggaacacccagagcgagatggctctgctgcgtaagctcaactacaccaaagcggaaggtccggcgaaagg

SEQ ID NO: 193999 - DNA, 75 bp, synthetic construct
  source 1..75: mol_type = other DNA
gctggaaaatctacgttaaaaagggtctggtgacctgggaaaaccaccagactgactacccgcgcactcgcccgg

SEQ ID NO: 194000 - DNA, 75 bp, synthetic construct
  source 1..75: mol_type = other DNA
atgaacggtataaaaacggggctggggatcacgccgggtgagcacataatcagtgctgattctgcactcagcaga

SEQ ID NO: 194001 - DNA, 75 bp, synthetic construct
  source 1..75: mol_type = other DNA
aataacacactgacgtttggcggtggtggacatggcgtaagccgtcgttcggcaaccaatggggctgactattat

SEQ ID NO: 194002 - DNA, 75 bp, synthetic construct
  source 1..75: mol_type = other DNA
acgcgctctatctgaccgataactggattgccgtcgccgggatccgctatcagtattacacgcagtatgcgggta

SEQ ID NO: 194003 - DNA, 75 bp, synthetic construct
  source 1..75: mol_type = other DNA
atatcatcaggtgaattaagtttcgacaaagtctgtaaaaacataaaaagatatgacctcttaaaagatatttac

SEQ ID NO: 194004 - DNA, 75 bp, synthetic construct
  source 1..75: mol_type = other DNA
ggactgtgtggatttttatcataaaaaaaataaacagaaatcttgcttagaaaaccctagacacctaacttcttc

SEQ ID NO: 194005 - DNA, 75 bp, synthetic construct
  source 1..75: mol_type = other DNA
ctttttcatgggaagaagttctgtgaaacctgtggtacggggatttattgcagagcggcatgtacgaagtatgtt

SEQ ID NO: 194006 - DNA, 75 bp, synthetic construct
  source 1..75: mol_type = other DNA
tcggtatggcagttatgggacgcaaccttgcgctcaacatcgaaagtcgtggttataccgtctctattttcaacc

SEQ ID NO: 194007 - DNA, 75 bp, synthetic construct
  source 1..75: mol_type = other DNA
tcgccgccgtggctgaagatggtgaaccatgcgttacctatattggtgccgatggcgcaggtcactatgtgaaga

SEQ ID NO: 194008 - DNA, 75 bp, synthetic construct
  source 1..75: mol_type = other DNA
acctcaccaacgaagaactggcgcagacctttaccgagtggaataacggtgaactgagcagctacctgatcgaca

SEQ ID NO: 194009 - DNA, 75 bp, synthetic construct
  source 1..75: mol_type = other DNA
aaagtcctcactggcccgaaagcgcagccagttggcgataaggctgagtttatcgagaaagttcgtcgtgcgctg

SEQ ID NO: 194010 - DNA, 75 bp, synthetic construct
  source 1..75: mol_type = other DNA
tgtttgcacgttatatctcttctctgaaagatcagcgtgttgccgcatctaaagtactgtctggtccgcaagcgc

SEQ ID NO: 194011 - DNA, 75 bp, synthetic construct
  source 1..75: mol_type = other DNA
tcttccgtgccggttgtatcattcgtgctcagttcctgcagaaaatcacggatgcttacgccgaaaatccgaaga

SEQ ID NO: 194012 - DNA, 75 bp, synthetic construct
  source 1..75: mol_type = other DNA
gcggtctggggcaacgctatgcgaccatcgccttcggcgcattgctgattgccatttacacgatgctggggacct

SEQ ID NO: 194013 - DNA, 75 bp, synthetic construct
  source 1..75: mol_type = other DNA
aacgatgttgctgctaccaatgtactgattgaaggcactattgataacgatcgcgtcacgcttacgaatctgggc

SEQ ID NO: 194014 - DNA, 75 bp, synthetic construct
  source 1..75: mol_type = other DNA
tggagtggctcggcgaatctgaatgccgccgccgcgacattcaatcgtgttgatgttcgtcgcccgtcgctggcg

SEQ ID NO: 194015 - DNA, 75 bp, synthetic construct
  source 1..75: mol_type = other DNA
atggttacggtgccaacctgacgctggttaccgatcataaatggggcgtctggagtggctcggcgaatctgaatg

SEQ ID NO: 194016 - DNA, 75 bp, synthetic construct
  source 1..75: mol_type = other DNA
cagcaagtgactcaaaccatgaatgcgggcgtcgtttccagtagcgaagttacatcgacggagccggtgcagtaa

SEQ ID NO: 194017 - DNA, 75 bp, synthetic construct
  source 1..75: mol_type = other DNA
gcaacagttgtggatgcagcaaactcccgcctggttaaacactctgcaactgaagagatttagcgccagccgcaa

SEQ ID NO: 194018 - DNA, 75 bp, synthetic construct
  source 1..75: mol_type = other DNA
gtgatggtcagcccgcgaccctggtggcaaaaagtgtcgacattgcgctaagcagtcggcaactgaccgaaccac

SEQ ID NO: 194019 - DNA, 75 bp, synthetic construct
  source 1..75: mol_type = other DNA
gtccagcgaaccgaacgttacaccgcaaattcgcgaagacgcgttccggttactgtgtctcaaccatacattcac

SEQ ID NO: 194020 - DNA, 75 bp, synthetic construct
  source 1..75: mol_type = other DNA
tgccgctatctcgatgccattctcgagcaatatcatcagggacgtgataaccgtctggcgtatcgtattgcccgc

SEQ ID NO: 194021 - DNA, 75 bp, synthetic construct
  source 1..75: mol_type = other DNA
ccatcattcagataaccggaatgcatcacgggtattggatcttgctgacaagtttgtttgtctgccagccaaact

SEQ ID NO: 194022 - DNA, 75 bp, synthetic construct
  source 1..75: mol_type = other DNA
ttccccgcagggcgtagcgctgcgccagttcaccagccgctgggaagggggtatggtcagaacgtcagggaactg

SEQ ID NO: 194023 - DNA, 75 bp, synthetic construct
  source 1..75: mol_type = other DNA
ttgacccgattataaacgcggaattttccccgcagggcgtagcgctgcgccagttcaccagccgctgggaagggg

SEQ ID NO: 194024 - DNA, 75 bp, synthetic construct
  source 1..75: mol_type = other DNA
gaatcagacaaagctctcgttgttgacgcgactacgtggcgatcgtggtcaacggggaacacgacgcactctgca

SEQ ID NO: 194025 - DNA, 75 bp, synthetic construct
  source 1..75: mol_type = other DNA
ggtaataccttcttccaggacactattcgtcgtaatcgtgagctttctgcagaaggctttaatttcattggtacc

SEQ ID NO: 194026 - DNA, 75 bp, synthetic construct
  source 1..75: mol_type = other DNA
gagaaaccatgtgtccttttgcttgatgaatttgatgctgttgcaaaaagacgtgatgatgacagggacgttgga

SEQ ID NO: 194027 - DNA, 75 bp, synthetic construct
  source 1..75: mol_type = other DNA
ctttataaatacatttcgacaatattatggcatcacaccacatcagtttgcacagcattcgccgggaaccttctc

SEQ ID NO: 194028 - DNA, 75 bp, synthetic construct
  source 1..75: mol_type = other DNA
atgcactggcggagctgatccagttgttaagtgcgggcaaaatcaatgcgttttttgaccaacctacacagggat

SEQ ID NO: 194029 - DNA, 75 bp, synthetic construct
  source 1..75: mol_type = other DNA
gaaagatcagcgcgttgccgcgtctaaagtcctcactggcccgaaagcgcagccagttggcgataaggctgagtt

SEQ ID NO: 194030 - DNA, 75 bp, synthetic construct
  source 1..75: mol_type = other DNA
agatgaagacggtaactacctggttgatgtgatcctggatgaagcagcaaacaaaggtacgggtaaatggaccag

SEQ ID NO: 194031 - DNA, 75 bp, synthetic construct
  source 1..75: mol_type = other DNA
gcgaaagcgaaaaatatgccgcacgcgtatttggtgccgatcgctcctggtcggtagtcgtcggtacttccggct

SEQ ID NO: 194032 - DNA, 75 bp, synthetic construct
  source 1..75: mol_type = other DNA
taagtccggtgctattaaagcagcgaaaaaagcaggcaacgttgctgctgatggcgtgatcaaaaccaaaatcga

SEQ ID NO: 194033 - DNA, 75 bp, synthetic construct
  source 1..75: mol_type = other DNA
agcaagccagaattcatcaaaccagaagacgtatccgctgaagtggtagaaaaagaataccaggtacagctggat

SEQ ID NO: 194034 - DNA, 75 bp, synthetic construct
  source 1..75: mol_type = other DNA
tacaccgatatgacaccggaacagtttgccgcgaagatgaaagggtttacggaaaatctggagagtttgtttagc

SEQ ID NO: 194035 - DNA, 75 bp, synthetic construct
  source 1..75: mol_type = other DNA
gcgctgggccgcgaagtagttaatgaaagtagccggatgggattacctgatgaactcactctacaacgcgaattc

SEQ ID NO: 194036 - DNA, 75 bp, synthetic construct
  source 1..75: mol_type = other DNA
cgcgaaaccggtctacatggtgccaagccgcaaccgctacggcattatcgggccaatctatccgcaggaaatgca

SEQ ID NO: 194037 - DNA, 75 bp, synthetic construct
  source 1..75: mol_type = other DNA
acactttgctaaatcgggcaagattgttcggcgggcaacatttggttattgctcagcaatcgttagatcgcttgt

SEQ ID NO: 194038 - DNA, 75 bp, synthetic construct
  source 1..75: mol_type = other DNA
ataaattacgcaccatgccaccggggcgctatatggtcgcagttggtgcgctacatctgtatggagaagggaatt

SEQ ID NO: 194039 - DNA, 75 bp, synthetic construct
  source 1..75: mol_type = other DNA
tgcgggcagaatacggtatcgattaccagctattgcaggcggcgaagcaacaacataaacccgtgattgaactgg

SEQ ID NO: 194040 - DNA, 75 bp, synthetic construct
  source 1..75: mol_type = other DNA
ggcggatgtttccaccagcgatacgccttttgctaatttgcctgcctgcgaggcgctggaagagcgcattagcga

SEQ ID NO: 194041 - DNA, 75 bp, synthetic construct
  source 1..75: mol_type = other DNA
agcatcagaggaatacaactgggatttgaactacggtgaaatcgcgaaaattttccgcgcaggctgcattattcg

SEQ ID NO: 194042 - DNA, 75 bp, synthetic construct
  source 1..75: mol_type = other DNA
actacaacaaatgatgagctggtggctgaatgcgccgccacaaaataatgaaataacgctgcccaatacgttcag

SEQ ID NO: 194043 - DNA, 75 bp, synthetic construct
  source 1..75: mol_type = other DNA
cttagtcggtgttgtcgtgcgcgatggcgcagccaactcccatgctgcgatcatggtacgtgcgctggggatccc

SEQ ID NO: 194044 - DNA, 75 bp, synthetic construct
  source 1..75: mol_type = other DNA
cccgcgcagttaaaaagcggtgagcgtataaaagtcatgctcaatgctggtttaagcccggaacatgaagaaaaa

SEQ ID NO: 194045 - DNA, 75 bp, synthetic construct
  source 1..75: mol_type = other DNA
tcggtatggctgtaatgggccgtaatctcgcgctcaatattgaaagtcgtgggtataccgtctctatctttaacc

SEQ ID NO: 194046 - DNA, 75 bp, synthetic construct
  source 1..75: mol_type = other DNA
gggtagccacgatatggctcccctgcccacccgtttgctcaaaaagctcaaaaacgccgatgcgctgatcgtcga

SEQ ID NO: 194047 - DNA, 75 bp, synthetic construct
  source 1..75: mol_type = other DNA
tggtatttatgctgccgcatctggcaaagcgggtcgatttcatctctgttggcaccaacgatctgactcaataca

SEQ ID NO: 194048 - DNA, 75 bp, synthetic construct
  source 1..75: mol_type = other DNA
agggaatgttgcaaatgttcaatgataagcccgtaaccctgcgtacgctggatgtcggtgctgataagcaactgc

SEQ ID NO: 194049 - DNA, 75 bp, synthetic construct
  source 1..75: mol_type = other DNA
atcgcgtgcctgttctcaccgcatggtcaacgcctggcgcggcgctgttggtcactggtttacaggggctaacac

SEQ ID NO: 194050 - DNA, 75 bp, synthetic construct
  source 1..75: mol_type = other DNA
gatgattattgggatcgtgatcgttatcgcgcaaggtgacgttgtcacaactgatgttgtctttaaacccgttct

SEQ ID NO: 194051 - DNA, 75 bp, synthetic construct
  source 1..75: mol_type = other DNA
ccgatgaaataactattcagaaagaagcgattattaattctgatgtcatacttctgcagctcgaaacaaattata

SEQ ID NO: 194052 - DNA, 75 bp, synthetic construct
  source 1..75: mol_type = other DNA
cgacgggagccagtttcgccggacagcgaaatggccttgtcgcacacaaagtaattgcccgcccgggagacggca

SEQ ID NO: 194053 - DNA, 75 bp, synthetic construct
  source 1..75: mol_type = other DNA
gcgagcggactgacattggttgggattggttcagcgttttggggattaattgccggtggcgtctgttacgtgatg

SEQ ID NO: 194054 - DNA, 75 bp, synthetic construct
  source 1..75: mol_type = other DNA
tttggtagtgccattaccgggatgatggctgccctgcccgtaagttggatccagatgctggcaggtctggcgctg

SEQ ID NO: 194055 - DNA, 75 bp, synthetic construct
  source 1..75: mol_type = other DNA
tttggcggtctggttgataacatcatcatgcgcgtggtcgatatcatgctggcgctgccaagtctgctgctggcg

SEQ ID NO: 194056 - DNA, 75 bp, synthetic construct
  source 1..75: mol_type = other DNA
tggggcaccatgctctccgacgtgttgcagttcgcgcaaagcgcctggtgggtcgtgactttcccgggtctggcg

SEQ ID NO: 194057 - DNA, 75 bp, synthetic construct
  source 1..75: mol_type = other DNA
tgattagcgcaccggtgccgatgaccccgttacaggagttctggcactattttaaacgcaacaaaggcgcggtcg

SEQ ID NO: 194058 - DNA, 75 bp, synthetic construct
  source 1..75: mol_type = other DNA
ggatgttgattatatcacccccaatgaaacagaagctggtttactgtccggcatagacgtacacgatcttgaatc

SEQ ID NO: 194059 - DNA, 75 bp, synthetic construct
  source 1..75: mol_type = other DNA
ctgccacgatccttgttaatgaaggtactggcgataatgttattgcgatctatcccggtgccaacatgacaatgt

SEQ ID NO: 194060 - DNA, 75 bp, synthetic construct
  source 1..75: mol_type = other DNA
ctgaaaatgaaccttcaggggtacgactaccgccgcgatgatgagtttatgatgtggggatctgcagatctccgg

SEQ ID NO: 194061 - DNA, 75 bp, synthetic construct
  source 1..75: mol_type = other DNA
gcgtaaatatcgctctgcacaatattgaaggttctactattaaacaggttcaggtcaataatccgggtgatgttt

SEQ ID NO: 194062 - DNA, 75 bp, synthetic construct
  source 1..75: mol_type = other DNA
atccgcaggcgttcaacgaagcctttgctcgtgcctggttcaaactgacgcacagggatatggggccgaaatctc

SEQ ID NO: 194063 - DNA, 75 bp, synthetic construct
  source 1..75: mol_type = other DNA
gctgcgttttgatcctgagttcgagaagatctctcgtcgtttcctcaacgatccgcaggcgttcaacgaagcctt

SEQ ID NO: 194064 - DNA, 75 bp, synthetic construct
  source 1..75: mol_type = other DNA
ctggggcagctacgccggtctgtttattcgtatggcctggcacggcgcgggtacttaccgttcaatcgacgggcg

SEQ ID NO: 194065 - DNA, 75 bp, synthetic construct
  source 1..75: mol_type = other DNA
tctactttccgtggtggcgacaaacgcggtggcgccaacggtgcgcgtctggcattagcaccgcagcgcgactgg

SEQ ID NO: 194066 - DNA, 75 bp, synthetic construct
  source 1..75: mol_type = other DNA
aatctcagccgtggtggccagccgactggggcagctacgccggtctgtttattcgtatggcctggcacggcgcgg

SEQ ID NO: 194067 - DNA, 75 bp, synthetic construct
  source 1..75: mol_type = other DNA
ttggttctaactccgtcctgcgtgcggtggctgaagtttacgccagcagcgatgcccacgagaagtttgttaaag

SEQ ID NO: 194068 - DNA, 75 bp, synthetic construct
  source 1..75: mol_type = other DNA
gtttgaaacgctgaccgagtggatggactggtcgctggcggaccgagatgtcgatctggatggtatctattattg

SEQ ID NO: 194069 - DNA, 75 bp, synthetic construct
  source 1..75: mol_type = other DNA
gtgaagtggagcgtcgtgtgaaggagcgcatgattctgtcacgtaaccgcaattacagccggctggccaccgctt

SEQ ID NO: 194070 - DNA, 75 bp, synthetic construct
  source 1..75: mol_type = other DNA
tctgccagtcgtgaggcggtaaaacgtgaagtggagcgtcgtgtgaaggagcgcatgattctgtcacgtaaccgc

SEQ ID NO: 194071 - DNA, 75 bp, synthetic construct
  source 1..75: mol_type = other DNA
gaagcgggatactgcacggcgggatgcatcacggcagcgtcatgacatcgagacgcgcgtgcgtcagcaactgac

SEQ ID NO: 194072 - DNA, 75 bp, synthetic construct
  source 1..75: mol_type = other DNA
gatttttatggatcgtggggagatagtggaacaagctgcaccggatgagttttttgcgcatcctaagtcagagcg

SEQ ID NO: 194073 - DNA, 75 bp, synthetic construct
  source 1..75: mol_type = other DNA
gcggaagggcgtttccggggaagcctggaggccgtgaagcgcgaaatcgaccgtcgcgtgaaggaacgcatgata

SEQ ID NO: 194074 - DNA, 75 bp, synthetic construct
  source 1..75: mol_type = other DNA
ttcgtttggtcaaggcaaaccggttatcgccctgctgggggaatatgacgccctggcaggtttaagtcagcaagc

SEQ ID NO: 194075 - DNA, 75 bp, synthetic construct
  source 1..75: mol_type = other DNA
tcaagaaatggctggaacaatatgggcaaggcggcacggtgcgcttttatggttgtcctggcgaagaaggcggct

SEQ ID NO: 194076 - DNA, 75 bp, synthetic construct
  source 1..75: mol_type = other DNA
tggcaaacattcaggcatcatggcgctttaaagggatcgcagcacatgccgcgaattcccctcatttgggacgca

SEQ ID NO: 194077 - DNA, 75 bp, synthetic construct
  source 1..75: mol_type = other DNA
atgcaggccgttatgatctcccaggtcagcaatgacatgagattctcggacgcattcatgttattcactcgctta

SEQ ID NO: 194078 - DNA, 75 bp, synthetic construct
  source 1..75: mol_type = other DNA
cgcttatctttgctgataacgagacgtcgacctgaaatagctgttcattgtattttgatacatgtaatgccgcat

SEQ ID NO: 194079 - DNA, 75 bp, synthetic construct
  source 1..75: mol_type = other DNA
tcaaaacagtctgaataatatcgctgcaaccggtggcgaaaacggcaaggcttttgcactacgtcatcgtgaaac

SEQ ID NO: 194080 - DNA, 75 bp, synthetic construct
  source 1..75: mol_type = other DNA
cactgatgacacaaggtaagcacgataaagccttccttgagaaatacaccaccggttatccgcagtttgaagagt

SEQ ID NO: 194081 - DNA, 75 bp, synthetic construct
  source 1..75: mol_type = other DNA
aatacttccatcagctgaaaaaatcgggcaaaccggtgattgccatcgaccctatccgttccgaaacaatcgagt

SEQ ID NO: 194082 - DNA, 75 bp, synthetic construct
  source 1..75: mol_type = other DNA
agcgtgttaccatgccagtgtttaataccttctggttgcaaaataaactgctcgaaatgcgccgcagcgagaaga

SEQ ID NO: 194083 - DNA, 75 bp, synthetic construct
  source 1..75: mol_type = other DNA
gaaattgaaaaactaacgttttcaaacagagaagtagtattgaactttctactcctttcttactatagctatatc

SEQ ID NO: 194084 - DNA, 75 bp, synthetic construct
  source 1..75: mol_type = other DNA
acgagcaatatgttcgctatggcgatttccgcgccgatccggtgaaaaatgcgctgggtacgccaagcggcaaaa

SEQ ID NO: 194085 - DNA, 75 bp, synthetic construct
  source 1..75: mol_type = other DNA
aaaatttggctataaggattgcccggcacacccaacctggctggctcctgatgaatggaaaggtaccgccgacga

SEQ ID NO: 194086 - DNA, 75 bp, synthetic construct
  source 1..75: mol_type = other DNA
aaaaacaaaaaggcacaggaaaggccccaccgttccatatgcgcatagttcctgaattgaaggagcagtttgata

SEQ ID NO: 194087 - DNA, 75 bp, synthetic construct
  source 1..75: mol_type = other DNA
aaaccccttttgatttgttaaaacaccttgcggtctggcaactgcaagtgtcaaacaagaaatcaaaagggggtc

SEQ ID NO: 194088 - DNA, 75 bp, synthetic construct
  source 1..75: mol_type = other DNA
atgaagtccgtaatctcgtcagaggttacggactttttgttgtgcacagaaaacccccagctaggctgggggttc

SEQ ID NO: 194089 - DNA, 75 bp, synthetic construct
  source 1..75: mol_type = other DNA
caatcctgggatcatcatttccctggttttgaacacgaaacggaaggcaccgaaattattgacggtatttaccac

SEQ ID NO: 194090 - DNA, 75 bp, synthetic construct
  source 1..75: mol_type = other DNA
atgaaacaccgggaaatacgggcggcagttctgtcagccctgaaagcaaatatttctgagcgggttagctggttt

SEQ ID NO: 194091 - DNA, 75 bp, synthetic construct
  source 1..75: mol_type = other DNA
tgcacagaaaacccccagctaggctggggggtccggaaagctttcagctttgagccagttattaaaacccctttt

SEQ ID NO: 194092 - DNA, 75 bp, synthetic construct
  source 1..75: mol_type = other DNA
atgatgcctcccacgaaagtgggaggttttttgtgcacagaaaacccccagctaggctgggggttccggaaagct

SEQ ID NO: 194093 - DNA, 75 bp, synthetic construct
  source 1..75: mol_type = other DNA
ggcacccgatggtatgttactggatatcaaacctgaaggtggcgatcccgcactttgtcaggctgcgttggcagc

SEQ ID NO: 194094 - DNA, 75 bp, synthetic construct
  source 1..75: mol_type = other DNA
agcgttgcgctgatgtgttccctgctattgttgcagagttacaggaatatcggaacgccgctaagcgaacttcag

SEQ ID NO: 194095 - DNA, 75 bp, synthetic construct
  source 1..75: mol_type = other DNA
ccacacataaactgctgaatgcgctgtcgcaggcgtcttatattcatgtacgtgaaggccggggcgcgattaact

SEQ ID NO: 194096 - DNA, 75 bp, synthetic construct
  source 1..75: mol_type = other DNA
cggtctggcaactgcaagtgtcaaacaagaaatcaaaagggagtcccaatggggaacgaaaagagcttagcgcac

SEQ ID NO: 194097 - DNA, 75 bp, synthetic construct
  source 1..75: mol_type = other DNA
atgttgttattaggtgtggggatcgagaggcaaagaaaacccggcactgaggccgggttgttattgtgcacagaa

SEQ ID NO: 194098 - DNA, 75 bp, synthetic construct
  source 1..75: mol_type = other DNA
acccgctggccaaccgcgtccagtgttccatcaccacactggccattgagtgtggactggcgacagagtccggtg

SEQ ID NO: 194099 - DNA, 75 bp, synthetic construct
  source 1..75: mol_type = other DNA
gaagtttcccggacagatttctggtggtcagcagcaacgcgttgccatagcacgttcactttgtatgaaaccaaa

SEQ ID NO: 194100 - DNA, 75 bp, synthetic construct
  source 1..75: mol_type = other DNA
gtaaaacgtgaagtggagcgtcgtgtgaaggagcgcatgattctgtcacgtaaccgtaattacagccggctggcc

SEQ ID NO: 194101 - DNA, 75 bp, synthetic construct
  source 1..75: mol_type = other DNA
cccttgatgtgtctgaggatgcagtggcagctgcgcgccgcagtcgtgttgaatgggaaaacagacagcgcaaaa

SEQ ID NO: 194102 - DNA, 75 bp, synthetic construct
  source 1..75: mol_type = other DNA
ctgcagggactctgttttcactatgatccgctggccaaccgcgtccagtgctccatcaccacgctggccattgag

SEQ ID NO: 194103 - DNA, 75 bp, synthetic construct
  source 1..75: mol_type = other DNA
cggaatatgacccgcttatcgggtgctacattccgaccgatatcacgttcacaccggcactgtttgctgctctcg

SEQ ID NO: 194104 - DNA, 75 bp, synthetic construct
  source 1..75: mol_type = other DNA
caggaaaactctccatcacccgtgccacccgcgccctgacgttcctgtcagagctggggctgattagctaccaga

SEQ ID NO: 194105 - DNA, 75 bp, synthetic construct
  source 1..75: mol_type = other DNA
caggaaaactctccatcacccgtgccacccgtgctctgacgttcctgtcagagctggggctgattagctaccaga

SEQ ID NO: 194106 - DNA, 75 bp, synthetic construct
  source 1..75: mol_type = other DNA
caggaaaactctccatcacccgtgccacccgagcactgacgttcctgtcagagctggggctgattagctaccaga

SEQ ID NO: 194107 - DNA, 75 bp, synthetic construct
  source 1..75: mol_type = other DNA
atgttgtttgatgagccaacgtcggcgctcgatccggagatggtgaaagaggtgctggatacgatgattgggctg

SEQ ID NO: 194108 - DNA, 75 bp, synthetic construct
  source 1..75: mol_type = other DNA
gctggccattgagtgcggactggcgacggagtctgctgccggaaaactctccatcacccgtgccacccgtgccct

SEQ ID NO: 194109 - DNA, 75 bp, synthetic construct
  source 1..75: mol_type = other DNA
caggaaaactctccatcacccgtgccacccgggcgctgacgttcctgtcagagctggggctgattagctaccaga

SEQ ID NO: 194110 - DNA, 75 bp, synthetic construct
  source 1..75: mol_type = other DNA
cggaatatgacccgcttatcgggtgctacattccgaccgatatcacgttcacatcggcgctgtttgccgctctcg

SEQ ID NO: 194111 - DNA, 75 bp, synthetic construct
  source 1..75: mol_type = other DNA
tgggcgaaatagagacgtttggagaactgttaaacagcaatccgaatgcaaaactcaccttctggaagttctggt

SEQ ID NO: 194112 - DNA, 75 bp, synthetic construct
  source 1..75: mol_type = other DNA
gttgccgaaagtcgcgtaccgctctccactattaccactctgtcccgttttattaaacgttcctctaatcaacgt

SEQ ID NO: 194113 - DNA, 75 bp, synthetic construct
  source 1..75: mol_type = other DNA
ctgctcaaagtttgtctttgatatttataaagaagcattatgtattccggtaggcgagatagaaacttttgaaga

SEQ ID NO: 194114 - DNA, 75 bp, synthetic construct
  source 1..75: mol_type = other DNA
ctacattccgaccgatatcacgttcacactggcgctgtttgccgcccttgatgtgtctgaggatgcagtggcagc

SEQ ID NO: 194115 - DNA, 75 bp, synthetic construct
  source 1..75: mol_type = other DNA
agctgcatcaaattgctggagtaatcacgtcgggatcattatcggtcataacggtgaagacttcctggttgcaga

SEQ ID NO: 194116 - DNA, 75 bp, synthetic construct
  source 1..75: mol_type = other DNA
taaaaccgttacgccagccagtttgtggcatcatccgggtttggtgctgatgaatcccctaatgatttttatcaa

SEQ ID NO: 194117 - DNA, 75 bp, synthetic construct
  source 1..75: mol_type = other DNA
cctcaacctcggtccgaaccacccgtcggcgcacggggctttccgtatcgttttgcaactcgatggcgaagagat

SEQ ID NO: 194118 - DNA, 75 bp, synthetic construct
  source 1..75: mol_type = other DNA
gcagttaccagacagagcttaagtcccggggaataaagcgtgcccgtgcgcgtcgtgatgcgaacagggaacgtc

SEQ ID NO: 194119 - DNA, 75 bp, synthetic construct
  source 1..75: mol_type = other DNA
catcaccacactggccattgagtgcggactggcgacagagtccggtgcaggaaaactctccatcacccgtgccac

SEQ ID NO: 194120 - DNA, 75 bp, synthetic construct
  source 1..75: mol_type = other DNA
accgccaggtaaagaacccgaatccggtgtttacaccccgtgaaggtgcaggaacgctgaagttctgcgaaaaac

SEQ ID NO: 194121 - DNA, 75 bp, synthetic construct
  source 1..75: mol_type = other DNA
gcgtgaaatctcggaagggcgcttcactgccagtcgtgaggcggtaaaacgtgaagtggagcgtcgtgtgaagga

SEQ ID NO: 194122 - DNA, 75 bp, synthetic construct
  source 1..75: mol_type = other DNA
cagccacctgctgtacatctcgacctttattcaggacgtcggcgcaatgacgccagtgttcttcgcctttaccga

SEQ ID NO: 194123 - DNA, 75 bp, synthetic construct
  source 1..75: mol_type = other DNA
gaagggcggtgcttttcgtaacgtgcgtgcggaagatctctccgctcatttaatgcgtagcctgctggcgcgtaa

SEQ ID NO: 194124 - DNA, 75 bp, synthetic construct
  source 1..75: mol_type = other DNA
caggggctctgttttcactatgatccgctggccaaccgcgtccagtgctccatcaccacgctggccattgagtgc

SEQ ID NO: 194125 - DNA, 75 bp, synthetic construct
  source 1..75: mol_type = other DNA
aacatccggtgccgttctactcctgcatctttgataatgcgataactgactgttactcatggagtatcagcaaag

SEQ ID NO: 194126 - DNA, 75 bp, synthetic construct
  source 1..75: mol_type = other DNA
gcccgccgcagccgcgtggaatgggaaaatcagcagcgcaaaaagcagaacctgaagccgctggagatggacgag

SEQ ID NO: 194127 - DNA, 75 bp, synthetic construct
  source 1..75: mol_type = other DNA
agctggggctgattacctaccagaccgaatacgacccccagattggctgcaatataccgactgatatcaccttca

SEQ ID NO: 194128 - DNA, 75 bp, synthetic construct
  source 1..75: mol_type = other DNA
gacgatatttactggggttgtgtgcagcagacgctggagcagggttttaatatcgcccgtaacgcggcgctgttg

SEQ ID NO: 194129 - DNA, 75 bp, synthetic construct
  source 1..75: mol_type = other DNA
cgctgatccccgccagcgttgaggtttatcacgacagcctgtgccgaaaaatctggcgtgaggatgataaatggc

SEQ ID NO: 194130 - DNA, 75 bp, synthetic construct
  source 1..75: mol_type = other DNA
taaatcccacggtatgaaacgtgcccgtgcgcgccgcgatgcaggcaggacccgtcaggatattgtcaccctggt

SEQ ID NO: 194131 - DNA, 75 bp, synthetic construct
  source 1..75: mol_type = other DNA
tgtgtttccactatgatccgctggccaaccgcgtccagtgctccatcaccacgctggccattgagtgcggactgg

SEQ ID NO: 194132 - DNA, 75 bp, synthetic construct
  source 1..75: mol_type = other DNA
acggttattttatctttggcggagcctatccgatgaaagacggtcaggcgcgtttcgcggcgctgaaagaaaaaa

SEQ ID NO: 194133 - DNA, 75 bp, synthetic construct
  source 1..75: mol_type = other DNA
ggatcatcagattcgtaaatatgtcgctatccagcagtggttcgcagagaaacatccggtgccgttctactcctg

SEQ ID NO: 194134 - DNA, 75 bp, synthetic construct
  source 1..75: mol_type = other DNA
atggaacatttcgacgtggcgattattggcctcggcccggcaggttcggcgttggcgcgaaagttagcaggcaaa

SEQ ID NO: 194135 - DNA, 75 bp, synthetic construct
  source 1..75: mol_type = other DNA
gagtctccgattaccgccatgggtaatgcgatggatctggtagggctatgcgcactgctggtggtgcttggtgtt

SEQ ID NO: 194136 - DNA, 75 bp, synthetic construct
  source 1..75: mol_type = other DNA
tacgcgtatccataacgatatgcgcgtgaacccggcgttcctgtttgccgccatgttctggtacccactgctgga

SEQ ID NO: 194137 - DNA, 75 bp, synthetic construct
  source 1..75: mol_type = other DNA
agaaccgatccctcgcctcgctaccctgctgaacgatatcccaccggcacgcctgtttgaagaatcgcttaaact

SEQ ID NO: 194138 - DNA, 75 bp, synthetic construct
  source 1..75: mol_type = other DNA
ttctgcgccaccagatcaaaaagggatgctcaccgagctggatgaagaaccagcacagcgccgtcgtactcgtcg

SEQ ID NO: 194139 - DNA, 75 bp, synthetic construct
  source 1..75: mol_type = other DNA
ttccatcaccacactggccattgagtgcggactggcgacagagtccggtgcaggaaaactctccatcacccgtgc

SEQ ID NO: 194140 - DNA, 75 bp, synthetic construct
  source 1..75: mol_type = other DNA
atgagccaaattttactgcaacctgctaacgcgatgattacgcttgaaaatgttaacaagtggtatgggcaattc

SEQ ID NO: 194141 - DNA, 75 bp, synthetic construct
  source 1..75: mol_type = other DNA
agaaccgatcccacgcctggctaccctgctgaacgatatcccaccggcacgcctgtttgaagaatcactcaaact

SEQ ID NO: 194142 - DNA, 75 bp, synthetic construct
  source 1..75: mol_type = other DNA
tcgtgaaattggcgctgaaaataacgtcccgacgcttgaagcgccgccgctggcgcgagcgctgtatcgacatgc

SEQ ID NO: 194143 - DNA, 75 bp, synthetic construct
  source 1..75: mol_type = other DNA
tgctgggggggctggtatttagcggcaaatccttgcagccaaagttttccaaactcaacccgctaccgggaatta

SEQ ID NO: 194144 - DNA, 75 bp, synthetic construct
  source 1..75: mol_type = other DNA
aatccttgcagccgaagttttccaaactcaacccgctaccgggcattaaacggatgttctcggcacagactggcg

SEQ ID NO: 194145 - DNA, 75 bp, synthetic construct
  source 1..75: mol_type = other DNA
gattatgctgtttgatgaaccaacatccgcgctcgatccggagatggtaaaagaagtactggatacgatgattgg

SEQ ID NO: 194146 - DNA, 75 bp, synthetic construct
  source 1..75: mol_type = other DNA
atcccgcgttcacgtgaattaacgtcactgctgattttgttagtgggcgtgtgtgttatctggtttggcggtgtg

SEQ ID NO: 194147 - DNA, 75 bp, synthetic construct
  source 1..75: mol_type = other DNA
agcgaaggcgatccgcatgtcaaagggcgaattcgtcagatgcagcgtgctgccgcgcggcgtcggatgatggcc

SEQ ID NO: 194148 - DNA, 75 bp, synthetic construct
  source 1..75: mol_type = other DNA
gcgctggaaaatcctggcggcaaatatcagcataacggtaaagagcaaacgtatccgaatatcaaaatgatctgg

SEQ ID NO: 194149 - DNA, 75 bp, synthetic construct
  source 1..75: mol_type = other DNA
caaagaaacaactttgtttatggcaggcacaaagagagcgcatgaatgagcgcgaatttctttccgccccatccg

SEQ ID NO: 194150 - DNA, 75 bp, synthetic construct
  source 1..75: mol_type = other DNA
gactggtcgctggcggaccgcgatgtcgatctggatggtatctattattgcccgcatcatccgcagggtagtgtt

SEQ ID NO: 194151 - DNA, 75 bp, synthetic construct
  source 1..75: mol_type = other DNA
aacagtttgtggaaatcagcgaaacgctggcggcggcgaaaggcattaataatggcgaccgtgtcaccgtatcca

SEQ ID NO: 194152 - DNA, 75 bp, synthetic construct
  source 1..75: mol_type = other DNA
ttgaggagaatatgctactccccaatttctggccaggaactgcccattcgttggcttgctcaacacggcagcgaa

SEQ ID NO: 194153 - DNA, 75 bp, synthetic construct
  source 1..75: mol_type = other DNA
tcaaaggaattaaaggcagcaggcttcatcaactaaagattcctatcccaagtaaagttgagcaagaccgaattg

SEQ ID NO: 194154 - DNA, 75 bp, synthetic construct
  source 1..75: mol_type = other DNA
gcaaagtgctgcgcgtggaggtaaaaggcttttcgacgtcattgattctggtgttcagcgaacgccaggttgatg

SEQ ID NO: 194155 - DNA, 75 bp, synthetic construct
  source 1..75: mol_type = other DNA
gtttaggccttggaggtgctgagaagcaggtttgtcttttagctgataaattaagtttaagcgggcaccatgtaa

SEQ ID NO: 194156 - DNA, 75 bp, synthetic construct
  source 1..75: mol_type = other DNA
taaagcagttgtacatcacctgctcactccacagaaaacagaagatatatcctgtccaggaaatgctgaagtaga

SEQ ID NO: 194157 - DNA, 75 bp, synthetic construct
  source 1..75: mol_type = other DNA
ttaatgctcgcaagatggcagagaaattttccagcccgttactgacaataaatggtgatgggcatacattagctc

SEQ ID NO: 194158 - DNA, 75 bp, synthetic construct
  source 1..75: mol_type = other DNA
atatccgggtgtggggttctacggcaaccaggaacgggctgcactggctgcgtacacctgggaagtgctggcccg

SEQ ID NO: 194159 - DNA, 75 bp, synthetic construct
  source 1..75: mol_type = other DNA
gccgctctggcactgcgccgtgcccgtaaactgatggatgttcacggcatcacacattccgacatcgccatgagt

SEQ ID NO: 194160 - DNA, 75 bp, synthetic construct
  source 1..75: mol_type = other DNA
gtcattcgccatattggcactaatgaggcagtatatgatattgaacgcattaggcaagcgctgggagataagcaa

SEQ ID NO: 194161 - DNA, 75 bp, synthetic construct
  source 1..75: mol_type = other DNA
cacgtggtgaatttgttgacggaattagcgacccgaacgatccgaaatgggtaaaggggatccagactcgcgatt

SEQ ID NO: 194162 - DNA, 75 bp, synthetic construct
  source 1..75: mol_type = other DNA
ttgctgccgacgcaatcggttaccttgatgcaatcgtcgccagtttcagcgaagaagatgcggcgcgcatcaaaa

SEQ ID NO: 194163 - DNA, 75 bp, synthetic construct
  source 1..75: mol_type = other DNA
gcgccagttccgccagcttaatcaggtggaaatcctcggcaaaatcaacggcgcggtcggtaactataatgccca

SEQ ID NO: 194164 - DNA, 75 bp, synthetic construct
  source 1..75: mol_type = other DNA
atcccgtacccacggtcagccagcgacaccgtcaaccatcggtaaagagatggctaacgtcgcttatcgtatgga

SEQ ID NO: 194165 - DNA, 75 bp, synthetic construct
  source 1..75: mol_type = other DNA
gagatgatggaaccattgatgcaacgcctgatccagagcgccagacgctaccctgtgcgccagcttccgctgata

SEQ ID NO: 194166 - DNA, 75 bp, synthetic construct
  source 1..75: mol_type = other DNA
atccgaaaactaaatggtgtggtggggatagctactcagtctcttgacgaagcactcaagaataaagtagcaaaa

SEQ ID NO: 194167 - DNA, 75 bp, synthetic construct
  source 1..75: mol_type = other DNA
atgaatgagattggcgatatggaaatggtgatctcaaatctcaataaacgcattggcaaccttattgtctctcag

SEQ ID NO: 194168 - DNA, 75 bp, synthetic construct
  source 1..75: mol_type = other DNA
gatagcctcagaagagtcaagcgatgcttcgggggtaatcctctgtgtagatcagggggatgagcaattaacacc

SEQ ID NO: 194169 - DNA, 75 bp, synthetic construct
  source 1..75: mol_type = other DNA
tgcgccactatacattggacagaaaagagcttcccaatgaatggaacatgagtaatttctacaacggtgaatatg

SEQ ID NO: 194170 - DNA, 75 bp, synthetic construct
  source 1..75: mol_type = other DNA
tccgaaatgggttaaggggatccagacccgcgactctatataccagaatcagccagaaacggaacagaacgaccc

SEQ ID NO: 194171 - DNA, 75 bp, synthetic construct
  source 1..75: mol_type = other DNA
ctcgcggtaagcgcgttgacgccgaaggcatgaagcaatttatcgacggtctggcgctgccagaagaagagaaag

SEQ ID NO: 194172 - DNA, 75 bp, synthetic construct
  source 1..75: mol_type = other DNA
acgccgtcaaccatcgggaaagagatggctaacgttgcctaccgtatggaacgccagtaccgccaacttaaccag

SEQ ID NO: 194173 - DNA, 75 bp, synthetic construct
  source 1..75: mol_type = other DNA
ccaccctgaaaggcgtgagcaaactggaagtgaaccgtgaccatctgctggatgaactggatcacaactgggaag

SEQ ID NO: 194174 - DNA, 75 bp, synthetic construct
  source 1..75: mol_type = other DNA
acttcgacaacacgattttgcgccgttcatatgaacggcaggggatcccctgcccgtggcgttaccacaacaatc

SEQ ID NO: 194175 - DNA, 75 bp, synthetic construct
  source 1..75: mol_type = other DNA
tctggcggaaccatcgaccggaaagcaataaagtggtgggcgaagcgatcacgcgaagcgcaatctgccattttt

SEQ ID NO: 194176 - DNA, 75 bp, synthetic construct
  source 1..75: mol_type = other DNA
aactgccctgattgtggcgcggtgatgggcgacgcaacataccatgaaacattcgatgacaagaaccaagttgaa

SEQ ID NO: 194177 - DNA, 75 bp, synthetic construct
  source 1..75: mol_type = other DNA
ggaatttcgaatgagaattaccacgtaggtcccggtgtcagtaagtctcagctcgatgacattgctgatactccg

SEQ ID NO: 194178 - DNA, 75 bp, synthetic construct
  source 1..75: mol_type = other DNA
taccagaatcagccagaaacggaacataacgaccagaaagcggaacagaacgacccaaatacgcaacaaaacgag

SEQ ID NO: 194179 - DNA, 75 bp, synthetic construct
  source 1..75: mol_type = other DNA
gaaatatctggaactgcgggcagaactccatgaagcccggaaaaacattccgccaaaaaatcctgtcgatgcaga

SEQ ID NO: 194180 - DNA, 75 bp, synthetic construct
  source 1..75: mol_type = other DNA
tatcgaagcatacctgggcgctgactacaccgatcgcggtctgcttacaaaagagtggatgaaaggaaatagtgt

SEQ ID NO: 194181 - DNA, 75 bp, synthetic construct
  source 1..75: mol_type = other DNA
tctggaaacggataaattcgctgatgagtatgccattccggtaccggttcctgaatatgtggttactacttctaa

SEQ ID NO: 194182 - DNA, 75 bp, synthetic construct
  source 1..75: mol_type = other DNA
actggcacaatccgttggaaaggcattctctcactcaacaacccgtcatatcagcccggccgaattcgacaagtt

SEQ ID NO: 194183 - DNA, 75 bp, synthetic construct
  source 1..75: mol_type = other DNA
tactcaaccacccggatcgcaaatctgaaatcagctatttcgggtttgatgaagaaaccgggctggaaatcaggg

SEQ ID NO: 194184 - DNA, 75 bp, synthetic construct
  source 1..75: mol_type = other DNA
ttgattgcggcggtttacggtttatgtgcgaatcctgcgtgcatagcctatgcgcctgcaatccctgacatcgca

SEQ ID NO: 194185 - DNA, 75 bp, synthetic construct
  source 1..75: mol_type = other DNA
aatattcgatggagagaatcagcctgaagttcaggaaaatgatccggaggaaatggaaggcgcggaacatccgaa

SEQ ID NO: 194186 - DNA, 75 bp, synthetic construct
  source 1..75: mol_type = other DNA
cgctatcacgttcaggatgcattctacagtgacggttatgaagcacagtttggagtgcagccaactttcgttttt

SEQ ID NO: 194187 - DNA, 75 bp, synthetic construct
  source 1..75: mol_type = other DNA
gaactcatattattaacaacagaccttttgttatggcgttcatcatggccaacccttgcaactgccatacgtcag

SEQ ID NO: 194188 - DNA, 75 bp, synthetic construct
  source 1..75: mol_type = other DNA
atatattaatatggctcttaggattgatggggtctggttatgttgatcttatcaagcaattatgtataagggtat

SEQ ID NO: 194189 - DNA, 75 bp, synthetic construct
  source 1..75: mol_type = other DNA
aggtctagttggtgttttccttttcatttctattagtgctataaaaatacctgaatttttggagggtttttttga

SEQ ID NO: 194190 - DNA, 75 bp, synthetic construct
  source 1..75: mol_type = other DNA
gctttgggggtaatcctttgtgttgatcagggagatgagaaattaacaccagaagagagaaaatcccgaaaagac

SEQ ID NO: 194191 - DNA, 75 bp, synthetic construct
  source 1..75: mol_type = other DNA
gatcctcgaggcgtcggacagtccactccgacaataaactgccagcaatcagatacagagattcaggaaaacata

SEQ ID NO: 194192 - DNA, 75 bp, synthetic construct
  source 1..75: mol_type = other DNA
tggccgcttcttatatggtgggcgataaattagaagatatgcaggcagcggctgcggcgaacgtgggaacaaaag

SEQ ID NO: 194193 - DNA, 75 bp, synthetic construct
  source 1..75: mol_type = other DNA
gcaaaaaatattcacgcggcactacaaaacaataccgatgcagcaaggttactcaaccacccggatcgcaaatct

SEQ ID NO: 194194 - DNA, 75 bp, synthetic construct
  source 1..75: mol_type = other DNA
gaaatcatgtggccgtcatatttcgagccaggccgctatgaaaacctcccgaacgaggtttatcactccgccaac

SEQ ID NO: 194195 - DNA, 75 bp, synthetic construct
  source 1..75: mol_type = other DNA
taatggcgaagacatgactgagattgaggagaatatgccactcccgatttctggccaagagctgtccattcgctg

SEQ ID NO: 194196 - DNA, 75 bp, synthetic construct
  source 1..75: mol_type = other DNA
ccgtaccgcgcattatgattactggtccgataccgtgcgccgttctgtgctggtggactggtggattcgaaagcc

SEQ ID NO: 194197 - DNA, 75 bp, synthetic construct
  source 1..75: mol_type = other DNA
gcagcacgtattaacgtggaaagcggtgcccagattattgatatcaatatgggttgcccggctaaaaaagtgaat

SEQ ID NO: 194198 - DNA, 75 bp, synthetic construct
  source 1..75: mol_type = other DNA
cacacaggcagacgctcacggggattgccaggattgcgaagtctctgtatctactttgcggttcacacagcgtct

SEQ ID NO: 194199 - DNA, 75 bp, synthetic construct
  source 1..75: mol_type = other DNA
cagcaggcgctgcgcgatgtcgtcgcttacgcagtacagaacggtatcccggttccgaccttcgccgctgcggtt

SEQ ID NO: 194200 - DNA, 75 bp, synthetic construct
  source 1..75: mol_type = other DNA
cttatgccgtacagaatggtattccggtaccgaccttctctgccgcaattgcctactacgacagctaccgttccg

SEQ ID NO: 194201 - DNA, 75 bp, synthetic construct
  source 1..75: mol_type = other DNA
tcgcggcggttgctgaagacggagagccttgtgtcacctatatcggtgctgatggcgctggtcattatgtgaaga

SEQ ID NO: 194202 - DNA, 75 bp, synthetic construct
  source 1..75: mol_type = other DNA
acaaaggtactggtaagtggaccagccagagtgcactggatctcggtgagcctctgtcgctgatcactgaatcag

SEQ ID NO: 194203 - DNA, 75 bp, synthetic construct
  source 1..75: mol_type = other DNA
cttatgcagtacagaacggtattccggttccgaccttctccgcagcggttgcctattacgacagctaccgtgctg

SEQ ID NO: 194204 - DNA, 75 bp, synthetic construct
  source 1..75: mol_type = other DNA
acgccgtatcctgttaatggtgaaagcaggcgcgggcacagatgctgccatcgattccctgaagccgtaccttga

SEQ ID NO: 194205 - DNA, 75 bp, synthetic construct
  source 1..75: mol_type = other DNA
tacctcggtaaaatcgtctcctatgctcagggcttctcccagctgcgtgctgcttctgatgaatacaactgggat

SEQ ID NO: 194206 - DNA, 75 bp, synthetic construct
  source 1..75: mol_type = other DNA
cgttgaaaggtccttccattatgcctggtgggcagaaagaagcctatgaacttgttgcgccgatcctgaccaaaa

SEQ ID NO: 194207 - DNA, 75 bp, synthetic construct
  source 1..75: mol_type = other DNA
atctctccaacgaagaactggcgcagacgtttaccgagtggaataacggtgaactgagcagctacctgatcgaca

SEQ ID NO: 194208 - DNA, 75 bp, synthetic construct
  source 1..75: mol_type = other DNA
ctttaaacaaattgccgatgattaccagcaggcgctgcgtgatgtcgttgcttatgcagtacagaacggtatccc

SEQ ID NO: 194209 - DNA, 75 bp, synthetic construct
  source 1..75: mol_type = other DNA
ctctttctaatgaagagttggcgcaaaccttcaccgtatggaacgaaggcgagctgagcagctacctgatcgaca

SEQ ID NO: 194210 - DNA, 75 bp, synthetic construct
  source 1..75: mol_type = other DNA
ttttccgcgctggctgcatcattcgtgcgcagttcctgcaaaagatcactgatgcttatgcgcaaaacgctggca

SEQ ID NO: 194211 - DNA, 75 bp, synthetic construct
  source 1..75: mol_type = other DNA
acaaaggcactggtaaatggaccagtcagagttctctggacttgggcgaaccgctatctctgattaccgaatctg

SEQ ID NO: 194212 - DNA, 75 bp, synthetic construct
  source 1..75: mol_type = other DNA
cttatgtacaggtgagctgggagcaagcattaaaactgattcatgagcaacacgatcgcattcgcaaagctaacg

SEQ ID NO: 194213 - DNA, 75 bp, synthetic construct
  source 1..75: mol_type = other DNA
gctactttcatattatagtcatataaataaactggatgatgatttgatcaacaaagagcgtatgaagcatgtatg

SEQ ID NO: 194214 - DNA, 75 bp, synthetic construct
  source 1..75: mol_type = other DNA
aaatgcctgtgccggtaactcagcgttggtgtatatcgaaaaatatacgggcaatgcaccgaagttaacggcgtt

SEQ ID NO: 194215 - DNA, 75 bp, synthetic construct
  source 1..75: mol_type = other DNA
aaaaatatgcggttgccgatcgtgaaccaatcactattcacaccgaagatgctgctcgctttggtattgcgaatg

SEQ ID NO: 194216 - DNA, 75 bp, synthetic construct
  source 1..75: mol_type = other DNA
atcgtgaaccaatcactattcacaccgaagatgctgctcgctttggtattgcgaatggcgatctggtgcgtgtct

SEQ ID NO: 194217 - DNA, 75 bp, synthetic construct
  source 1..75: mol_type = other DNA
cacggggcgtaaaagggaaaacgtgaaagccgccaaaaataaaggcgtgttgagtattggaaaagacgaagacgt

SEQ ID NO: 194218 - DNA, 75 bp, synthetic construct
  source 1..75: mol_type = other DNA
acaacattatttccgatattgcatcaggtagcgatgttcccgcgattctcatcaaggaggaggctttctcgaatg

SEQ ID NO: 194219 - DNA, 75 bp, synthetic construct
  source 1..75: mol_type = other DNA
tgttgccgaaaatccaggcaagaaactggttcctcattacacggtaaaagaattcgtcgaatctcttgaaacccc

SEQ ID NO: 194220 - DNA, 75 bp, synthetic construct
  source 1..75: mol_type = other DNA
agagaaccgtatccttcgggaggagagggagatattaaaaaaggcagcaatatttttcgcagtacaaaagctgtg

SEQ ID NO: 194221 - DNA, 75 bp, synthetic construct
  source 1..75: mol_type = other DNA
ttaagcgtgatgcagttcgcatagcactcactagtggcttaacacgccgtcaagttgcgtcagatttaagtattg

SEQ ID NO: 194222 - DNA, 75 bp, synthetic construct
  source 1..75: mol_type = other DNA
ccggggattttgacctgacggatgaagccgttccgacggtgaagtctcccgatgccgaaacgctggtcacccgcc

SEQ ID NO: 194223 - DNA, 75 bp, synthetic construct
  source 1..75: mol_type = other DNA
atgttctcggcacagactggcgcggagttgcttaaggcaattttgaaaaccatcctggttggcagcgtgacgggg

SEQ ID NO: 194224 - DNA, 75 bp, synthetic construct
  source 1..75: mol_type = other DNA
cgccgccgctggcgcgtgcgctgtatcgacatgcggagatcggtcaacaaatcccgggtgactcaggaagccgat

SEQ ID NO: 194225 - DNA, 75 bp, synthetic construct
  source 1..75: mol_type = other DNA
ctcaaatgatttacatagtgcgctttgtttatgccggatgcggcgtgaacgccttatccggcctacaaaatcgtg

SEQ ID NO: 194226 - DNA, 75 bp, synthetic construct
  source 1..75: mol_type = other DNA
ggctcagcgtgattactttggtgcgcatacctataaacgtaccgataaagaaggtgtattccataccgagtggct

SEQ ID NO: 194227 - DNA, 75 bp, synthetic construct
  source 1..75: mol_type = other DNA
caatgtattgcagtttattggtagggctaataagcgcggcgcatcaggcaatcttacgcttgtcatcagtgacat

SEQ ID NO: 194228 - DNA, 75 bp, synthetic construct
  source 1..75: mol_type = other DNA
atcaacttgagcttgttaattactctaagcaaaatactcagtctattttggtattttcatctatcagggagctgg

SEQ ID NO: 194229 - DNA, 75 bp, synthetic construct
  source 1..75: mol_type = other DNA
ttttgcaaagagtaacattattcgtgaattgtataatcatgtcggttatgaatttaaatcatcggaaaaagattt

SEQ ID NO: 194230 - DNA, 75 bp, synthetic construct
  source 1..75: mol_type = other DNA
ttagtgaagcagaaatgaaatccattttgacactaatcacgagatttccatggaacgtggcaaaacctgttattt

SEQ ID NO: 194231 - DNA, 75 bp, synthetic construct
  source 1..75: mol_type = other DNA
tttttattataatactgacaacagtaattgcatttattttctttacctgtagccatcactacccaaaatcaccac

SEQ ID NO: 194232 - DNA, 75 bp, synthetic construct
  source 1..75: mol_type = other DNA
ttttcattgcgatatttattacgctaaccatattaatattatttccatttaattgtacttacaaaaaatcacctc

SEQ ID NO: 194233 - DNA, 75 bp, synthetic construct
  source 1..75: mol_type = other DNA
ggtatgcatattacaccggaatatgacttatcggtgttacgtactgctgacatggttatagttcctttctggcca

SEQ ID NO: 194234 - DNA, 75 bp, synthetic construct
  source 1..75: mol_type = other DNA
acaaagggactggcaaatggaccagccagagcgctctggatctcggggagccgctgtcgttgattacagagtctg

SEQ ID NO: 194235 - DNA, 75 bp, synthetic construct
  source 1..75: mol_type = other DNA
aaagtgcagtttatcgagaaagtccgtcgcgcattgtatctcggtaaaatcgtctcttatgcccagggtttctct

SEQ ID NO: 194236 - DNA, 75 bp, synthetic construct
  source 1..75: mol_type = other DNA
atgcctatgaactggtcgcaccgatcctgaccaaaattgcagccgttgccgaagatggcgagccctgtgtgacct

SEQ ID NO: 194237 - DNA, 75 bp, synthetic construct
  source 1..75: mol_type = other DNA
ttcgtcgtaaccgtgaactgtctgctgaaggtttcaattttatcggtaccggtgtctccggcggtgaagaggggg

SEQ ID NO: 194238 - DNA, 75 bp, synthetic construct
  source 1..75: mol_type = other DNA
tatctgggtaaaatcgtttcttacgctcagggtttctctcagctgcgcgcagcgtctgaagagtacaactgggat

SEQ ID NO: 194239 - DNA, 75 bp, synthetic construct
  source 1..75: mol_type = other DNA
tcgattccctcaagccttaccttgataaaggcgacataattattgatggcggcaacactttcttccaggacacca

SEQ ID NO: 194240 - DNA, 75 bp, synthetic construct
  source 1..75: mol_type = other DNA
tgcttcgcaagagtacaactgggatttgaattatggcgagctagcccaaattttccgcgcaggctgcattatccg

SEQ ID NO: 194241 - DNA, 75 bp, synthetic construct
  source 1..75: mol_type = other DNA
acgtcgtatcctgttaatggtgaaagcaggcgcgggcaccgatgctgccatcgattccctgaaaccttaccttga

SEQ ID NO: 194242 - DNA, 75 bp, synthetic construct
  source 1..75: mol_type = other DNA
tcgattccctgaagccttacctcgacataggggacatcatcattgatggcggcaacaccttcttcctggacacca

SEQ ID NO: 194243 - DNA, 75 bp, synthetic construct
  source 1..75: mol_type = other DNA
ctgaactacggcgagatcgccaaaattttccgtgcaggctgcattatccgtgctcagttcctgcagaaaattact

SEQ ID NO: 194244 - DNA, 75 bp, synthetic construct
  source 1..75: mol_type = other DNA
ggtaccgacgttctcagccgcgattgcttactacgacagctaccgttccgcagttctgccagctaacctgatcca

SEQ ID NO: 194245 - DNA, 75 bp, synthetic construct
  source 1..75: mol_type = other DNA
tatgcgctgttgaaaggcggtctggcgctctccaatgaagagttggcacaaaccttcactgaatggaacgaaggc

SEQ ID NO: 194246 - DNA, 75 bp, synthetic construct
  source 1..75: mol_type = other DNA
ggtaacaccttcttccaggataccattcgtcgtaaccgtgagctgtctgctgaaggctttaacttcatcggtacc

SEQ ID NO: 194247 - DNA, 75 bp, synthetic construct
  source 1..75: mol_type = other DNA
tctgctaaccagataaccctgaccgtcgtggacagctatggtaacccgttgcaggggcaagaagttacgctgact

SEQ ID NO: 194248 - DNA, 75 bp, synthetic construct
  source 1..75: mol_type = other DNA
tttgtggcaataacgcccaaccctttagcgccgatgtgtttatcgcccacttcggcccggcgggtgtaacagcgg

SEQ ID NO: 194249 - DNA, 75 bp, synthetic construct
  source 1..75: mol_type = other DNA
taaacataccgttcagagcctgatcattgagtcgctgaaagagaaagataaaccgtttctctatctcgacaccca

SEQ ID NO: 194250 - DNA, 75 bp, synthetic construct
  source 1..75: mol_type = other DNA
gatctgatgctgccgatcagtaatttgtgggcgaaacgattgcagggaatgggctgcccggcggcgaaaattgcc

SEQ ID NO: 194251 - DNA, 75 bp, synthetic construct
  source 1..75: mol_type = other DNA
agtatgaaatcccgctggcgcagaccgtggcgattggcgatggtgccaacgacctgccgatgatcaaagcggcag

SEQ ID NO: 194252 - DNA, 75 bp, synthetic construct
  source 1..75: mol_type = other DNA
tcggcatcgggccgtgggagcgccgtctgcgcaccctgattgaacagtatcagctggaagatcacgtagaaatgc

SEQ ID NO: 194253 - DNA, 75 bp, synthetic construct
  source 1..75: mol_type = other DNA
gatagacgccaacgcctccggctggctggtggcggagaacgacgccccggcactggcgggcaaactcagcgaact

SEQ ID NO: 194254 - DNA, 75 bp, synthetic construct
  source 1..75: mol_type = other DNA
tcttgaccattatgattccataaccacaggtcatattagccaggcacttcattatctcaatatcggaagattgcc

SEQ ID NO: 194255 - DNA, 75 bp, synthetic construct
  source 1..75: mol_type = other DNA
ttgtcgcactgcaaaaaggcgatacgcaaaacacccacgcggcatggacgaaatataaccttgccgccagaaccc

SEQ ID NO: 194256 - DNA, 75 bp, synthetic construct
  source 1..75: mol_type = other DNA
tcatgccgatgtctttatcgctcattttggccctgcgggggtaaccgcagcaaaactacgcgaactgggtgtcat

SEQ ID NO: 194257 - DNA, 75 bp, synthetic construct
  source 1..75: mol_type = other DNA
gttaatctcggttctgattttgatgccagcaccatcaaaaaaggcgacccggtatacgttgtcgtctccactgat

SEQ ID NO: 194258 - DNA, 75 bp, synthetic construct
  source 1..75: mol_type = other DNA
tttggccctgcgggggtaaccgcagcaaaactacgggaactgggtgtcattcgcggcaaaatcgccactatcttc

SEQ ID NO: 194259 - DNA, 75 bp, synthetic construct
  source 1..75: mol_type = other DNA
gcgccggtcgtcaaacgtgcgcgcgataaagtcgaacatgattttaaccagcaggtgatcaatcgagaactcgcc

SEQ ID NO: 194260 - DNA, 75 bp, synthetic construct
  source 1..75: mol_type = other DNA
gtgattcgtctggcaggttcgcttaccgcgcgggctacacgcctggctcatgaagcacaactggatgtcgcgccg

SEQ ID NO: 194261 - DNA, 75 bp, synthetic construct
  source 1..75: mol_type = other DNA
cgtgcatcggtttcaccatggggattaacggcgaatacgatcaggtggcgtattacggtcgtggaccgggcgaaa

SEQ ID NO: 194262 - DNA, 75 bp, synthetic construct
  source 1..75: mol_type = other DNA
cggttattgccccaccggtgtttgacttcgggatgcgctgcacctacatctggcgcatcgctgccgatggccagg

SEQ ID NO: 194263 - DNA, 75 bp, synthetic construct
  source 1..75: mol_type = other DNA
ggggaacggaccaggtgggctgacggagtaccagaacgtcttctataagcacgattgcattcagggacattatgt

SEQ ID NO: 194264 - DNA, 75 bp, synthetic construct
  source 1..75: mol_type = other DNA
gcggatcggctggaagccctgggggcgattggcctggcgcgcgtgtttgccgtttcaggggcattgggcgtggcg

SEQ ID NO: 194265 - DNA, 75 bp, synthetic construct
  source 1..75: mol_type = other DNA
atattgtcaagcggggtgagatgttgcggcagcacgattttatcgacgacgcgggcataacagctaccggtaaaa

SEQ ID NO: 194266 - DNA, 75 bp, synthetic construct
  source 1..75: mol_type = other DNA
tggccagtaatcgtaaaggccgttttttgcaaactgttgcgggggctacccccttaatgaaggattggattagct

SEQ ID NO: 194267 - DNA, 75 bp, synthetic construct
  source 1..75: mol_type = other DNA
tctggcggagaagctaaggcgtcgtatgagttcggcgcagggttcttttccacgaatttgcacagcgagaataag

SEQ ID NO: 194268 - DNA, 75 bp, synthetic construct
  source 1..75: mol_type = other DNA
ggctggggattgcctaccatgccaagccaaaagtgaatgaaaaggcggaagtcaccatccgtcacgctgacctga

SEQ ID NO: 194269 - DNA, 75 bp, synthetic construct
  source 1..75: mol_type = other DNA
cgctgacgccaatattctgcaacaggtgcgtgaaaatctgccgctgatgccaggcttaacgcaactggtgctcaa

SEQ ID NO: 194270 - DNA, 75 bp, synthetic construct
  source 1..75: mol_type = other DNA
tgcatattacgctgccgcaactggacgcccgtgaagcgttcctcaacattatggtgaccaaagattcccgcaccc

SEQ ID NO: 194271 - DNA, 75 bp, synthetic construct
  source 1..75: mol_type = other DNA
tgcgcgtcgaaggtgaaacgctcgcgacgcagcagattaaactgcgcgacgttgcgccgaacagcgaagccccct

SEQ ID NO: 194272 - DNA, 75 bp, synthetic construct
  source 1..75: mol_type = other DNA
tttattttcgtgatccagttaaagtaaatgcatttacctgctactttttagtaaaaattttactaaactccccag

SEQ ID NO: 194273 - DNA, 75 bp, synthetic construct
  source 1..75: mol_type = other DNA
ggcaaggggcggcaaaagcctattctttcgatgaagcaattgtcgatagcaatggcaaaaaactcgatatgcgct

SEQ ID NO: 194274 - DNA, 75 bp, synthetic construct
  source 1..75: mol_type = other DNA
agagaaaaaaaccggttgtctggtgtgcctggatagctgcccggtcggtattgtcagcaatgcgacatacactta

SEQ ID NO: 194275 - DNA, 75 bp, synthetic construct
  source 1..75: mol_type = other DNA
agagaagaaaacgggttgcctggtgtgtctggatagctgcccggtcggcatcgtcagcaatgcaacatacactta

SEQ ID NO: 194276 - DNA, 75 bp, synthetic construct
  source 1..75: mol_type = other DNA
aagaagaagaacaataacaagcacggtaaccatagaaaaataacatcagaaaaaaacattccggacacatcacaa

SEQ ID NO: 194277 - DNA, 75 bp, synthetic construct
  source 1..75: mol_type = other DNA
agggacccgccgcaacgacggagagcgcgtgcgcgaaacggcgttgccccttacatcccggcggccttttgccgg

SEQ ID NO: 194278 - DNA, 75 bp, synthetic construct
  source 1..75: mol_type = other DNA
ggaaaaaaggactggctgcgctgtgtttactggcagccgcggggcttggtggctgcgatcaaaaagagaatacga

SEQ ID NO: 194279 - DNA, 75 bp, synthetic construct
  source 1..75: mol_type = other DNA
gaaagcactggcgcactatccgggatgggaaaatccatgcgattgatttagctccagaggatgttgttgctacgg

SEQ ID NO: 194280 - DNA, 75 bp, synthetic construct
  source 1..75: mol_type = other DNA
ggcaatatgccggaaggctacattggctaccgccagctggcggcgaaatgcggcctgactgaagccaaatgtcgc

SEQ ID NO: 194281 - DNA, 75 bp, synthetic construct
  source 1..75: mol_type = other DNA
atgacgacactcatttatttgcaaattcctgttcctgaaccgattcctggagatcctgttccagtgcctgatccg

SEQ ID NO: 194282 - DNA, 75 bp, synthetic construct
  source 1..75: mol_type = other DNA
aaattcaaaggcaatgcctcggttctcccggcggataacacgctggcaacggttacctttaaaatcaccgaataa

SEQ ID NO: 194283 - DNA, 75 bp, synthetic construct
  source 1..75: mol_type = other DNA
tgctggtgcaaattaatggtcgtttcctcaccgacgacactcgtcacggtattgtgtttaaagatggctccaacg

SEQ ID NO: 194284 - DNA, 75 bp, synthetic construct
  source 1..75: mol_type = other DNA
ctctctcccgaattcaccgcccggctggtggaccgctggcgcgaactggagaatgcccgggtacagttaaaatca

SEQ ID NO: 194285 - DNA, 75 bp, synthetic construct
  source 1..75: mol_type = other DNA
tttgctcagcaaatcattggtgtgcaggaaacatcaccggagcgagttatgcatatcgatctcgattatgtttat

SEQ ID NO: 194286 - DNA, 75 bp, synthetic construct
  source 1..75: mol_type = other DNA
ttcgtgccgctggcagatggtgataccgcagacaaggtgaaggggatctacgtgcgcccttatccgaccacttcg

SEQ ID NO: 194287 - DNA, 75 bp, synthetic construct
  source 1..75: mol_type = other DNA
gtggcgggggtgaaaaatctggaggattttgaagtgcgcagcccgctgacgtcggttcaggcgggggacagtgag

SEQ ID NO: 194288 - DNA, 75 bp, synthetic construct
  source 1..75: mol_type = other DNA
cacagttaatcacgcagacacagcaggatatcagccagcgtctgcccggttcgcagccgggtgtgaatgaaacca

SEQ ID NO: 194289 - DNA, 75 bp, synthetic construct
  source 1..75: mol_type = other DNA
cctggtacgtggttacgtcacggtaaacatcggcgcggatgcatccagcgttgcgctgcatggcccggtctatat

SEQ ID NO: 194290 - DNA, 75 bp, synthetic construct
  source 1..75: mol_type = other DNA
tgccagcgggcatcgccggggcaatttctcgtccgcaggatctgacggttgaacctcaactcctggactcctcca

SEQ ID NO: 194291 - DNA, 75 bp, synthetic construct
  source 1..75: mol_type = other DNA
cgccatgaagcgtggctacgtgaccgttaatctcggttctgattttgatgtcagcaccatcaaaaaaggcgaccc

SEQ ID NO: 194292 - DNA, 75 bp, synthetic construct
  source 1..75: mol_type = other DNA
ccgctgttcgtacagatcggcgaagtcatcaaagtggatacccgctctggtgagtatgtttctcgcgtgaagtaa

SEQ ID NO: 194293 - DNA, 75 bp, synthetic construct
  source 1..75: mol_type = other DNA
aaggccaggcatttgctcgcgttaaactgcgtcgtctgctgaccggtactcgcgtagaaaaaaccttcaaatcta

SEQ ID NO: 194294 - DNA, 75 bp, synthetic construct
  source 1..75: mol_type = other DNA
ccaaattcgggaagctcaccgtgggggaaaaccgctacctaataaagcggttttactctcctttgatgatggatt

SEQ ID NO: 194295 - DNA, 75 bp, synthetic construct
  source 1..75: mol_type = other DNA
cacaattaatcacgcagacacagcaggatatcagccagcgtcttcccggttcgcagccgggcgtgaatgaaacca

SEQ ID NO: 194296 - DNA, 75 bp, synthetic construct
  source 1..75: mol_type = other DNA
cctctcggggggacgggccggttcagctgatgctgaccacggatgcggggatcaaggaaggtgtgcttctccagc

SEQ ID NO: 194297 - DNA, 75 bp, synthetic construct
  source 1..75: mol_type = other DNA
ttcgtgctggtcttaaaatcatgttagatggcgaaccttatgcggttgaagccagtgagttcgtgaaaccgggta

SEQ ID NO: 194298 - DNA, 75 bp, synthetic construct
  source 1..75: mol_type = other DNA
taccaggaataaacccacgacggcgagtctggctgtcaatggctgggaacgtgatgaggctaccggacggatgcg

SEQ ID NO: 194299 - DNA, 75 bp, synthetic construct
  source 1..75: mol_type = other DNA
tgaaggacggcgcggggaagtcggtaccgggatgcacgatagagctgaaagcgcgacgtaccaccgaaacggtga

SEQ ID NO: 194300 - DNA, 75 bp, synthetic construct
  source 1..75: mol_type = other DNA
agatgaattttacaccgataaaggcgaatggttgacactgaagcaactccgggagcgtgatgctcaggcattcag

SEQ ID NO: 194301 - DNA, 75 bp, synthetic construct
  source 1..75: mol_type = other DNA
gctctcagaaagcagccacattaaccggtaatacattgccaggaacatggcgggtctgtagtccacttcaggtca

SEQ ID NO: 194302 - DNA, 75 bp, synthetic construct
  source 1..75: mol_type = other DNA
cgaaaacaaaggcagaagaggctgctgcaggaggtggtgttcccggtccgaaaggagataaaggggacacggggc

SEQ ID NO: 194303 - DNA, 75 bp, synthetic construct
  source 1..75: mol_type = other DNA
aatgcgaggggaccgaagggggataagggagacacggggccacagggtattcccgggccaaaaggcgataccggc

SEQ ID NO: 194304 - DNA, 75 bp, synthetic construct
  source 1..75: mol_type = other DNA
gcagacggcagccctatttaaaatgcggcatgctacttgctcttgttactggacaacgtttaggcgatatgaacc

SEQ ID NO: 194305 - DNA, 75 bp, synthetic construct
  source 1..75: mol_type = other DNA
gataagggagaagagaaagctcacgtcggtgaaccgcaggttaccgttcatgttgtgaaaacggccccgttagaa

SEQ ID NO: 194306 - DNA, 75 bp, synthetic construct
  source 1..75: mol_type = other DNA
tccacgccaaagctgggtgcctcttttgttgattatctggtcacactgcatcaaaacggtggcaaccaacagggc

SEQ ID NO: 194307 - DNA, 75 bp, synthetic construct
  source 1..75: mol_type = other DNA
agagaagggcgaaaaaggcgagccgggaggaccggatgcgacgacggcacagaagggaattgtgcagttaagcag

SEQ ID NO: 194308 - DNA, 75 bp, synthetic construct
  source 1..75: mol_type = other DNA
tccagaaaaatgaccgaccgatacaatgatgatcgtggtaaagactggattatcgtagatatcaaaacagcatag

SEQ ID NO: 194309 - DNA, 75 bp, synthetic construct
  source 1..75: mol_type = other DNA
agcacaacacgcaggacatgttccgccaggatttaacccagcgcaggcaacaaaacaaccgcgaaatcgagtaaa

SEQ ID NO: 194310 - DNA, 75 bp, synthetic construct
  source 1..75: mol_type = other DNA
ggcaatgggcaaagcggacggatgcctggagaaagcgaaaaacggtgacgatatcccggataaggtgcagtttct

SEQ ID NO: 194311 - DNA, 75 bp, synthetic construct
  source 1..75: mol_type = other DNA
tggtaaaacacttcaaccgtagcggtcagttgcgttactaccccggttcgccgttgattgctcgtcagttactgc

SEQ ID NO: 194312 - DNA, 75 bp, synthetic construct
  source 1..75: mol_type = other DNA
tatctggcagcaggacgatttgcctgcagagctggaggcgtacatcaatgtggtaaaacacttcaaccgtagcgg

SEQ ID NO: 194313 - DNA, 75 bp, synthetic construct
  source 1..75: mol_type = other DNA
gattaacccgccgtggaagctggaacagcagatgaataacgtgctgccgtggttgcacagcaaactggttccggc

SEQ ID NO: 194314 - DNA, 75 bp, synthetic construct
  source 1..75: mol_type = other DNA
cgtggctggcaggcgaaagatgtttttctgccggatgattatctgattaaacagcgatttccgggaatgacgccg

SEQ ID NO: 194315 - DNA, 75 bp, synthetic construct
  source 1..75: mol_type = other DNA
caccttaccaatgacaataccgggcgatgtggagcaggcgatgaaaacgctgcaaacttttccgggtatcgggcg

SEQ ID NO: 194316 - DNA, 75 bp, synthetic construct
  source 1..75: mol_type = other DNA
ttgctgcgttctgaatttcagaaagacagccgtgcgcgcgtggaaaaagccgacggtttccagcagcttaaggcc

SEQ ID NO: 194317 - DNA, 75 bp, synthetic construct
  source 1..75: mol_type = other DNA
tttgaccagccttactggatgatgaaggcatcactgcatgcgggattcaataaggtcatcacggatgtcggaccg

SEQ ID NO: 194318 - DNA, 75 bp, synthetic construct
  source 1..75: mol_type = other DNA
gtctcggtgtggctaaacaaacagttaaccgttggatcagagaaaaaggctggaagacagaaaaattccccggtg

SEQ ID NO: 194319 - DNA, 75 bp, synthetic construct
  source 1..75: mol_type = other DNA
ggcaggtggtttgcatgctgttggggcatttgtctttgctcaggccagtataagtaacagtgaaaaatatgccgc

SEQ ID NO: 194320 - DNA, 75 bp, synthetic construct
  source 1..75: mol_type = other DNA
caaaattctgcaaattgaactggcggtgctgccggatagcgaccgccgtggtatgaccgcttccggcatgattgt

SEQ ID NO: 194321 - DNA, 75 bp, synthetic construct
  source 1..75: mol_type = other DNA
gaaggggatacgggagctgcaggcccggcaggcgcacaggggccaaaaggtgacaaaggcgatccgggagaagca

SEQ ID NO: 194322 - DNA, 75 bp, synthetic construct
  source 1..75: mol_type = other DNA
aaacaagcccacaacagcaagcctgacagtaaatggctgggagcgtgatgaagtaaccggtcgtttgcggcaatg

SEQ ID NO: 194323 - DNA, 75 bp, synthetic construct
  source 1..75: mol_type = other DNA
cacggtattgatatctccagtcgggacgttctcaaccactacactcccgaatatcagcaactgttccgccgtggc

SEQ ID NO: 194324 - DNA, 75 bp, synthetic construct
  source 1..75: mol_type = other DNA
aaatacaaccttgccgccagaacccgttggttacaggacgaacctacgggcaaagtggcgaagctgcgccaccgc

SEQ ID NO: 194325 - DNA, 75 bp, synthetic construct
  source 1..75: mol_type = other DNA
agaccctacaactcctcgacagcatgctggacgggctaaacggcaaaacacgtgaagcgtttctgctttcgcaac

SEQ ID NO: 194326 - DNA, 75 bp, synthetic construct
  source 1..75: mol_type = other DNA
aaactccatgcttctggcagttgtcaccgggcaacggcgcggcgatatagccaaaatgaagttctctgatgtctg

SEQ ID NO: 194327 - DNA, 75 bp, synthetic construct
  source 1..75: mol_type = other DNA
tctgtatgaggggcaaggcatcaatacccggcaactactaggtcactcatcagacaggatgacagcgcagtatca

SEQ ID NO: 194328 - DNA, 75 bp, synthetic construct
  source 1..75: mol_type = other DNA
cctgcgcaccctcatcgaacaatatcaactggaagatgtggtagagatgccgggctttaaaccgagccacgaagt

SEQ ID NO: 194329 - DNA, 75 bp, synthetic construct
  source 1..75: mol_type = other DNA
tgtcgtgactatgtagtcagcccataccttgtacatttttttcgtactacttcacaggctgaacgtggcgcgcag

SEQ ID NO: 194330 - DNA, 75 bp, synthetic construct
  source 1..75: mol_type = other DNA
aagcaccaaaaagacaacatttttcttttacgtgacggaaaaaatgaaagatatgaatacatggcaacaaaaaat

SEQ ID NO: 194331 - DNA, 75 bp, synthetic construct
  source 1..75: mol_type = other DNA
gctgtttttatgcaaccggggataatttacagggggcgcggcaactgggggtacgtaccgaagccattcggattc

SEQ ID NO: 194332 - DNA, 75 bp, synthetic construct
  source 1..75: mol_type = other DNA
tctggccatcagtgacaggatcgcaaccagcaaagggaaagcaatcacaacgtcaacttggttagatcgctatca

SEQ ID NO: 194333 - DNA, 75 bp, synthetic construct
  source 1..75: mol_type = other DNA
gtatatcgccgtcggacagccgagaatggcgcaagtagttcgttccgtcctgattgatgtattcaaggaggcgca

SEQ ID NO: 194334 - DNA, 75 bp, synthetic construct
  source 1..75: mol_type = other DNA
atcacaggctgaacgtggcgcacaggtaaaagctaatacactaacgatgaactttagcaaggcacgtgatctggc

SEQ ID NO: 194335 - DNA, 75 bp, synthetic construct
  source 1..75: mol_type = other DNA
tggtgatggagtggcgcgaggaagcctataccctcgatgaactggctgattatctcgatttgagcgcctcagagc

SEQ ID NO: 194336 - DNA, 75 bp, synthetic construct
  source 1..75: mol_type = other DNA
atgaaggtcggcttcttcttattgaaatttccgctgtcatcggaaaccttcgttctcaaccaaatcactgcgttt

SEQ ID NO: 194337 - DNA, 75 bp, synthetic construct
  source 1..75: mol_type = other DNA
cgcgaaaaagtcgaacacgattttaaccagcaggtgattaatcgagaactcgccagcttgttgcaggctttatag

SEQ ID NO: 194338 - DNA, 75 bp, synthetic construct
  source 1..75: mol_type = other DNA
gcgcggatggcgatatggaaggcattccggtggcgctgatggaagcgatggcggtcggtattccggtggtttcta

SEQ ID NO: 194339 - DNA, 75 bp, synthetic construct
  source 1..75: mol_type = other DNA
gtattcttgctcaatgggaataaacaacttcatttcaaaaaccttgctcagcgctcttgagaacatcaaaaaagg

SEQ ID NO: 194340 - DNA, 75 bp, synthetic construct
  source 1..75: mol_type = other DNA
tcgcggaacctgattttgtctgccatttgcggtcaggtcgcaacaccattttatgccgatgtctttatcgctcat

SEQ ID NO: 194341 - DNA, 75 bp, synthetic construct
  source 1..75: mol_type = other DNA
ctggtgcctgagaacgatgctcgcgcactggcgcaacgcctggcggcatttagccaactggacaccaacgaactg

SEQ ID NO: 194342 - DNA, 75 bp, synthetic construct
  source 1..75: mol_type = other DNA
ggggctatccagattagcgggatggccgacagtgacgacggtcgacaacaaccaagttcgtggcgagggcgcagc

SEQ ID NO: 194343 - DNA, 75 bp, synthetic construct
  source 1..75: mol_type = other DNA
agatctgttcggcggttcgctttccttcattaacgcggatcaaattgtccaactccttcgggctgtagcagccaa

SEQ ID NO: 194344 - DNA, 75 bp, synthetic construct
  source 1..75: mol_type = other DNA
tatgtggctgatacgcacacgccagaaattcaggctgcacgcggtcgcaagggcggttctaagtctaagcgcagc

SEQ ID NO: 194345 - DNA, 75 bp, synthetic construct
  source 1..75: mol_type = other DNA
tttggcccggcgggggtaaccgcagcaaaactccgcgaactgggtgtcattcgcggcaaaattgccaccattttc

SEQ ID NO: 194346 - DNA, 75 bp, synthetic construct
  source 1..75: mol_type = other DNA
gcatttcgctatcgcatcctcggcattggcccgtgggaacgacgcctgcgcaccctcatcgaacaatatcaactg

SEQ ID NO: 194347 - DNA, 75 bp, synthetic construct
  source 1..75: mol_type = other DNA
cacggcattgatatctccagtcgggaagtgctcaaccattacactcccgaatatcaacaactgtttcgccgtggc

SEQ ID NO: 194348 - DNA, 75 bp, synthetic construct
  source 1..75: mol_type = other DNA
tgtattttcggtggaaggtggtaaatcaattcgtgcttatcatgaaattactactaccgacgaatcaggggtaat

SEQ ID NO: 194349 - DNA, 75 bp, synthetic construct
  source 1..75: mol_type = other DNA
tgcaggcggcattaccgggatgcgacggattgccgattttgcatcgctttatcaggtacgtaccggttcgcatgg

SEQ ID NO: 194350 - DNA, 75 bp, synthetic construct
  source 1..75: mol_type = other DNA
gattattaatcggcttgatgtgaagtttgacaacgaatcactattacgcgcggcggggtatcataaaaatggaaa

SEQ ID NO: 194351 - DNA, 75 bp, synthetic construct
  source 1..75: mol_type = other DNA
tccctatcagcggagggataaaactttactctgatattttagggccggacccgtcgattattccggggaaaataa

SEQ ID NO: 194352 - DNA, 75 bp, synthetic construct
  source 1..75: mol_type = other DNA
taggttatgaaggcgatataaagaacgatgaagcagggcttgataagataagcgtggtaacgaaatcggtagtgc

SEQ ID NO: 194353 - DNA, 75 bp, synthetic construct
  source 1..75: mol_type = other DNA
gaattgcagcggaaacaatcgagcaaagaggtaaacaaaacggctacgacagaaaagaggaaaaatcagcgccaa

SEQ ID NO: 194354 - DNA, 75 bp, synthetic construct
  source 1..75: mol_type = other DNA
tctgggtgccaaactttggcgttcaggagtacatgggctattccgaacaaatgcttgaagtcttcccgcacagct

SEQ ID NO: 194355 - DNA, 75 bp, synthetic construct
  source 1..75: mol_type = other DNA
tgcccttctcagttatcttattaatatccatatacggactgttaaaagccctgcgtcgggatttgaccaagcgtg

SEQ ID NO: 194356 - DNA, 75 bp, synthetic construct
  source 1..75: mol_type = other DNA
tctgattgccggggggctgggtgcattgcaaactgtaacaatagcaagcgcattacctttttctgttatcttatt

SEQ ID NO: 194357 - DNA, 75 bp, synthetic construct
  source 1..75: mol_type = other DNA
tggggtggcaaacacgcccgtctggcagcgaattttctgggcattgctcatgggcgttgttgctattgccctgct

SEQ ID NO: 194358 - DNA, 75 bp, synthetic construct
  source 1..75: mol_type = other DNA
gacgatcgtattcgtcttgaagtcgatttgggcaacgtgaaccgccccgggtttcctggagagtgttttatctgt

SEQ ID NO: 194359 - DNA, 75 bp, synthetic construct
  source 1..75: mol_type = other DNA
tgccgttaaattgcggctgtaagaatgtcactatatccggcggcacgatcgccgccagcgggataacgctaaatg

SEQ ID NO: 194360 - DNA, 75 bp, synthetic construct
  source 1..75: mol_type = other DNA
cggtgcaggtaattctgatcgtggtcatcacggggttagcgacgatttcagtggtgtccggtctggataagggaa

SEQ ID NO: 194361 - DNA, 75 bp, synthetic construct
  source 1..75: mol_type = other DNA
cggaagagtatcgcctgtgtaatgactactggaaaaagcgcctcgttaaccgtaagtatgaccgcctgattatca

SEQ ID NO: 194362 - DNA, 75 bp, synthetic construct
  source 1..75: mol_type = other DNA
ccggcgtcagacgctgattgtcacccagacaaacgcggatgcaatggccataaatgccggcattcatgaccgtct

SEQ ID NO: 194363 - DNA, 75 bp, synthetic construct
  source 1..75: mol_type = other DNA
acagcttaacttctcaaaaacgctgtttcttatcgatgaaagctccatggtgggcaaccgggacatggctgacac

SEQ ID NO: 194364 - DNA, 75 bp, synthetic construct
  source 1..75: mol_type = other DNA
cacagaaagcggttattgccacatttaatcatgacacttcacggaatctggatccgcaacttcatacccatgctt

SEQ ID NO: 194365 - DNA, 75 bp, synthetic construct
  source 1..75: mol_type = other DNA
atcacacatccgcactttggcgataaaccggtaaaggtgttcgctcttagggtaaataacagcactgaatgtcaa

SEQ ID NO: 194366 - DNA, 75 bp, synthetic construct
  source 1..75: mol_type = other DNA
atcacacatccgcactttggcgataaaccggtaaaggtgttcgctcttaaggtaaatagcagcactgaatgtcaa

SEQ ID NO: 194367 - DNA, 75 bp, synthetic construct
  source 1..75: mol_type = other DNA
tgaagtgaaaacaatcacacatccgcacttcggcgataagccggtaaaggtgttcgcgataaaggtaaatattga

SEQ ID NO: 194368 - DNA, 75 bp, synthetic construct
  source 1..75: mol_type = other DNA
atgctgagtattgctcccattgctggtagtggagccggctactataccgcgcaggataactactattttctgggc

SEQ ID NO: 194369 - DNA, 75 bp, synthetic construct
  source 1..75: mol_type = other DNA
aaccggaacaggctgttttgtcaggagaggccggagggtattctcagcgggagacatcgtcttcatccacttctg

SEQ ID NO: 194370 - DNA, 75 bp, synthetic construct
  source 1..75: mol_type = other DNA
atggctaatctgcaactggcagtgaacggcgaatacttcgaccagatgaagcggggcgagaaaacggaagagtat

SEQ ID NO: 194371 - DNA, 75 bp, synthetic construct
  source 1..75: mol_type = other DNA
ccggaaaaatggtggcagccgcttttaaccatgacacctcgcgggagctggacccgcaaattcacacgcatcttc

SEQ ID NO: 194372 - DNA, 75 bp, synthetic construct
  source 1..75: mol_type = other DNA
tatgcatctggattacggctatgccggtacggcacaccgtgcccagggggccagcgaggcctttgtgatagccct

SEQ ID NO: 194373 - DNA, 75 bp, synthetic construct
  source 1..75: mol_type = other DNA
gtggaggctgaaccgggcagtattgccctggcccgtgccgggattgagcaggccatcagcagcggcgaactggtg

SEQ ID NO: 194374 - DNA, 75 bp, synthetic construct
  source 1..75: mol_type = other DNA
gttactgtcacatattttcagcgagatcattatggtcgtattctcgggcaggtttatgcaccagacggaatgaat

SEQ ID NO: 194375 - DNA, 75 bp, synthetic construct
  source 1..75: mol_type = other DNA
accgtcacatattttcagcgagatcgttatggtcgtattctcgggcaggtttatgcaccagatggaatgaatgtt

SEQ ID NO: 194376 - DNA, 75 bp, synthetic construct
  source 1..75: mol_type = other DNA
ggtttatgcaccagacggaatgaatgttaatcagtttatggtccgggccggggctgcctgggtatatgagcagta

SEQ ID NO: 194377 - DNA, 75 bp, synthetic construct
  source 1..75: mol_type = other DNA
aggaatcggcaaaagcattaacccaacgctgggatgactggttcgccgatccgattgaccttgccgacgcccgtg

SEQ ID NO: 194378 - DNA, 75 bp, synthetic construct
  source 1..75: mol_type = other DNA
tggctgctgccaacgctttcctggcggatgtgcgggcaggggcgtttaacgacctttgcgcggcgtttgtcaggc

SEQ ID NO: 194379 - DNA, 75 bp, synthetic construct
  source 1..75: mol_type = other DNA
gaagaaatcacctccggcgatctgattgtcgatggcctgaaggttaacgatccgaaagttgacgagcgcctgatt

SEQ ID NO: 194380 - DNA, 75 bp, synthetic construct
  source 1..75: mol_type = other DNA
aatatatctgaaacagttgagatggttgtcatagctttattaatgatactaatgactctgtccttttatctttgt

SEQ ID NO: 194381 - DNA, 75 bp, synthetic construct
  source 1..75: mol_type = other DNA
atcctgctggtcactggttttattctttacaggacttactcgacaatcctgtatttatggtttctttctttgttt

SEQ ID NO: 194382 - DNA, 75 bp, synthetic construct
  source 1..75: mol_type = other DNA
ctggctgacctcagatgccgctgtggatgaggccctgctcatcaacgaatacacctttaccgaagccggtctacg

SEQ ID NO: 194383 - DNA, 75 bp, synthetic construct
  source 1..75: mol_type = other DNA
tgatatggaaaagctgattagcgcgtacagacgtatgctgcgacaggggaatcatgcgctgacggtaattgttgg

SEQ ID NO: 194384 - DNA, 75 bp, synthetic construct
  source 1..75: mol_type = other DNA
atcactggttgcaggaaaaacggttaccgtcacatattttcagcgagatcgttatggtcgtattctcgggcaggt

SEQ ID NO: 194385 - DNA, 75 bp, synthetic construct
  source 1..75: mol_type = other DNA
ggcagctgcgccgtatcgcatgctgccagatgacattaatctctggtatgtccgaaataaagatggcggcatggt

SEQ ID NO: 194386 - DNA, 75 bp, synthetic construct
  source 1..75: mol_type = other DNA
gtttgcttaacggaccacaggtcgataccagcaaagccggtgtggttgccagtcaggatcaggtggacgatttgt

SEQ ID NO: 194387 - DNA, 75 bp, synthetic construct
  source 1..75: mol_type = other DNA
atatgccgattcagcttacattgagcctgagctgaataagctattccgaacgctggagaaggagcaattctttca

SEQ ID NO: 194388 - DNA, 75 bp, synthetic construct
  source 1..75: mol_type = other DNA
cctttcgacggtcagcgcctcaaggaaacacacaagcgcatttttgctggcatctatccatgggccggagaatac

SEQ ID NO: 194389 - DNA, 75 bp, synthetic construct
  source 1..75: mol_type = other DNA
caacaacgctgggatcagggataaaaaacagcttgaagagtttgagcgcgacacagtagcgcttaacttatcgca

SEQ ID NO: 194390 - DNA, 75 bp, synthetic construct
  source 1..75: mol_type = other DNA
tttgatgagaagctggcggcgaaatatccgtatgatccggcgtatctccccgttgcgcgtctggaagacggtaca

SEQ ID NO: 194391 - DNA, 75 bp, synthetic construct
  source 1..75: mol_type = other DNA
ccggggctgggtatttctttcgatgagaaactggcggcgaaatatccgtatgacccggcgtatctccccgtcgca

SEQ ID NO: 194392 - DNA, 75 bp, synthetic construct
  source 1..75: mol_type = other DNA
aattagatgctttgcatccattcagggaaggaaacagccggacgctgagacagttcacggcagatctggcgttaa

SEQ ID NO: 194393 - DNA, 75 bp, synthetic construct
  source 1..75: mol_type = other DNA
caattgcggtaggtgaagtctttaacagcatctgggactgcaaacagctgattgaagaacaactcatcgactata

SEQ ID NO: 194394 - DNA, 75 bp, synthetic construct
  source 1..75: mol_type = other DNA
cgcttcgatgaaggttatatgcacccaggcgatgaaccggggctgggtatttctttcgatgagaaactggcggcg

SEQ ID NO: 194395 - DNA, 75 bp, synthetic construct
  source 1..75: mol_type = other DNA
gcccgcgatcgtttgtactacgtcgtgcagatgactgcccaggctgcggagcgtgcgctgaacagtgttgaggcg

SEQ ID NO: 194396 - DNA, 75 bp, synthetic construct
  source 1..75: mol_type = other DNA
ggtaaaagcattgaagattatcgcatgttctggatggaagacccgacgcctgcagaaaaccaggaatgcttccgt

SEQ ID NO: 194397 - DNA, 75 bp, synthetic construct
  source 1..75: mol_type = other DNA
catcgcagtgggtgaagtcttcaacagcatctgggactgcaaacaactgattgaagagcaactcatcgattatat

SEQ ID NO: 194398 - DNA, 75 bp, synthetic construct
  source 1..75: mol_type = other DNA
atgattgagaatcatctctactctctggtgactgttgtgaaatacaaattactgccatgcttactcgcgatattc

SEQ ID NO: 194399 - DNA, 75 bp, synthetic construct
  source 1..75: mol_type = other DNA
aaatcattaaaaagtatccgaagcactattaagcatcagcaattttaccctgcaataggtgtcagacgggctaca

SEQ ID NO: 194400 - DNA, 75 bp, synthetic construct
  source 1..75: mol_type = other DNA
tccgtagttactgaattatggaaatttgaggacaaggatcgctttgcaaggaagcgcgtgaaaggccgtgcattt

SEQ ID NO: 194401 - DNA, 75 bp, synthetic construct
  source 1..75: mol_type = other DNA
agaacataaccttcgggaaataggcctgagactgatagctcttaaagagtccggattcaatcaaaaggaaattgc

SEQ ID NO: 194402 - DNA, 75 bp, synthetic construct
  source 1..75: mol_type = other DNA
tctttgctgaatacctgcgcgacaagctacgcctgacaaccgtggtagccaatgaactggagatcatggacggta

SEQ ID NO: 194403 - DNA, 75 bp, synthetic construct
  source 1..75: mol_type = other DNA
gccgtggtagccaatgaactggagatcatggacggtaaatttaccggcaatgtgatcggcgacatcgttgacgcg

SEQ ID NO: 194404 - DNA, 75 bp, synthetic construct
  source 1..75: mol_type = other DNA
gctggtggcctgaccgacaccgccgactggcgcaacgtcgttctgacacacaatggccgcgaagaacgtatttct

SEQ ID NO: 194405 - DNA, 75 bp, synthetic construct
  source 1..75: mol_type = other DNA
tgactagaaatgatggtgtttatctgcaggactgtttgaactcaatccttaaaaataccgtatacccattcaatc

SEQ ID NO: 194406 - DNA, 75 bp, synthetic construct
  source 1..75: mol_type = other DNA
gcgtcagttgggaaacggatgataatggctttgtggttaaagccagcagtaaagagacgaaggtggagtatcgtt

SEQ ID NO: 194407 - DNA, 75 bp, synthetic construct
  source 1..75: mol_type = other DNA
ttatctccagtcattctactatcaaataaaaagcaatgtgcatttataatttttttaattatattgtttgtttat

SEQ ID NO: 194408 - DNA, 75 bp, synthetic construct
  source 1..75: mol_type = other DNA
agctctcgtcgttctctgcttgctggctggtttttttggtcttattggcatcctgttgcagcatgcctgcatcat

SEQ ID NO: 194409 - DNA, 75 bp, synthetic construct
  source 1..75: mol_type = other DNA
cctggattaaatggatgttggttgactcaattagtaatatatatggacacgtataaatgcattggcaaaataggt

SEQ ID NO: 194410 - DNA, 75 bp, synthetic construct
  source 1..75: mol_type = other DNA
tgactgtaataagaaataagagtaatttatgggttttaggtctaaataagcatcttgagaaagttaaaaaggaaa

SEQ ID NO: 194411 - DNA, 75 bp, synthetic construct
  source 1..75: mol_type = other DNA
atgcctccttctgctactgattcggtgcaggaggcaatgaatgatgtgcgccttaaaatgcaaaaattattctga

SEQ ID NO: 194412 - DNA, 75 bp, synthetic construct
  source 1..75: mol_type = other DNA
gatgcggcagtcagcgtaaaactcaacaacaaagttggttttagcgctgaggcacagagcaaggctgctgctgcg

SEQ ID NO: 194413 - DNA, 75 bp, synthetic construct
  source 1..75: mol_type = other DNA
atgtggggaatgatgctcggattcagtggcatcaactacactgcgtggctgtatctggcctggcttcctggttac

SEQ ID NO: 194414 - DNA, 75 bp, synthetic construct
  source 1..75: mol_type = other DNA
gggctgccgggatgctggtcaacggttacgttactgactggctggtcaaagggggaatggctccgattaaaagcc

SEQ ID NO: 194415 - DNA, 75 bp, synthetic construct
  source 1..75: mol_type = other DNA
tggaaagggtggcaggattacaaaaatatcctccgtccggcagaagataacttcatggaaaaggtcgatgacctt

SEQ ID NO: 194416 - DNA, 75 bp, synthetic construct
  source 1..75: mol_type = other DNA
ataccaaagtaaaaccaacagcagcgcaaatagcacaggaagaggtggcctggaaagggtggcaggattacaaaa

SEQ ID NO: 194417 - DNA, 75 bp, synthetic construct
  source 1..75: mol_type = other DNA
gggcagattgacacaaccacacgggggcaggtgtcgcaggcagataagtatgttgccgggctacaggatgttgct

SEQ ID NO: 194418 - DNA, 75 bp, synthetic construct
  source 1..75: mol_type = other DNA
tgttggcgctgtaagaaaacaactcctgtgtttggtatttttttacctcgttggtataagtatagagacgttatt

SEQ ID NO: 194419 - DNA, 75 bp, synthetic construct
  source 1..75: mol_type = other DNA
aagtggtaactaaagagtttacctttgccgttgatggtgctccgctgaaacagcaaatcttcaatactgccgctt

SEQ ID NO: 194420 - DNA, 75 bp, synthetic construct
  source 1..75: mol_type = other DNA
ataaccgtaagctggttggtcgtatgtctgtaccggatatcgaactttcgatcaactacatgccgggtaacgaag

SEQ ID NO: 194421 - DNA, 75 bp, synthetic construct
  source 1..75: mol_type = other DNA
gcgcgtctcgtgaaggggtgatggtttattgccataccaccggtcacagtattgatgaagctctggatgattatg

SEQ ID NO: 194422 - DNA, 75 bp, synthetic construct
  source 1..75: mol_type = other DNA
aagacccgacgcctgcggaaaaccaggaatgcttccgtctcattcgccaacataccgtcacacccatcgcagtgg

SEQ ID NO: 194423 - DNA, 75 bp, synthetic construct
  source 1..75: mol_type = other DNA
ctgtgtttggtatttttttacctcgttggtataagtatagagacgttatttggggagttgatcctgccgaatggg

SEQ ID NO: 194424 - DNA, 75 bp, synthetic construct
  source 1..75: mol_type = other DNA
agcgagaagtttcagaactgccgatctctattgccattggtgatgtgactattactaaatcgcttgaggacgctg

SEQ ID NO: 194425 - DNA, 75 bp, synthetic construct
  source 1..75: mol_type = other DNA
cgtagccataactgcttataaccatgctatcggtaccgcgcttgcggaagcatcagcaaataaggccagcacagc

SEQ ID NO: 194426 - DNA, 75 bp, synthetic construct
  source 1..75: mol_type = other DNA
agtcgctgctatgggggacattaaccagacccttaacacaggctcaggaagctcgtcaggctctgattcaggtgg

SEQ ID NO: 194427 - DNA, 75 bp, synthetic construct
  source 1..75: mol_type = other DNA
tcgcggggagaaaacagaagaatatcgcctgtgcaatgactgctggaataagcgaattatgttccgggaatatga

SEQ ID NO: 194428 - DNA, 75 bp, synthetic construct
  source 1..75: mol_type = other DNA
tgaaataaaaacaatcacacatccgcacttcggtgataaaccggtaaaggtgttcgcgataaaagtgaagattaa

SEQ ID NO: 194429 - DNA, 75 bp, synthetic construct
  source 1..75: mol_type = other DNA
gtggctaacctgcaacttgccgtcaaaggtgaatacttcgatgccatgattcgcggggagaaaacggaagagtat

SEQ ID NO: 194430 - DNA, 75 bp, synthetic construct
  source 1..75: mol_type = other DNA
atcacacatccgcactttggcgataaaccggtaagggtgttcgctcttaaggtaaataacagcactgaatgtcaa

SEQ ID NO: 194431 - DNA, 75 bp, synthetic construct
  source 1..75: mol_type = other DNA
atcacacatccgcactttggcgataaaccggtaacggtgttcgctcttacggtaaataccagcactgaatgtcaa

SEQ ID NO: 194432 - DNA, 75 bp, synthetic construct
  source 1..75: mol_type = other DNA
atcacacatccgcactttggcgataaaccggtaatggtgttcgctcttaaggtaaatatcagcactgaatgtcaa

SEQ ID NO: 194433 - DNA, 75 bp, synthetic construct
  source 1..75: mol_type = other DNA
gggctggcaactcagcacgcggacctgttggctggttatgctgatctgtcaatgctccttcaactcgatattggt

SEQ ID NO: 194434 - DNA, 75 bp, synthetic construct
  source 1..75: mol_type = other DNA
atggctaacctgcaacttcctgttaaaagtgaatttttcgatgccatgattcgcggagagaaaacggaggagtat

SEQ ID NO: 194435 - DNA, 75 bp, synthetic construct
  source 1..75: mol_type = other DNA
tgaaatcaagacaatcacacatccgcacttcggcgataaaccggtaaatgtttacgcgataaaggtgaatatcag

SEQ ID NO: 194436 - DNA, 75 bp, synthetic construct
  source 1..75: mol_type = other DNA
atggcactctggctactggtattacagaacgtgccggtaggcattgcctacccgatgttgagcctgaattttgtc

SEQ ID NO: 194437 - DNA, 75 bp, synthetic construct
  source 1..75: mol_type = other DNA
gtgcaaattgaatttccagcgctgcttgtgagcagcaagaaaaggtcgctcttcgtagtggcatcagaatccgag

SEQ ID NO: 194438 - DNA, 75 bp, synthetic construct
  source 1..75: mol_type = other DNA
cgataacgaagaaatgtcagtatcgatgcataagcagcgcagtcagcagcagcctggcgtcaccgcatggcgtgc

SEQ ID NO: 194439 - DNA, 75 bp, synthetic construct
  source 1..75: mol_type = other DNA
tggcgcagtatttacgggcaggataactggctatctaacccgtgggtatgggtaatcgagtttaagcgcattcag

SEQ ID NO: 194440 - DNA, 75 bp, synthetic construct
  source 1..75: mol_type = other DNA
ccgtttgatgccagcatatcgcggaatgatcaataagttgaatgcggatctactcatcgtgccgtttatcgataa

SEQ ID NO: 194441 - DNA, 75 bp, synthetic construct
  source 1..75: mol_type = other DNA
ctcgccagacataatgacgctcatctgacgttaattcatattgatgatggcttaagtgagttgtatccgggtatc

SEQ ID NO: 194442 - DNA, 75 bp, synthetic construct
  source 1..75: mol_type = other DNA
gactatttgcaacagtgcctgatgagggatgcggttgtgcaaattgaatttccagcgctgcttgtgagcagcaag

SEQ ID NO: 194443 - DNA, 75 bp, synthetic construct
  source 1..75: mol_type = other DNA
cgcctgtgtaatgactactggaataagcgaattatgttccgggagtatgaccgactgattatcacaaagggatat

SEQ ID NO: 194444 - DNA, 75 bp, synthetic construct
  source 1..75: mol_type = other DNA
tttgtggcaataaaaaagcggcgcaaacatatcgtactgtggctgggactggcgctggcttgtcttggccttgcg

SEQ ID NO: 194445 - DNA, 75 bp, synthetic construct
  source 1..75: mol_type = other DNA
ggcgctggcttgtcttggtcttgctatggtgctctggctgctggtcttgcagaacgtaccggtaggcattgccta

SEQ ID NO: 194446 - DNA, 75 bp, synthetic construct
  source 1..75: mol_type = other DNA
atgaaaaatttgatggcgggtggcgtccatcaattcacatgccgcgctgggcatcgcgcattttgctggaaatta

SEQ ID NO: 194447 - DNA, 75 bp, synthetic construct
  source 1..75: mol_type = other DNA
gtggctaacctgcaacttgccgtcaaaggtgaatacttcgatgccatgattcgcggggagaaaacagaagaatat

SEQ ID NO: 194448 - DNA, 75 bp, synthetic construct
  source 1..75: mol_type = other DNA
ccgaagcgcgacgatttcagtcgcagaattgatgttccgtatgacggatatgaaatcaagacaatcacacatccg

SEQ ID NO: 194449 - DNA, 75 bp, synthetic construct
  source 1..75: mol_type = other DNA
gtgcgctggaacgtaatctacggcggcaaaaatatgcccgctttatggggagcccgcagaattcggaaaaaatcg

SEQ ID NO: 194450 - DNA, 75 bp, synthetic construct
  source 1..75: mol_type = other DNA
tttagcaggtgctctggccggagcttctgcaccggaactggcacatctgctgaaatcaacagaaaaagacccggc

SEQ ID NO: 194451 - DNA, 75 bp, synthetic construct
  source 1..75: mol_type = other DNA
aataatctgctgattgacgcgaacaaactggataatacgggaagtcatcttcttgccagcgagtttgtcagcctg

SEQ ID NO: 194452 - DNA, 75 bp, synthetic construct
  source 1..75: mol_type = other DNA
taacgtggtcatccggggcggacgtgatgtgaacctggtggcagagtctgccggcgcaggcgacagctatacgtc

SEQ ID NO: 194453 - DNA, 75 bp, synthetic construct
  source 1..75: mol_type = other DNA
tgacggcctgttgcagggcgccggtgcactggcgcttgctggcgacaccctctcacagggtagtcacggacgctg

SEQ ID NO: 194454 - DNA, 75 bp, synthetic construct
  source 1..75: mol_type = other DNA
ctgctggcaaagacggcgtttggacgcagtttttatgccacgggcgataatttacagggcgctcgtcaactgggc

SEQ ID NO: 194455 - DNA, 75 bp, synthetic construct
  source 1..75: mol_type = other DNA
acaaactgagtaccgcagcgggcgcacagcttcagagcggtaaaaatctcagcatcaacgccagagatgcacgtc

SEQ ID NO: 194456 - DNA, 75 bp, synthetic construct
  source 1..75: mol_type = other DNA
ggggacaccacgctgaacgcagccaccatggacaaccggggcagtctgctttcggccggcacgctctcccttgat

SEQ ID NO: 194457 - DNA, 75 bp, synthetic construct
  source 1..75: mol_type = other DNA
gccatcagaccacccggaccatcacggaagacagcgtcacccgtgagaagggctctctgctgtcggggaatcgcg

SEQ ID NO: 194458 - DNA, 75 bp, synthetic construct
  source 1..75: mol_type = other DNA
ctgccggtggtggttttgaggcatgggccgttccgactgaaaagggagccacccggaaatttctgactggcacaa

SEQ ID NO: 194459 - DNA, 75 bp, synthetic construct
  source 1..75: mol_type = other DNA
atctgcaacagcacggtaaaatgctgacaggcggtgcattaaacgtcaacgccagagacatcagcaatagtgggc

SEQ ID NO: 194460 - DNA, 75 bp, synthetic construct
  source 1..75: mol_type = other DNA
accttactgcttcagcaaccggtcagttgaccagtaccggcgatatcatgagccagggtgacaccacgctgaacg

SEQ ID NO: 194461 - DNA, 75 bp, synthetic construct
  source 1..75: mol_type = other DNA
gtaacatgccgggtggcatgatatccgccggaggtcacagcggacatgcggaaggaacgactcaggccgcagtgg

SEQ ID NO: 194462 - DNA, 75 bp, synthetic construct
  source 1..75: mol_type = other DNA
ccgcaatgaacgcgggtaagtctacggcattgctgcaatcttcatacaattaccaggaacgcggtatgcggactg

SEQ ID NO: 194463 - DNA, 75 bp, synthetic construct
  source 1..75: mol_type = other DNA
attggcagccaatacttactggcatggtccgacaaactggttgaattaaaaaccatctgtttttgtggccgtaaa

SEQ ID NO: 194464 - DNA, 75 bp, synthetic construct
  source 1..75: mol_type = other DNA
atgacatcagtcattcaggtttgacccaaagtggtggtcgtgaatattccagcaatggttatggtatgcaacgta

SEQ ID NO: 194465 - DNA, 75 bp, synthetic construct
  source 1..75: mol_type = other DNA
agggatgaatcgtatagctattggtgaagggccttcttgggggacaacatataaagtacacccggtagttcaggc

SEQ ID NO: 194466 - DNA, 75 bp, synthetic construct
  source 1..75: mol_type = other DNA
gagcgttacgtgtcagtatgtcgaaaacattataaagaggcgctaaacattggctctttgacggctattcaggaa

SEQ ID NO: 194467 - DNA, 75 bp, synthetic construct
  source 1..75: mol_type = other DNA
tacccgtactttgttatggtttacgtaccgatttcgaggtgaattatttattggcagccaatacttactgcatgg

SEQ ID NO: 194468 - DNA, 75 bp, synthetic construct
  source 1..75: mol_type = other DNA
ggaaaactcacctcttctatcggcgttgtcacctatcaggaaaccattccagcgctggtggcgtttcaaaaaacc

SEQ ID NO: 194469 - DNA, 75 bp, synthetic construct
  source 1..75: mol_type = other DNA
gggatatcagtatcaccggtgccgccgtttctgccggtgacagcgtgttactgtccgccggtaatgacctgaaca

SEQ ID NO: 194470 - DNA, 75 bp, synthetic construct
  source 1..75: mol_type = other DNA
agcaggcgcagcaacgggagagctggcagccagagcgattaccggaatgctgtatcctggcgtgaagcagtcaga

SEQ ID NO: 194471 - DNA, 75 bp, synthetic construct
  source 1..75: mol_type = other DNA
ttttatgaaccgcgcactattcacgactcgtcattaagtaaagcaatccacggcattgttgccgcacgctgtggc

SEQ ID NO: 194472 - DNA, 75 bp, synthetic construct
  source 1..75: mol_type = other DNA
acggtgaattgcatctcaatccggcgttacctgagcagtggcaacagttgtctttccctctgttctggcagggct

SEQ ID NO: 194473 - DNA, 75 bp, synthetic construct
  source 1..75: mol_type = other DNA
gatgtgttacaggcactggcaaaagccggaaaactcacctcttctatcggcgttgtcacttatcaggaaactatt

SEQ ID NO: 194474 - DNA, 75 bp, synthetic construct
  source 1..75: mol_type = other DNA
cgtgaatgccggtcgtgatgttgccctgaccacggcgacagaaagtgactatcactatctggaaacgaagaaaaa

SEQ ID NO: 194475 - DNA, 75 bp, synthetic construct
  source 1..75: mol_type = other DNA
agtgtcagcccggtggtctctgcaccggtactgaatacgttaagtcagcagaccggcggagacagtctgacacag

SEQ ID NO: 194476 - DNA, 75 bp, synthetic construct
  source 1..75: mol_type = other DNA
agagaatgaatatctggtataccgctacgacccgaaaacgttttacggtagctatgccacaggctctctggataa

SEQ ID NO: 194477 - DNA, 75 bp, synthetic construct
  source 1..75: mol_type = other DNA
tatctgattacggtgaacccgaaactggatggtctcggacaggtggacagcagtttgtttgccggactgtatgac

SEQ ID NO: 194478 - DNA, 75 bp, synthetic construct
  source 1..75: mol_type = other DNA
aatgtgctgtacgtgatccgagtcgcgatggtacccggggaccggggcatgtgctgaatggcgacaatacagacg

SEQ ID NO: 194479 - DNA, 75 bp, synthetic construct
  source 1..75: mol_type = other DNA
tcaactctcagcgccggtaacaatgtctccgtcactgccacggggaaaaataaggaccataacaacagcggcgat

SEQ ID NO: 194480 - DNA, 75 bp, synthetic construct
  source 1..75: mol_type = other DNA
tcgcagaagaaaggaattagcggtgcacataatgctgatgtattcaataaagctgtggttgataatggtgtgaaa

SEQ ID NO: 194481 - DNA, 75 bp, synthetic construct
  source 1..75: mol_type = other DNA
tgtgtatcgctattacggcaaactggccatgatccccaacgacgggcatctgcagtatggagatgcttctgccga

SEQ ID NO: 194482 - DNA, 75 bp, synthetic construct
  source 1..75: mol_type = other DNA
atggctagaccagtaaaacgaatcaagaacgccgcagcggcttatgttccacagtcccgcgatgcagtgatgtgt

SEQ ID NO: 194483 - DNA, 75 bp, synthetic construct
  source 1..75: mol_type = other DNA
ggaggttcattgctgaccagcggcgatctgacaatcaccgcaggcagtctggtaaacagcggggcgatccaggcg

SEQ ID NO: 194484 - DNA, 75 bp, synthetic construct
  source 1..75: mol_type = other DNA
aacacacagaggcttgataatcagcagaacggcacgctgtacagtgctgcagacctgacgctggatataccggac

SEQ ID NO: 194485 - DNA, 75 bp, synthetic construct
  source 1..75: mol_type = other DNA
gcaggtgcaaatgcaggaattggttccatggtagatagttcagttgatcctgaaaatgcaatcattgcaggatgg

SEQ ID NO: 194486 - DNA, 75 bp, synthetic construct
  source 1..75: mol_type = other DNA
taccggtccgctggctgctgtcagggcaacggactcactgtttatgggcgcagccggggatatcagtatcaccgg

SEQ ID NO: 194487 - DNA, 75 bp, synthetic construct
  source 1..75: mol_type = other DNA
aggcgcacctggctacttaagatatgaaggtgcaggtcttgaaatgatctataacccgaaaacgggacaagttgg

SEQ ID NO: 194488 - DNA, 75 bp, synthetic construct
  source 1..75: mol_type = other DNA
ggctgcaacggctgcacttcagggcctggtgggcggcaatatggcaggcgcgctggcaggtgcttcagcgccgga

SEQ ID NO: 194489 - DNA, 75 bp, synthetic construct
  source 1..75: mol_type = other DNA
ctcagcagccagaacatcacaacagtaaccggtgctgataatccggcaggccgcattgcgtcagggcgtaatctt

SEQ ID NO: 194490 - DNA, 75 bp, synthetic construct
  source 1..75: mol_type = other DNA
actgtagatggaatgaaattcagcaaaagttattatgagaaattatgggagcaaggcagacctgcgccattcgtg

SEQ ID NO: 194491 - DNA, 75 bp, synthetic construct
  source 1..75: mol_type = other DNA
tggccggagcttctgcaccggaactggcgcatctgctgaaatcaacagaaaaagacccggcagtaaacgccattg

SEQ ID NO: 194492 - DNA, 75 bp, synthetic construct
  source 1..75: mol_type = other DNA
ggataaatttcagggtaacatgccgggtggcatgatatccgccggaggtcacagcggacatgcggaaggaacgac

SEQ ID NO: 194493 - DNA, 75 bp, synthetic construct
  source 1..75: mol_type = other DNA
cgctgacacccgacagacaaccgggaagaacagcagcaaaggtggcggcgtgggtgtcagctttggtggtggaac

SEQ ID NO: 194494 - DNA, 75 bp, synthetic construct
  source 1..75: mol_type = other DNA
agcattaccggtgacagtgtggtggttgacccggggcatgaccgtcgtactgtggacgaaaaatttgagcagaag

SEQ ID NO: 194495 - DNA, 75 bp, synthetic construct
  source 1..75: mol_type = other DNA
gcgaggccgggacaacgcagagtcagagtgccagcaccatcggctccactgctggtaatgtcagtattaccgcgg

SEQ ID NO: 194496 - DNA, 75 bp, synthetic construct
  source 1..75: mol_type = other DNA
gctatttcacccgtgaagttgaaaatcagcacggtacgccctgcaacgggcacggggcatgcaatatcacaatgg

SEQ ID NO: 194497 - DNA, 75 bp, synthetic construct
  source 1..75: mol_type = other DNA
atccgtgtgaatgccggtcatgacatcgtactgggtactgccacggaaagtgattatcactacagtgaatcaggg

SEQ ID NO: 194498 - DNA, 75 bp, synthetic construct
  source 1..75: mol_type = other DNA
ggtaatgacctgaacatgaacgcgatacaggccggagaacgtcgtcgctatggcgggtccgggtggtatgaaact

SEQ ID NO: 194499 - DNA, 75 bp, synthetic construct
  source 1..75: mol_type = other DNA
cacagcgccaatcgaccgccagtggtttccgatgccgcccctgatttcgtgaaaaccgtaaccgcagcgatgctc

SEQ ID NO: 194500 - DNA, 75 bp, synthetic construct
  source 1..75: mol_type = other DNA
ggaaagatgctgcagctgatttgcaaaaacgctatgacttcctggcacaaatggccggaaaagcggaaaaaagca

SEQ ID NO: 194501 - DNA, 75 bp, synthetic construct
  source 1..75: mol_type = other DNA
cagaggttcgtcgagaacaggtcgcagctttacgccagcaactcaacgatgttgccgaagcacatgaactgctgc

SEQ ID NO: 194502 - DNA, 75 bp, synthetic construct
  source 1..75: mol_type = other DNA
ccttgtttgccgacgagctgatcgagcgggagcttgagagcagacccgggtattttcgcggcaaatcagaacgat

SEQ ID NO: 194503 - DNA, 75 bp, synthetic construct
  source 1..75: mol_type = other DNA
ctggtacagtaaaaaaagcacacgcaacttatgcgcaactggttctcgatgcccgtaagaaagccagcgagaaga

SEQ ID NO: 194504 - DNA, 75 bp, synthetic construct
  source 1..75: mol_type = other DNA
aagttcgtgctgtttttcctgaactatggacagacgaaaaaaaagaacttgcccctgaaaagcgggattctccag

SEQ ID NO: 194505 - DNA, 75 bp, synthetic construct
  source 1..75: mol_type = other DNA
atcgctattaaagcaacaagggaactcggttggcgaagtcgctgatacgctcaacttcttcgactcctttcattt

SEQ ID NO: 194506 - DNA, 75 bp, synthetic construct
  source 1..75: mol_type = other DNA
gaagcaataaaaaataatctggcagtcgcttttctgacgaaaattatttatcagtggatttgtcttatgcacgca

SEQ ID NO: 194507 - DNA, 75 bp, synthetic construct
  source 1..75: mol_type = other DNA
tccttgtcttctcgttttctgtctcagcagagtgctgggtcgttggagatatgcacggaataagctattcagaac

SEQ ID NO: 194508 - DNA, 75 bp, synthetic construct
  source 1..75: mol_type = other DNA
tcacctttaatggtcagcagatgaccatggaaaacttatctgagatccggcagggacggcaggagtgggagcgcc

SEQ ID NO: 194509 - DNA, 75 bp, synthetic construct
  source 1..75: mol_type = other DNA
gcagggacggcaggagtgggagcgccgcccttgcggctctgattacacgacacgggggcatcccgggtaccggct

SEQ ID NO: 194510 - DNA, 75 bp, synthetic construct
  source 1..75: mol_type = other DNA
tcaacttcttcgactcctttcatttcagcaaagcctttaaacataaatttggttatgcgccgtcagctgtgctga

SEQ ID NO: 194511 - DNA, 75 bp, synthetic construct
  source 1..75: mol_type = other DNA
tatggcaaaatgccgctggaactggcgcgggaacgcggttttgaagagattgctcaattgctgattgccgcaggt

SEQ ID NO: 194512 - DNA, 75 bp, synthetic construct
  source 1..75: mol_type = other DNA
gtgaggtgctggcagagcatcctggattgattagtgtcctccggcaacggtataaagggcgggggatgagtaagc

SEQ ID NO: 194513 - DNA, 75 bp, synthetic construct
  source 1..75: mol_type = other DNA
ggatgattcaggaatatgtccccggtaaacaggtcacactggcacatgtcattgctaatccgggaaaggatctgt

SEQ ID NO: 194514 - DNA, 75 bp, synthetic construct
  source 1..75: mol_type = other DNA
attacccccagtgaagcatctatcatcgcgtgtgatatcgccacaaaatcaggcgctgtagagattggttttctt

SEQ ID NO: 194515 - DNA, 75 bp, synthetic construct
  source 1..75: mol_type = other DNA
ggatgagtaaacgcaaaatggctgaattgttgaatgaggtgcacccggaatggtgttttagtacatgcgaaaagc

SEQ ID NO: 194516 - DNA, 75 bp, synthetic construct
  source 1..75: mol_type = other DNA
gaaaaatggctgaattgctaaatgatgcacaccctgagtggtgttttagcacatgcgaaaagcgaattgctaatt

SEQ ID NO: 194517 - DNA, 75 bp, synthetic construct
  source 1..75: mol_type = other DNA
ggcagaacagttaaatgaatatcaccctgactggacattgattacatgtcgacgtcggatcgacctatggctgaa

SEQ ID NO: 194518 - DNA, 75 bp, synthetic construct
  source 1..75: mol_type = other DNA
gcgaaaggacgcaagcatattcgaattgaacgagaagcgcttaatgctcttaaagctgagaataaactaccagtt

SEQ ID NO: 194519 - DNA, 75 bp, synthetic construct
  source 1..75: mol_type = other DNA
cccgcatctgaccgataaatatggcaaaacgccgctggaactggcgcgggaacggggctttgaagagattgcgca

SEQ ID NO: 194520 - DNA, 75 bp, synthetic construct
  source 1..75: mol_type = other DNA
caatatgcttgcgttcaggcattaattgatgccggagcggatattaataaacaagacctgacatgtttaaatcct

SEQ ID NO: 194521 - DNA, 75 bp, synthetic construct
  source 1..75: mol_type = other DNA
tctaaaggtcgtaagcacatccgaattactacggacgctttagatactttgaaggcacttaacagctttaagatt

SEQ ID NO: 194522 - DNA, 75 bp, synthetic construct
  source 1..75: mol_type = other DNA
gtcggatttacttaaatatccagtctctaaaggtcgtaagcacatccgaattactacggacgctttagatacttt

SEQ ID NO: 194523 - DNA, 75 bp, synthetic construct
  source 1..75: mol_type = other DNA
taagagtgaaaacaagctgccagtagatatcacgcgcttactgagcctgaagatttacaagttatctcaagaggt

SEQ ID NO: 194524 - DNA, 75 bp, synthetic construct
  source 1..75: mol_type = other DNA
gtggtatctacgccggaaaagatgggtttgatgtcactgtggggaatcacactcagctcaatggtgcggtaattg

SEQ ID NO: 194525 - DNA, 75 bp, synthetic construct
  source 1..75: mol_type = other DNA
cgtgagcatttcgctcaaccatcagcagtcgaagtctgagacgaaatatcagcacgatatcgtctccggctcaac

SEQ ID NO: 194526 - DNA, 75 bp, synthetic construct
  source 1..75: mol_type = other DNA
ccagacttccgggaccgtgaatgcagctgaaaatgtcacccttaccaccaccgatgataccacactgaaaggccg

SEQ ID NO: 194527 - DNA, 75 bp, synthetic construct
  source 1..75: mol_type = other DNA
ggggaccagttcaagggcaacatgccgggcggaatgatttcggcggcaggcaacagcggccatgccgaaggcacg

SEQ ID NO: 194528 - DNA, 75 bp, synthetic construct
  source 1..75: mol_type = other DNA
ggcgcacaacttcagagcggcaaaaatctcagcatcaacgccagagatgcacgtcttgcaggtacgcaggcagca

SEQ ID NO: 194529 - DNA, 75 bp, synthetic construct
  source 1..75: mol_type = other DNA
aagcgcgtctgagtcagcttgatgaaaccgacaaagcccgagatgccgcaatagcagaggcgtgtccaccaggaa

SEQ ID NO: 194530 - DNA, 75 bp, synthetic construct
  source 1..75: mol_type = other DNA
gacagtgtggtggttgacccggggcatgaccgtcgtactgtggacgaaaaatttgagcagaagaaaagcgggctg

SEQ ID NO: 194531 - DNA, 75 bp, synthetic construct
  source 1..75: mol_type = other DNA
tgcggtcgcagcaccttgcaggactaaagttgcagagcagttgctagaaatcggggcgaaagcgggcatggccgg

SEQ ID NO: 194532 - DNA, 75 bp, synthetic construct
  source 1..75: mol_type = other DNA
tcagcggaacggataccggtccgctggctgctgtcagggcaacggactcactgtttatgggcgcagccggggata

SEQ ID NO: 194533 - DNA, 75 bp, synthetic construct
  source 1..75: mol_type = other DNA
gtctttgccagcgttaatgcggcaaaaggcagcgagaaaggtaacggtactgagtggactgaaaccacaacagac

SEQ ID NO: 194534 - DNA, 75 bp, synthetic construct
  source 1..75: mol_type = other DNA
aaggcagcgagaaaggtaacggtactgagtggactgaaaccacaacagacagcggtaaaaccgtcaccatcaaca

SEQ ID NO: 194535 - DNA, 75 bp, synthetic construct
  source 1..75: mol_type = other DNA
aaaaacaggggcgataaccgcggagatattgtgattgccggaagccagcttaaggccggtggtaacacaagcctg

SEQ ID NO: 194536 - DNA, 75 bp, synthetic construct
  source 1..75: mol_type = other DNA
ctaaatttaaagtagtatattcgatagatggaggtcgcccgattgaaaaagtatttaacaatgcacccggaggta

SEQ ID NO: 194537 - DNA, 75 bp, synthetic construct
  source 1..75: mol_type = other DNA
accatcaaatgtacgtctggttgactggatacctatgggtgtattccttaatggagctgatggatttattcatca

SEQ ID NO: 194538 - DNA, 75 bp, synthetic construct
  source 1..75: mol_type = other DNA
gcggcactgtccagggtaaccatgtcacgattcgccagaacagtgtcaccaacagtggcacgctcaccgggatag

SEQ ID NO: 194539 - DNA, 75 bp, synthetic construct
  source 1..75: mol_type = other DNA
gaatcaggggaaacccgcaaccgtctcctcagccatcagaccacccggaccatcacggaagacagcgtcacccgt

SEQ ID NO: 194540 - DNA, 75 bp, synthetic construct
  source 1..75: mol_type = other DNA
acgggggcgtcaggagtgggagcggcgtcttgctgccctgactgcgcggcgacgggggaatccgggatataaact

SEQ ID NO: 194541 - DNA, 75 bp, synthetic construct
  source 1..75: mol_type = other DNA
aaatatagaattccttcagtgatgctggctgttggattcgcgcatacatctgcccatattcagatgttaaaccgt

SEQ ID NO: 194542 - DNA, 75 bp, synthetic construct
  source 1..75: mol_type = other DNA
cctgacagcgctgtatagtggaataccacagattgtgtttggcgaaggtgcagatcgctctgttaatgcagaaat

SEQ ID NO: 194543 - DNA, 75 bp, synthetic construct
  source 1..75: mol_type = other DNA
gaatgaaagcggtaccgggataaccggccctgtatggaatgacgcgctgccggatacgctgaaggatatcccggg

SEQ ID NO: 194544 - DNA, 75 bp, synthetic construct
  source 1..75: mol_type = other DNA
taccgtatccgtacgggcgatacggatacggtgacagtcagtgcctccggctatgctgccagaatatccggcggt

SEQ ID NO: 194545 - DNA, 75 bp, synthetic construct
  source 1..75: mol_type = other DNA
tatcttgcgaaactgcgtgacacgcaggcttacaggaatgaaatggcgaagtatggtaccggcagtgaaattcag

SEQ ID NO: 194546 - DNA, 75 bp, synthetic construct
  source 1..75: mol_type = other DNA
gtgtgacagcagcccttcagggcaacagtgcggcagcaggcgcaattggtgcgggtactggtgaagtgatcgcgt

SEQ ID NO: 194547 - DNA, 75 bp, synthetic construct
  source 1..75: mol_type = other DNA
cggcaggcatatctggcaaaactgcgtgatacgccggaatacaaaaaggaacaggaaaagtatggtaccggcagc

SEQ ID NO: 194548 - DNA, 75 bp, synthetic construct
  source 1..75: mol_type = other DNA
gaaaggtaacggtactgagtggactgaaaccacaacagacagcggtaaaaccgtcaccatcaacagtggtcggga

SEQ ID NO: 194549 - DNA, 75 bp, synthetic construct
  source 1..75: mol_type = other DNA
aacgctcagcaacagtggctccctgctcagtggcagccgcctgactgttaatacccacgaatttaaccagagcgg

SEQ ID NO: 194550 - DNA, 75 bp, synthetic construct
  source 1..75: mol_type = other DNA
tgtggtacaggtcgcaatgcgaaaatgacaggcgtgactgggggttctacggattgattgccgaggaagtaggag

SEQ ID NO: 194551 - DNA, 75 bp, synthetic construct
  source 1..75: mol_type = other DNA
cttccactaacccggcggcaaccgtcattaacaacgccatcagcctgattgccgcgggcaacagcgtcatttttg

SEQ ID NO: 194552 - DNA, 75 bp, synthetic construct
  source 1..75: mol_type = other DNA
catttttgccccgcatccggcggcgaaaaaagtctcccagcgggcgattacgctgctcaaccaggcgattgttgc

SEQ ID NO: 194553 - DNA, 75 bp, synthetic construct
  source 1..75: mol_type = other DNA
acaaaaactgaagttgataataagctgaaaaacaaactggaagtgaatgctctggaaagcggtaattatggtgga

SEQ ID NO: 194554 - DNA, 75 bp, synthetic construct
  source 1..75: mol_type = other DNA
gatggatgtcacattacaaagtgcggcaaacaaaataaaaagtgcctttggcgctattctggcaagcggtgtttt

SEQ ID NO: 194555 - DNA, 75 bp, synthetic construct
  source 1..75: mol_type = other DNA
agtattgtcctatgtttccggggcatcatggggatctgtcgcttctattggtgttgcattaatgggcatcggttc

SEQ ID NO: 194556 - DNA, 75 bp, synthetic construct
  source 1..75: mol_type = other DNA
gaaaccacagcggaacatccgtttgccgtgaccgaactgatgatgccagtgctgccagtggtgcgcgttgccaac

SEQ ID NO: 194557 - DNA, 75 bp, synthetic construct
  source 1..75: mol_type = other DNA
tgtcagtaaagccaaggaagatatttcctcaattaacggaaaagtatcaacgcttcagactgatatgaccagtgc

SEQ ID NO: 194558 - DNA, 75 bp, synthetic construct
  source 1..75: mol_type = other DNA
gtacaggtcgcaatgcgaaaatgacaggcgtgactggggcttctaaggattgattgccgaggaagttggagaaat

SEQ ID NO: 194559 - DNA, 75 bp, synthetic construct
  source 1..75: mol_type = other DNA
gcaaccgtaattaacaacgccatcagcctgattgccgcgggcaacagcgtcatttttgccccgcatccggcggcg

SEQ ID NO: 194560 - DNA, 75 bp, synthetic construct
  source 1..75: mol_type = other DNA
ggcaaatccggatatcgaaaccgcgcaacgcttgttcaagtttccgggcatcggccttctggtggtgaccggcgg

SEQ ID NO: 194561 - DNA, 75 bp, synthetic construct
  source 1..75: mol_type = other DNA
ggccggaaaacttactggttaccgtagcaaatccggatatcgaaaccgcgcaacgcttgttcaagtttccgggca

SEQ ID NO: 194562 - DNA, 75 bp, synthetic construct
  source 1..75: mol_type = other DNA
gaaactgacagcattcaggctgaaattgataaatggactttaatggcgcgggaactggaacagtacccagacctc

SEQ ID NO: 194563 - DNA, 75 bp, synthetic construct
  source 1..75: mol_type = other DNA
atgtccattttaattgataaaaacaccaaggttatctgccagggctttactggtagccaggggactttccactca

SEQ ID NO: 194564 - DNA, 75 bp, synthetic construct
  source 1..75: mol_type = other DNA
aaatggttggcggcgtaaccccaggtaaaggcggcaccacccacctcggcctgccggtgttcaacaccgtgcgtg

SEQ ID NO: 194565 - DNA, 75 bp, synthetic construct
  source 1..75: mol_type = other DNA
gaaaactcaccgatcaattcggtcaaacacactatttattactggaacccgaagaagggaaattttttaataaag

SEQ ID NO: 194566 - DNA, 75 bp, synthetic construct
  source 1..75: mol_type = other DNA
gaactgccgaaatatctgctggctccggaagtaagtgccctgctccattacgtcccggatctgcgccgcaagatg

SEQ ID NO: 194567 - DNA, 75 bp, synthetic construct
  source 1..75: mol_type = other DNA
agagctgaccggtctgccgaccccacgcgcgtttctggaagcgaaagcattgcagggcgataactcggacaacat

SEQ ID NO: 194568 - DNA, 75 bp, synthetic construct
  source 1..75: mol_type = other DNA
gttaccaagccagttgtgggttacatcgctggtgtgactgcgccgaaaggcaaacgtatgggtcacgcaggtgcg

SEQ ID NO: 194569 - DNA, 75 bp, synthetic construct
  source 1..75: mol_type = other DNA
gaaatttcgccgaagaccgtgaaaaggcatccgacgctggccgtaaaggcggtcagcatagcggcggtaatttta

SEQ ID NO: 194570 - DNA, 75 bp, synthetic construct
  source 1..75: mol_type = other DNA
atgatctgcaacccattgtcgacggcctgcaagcgcagattgctgacaaagataagctaattgccgatctgaaag

SEQ ID NO: 194571 - DNA, 75 bp, synthetic construct
  source 1..75: mol_type = other DNA
caaagtgcggcatgataaaccagagcttgccgaaggatgggatgaaatgcgggctgcacagcgagcgcatgagaa

SEQ ID NO: 194572 - DNA, 75 bp, synthetic construct
  source 1..75: mol_type = other DNA
atgaagcggttaaacagaccacggattacggtttcggtcagtctacctgtgtcggtatcggcggcgatccgatcc

SEQ ID NO: 194573 - DNA, 75 bp, synthetic construct
  source 1..75: mol_type = other DNA
taaaggcggcaccacccacctcggcctgccggtgttcaacaccgtgcgtgaagccgttgccgccactggcgctac

SEQ ID NO: 194574 - DNA, 75 bp, synthetic construct
  source 1..75: mol_type = other DNA
gatccgcaacgcgcatctgaagcgggtaaaaaaggcggtcaacaaagcggtggtaataaatcaggtaaatcctga

SEQ ID NO: 194575 - DNA, 75 bp, synthetic construct
  source 1..75: mol_type = other DNA
acgcctctggatgacaaggaaaaaggctttatttccagtaccaccatccccgtcttcaaatacctggttgacccg

SEQ ID NO: 194576 - DNA, 75 bp, synthetic construct
  source 1..75: mol_type = other DNA
ctgtttgtggttcctgtcagtttactgtttacgattattgcggtgcattataccggtaaaatagttgcgccctgg

SEQ ID NO: 194577 - DNA, 75 bp, synthetic construct
  source 1..75: mol_type = other DNA
ggcgctggtgaaagatttaaaagctaacggtgcaaacaccgtgattgggccgctgaactgggatgaaaaaggcga

SEQ ID NO: 194578 - DNA, 75 bp, synthetic construct
  source 1..75: mol_type = other DNA
gtggattatttcctcagactcaggtgtcacagcagaaggtctgtcaggatattgccggtgagagcaatattttcg

SEQ ID NO: 194579 - DNA, 75 bp, synthetic construct
  source 1..75: mol_type = other DNA
aaagggcaatatgaagcggcagagtcgctggcgttgggttactggaaaacccaggggctggttattctgccacag

SEQ ID NO: 194580 - DNA, 75 bp, synthetic construct
  source 1..75: mol_type = other DNA
cctttatgactccatagaaccgatcatctgcgaccgctggccgcaggcaaaaatatatcgcctggcagatattga

SEQ ID NO: 194581 - DNA, 75 bp, synthetic construct
  source 1..75: mol_type = other DNA
ccggagaggacggcaggatgatcccgggcattgctccggccgcaaaacaggaaggacagtatgtggctaaactga

SEQ ID NO: 194582 - DNA, 75 bp, synthetic construct
  source 1..75: mol_type = other DNA
ggcgtagaaacagtcacggacaattattatgcccgtagtctggcggtgggcgaacatcgcggcgtgataaaggcg

SEQ ID NO: 194583 - DNA, 75 bp, synthetic construct
  source 1..75: mol_type = other DNA
gcgaaaatgagccgcctgtttgatctgcaatgtaacccgcagattgttaacggtgcgttgggcaggttaggcgcg

SEQ ID NO: 194584 - DNA, 75 bp, synthetic construct
  source 1..75: mol_type = other DNA
cggactgggccgcctcgcgccagggttgtacggtgggcggcaagatggacagcgtccaggataaggccagcgata

SEQ ID NO: 194585 - DNA, 75 bp, synthetic construct
  source 1..75: mol_type = other DNA
atgctcggggtgtctaactcacttatttaccagctgacggactatatcggctacgacatcctgctgcagtacatt

SEQ ID NO: 194586 - DNA, 75 bp, synthetic construct
  source 1..75: mol_type = other DNA
ccggtggaagccgcgccggtggccagcgcccctgcagctgccgaaccggaggaagccgcgccggtggccagcgct

SEQ ID NO: 194587 - DNA, 75 bp, synthetic construct
  source 1..75: mol_type = other DNA
actgagaagctgattctcagtattattgagaaccaccctgagtatgacccttcagagccgagctttgggcaacca

SEQ ID NO: 194588 - DNA, 75 bp, synthetic construct
  source 1..75: mol_type = other DNA
aaatatatcgcctggcagatattgaaaatgtaaaaaaacaaattgccatcactcgcgaagagaaaaaggtcaaat

SEQ ID NO: 194589 - DNA, 75 bp, synthetic construct
  source 1..75: mol_type = other DNA
gtcaggccctgctggatctgcaaagcaacaataaaacggtgggcggtgcgaaatcctttaacgacgcttatgcct

SEQ ID NO: 194590 - DNA, 75 bp, synthetic construct
  source 1..75: mol_type = other DNA
ctgaaatatacctgggatgaaatccaggggtttattatcgataagatttcggcggtgatggcaccggtacttatc

SEQ ID NO: 194591 - DNA, 75 bp, synthetic construct
  source 1..75: mol_type = other DNA
gtacaggtcgcaatgcgaaaatgacaggcgtgactggggtttctacggattgattgccgaggaagtcggagaaat

SEQ ID NO: 194592 - DNA, 75 bp, synthetic construct
  source 1..75: mol_type = other DNA
gtacaggtcgcaatgcgaaaatgacaggcgtgactggggattctatggattgattgccgaggaagtgggagaaat

SEQ ID NO: 194593 - DNA, 75 bp, synthetic construct
  source 1..75: mol_type = other DNA
ttgttgccgaaggtgtaatgtacgaacgtctggttgttccactgattcaccatatccaaaagctgacagaaagag

SEQ ID NO: 194594 - DNA, 75 bp, synthetic construct
  source 1..75: mol_type = other DNA
gcaggaggcggactacttgcattttatttaatgagttctcgtactggcggaacgggtgctggcgctaactggatt

SEQ ID NO: 194595 - DNA, 75 bp, synthetic construct
  source 1..75: mol_type = other DNA
ttttcataaacgttggtttgggagaagcggcaaaacgggaggttggaaccggggtaaatcagatctcggatatgg

SEQ ID NO: 194596 - DNA, 75 bp, synthetic construct
  source 1..75: mol_type = other DNA
cagtgggctggcagtttttcatggagagaccattgatcttgaccatgcaatttgcctcacaactgccgtgctgtc

SEQ ID NO: 194597 - DNA, 75 bp, synthetic construct
  source 1..75: mol_type = other DNA
tcaccagtatccattatggcgttacggggcgtccggtttaccgttaccgtattcaggcagaacactactcactgc

SEQ ID NO: 194598 - DNA, 75 bp, synthetic construct
  source 1..75: mol_type = other DNA
caaagataccagcctggtgatcatcatcgggttgttcgatcttttcagtagcgttcagcaggcaaccgttgatcc

SEQ ID NO: 194599 - DNA, 75 bp, synthetic construct
  source 1..75: mol_type = other DNA
atacagtttggcgtcagtattgcagggccaatcggctatccaacaactgttaacttcccgattccttttacatct

SEQ ID NO: 194600 - DNA, 75 bp, synthetic construct
  source 1..75: mol_type = other DNA
taacgattattcgataaatggtggttttggcgttggtgcagtggggctttctacgggtaaagatggtgttagttt

SEQ ID NO: 194601 - DNA, 75 bp, synthetic construct
  source 1..75: mol_type = other DNA
tcaccggtgtggatgctctcacgctcacggtgaatcagacgctgaacaatcacgcgagcggaaaactgctcagta

SEQ ID NO: 194602 - DNA, 75 bp, synthetic construct
  source 1..75: mol_type = other DNA
tcagacctcagtgaagagcagaagcagacgataagtacgctggcaactgtgtcagcagggctggcctgcggtctt

SEQ ID NO: 194603 - DNA, 75 bp, synthetic construct
  source 1..75: mol_type = other DNA
ggccatcggggatatcggcaatatcagctcagtcatcagcggtaaaaccgtatccctggaaagcgccaccggaaa

SEQ ID NO: 194604 - DNA, 75 bp, synthetic construct
  source 1..75: mol_type = other DNA
ttcggccggcacgctctcccttgatggaaactcactggataacagcggcactgtccagggtaaccatgtcacgat

SEQ ID NO: 194605 - DNA, 75 bp, synthetic construct
  source 1..75: mol_type = other DNA
taatgtcagtattaccgcgggcaaacaggctcatatcagcggttcggatgtgattgcgaaccgggatatcagcat

SEQ ID NO: 194606 - DNA, 75 bp, synthetic construct
  source 1..75: mol_type = other DNA
gatgtgaacagccaggctgccggtattacggctgaaaacagtatggatatccgcgccggacgggatgtgaacatg

SEQ ID NO: 194607 - DNA, 75 bp, synthetic construct
  source 1..75: mol_type = other DNA
aaggcaacacaattaacggcagattcacttcttgaaatgaaaaaagcctcttttaaagaatggtacggaatatta

SEQ ID NO: 194608 - DNA, 75 bp, synthetic construct
  source 1..75: mol_type = other DNA
cacaaggtggtaagttaccgggtatgaataatgaccctagattccctatttctgctggattccagaaaatggaag

SEQ ID NO: 194609 - DNA, 75 bp, synthetic construct
  source 1..75: mol_type = other DNA
accgggcatcttctgaaccagcgggagggattttctgccacaacaacaacccggactaacccctcatccattcag

SEQ ID NO: 194610 - DNA, 75 bp, synthetic construct
  source 1..75: mol_type = other DNA
ggtgatgtatcgtggcgggtccgtccaccatcagtaagtattcgtggtatggatgcagtgatggaaacgctggag

SEQ ID NO: 194611 - DNA, 75 bp, synthetic construct
  source 1..75: mol_type = other DNA
tgaatgccggtcatgacatcgtactgggtactgccacggaaagtgattatcactacagtgaatcaggggaaaccc

SEQ ID NO: 194612 - DNA, 75 bp, synthetic construct
  source 1..75: mol_type = other DNA
gggcttccctgacgctcggcagtacaacgctcagcaacagtggctccctgctcagtggcggtcgcctgaccgtga

SEQ ID NO: 194613 - DNA, 75 bp, synthetic construct
  source 1..75: mol_type = other DNA
agcaggggagatatcactctcgacgcttttaccggcacgacgggtagtctgatgttaacggccgccggctcagtc

SEQ ID NO: 194614 - DNA, 75 bp, synthetic construct
  source 1..75: mol_type = other DNA
ctgcaggcaggctgaccaacaatggccagttgaccgccggcaacggcaccacggcactgagcggcagcgggattg

SEQ ID NO: 194615 - DNA, 75 bp, synthetic construct
  source 1..75: mol_type = other DNA
cggcactgtccagggtaaccatgtcacgcttcatcacagcaacactgacaacagcggtacggtcacggggctgag

SEQ ID NO: 194616 - DNA, 75 bp, synthetic construct
  source 1..75: mol_type = other DNA
ccagtgacacgctgacaacacagggacagataaccgccgggcagaatctcacggccagcgccaccacgctggcac

SEQ ID NO: 194617 - DNA, 75 bp, synthetic construct
  source 1..75: mol_type = other DNA
gcggtgactgcggcggtattatcaaaaagtacgaagagttgagtacggcacagcaaaagcaactgatcagtgact

SEQ ID NO: 194618 - DNA, 75 bp, synthetic construct
  source 1..75: mol_type = other DNA
gcgcttgcaggcgacaccctctcacagggtagtcacggacgctggctgacggcgggcgacctctccctccggggt

SEQ ID NO: 194619 - DNA, 75 bp, synthetic construct
  source 1..75: mol_type = other DNA
acgccaggaataatgaatcaatagagcaacgtaatgagaaaacctcatcagaaaacgtacctaatagttctgaaa

SEQ ID NO: 194620 - DNA, 75 bp, synthetic construct
  source 1..75: mol_type = other DNA
tacagacgaaaacaaacagccgaatctgggcaaagacgtagcgagcgctacggacaaggagaaagctgagcttgg

SEQ ID NO: 194621 - DNA, 75 bp, synthetic construct
  source 1..75: mol_type = other DNA
gctttccgccggtcgtgatgtgaacagccaggctgccggtattacggctgaaaacagtatggctatccgcgccgg

SEQ ID NO: 194622 - DNA, 75 bp, synthetic construct
  source 1..75: mol_type = other DNA
gcgctgacagtctgggtaaccttgagtccgggcttataaatgccggtggcgctctcggactgaaagcgatgggcg

SEQ ID NO: 194623 - DNA, 75 bp, synthetic construct
  source 1..75: mol_type = other DNA
ttgttgcttccgccctgaatacacagtcacagaccctgaccaacagcggtctgttgcagggggaggcctcactca

SEQ ID NO: 194624 - DNA, 75 bp, synthetic construct
  source 1..75: mol_type = other DNA
tcaagggcgtgagatgacaatgagtgtatctaaagagcctgtatgtggttattgccgcggtgatatagcagccat

SEQ ID NO: 194625 - DNA, 75 bp, synthetic construct
  source 1..75: mol_type = other DNA
tatctgaaacaatcacatccccatttcactatatattcaagaggaaactttcacattatttatatcagaaaaata

SEQ ID NO: 194626 - DNA, 75 bp, synthetic construct
  source 1..75: mol_type = other DNA
cctgccgttcgccagtcgctggcggaagacaaaacattgctgccgttttttagtaacgaacgggtgattcgtgct

SEQ ID NO: 194627 - DNA, 75 bp, synthetic construct
  source 1..75: mol_type = other DNA
acgtcgctcgctgggattaccagcggaaaaaatctgctcggtgtaccgcgaaagcgacatcgtaccgggagagca

SEQ ID NO: 194628 - DNA, 75 bp, synthetic construct
  source 1..75: mol_type = other DNA
acgacgcaatggtcgcggagctgaatcgccgatacgtggcacaaatcccaggctttcaatgctgtggaacggcct

SEQ ID NO: 194629 - DNA, 75 bp, synthetic construct
  source 1..75: mol_type = other DNA
ttgctattgttcttgcctcatataatggacagttatatattaaagaacaagttttaagtattttaaaccagagtt

SEQ ID NO: 194630 - DNA, 75 bp, synthetic construct
  source 1..75: mol_type = other DNA
cagatttggcatcaaggtaatgataatacgtggattgactggaccgaaaaaaattctatacgcataaacattaat

SEQ ID NO: 194631 - DNA, 75 bp, synthetic construct
  source 1..75: mol_type = other DNA
aggagttgcgggaatttaagcacagcatgtctttaagaccttctgtgaaaatcgcccgtaacgttcgctccctca

SEQ ID NO: 194632 - DNA, 75 bp, synthetic construct
  source 1..75: mol_type = other DNA
gatgatgatattgttatttcccttgagtcatggctggaactggcgagagccaatggttggtttgttgttcgcaga

SEQ ID NO: 194633 - DNA, 75 bp, synthetic construct
  source 1..75: mol_type = other DNA
ggatgactgttttggtttttatgacggggtgaaggttaagttactgtggcctggtaaactcacgatgaccatgac

SEQ ID NO: 194634 - DNA, 75 bp, synthetic construct
  source 1..75: mol_type = other DNA
atcaacttgctcagcagaatctggttgcctggatgattgatgtcatccgtcacgcaataagcggtacgcaggaga

SEQ ID NO: 194635 - DNA, 75 bp, synthetic construct
  source 1..75: mol_type = other DNA
tagagggatgctggaaaaatatattgctaagcatcataaagaatttgttacttttcgagcagaattagcatggga

SEQ ID NO: 194636 - DNA, 75 bp, synthetic construct
  source 1..75: mol_type = other DNA
ttcagagcatcacccctactccatgatgagctatgttgatcgaaaaactcttaacctggacgtttctgtgctctt

SEQ ID NO: 194637 - DNA, 75 bp, synthetic construct
  source 1..75: mol_type = other DNA
gacctgatattactcgatatctatatgcaaaaagagaatggactcgatttactgcccgccctgcacaacgctcac

SEQ ID NO: 194638 - DNA, 75 bp, synthetic construct
  source 1..75: mol_type = other DNA
agaagaaattaccaccggattacgcgtggaattttgccggataaatggtctgcgtggaccatcagctgccaatgt

SEQ ID NO: 194639 - DNA, 75 bp, synthetic construct
  source 1..75: mol_type = other DNA
tcattcgccatcttggggaatccgaatacataaggattaaaatctgggaggtggatccagccgttcttggtagcc

SEQ ID NO: 194640 - DNA, 75 bp, synthetic construct
  source 1..75: mol_type = other DNA
tgatcaactcactgacggattattttgttgaggtcggtaaattgtttcaggagatgcacgggcgcgggaaagaga

SEQ ID NO: 194641 - DNA, 75 bp, synthetic construct
  source 1..75: mol_type = other DNA
taccggaaacagcactgcatcagcagcagtgggagcacaaagcgggaagaatgctgctgagaataacagtctcag

SEQ ID NO: 194642 - DNA, 75 bp, synthetic construct
  source 1..75: mol_type = other DNA
aagagttttatctactgtcatcagcagaagatgaaaagagaatttatatagctcaattacgtagcagtattaatc

SEQ ID NO: 194643 - DNA, 75 bp, synthetic construct
  source 1..75: mol_type = other DNA
tggatttttcttctcaggatattcaacgacaactccagcgccttgaagaacgcgaattgccgttcgcaatggcgc

SEQ ID NO: 194644 - DNA, 75 bp, synthetic construct
  source 1..75: mol_type = other DNA
gactatgagttttcaaccgacgagttggccaacgaggttaacatctcacgcgtttcgtgccgtaaatatttgatc

SEQ ID NO: 194645 - DNA, 75 bp, synthetic construct
  source 1..75: mol_type = other DNA
gacctgatattgctcgatatctatatgcaaaaagagaacgggctcgatttactgccagccctgcacaatgcccgt

SEQ ID NO: 194646 - DNA, 75 bp, synthetic construct
  source 1..75: mol_type = other DNA
gtcacggggcgtccggtttaccgttaccgtattcaggcagaacactactcactgctgaaacaatattgccaataa

SEQ ID NO: 194647 - DNA, 75 bp, synthetic construct
  source 1..75: mol_type = other DNA
tcgattcttgtactaatggtgcttcgtcttgtgctaagactgaaatacccaaccccgccaattgtgcctaaaccg

SEQ ID NO: 194648 - DNA, 75 bp, synthetic construct
  source 1..75: mol_type = other DNA
accaggccgagctggatcagctaattcatggcaattcatctaacgaacaggatacccgccgtctgccaaaaggct

SEQ ID NO: 194649 - DNA, 75 bp, synthetic construct
  source 1..75: mol_type = other DNA
ttaccagcattcattatggcgtcacaggccgcccggtttaccgttaccgtattcaggcagagcattactcactac

SEQ ID NO: 194650 - DNA, 75 bp, synthetic construct
  source 1..75: mol_type = other DNA
gtccgactggtcaggcaatgacagccgatgcggaagccgttgtcagcgaagccctgcgcgacctggccttctggt

SEQ ID NO: 194651 - DNA, 75 bp, synthetic construct
  source 1..75: mol_type = other DNA
agtaataaagccaagaacgcatggggaggcgatgtcaccattacagcaacaagtaataaatacggttataccata

SEQ ID NO: 194652 - DNA, 75 bp, synthetic construct
  source 1..75: mol_type = other DNA
ggaaaaacttcgcggatttaaagcctggctgattctgctgtacggcattttgctatgcttgtcgccactgttgaa

SEQ ID NO: 194653 - DNA, 75 bp, synthetic construct
  source 1..75: mol_type = other DNA
aaaattaactcacgcgtgctgactctggcgatctgcgcttttatcgtcattacgttgacgatttgggtttcgttt

SEQ ID NO: 194654 - DNA, 75 bp, synthetic construct
  source 1..75: mol_type = other DNA
cgtggatatcgcgttaagggattttcaaccacggctgaaggggtcaggcagctacgggaacatatcaagttttcg

SEQ ID NO: 194655 - DNA, 75 bp, synthetic construct
  source 1..75: mol_type = other DNA
ttttggcgctcctgttatcggctttaatgttggtcgtaactttctgaagtcactaattaattcgaaggggaagta

SEQ ID NO: 194656 - DNA, 75 bp, synthetic construct
  source 1..75: mol_type = other DNA
atgatcaaaatctatctattggcagtagccacaggcctttcagtggtcctcatctatggcttactggttccgtcg

SEQ ID NO: 194657 - DNA, 75 bp, synthetic construct
  source 1..75: mol_type = other DNA
atgtctaacactagttctaattttgagatggctggcgttttgttaggaaaagaggcgcgtaaacgtaaaacacct

SEQ ID NO: 194658 - DNA, 75 bp, synthetic construct
  source 1..75: mol_type = other DNA
atgaataccaccccggctactgtggatcctgtaacagtatgtagtaaggacaaaaataacatcacccttgaaaca

SEQ ID NO: 194659 - DNA, 75 bp, synthetic construct
  source 1..75: mol_type = other DNA
caggggcaccagcgtatagcgctgctgagcgaaaataacaatcaggcgtttattacgcagcgccgcaatggttac

SEQ ID NO: 194660 - DNA, 75 bp, synthetic construct
  source 1..75: mol_type = other DNA
atatcacctctacggtgctgaatatctttgccgtactgaccgcattctttggcatttatctcggtttccacgagg

SEQ ID NO: 194661 - DNA, 75 bp, synthetic construct
  source 1..75: mol_type = other DNA
ggtgttctttcagttgggaagcccgttatatggcattgtgtcgtgcctcattccgtttttcctgatctataaagt

SEQ ID NO: 194662 - DNA, 75 bp, synthetic construct
  source 1..75: mol_type = other DNA
caggaaaaaatcgcaattattcaacagactatggagcctggcatgacggtgtcccacgtggcgcgtttgcatgga

SEQ ID NO: 194663 - DNA, 75 bp, synthetic construct
  source 1..75: mol_type = other DNA
cagtggcgtagcctcgaaacaaaaaaaatgtttgaggctcagttagcaatcggtatggcttacaggtcaatcttt

SEQ ID NO: 194664 - DNA, 75 bp, synthetic construct
  source 1..75: mol_type = other DNA
tgtggcgctggataaactgttaggtcggcgggcgcaagaaggtgaacgttggcagtcgggggcggtgttggtttc

SEQ ID NO: 194665 - DNA, 75 bp, synthetic construct
  source 1..75: mol_type = other DNA
gcggacatgaagatgtgggccgccatgtggcgctggataaactgttaggtcggcgggcgcaagaaggtgaacgtt

SEQ ID NO: 194666 - DNA, 75 bp, synthetic construct
  source 1..75: mol_type = other DNA
tccagccgtcgctttatggggttgaaagagcgtcgtcgggcactggcggggcgcacgggctgtggcgtatgtggc

SEQ ID NO: 194667 - DNA, 75 bp, synthetic construct
  source 1..75: mol_type = other DNA
agttcagctggggcccaccaacatagtcagactgggcccagaacgaatagcgggagtcaacctactggaatgttt

SEQ ID NO: 194668 - DNA, 75 bp, synthetic construct
  source 1..75: mol_type = other DNA
agcagccacttctgcatccaccgcgactacgaaagcgtcagaagctgccacctcagcccgggatgcgtcggcttc

SEQ ID NO: 194669 - DNA, 75 bp, synthetic construct
  source 1..75: mol_type = other DNA
aacccttatccggagagagttatatacgtctgcaggttgaaatttttctttcatcacttgaactggaatgccagg

SEQ ID NO: 194670 - DNA, 75 bp, synthetic construct
  source 1..75: mol_type = other DNA
atcagagtgtaagtaatacaaatacttctggtcaattaacgatatggaatgatctttctccaggaacattggttg

SEQ ID NO: 194671 - DNA, 75 bp, synthetic construct
  source 1..75: mol_type = other DNA
tatctcgtaaaagcggcagatgaagccgttttttctggcagcgaggttttaaaggaggcaatgcgcttaacgatc

SEQ ID NO: 194672 - DNA, 75 bp, synthetic construct
  source 1..75: mol_type = other DNA
ggatgcagataataaacatggtttctgggatataaaaggtattccagaatcattgttaggggctttatcaaagcg

SEQ ID NO: 194673 - DNA, 75 bp, synthetic construct
  source 1..75: mol_type = other DNA
cagccgtgccagttatgaaatggtgcaaaagtcagcgatgtgcggcgtagagattttgtttgcggtgtctgccgc

SEQ ID NO: 194674 - DNA, 75 bp, synthetic construct
  source 1..75: mol_type = other DNA
ggctgcaaggtgcggtgctggtttccagtcgtgccagttatgaaatggtgcaaaagtcagcgatgtgcggcgtcg

SEQ ID NO: 194675 - DNA, 75 bp, synthetic construct
  source 1..75: mol_type = other DNA
gcggacatgaagacgtgggccgccatgtggcgctggataaattactaggccgtcgggcgcaagaaggtgaaaact

SEQ ID NO: 194676 - DNA, 75 bp, synthetic construct
  source 1..75: mol_type = other DNA
attcgtttggtggtaacccaccattatattcgtgcggtcttagtgcgctgtaatatccaacgatatagtccgtta

SEQ ID NO: 194677 - DNA, 75 bp, synthetic construct
  source 1..75: mol_type = other DNA
aagcggaactgaaagtggtttccgtgactgccggaacctatgagatcacggcgtcagcaggaaatgaccagcctt

SEQ ID NO: 194678 - DNA, 75 bp, synthetic construct
  source 1..75: mol_type = other DNA
cgaatgcgcagtctgtaacgtttgtggccgataagactacggcgaccatctccagtattgaggtgattggcaacc

SEQ ID NO: 194679 - DNA, 75 bp, synthetic construct
  source 1..75: mol_type = other DNA
gacaaaaacgagctggcgcaggtggcactgcgtcaggaactggagaacgccgcgaagcgtgaagcacagcgcgag

SEQ ID NO: 194680 - DNA, 75 bp, synthetic construct
  source 1..75: mol_type = other DNA
atcgattttccgattcgtttggtggtaacccaccattatattcgtgcggtcttagtgcgctgtaatatccaacga

SEQ ID NO: 194681 - DNA, 75 bp, synthetic construct
  source 1..75: mol_type = other DNA
cagagcgtgtagattctctggtggcggacgggaagactactgcaacactgacggttactctgatgtcgggtgtca

SEQ ID NO: 194682 - DNA, 75 bp, synthetic construct
  source 1..75: mol_type = other DNA
tcacaggcaaagccaacactgggtgagttcaccgaaactgaagcaggggtgtatcagtctgtctttactaccgga

SEQ ID NO: 194683 - DNA, 75 bp, synthetic construct
  source 1..75: mol_type = other DNA
aaactgctgcagatgaccggagaatggctgaatacaacaggggctgatcagcagtcaccggaacatcgtagctga

SEQ ID NO: 194684 - DNA, 75 bp, synthetic construct
  source 1..75: mol_type = other DNA
ccaaagaccttgagtactttgcgctcggtttttcgctttccgaggggataatcgaaagtccgcgcgatatcttcg

SEQ ID NO: 194685 - DNA, 75 bp, synthetic construct
  source 1..75: mol_type = other DNA
gttaccctgttctcggcaaataaccctgttggggggaatgtgtgggtcgacattgaggctccggaaggggtgaca

SEQ ID NO: 194686 - DNA, 75 bp, synthetic construct
  source 1..75: mol_type = other DNA
aactgtcactgcagaactgcgggccacgatgatggatgtgtcgaagtctaccctgagcgtgaatgaactctcagg

SEQ ID NO: 194687 - DNA, 75 bp, synthetic construct
  source 1..75: mol_type = other DNA
accgaagccgcgcagctgactgttattgccggagagatgtcatcagcgaactctacgcttgttgcggacaataaa

SEQ ID NO: 194688 - DNA, 75 bp, synthetic construct
  source 1..75: mol_type = other DNA
atgtcaaggctgatgattgtgctggtcgtgttgttatcgctggcggtggggggtctgtttctggagaagcataaa

SEQ ID NO: 194689 - DNA, 75 bp, synthetic construct
  source 1..75: mol_type = other DNA
atggccgtcgatttaaccccagtgtttttaaagatacttatcaatatggttatacaagctcaggtcaaaatacct

SEQ ID NO: 194690 - DNA, 75 bp, synthetic construct
  source 1..75: mol_type = other DNA
ttactctgggatgactattttgcacctggctacggcgtgccgaacgacgaaggcatggaagcagtgaaattgctg

SEQ ID NO: 194691 - DNA, 75 bp, synthetic construct
  source 1..75: mol_type = other DNA
ttgggacataaacgtattgcattgttgagtgaagacacttcacatagctatgttgttgcaagacgtcagggatgg

SEQ ID NO: 194692 - DNA, 75 bp, synthetic construct
  source 1..75: mol_type = other DNA
gacatggatttctttgaacagaatggtgattttaagaaagaattaaaaaataaacccataacacaaaccatgaga

SEQ ID NO: 194693 - DNA, 75 bp, synthetic construct
  source 1..75: mol_type = other DNA
ctggacgattaagggcaagcccgccagtggtcgtgccgtattgtctcaggaacaggacggcataaaatcgcatac

SEQ ID NO: 194694 - DNA, 75 bp, synthetic construct
  source 1..75: mol_type = other DNA
gtgtctctgttcctatctttggatctggaatcactagaataaaggaacataaaaatattagcgatgaggatttac

SEQ ID NO: 194695 - DNA, 75 bp, synthetic construct
  source 1..75: mol_type = other DNA
caaattataagtttgatgaagatgaaatccttgaagtcaaccaagaaagaaaggtaggaaagaaacaaaaatatt

SEQ ID NO: 194696 - DNA, 75 bp, synthetic construct
  source 1..75: mol_type = other DNA
ccagggcagacaaaaacgagctggcgcaggtggcactgcgtcaggaactggagaacgcggcgaagcgtgaagcac

SEQ ID NO: 194697 - DNA, 75 bp, synthetic construct
  source 1..75: mol_type = other DNA
accagtacagatggtaatcatagccactcactgtccggcacagcagcatctgcaggtgcacacgcgcatactgtc

SEQ ID NO: 194698 - DNA, 75 bp, synthetic construct
  source 1..75: mol_type = other DNA
agggcaaacccgccagtggccgggccgtattgtctcaggaacgggacggcataaaatcgcacacccacagcgcca

SEQ ID NO: 194699 - DNA, 75 bp, synthetic construct
  source 1..75: mol_type = other DNA
gcaccccccatgcactgaagaacaggccgaatggctcattcagtgttaccgcaggcgcggatgcgaggttaaaaa

SEQ ID NO: 194700 - DNA, 75 bp, synthetic construct
  source 1..75: mol_type = other DNA
tttagcgccacgctgcgtgataatctgttactcgccgcacctggcgctacagatgacactctagctgaaattctc

SEQ ID NO: 194701 - DNA, 75 bp, synthetic construct
  source 1..75: mol_type = other DNA
gaagtaaagttctggcactgctggaaagcagtaaacgatatctctggcatggcaatgttgtcgctgcgctggaac

SEQ ID NO: 194702 - DNA, 75 bp, synthetic construct
  source 1..75: mol_type = other DNA
cctgctcaggccaggaaaaccgcttgtggtgggtatcgatggtggttatattcgcgaccgggatgacaaaaagcg

SEQ ID NO: 194703 - DNA, 75 bp, synthetic construct
  source 1..75: mol_type = other DNA
tgatcctgatgctgtggatggcgtctggcggcgttggtggcaatgctcaacccggcgcgttaattgccctgtttg

SEQ ID NO: 194704 - DNA, 75 bp, synthetic construct
  source 1..75: mol_type = other DNA
gcggactctctcgtttccaacaaataatagtgatggacaacgggcaaattattgagcaaggtactcacgcagaac

SEQ ID NO: 194705 - DNA, 75 bp, synthetic construct
  source 1..75: mol_type = other DNA
gttgccggactgtatagcttcaactatatgctacccgctgcgggcgtgcgtggcgcagcaatcacccgtaccgcc

SEQ ID NO: 194706 - DNA, 75 bp, synthetic construct
  source 1..75: mol_type = other DNA
atgaaccatgagagccgaactgtatacctgaacacggccattgaggccctgttgaaagctgaggcggctctgaac

SEQ ID NO: 194707 - DNA, 75 bp, synthetic construct
  source 1..75: mol_type = other DNA
cagcgtgctggtattctgggtgccgaccgactggagccatagcagcaaagttgtgtatgcatatttgacctacat

SEQ ID NO: 194708 - DNA, 75 bp, synthetic construct
  source 1..75: mol_type = other DNA
atcccgcggcggctcgcgggattgccgcttcattaacctttgtctgctgcctggcatttctgataggaccgagca

SEQ ID NO: 194709 - DNA, 75 bp, synthetic construct
  source 1..75: mol_type = other DNA
ccgccgttttgaataacgaactgcaggataaatttgtctgctggtatccgggttttcaaagtgacgggaagggac

SEQ ID NO: 194710 - DNA, 75 bp, synthetic construct
  source 1..75: mol_type = other DNA
aaatcaggggagacccggaacgacatcggattatcggtgtcagaatccaagctgttgctgaatacggtccagcag

SEQ ID NO: 194711 - DNA, 75 bp, synthetic construct
  source 1..75: mol_type = other DNA
gttctgaataacgaactgcaggataaatttgtctgctggtatccggggtttcaaagtgacggaaaggtatcagcg

SEQ ID NO: 194712 - DNA, 75 bp, synthetic construct
  source 1..75: mol_type = other DNA
attattgaacaaggtacccatgcagaactgcttgccagacaggggcgttattaccagtttaagcagggtttgtaa

SEQ ID NO: 194713 - DNA, 75 bp, synthetic construct
  source 1..75: mol_type = other DNA
gcacttaaaaagtatcacgacagctatagtttagcttctatatacgtgtctgattggcttgattttggacatatt

SEQ ID NO: 194714 - DNA, 75 bp, synthetic construct
  source 1..75: mol_type = other DNA
atgccggtaactaaaacggtttccgttggcggggaagttggtaaacaactcggcgtaagctatttccttgaacgt

SEQ ID NO: 194715 - DNA, 75 bp, synthetic construct
  source 1..75: mol_type = other DNA
gcagggctgaccggcggtctaaccggaaacagcaccgcatcagctgcagtgggagcacagagcgggaagaatgct

SEQ ID NO: 194716 - DNA, 75 bp, synthetic construct
  source 1..75: mol_type = other DNA
tgctgactgaaaagcttgggaaaatctcatcggaagaggggatgacgacacagcagaaaaaagaaatggctgcat

SEQ ID NO: 194717 - DNA, 75 bp, synthetic construct
  source 1..75: mol_type = other DNA
acgttgctggtatcacggcatcgcagacaaaccgtgaaggtggcgcgtcagaagttgccacaatgatgcacgctg

SEQ ID NO: 194718 - DNA, 75 bp, synthetic construct
  source 1..75: mol_type = other DNA
aaccgtttgatcatattagaaagagttataagcttgaatatttatataatacgacattaaatgaattatttgttt

SEQ ID NO: 194719 - DNA, 75 bp, synthetic construct
  source 1..75: mol_type = other DNA
gcagcatctgcgcatttacaccttcagcaaactattgccactctcccctgccgggctggcccgctatcgccaggg

SEQ ID NO: 194720 - DNA, 75 bp, synthetic construct
  source 1..75: mol_type = other DNA
tttcagcatctggggcaagtcattgcctctgccatgcgcatcactgatttaacggaacaaaaaccagaagtggct

SEQ ID NO: 194721 - DNA, 75 bp, synthetic construct
  source 1..75: mol_type = other DNA
ttgaagacgcaggactcaacagttggctgggtgaaggtggacgccaactctccggtggcgaactgcgccgtctgg

SEQ ID NO: 194722 - DNA, 75 bp, synthetic construct
  source 1..75: mol_type = other DNA
taaaaacagtaaaaatccggcagagcgtgaaaaggcacagcagaaatatgatgcattgcttgaaaaagatattgc

SEQ ID NO: 194723 - DNA, 75 bp, synthetic construct
  source 1..75: mol_type = other DNA
ggcggtctaaccggaaacagcaccgcatcagcagcagtgggagcacagagcgggaagaatgctgttgataataac

SEQ ID NO: 194724 - DNA, 75 bp, synthetic construct
  source 1..75: mol_type = other DNA
tattacacgctttggaaccaggtggttcagaaaaagaaaactatcttcatgaaaaatttagcaacgaaagacgtc

SEQ ID NO: 194725 - DNA, 75 bp, synthetic construct
  source 1..75: mol_type = other DNA
gtctgcttcaaaagatgaggcgaccagacaagcgtcagcagcgaatggcagtgccacgaccgcaacgacgaaggc

SEQ ID NO: 194726 - DNA, 75 bp, synthetic construct
  source 1..75: mol_type = other DNA
gtctgcttcaaaagatgaggcgaccagacaagcgtcagcagcgaatggcagtgccacgacagcaccgacgaaggc

SEQ ID NO: 194727 - DNA, 75 bp, synthetic construct
  source 1..75: mol_type = other DNA
gtattttacgttgaagccagagcattccctatcaatatatttgctgaggagggcttgaacgtaattgttccaacg

SEQ ID NO: 194728 - DNA, 75 bp, synthetic construct
  source 1..75: mol_type = other DNA
tccggcagaatccgcggcaacgcgcgccgagacagcagcaaaacgggcagaggatattgcatccgccgtggcgct

SEQ ID NO: 194729 - DNA, 75 bp, synthetic construct
  source 1..75: mol_type = other DNA
ttccgctgaatccgcggcaacgcgcgccgagacagcagcaaaacgggcagaggatattgcatccgccgtggcgct

SEQ ID NO: 194730 - DNA, 75 bp, synthetic construct
  source 1..75: mol_type = other DNA
tacggccgaatccgcggcaacgcgcgccgagacagcagcaaaacgggcagaggatattgcatccgccgtggcgct

SEQ ID NO: 194731 - DNA, 75 bp, synthetic construct
  source 1..75: mol_type = other DNA
ggcagccacttctgcatccacagcgaccacgaaggcgtcagaagctgccacctcagcacggggtgcggcggcttc

SEQ ID NO: 194732 - DNA, 75 bp, synthetic construct
  source 1..75: mol_type = other DNA
tggtggtaatcagattcgaatgataggtggggagtatggtgcattatggcgtaatgatggcgctaaaacttacct

SEQ ID NO: 194733 - DNA, 75 bp, synthetic construct
  source 1..75: mol_type = other DNA
aacatcaatggtgttaagtttgatggctcaggcgatatcaacattaatacactggtatctcgtggccgagttacg

SEQ ID NO: 194734 - DNA, 75 bp, synthetic construct
  source 1..75: mol_type = other DNA
ctggaactggaatagcggtgtttatgatgcagatatcagtggtgcatcgacattaatcctccacttcaatatgaa

SEQ ID NO: 194735 - DNA, 75 bp, synthetic construct
  source 1..75: mol_type = other DNA
caggttgcggaaatatttgtcttgcaggtgctgtggtggaagttattggcacccgtggcgcaatgaccatacgcg

SEQ ID NO: 194736 - DNA, 75 bp, synthetic construct
  source 1..75: mol_type = other DNA
tgcagcggaatccgcggcaacgcgcgccgagacagcagcaaaacgggcagaggatattgcatccgccgtggcgct

SEQ ID NO: 194737 - DNA, 75 bp, synthetic construct
  source 1..75: mol_type = other DNA
ccggtgcacatacccattcgatgacatttgtttcaggtggttccagtggtgctccgggaagtggatcacctgatt

SEQ ID NO: 194738 - DNA, 75 bp, synthetic construct
  source 1..75: mol_type = other DNA
gagacagcggcaaaacgggcagaggatattgcatccgccgtggcgcttgaggatgcgagcacgacgaaaaagggg

SEQ ID NO: 194739 - DNA, 75 bp, synthetic construct
  source 1..75: mol_type = other DNA
atgagcaacctacgaaaatatcgagagtcactgaagatctctcaaacaacccttgctaaggctgttggatgcaca

SEQ ID NO: 194740 - DNA, 75 bp, synthetic construct
  source 1..75: mol_type = other DNA
acttgctaaggcagttggatgcacacagggagctatcggacattgggaatctggtcgtcgcttcccagaccttaa

SEQ ID NO: 194741 - DNA, 75 bp, synthetic construct
  source 1..75: mol_type = other DNA
atgagcaacctacgaaaatatcgagagtcactgaatatctctcaaacaacccttgctaaggcagttggatgcaca

SEQ ID NO: 194742 - DNA, 75 bp, synthetic construct
  source 1..75: mol_type = other DNA
gctccggcatttattcgttcacgacgggatacgcccgacgcaaactggtcgccgtgggcgcagctttacacctcg

SEQ ID NO: 194743 - DNA, 75 bp, synthetic construct
  source 1..75: mol_type = other DNA
taagccaacagcatcagagatcggggcgttaccgtcagatgggacagcagtatcgtcagttaatctggcttcaaa

SEQ ID NO: 194744 - DNA, 75 bp, synthetic construct
  source 1..75: mol_type = other DNA
agaaaattgttcgcgtgtcttatacatggacgttggcggatgttcctgcatgggtggacaaaaaagcgttctcca

SEQ ID NO: 194745 - DNA, 75 bp, synthetic construct
  source 1..75: mol_type = other DNA
ttacggcacgaagacagtcagtacgtttaaccacggcacaaaatcaaccaatacttcaggcaatcatacacatac

SEQ ID NO: 194746 - DNA, 75 bp, synthetic construct
  source 1..75: mol_type = other DNA
gcgagctggactttgagacccgactgactatggccaccgacattggcatacagcacaaccgccacggccacgagt

SEQ ID NO: 194747 - DNA, 75 bp, synthetic construct
  source 1..75: mol_type = other DNA
agtgaaaccaacgcaaaggcgagcgagactgcggctgctaactcggcgaaagcatcagctgcaagccagacggct

SEQ ID NO: 194748 - DNA, 75 bp, synthetic construct
  source 1..75: mol_type = other DNA
tcgaaaatgtgacaaatatcacaggtgttcgtcaaattgagttatggcggcgtgatgatttacaacacccacggt

SEQ ID NO: 194749 - DNA, 75 bp, synthetic construct
  source 1..75: mol_type = other DNA
tggatgttctgataccaggaaggcttcagacaaaaagccgggtgaagccgctgtcctctggatcaagcgtggtga

SEQ ID NO: 194750 - DNA, 75 bp, synthetic construct
  source 1..75: mol_type = other DNA
tggatgttctgataccaggaaggcttcagacaaaaagccgggtgaagccgctgtactctggctcaagcgtggtga

SEQ ID NO: 194751 - DNA, 75 bp, synthetic construct
  source 1..75: mol_type = other DNA
atttacgttttcctgagtatatgcctgccaccatcatggatcccgatccggactctgcggtgatttctcgttttt

SEQ ID NO: 194752 - DNA, 75 bp, synthetic construct
  source 1..75: mol_type = other DNA
tggatgttctgataccaggaaggcttcagacaaaaagccgggtggagccgctgtcctctgggtcaagcgtggtga

SEQ ID NO: 194753 - DNA, 75 bp, synthetic construct
  source 1..75: mol_type = other DNA
tggatgttctgataccaggaaggcttcagacaaaaagccgggtgcagccgctgtcctctggctcaagcgtggtga

SEQ ID NO: 194754 - DNA, 75 bp, synthetic construct
  source 1..75: mol_type = other DNA
tggatgttctgataccaggaaggcttcagacaaaaagccgggtgtagccgctgtcctctggttcaagcgtggtga

SEQ ID NO: 194755 - DNA, 75 bp, synthetic construct
  source 1..75: mol_type = other DNA
aatatctctgttcaggttcttttcccactcgcagtcacttttaccccagtaatggcggcacatgcgcagcatgcg

SEQ ID NO: 194756 - DNA, 75 bp, synthetic construct
  source 1..75: mol_type = other DNA
cgggaaaatcacgcgtacatttagtaccaacaagccaggtacatacacattcacattcaactctttgacatatgg

SEQ ID NO: 194757 - DNA, 75 bp, synthetic construct
  source 1..75: mol_type = other DNA
ttactggctgaaggtggcaaaattaccggtcagggtagtcagtggcaagtaacgctcccggcttaccgtccaggc

SEQ ID NO: 194758 - DNA, 75 bp, synthetic construct
  source 1..75: mol_type = other DNA
aaggcttcagacaaaaagccgggtgaagccgctgttctctggatcaagcgtggtgatgtggaagcgctgcagaaa

SEQ ID NO: 194759 - DNA, 75 bp, synthetic construct
  source 1..75: mol_type = other DNA
gccaacaagcgtgtgcgtgcaaccactctgcgttatttctggtgtcgggagtttggcaaggaaaaaggcaggaaa

SEQ ID NO: 194760 - DNA, 75 bp, synthetic construct
  source 1..75: mol_type = other DNA
ggatttcagcgaaccatcttcgctggcgacgatgatccaggaggcatggtgcagcgccctgcatcttgagccctg

SEQ ID NO: 194761 - DNA, 75 bp, synthetic construct
  source 1..75: mol_type = other DNA
tggatgttctgataccaggaaggcttcagacaaaaagccgggtggagccgctgtgctctggctcaagcgtggtga

SEQ ID NO: 194762 - DNA, 75 bp, synthetic construct
  source 1..75: mol_type = other DNA
gttaaatccaatacattgacgatgaactttagtaaagcgagagatttagcaggaattgactggggtgatggctca

SEQ ID NO: 194763 - DNA, 75 bp, synthetic construct
  source 1..75: mol_type = other DNA
ggcctgggcgtggatgatgcaaagcatggatttaccgaagatgaactggcgcgggtgatggcagcgtttgataca

SEQ ID NO: 194764 - DNA, 75 bp, synthetic construct
  source 1..75: mol_type = other DNA
ggtctgggcgtggatgatgcaaaacatggtttcactgaggatgagctggcgcaggtgatggcagcatttgatacg

SEQ ID NO: 194765 - DNA, 75 bp, synthetic construct
  source 1..75: mol_type = other DNA
acgtttgaatcttgatgaatggcaaaaaatctttgatatcgcagatgccagtcatcgttatatggggaatgctat

SEQ ID NO: 194766 - DNA, 75 bp, synthetic construct
  source 1..75: mol_type = other DNA
gttaaatccaatacattgacgatgaattttagtaaagcacgggatttagcagggattgactggggggatggctca

SEQ ID NO: 194767 - DNA, 75 bp, synthetic construct
  source 1..75: mol_type = other DNA
gtaaaagccaatacattgacgatgaatttcagtaaagcgagggatttagcaggcattgactggggtgaaggttcg

SEQ ID NO: 194768 - DNA, 75 bp, synthetic construct
  source 1..75: mol_type = other DNA
gctgattttggtagcaaaagcttaagcctgcatttgctcaatgaagcgcagaatgagctggaactgtcagaaggc

SEQ ID NO: 194769 - DNA, 75 bp, synthetic construct
  source 1..75: mol_type = other DNA
tccaggcgggcgcctttccgtaaaccgacatcatctgatgctcgcccttcttccgatgatacgcctgtgcctggt

SEQ ID NO: 194770 - DNA, 75 bp, synthetic construct
  source 1..75: mol_type = other DNA
atgagcattaaattaattgcggtagatatggatggtactttcttaagcgatcaaaaaacctataaccgtgagcgg

SEQ ID NO: 194771 - DNA, 75 bp, synthetic construct
  source 1..75: mol_type = other DNA
atgacgcccattctgaatcactattttgcccgtattcgctggacgggtgctgctgcggtcaatatcgatacgcta

SEQ ID NO: 194772 - DNA, 75 bp, synthetic construct
  source 1..75: mol_type = other DNA
cctgaataccacggctggtgcagtcggaggcggtgcggcaggtgcggcagcaggctccatggtaagtgataaaac

SEQ ID NO: 194773 - DNA, 75 bp, synthetic construct
  source 1..75: mol_type = other DNA
agcgacgataacgaaggtattaaagaacgtaccagcttccgtctggagcgtcgggtcgccgcagtgggtcgtcaa

SEQ ID NO: 194774 - DNA, 75 bp, synthetic construct
  source 1..75: mol_type = other DNA
ctgaatctttccgatgaactgattccacaagtacaaaaagcattacatgaggccatcggcgatattatggtgccg

SEQ ID NO: 194775 - DNA, 75 bp, synthetic construct
  source 1..75: mol_type = other DNA
cgcaaggggaatacatcaccgggatcgatgacgatgatgaatggacgcccaaccgcctgagcgtcttcctcgccc

SEQ ID NO: 194776 - DNA, 75 bp, synthetic construct
  source 1..75: mol_type = other DNA
ttaccgctgcagaggaaacggtgttcgaactggaagaaatccaggacgacaaaccgtccctgtttgcccgcgtca

SEQ ID NO: 194777 - DNA, 75 bp, synthetic construct
  source 1..75: mol_type = other DNA
acgcaccgaaaaatccctggctgaacaggaagaacgcctgtctgagctggagactgctctgcaggagcagcaaac

SEQ ID NO: 194778 - DNA, 75 bp, synthetic construct
  source 1..75: mol_type = other DNA
atgaatcaaccaatacacaatgcttactggttatcccgttttgacatccttctcgacagtgccctggcgcagcac

SEQ ID NO: 194779 - DNA, 75 bp, synthetic construct
  source 1..75: mol_type = other DNA
cacaagtacaaaagcattacatgaggccatcggcgatattatggtgtcggtccacaccggcaacggcagcatcga

SEQ ID NO: 194780 - DNA, 75 bp, synthetic construct
  source 1..75: mol_type = other DNA
gcgacagaaaaactacgcacttacttttcaaatgtatgtgctgattttgaagctgaactggttgaaatggatggc

SEQ ID NO: 194781 - DNA, 75 bp, synthetic construct
  source 1..75: mol_type = other DNA
ataccgacgccagatttttgaccatgacgcgacagaaaaactacgcacttacttttcaaatgtatgtgctgattt

SEQ ID NO: 194782 - DNA, 75 bp, synthetic construct
  source 1..75: mol_type = other DNA
ctttgacaacttagaggatatcttctttaagtttggcctgaatctttccgatgaactgattccacaagtacaaaa

SEQ ID NO: 194783 - DNA, 75 bp, synthetic construct
  source 1..75: mol_type = other DNA
agcctacctggtcggcctggctgctactgatgaccctgccagtctgggtacggaaatgctgacattcagcgccag

SEQ ID NO: 194784 - DNA, 75 bp, synthetic construct
  source 1..75: mol_type = other DNA
agacagccctgcaggtacaacaggccgcctttaacgaactggtggacaagctgagccatgaggactgccgccagg

SEQ ID NO: 194785 - DNA, 75 bp, synthetic construct
  source 1..75: mol_type = other DNA
caggaagaacgcctgtctgagctggagacagccctgcaggcacagctgaccgcctttaacgaactggtgaataag

SEQ ID NO: 194786 - DNA, 75 bp, synthetic construct
  source 1..75: mol_type = other DNA
cgaactggaagaaatccaggatgacaaaccgtccctgtttgcccgtgtcacggcgctgtttaccaaaaaagagca

SEQ ID NO: 194787 - DNA, 75 bp, synthetic construct
  source 1..75: mol_type = other DNA
tcacattcaactctttgacatatggagggtatgaaatgaaaccagtgactgtgacaattaacgccgttcctgcag

SEQ ID NO: 194788 - DNA, 75 bp, synthetic construct
  source 1..75: mol_type = other DNA
tggactccgagggtaatccggtgacgggagaagccagccgcctgcgacttgttccgcaagacactaatggtgtaa

SEQ ID NO: 194789 - DNA, 75 bp, synthetic construct
  source 1..75: mol_type = other DNA
gactgccggaacgtatgagatcacggcgtcggcaggaaatgaccagccttcgaatgcgcagtctgtaacgtttgt

SEQ ID NO: 194790 - DNA, 75 bp, synthetic construct
  source 1..75: mol_type = other DNA
tcggcaagcctgacgggtgctgcgtctgaaggggcgactgtttcttgttggaccgaaaaaggtgatggttcctat

SEQ ID NO: 194791 - DNA, 75 bp, synthetic construct
  source 1..75: mol_type = other DNA
gaggaggattatcagttcctgccgtcgaaaaatgaccatttcgtgagcggaaaaatcacgcgtaaatttagtacc

SEQ ID NO: 194792 - DNA, 75 bp, synthetic construct
  source 1..75: mol_type = other DNA
gggagaagccagccgcctgcgacttgttccgcaagacattaatggtgttaccgttggtgccatttcggaaataaa

SEQ ID NO: 194793 - DNA, 75 bp, synthetic construct
  source 1..75: mol_type = other DNA
gaccgatgaggcgcgtttctctgacgtgcatcaggccgtggagctggtcgctactgagcagcagaacctgagcga

SEQ ID NO: 194794 - DNA, 75 bp, synthetic construct
  source 1..75: mol_type = other DNA
agactgctctgcaggagcagcaaaccgcctttaacgaactggtgaataagctgagtcatgaagacagccgccagg

SEQ ID NO: 194795 - DNA, 75 bp, synthetic construct
  source 1..75: mol_type = other DNA
cgaactggaagaagtccaggacgaaaaaccatccctgtttgcccgcgtcacggcgctgtttaccaaaaaagagca

SEQ ID NO: 194796 - DNA, 75 bp, synthetic construct
  source 1..75: mol_type = other DNA
agagagcccgttatctcgtgaaaaatgaaacgaagctgcatgacggttcaggtcaacgtaattatggttgcagtc

SEQ ID NO: 194797 - DNA, 75 bp, synthetic construct
  source 1..75: mol_type = other DNA
agacagttctgcaggcacaacaggccgcctttaacgaactggtggacaagctgagccatgaagacagccgccagg

SEQ ID NO: 194798 - DNA, 75 bp, synthetic construct
  source 1..75: mol_type = other DNA
cgaactggaagaagtccaagatgacaaactgtccctgtttgcccgcgtcacggcgctgtttaccaaaaaagagca

SEQ ID NO: 194799 - DNA, 75 bp, synthetic construct
  source 1..75: mol_type = other DNA
cagccaatgagcaacgaatggccaatgcgcaagatcctaagtctgccttatctgaaatgatgagcttctttgtct

SEQ ID NO: 194800 - DNA, 75 bp, synthetic construct
  source 1..75: mol_type = other DNA
acctttgccactgctaaccagcgtctggcagagctggctgacagagctccagctgtaacttcaatgtcatcactg

SEQ ID NO: 194801 - DNA, 75 bp, synthetic construct
  source 1..75: mol_type = other DNA
gactcaattacagaactccacatatactccaacgataggaacgataacaactcaagatgaaagtaatgcagctaa

SEQ ID NO: 194802 - DNA, 75 bp, synthetic construct
  source 1..75: mol_type = other DNA
tcttccgcgtgaaatcgagttacgccaaaaacaatacgagtactatcgtgatttactgttcagtttcctaaaaac

SEQ ID NO: 194803 - DNA, 75 bp, synthetic construct
  source 1..75: mol_type = other DNA
tttctgatgatcgttcctaccggaaatggctggagtctcgctcagctcattatgttatggggcgcatcgataatg

SEQ ID NO: 194804 - DNA, 75 bp, synthetic construct
  source 1..75: mol_type = other DNA
gaataccacctatacaccacctctgggcactgttacatcagccaatgagcaacgaatggctaatgcgcaagatcc

SEQ ID NO: 194805 - DNA, 75 bp, synthetic construct
  source 1..75: mol_type = other DNA
cttcctgctgtttttgctgttctgtgccggtttttcgttatccatttacctgccgtttattccgtttatcttctg

SEQ ID NO: 194806 - DNA, 75 bp, synthetic construct
  source 1..75: mol_type = other DNA
gatgactggcatcggcaactggatagtcagcgtactgattggatgtgcagccgggcccctctgggccgccaccca

SEQ ID NO: 194807 - DNA, 75 bp, synthetic construct
  source 1..75: mol_type = other DNA
tgtatattctagtacaggaactacatcctatcaggcaaatcccctgctgaagatgaaggatatcggtgattacac

SEQ ID NO: 194808 - DNA, 75 bp, synthetic construct
  source 1..75: mol_type = other DNA
gttcaataaaagagatttttgctggcagcaatagaaacataagacacgcacctaatataagagaggagcaaatta

SEQ ID NO: 194809 - DNA, 75 bp, synthetic construct
  source 1..75: mol_type = other DNA
aaggttaactctggtgatgttgttattactaacacaagcgaaaattttactgatgttggtaaggcgcttgtttat

SEQ ID NO: 194810 - DNA, 75 bp, synthetic construct
  source 1..75: mol_type = other DNA
tggcgcggctctggttaatgtgcaggctgactcccttacagggttattcagtatcgcgggatttttgatgattta

SEQ ID NO: 194811 - DNA, 75 bp, synthetic construct
  source 1..75: mol_type = other DNA
ttatacctaacgatatattgattgggaatatccgcccatatttgaaaaaaatttggcaagcagattgtatcggtg

SEQ ID NO: 194812 - DNA, 75 bp, synthetic construct
  source 1..75: mol_type = other DNA
tctcagtggcatgttgatgtggttatcgttgagcggcgttcgttcagtattgttgcagcagtagagctggatgat

SEQ ID NO: 194813 - DNA, 75 bp, synthetic construct
  source 1..75: mol_type = other DNA
ttgaaacccgtttaacgatggcaactgacattggtcttcaacacagtcgcctcggttatgagtctatctacacca

SEQ ID NO: 194814 - DNA, 75 bp, synthetic construct
  source 1..75: mol_type = other DNA
agttgcatgcggcaggtatacggaccggtgatgcagagcgaatactgtccagcggtgaatactggcaacgtcaga

SEQ ID NO: 194815 - DNA, 75 bp, synthetic construct
  source 1..75: mol_type = other DNA
aaccggtgcagccgctgccgttcacccagacgtttgatctcaacaaactggatgatgcattacgtcatctcaatg

SEQ ID NO: 194816 - DNA, 75 bp, synthetic construct
  source 1..75: mol_type = other DNA
atgaagttgattatttttattcttattgttctgattattgcagcgttacttattaggattattctcagaagtgta

SEQ ID NO: 194817 - DNA, 75 bp, synthetic construct
  source 1..75: mol_type = other DNA
tggtggcagttattcaggatggtgtctcagtggcatgttgatgtggttatcgttgagcggcgttcgttcagtatt

SEQ ID NO: 194818 - DNA, 75 bp, synthetic construct
  source 1..75: mol_type = other DNA
aacgattatgctaggtctgcgctctttactgttaaaaataagcgccagccccgcgaagctctgcagaagaaagaa

SEQ ID NO: 194819 - DNA, 75 bp, synthetic construct
  source 1..75: mol_type = other DNA
agtaacggcgtgcccctgcgaggcttaaagattcgccgtgaaaaagaacgccagctttgcctgacgggactggtc

SEQ ID NO: 194820 - DNA, 75 bp, synthetic construct
  source 1..75: mol_type = other DNA
tgttttacacgttcattctggttattatacgtagaaaagaatttatcgggcaacgccgagatgacgcggccccgt

SEQ ID NO: 194821 - DNA, 75 bp, synthetic construct
  source 1..75: mol_type = other DNA
aaattttttgtgaagatggcctctatgctgtgtgcgttgaaaatggaaacattgttagccattaccgcattctgt

SEQ ID NO: 194822 - DNA, 75 bp, synthetic construct
  source 1..75: mol_type = other DNA
aattggtgccgtactggcgaacaccttgagcaacctgatttcagccgtattgctcatctatctgttccgcctgta

SEQ ID NO: 194823 - DNA, 75 bp, synthetic construct
  source 1..75: mol_type = other DNA
gcatattccggtgggatcggtcgcctgcattatgctcgaaccgggaacgagagtttcccacgcggcggtgcatct

SEQ ID NO: 194824 - DNA, 75 bp, synthetic construct
  source 1..75: mol_type = other DNA
cttgatttgtttaatctaagtgaattgcaagaaatattacagttgcgaaaggaggggaaatctatcgatcaaaag

SEQ ID NO: 194825 - DNA, 75 bp, synthetic construct
  source 1..75: mol_type = other DNA
tattaaccgacgcactgaatgcgctgaaggtgggcaactttagccactgtgaagcgctcggattcacttttgatg

SEQ ID NO: 194826 - DNA, 75 bp, synthetic construct
  source 1..75: mol_type = other DNA
cttttatccacaccatttgtcgatattagtgttcgacatgatattctacgacaatttctcatattatcctgcaat

SEQ ID NO: 194827 - DNA, 75 bp, synthetic construct
  source 1..75: mol_type = other DNA
ttaataatcatgaaaaatattggggactacactctagcttcagttgaaacaacttacggtgcatatattgccgca

SEQ ID NO: 194828 - DNA, 75 bp, synthetic construct
  source 1..75: mol_type = other DNA
ctgccaccaacgcactgggtttagggcttgcgacgacgctggtgctgacgcttaccaacctgactatctcgacgc

SEQ ID NO: 194829 - DNA, 75 bp, synthetic construct
  source 1..75: mol_type = other DNA
gaaggcgttgccaacagataacgcagaaactgagcgcagggagcagctgaaatcctacctgaccacctacggctg

SEQ ID NO: 194830 - DNA, 75 bp, synthetic construct
  source 1..75: mol_type = other DNA
acgaaaccggtaaggacatgaacgctaaataccgcgaaacctcacgcggtggtctggcaatcaaagtccagtgtg

SEQ ID NO: 194831 - DNA, 75 bp, synthetic construct
  source 1..75: mol_type = other DNA
gttaaatccaatacattgacgacgaattttagtagagcgagagatttggcagaaattgactggggtaatggctca

SEQ ID NO: 194832 - DNA, 75 bp, synthetic construct
  source 1..75: mol_type = other DNA
agaaattaactggggggaaggttcacctgccacattccatgagcaacgatctttatctgaacgcctttacaagga

SEQ ID NO: 194833 - DNA, 75 bp, synthetic construct
  source 1..75: mol_type = other DNA
caggcacctttaccgcttgtcgatattactatccgccatgatgtcctgcaaaaattactggcatcatcccacgag

SEQ ID NO: 194834 - DNA, 75 bp, synthetic construct
  source 1..75: mol_type = other DNA
tcagaaggtggtgtcggaaaaatcattagccgaaaatgtgttaattgcaccaggctctggcaaaccggatgcggc

SEQ ID NO: 194835 - DNA, 75 bp, synthetic construct
  source 1..75: mol_type = other DNA
aaacaaagatctcgactcttggacttttaaaatagaaaaagtaaaaggcggtatcgtctatcaaggcgcgatttt

SEQ ID NO: 194836 - DNA, 75 bp, synthetic construct
  source 1..75: mol_type = other DNA
cagctaaaaccgccagtggtaattacactgtcacggtatccaatggcagcggtatctgtggttcagccagcctgt

SEQ ID NO: 194837 - DNA, 75 bp, synthetic construct
  source 1..75: mol_type = other DNA
aattgctggatggggttgaggttgagtggttgcctttgggggaactaggtgaattagttcgtggaaatggattgc

SEQ ID NO: 194838 - DNA, 75 bp, synthetic construct
  source 1..75: mol_type = other DNA
cagtctgaaatcgttcggattctggacgcattcagcgcccttacagcagagcttacagcagagcttacagcagag

SEQ ID NO: 194839 - DNA, 75 bp, synthetic construct
  source 1..75: mol_type = other DNA
aagtgtctttacgtaaaaacgcaaatccgactgagataacctggcgtgatttacggtgtgcttacgacgattttg

SEQ ID NO: 194840 - DNA, 75 bp, synthetic construct
  source 1..75: mol_type = other DNA
acctttgccaccgccaaccagcgactggaagacctggccaaccgcgctcctactgtgagtggcgtctcgtcactg

SEQ ID NO: 194841 - DNA, 75 bp, synthetic construct
  source 1..75: mol_type = other DNA
gaaaatcattatctaatcatgtaccgacatcaggtaaattaacggagtttatacctaacgatatactgattggga

SEQ ID NO: 194842 - DNA, 75 bp, synthetic construct
  source 1..75: mol_type = other DNA
agcgaatagtcggaattctggacaaattagaggctataacattctcattgactgaaggcttacctcgtgaaatcg

SEQ ID NO: 194843 - DNA, 75 bp, synthetic construct
  source 1..75: mol_type = other DNA
agcaaccaagttaacccattaattaagatgaaaaacatcggcgattatacattgggtacaacagaaattctctgg

SEQ ID NO: 194844 - DNA, 75 bp, synthetic construct
  source 1..75: mol_type = other DNA
agagggagtcgtgctgcctacggttatatatatttaatagacagcatgataagaccacctatcatggttttcgga

SEQ ID NO: 194845 - DNA, 75 bp, synthetic construct
  source 1..75: mol_type = other DNA
gataagtggcacaggaacaacaagcgatcaggtcaatccattgataaagatgaaaaatattggtgattatacatt

SEQ ID NO: 194846 - DNA, 75 bp, synthetic construct
  source 1..75: mol_type = other DNA
acagatttgtaccagggagtaatggctgcataccggacaaacttgcagaacacgacctatacaccgccctcaagt

SEQ ID NO: 194847 - DNA, 75 bp, synthetic construct
  source 1..75: mol_type = other DNA
ttgtttctggtggaagtaacttaagaagatctcctgccacaaatattattcagaagaaggatacaaacaaaaatg

SEQ ID NO: 194848 - DNA, 75 bp, synthetic construct
  source 1..75: mol_type = other DNA
acatacgaaactattgcctccgcagcggagaaaagcactgacctgtcccgtcaggcgctggtcaccatattcgga

SEQ ID NO: 194849 - DNA, 75 bp, synthetic construct
  source 1..75: mol_type = other DNA
cgtcatcagcggtaccgaaatcttcctggccgccagtagggctacgttgttggttatggccaacgacagggaaag

SEQ ID NO: 194850 - DNA, 75 bp, synthetic construct
  source 1..75: mol_type = other DNA
gctaacagcgatcccgcaatagaagtggagatagacgacgctatcgaaacaacgctctggcgggctaacaatatc

SEQ ID NO: 194851 - DNA, 75 bp, synthetic construct
  source 1..75: mol_type = other DNA
gggtgaagagcgaacaattgccggtgattctggtcgttgggataaaactgggctgcattaatcacgcgatgctga

SEQ ID NO: 194852 - DNA, 75 bp, synthetic construct
  source 1..75: mol_type = other DNA
ccagcgtaaaagagctggcgcgactgaacggcatttcccccccttacaccattgaagttggtcagaaactaaaac

SEQ ID NO: 194853 - DNA, 75 bp, synthetic construct
  source 1..75: mol_type = other DNA
tatcgtatttcgcgcaccacgggaaccagcgtaaaagagctggcgcgactgaacggcatttcccccccttacacc

SEQ ID NO: 194854 - DNA, 75 bp, synthetic construct
  source 1..75: mol_type = other DNA
atgaacactaaagttattcgactattcctgctgggaagcctgttcagcttaagcgcctgcgtacagcaaagcgaa

SEQ ID NO: 194855 - DNA, 75 bp, synthetic construct
  source 1..75: mol_type = other DNA
gcagacgcattccgcgagatacgcgatcacctgcagaacccggcgacgcgtcaccagccgttgatgctggcccgc

SEQ ID NO: 194856 - DNA, 75 bp, synthetic construct
  source 1..75: mol_type = other DNA
ggtctgaacacaacaccgaggcgttcgccggtctgcacaacgaacgcaagcgcatcatcgttgtattcgatgaag

SEQ ID NO: 194857 - DNA, 75 bp, synthetic construct
  source 1..75: mol_type = other DNA
ggtctgagcacaacactgaggcattcgccggactacacaacgagcgcaaacgcatcatcgtggtgtttgatgaag

SEQ ID NO: 194858 - DNA, 75 bp, synthetic construct
  source 1..75: mol_type = other DNA
aaagtacataaaccttgccttgttggagccatcctgtatttggttaaattgcgagcgagatcgagtcttcggttg

SEQ ID NO: 194859 - DNA, 75 bp, synthetic construct
  source 1..75: mol_type = other DNA
ggctgtattaatcacgcgatgttgactgcacaggctgtgcagcaagccggactcactctggtgggttgggtagcg

SEQ ID NO: 194860 - DNA, 75 bp, synthetic construct
  source 1..75: mol_type = other DNA
ggctgtattaatcacgcgatgttgacggcacaggcagtacagcaggcaggactaactctcgcaggctgggtggcg

SEQ ID NO: 194861 - DNA, 75 bp, synthetic construct
  source 1..75: mol_type = other DNA
gaaatacagccgccggccccacctgaagatgcgcagcctgttgctattccacttcccgtttctctgggagatgcc

SEQ ID NO: 194862 - DNA, 75 bp, synthetic construct
  source 1..75: mol_type = other DNA
cagcccgacgtttgtttctcactacaccgggcgtttgttgaacatccacccttccctactaccaaaatatcccgg

SEQ ID NO: 194863 - DNA, 75 bp, synthetic construct
  source 1..75: mol_type = other DNA
agcgcaggaccggaccgtaagagcattaatttcggtctgtactgttttcccgccgacggcagcagcaatgtaccg

SEQ ID NO: 194864 - DNA, 75 bp, synthetic construct
  source 1..75: mol_type = other DNA
cttctggctcattccggaaaccaagaatgtcacgctggagcatatcgaacgcaaactgatggctggcgaaaaatt

SEQ ID NO: 194865 - DNA, 75 bp, synthetic construct
  source 1..75: mol_type = other DNA
ggcgcggtaccggatggagatacaattctttggtggctaaaacaaagcccggaagcacgctcagctatttgtgtt

SEQ ID NO: 194866 - DNA, 75 bp, synthetic construct
  source 1..75: mol_type = other DNA
tgttgatgatgcgatgccgatatcatctgccctatctgaactgagccatttcattaatcggcattctgataaccc

SEQ ID NO: 194867 - DNA, 75 bp, synthetic construct
  source 1..75: mol_type = other DNA
acgccatcgcggaattgatgcacaaatactggaagccagaaaaaagtttatcgcgaagctcgcaaacgtcatcct

SEQ ID NO: 194868 - DNA, 75 bp, synthetic construct
  source 1..75: mol_type = other DNA
gtctgatgcggtaacagccgggttgcgcgggcaaaaaccaggggaaggctacaacattcagcaaatgctggagat

SEQ ID NO: 194869 - DNA, 75 bp, synthetic construct
  source 1..75: mol_type = other DNA
ttgtcgtgtacagagattattatagaagcccccatgaataaatcgctcatcattttcggcatcgtcaacataacc

SEQ ID NO: 194870 - DNA, 75 bp, synthetic construct
  source 1..75: mol_type = other DNA
agtagataaagcggggcgtaaaccagcactgaaaattggttttagcgtgatggcattgggaactctggtgctggg

SEQ ID NO: 194871 - DNA, 75 bp, synthetic construct
  source 1..75: mol_type = other DNA
gattgatggcgtggaaattggcaccctggtggaactggcgcaatggacgctggcagccgataaagtgctcacgtt

SEQ ID NO: 194872 - DNA, 75 bp, synthetic construct
  source 1..75: mol_type = other DNA
ccgcgaaagcggctggggaggctttgtggaagctgcaatttttatttttgtgttactggcagggctgggttttct

SEQ ID NO: 194873 - DNA, 75 bp, synthetic construct
  source 1..75: mol_type = other DNA
tatctttcttatcgttgccattggcctgtgttgcctgatgttgattggcggttggtttttaggcggtcgcgcgcg

SEQ ID NO: 194874 - DNA, 75 bp, synthetic construct
  source 1..75: mol_type = other DNA
ccgcgaaagcggctgggtaggctttgtggaagctacaatttttatttttgtgttactggcaggtctggtttatct

SEQ ID NO: 194875 - DNA, 75 bp, synthetic construct
  source 1..75: mol_type = other DNA
atctcaaaaatggcagcggtaacggtgattactatcatcatgcgccgctatttcacgtttgagggtagaaaatga

SEQ ID NO: 194876 - DNA, 75 bp, synthetic construct
  source 1..75: mol_type = other DNA
ctatcacgtcatttgcaaacattgtggctataccatgcagtacaacacaggagttgtgttaagttggtatcttaa

SEQ ID NO: 194877 - DNA, 75 bp, synthetic construct
  source 1..75: mol_type = other DNA
aaccatgcgcggtttcttcgatgccctgcaatcctcagtgaagcatagccgtcagcggatgtatctggtgccacc

SEQ ID NO: 194878 - DNA, 75 bp, synthetic construct
  source 1..75: mol_type = other DNA
tattcatcgatttagcacaaggcgctgatgatagaagtttttcagcaatatgtgatcttaatgctgatttccttg

SEQ ID NO: 194879 - DNA, 75 bp, synthetic construct
  source 1..75: mol_type = other DNA
ggaatgatcgctaacaagctatttgataatccatttgttccatttgatcataaaacatctatcaataattcaagt

SEQ ID NO: 194880 - DNA, 75 bp, synthetic construct
  source 1..75: mol_type = other DNA
tatttctcactggctaaaattcatcataaaaatgtattcattgcttcggatatgtacttgccagaagccttatta

SEQ ID NO: 194881 - DNA, 75 bp, synthetic construct
  source 1..75: mol_type = other DNA
atatattatctgaccttcttggagttgatattcctttatatatgtttagatcaaaaccgtacaagtgtatgaata

SEQ ID NO: 194882 - DNA, 75 bp, synthetic construct
  source 1..75: mol_type = other DNA
tcgttaagtgaaatggaggtatcttctaaagacatagaagatatacaaaacataaaaaaatatttccaggaaaac

SEQ ID NO: 194883 - DNA, 75 bp, synthetic construct
  source 1..75: mol_type = other DNA
tgctgaataatagtatttttctcgagggacatcatactggtttttggaggctggaaaataaaaatcctgatatat

SEQ ID NO: 194884 - DNA, 75 bp, synthetic construct
  source 1..75: mol_type = other DNA
cgatcaccacggtagccgctgtgtatgtcaatatgatgatccgtgactttctgttatatgacggcggcctgaaat

SEQ ID NO: 194885 - DNA, 75 bp, synthetic construct
  source 1..75: mol_type = other DNA
gaaacaataagtgaatatctcgatcttgactggtttcgacaacaacaacggcagtcgcaaaatccgttcgatatc

SEQ ID NO: 194886 - DNA, 75 bp, synthetic construct
  source 1..75: mol_type = other DNA
gttgcaggatatggtcacaggcgggttaagcattgatgccattctcgatgtactggacgccaccggcgaaggaga

SEQ ID NO: 194887 - DNA, 75 bp, synthetic construct
  source 1..75: mol_type = other DNA
gcaatctgaccactgaagctgattcattgcaggatatggtcacaggagggttaagcattgacgctattctcgatg

SEQ ID NO: 194888 - DNA, 75 bp, synthetic construct
  source 1..75: mol_type = other DNA
gtcaaagcgcctgcgacttcccgggcagcagaaccagcaaggcaaggcgcttaccgagtacgatccatatgctta

SEQ ID NO: 194889 - DNA, 75 bp, synthetic construct
  source 1..75: mol_type = other DNA
tactgctgacgtttgctttcccggtctcgaaacgcataaatataccaggacagcaaagccagcagggaagggcca

SEQ ID NO: 194890 - DNA, 75 bp, synthetic construct
  source 1..75: mol_type = other DNA
tgccaccggcccacgtcagtggcaggctgatgcgttccgagagatacgtgatcacctgcagaatccagagacgcg

SEQ ID NO: 194891 - DNA, 75 bp, synthetic construct
  source 1..75: mol_type = other DNA
agtacaacaacggcaaaggcaacatgaacatctaccatgtggatcacatggaatcatggcgctgtgacggccaga

SEQ ID NO: 194892 - DNA, 75 bp, synthetic construct
  source 1..75: mol_type = other DNA
cgcgcaaatcgtcgcaggatttgaggatgagcataaggcagatgcagtgttcatagacttcgggtatggcaccgg

SEQ ID NO: 194893 - DNA, 75 bp, synthetic construct
  source 1..75: mol_type = other DNA
tgtgttgctctcgctggaaaatgaacccgtgctggtaaatggctggattgacaagcatatgaatccagagctggt

SEQ ID NO: 194894 - DNA, 75 bp, synthetic construct
  source 1..75: mol_type = other DNA
gctgatgcgttccgagagatacgtgatcacctgcagaatccagagacgcgctatcagccgcttatgctggcacgt

SEQ ID NO: 194895 - DNA, 75 bp, synthetic construct
  source 1..75: mol_type = other DNA
tgtttttgcgacagatgaagagctcgaagcgcatgaagcccgcctcgatttggtgcagaagaagggcggaagttg

SEQ ID NO: 194896 - DNA, 75 bp, synthetic construct
  source 1..75: mol_type = other DNA
gaaccgtcgcctgacgggcaataacttccatgtttatctcaaacccgatcggctggtggatccggaagcctttgg

SEQ ID NO: 194897 - DNA, 75 bp, synthetic construct
  source 1..75: mol_type = other DNA
tgtcgctggtatcgattgtggtaatcatgaagctgttttatcagtacgagcagcgtttcggtatgcgttcctcca

SEQ ID NO: 194898 - DNA, 75 bp, synthetic construct
  source 1..75: mol_type = other DNA
gcttgtggtatctgtatgctttaattgtctatttcgtgatatgtaaaatttttaaccgcctggccctgccgttat

SEQ ID NO: 194899 - DNA, 75 bp, synthetic construct
  source 1..75: mol_type = other DNA
tctggtggtgatttatcactcggtcattaccttttatccgcatctgaccacttttcagcatccgttatcggaagt

SEQ ID NO: 194900 - DNA, 75 bp, synthetic construct
  source 1..75: mol_type = other DNA
ttttgccgaagccgaaggtttactgggttcaaacgaaaatgttgatgctgcattgctggaaaagatgccgaaact

SEQ ID NO: 194901 - DNA, 75 bp, synthetic construct
  source 1..75: mol_type = other DNA
ttttgccgaagctgaaggtttactgggttcaaacgagaatgttgatgccgcattgctggaaaaaatgccgaaact

SEQ ID NO: 194902 - DNA, 75 bp, synthetic construct
  source 1..75: mol_type = other DNA
aactggcgctcctgctggtttatccctttgtcagtttgttgatttgtacactggctggcttgctggtacgaaaat

SEQ ID NO: 194903 - DNA, 75 bp, synthetic construct
  source 1..75: mol_type = other DNA
atgattttaataaattaacatcagatgaatacatgagtatcctgacacctctgatgaagtgtgagcgtagcgtcc

SEQ ID NO: 194904 - DNA, 75 bp, synthetic construct
  source 1..75: mol_type = other DNA
aaagagatattccgagccagtatcgctttttcaaaatgtttaccaatctggcactggttattgatcagttaaccg

SEQ ID NO: 194905 - DNA, 75 bp, synthetic construct
  source 1..75: mol_type = other DNA
actgcgcttgatccgctggatgcgcaggcgcagtacagcgaactgtttgaccgtggtcgcgccacatcgctactg

SEQ ID NO: 194906 - DNA, 75 bp, synthetic construct
  source 1..75: mol_type = other DNA
gtcgctgttaatttcgttcccacgccgtggtggggaatgaacagcgtgatccgcaatttgccttattacagtctt

SEQ ID NO: 194907 - DNA, 75 bp, synthetic construct
  source 1..75: mol_type = other DNA
caatgtcttttaatacaggatgaagaaccagatttatttaacctggtaaaaattaaaacctttgaagccaggcat

SEQ ID NO: 194908 - DNA, 75 bp, synthetic construct
  source 1..75: mol_type = other DNA
tgaatacatgagtatcatgacacctctgatgaagtgtgagcgtagcgtccacgaccacaacaggtatgtgacggg

SEQ ID NO: 194909 - DNA, 75 bp, synthetic construct
  source 1..75: mol_type = other DNA
cgctggttttctctgacaatctggatttacgcaaagcggttgagctttatcgccatttctcttctcgtgtgcaat

SEQ ID NO: 194910 - DNA, 75 bp, synthetic construct
  source 1..75: mol_type = other DNA
ctgagcgatgcgttaagcaccgccgcgacgccgctgaaacgctttatgctggcgcagactgacaaaaaagcgatg

SEQ ID NO: 194911 - DNA, 75 bp, synthetic construct
  source 1..75: mol_type = other DNA
atgaaacgccgcactcaactgacgctgggcctggcgcttctggcgctcgccccgctggcattggcccagggcggc

SEQ ID NO: 194912 - DNA, 75 bp, synthetic construct
  source 1..75: mol_type = other DNA
tgaatatttacgaccacgcggtggtgccgttcgaaaacgatcagattaccctgaccgatgcgttaagcaccgccg

SEQ ID NO: 194913 - DNA, 75 bp, synthetic construct
  source 1..75: mol_type = other DNA
atgttccgtcacccggaaaacgagtacgactggctgagctcagacgccgctgtggatgaggccattctcatcaat

SEQ ID NO: 194914 - DNA, 75 bp, synthetic construct
  source 1..75: mol_type = other DNA
acctcagatgccgctgtggatgaggccctgctcatcaacgaatacacctttaccgaagccggtctacgcgccggc

SEQ ID NO: 194915 - DNA, 75 bp, synthetic construct
  source 1..75: mol_type = other DNA
ccggtgattatcgaccaggtaactttgacagcggttttcatggcccgatcagcatgagcgaggcgctggtgcgct

SEQ ID NO: 194916 - DNA, 75 bp, synthetic construct
  source 1..75: mol_type = other DNA
aggatgatgaataccagtggctctcagcactgcctttctttaagaccgattatctcaactggttgcgtgatttcc

SEQ ID NO: 194917 - DNA, 75 bp, synthetic construct
  source 1..75: mol_type = other DNA
catcaacaaatcagcccggatcttgccaatagtcagcgcgctgcacttgctgcgtggctggaagaatatcctgac

SEQ ID NO: 194918 - DNA, 75 bp, synthetic construct
  source 1..75: mol_type = other DNA
ctttaacccggaacaggtcaccgtcaccaacgataacggtaagctggatattcgtttaaccggcccgtggcgtga

SEQ ID NO: 194919 - DNA, 75 bp, synthetic construct
  source 1..75: mol_type = other DNA
gacaatttgaacaatagtgaatcaacttcacttaattggattgaaatatttatactggtcctgacagttccgtat

SEQ ID NO: 194920 - DNA, 75 bp, synthetic construct
  source 1..75: mol_type = other DNA
aactgccgcctgcacttgccaataactgggccagccgtggctattacggttctgtcagccacaacgcccgcgcgg

SEQ ID NO: 194921 - DNA, 75 bp, synthetic construct
  source 1..75: mol_type = other DNA
tatttgcgttgaatttgtcattttgtgccgtggtgtttaaaccgcacagaataaattgtcgcgatttcaccttta

SEQ ID NO: 194922 - DNA, 75 bp, synthetic construct
  source 1..75: mol_type = other DNA
tcggacaagaattctatacggttgttagcctggacagtgctatgaagcaaggagctacacctgacggcgatacca

SEQ ID NO: 194923 - DNA, 75 bp, synthetic construct
  source 1..75: mol_type = other DNA
cagcatgagcgggataccgggggcagtattgatgatactttgtcgatcagcgatgctctctcagaactaaaccat

SEQ ID NO: 194924 - DNA, 75 bp, synthetic construct
  source 1..75: mol_type = other DNA
accgatcgtttccattggcgcggtgttcttcactccagaaaccggagacatcggacaagaattctatacggttgt

SEQ ID NO: 194925 - DNA, 75 bp, synthetic construct
  source 1..75: mol_type = other DNA
gttgctactcagggcggtaaatctgctcgcgcagtacgtaaatacttcccggatgccaccatcttggcactgacc

SEQ ID NO: 194926 - DNA, 75 bp, synthetic construct
  source 1..75: mol_type = other DNA
tgatgctgtctggtgaatccgcaaaaggtaaatacccgctggaagctgtttctatcatggcgaccatttgcgaac

SEQ ID NO: 194927 - DNA, 75 bp, synthetic construct
  source 1..75: mol_type = other DNA
tccatctttatcctgatgaatcagtaacacttttcctttacttttcaaataatacctttgagcattttatcttta

SEQ ID NO: 194928 - DNA, 75 bp, synthetic construct
  source 1..75: mol_type = other DNA
ggctatggcgatagcagcaaactttttgcgcgcctgccacgtctgtcctttgaagaagcctgcgggctgttgtaa

SEQ ID NO: 194929 - DNA, 75 bp, synthetic construct
  source 1..75: mol_type = other DNA
gatgcgcgccatcaggcaaaatatgtgtcagcaatttggcagaaaattatccctgccaccagcaccaacgagtaa

SEQ ID NO: 194930 - DNA, 75 bp, synthetic construct
  source 1..75: mol_type = other DNA
ttctttggtggctaaaacaaagccctgaggcgcgctcagctatttgcgttgatgatgcgatgcctatcactgatg

SEQ ID NO: 194931 - DNA, 75 bp, synthetic construct
  source 1..75: mol_type = other DNA
taccccaggtgtggatgttgaagtggatgatgaaaatgaggtggcatggatggaaatcagcctgccactggttga

SEQ ID NO: 194932 - DNA, 75 bp, synthetic construct
  source 1..75: mol_type = other DNA
tacacagcatatctgcgctgggatgcctggccttacagggaactggatcctgatctggtgttctccctggtggaa

SEQ ID NO: 194933 - DNA, 75 bp, synthetic construct
  source 1..75: mol_type = other DNA
attttatgaacggttaccacaactgtttccccacggcgatgcccgcagttggtttacctccagcccacaacttgc

SEQ ID NO: 194934 - DNA, 75 bp, synthetic construct
  source 1..75: mol_type = other DNA
ggatgccaccatcctgggcactgaccaccaacgaaaaaacggctcaccagttagtactgagcaaaggcgttgtgc

SEQ ID NO: 194935 - DNA, 75 bp, synthetic construct
  source 1..75: mol_type = other DNA
cgaaacgcgctcatacaactgggacatgatgcataaagcggcgtatttcgtcgccaacggcgcacgttttatcgc

SEQ ID NO: 194936 - DNA, 75 bp, synthetic construct
  source 1..75: mol_type = other DNA
gttttatacctccgcgatggcgaccgccgatttcctgcgtcgccaggaaggcaagaaagcgtatgtggtgggcga

SEQ ID NO: 194937 - DNA, 75 bp, synthetic construct
  source 1..75: mol_type = other DNA
acgggattatggataaaggcctgccgctggtgttgctgaccaactatccttcgcagaccgggcaagatctggcga

SEQ ID NO: 194938 - DNA, 75 bp, synthetic construct
  source 1..75: mol_type = other DNA
attcagcaatcactgcccatcaacgtcgctttgccggtgccgtcgcgccgcaatatctgaatatcaccaccggag

SEQ ID NO: 194939 - DNA, 75 bp, synthetic construct
  source 1..75: mol_type = other DNA
gtctccttgaatacccggatgctgccttgtggcagcatcaacaagaggtgttcgaggcgattgccggagcggaaa

SEQ ID NO: 194940 - DNA, 75 bp, synthetic construct
  source 1..75: mol_type = other DNA
aatatttaccaatacttcctggacttgcgttatgtgcagttttaagtaatacaaatgcaagcactgagtatcaac

SEQ ID NO: 194941 - DNA, 75 bp, synthetic construct
  source 1..75: mol_type = other DNA
gatatcatctcgatgtttaccagcacgttaataacgcccgctatctggagtttctcgaagaagcccgctgggatg

SEQ ID NO: 194942 - DNA, 75 bp, synthetic construct
  source 1..75: mol_type = other DNA
gaaatatcaagaactgcgggcagaactccatgaagcccggaaaaacattccatcaaaaaatcctgtcgatgccga

SEQ ID NO: 194943 - DNA, 75 bp, synthetic construct
  source 1..75: mol_type = other DNA
aagatattgcgccgattctggcattgctgagcgcgcgtctgcaacagcgtgaaagccgttatgccgtgctgtttg

SEQ ID NO: 194944 - DNA, 75 bp, synthetic construct
  source 1..75: mol_type = other DNA
ctcgacgatatcgacagtatgccgttccgccctagctggatttacccgtcggtcgctgaaatcgacgttatctga

SEQ ID NO: 194945 - DNA, 75 bp, synthetic construct
  source 1..75: mol_type = other DNA
caccaacccggatacccacgggcgcggtttttatccggcctgtggcgcgttgtgtgcagggatcgagaaaatctc

SEQ ID NO: 194946 - DNA, 75 bp, synthetic construct
  source 1..75: mol_type = other DNA
gacgcgctcattacgtttgtttgtatcgatctcaaaacgcagaaggctttagcgctggaaggggagctgcgcgaa

SEQ ID NO: 194947 - DNA, 75 bp, synthetic construct
  source 1..75: mol_type = other DNA
tttacactggctaaaatccatcataaaaatttatttgttgcttctgatatgtacttaccggaagacttattaaaa

SEQ ID NO: 194948 - DNA, 75 bp, synthetic construct
  source 1..75: mol_type = other DNA
gcagcaggagaaggctgaagggttggcgctgatcgacagcaaaacgctggcggtggcgaacgataacgactttgg

SEQ ID NO: 194949 - DNA, 75 bp, synthetic construct
  source 1..75: mol_type = other DNA
cccggtgaatatgcagaccgtaaccgtgctgttgcgaatcagcggctgaccgggagtaatgcgcggtggaaatgg

SEQ ID NO: 194950 - DNA, 75 bp, synthetic construct
  source 1..75: mol_type = other DNA
agactcacagaaaaatcagggcagcatcggcagacggcgcttacgacacccggctctgtcacgatgaactgcggc

SEQ ID NO: 194951 - DNA, 75 bp, synthetic construct
  source 1..75: mol_type = other DNA
cggtgcatttggtggcacgaacacgagcattttccctaatggttataccgcgatttcaaatctaagcgcggggat

SEQ ID NO: 194952 - DNA, 75 bp, synthetic construct
  source 1..75: mol_type = other DNA
aaaaggagcaggttactggcccggtgagtacgcagaccgcaaccgtgccgttgccaatcagcggctgagcggaag

SEQ ID NO: 194953 - DNA, 75 bp, synthetic construct
  source 1..75: mol_type = other DNA
accgggtaaaacagctgttcggaggttcactgacactgcgtgactacgatggtcaggttgcagaggctatggccc

SEQ ID NO: 194954 - DNA, 75 bp, synthetic construct
  source 1..75: mol_type = other DNA
gccacttctttaggtttagggcttggcgtctcctacgatcccgaaatttttaaaatattgccagcctctatttat

SEQ ID NO: 194955 - DNA, 75 bp, synthetic construct
  source 1..75: mol_type = other DNA
agcttatttccgatgattggcggcttcggtaatgactccaacttattgatagtgttttatgttcagataatgccc

SEQ ID NO: 194956 - DNA, 75 bp, synthetic construct
  source 1..75: mol_type = other DNA
gtgctggctgatgggctggtctctgttatcgcttccgctgtcggttcattgccattaacaacttttgcgcaaaat

SEQ ID NO: 194957 - DNA, 75 bp, synthetic construct
  source 1..75: mol_type = other DNA
atgtctgatataaaccatgcaggttccgaccttatatttgaactggaggatcgccctccctttcatcaggctatt

SEQ ID NO: 194958 - DNA, 75 bp, synthetic construct
  source 1..75: mol_type = other DNA
catttgattacggcacgaagacagtcagtacgtttaaccacggcacaaaatcaaccaatacttcaggcaatcata

SEQ ID NO: 194959 - DNA, 75 bp, synthetic construct
  source 1..75: mol_type = other DNA
gtttgcacaacaaccagatgtgtttctaaagcacatatctaaactacaagaaaaagagatagtcattgggaattt

SEQ ID NO: 194960 - DNA, 75 bp, synthetic construct
  source 1..75: mol_type = other DNA
tctcgcaggcccagcttatcgtctgaatgactatatcagtttttatggtttggtggggatatctcatactaaagc

SEQ ID NO: 194961 - DNA, 75 bp, synthetic construct
  source 1..75: mol_type = other DNA
gagtgggattctccggtcagtgttgtcgggagtttttcgtatatgaaaggtgactgggcggacagtcatcgcgat

SEQ ID NO: 194962 - DNA, 75 bp, synthetic construct
  source 1..75: mol_type = other DNA
ttcgtgacatcaacacattttccaatcacttagcatcactctacaacttttcaaatttatctgactttctatcag

SEQ ID NO: 194963 - DNA, 75 bp, synthetic construct
  source 1..75: mol_type = other DNA
tattaattcgtttactacaagaacctcgtgatggtcttatattgataaatggagagtggggggttggtaaaactt

SEQ ID NO: 194964 - DNA, 75 bp, synthetic construct
  source 1..75: mol_type = other DNA
ttctcgacccaaaataataattagcgaatattcaaatattacttccattacaaatttcgataatatctttaggaa

SEQ ID NO: 194965 - DNA, 75 bp, synthetic construct
  source 1..75: mol_type = other DNA
accggaaaatcaggtcagccgccgccgatggcgcttacgatacccggctctgtcacgatgaactgcgacgtaaga

SEQ ID NO: 194966 - DNA, 75 bp, synthetic construct
  source 1..75: mol_type = other DNA
cagtacggatttggggacgaaaaccacatcgtcgtttgattacggcactaaatccacgaataacaccggggcgca

SEQ ID NO: 194967 - DNA, 75 bp, synthetic construct
  source 1..75: mol_type = other DNA
gaggctatggccctggtacgagcgctcaacaaaatgacgaaagcaggtatacctgaaagcgtgcgtattgcctga

SEQ ID NO: 194968 - DNA, 75 bp, synthetic construct
  source 1..75: mol_type = other DNA
caataacaccagcttccccatccgtcttgccaagccaaggctcgattcgactggcacagggacgaattcagtgat

SEQ ID NO: 194969 - DNA, 75 bp, synthetic construct
  source 1..75: mol_type = other DNA
aaatcaccaactggcccacctacaataaagccctcatcaaccgtggctccataactttctggctggatgatgaag

SEQ ID NO: 194970 - DNA, 75 bp, synthetic construct
  source 1..75: mol_type = other DNA
atggccgaatgccggatgggtaatccgggtcgcctgaccaccgatatcggtccggtgattgatagcgaagcgaaa

SEQ ID NO: 194971 - DNA, 75 bp, synthetic construct
  source 1..75: mol_type = other DNA
gcaggcaggaacacaacgattgctgccagggccgacgggtgaacgcaacacctggacgctgctgccgcgtgagcg

SEQ ID NO: 194972 - DNA, 75 bp, synthetic construct
  source 1..75: mol_type = other DNA
ttcggcgctgcgtgtactgtgcctgcaagatgagattgccgaccacacgttgaaaatgctgcgcggcgcaatggc

SEQ ID NO: 194973 - DNA, 75 bp, synthetic construct
  source 1..75: mol_type = other DNA
aaatgtcacccgttatcaacccggcggaaccgaaagatattgtgggctatgtgcgtgaagccacgccgcgtgaag

SEQ ID NO: 194974 - DNA, 75 bp, synthetic construct
  source 1..75: mol_type = other DNA
tctggcggaagcgttgttgcgtattcccgacaaagccacccgtgatgcgttaattcgcgacaaaatcagcaacgg

SEQ ID NO: 194975 - DNA, 75 bp, synthetic construct
  source 1..75: mol_type = other DNA
cgccgcgatcaccgcggcctatcgccgcccggaaaccgaagcggtttctatgctgctggaacaagctcgcctgcc

SEQ ID NO: 194976 - DNA, 75 bp, synthetic construct
  source 1..75: mol_type = other DNA
catgttggtaacctgtatgttaaccgtaatatggtgggcgcagtggttggtgtgcagccgttcggcggcgaaggg

SEQ ID NO: 194977 - DNA, 75 bp, synthetic construct
  source 1..75: mol_type = other DNA
gtcgcctgctggaaaacggtgctaacacctcgtttgttaaccgtattgccgacacctctttgccactggatgaac

SEQ ID NO: 194978 - DNA, 75 bp, synthetic construct
  source 1..75: mol_type = other DNA
gcagccagttgctgaacaggcgcacaaactggcgtatcaactggccgataaactgcgtaatcaaaaaaatgccag

SEQ ID NO: 194979 - DNA, 75 bp, synthetic construct
  source 1..75: mol_type = other DNA
gaaggctatccggtttatacccgcaaggtgtataccgacgtttcttatctcgcctgtgcgaaaaagctgctggcg

SEQ ID NO: 194980 - DNA, 75 bp, synthetic construct
  source 1..75: mol_type = other DNA
atttcaatcaagctgtcggcgctgcatccgcgctacagccgcgcccagtatgaccgggtaatggaagagctttac

SEQ ID NO: 194981 - DNA, 75 bp, synthetic construct
  source 1..75: mol_type = other DNA
aactggtcgccgatccagtcactgctgtagaaaaactggcgcaacaggaagggcaaactggattaccgcatccga

SEQ ID NO: 194982 - DNA, 75 bp, synthetic construct
  source 1..75: mol_type = other DNA
tagggttactgtggtttggttttgatgccattcccagcgatcctttagaagtcatcattatctatttcctgctga

SEQ ID NO: 194983 - DNA, 75 bp, synthetic construct
  source 1..75: mol_type = other DNA
tcgaagcgcgccaggctcgtctggagcgcgaaaaagcggctcgccttgaacgacataagagcgcagccgttcaac

SEQ ID NO: 194984 - DNA, 75 bp, synthetic construct
  source 1..75: mol_type = other DNA
gcggctctgtgaaatcccgcgaaacgcgtaaccgtctttccgctcgtggcgttgtcgtttatcttgaaacgacca

SEQ ID NO: 194985 - DNA, 75 bp, synthetic construct
  source 1..75: mol_type = other DNA
gagccggaaatgattaacccggattctgacctgtttcgtcttcatcctgactgggtattgtcaatgcctggatat

SEQ ID NO: 194986 - DNA, 75 bp, synthetic construct
  source 1..75: mol_type = other DNA
atgtctgatataaacaatgcaggttctgaccttatatttgaactggaggatcgccctccctttcatcaggctctc

SEQ ID NO: 194987 - DNA, 75 bp, synthetic construct
  source 1..75: mol_type = other DNA
tacgctggatatcgacgctaagagcaagaaaaaggcgctgtttacgcgtctggtgagcttcgatccggcaagcgg

SEQ ID NO: 194988 - DNA, 75 bp, synthetic construct
  source 1..75: mol_type = other DNA
tgattatgggtggcccgctaatgggctttaccttgccatggctggatgtcccggtcgtaaagattaccaactgtc

SEQ ID NO: 194989 - DNA, 75 bp, synthetic construct
  source 1..75: mol_type = other DNA
agggaagctggaagggaagctggaaactgcctgcaatatgctgaatgccggaatggaccgtcagacggtgctgca

SEQ ID NO: 194990 - DNA, 75 bp, synthetic construct
  source 1..75: mol_type = other DNA
cggaaagcagtattactcttcaggtgggcgatcgtgagctgacctttatgccaaccgttaaggcgtataacgacc

SEQ ID NO: 194991 - DNA, 75 bp, synthetic construct
  source 1..75: mol_type = other DNA
gggagccaataacagcatcaatgattgtaaagtctgaagattgtatatttgacgcctcaaagggaaacttcatta

SEQ ID NO: 194992 - DNA, 75 bp, synthetic construct
  source 1..75: mol_type = other DNA
gctcgatacgctggtggctcgcttcccgcatattgaatttgagtcctgttcctccggcggcgggcgaatcgacta

SEQ ID NO: 194993 - DNA, 75 bp, synthetic construct
  source 1..75: mol_type = other DNA
gtgatcgcaccggaaccggcacaaaaagtgtttcatatgtcccttcctgctacatgctgacgggcggatctgttc

SEQ ID NO: 194994 - DNA, 75 bp, synthetic construct
  source 1..75: mol_type = other DNA
gctgatacattttataaatctgataaaatatttgatgaaaaagaaaatattaagattggcacagagtatttgcaa

SEQ ID NO: 194995 - DNA, 75 bp, synthetic construct
  source 1..75: mol_type = other DNA
agcgctgataatccggcatgcagaaagtcgcccggcttccggcggactggcaaacatcacggtgaaacagactct

SEQ ID NO: 194996 - DNA, 75 bp, synthetic construct
  source 1..75: mol_type = other DNA
agcgagaaaacgcagtatctgggtgtggtgaatggtcaggtgtcaggtaacagtgtggtgaaggtgacccgtaca

SEQ ID NO: 194997 - DNA, 75 bp, synthetic construct
  source 1..75: mol_type = other DNA
tggtgaacggccaggtgtcaggtaacagcgtggtgaaggtaacccgcacaccgacagacccggtgctgtaccgct

SEQ ID NO: 194998 - DNA, 75 bp, synthetic construct
  source 1..75: mol_type = other DNA
tgcgactattttagatatgctaaaaaataataacgttgaaggtgtttgtaattttattactcatcacgtaagtag

SEQ ID NO: 194999 - DNA, 75 bp, synthetic construct
  source 1..75: mol_type = other DNA
atgaagaaaataatgatggcagtcgccctgaccctgagtgcactcagtattcagtcagcactggccactgaatac

SEQ ID NO: 195000 - DNA, 75 bp, synthetic construct
  source 1..75: mol_type = other DNA
atgaagaaaacaatgatggtagtcgccttggccctgagtgcactcagtattcagtcaacacttgccgctgaatac

SEQ ID NO: 195001 - DNA, 75 bp, synthetic construct
  source 1..75: mol_type = other DNA
ttatcatcccgctccgaagaccgaagaaataaaggggttgggggaattaaaaaaagcacctaaaaaaacacctaa

SEQ ID NO: 195002 - DNA, 75 bp, synthetic construct
  source 1..75: mol_type = other DNA
ccatcaagcatcaactcaaggccggtaaagctattcctggcgcatcactcaagctcggtaagccaacgctgctaa

SEQ ID NO: 195003 - DNA, 75 bp, synthetic construct
  source 1..75: mol_type = other DNA
aacttcgtaggagttaatggttccggagcgaaatatcgtccatttcttattttggcgaaagatttcaatatacct

SEQ ID NO: 195004 - DNA, 75 bp, synthetic construct
  source 1..75: mol_type = other DNA
agggggacgaacgcggtaaattcaggaaagaaatcgccagagaacgtaagaaacgttttgcggtgaaaacaggga

SEQ ID NO: 195005 - DNA, 75 bp, synthetic construct
  source 1..75: mol_type = other DNA
agcatcaaatcatatatagcgtcatcgcttgaaatggttggcaagaaaaagattcgagcaggtattcaccaggta

SEQ ID NO: 195006 - DNA, 75 bp, synthetic construct
  source 1..75: mol_type = other DNA
gacaagccaattagtcaaggtggtgaggtttatgacatggataatatccgagtgactacacctaagcgacatatc

SEQ ID NO: 195007 - DNA, 75 bp, synthetic construct
  source 1..75: mol_type = other DNA
tcggcgctcgatcctgagatggtgaaagaggtgctggatacgatgattgggctggcgcagtcgggtatggacaat

SEQ ID NO: 195008 - DNA, 75 bp, synthetic construct
  source 1..75: mol_type = other DNA
gcgttaatgggggtaagcattatggttttatggaaagttttaaatacggagacgatcgcggcggccatcctcaaa

SEQ ID NO: 195009 - DNA, 75 bp, synthetic construct
  source 1..75: mol_type = other DNA
ccggaagaaaaaccaatgcctaatcctcttagcatgtacgcggttgatgctgttgccgctattgcagaggtgaga

SEQ ID NO: 195010 - DNA, 75 bp, synthetic construct
  source 1..75: mol_type = other DNA
gacggaaacagggttcaggaatacgtgaagctggagcgattgcgtaatgcgctatcgggcaattctccggtaact

SEQ ID NO: 195011 - DNA, 75 bp, synthetic construct
  source 1..75: mol_type = other DNA
acgccacgtataaattacgaacaaactaaactagaaaaaattcttggttatttaattaatgataatatcaaaaat

SEQ ID NO: 195012 - DNA, 75 bp, synthetic construct
  source 1..75: mol_type = other DNA
gattctgttttggaaaaaagagaaataaaacaaaatttaataaagaataatgtgacagtaattaatataccagac

SEQ ID NO: 195013 - DNA, 75 bp, synthetic construct
  source 1..75: mol_type = other DNA
ggggctggataccggcccgatgtcgggctttgaccgtcaatacgttgacgacgccttttttgcgggcagcacgct

SEQ ID NO: 195014 - DNA, 75 bp, synthetic construct
  source 1..75: mol_type = other DNA
taatgattgacgccaagaaaatgaataaagatctcaaagagaatataagtgctgatttgtttaattcacacttca

SEQ ID NO: 195015 - DNA, 75 bp, synthetic construct
  source 1..75: mol_type = other DNA
caaaaataattaaagcagaaggtatttatttatactgctctctattatttgatattgcatgtatcattgtctttg

SEQ ID NO: 195016 - DNA, 75 bp, synthetic construct
  source 1..75: mol_type = other DNA
ggatgcttgccgctgctttcgttatcctttactccggtgtgctcctgtttattctgtattttgtttttctgccct

SEQ ID NO: 195017 - DNA, 75 bp, synthetic construct
  source 1..75: mol_type = other DNA
cggtcgatgctgttgccgctattgcagaggtgagaggctggaacgcctgccgcgccgccatgcttcatggtgccg

SEQ ID NO: 195018 - DNA, 75 bp, synthetic construct
  source 1..75: mol_type = other DNA
ctgtatttacgacttttccgttgttttatattggaatgattgttgctggtttatcttatataacatttgcggtaa

SEQ ID NO: 195019 - DNA, 75 bp, synthetic construct
  source 1..75: mol_type = other DNA
ttatttatactgttctctattttttgatattgcatgtatcattgttattgggtggtttctatattcagaattggt

SEQ ID NO: 195020 - DNA, 75 bp, synthetic construct
  source 1..75: mol_type = other DNA
gctattctgaacgtagccggtcgcaccttagccttcattagtggtaaggcaccggaaatcaaaccctcgcccggc

SEQ ID NO: 195021 - DNA, 75 bp, synthetic construct
  source 1..75: mol_type = other DNA
agacgcacaggaagggaaactgaaagaacagggctggacaggggcagatggaaaagcctccgtcgtaaatgactc

SEQ ID NO: 195022 - DNA, 75 bp, synthetic construct
  source 1..75: mol_type = other DNA
atgacgtgcaggatatgagccagtacaaccacccgaaagccgacctgaacaaaggtcagcatggctgtgtgagtc

SEQ ID NO: 195023 - DNA, 75 bp, synthetic construct
  source 1..75: mol_type = other DNA
caactgggcacatttggggcatttgaccataactggcatacagttgttttccgctttgcgggaaataacagcgaa

SEQ ID NO: 195024 - DNA, 75 bp, synthetic construct
  source 1..75: mol_type = other DNA
tgccattttgcagtacgccgggcggacattatcgttccttaccgggcagagcgcaccgcagtcgggtggtacaac

SEQ ID NO: 195025 - DNA, 75 bp, synthetic construct
  source 1..75: mol_type = other DNA
aagcgaggaagattatgcgcgggagctggctgaggattgcggcctgttaaatgaggtgccggagccgctgcgcag

SEQ ID NO: 195026 - DNA, 75 bp, synthetic construct
  source 1..75: mol_type = other DNA
tattactaaagaagaaaacactgggaggttggctggaaaaataatctcaacatttgctggagcaatgcaacatta

SEQ ID NO: 195027 - DNA, 75 bp, synthetic construct
  source 1..75: mol_type = other DNA
aaagcaaacttagcttcagtgacgatgaaataaaatcatattttcataaaaccgtgccaaacatcaatgacatcc

SEQ ID NO: 195028 - DNA, 75 bp, synthetic construct
  source 1..75: mol_type = other DNA
tattactaaagaagaaagcactgggaagtttactggaaaaataatatcaacatttgcaggggcaatgcaacatta

SEQ ID NO: 195029 - DNA, 75 bp, synthetic construct
  source 1..75: mol_type = other DNA
tgatatagcaacgaaacagcagcaaatggatcggaataattatgcgaacatcagtaataatttttattactacaa

SEQ ID NO: 195030 - DNA, 75 bp, synthetic construct
  source 1..75: mol_type = other DNA
ggctaaagcatcgcataaagatattaataaaatacgattggtggtaacagaaaaacaaaagctattggcttcact

SEQ ID NO: 195031 - DNA, 75 bp, synthetic construct
  source 1..75: mol_type = other DNA
attgcgacctgattatgaaacgattatggaaaataatactaataaagagtccttatgtatgcaatcagagaaagg

SEQ ID NO: 195032 - DNA, 75 bp, synthetic construct
  source 1..75: mol_type = other DNA
gtctctactggccggtgtcgcagtgggcgtcaggcgcggcagcaaacagtatgctggcatcattcttccttcaga

SEQ ID NO: 195033 - DNA, 75 bp, synthetic construct
  source 1..75: mol_type = other DNA
gtgaaaccaaagaaaaaattcgccgtaactttggtatgccagcgccagaaggttaccgcaaagcactgcgtctga

SEQ ID NO: 195034 - DNA, 75 bp, synthetic construct
  source 1..75: mol_type = other DNA
atgcaggccattgcggcggaaggtgatgtcaccacaccggtggtggtgcaaccgtcgggtgatggtggcgctgtt

SEQ ID NO: 195035 - DNA, 75 bp, synthetic construct
  source 1..75: mol_type = other DNA
atatcacgggggcaaaagcgacgtatccggtactgcttgatacggtcacagtcaaagttaacgaaagccgggcat

SEQ ID NO: 195036 - DNA, 75 bp, synthetic construct
  source 1..75: mol_type = other DNA
gttctgagggattatattggtgatgatggacgagttcgtgcaatcctcgaaattcttgattcgcggaagccgctt

SEQ ID NO: 195037 - DNA, 75 bp, synthetic construct
  source 1..75: mol_type = other DNA
aatttcgtaggagttaatggttccggagcgaaatatcgtccgtttcttattttggcgaaagatttcaacatacct

SEQ ID NO: 195038 - DNA, 75 bp, synthetic construct
  source 1..75: mol_type = other DNA
cgtaccgactatttgtaccgttatcggtgaaggtggttctggcggcgcgctggcgattggcgtgggcgataaagt

SEQ ID NO: 195039 - DNA, 75 bp, synthetic construct
  source 1..75: mol_type = other DNA
ttaagcaactggcgcgtcgcagtacggtgacaccgggtggtgtcgcctgtaaatataacgacatcattccggcgg

SEQ ID NO: 195040 - DNA, 75 bp, synthetic construct
  source 1..75: mol_type = other DNA
acggattttgacagcttccgcgatgcctggtggggcgaggctgacagtgaggaggcttttgcggttgagttcgcc

SEQ ID NO: 195041 - DNA, 75 bp, synthetic construct
  source 1..75: mol_type = other DNA
aatggcacacactgtcttttgagtttgccggaaacaacagtattcaggtgacgccggtacttgatgagaagcggg

SEQ ID NO: 195042 - DNA, 75 bp, synthetic construct
  source 1..75: mol_type = other DNA
gcgcaactgggcacatttggggcatttgaccataactggcatacagttgttttccgctttgcgggaaataacagc

SEQ ID NO: 195043 - DNA, 75 bp, synthetic construct
  source 1..75: mol_type = other DNA
gtatcaggacctggtcagccgcacgaaagcggcgctggcgaagaacccgaaaaacagactgctggcggtggtatg

SEQ ID NO: 195044 - DNA, 75 bp, synthetic construct
  source 1..75: mol_type = other DNA
tgcatgatgtacaggatatgagcggtgttaatcatccgaaagctgacctgaataaggggcagtatggttgtgtca

SEQ ID NO: 195045 - DNA, 75 bp, synthetic construct
  source 1..75: mol_type = other DNA
cccagtttcactcaatagccccttagacttatcggaagatgaactggagatgttgcgactgtatcgcgcacttcc

SEQ ID NO: 195046 - DNA, 75 bp, synthetic construct
  source 1..75: mol_type = other DNA
gctgccgtggtgctggcacacaatcacccgtccggtgaagactcacccagtaaggctgaccggcttatcactgaa

SEQ ID NO: 195047 - DNA, 75 bp, synthetic construct
  source 1..75: mol_type = other DNA
atttacgggatctggtcgccgctcatcggggagtcttcccgcgtatgcacgcatccggataactggaagctggta

SEQ ID NO: 195048 - DNA, 75 bp, synthetic construct
  source 1..75: mol_type = other DNA
gccacctctccttcctgcgcaaaaaacaggaagccgatcgtcagaaaggaaaaaacgccaggcaggcagaacgct

SEQ ID NO: 195049 - DNA, 75 bp, synthetic construct
  source 1..75: mol_type = other DNA
aacataataagatataacttatcatttcttgaagaatgcctaagcactaatcctgaaggcattattttgtccaga

SEQ ID NO: 195050 - DNA, 75 bp, synthetic construct
  source 1..75: mol_type = other DNA
ctgtaaaaattggctcgcgagcgattgctttcgttgagagtgaaattgacgagtggattaatcagcgtattgcgg

SEQ ID NO: 195051 - DNA, 75 bp, synthetic construct
  source 1..75: mol_type = other DNA
ctgatgttatgcgccgtactggttacggtcgcgcttggatttatcgcctgatcaaccaggggcgctttcctaaac

SEQ ID NO: 195052 - DNA, 75 bp, synthetic construct
  source 1..75: mol_type = other DNA
accttcgaaaaactctgcgatggctttggcgcgaccgatggcgagctgaccatggatgtaacgctgaaggcgtat

SEQ ID NO: 195053 - DNA, 75 bp, synthetic construct
  source 1..75: mol_type = other DNA
cagcagcaccttcgaaaaactctgcgatggctttggcgcgaccgatggcgaactgaccatggatgtaacgctgaa

SEQ ID NO: 195054 - DNA, 75 bp, synthetic construct
  source 1..75: mol_type = other DNA
aaaatcaatggccgagagcgtggagcgcgccatcggctgggcgcgccttcaccgggtccgccagttccagttctt

SEQ ID NO: 195055 - DNA, 75 bp, synthetic construct
  source 1..75: mol_type = other DNA
aaaaagaaccagcaggcggaacgctatgcgagcggaaccctgcgcaaaatattcgaacgtctggcccgcaccgac

SEQ ID NO: 195056 - DNA, 75 bp, synthetic construct
  source 1..75: mol_type = other DNA
caccgctggctgacaccgggttatcgctcccttgccggacgcgaacgcctggacgatttgctttacctgccgcag

SEQ ID NO: 195057 - DNA, 75 bp, synthetic construct
  source 1..75: mol_type = other DNA
gggcggcagcctgtacgttgacggcagcatcattgcaccacagggatttgaaattgtacgcaaaccggatacccg

SEQ ID NO: 195058 - DNA, 75 bp, synthetic construct
  source 1..75: mol_type = other DNA
aatggtgccgtgatccacatcgttccgcgtcttgcgggagcaaaaagtggcggtgtatttcaggcggtgctgggt

SEQ ID NO: 195059 - DNA, 75 bp, synthetic construct
  source 1..75: mol_type = other DNA
gtttaaaaaatcaagctcttggcgctgcccgaacgttcgttgtttgcaagacgggtacgaagcaagtagctggtt

SEQ ID NO: 195060 - DNA, 75 bp, synthetic construct
  source 1..75: mol_type = other DNA
gaaaaagcacaagctatttttactccggtaatgaatggctctgtaaatatcatgtcaattatgattgggctttgt

SEQ ID NO: 195061 - DNA, 75 bp, synthetic construct
  source 1..75: mol_type = other DNA
ttgtctggaaccggactcatttgcggtaaatgtttatcatttattgcatgcaacacaggtattacatatgtccag

SEQ ID NO: 195062 - DNA, 75 bp, synthetic construct
  source 1..75: mol_type = other DNA
ataataaaatctacacatgaagaactactgggtgaaattaagcataacattcaggttaatttgaaggtgaaccct

SEQ ID NO: 195063 - DNA, 75 bp, synthetic construct
  source 1..75: mol_type = other DNA
aaaggtacgcaacaaatagtcggtttttactcactggccactggtagtgtcaatcatacagaagctacaggtaac

SEQ ID NO: 195064 - DNA, 75 bp, synthetic construct
  source 1..75: mol_type = other DNA
taccggtgattatactcgctcgcctggcggtagatgtctcattgcacggaaaaggggttggcgccgatttactcc

SEQ ID NO: 195065 - DNA, 75 bp, synthetic construct
  source 1..75: mol_type = other DNA
gcgcactgtccacacaggtcccggcgtttcgtcagaaactgaatgacggctggtatcaggtgcgcattgccgggc

SEQ ID NO: 195066 - DNA, 75 bp, synthetic construct
  source 1..75: mol_type = other DNA
aaatgtcagacaacgatgcaataaaaagaacaggtgatgaagttcttgaatttgcacgttgctatgctgaagcag

SEQ ID NO: 195067 - DNA, 75 bp, synthetic construct
  source 1..75: mol_type = other DNA
aacgaaaacactcggcagcgaaattctgaattttgcatgtgagtatacaaaagctgctgccgaaaaagaattagc

SEQ ID NO: 195068 - DNA, 75 bp, synthetic construct
  source 1..75: mol_type = other DNA
gggcactggatggcaaaatattcaacttatttatcaaggccctatctcaaaattggcactcaatggagatgaata

SEQ ID NO: 195069 - DNA, 75 bp, synthetic construct
  source 1..75: mol_type = other DNA
caccgtgccggacagcaacggctggccgccgttcaccgggccatgcagcagggggccgcgaatgattactggttt

SEQ ID NO: 195070 - DNA, 75 bp, synthetic construct
  source 1..75: mol_type = other DNA
caccgtgccggacagcaacgcctggccgccgttcagcgggccatgcagcagggggccgcgaatgattactggttt

SEQ ID NO: 195071 - DNA, 75 bp, synthetic construct
  source 1..75: mol_type = other DNA
caccgtgccggacagcaacgtctggccgccgtgcaccgggccatgcagcagggggccgcgaatgattactggttt

SEQ ID NO: 195072 - DNA, 75 bp, synthetic construct
  source 1..75: mol_type = other DNA
atgcaacaactttcctttctgcccggagaaatgacgcccggcgagcgcagtctcattctgcgggctctgaaaacc

SEQ ID NO: 195073 - DNA, 75 bp, synthetic construct
  source 1..75: mol_type = other DNA
cagtccggacgccggtatatcggtatcgagctgcttgaacagtatcaccgtgccggacagcaacgtctggcagcc

SEQ ID NO: 195074 - DNA, 75 bp, synthetic construct
  source 1..75: mol_type = other DNA
ggtgaaatgctggttggttcacgacggatatcccaggacatcagcacccgtgatgagggcggagacgggaaagtg

SEQ ID NO: 195075 - DNA, 75 bp, synthetic construct
  source 1..75: mol_type = other DNA
gggatttgcaacgatttggccgccgcctcagcctgtatgtgaacacggcagcggaagccatccgggcgctgtcgt

SEQ ID NO: 195076 - DNA, 75 bp, synthetic construct
  source 1..75: mol_type = other DNA
atctgcgctacggtacaatgccgcagcagtgatccttgcgcataaccatccctccggcgtggcggaacccagtcg

SEQ ID NO: 195077 - DNA, 75 bp, synthetic construct
  source 1..75: mol_type = other DNA
caccgtgccggacagcaacgtctggccgccgtccagcgggccatgcagcagggggccgcgaatgattactggttt

SEQ ID NO: 195078 - DNA, 75 bp, synthetic construct
  source 1..75: mol_type = other DNA
caccgtgccggacagcaacgactggccgccgtacatcgggccatgcagcagggggccgcgaatgattactggttt

SEQ ID NO: 195079 - DNA, 75 bp, synthetic construct
  source 1..75: mol_type = other DNA
taaggctgaccggcttatcactgagcgtctggtacaggcactggctctggtggatatccgggtgccggaccatct

SEQ ID NO: 195080 - DNA, 75 bp, synthetic construct
  source 1..75: mol_type = other DNA
ttgccacggcaatgctcatgggggcgctgacttcagtatcagtcgttgccgcagggaacaacggtacagtgagat

SEQ ID NO: 195081 - DNA, 75 bp, synthetic construct
  source 1..75: mol_type = other DNA
ggcgagcagagtgtacagatttacgggatctggtcgccgctcatcggggagtcttcccgcgtgtgcacgcatccg

SEQ ID NO: 195082 - DNA, 75 bp, synthetic construct
  source 1..75: mol_type = other DNA
ccagctacatcgccacctacatcggaaagaacctggacagccgcgccgtggatggcatcgacccgaaaacgggca

SEQ ID NO: 195083 - DNA, 75 bp, synthetic construct
  source 1..75: mol_type = other DNA
gataactttggtgcgaccgatggtgaactgaccatggaggtggcgctgaaggcatatcagatgctggcacgcatg

SEQ ID NO: 195084 - DNA, 75 bp, synthetic construct
  source 1..75: mol_type = other DNA
cagagaatcagtgaaaccactgaacgcgcccaccgcaaagcagacctgctgcggggtggcctgaccagtggaaac

SEQ ID NO: 195085 - DNA, 75 bp, synthetic construct
  source 1..75: mol_type = other DNA
gcgtgaaggaacggggatccccgcacctgaatccgcgctttcctcctggctggatgcctaccgggcagagaacga

SEQ ID NO: 195086 - DNA, 75 bp, synthetic construct
  source 1..75: mol_type = other DNA
cgcattatgacgcactgacaacagacaaagaccggaggaacgaaccggacacagaactgctgccgggtgcaatcc

SEQ ID NO: 195087 - DNA, 75 bp, synthetic construct
  source 1..75: mol_type = other DNA
cgttattcaacattgacaccggtgttgccatgaaccacgtgagcctggtaatcggcgatacccatggcaaaggtt

SEQ ID NO: 195088 - DNA, 75 bp, synthetic construct
  source 1..75: mol_type = other DNA
ggcgtgatgcaggtgaaaccgaattatctgcccgtcttaatgagccgctggcaaatggtgccgtgatccacatcg

SEQ ID NO: 195089 - DNA, 75 bp, synthetic construct
  source 1..75: mol_type = other DNA
tcaaagcctggttagtcggtgcggctggtacgcctgacctgggtggttttgaagcgaataccaccttccagatta

SEQ ID NO: 195090 - DNA, 75 bp, synthetic construct
  source 1..75: mol_type = other DNA
caactccgcgccgcctgtctggtttccagaaaaacatcgccctatctgagccaggacgcgttaagcgagtttcgc

SEQ ID NO: 195091 - DNA, 75 bp, synthetic construct
  source 1..75: mol_type = other DNA
tctgatatgacattctttggcaaaatttatggccaatgggataactcatggggtgacgatctggacatgttttat

SEQ ID NO: 195092 - DNA, 75 bp, synthetic construct
  source 1..75: mol_type = other DNA
ttgcctggaagttctatcctcgctggaaagccagtgtgacgtggcgttatttcgataataagctgggctacgatg

SEQ ID NO: 195093 - DNA, 75 bp, synthetic construct
  source 1..75: mol_type = other DNA
gatgagtgttctggccagagagctggttgccagtggcgatgtatacaactctggttacgggttattcccgtctga

SEQ ID NO: 195094 - DNA, 75 bp, synthetic construct
  source 1..75: mol_type = other DNA
aagcacggataacggcagacagaacacgtacttttcctcgctggataacatgattgcccaggggaacccgatgcc

SEQ ID NO: 195095 - DNA, 75 bp, synthetic construct
  source 1..75: mol_type = other DNA
cggaacaggccttagcggtattgctacaaacttatatatgctcgcagtttgccgttttattgttggcttagggat

SEQ ID NO: 195096 - DNA, 75 bp, synthetic construct
  source 1..75: mol_type = other DNA
ccagtatgacgcttggcggtgttgcacagatgctggcccctaaacccaaaaccccccgcacacagacaacggata

SEQ ID NO: 195097 - DNA, 75 bp, synthetic construct
  source 1..75: mol_type = other DNA
tggtgtttttcaggcagtgctgggtgcggcgctgattgctacggcaatctggatgccaggaatcagtatcgcttt

SEQ ID NO: 195098 - DNA, 75 bp, synthetic construct
  source 1..75: mol_type = other DNA
ggtgaaatgcgtgtggggtcacgggtaatttcgcaggaaatcagcacggcagacgaaggggatggaggtgaaatc

SEQ ID NO: 195099 - DNA, 75 bp, synthetic construct
  source 1..75: mol_type = other DNA
ttattttatcaatattttaaaatttcgaatacaggtattgatcatctcgaacaattgattaacgtcaactttttc

SEQ ID NO: 195100 - DNA, 75 bp, synthetic construct
  source 1..75: mol_type = other DNA
tgatgaccgcgtttggcgtgacaccagatgacgtcgctttgtcgcgacctctgcgaccattgccggcagcgacgc

SEQ ID NO: 195101 - DNA, 75 bp, synthetic construct
  source 1..75: mol_type = other DNA
ggttgaccatcaacgcacagcgattatggaaaacgcccatctggtactttccgccgccagctttgctgaaagcga

SEQ ID NO: 195102 - DNA, 75 bp, synthetic construct
  source 1..75: mol_type = other DNA
aaattatcgccggtcgggacatgccggacgaggtccgcgccaaactctgcaaggcgcgcgcgttttcccgtcgtg

SEQ ID NO: 195103 - DNA, 75 bp, synthetic construct
  source 1..75: mol_type = other DNA
ctggtgggaagaggaagacggcacctgcctggttttaagagccgaaatactgaaaacagaggagaaagaaaacgc

SEQ ID NO: 195104 - DNA, 75 bp, synthetic construct
  source 1..75: mol_type = other DNA
ctggctcacacgaaactcgctttgcgagttgcggatgaaagacggaacaagggaggtatctgctatcctggccta

SEQ ID NO: 195105 - DNA, 75 bp, synthetic construct
  source 1..75: mol_type = other DNA
atgacaaaagtattgctgtctcaccccccgcgcccggcgagccataactcaagccgcgcgatggtgtgggtgcga

SEQ ID NO: 195106 - DNA, 75 bp, synthetic construct
  source 1..75: mol_type = other DNA
cgcgtgctggcgttttatcaaggaggtggcgctgtgagtgaaattagctatcaggcttcaattgccgctggcatt

SEQ ID NO: 195107 - DNA, 75 bp, synthetic construct
  source 1..75: mol_type = other DNA
gctgaagaaaccatctgcggttgatccggaccttatctggtcattaccagatggcgaaatacgccgctacgacag

SEQ ID NO: 195108 - DNA, 75 bp, synthetic construct
  source 1..75: mol_type = other DNA
gacgacagaacataatctgttgcgagtgcaggaatagtgaagttatgcagcgcgtgctggcgttttatcagggga

SEQ ID NO: 195109 - DNA, 75 bp, synthetic construct
  source 1..75: mol_type = other DNA
ctggtcactgcgcgagtgggacagcgcgccaccaaaaattgcccgctggcaacgaaaaaggattcaacatcagga

SEQ ID NO: 195110 - DNA, 75 bp, synthetic construct
  source 1..75: mol_type = other DNA
gatgaggcgggcgataacatggctgcgcttcgtcacgcagtcgaacagcagcagctgccgcaagtagcctggctg

SEQ ID NO: 195111 - DNA, 75 bp, synthetic construct
  source 1..75: mol_type = other DNA
ctggctacgggttattcccgtctgaacaggcgcgtaaggactggcaaaacgcccgcaaaaaactctcaagggcaa

SEQ ID NO: 195112 - DNA, 75 bp, synthetic construct
  source 1..75: mol_type = other DNA
gcctggttgggtatgtcgacggaagggtatgttttcgccgcactgatctactggatcttctgtttcagcatgtcg

SEQ ID NO: 195113 - DNA, 75 bp, synthetic construct
  source 1..75: mol_type = other DNA
aaaaatctgttctccagctggagcaatagcctactgactattggctgtatatggttgatgtgtgaactgatccca

SEQ ID NO: 195114 - DNA, 75 bp, synthetic construct
  source 1..75: mol_type = other DNA
gtcgtctaaacataatctgtcgcgagtgccggaagagcgaagttatgcagcgcatcctggcattttatcagggaa

SEQ ID NO: 195115 - DNA, 75 bp, synthetic construct
  source 1..75: mol_type = other DNA
tgttgaactcgtacgccagagtgggcgcgagacgttacgacaactggaagctaaaaccggggcgacaagatattt

SEQ ID NO: 195116 - DNA, 75 bp, synthetic construct
  source 1..75: mol_type = other DNA
aaagataccagtctggtgatcattatcggcctgttcgatctcttcagtagtgtgcagcaggcaactgtcgatccc

SEQ ID NO: 195117 - DNA, 75 bp, synthetic construct
  source 1..75: mol_type = other DNA
gtggcaaaagtttttacacaagaagagcgggaaaaaattaaagggcaggttgttgatctcgtacgccggagtggg

SEQ ID NO: 195118 - DNA, 75 bp, synthetic construct
  source 1..75: mol_type = other DNA
cagatattactttcgcagattctaacccgactgatataacaactcgttcaatcagggcttttgagagtataacag

SEQ ID NO: 195119 - DNA, 75 bp, synthetic construct
  source 1..75: mol_type = other DNA
gttctctctgcaactaatattcgaccattcacagataaagttcttgttaagaaaccagagagcattgaatacgat

SEQ ID NO: 195120 - DNA, 75 bp, synthetic construct
  source 1..75: mol_type = other DNA
tgctgggtgaaattaggcgtaacattcaggtgaatttaaaggtgaatcctgataattttcctgaattaatagaaa

SEQ ID NO: 195121 - DNA, 75 bp, synthetic construct
  source 1..75: mol_type = other DNA
aaaggcaaagcgaagcagacgctggactttaaagcctggctggtgggcgctgctgatgcgccagatttaggtaac

SEQ ID NO: 195122 - DNA, 75 bp, synthetic construct
  source 1..75: mol_type = other DNA
tttctcctccctggataacatggttgcccagggtaatgttctgccggttctgtacggtgaaatgcgcgtggggtc

SEQ ID NO: 195123 - DNA, 75 bp, synthetic construct
  source 1..75: mol_type = other DNA
tgtacggtgaaatgcgcgtggggtcacgtgttgtctctcaggagatcagcacggcagacgagggggacggtggtc

SEQ ID NO: 195124 - DNA, 75 bp, synthetic construct
  source 1..75: mol_type = other DNA
gcggttctggtgccgctccacacctggagtggtgccgagaaataattcatgagattgcccgggaagagcacctct

SEQ ID NO: 195125 - DNA, 75 bp, synthetic construct
  source 1..75: mol_type = other DNA
tgcgtcacctgttccaagggaaacgctactttatgaaaagcacagggacacgagacatacggcaagcgcgattgt

SEQ ID NO: 195126 - DNA, 75 bp, synthetic construct
  source 1..75: mol_type = other DNA
gccgttcaagtgattcaagcactgatattattatccttccgaggatgataagaagaatggttgtatttaattata

SEQ ID NO: 195127 - DNA, 75 bp, synthetic construct
  source 1..75: mol_type = other DNA
ggtaaagcctttaccgaccgggcgggcgtcaaacgcgacctgcgttacatgataaccgctggcgtgaagaacaac

SEQ ID NO: 195128 - DNA, 75 bp, synthetic construct
  source 1..75: mol_type = other DNA
aacccacgacgcgattgacgaaagtacgtatatcgtcgcgcaaatgggcatcgaacccttccagcgggcgctgaa

SEQ ID NO: 195129 - DNA, 75 bp, synthetic construct
  source 1..75: mol_type = other DNA
ctgattgaagccaacgacgcactgcgttttgatttccacatcgaacaggtgacgccggaaggagttcaggcatga

SEQ ID NO: 195130 - DNA, 75 bp, synthetic construct
  source 1..75: mol_type = other DNA
accgataccggtgcggcatttaacaatgttagcctggcgatcggtgactctctgggtacctcttacaaaagcggc

SEQ ID NO: 195131 - DNA, 75 bp, synthetic construct
  source 1..75: mol_type = other DNA
cctgtttggcagcgatgaattgtcacagcgtgctccggtcttccggagccgtatgccgcagccgtacatcaaact

SEQ ID NO: 195132 - DNA, 75 bp, synthetic construct
  source 1..75: mol_type = other DNA
ggttgaccatcaacgcacagcgattatggaaaacgcccatctggtactttctgctgccagctttgctgaaagcga

SEQ ID NO: 195133 - DNA, 75 bp, synthetic construct
  source 1..75: mol_type = other DNA
caacccagcggatgccgcgaagttgggcgtgaacgcaggcgctcgcgtctcctttagttacgatggcaacacggt

SEQ ID NO: 195134 - DNA, 75 bp, synthetic construct
  source 1..75: mol_type = other DNA
gttactacaaagattacgctgacggtacggatctgggcgtttatggcgcgcacgacaacgtctacttcggtcgcc

SEQ ID NO: 195135 - DNA, 75 bp, synthetic construct
  source 1..75: mol_type = other DNA
cccaccgcaatcaggatctggggccgttcatctctcatgaaatgaaccgctgcatcgcctgttaccgctgtgtgc

SEQ ID NO: 195136 - DNA, 75 bp, synthetic construct
  source 1..75: mol_type = other DNA
gaaagccctgaaaggtcgcggcgctgacgtcggtatcaccatgattgcccgttccgtcaacagcatggggctggg

SEQ ID NO: 195137 - DNA, 75 bp, synthetic construct
  source 1..75: mol_type = other DNA
atgatggaacagtcacttatcccacaggctacggcacttccactgaccgcaaaacgtacggtaaaacgcgcctta

SEQ ID NO: 195138 - DNA, 75 bp, synthetic construct
  source 1..75: mol_type = other DNA
gcaccgaggtacatccccgggaggtggtcaaacgcgccctgtatttcaatgcggcagcagtgatactggcgcata

SEQ ID NO: 195139 - DNA, 75 bp, synthetic construct
  source 1..75: mol_type = other DNA
atttaacaatgtcagcctggcgattggtgatgctcaggggacctcttacaaaagcggtacgggcatcaaccagac

SEQ ID NO: 195140 - DNA, 75 bp, synthetic construct
  source 1..75: mol_type = other DNA
aagaatacgaggtcaacggagcggacaacctgctggaagcttgtctgtctctgggccttgatattccttactttt

SEQ ID NO: 195141 - DNA, 75 bp, synthetic construct
  source 1..75: mol_type = other DNA
ggggatcgggattaccaccccgcaggagttagaggcgatacacgacgcgccagcgtctttttttgtatcggcgca

SEQ ID NO: 195142 - DNA, 75 bp, synthetic construct
  source 1..75: mol_type = other DNA
ttaaaaaaacttgttagcccagaaataatgatgcaagcaagaaaccgtaagaatctcccaagtttatttggaaga

SEQ ID NO: 195143 - DNA, 75 bp, synthetic construct
  source 1..75: mol_type = other DNA
aggatgctccaaaaagctgagggcgtagtggagggcatgctgatggtgttggatctcagattggagatggatgct

SEQ ID NO: 195144 - DNA, 75 bp, synthetic construct
  source 1..75: mol_type = other DNA
tcgcgaagaaacggaagtgttctgatgggaccatcaggaaggaattgcagactgcaatggggtttgtagatggtt

SEQ ID NO: 195145 - DNA, 75 bp, synthetic construct
  source 1..75: mol_type = other DNA
gacttgctggttgattattacgtgttgggggagacgttcatggcgctggcacggaaacatgggtgctctgacacc

SEQ ID NO: 195146 - DNA, 75 bp, synthetic construct
  source 1..75: mol_type = other DNA
aaggctgaaggaatagtcgaaggaatgttgatggcattggatgttcgtctcgagatggatcgcgaagttgttagg

SEQ ID NO: 195147 - DNA, 75 bp, synthetic construct
  source 1..75: mol_type = other DNA
ggggttggcacgaaagcatgggtgttcggatacctgtattggcaagcgcctgcagaaagcggaaggggttattga

SEQ ID NO: 195148 - DNA, 75 bp, synthetic construct
  source 1..75: mol_type = other DNA
ggcataattgaagggatgttaatggcattagatatccggttagatatggatatcgttgctaataattctaattga

SEQ ID NO: 195149 - DNA, 75 bp, synthetic construct
  source 1..75: mol_type = other DNA
agcgttggggagcgtgggcggctaataatcatgaagatgtgacctggtcgtccattgccgccggttttaagggac

SEQ ID NO: 195150 - DNA, 75 bp, synthetic construct
  source 1..75: mol_type = other DNA
gcatgacttgctggttgattattacgtgttgggggagacgttcatggcgttggcacggaaacatgggtgctctga

SEQ ID NO: 195151 - DNA, 75 bp, synthetic construct
  source 1..75: mol_type = other DNA
ccggttgctgaaatccgggctgaatctcagctttttgtgactcctgccccggtctgtgatcgcctggtgacgctg

SEQ ID NO: 195152 - DNA, 75 bp, synthetic construct
  source 1..75: mol_type = other DNA
gcggatggggtaaagatactgatgcgtgatatccggcaggttcttgagcgctggggtgcatgggcggcaaataac

SEQ ID NO: 195153 - DNA, 75 bp, synthetic construct
  source 1..75: mol_type = other DNA
gttctgctgttgcggataccgccgccgttgccgcgctactggtgccgatgatgcgcagcgctaactacccggtca

SEQ ID NO: 195154 - DNA, 75 bp, synthetic construct
  source 1..75: mol_type = other DNA
agcgttggggggcgtgggtggcaaataaccacgaagatgttacctggtcgtcgattgctgcgggattcaaaggac

SEQ ID NO: 195155 - DNA, 75 bp, synthetic construct
  source 1..75: mol_type = other DNA
agcgttggggagcatgggtggtaaataaccacgaggatgttacctggccatctattgccgccggattcaaggggc

SEQ ID NO: 195156 - DNA, 75 bp, synthetic construct
  source 1..75: mol_type = other DNA
agccatgtccagaagtgggagcgtgtctgcgccgcgctgcgggagctgaacaagtaccgggatattatacggtag

SEQ ID NO: 195157 - DNA, 75 bp, synthetic construct
  source 1..75: mol_type = other DNA
agtcgtgaagaagtgctgaacgagctgtgggaactgaaaagaaatggcgtcgttgataaaacgggtcacacctgg

SEQ ID NO: 195158 - DNA, 75 bp, synthetic construct
  source 1..75: mol_type = other DNA
agcttctccctgctggcgattccgttctttgtgctggcgggtgaaatcatgaatgcgggcggcttgtcaaaacgc

SEQ ID NO: 195159 - DNA, 75 bp, synthetic construct
  source 1..75: mol_type = other DNA
gggggcggcgctgattgcggtggcatggtggaaccctgtgggctggctgggtgctgcggctgtatcgggcatgta

SEQ ID NO: 195160 - DNA, 75 bp, synthetic construct
  source 1..75: mol_type = other DNA
aaagcctcttcacaggaggtggcatcccgcctgggaatcagccgtgaagatgctgtccacgaactgtggaaactg

SEQ ID NO: 195161 - DNA, 75 bp, synthetic construct
  source 1..75: mol_type = other DNA
gccgggcgaattcatcgctggcaatggcaatcagcaaagggcgtctgattcgcgtgaatcagggcggtaaatttc

SEQ ID NO: 195162 - DNA, 75 bp, synthetic construct
  source 1..75: mol_type = other DNA
atgatcgtttgcggatgtatggcccgtctgaaaaagaacaacagcgatttgcatgatttactagtggattattat

SEQ ID NO: 195163 - DNA, 75 bp, synthetic construct
  source 1..75: mol_type = other DNA
atgcgtgatattcagcaggttctggaacgctggggagcgtgggcggcaaataatcgcgagaatgtgacctggtca

SEQ ID NO: 195164 - DNA, 75 bp, synthetic construct
  source 1..75: mol_type = other DNA
atggttatttgtgggtgtatggctcgcttgaaaaagaacaacagtgatttgcatgatttgctggtagattattat

SEQ ID NO: 195165 - DNA, 75 bp, synthetic construct
  source 1..75: mol_type = other DNA
taccattgctgaactgccgatgatggtttctgatttactgcaaccgttggtcgattcaccgcgtctgctgtttat

SEQ ID NO: 195166 - DNA, 75 bp, synthetic construct
  source 1..75: mol_type = other DNA
cagcaaaaagcgacgatgcaggaaatctggcactcttttgtctccggtatctgggcgctgtttcttccggtcatc

SEQ ID NO: 195167 - DNA, 75 bp, synthetic construct
  source 1..75: mol_type = other DNA
ttgcccgtaaacatgggcgttctgattgctgggttgggcgcttattgcaaaaggcagaaggcatcattgaaggta

SEQ ID NO: 195168 - DNA, 75 bp, synthetic construct
  source 1..75: mol_type = other DNA
tgcccgtctcccgtcaccatctggcagatactgctgtcccgactgctggaccagcactacggcctcacgctgaat

SEQ ID NO: 195169 - DNA, 75 bp, synthetic construct
  source 1..75: mol_type = other DNA
ggctcgccgggcgaccggcctgatgacccgcgacaattacagaacggtaaataacattaccctgggtaaacatcc

SEQ ID NO: 195170 - DNA, 75 bp, synthetic construct
  source 1..75: mol_type = other DNA
cagcatattgaggctggcatttcactgtgcgatgcagtgaactttcttgttgaaaaatacgcactggtgcgtacc

SEQ ID NO: 195171 - DNA, 75 bp, synthetic construct
  source 1..75: mol_type = other DNA
taccgttttctgacgtccgcgaggagctgccgcgcggcacgtttgcttataccgatgcttcgacgatgattattc

SEQ ID NO: 195172 - DNA, 75 bp, synthetic construct
  source 1..75: mol_type = other DNA
attattggcgggtttcgctccggtctgtttacccctaccgaagccggggccgttgctgctttctatgcgttgttt

SEQ ID NO: 195173 - DNA, 75 bp, synthetic construct
  source 1..75: mol_type = other DNA
tcccgtcaccatctggcagatactgctcacccggttactggaccagcattacagccttacgctgaatgacacacc

SEQ ID NO: 195174 - DNA, 75 bp, synthetic construct
  source 1..75: mol_type = other DNA
gttgaaaaatacgcgctggtacgtaccgaccagccgggattcagcgcagaagccccgtcgcagttaatcaacagc

SEQ ID NO: 195175 - DNA, 75 bp, synthetic construct
  source 1..75: mol_type = other DNA
tgatattctccgggcacgccgggcaaccggcctgatgacccgcgataactacagaacggtaaataacattgccct

SEQ ID NO: 195176 - DNA, 75 bp, synthetic construct
  source 1..75: mol_type = other DNA
cagcatattgaggccggcatttcactgtgcgatgcggtgaactttctcgttgaaaaatacgcactggtacgtacc

SEQ ID NO: 195177 - DNA, 75 bp, synthetic construct
  source 1..75: mol_type = other DNA
cgatatcctccgggctcgcagggcgaccgacctgatgacccgcgacaattacagaacggtaaataacattaccca

SEQ ID NO: 195178 - DNA, 75 bp, synthetic construct
  source 1..75: mol_type = other DNA
accggcctgatgacccgcgacaattacagaacggtaaataacattaccctgggcaggcatccggaggaggcgaaa

SEQ ID NO: 195179 - DNA, 75 bp, synthetic construct
  source 1..75: mol_type = other DNA
ggcctgatgacccgcgacaattacagaacggtaaataacattaccctgggtaagcacccggaggtgaaacgatga

SEQ ID NO: 195180 - DNA, 75 bp, synthetic construct
  source 1..75: mol_type = other DNA
tccggctgatgcgcgcaaggctggataacgccgcgccggttgctgaaatacgcgctgaatctcagctttttgtga

SEQ ID NO: 195181 - DNA, 75 bp, synthetic construct
  source 1..75: mol_type = other DNA
caggatatccggcatatcctgcgggctttttccctgttgcgtccggggggcgtgctggttgccgtctgtctcaac

SEQ ID NO: 195182 - DNA, 75 bp, synthetic construct
  source 1..75: mol_type = other DNA
taacgccgcgccggttgctgaaatccgggctgaatctcagctttttgtgacacctgccccggtctgtgatcgcct

SEQ ID NO: 195183 - DNA, 75 bp, synthetic construct
  source 1..75: mol_type = other DNA
ggtgacgctggcggagatcagcaaccgtgatcacattctggaaccctctgccgggaccggagccatactgcgggc

SEQ ID NO: 195184 - DNA, 75 bp, synthetic construct
  source 1..75: mol_type = other DNA
taccgttttctgacatctgcgaggaactgccgtgcggcacgtttgcttatacccgtgttccgacgatgattattc

SEQ ID NO: 195185 - DNA, 75 bp, synthetic construct
  source 1..75: mol_type = other DNA
atggtgatatgcgggtgcatagcccgcctttaccggaacaatcgcgatctgcatgacttgctggtggattactac

SEQ ID NO: 195186 - DNA, 75 bp, synthetic construct
  source 1..75: mol_type = other DNA
tggacatatcggaaagcggctacagaaagcggaaggtgttgttgaaggcatgttgatgatgctggatgtgaagct

SEQ ID NO: 195187 - DNA, 75 bp, synthetic construct
  source 1..75: mol_type = other DNA
cacctgccccggtctgtgagcgcctggtgacgctggcggagatcagcaaccgggatcacattctggaaccctctg

SEQ ID NO: 195188 - DNA, 75 bp, synthetic construct
  source 1..75: mol_type = other DNA
ggtgacgctggcggaaatcagcaaccatgatcacattctggaaccctctgccgggaccggagccatactgcgggc

SEQ ID NO: 195189 - DNA, 75 bp, synthetic construct
  source 1..75: mol_type = other DNA
gcgggctggtccggtatctgcgggaaaattttaacggtgtcagggttcagtgtggcgacttcatggaatggctgc

SEQ ID NO: 195190 - DNA, 75 bp, synthetic construct
  source 1..75: mol_type = other DNA
taccgttttctgacgtccgcgaggagctgccacgcggcacgtttgcttataccgatgttccgacgatgattattc

SEQ ID NO: 195191 - DNA, 75 bp, synthetic construct
  source 1..75: mol_type = other DNA
ggaccacgccagcaggagaagctgttaccgttttctgacgtccgcgaggagctgccgcgcggcacgtttgcttat

SEQ ID NO: 195192 - DNA, 75 bp, synthetic construct
  source 1..75: mol_type = other DNA
taccgttttctgacatccgcgaggagctgccgcgcggcacgtttgcttatacccgtgttccgacgatgattgttc

SEQ ID NO: 195193 - DNA, 75 bp, synthetic construct
  source 1..75: mol_type = other DNA
agtgggagcgagtctgcgccgcgctgcgggagctgaacaagtgccgggatattctctgggatattaccgccacca

SEQ ID NO: 195194 - DNA, 75 bp, synthetic construct
  source 1..75: mol_type = other DNA
cgctgccatcgttcactgaaacgcgagcagatgacctggttttaccatcgctgcatatggcaaaccgcgaactgc

SEQ ID NO: 195195 - DNA, 75 bp, synthetic construct
  source 1..75: mol_type = other DNA
agtcgtgaagaagtactgaacgagctgtgggaactgaaaagggctggcttcgttgataaaagcgtatacacctgg

SEQ ID NO: 195196 - DNA, 75 bp, synthetic construct
  source 1..75: mol_type = other DNA
aagcaatgggaaaagccacgtcggttgaactggctacgcgacttgatatcagtcgtgaagaagtgctgaacgagc

SEQ ID NO: 195197 - DNA, 75 bp, synthetic construct
  source 1..75: mol_type = other DNA
tactgaaacgcgagcggatgacctggttttaccatcactgcatatggcaaaccgcgaactgcgtcgggcgaaaaa

SEQ ID NO: 195198 - DNA, 75 bp, synthetic construct
  source 1..75: mol_type = other DNA
ctcagcccgcaggtgttgcgttaccagtacaggaggctgcaacacaggaagatattaaaacagaaacggtggcgg

SEQ ID NO: 195199 - DNA, 75 bp, synthetic construct
  source 1..75: mol_type = other DNA
ctgtagcggacattgtgcagtcgctgccatcgttcactgaaacacgagctgatgacctggttttaccatcactgc

SEQ ID NO: 195200 - DNA, 75 bp, synthetic construct
  source 1..75: mol_type = other DNA
ctggcacgcgtaaaccagaacggtaaatttcgttactgcctgccgggcgataatttaccagcagagccgaaagcc

SEQ ID NO: 195201 - DNA, 75 bp, synthetic construct
  source 1..75: mol_type = other DNA
aggcctttcctcagccagcaggtgttgcgttaccagtacaggaagcggcaacacaggaagatataaaaacagaaa

SEQ ID NO: 195202 - DNA, 75 bp, synthetic construct
  source 1..75: mol_type = other DNA
ttaccagcagagccgaaagcagcatcggtagcggaaactgatggtaaggcctttcctcagcccgcaggtgttgca

SEQ ID NO: 195203 - DNA, 75 bp, synthetic construct
  source 1..75: mol_type = other DNA
aagcaatgggaaaagccacgtcggtggaactggctgtgcgacttgatatcagtagtgaagaagtactgaacgagc

SEQ ID NO: 195204 - DNA, 75 bp, synthetic construct
  source 1..75: mol_type = other DNA
ggcggtagtaaccgcaacggggcggctggcacgcgttaatcagaacggtaaatttcgttactgcctgccggacgg

SEQ ID NO: 195205 - DNA, 75 bp, synthetic construct
  source 1..75: mol_type = other DNA
cctggtttctggctggcgaaggtgaatcccgggtaaccgaagagcggccagtaaaatctgaagcacaggatatgc

SEQ ID NO: 195206 - DNA, 75 bp, synthetic construct
  source 1..75: mol_type = other DNA
atgagtgatttatattcgccagccatgttaatacaggttgttaatgccgaagatattcaatggcagattaattct

SEQ ID NO: 195207 - DNA, 75 bp, synthetic construct
  source 1..75: mol_type = other DNA
aaactcaaaacctaaagtaaaagcacgtattgaatatgtaagagacaaacttttaggtgtgcagaccgaagatac

SEQ ID NO: 195208 - DNA, 75 bp, synthetic construct
  source 1..75: mol_type = other DNA
cgactgatgtacctagacctggagtatcgacagggccagtaccgtctgctgtccggcagccgtcagcgagagctg

SEQ ID NO: 195209 - DNA, 75 bp, synthetic construct
  source 1..75: mol_type = other DNA
gtgagtagtgaagaaagtatcacggaatcagttaagcaggcgttgaaggaacgagtagctaaccctttatggggc

SEQ ID NO: 195210 - DNA, 75 bp, synthetic construct
  source 1..75: mol_type = other DNA
ggcgttataccgacgaggacggaactgaaaaacatttccttgatcctgatttgatggtgcttggcaatacggctc

SEQ ID NO: 195211 - DNA, 75 bp, synthetic construct
  source 1..75: mol_type = other DNA
cggccctgaaaaatcttggggattctgtaagcttcaagggttacgttggcgatgttgctattgtggtatatagcg

SEQ ID NO: 195212 - DNA, 75 bp, synthetic construct
  source 1..75: mol_type = other DNA
cacgaacagcaggaaaccatccgcaatggtgacaacgccacggacagctatgtgcgccagacgcgcccgctgctg

SEQ ID NO: 195213 - DNA, 75 bp, synthetic construct
  source 1..75: mol_type = other DNA
gagcgtgtctgcgccgcgctgcgggagctgaacaggcaccgggatattgtccgacagattgtcgattcttcccgc

SEQ ID NO: 195214 - DNA, 75 bp, synthetic construct
  source 1..75: mol_type = other DNA
gagcgagtctgcgcggcgctgcgggagcttaacaagcaccgggatattgtacggcagatgaattgttccagagag

SEQ ID NO: 195215 - DNA, 75 bp, synthetic construct
  source 1..75: mol_type = other DNA
gagcccttccccattttcacgtttttcactcactgctcgccagaaccggcgacggtcttttacctcataaggaat

SEQ ID NO: 195216 - DNA, 75 bp, synthetic construct
  source 1..75: mol_type = other DNA
tctcagccttacctcatttccgttttattcaacagtcgctgaattcattttctccatcagaaaatcgggggcaat

SEQ ID NO: 195217 - DNA, 75 bp, synthetic construct
  source 1..75: mol_type = other DNA
gtgcatcctctggcgaccatccatgcagtgacaatcctgaacaccacttttaccccgcgaaaacgtctcagcctg

SEQ ID NO: 195218 - DNA, 75 bp, synthetic construct
  source 1..75: mol_type = other DNA
caatccactgccgcgcaataaagtggtactggcggtcagcattctgttaatcctcattttctcgaaatatttcta

SEQ ID NO: 195219 - DNA, 75 bp, synthetic construct
  source 1..75: mol_type = other DNA
ctgtggcgggcgcgactgcgtcaacgaccaaggcccgaacatcgtttggtattttaggtgctatcagcctctcac

SEQ ID NO: 195220 - DNA, 75 bp, synthetic construct
  source 1..75: mol_type = other DNA
gctggcggcggcgctggtcggtacgggttcgtcggtctttcacccggaatcttcccgcgtggcgcgtatggcgtc

SEQ ID NO: 195221 - DNA, 75 bp, synthetic construct
  source 1..75: mol_type = other DNA
ggaagaaactaccacggcaacagtcgcgaaaatttcagagagcgatttaactgcgacgattgaacaacgtggacc

SEQ ID NO: 195222 - DNA, 75 bp, synthetic construct
  source 1..75: mol_type = other DNA
agttgcatcggtagcggaaaccgatggtaaggcctttcctcagcccacaggtgttgcgttaccggtacagaaaga

SEQ ID NO: 195223 - DNA, 75 bp, synthetic construct
  source 1..75: mol_type = other DNA
agtcgtgaagaagtgcttaacgaactatgggaactgaaaaaggctggttttgttgataaaagcgcgtacacctgg

SEQ ID NO: 195224 - DNA, 75 bp, synthetic construct
  source 1..75: mol_type = other DNA
actgcataccgggcgataatttaccagcagagccgaaagcagcatcggtatctccgctctggttatctgcatcgt

SEQ ID NO: 195225 - DNA, 75 bp, synthetic construct
  source 1..75: mol_type = other DNA
tggtatcaggtgcgcattgccgggcgtgatgcaggcgaaaacgaattatctgcccgtcttaatgagccgctggca

SEQ ID NO: 195226 - DNA, 75 bp, synthetic construct
  source 1..75: mol_type = other DNA
gccggaagaaatcgccacggcaacagtgacgaaaatctcagagtgcgatttaaccgcgacgattgaacaacgcgg

SEQ ID NO: 195227 - DNA, 75 bp, synthetic construct
  source 1..75: mol_type = other DNA
tgcgccgcgctgcgggagctgaacaagcaccgggatattgttcgtcagattgtcgattcctccagtcgtattgtg

SEQ ID NO: 195228 - DNA, 75 bp, synthetic construct
  source 1..75: mol_type = other DNA
agaagcggtggaggacattgtgaagttgcagcaatcgttcactgaaacgaaagcagatgacctgattctaccatc

SEQ ID NO: 195229 - DNA, 75 bp, synthetic construct
  source 1..75: mol_type = other DNA
cggatgaactggcattgatgttcggaattacctcccgccgggcgaattcatcgctggcaatggcaatcagcaaag

SEQ ID NO: 195230 - DNA, 75 bp, synthetic construct
  source 1..75: mol_type = other DNA
ggaaccctgtgggctggctgggagctgcggctgtatcgggcatgtatgctgcgggggccagtatgatccttggcg

SEQ ID NO: 195231 - DNA, 75 bp, synthetic construct
  source 1..75: mol_type = other DNA
taaccgcgacgattgaacaacgcggaccacaaacggcggatgagctggctgcgttgttcggtaccacatcacgca

SEQ ID NO: 195232 - DNA, 75 bp, synthetic construct
  source 1..75: mol_type = other DNA
accgcgaactgcgtcgggcgaaaagtcatgtccagaagtgggagcgagtctgcgccgcgctgcgggagctgaaca

SEQ ID NO: 195233 - DNA, 75 bp, synthetic construct
  source 1..75: mol_type = other DNA
acattgttcggtaccacatcacgcaaagtagcttcaacgctggcaatggctatcagcaaaggacgcctgattcgc

SEQ ID NO: 195234 - DNA, 75 bp, synthetic construct
  source 1..75: mol_type = other DNA
tcatgtccagaagtgggagcgtgtctgcgccgcgctgcgtgagttgaacaagcacagggatattgtacgacagat

SEQ ID NO: 195235 - DNA, 75 bp, synthetic construct
  source 1..75: mol_type = other DNA
gaaattaaaacagatactatgggggacattgtgcagtcactaccatcgttcactgaaacgcgagccaatgacctg

SEQ ID NO: 195236 - DNA, 75 bp, synthetic construct
  source 1..75: mol_type = other DNA
aagtagcttcaacgctggcaatggcaatcagcaaggggcgtctgattcgcgtaaatcagaacggtaaatttcgtt

SEQ ID NO: 195237 - DNA, 75 bp, synthetic construct
  source 1..75: mol_type = other DNA
tgcgttaccagtccgggaagcggaaacacaggaagaaataaaaacggaaagtgtggcggtcacagtgcagtcaca

SEQ ID NO: 195238 - DNA, 75 bp, synthetic construct
  source 1..75: mol_type = other DNA
gcattcgcaaggttgcttccacgttggcggtcgtaacagcaacggggcgcctggcacgcgtaaatcagaacggta

SEQ ID NO: 195239 - DNA, 75 bp, synthetic construct
  source 1..75: mol_type = other DNA
gtctgaagtaccggatgtgctgaccggggaggtcgaacaaaaagttaccgcggacatgatgattgagtttatctg

SEQ ID NO: 195240 - DNA, 75 bp, synthetic construct
  source 1..75: mol_type = other DNA
gttaatcagaacggtaaatttcgttactgcatgccgggcgatgatttaccagcagagccgaaagctgcatcggta

SEQ ID NO: 195241 - DNA, 75 bp, synthetic construct
  source 1..75: mol_type = other DNA
taaccgcgacgattgaacaacgcggaccacaaacggcggatgaactggctacgttgttcggtaccacatcacgca

SEQ ID NO: 195242 - DNA, 75 bp, synthetic construct
  source 1..75: mol_type = other DNA
cagacatgatgattgagtttatcggtcaggatggggctaaaacgtgtgaggaactggcggataagttcggtgtta

SEQ ID NO: 195243 - DNA, 75 bp, synthetic construct
  source 1..75: mol_type = other DNA
ggcgttgcgcgcatggtctgagcgttatcaggagcaggtagccgccgggcaacgggctgaagctggttatcttga

SEQ ID NO: 195244 - DNA, 75 bp, synthetic construct
  source 1..75: mol_type = other DNA
ctggcacagcgaccgggcaacctgaaaccgctgacgcccggttacgcaattcgggtgtctcccagcgtgacgtcc

SEQ ID NO: 195245 - DNA, 75 bp, synthetic construct
  source 1..75: mol_type = other DNA
tcagcattcgacaaatacaaaacggagcaggcaacgcttgagaacgctgcgttgcgggcctgggcaaaacggtat

SEQ ID NO: 195246 - DNA, 75 bp, synthetic construct
  source 1..75: mol_type = other DNA
ggacgaagctgtagcaatcggtgctgctgttcagggtggtgttctgactggtgacgtgaaagacgtactgctgct

SEQ ID NO: 195247 - DNA, 75 bp, synthetic construct
  source 1..75: mol_type = other DNA
tatcatcaacgaaccgaccgcagctgcgctggcttatggtctggacaaaggtactggcaaccgtactatcgcggt

SEQ ID NO: 195248 - DNA, 75 bp, synthetic construct
  source 1..75: mol_type = other DNA
atcgaaaccatgggcggtgtgatgaccacgctgatcgcgaaaaacaccactatcccgaccaagcacagccaggtg

SEQ ID NO: 195249 - DNA, 75 bp, synthetic construct
  source 1..75: mol_type = other DNA
aatgctgccgctaccggtttgctgattaagcgcctgctcccggcattgctggcctgctctcttccacaggaacat

SEQ ID NO: 195250 - DNA, 75 bp, synthetic construct
  source 1..75: mol_type = other DNA
tatgtgggggtcgcctcagaaaacggaatctatggtcactcccgtttttgcaacaccgattttgacgacaagtgg

SEQ ID NO: 195251 - DNA, 75 bp, synthetic construct
  source 1..75: mol_type = other DNA
ggatggtggtattgctggcaattgcctttgtgttgtcggtaaataaaaagagcatcagcttgcgcacggttggcg

SEQ ID NO: 195252 - DNA, 75 bp, synthetic construct
  source 1..75: mol_type = other DNA
atccactggatggcactaccaactttatcaaacgtctgccgcacttcgcggtatctatcgccgttcgtatcaaag

SEQ ID NO: 195253 - DNA, 75 bp, synthetic construct
  source 1..75: mol_type = other DNA
ctgggaaaacgcatctataacgagatctccaaagaagcctgggcgcagtggcagcacaaacaaaccatgctgatt

SEQ ID NO: 195254 - DNA, 75 bp, synthetic construct
  source 1..75: mol_type = other DNA
ttttgcccccaccgcagcaggtattgatgcgtgtaaagtgaccgatcgtggcattttaccggtcatcaatacggg

SEQ ID NO: 195255 - DNA, 75 bp, synthetic construct
  source 1..75: mol_type = other DNA
catcatttttctcatcacgcagcgccatcgcgatggcagcatgatgcaattattactcgccggtatcgccatcaa

SEQ ID NO: 195256 - DNA, 75 bp, synthetic construct
  source 1..75: mol_type = other DNA
gtggaatactttggcgaaatgctcttccgctctgacttgtgtaatgctgacgtagcaatgggcgatctgctgatt

SEQ ID NO: 195257 - DNA, 75 bp, synthetic construct
  source 1..75: mol_type = other DNA
atgtcagaattaaaaattgccgttagtcgttcttgccagaattacttttccactcatcgtgtatgcgtgaatatt

SEQ ID NO: 195258 - DNA, 75 bp, synthetic construct
  source 1..75: mol_type = other DNA
atgtcagaattaaaaattgccgttagccgttcttgcccggattgtttttccactcatcgtgcatgcgtgaatata

SEQ ID NO: 195259 - DNA, 75 bp, synthetic construct
  source 1..75: mol_type = other DNA
cttatcctccgggtgtgctgtgtgttgttccgggtgaaatctggggtggtgctgttttgcgttacttcagcgctc

SEQ ID NO: 195260 - DNA, 75 bp, synthetic construct
  source 1..75: mol_type = other DNA
atactttgtcgatccatgcaaactgttgctgacaaccccaggtattgatgcacgtaacggcgaatatgaagcgtt

SEQ ID NO: 195261 - DNA, 75 bp, synthetic construct
  source 1..75: mol_type = other DNA
caccactgttgctggatcttaatgagaacgatccgggtattctggttacgcaatctgtgcataaacagcaggctg

SEQ ID NO: 195262 - DNA, 75 bp, synthetic construct
  source 1..75: mol_type = other DNA
ttgccccttgtcatcattatcacgcggttggcccaatggcaggcatcatcagcccgtcgatgccgttatgggtgg

SEQ ID NO: 195263 - DNA, 75 bp, synthetic construct
  source 1..75: mol_type = other DNA
aatattacatacaaaatctaaacattgggaatacgagcaggagtggaggcatgtagttgagcaaggtaatgagtt

SEQ ID NO: 195264 - DNA, 75 bp, synthetic construct
  source 1..75: mol_type = other DNA
tccaaaaaacgttctcttgatgaacttttggacagatttaaaagcggtttagaaaagttaggtattctttcacta

SEQ ID NO: 195265 - DNA, 75 bp, synthetic construct
  source 1..75: mol_type = other DNA
taagcgtcttcttccggcattgctggccagctctcttccacaagaacatatccagcgcgccgtggcatttatcac

SEQ ID NO: 195266 - DNA, 75 bp, synthetic construct
  source 1..75: mol_type = other DNA
atgccgctgctacaggtttgctgattaagcgtcttcttccggcattgctggccagctctcttccacaagaacata

SEQ ID NO: 195267 - DNA, 75 bp, synthetic construct
  source 1..75: mol_type = other DNA
atgaataccttatttaatcagcctttgaaggttgtgaacgcgggactacacagttttgctgacaatattcaacat

SEQ ID NO: 195268 - DNA, 75 bp, synthetic construct
  source 1..75: mol_type = other DNA
aatatgaagcgttcggtgtacccgcgacgattcttgctaacttcctgcgcgaaaatggcgtagtgccggaaaaat

SEQ ID NO: 195269 - DNA, 75 bp, synthetic construct
  source 1..75: mol_type = other DNA
cgcggtaaaacctatcaagaagaactacaaaaagtaccttctgatttagtattcaaagtacaggcactattcaag

SEQ ID NO: 195270 - DNA, 75 bp, synthetic construct
  source 1..75: mol_type = other DNA
gtcctgcatacgttgcgtggcgatgcccccttcccattactgcaccaggacaaaaagacccagggcgggcgctat

SEQ ID NO: 195271 - DNA, 75 bp, synthetic construct
  source 1..75: mol_type = other DNA
gctgactccggcagaagatatggccaaacttcagcaacttgttgccctgctggtacgcttcgaaaaactgcttga

SEQ ID NO: 195272 - DNA, 75 bp, synthetic construct
  source 1..75: mol_type = other DNA
tcgtccgttcgtacctgaactggtggatggtaaaccctggcagtcgtatgaaacagcgcaaattgcggttgatct

SEQ ID NO: 195273 - DNA, 75 bp, synthetic construct
  source 1..75: mol_type = other DNA
tgttccgggtgaaatctggggtggtgctgttttgcgttacttcagcgctctggaagaagggatcaacctgctgcc

SEQ ID NO: 195274 - DNA, 75 bp, synthetic construct
  source 1..75: mol_type = other DNA
gggctgggcgcgccatattgggatccgtatgcgcgcggggcgattttcggtttaactcgcggggtgaactctaac

SEQ ID NO: 195275 - DNA, 75 bp, synthetic construct
  source 1..75: mol_type = other DNA
agtagcaaacaatttcctgatgcagttccagtccgatattctcggcacccgcgttgagcgcccggaagtgcgcga

SEQ ID NO: 195276 - DNA, 75 bp, synthetic construct
  source 1..75: mol_type = other DNA
cgggctgggtgcgccgtactgggacccgtatgcgcgcggggcgattttcggtctgactcgtggggtgaacgctaa

SEQ ID NO: 195277 - DNA, 75 bp, synthetic construct
  source 1..75: mol_type = other DNA
ggtatttattccgatggcattcttcggtggctcaacaggggcaatttatcgccagttctctatcactattgtttc

SEQ ID NO: 195278 - DNA, 75 bp, synthetic construct
  source 1..75: mol_type = other DNA
gcgcagtttaaactggaagttgaccaggaaaaggcgcaggcattaggtgtttcactttctgacatcaatcagacc

SEQ ID NO: 195279 - DNA, 75 bp, synthetic construct
  source 1..75: mol_type = other DNA
atcctcggcgctcgcgtagagcgcccggaagtccgcgaagtgactgcattaggtgcggcatacctcgcgggtctg

SEQ ID NO: 195280 - DNA, 75 bp, synthetic construct
  source 1..75: mol_type = other DNA
cgatctactgattcatgaaggtgcgccatgcattgcacagcaacatgcagctaaagtgtttaatgccgataaaac

SEQ ID NO: 195281 - DNA, 75 bp, synthetic construct
  source 1..75: mol_type = other DNA
tctttttgccagacgttctgtgtcttgtaagggggacactcgaggtgtagctcatgacgttttgggtatattgct

SEQ ID NO: 195282 - DNA, 75 bp, synthetic construct
  source 1..75: mol_type = other DNA
atcgacgaaagccgtaaacgctttcaggatggcagcatttggggaatatattgacgatgaaaccgcatcgacagt

SEQ ID NO: 195283 - DNA, 75 bp, synthetic construct
  source 1..75: mol_type = other DNA
ggtaatctactcatttagcaagtatggcttatcatcgaatacaattcgcctttcttttcaagaatttgcaaaggc

SEQ ID NO: 195284 - DNA, 75 bp, synthetic construct
  source 1..75: mol_type = other DNA
cgcaggatttatctttggtttcagagtattaccggcaattatcttcgttacagcactggtgagtattctctacta

SEQ ID NO: 195285 - DNA, 75 bp, synthetic construct
  source 1..75: mol_type = other DNA
atgccgggatatcaatggtgcgctctaactaatttcaatattgcatttccagatatttgttctcggttcttgtct

SEQ ID NO: 195286 - DNA, 75 bp, synthetic construct
  source 1..75: mol_type = other DNA
ggtaggcctagatactgtatacaacatagaagtcgaaggtgatcattcctatatcctcaatggtgcggtggtcca

SEQ ID NO: 195287 - DNA, 75 bp, synthetic construct
  source 1..75: mol_type = other DNA
caatacgatccagccagaaaccgcgcgtgctctggcgtcgcaccccaatatcattgggattaaagacagcgccgg

SEQ ID NO: 195288 - DNA, 75 bp, synthetic construct
  source 1..75: mol_type = other DNA
ttggtggtgcgcgcattaccgggcaaatcagtagcattaccgtgtggggggtcattattccggtcgtcggtctgt

SEQ ID NO: 195289 - DNA, 75 bp, synthetic construct
  source 1..75: mol_type = other DNA
tttgactgcccgggtcatcagggaggtgagtttttccgtcgtcatccggcagggaatcagttcgtggagtacttc

SEQ ID NO: 195290 - DNA, 75 bp, synthetic construct
  source 1..75: mol_type = other DNA
ttctttatgctgacattgaaagcaaggctaaagaattaacagttaattcgaacaatactgttcaacctgtcgcac

SEQ ID NO: 195291 - DNA, 75 bp, synthetic construct
  source 1..75: mol_type = other DNA
atgagtctcttggacgtttacgtaacaaaggcatttcgttcagacgaggtaagaatgcaaaagggagctataaca

SEQ ID NO: 195292 - DNA, 75 bp, synthetic construct
  source 1..75: mol_type = other DNA
ttctttacgcagacattgaaagtaaggcaaaagaactaacagttaattcaaacaacactgtgcagcctgtagcgt

SEQ ID NO: 195293 - DNA, 75 bp, synthetic construct
  source 1..75: mol_type = other DNA
taccgtaatttgcgccctctgtatcccaaaacagcaattcgtatccgtaagggcagcgccaatggcgttgagctg

SEQ ID NO: 195294 - DNA, 75 bp, synthetic construct
  source 1..75: mol_type = other DNA
aagagcagaagattagccagtctaccctggacgctctggagtccgagctttaccgcaacctgctacccatctatc

SEQ ID NO: 195295 - DNA, 75 bp, synthetic construct
  source 1..75: mol_type = other DNA
gcgtggcgtattgccgttttcactattgcatcagaagcggcgtgaaatcagcggttggttggcgcagggcaacag

SEQ ID NO: 195296 - DNA, 75 bp, synthetic construct
  source 1..75: mol_type = other DNA
agtttcagagccagttagcgaactatgtgccacagttttctgcggagttctggcccgtgtggctggtgattgccg

SEQ ID NO: 195297 - DNA, 75 bp, synthetic construct
  source 1..75: mol_type = other DNA
atgaacccgtcgcaacatgctgaacagtttcagagccagttagcgaactatgtgccacagttcactcccgaattt

SEQ ID NO: 195298 - DNA, 75 bp, synthetic construct
  source 1..75: mol_type = other DNA
agcagactgccggtgctgatgcttctgcaaacaacgcgaaagatgacgatgttgtcgacgctgagtttgaagaag

SEQ ID NO: 195299 - DNA, 75 bp, synthetic construct
  source 1..75: mol_type = other DNA
ccgaaaaggtatagaaatattagttaagcagggagaactgttatcatcattaataaattatgacaaagaaaacaa

SEQ ID NO: 195300 - DNA, 75 bp, synthetic construct
  source 1..75: mol_type = other DNA
catgaaaagctggaagcatggagtggtaacaggatcaatgaatctgactatgtggtgcttcctgcagacagttcc

SEQ ID NO: 195301 - DNA, 75 bp, synthetic construct
  source 1..75: mol_type = other DNA
ttttccaatggcgtggtatatggcgcgctataccagcgggaaaatgaaagcgtttttatattgcggtaatgttgc

SEQ ID NO: 195302 - DNA, 75 bp, synthetic construct
  source 1..75: mol_type = other DNA
cgatcacatttctttgcgttgccatcaaaacgtcaccgctgaacgctggcgtcgcgggtttgaacagtgcggcga

SEQ ID NO: 195303 - DNA, 75 bp, synthetic construct
  source 1..75: mol_type = other DNA
atccaacgctggccgtcaccgacggtaaaaccacgattaagtttcatccgtggtccattgaagagatcgtcgcca

SEQ ID NO: 195304 - DNA, 75 bp, synthetic construct
  source 1..75: mol_type = other DNA
attttccattgttgagttaccgtggccgggagaaaaacgttacccgcacgaaggttgggaacatatcgaaattgt

SEQ ID NO: 195305 - DNA, 75 bp, synthetic construct
  source 1..75: mol_type = other DNA
atggtcatcactatattattcgtcgtcagggctggctgggacgagcggttaaacaaacgcgattttatctgtttg

SEQ ID NO: 195306 - DNA, 75 bp, synthetic construct
  source 1..75: mol_type = other DNA
gatggtcaggaggcggtcagctacaccctgacgctgaaaaccactgacggtaagcccctttccgggaaaaacgtc

SEQ ID NO: 195307 - DNA, 75 bp, synthetic construct
  source 1..75: mol_type = other DNA
ccaggcttccgggcaggcagcagatgcggtcacgcagtggctgaaccagttcggtacggcgaaaacgcagctgag

SEQ ID NO: 195308 - DNA, 75 bp, synthetic construct
  source 1..75: mol_type = other DNA
actatcgggcattctatctcccgcaaggcaccgttggtgtgctgtccgggccgagtggttattacgcctgccgct

SEQ ID NO: 195309 - DNA, 75 bp, synthetic construct
  source 1..75: mol_type = other DNA
atgaagaaaactattggctactcaatggtggccgtgcagttctttgcgcaaatttccccggcatttgccggtgtc

SEQ ID NO: 195310 - DNA, 75 bp, synthetic construct
  source 1..75: mol_type = other DNA
gcagacacaggggcaccacagatgcacaggggcgtgccaccacgacgtgggaaagtaccacgcccggaacggcca

SEQ ID NO: 195311 - DNA, 75 bp, synthetic construct
  source 1..75: mol_type = other DNA
tcggcctgacataccgtattggtgaaccactggcgcaccaactggacagtggttatgttggggcaaaacgttctc

SEQ ID NO: 195312 - DNA, 75 bp, synthetic construct
  source 1..75: mol_type = other DNA
taccgcaatctgcgccccctgtatccaaaaacggtaattcgcatccgcaaaggtagctctaacggtgtggaactg

SEQ ID NO: 195313 - DNA, 75 bp, synthetic construct
  source 1..75: mol_type = other DNA
agtttcagagccagttggcgaactatgtgccacagttcactccccaattttggccggtgtggttgatcattgccg

SEQ ID NO: 195314 - DNA, 75 bp, synthetic construct
  source 1..75: mol_type = other DNA
taagacgtgtcgcagtttatgggctggctggattgcagttcttttttcaggttaccccggcatttgccggcgtct

SEQ ID NO: 195315 - DNA, 75 bp, synthetic construct
  source 1..75: mol_type = other DNA
aaagcaccattgcctattactttcccggcggtcaggagggtcacttgacggggcttcgtggttattacgcctgcc

SEQ ID NO: 195316 - DNA, 75 bp, synthetic construct
  source 1..75: mol_type = other DNA
cgggttacggccaccacccgtaaccaggcggcaaaagcggcagatgtaaattttgttgccgccatgcagggagag

SEQ ID NO: 195317 - DNA, 75 bp, synthetic construct
  source 1..75: mol_type = other DNA
atgctggtactggtggggattgcccctgctggcttcgtcgtcaatatgaatgcgtccggctatgaaattacccgt

SEQ ID NO: 195318 - DNA, 75 bp, synthetic construct
  source 1..75: mol_type = other DNA
cgcaaggcatggcggcacaaatgacggcggcagtgtctatcggccttgccagttatattgggatgcccgtctcca

SEQ ID NO: 195319 - DNA, 75 bp, synthetic construct
  source 1..75: mol_type = other DNA
gtaaccagcatcctgatggcgtgggtgtttactttaccggcggcaatttttctttctggtgggctgtactggata

SEQ ID NO: 195320 - DNA, 75 bp, synthetic construct
  source 1..75: mol_type = other DNA
tcagcaagaattttatgaatataaattcttgtctaatattagtgttggagaaataatgcctcttactactttgct

SEQ ID NO: 195321 - DNA, 75 bp, synthetic construct
  source 1..75: mol_type = other DNA
atggggatctttgctttagtaatattcttttcaactctcgtcttaacagcattaaagtgttggatcctcgtggta

SEQ ID NO: 195322 - DNA, 75 bp, synthetic construct
  source 1..75: mol_type = other DNA
tacttattcaaagctaatagtgcactgacaaatattagtcaaactaatattggtgaaaaaatagccattgattct

SEQ ID NO: 195323 - DNA, 75 bp, synthetic construct
  source 1..75: mol_type = other DNA
tccagataaaatcagacaggaatttcaagacttcaataaaaaactatgcccaaataaatctctttccaaaacaat

SEQ ID NO: 195324 - DNA, 75 bp, synthetic construct
  source 1..75: mol_type = other DNA
ggaaacagcacgtaacccgtatggttttatcggtggcattgatgcgcactgcttcgaagaaagttatctgcgtga

SEQ ID NO: 195325 - DNA, 75 bp, synthetic construct
  source 1..75: mol_type = other DNA
ccatgcattgcacagcaacatgcggctaaagtgtttaatgccgataaaacgtactttgttttaaacggcacctcc

SEQ ID NO: 195326 - DNA, 75 bp, synthetic construct
  source 1..75: mol_type = other DNA
gtttcactgtcatccggcaaatacctttgatgctattgcgcgcgttaaaacgatgctgccaggcaatatggaaag

SEQ ID NO: 195327 - DNA, 75 bp, synthetic construct
  source 1..75: mol_type = other DNA
cgttatgggatgtggtacgagaccagggtcatgcgctaatggctgagcgggaaggggatccgttgtatcagatat

SEQ ID NO: 195328 - DNA, 75 bp, synthetic construct
  source 1..75: mol_type = other DNA
ctatccgcgtgaccgtgttcttcggcggttgttcagactcaacaatgagtttcagcgcaacagaattatccggag

SEQ ID NO: 195329 - DNA, 75 bp, synthetic construct
  source 1..75: mol_type = other DNA
tctctagattagaaaattactgtaaaaaagcagatatatcaatacacaatcctgtcatatatgactcagtaacat

SEQ ID NO: 195330 - DNA, 75 bp, synthetic construct
  source 1..75: mol_type = other DNA
gccagtccactcgcattggtgccgtgctggcagatgatgcagaagcatctgctgctcaactcatttttgaggatg

SEQ ID NO: 195331 - DNA, 75 bp, synthetic construct
  source 1..75: mol_type = other DNA
tggcttttgaaggcggcactgatggcgatttgtccaccattgacaccgaagactatctggaagcattaaaggttc

SEQ ID NO: 195332 - DNA, 75 bp, synthetic construct
  source 1..75: mol_type = other DNA
gaagcaacggtaaatatcggcgatacactgaccgttcgtgccgtttctggagccacttctccggtaactttcgct

SEQ ID NO: 195333 - DNA, 75 bp, synthetic construct
  source 1..75: mol_type = other DNA
cgagctacattgttaaagcctatgcctggacgttattgctggcaaaaagatggcgtggctcagtggtttttacaa

SEQ ID NO: 195334 - DNA, 75 bp, synthetic construct
  source 1..75: mol_type = other DNA
tacgctcgttatgttgaagcgcgcaaactgtggggacagttgatgattgcctcacggtcattattgcgtgaagta

SEQ ID NO: 195335 - DNA, 75 bp, synthetic construct
  source 1..75: mol_type = other DNA
cgaacagttggtttccctcatttatttgatgacagagcaactggatgcagtggtgcagcgctgccatgacgacct

SEQ ID NO: 195336 - DNA, 75 bp, synthetic construct
  source 1..75: mol_type = other DNA
cgtatcggtaagcggcattatcggctttattggcctggtgatcccgcatctgattcgcatgactaccggggcaaa

SEQ ID NO: 195337 - DNA, 75 bp, synthetic construct
  source 1..75: mol_type = other DNA
gcattatcggttttattggcctggtgatcccgcatctgattcgcatgacgaccggggcgaatcaccgctggctaa

SEQ ID NO: 195338 - DNA, 75 bp, synthetic construct
  source 1..75: mol_type = other DNA
ccgttcaacgatgaatggaaactgtcgatcaactacacctacaacgatggtcgtgatgtcagcaacggcgaaaac

SEQ ID NO: 195339 - DNA, 75 bp, synthetic construct
  source 1..75: mol_type = other DNA
gcatccgtgctggcaaaaatcaatacgctggcagaagacgttcgcgtggatatgttctacgacctgaaatgtgct

SEQ ID NO: 195340 - DNA, 75 bp, synthetic construct
  source 1..75: mol_type = other DNA
tcggcggtatgctgatggcgggtattgtggtggtgttgattggaatggtagcgaatatcttcctgcaactgcctg

SEQ ID NO: 195341 - DNA, 75 bp, synthetic construct
  source 1..75: mol_type = other DNA
acttggtgatgaagaagcccactacctcggcgtgaacgttaaacgtaaacgccagcaattactgttgattagctc

SEQ ID NO: 195342 - DNA, 75 bp, synthetic construct
  source 1..75: mol_type = other DNA
ggcattcgtctacatgcgctgcgtgtagacggcggcgcggtggcgaacaatttcctgatgcagttccagtctgac

SEQ ID NO: 195343 - DNA, 75 bp, synthetic construct
  source 1..75: mol_type = other DNA
agctgaaggaaccatctgcggttgatccggaccttatctggtcattacctgacggagaaatacgtcgttacgaca

SEQ ID NO: 195344 - DNA, 75 bp, synthetic construct
  source 1..75: mol_type = other DNA
gacggagagatacgccgctacgacaggcgccagaacataatctgtcgcgagtgccggaaaagcaaggttatgcag

SEQ ID NO: 195345 - DNA, 75 bp, synthetic construct
  source 1..75: mol_type = other DNA
gacggagaaatacgtcgctacgacaggcgtcagaacataatctgtcgcgagtgccggaagagtgaagctatgcag

SEQ ID NO: 195346 - DNA, 75 bp, synthetic construct
  source 1..75: mol_type = other DNA
gtgccggaagagcgaagttatgcagcgtgtactgacattctatagacgttgtgtacaggaaaataacagtctgcg

SEQ ID NO: 195347 - DNA, 75 bp, synthetic construct
  source 1..75: mol_type = other DNA
gcaggcgcgtaaggactggcaaaatgcccgcaaaaaactctcgagagcaaaggcaaagaaaccggttgtcgttga

SEQ ID NO: 195348 - DNA, 75 bp, synthetic construct
  source 1..75: mol_type = other DNA
ctaaaacaggtgcgacaagatatctgatgagcgttcttgccagagagttggttgccagtggtgatgtatacaact

SEQ ID NO: 195349 - DNA, 75 bp, synthetic construct
  source 1..75: mol_type = other DNA
tgttgaactcgtacgccagagtgggcgcgagacgttacgacaactggaaactaaaactggggcaacaagatatct

SEQ ID NO: 195350 - DNA, 75 bp, synthetic construct
  source 1..75: mol_type = other DNA
ctggctatgggttatttacctctgaacaggctcgtaaggactggaataacgcccgcaaaaaactatccagggcaa

SEQ ID NO: 195351 - DNA, 75 bp, synthetic construct
  source 1..75: mol_type = other DNA
tcctgaccttatctggtcattacccgacggagaaatacgtcgctacgacaggcgtatgaacataatctgtcgcga

SEQ ID NO: 195352 - DNA, 75 bp, synthetic construct
  source 1..75: mol_type = other DNA
ggcgtcagaacataatctgtcgcgagtgccggaagagtgaagttatgcagcgcatactggcattttatcagggat

SEQ ID NO: 195353 - DNA, 75 bp, synthetic construct
  source 1..75: mol_type = other DNA
agctgaagaaaccggttgtggttgatccggaccttatctggtcattacctgacggagaaatacgtcgctacgaca

SEQ ID NO: 195354 - DNA, 75 bp, synthetic construct
  source 1..75: mol_type = other DNA
ggcgtcagaacataatctgtcgcgagtgccggaagagtgaagttatgctgcgtgtactggcgttctatcagggca

SEQ ID NO: 195355 - DNA, 75 bp, synthetic construct
  source 1..75: mol_type = other DNA
cgaaggtactcatcgctttagcgacctgcggcgcaaaatcggcggggtgagtgaaaagatgcttgcgcagtcgtt

SEQ ID NO: 195356 - DNA, 75 bp, synthetic construct
  source 1..75: mol_type = other DNA
accagtcttgttatagactgttttcctgttatgagttgtaagcttacctcaatgcttctttcttaccattttctg

SEQ ID NO: 195357 - DNA, 75 bp, synthetic construct
  source 1..75: mol_type = other DNA
agcgagggagtaagttttcaaagtatattggacgacgtgaggttaaataatgcgttgtctgctatacaaacgaca

SEQ ID NO: 195358 - DNA, 75 bp, synthetic construct
  source 1..75: mol_type = other DNA
tatcttgcagaaatgctttattatcccattgatctaattgaaaagttccaaaatctttatgcgataaccgatcaa

SEQ ID NO: 195359 - DNA, 75 bp, synthetic construct
  source 1..75: mol_type = other DNA
cctacgtcaacaacgccaacgcggcgctggaaagcctgccagaatttgccaacctgccggttgaagagctgatca

SEQ ID NO: 195360 - DNA, 75 bp, synthetic construct
  source 1..75: mol_type = other DNA
ttatttccctgtggatatgaattttatattgcgaattacccagaagcaggtctttatcttgcagaaatgctttat

SEQ ID NO: 195361 - DNA, 75 bp, synthetic construct
  source 1..75: mol_type = other DNA
tggaaaggcaacgtacaggttgagtattcagggaaccacggcaaatacaacattatctatgatgctgttccagct

SEQ ID NO: 195362 - DNA, 75 bp, synthetic construct
  source 1..75: mol_type = other DNA
atgatctggcagcctgagttcacagataaaatactctccaggaaacccggggcggttcataacgggcagttgcgt

SEQ ID NO: 195363 - DNA, 75 bp, synthetic construct
  source 1..75: mol_type = other DNA
gcccgcaaaaaactctcaagggcaaagctgaagaaaccatctgtggttgatccggaccttatctggctattacca

SEQ ID NO: 195364 - DNA, 75 bp, synthetic construct
  source 1..75: mol_type = other DNA
gacaggcaccagaacataatttgtcgtgagagcaggaggagcgaagttatgcagcgtgtgctggcgttctatcgg

SEQ ID NO: 195365 - DNA, 75 bp, synthetic construct
  source 1..75: mol_type = other DNA
atacgggagcctccacctacgttcctttgatgcaatatttttatgataacgatctggttgatttcttctcgtcgc

SEQ ID NO: 195366 - DNA, 75 bp, synthetic construct
  source 1..75: mol_type = other DNA
atttaatatcatgcaaaaaacacgcctcaacaaagtgtataaggctgtttatgatcagttagatgaaatctatac

SEQ ID NO: 195367 - DNA, 75 bp, synthetic construct
  source 1..75: mol_type = other DNA
ctattcgaacaggaagccagccagcaacgggaataaaccaaagcgtttgccgggtgtactgacacaacagatcct

SEQ ID NO: 195368 - DNA, 75 bp, synthetic construct
  source 1..75: mol_type = other DNA
ccttatccgtgcattatctgacggaaaaatacgtcgttacgacaggcgtcataacataatttgcgaggaatgtcg

SEQ ID NO: 195369 - DNA, 75 bp, synthetic construct
  source 1..75: mol_type = other DNA
cgccacgctgccgtttccggatgccctgttacggcagttgccgcgtcagtcgggctttaccccgctgcggcgggc

SEQ ID NO: 195370 - DNA, 75 bp, synthetic construct
  source 1..75: mol_type = other DNA
caggcgcagaccgtgcgtcttgacagtatgtcgctgtttgacgtcggacaggcccgcctgaaagacggctcgaca

SEQ ID NO: 195371 - DNA, 75 bp, synthetic construct
  source 1..75: mol_type = other DNA
gacggagaaatacgccgctacgacaggcgtcaaaacataatctgtagtgaaccgccccggttttcctggagagtg

SEQ ID NO: 195372 - DNA, 75 bp, synthetic construct
  source 1..75: mol_type = other DNA
gtggcaaaagtttttacacaagaagagcgggaaaaaattaaagggcaggttgttgaacttgtacgccagagtggg

SEQ ID NO: 195373 - DNA, 75 bp, synthetic construct
  source 1..75: mol_type = other DNA
atggcaaaagtatttacacaggaagagcgggaaaaattaaaggggcgggttgttgaacttgtacgtcttagcggt

SEQ ID NO: 195374 - DNA, 75 bp, synthetic construct
  source 1..75: mol_type = other DNA
atgcagcgtgtgctggcattctatagacgttgcgcacaggcaaataacagtctgcatagccgtgtattggcttaa

SEQ ID NO: 195375 - DNA, 75 bp, synthetic construct
  source 1..75: mol_type = other DNA
ttccgttggcaattggtaagagcgaagttcgcggcggcgtatcgcacgagcttgttcttaatgctattgccgatt

SEQ ID NO: 195376 - DNA, 75 bp, synthetic construct
  source 1..75: mol_type = other DNA
aactggccgttcagctggccacgctacgccagcgttgtgccccggtggcgcagttcagcacgctaagcgcccgtt

SEQ ID NO: 195377 - DNA, 75 bp, synthetic construct
  source 1..75: mol_type = other DNA
cgaattcaccgtggtttatctgtaccggcggcgaagttcaggtagcaacatccacagagaacgcgatgcccgcgc

SEQ ID NO: 195378 - DNA, 75 bp, synthetic construct
  source 1..75: mol_type = other DNA
ctggttacgggttatttccgtctgaacaggcccgtaaggactggcaaaacgcccgcaaaaaactctccagggcaa

SEQ ID NO: 195379 - DNA, 75 bp, synthetic construct
  source 1..75: mol_type = other DNA
ggcgtctgaacataatttgccgtgagtgccggaagagtgaagttatgcagcgtgtattagcattctatcagggaa

SEQ ID NO: 195380 - DNA, 75 bp, synthetic construct
  source 1..75: mol_type = other DNA
gtatggtgatggcggcgcggacgtcggaacgtctcgggcagtttagttctgccgaaacgcagcgtattataaccc

SEQ ID NO: 195381 - DNA, 75 bp, synthetic construct
  source 1..75: mol_type = other DNA
agcgggaaaaaattaaagggcaggttgttgaactcgtacgccggagtgggcgcgagacgttacggcaactggaag

SEQ ID NO: 195382 - DNA, 75 bp, synthetic construct
  source 1..75: mol_type = other DNA
acaggcacgaaaggactggcaaaatgcccgcaaaaaactctctagggcgaaggtgaagaaacccgctgtggttga

SEQ ID NO: 195383 - DNA, 75 bp, synthetic construct
  source 1..75: mol_type = other DNA
atggcaaaagtatttacacaagaagaacgggaaaaaattaaagggcaggttgttgagctagtacgccagagtggg

SEQ ID NO: 195384 - DNA, 75 bp, synthetic construct
  source 1..75: mol_type = other DNA
tctgatttattcattaccagatggtgaaatacgccgctacgacaggcgtctgaacataatctgccgtgagtgccg

SEQ ID NO: 195385 - DNA, 75 bp, synthetic construct
  source 1..75: mol_type = other DNA
agcgggaaaaaattaaagggcaggttgttgaactagtacgccggagtgggcgagagacgttacggcaactggaag

SEQ ID NO: 195386 - DNA, 75 bp, synthetic construct
  source 1..75: mol_type = other DNA
gttgccagtggcgatgtatacaactctggctatgggttattcccgtcagaacaggctcgtaaggactggcaaaac

SEQ ID NO: 195387 - DNA, 75 bp, synthetic construct
  source 1..75: mol_type = other DNA
ataatctgtcgcgagtgccggaagagcgaagttatgcagcgcatattgtcgttttatcaggggaattttcagtag

SEQ ID NO: 195388 - DNA, 75 bp, synthetic construct
  source 1..75: mol_type = other DNA
gtggatcacttttcatccgtcgttgacattgaactcgtacgccagagtgggcgcgagacgttacgacaactggaa

SEQ ID NO: 195389 - DNA, 75 bp, synthetic construct
  source 1..75: mol_type = other DNA
ggcgtcagaacataatttgccgtgagtgccggaaaagcgaagttatgcagcgtgtactggcgttttatcggggaa

SEQ ID NO: 195390 - DNA, 75 bp, synthetic construct
  source 1..75: mol_type = other DNA
gcaggcgcgtaaagactggcaaaacgcccgcaaaaaactatcaagggaaaaggtgaaaaaaccggttgtggttga

SEQ ID NO: 195391 - DNA, 75 bp, synthetic construct
  source 1..75: mol_type = other DNA
gtgccggaaaagcgaagttatgcagcgtgtactggcgttctatcagggtaattttcaggaggtagtcagtgagtg

SEQ ID NO: 195392 - DNA, 75 bp, synthetic construct
  source 1..75: mol_type = other DNA
caggttatggtttattcccgtctgatcaggcgcgtaaggactggcaaaatgcccgcaaaaaactctcgagagcaa

SEQ ID NO: 195393 - DNA, 75 bp, synthetic construct
  source 1..75: mol_type = other DNA
atgcaacaactttcctttctgcccggagagatgacgcccggtgagcgcagtctcattctgcaggccctgaaaacc

SEQ ID NO: 195394 - DNA, 75 bp, synthetic construct
  source 1..75: mol_type = other DNA
tcaaccgcacggaagtccatccccgggaagtgattaaacgcgccctgtatcacaatgccgctgccgtggtgctgg

SEQ ID NO: 195395 - DNA, 75 bp, synthetic construct
  source 1..75: mol_type = other DNA
ggcaaagaagatatgcttagcctgttttcactgccggtatttccagaaaaatactggaagggtcacaaactgagc

SEQ ID NO: 195396 - DNA, 75 bp, synthetic construct
  source 1..75: mol_type = other DNA
ttgtcttccgctggtacatcctcaaacacaacatcaaaacgccgggccgcgaggtggatgttcagggggcacagc

SEQ ID NO: 195397 - DNA, 75 bp, synthetic construct
  source 1..75: mol_type = other DNA
agcggtatccgcttcgtacccatcatcacttcgctaacattatcgttagtaggcctggccattcctttgctctgg

SEQ ID NO: 195398 - DNA, 75 bp, synthetic construct
  source 1..75: mol_type = other DNA
acaggcactggccctggtggatatccgggtaccggaccatctgatagttggtggcagacaggttttctcctttgc

SEQ ID NO: 195399 - DNA, 75 bp, synthetic construct
  source 1..75: mol_type = other DNA
gcgtggcattcacctccacccgtgcggcacgagaatggctgattctgaacatggcgggactggagcgtgaagagt

SEQ ID NO: 195400 - DNA, 75 bp, synthetic construct
  source 1..75: mol_type = other DNA
gaatcaactgattgccggtgaaaccctcttcaccggcaccatcaaccgcacggaagttcatccccgggaagtgat

SEQ ID NO: 195401 - DNA, 75 bp, synthetic construct
  source 1..75: mol_type = other DNA
cagcaaggcagaccggcttatcacggaacgtctggtacaggcactgggcctggtggatatccgggtgccggacca

SEQ ID NO: 195402 - DNA, 75 bp, synthetic construct
  source 1..75: mol_type = other DNA
cgtctggtacaggcactggccctggtggatatccgggtaccggaccatctgataataggtggcagccaggttttc

SEQ ID NO: 195403 - DNA, 75 bp, synthetic construct
  source 1..75: mol_type = other DNA
atgcagcagctttcctttctgcccggagagataacgcccggcgagcgcagcctcattcagcgggccctgaaaact

SEQ ID NO: 195404 - DNA, 75 bp, synthetic construct
  source 1..75: mol_type = other DNA
gggaatggctgattctgaacatggcaggactggagcgtgaagaattccgggtgctgtatctgaacaaccagaatc

SEQ ID NO: 195405 - DNA, 75 bp, synthetic construct
  source 1..75: mol_type = other DNA
ggctaacccgcattatcgtccggacgtggaggtaaacgtaccgccagaagtgttcagttcaggcgggcagtcagc

SEQ ID NO: 195406 - DNA, 75 bp, synthetic construct
  source 1..75: mol_type = other DNA
accggtatgagcgcctggatgggcatggcggactggtcgattctggcaccgccgatgatgcagggcttcttctcc

SEQ ID NO: 195407 - DNA, 75 bp, synthetic construct
  source 1..75: mol_type = other DNA
atactgctgcaatgccagcgggatgacaaaacccttagcactaatccgctggtctggcggcgcgtaaagccataa

SEQ ID NO: 195408 - DNA, 75 bp, synthetic construct
  source 1..75: mol_type = other DNA
gcgcagtgattaaagcggaggggatactgctgcaatgccagcgggatgacaaaaccattagcaccaatccgctgg

SEQ ID NO: 195409 - DNA, 75 bp, synthetic construct
  source 1..75: mol_type = other DNA
ggcttatgtcgctgctggtcgcgttgacggtttctttgaaatcggtctgcgtccgtgggacttcgccgcaggcga

SEQ ID NO: 195410 - DNA, 75 bp, synthetic construct
  source 1..75: mol_type = other DNA
atgaacggacagatatcaattgttcgaccaggagcatgtgacgatcgcgaaatacgaatgattattcgtctggcg

SEQ ID NO: 195411 - DNA, 75 bp, synthetic construct
  source 1..75: mol_type = other DNA
cgccacgctgttccgccgaaagtattacattaacggtagtcatgcaggcttcatcatgtacatgaccgatgccgc

SEQ ID NO: 195412 - DNA, 75 bp, synthetic construct
  source 1..75: mol_type = other DNA
gtagttccgttaccagccagcctgacggctgaaacccctcagcctgatttacctaatcattttacgtggggctcg

SEQ ID NO: 195413 - DNA, 75 bp, synthetic construct
  source 1..75: mol_type = other DNA
gtgagtcgagcattgttcgccctagcattggcatttccattcattgcactggctaacccgcattatcgtccggac

SEQ ID NO: 195414 - DNA, 75 bp, synthetic construct
  source 1..75: mol_type = other DNA
gggcggtaattaaagccgaaggaatactgctgcaatgccagcgtgatgacaaaacccttagcactaatccgctgg

SEQ ID NO: 195415 - DNA, 75 bp, synthetic construct
  source 1..75: mol_type = other DNA
ttgctgattctcttgtcaaaggctgggaaaccagaatcccggcaatgacgtttagtgagtgggtgatgctgccaa

SEQ ID NO: 195416 - DNA, 75 bp, synthetic construct
  source 1..75: mol_type = other DNA
gacaagtgatgcttttctcagcatgagctcgcctttccctgcaggagcgacgttcggtaatcatgacccccgtta

SEQ ID NO: 195417 - DNA, 75 bp, synthetic construct
  source 1..75: mol_type = other DNA
taaacgcgccctataccacaatgccactgccgtggtgctggcgcacaatcacccgtccggtgaagtcacccccag

SEQ ID NO: 195418 - DNA, 75 bp, synthetic construct
  source 1..75: mol_type = other DNA
gaagtccatccccgggaagtgattaaacgtgccctgtaccacaatgccgccgccgtgatactggcacacaaccac

SEQ ID NO: 195419 - DNA, 75 bp, synthetic construct
  source 1..75: mol_type = other DNA
tgccgtggtactggcacacaatcacccgtccggtgaagtcacacccagtaaggcagaccggcttatcaccgaacg

SEQ ID NO: 195420 - DNA, 75 bp, synthetic construct
  source 1..75: mol_type = other DNA
ggcacgggaatggctgattctgaacatggcaggactggagcgggaagagttccgggtgctgtatctgaacaacca

SEQ ID NO: 195421 - DNA, 75 bp, synthetic construct
  source 1..75: mol_type = other DNA
gaaacgtgccctgtacttcaacgcggcggcggtgatactcgcgcacaaccatccctctggtgagacaacacccag

SEQ ID NO: 195422 - DNA, 75 bp, synthetic construct
  source 1..75: mol_type = other DNA
atgcccgtgaatgaagacacaaaacgtcagatcgatatgaaaaatgcggccctgggggcagctgatgtccttcgg

SEQ ID NO: 195423 - DNA, 75 bp, synthetic construct
  source 1..75: mol_type = other DNA
ggttccggctgggcatggctggtgctgaaaggcgataaactggcggtggtttctactgctaaccaggactctccg

SEQ ID NO: 195424 - DNA, 75 bp, synthetic construct
  source 1..75: mol_type = other DNA
gtaaaacctataagcgagattgccagagaaaatggttataagtgtccttctcgttttactgaaagatttcataat

SEQ ID NO: 195425 - DNA, 75 bp, synthetic construct
  source 1..75: mol_type = other DNA
gtgcacaaacagcaggcgggattctcacagacgtcgcagatccataaaaaagataaccatatccgcggacaggcg

SEQ ID NO: 195426 - DNA, 75 bp, synthetic construct
  source 1..75: mol_type = other DNA
aggtctgtggaatgcgacattattactcagcgaaaaaggtttttatggactggctttcttcttaagcttgtttgg

SEQ ID NO: 195427 - DNA, 75 bp, synthetic construct
  source 1..75: mol_type = other DNA
gaatcagatgattgccggtgaaaccctcttcaccggcaccattaaccgcacggaagtccatccccgggaagtgat

SEQ ID NO: 195428 - DNA, 75 bp, synthetic construct
  source 1..75: mol_type = other DNA
taaggctgaccgccttattacggaacgtctggtacaggtactggccctggttgacatccgggtgccggaccatct

SEQ ID NO: 195429 - DNA, 75 bp, synthetic construct
  source 1..75: mol_type = other DNA
ctcttcaccggcaccatcaaccgcacagaagttcatccccgggaggtgattaaacgtgccctgtaccacaatgcc

SEQ ID NO: 195430 - DNA, 75 bp, synthetic construct
  source 1..75: mol_type = other DNA
ggtgaaaccctcttcaccggcaccatcaaccgcacggaagtccatccccgggaagtgattaaacgcgccctgtac

SEQ ID NO: 195431 - DNA, 75 bp, synthetic construct
  source 1..75: mol_type = other DNA
taaacgcgccctgtatcacaatgccgcagccgtggtgctggcgcacaatcacccgtccggtgaagtcacacccag

SEQ ID NO: 195432 - DNA, 75 bp, synthetic construct
  source 1..75: mol_type = other DNA
tggctgattctgaacatggcgggactggagcgtgaagagttccgggtgctgtatctgaataaccagaatcagctg

SEQ ID NO: 195433 - DNA, 75 bp, synthetic construct
  source 1..75: mol_type = other DNA
gacatccgggtgccggaccatctgatagtcggtggcagccaggttttctcctttgcggaacacggtctgctttaa

SEQ ID NO: 195434 - DNA, 75 bp, synthetic construct
  source 1..75: mol_type = other DNA
tggatatccgtatccctgaccatctgattgtcggcggcaggcaaatctattcgttcgcggaacacggtcttctgt

SEQ ID NO: 195435 - DNA, 75 bp, synthetic construct
  source 1..75: mol_type = other DNA
cgtctggtacaggcactgggcctggtggatatccgggtgccggaccatctgataatcggtggcagccaggttttc

SEQ ID NO: 195436 - DNA, 75 bp, synthetic construct
  source 1..75: mol_type = other DNA
gagcgatgacgcccggcgagcgcagcctcattcagcgggccctgaaaaccctggaccgccatcttcatgaacccg

SEQ ID NO: 195437 - DNA, 75 bp, synthetic construct
  source 1..75: mol_type = other DNA
gctgccgtggtgctggcgcacaatcatccgtccggtgaggtcacacccggtaaggcagaccgccttatcactgaa

SEQ ID NO: 195438 - DNA, 75 bp, synthetic construct
  source 1..75: mol_type = other DNA
cgactggttcaggtacttcagctggtggatatccgtgtccctgaccacctgattgtcggcggcaggcaaatctat

SEQ ID NO: 195439 - DNA, 75 bp, synthetic construct
  source 1..75: mol_type = other DNA
gaatcagctgattgccggtgaaaccctcttcacaggcaccatcaatcgcacagaagtccatccccgggaggtgat

SEQ ID NO: 195440 - DNA, 75 bp, synthetic construct
  source 1..75: mol_type = other DNA
tgcggtgaactttctcgtggaaaaatacgcgctggtgcgtaccgaccagccgggattcagcgcctgtacccgctc

SEQ ID NO: 195441 - DNA, 75 bp, synthetic construct
  source 1..75: mol_type = other DNA
gttacaaagatatctcgaattaaaaatgaaagatcatcttagtttgcaatcttctcaggaagcaaatgagtttct

SEQ ID NO: 195442 - DNA, 75 bp, synthetic construct
  source 1..75: mol_type = other DNA
aaatctatatgaaatagatcaaatgctccatatgattatgctagagatgaatgatgatatagccaaaaggtcatt

SEQ ID NO: 195443 - DNA, 75 bp, synthetic construct
  source 1..75: mol_type = other DNA
aaaatagatactgatacgtttttctctcagtggtcaaccaaaaccaagaaagatctgcaaaaaaaaatacaagac

SEQ ID NO: 195444 - DNA, 75 bp, synthetic construct
  source 1..75: mol_type = other DNA
gctgaaaatgaaaccggaagaagagatggaacagcaactgccacccgggatcagtgaatccggtgaagtggtgga

SEQ ID NO: 195445 - DNA, 75 bp, synthetic construct
  source 1..75: mol_type = other DNA
caacagccgcaacagccgcaacagccgcaacagccgcaacagccgcaacagccgatgtctcctgccatcaacgat

SEQ ID NO: 195446 - DNA, 75 bp, synthetic construct
  source 1..75: mol_type = other DNA
gactacagcaaaaatggtgcaggcatagaaaactataacttcatcactactgctggaaaaaaaaaaaaaaaaaac

SEQ ID NO: 195447 - DNA, 75 bp, synthetic construct
  source 1..75: mol_type = other DNA
tcaccctcagtctctattggtaacccaagaaggacgctgtatgggattagccttactttatttacagactgaaga

SEQ ID NO: 195448 - DNA, 75 bp, synthetic construct
  source 1..75: mol_type = other DNA
cagataaagaatttgtttgaatacaaaggtaacagatatgttttcgttgttgagcaaggtggtgcctggtgctac

SEQ ID NO: 195449 - DNA, 75 bp, synthetic construct
  source 1..75: mol_type = other DNA
tacaccactaccgggccggaaatctggcagcaaactggcgggcgcattacccattttgtctccagcatgggaaca

SEQ ID NO: 195450 - DNA, 75 bp, synthetic construct
  source 1..75: mol_type = other DNA
gccagaatcaggcttacagggaactaagaagaataagagataatattcatagtgaaatatacttcaaacaaactg

SEQ ID NO: 195451 - DNA, 75 bp, synthetic construct
  source 1..75: mol_type = other DNA
acatgattaaacttcaggataatttcttcaactattgcattgtcaaaggtgttacagagattaatgatgagttac

SEQ ID NO: 195452 - DNA, 75 bp, synthetic construct
  source 1..75: mol_type = other DNA
tatgagaatgatttcttgagagaaaagattgaagcagtaaaaaacaaaatgaattctcacgaactttattttgaa

SEQ ID NO: 195453 - DNA, 75 bp, synthetic construct
  source 1..75: mol_type = other DNA
gatgctgctgcaaaagagaaggcagatgctgatgctgcattaagtgccgcgcaggagcgccgcaaacagaaggaa

SEQ ID NO: 195454 - DNA, 75 bp, synthetic construct
  source 1..75: mol_type = other DNA
ggcctgccattccgcttctgattgaaggtgccaaaatgaccctgtggatttcggtcctcggtctggcaggcggtc

SEQ ID NO: 195455 - DNA, 75 bp, synthetic construct
  source 1..75: mol_type = other DNA
atgcagaagcacaaaagcctgcgcaaagcgctgattaacgccgtgccgcagctccgaaacaaccccgatatactg

SEQ ID NO: 195456 - DNA, 75 bp, synthetic construct
  source 1..75: mol_type = other DNA
tggttgccacgggagccagctccatgtcatgggagtatcgttacaccctgaacgtagtgatagaggatttcagcg

SEQ ID NO: 195457 - DNA, 75 bp, synthetic construct
  source 1..75: mol_type = other DNA
tgcacgcactttcggtggttggatcgccaatcacatcgcgctggtcttcattgaagtgatccgcggaacacctat

SEQ ID NO: 195458 - DNA, 75 bp, synthetic construct
  source 1..75: mol_type = other DNA
tgcacgcacctttggcggttggatagccaaccacgtcgcgctagtctttattgaagtgattcgcggcacacctat

SEQ ID NO: 195459 - DNA, 75 bp, synthetic construct
  source 1..75: mol_type = other DNA
ctgggtaaccagtggatcatcagcattaaagacacctcgctgtttattgttatcggcgtggcggaactgacccgt

SEQ ID NO: 195460 - DNA, 75 bp, synthetic construct
  source 1..75: mol_type = other DNA
ccgacatcatcgccgccctgcacaaacgcggcaccagtatggcagcggtctcgcgggaagcggggctggcctcct

SEQ ID NO: 195461 - DNA, 75 bp, synthetic construct
  source 1..75: mol_type = other DNA
ttaattgtggttcctcatcaatgaaattctccgtcattcctcaggatgcagatcagccgttgctgtcgggcctag

SEQ ID NO: 195462 - DNA, 75 bp, synthetic construct
  source 1..75: mol_type = other DNA
gctcagttggcaaaactcgacaccactaaaggcgtgctgtttctcgttgatacatggggaggcagcccgttcaat

SEQ ID NO: 195463 - DNA, 75 bp, synthetic construct
  source 1..75: mol_type = other DNA
atttatctggctgatgacggcggtgtggcggtggatatgtcccgtgaagcgtcactggagatgcagtctgaaccg

SEQ ID NO: 195464 - DNA, 75 bp, synthetic construct
  source 1..75: mol_type = other DNA
cagcccgacatcatgaccaccgacgcaggtcagaaaaagggcttcacgttttatgcagacatcaacaatgacagc

SEQ ID NO: 195465 - DNA, 75 bp, synthetic construct
  source 1..75: mol_type = other DNA
cttcggaaatctggcccagccgttacgaggaagaaggcgaacagcggcaacccaaaaatccgctccccgtcaggt

SEQ ID NO: 195466 - DNA, 75 bp, synthetic construct
  source 1..75: mol_type = other DNA
tacctcttcctggtacgacgggcgttgaacgcgtactctttagcgcgcttggcgtctctgaccgcgagatgaact

SEQ ID NO: 195467 - DNA, 75 bp, synthetic construct
  source 1..75: mol_type = other DNA
gcatgaacacgctgggtaatgcgtgggtagacctgttgcggattacgttatgggtgttaacccccgtagcattgc

SEQ ID NO: 195468 - DNA, 75 bp, synthetic construct
  source 1..75: mol_type = other DNA
ggcgtctctgaccgcgagatgaactggaagcagtatctctcagccattcttggcctgaatatgctggggctggcg

SEQ ID NO: 195469 - DNA, 75 bp, synthetic construct
  source 1..75: mol_type = other DNA
tcgttgataacgacaccgctatgatggtgcaaagcttcattgatgcaggtattagcattgactttgacaggttgt

SEQ ID NO: 195470 - DNA, 75 bp, synthetic construct
  source 1..75: mol_type = other DNA
atgaacaattacccaatgcaaattatggttgatagcgataccgctatgatggtgcaaagcttcactgatgcaggt

SEQ ID NO: 195471 - DNA, 75 bp, synthetic construct
  source 1..75: mol_type = other DNA
atgaacaattacgaattacagattttcgttgatagcgacaccgctatgatgattcaggctttcagtgattccggt

SEQ ID NO: 195472 - DNA, 75 bp, synthetic construct
  source 1..75: mol_type = other DNA
gcgtgcaacaggcgtcagcaaaggtccggggcagcaggaagccgtcaggatcgcagcgtcggctgaagagctgac

SEQ ID NO: 195473 - DNA, 75 bp, synthetic construct
  source 1..75: mol_type = other DNA
gcgtgcaacaggcgtcagcaaaggtccggggcagcaggaagccgtcaggaacgctgcgtcggctgaagagctgac

SEQ ID NO: 195474 - DNA, 75 bp, synthetic construct
  source 1..75: mol_type = other DNA
gcgtgcaacaggcgtcagcaaaggtccggggcagcagaaagccgtcaggagcgctgcgtcggctgaagagctgac

SEQ ID NO: 195475 - DNA, 75 bp, synthetic construct
  source 1..75: mol_type = other DNA
tcgcctcctggcgttatgcggagcagcttccggcactgtttaacggtatgccgatgggtacgcggattttagctt

SEQ ID NO: 195476 - DNA, 75 bp, synthetic construct
  source 1..75: mol_type = other DNA
gcattctcgacggcaaagggcaacgtattgccgaaatgaccgccgcgaaagcagaacaactgattgagcagggca

SEQ ID NO: 195477 - DNA, 75 bp, synthetic construct
  source 1..75: mol_type = other DNA
ccagaaacgcctgaatgagctggcacagcaggcggtgcggtttgaagagcagcagagcgcgaagcaggccgccat

SEQ ID NO: 195478 - DNA, 75 bp, synthetic construct
  source 1..75: mol_type = other DNA
aacaaacacagtatttccccagagcaatttttgaaaggtgctgtgacaatcctgcacagcgataatattctggtg

SEQ ID NO: 195479 - DNA, 75 bp, synthetic construct
  source 1..75: mol_type = other DNA
aaaagctaacgctggcgcggtagtggtggcgattatctgcgatcgcggcgatcgctacctttccaccggcgtatt

SEQ ID NO: 195480 - DNA, 75 bp, synthetic construct
  source 1..75: mol_type = other DNA
gtagcgatcatctgcgatcgtggcgatcgctacctttccaccggggtgtttggcgaagaacactttagccagggg

SEQ ID NO: 195481 - DNA, 75 bp, synthetic construct
  source 1..75: mol_type = other DNA
cacctgtgcgcacgatggccagtatgtgaactactggatgcattccggtatggtgatggttgaccgcgagaagat

SEQ ID NO: 195482 - DNA, 75 bp, synthetic construct
  source 1..75: mol_type = other DNA
accggcaccattaccggtgtgtcacggtttatgcgcgaacaatccaaaccggtgaccattgttggcctgcagcca

SEQ ID NO: 195483 - DNA, 75 bp, synthetic construct
  source 1..75: mol_type = other DNA
cgataacatgagccaggagcgtcgcgcggcgatgcgtgcctacggtgcggagctaattctggtcaccaaagagca

SEQ ID NO: 195484 - DNA, 75 bp, synthetic construct
  source 1..75: mol_type = other DNA
gtggcgattatctgcgatcgcggcgatcgctacctttccaccggcgtatttggcgaagaacactttagccagggg

SEQ ID NO: 195485 - DNA, 75 bp, synthetic construct
  source 1..75: mol_type = other DNA
tggttgatagcgacaccgccatgatgattcaggctttcactgatgtaggtgttggcattgactttgataagttgt

SEQ ID NO: 195486 - DNA, 75 bp, synthetic construct
  source 1..75: mol_type = other DNA
aacaaatacagtatttccccagagcaatttttgaaaggtgctgtgataatcttgcacagtgataatattctggtg

SEQ ID NO: 195487 - DNA, 75 bp, synthetic construct
  source 1..75: mol_type = other DNA
tcgttgataacgacaccgccatgatgattcaggctttcactgatgtaggtgttagcattgactttgataagttgt

SEQ ID NO: 195488 - DNA, 75 bp, synthetic construct
  source 1..75: mol_type = other DNA
gtgaactactggatgcactccggaatggtgatggttgaccgcgagaagatgtccaaatcgctgggtaacttcttt

SEQ ID NO: 195489 - DNA, 75 bp, synthetic construct
  source 1..75: mol_type = other DNA
acagacaaaaccgttgcgcctgccggtggcgaagcgtttgaagcgcgctttattgaagcaatggacgacgatttc

SEQ ID NO: 195490 - DNA, 75 bp, synthetic construct
  source 1..75: mol_type = other DNA
ttattgataccgacgccgctctgatgattcaggctttcactgatgcaggtgtggcaattgactttgacaggctgt

SEQ ID NO: 195491 - DNA, 75 bp, synthetic construct
  source 1..75: mol_type = other DNA
taatcatggtgatgcttacgctcctggctggcgacgagactacaacacgaaaaaccagcagcctgcatttgcttt

SEQ ID NO: 195492 - DNA, 75 bp, synthetic construct
  source 1..75: mol_type = other DNA
ttaacggtgtctcgtttgatggttctaaaaatattgagttaacggcggaagatttaaatcttgagcaaaccgtag

SEQ ID NO: 195493 - DNA, 75 bp, synthetic construct
  source 1..75: mol_type = other DNA
aatgatgttgccagcctggcgacattgacaaaagtcgggcgggatattctggctaaatcgaccgttgccgccgtt

SEQ ID NO: 195494 - DNA, 75 bp, synthetic construct
  source 1..75: mol_type = other DNA
ccgaaagcagtaaaggccgcgtatgatcttgctaacggtaaatatactgcgcaggatgccagcacgacgcgaaaa

SEQ ID NO: 195495 - DNA, 75 bp, synthetic construct
  source 1..75: mol_type = other DNA
tcgttcagcgcgtgatggttatggctttgaagctgactggtcagagttttacaccacaacccgcaaaccctctgc

SEQ ID NO: 195496 - DNA, 75 bp, synthetic construct
  source 1..75: mol_type = other DNA
cctggctgacgggaaatataccgcccagaacgccaccacaacacaaaaagggattgttcagctcagtagcgccac

SEQ ID NO: 195497 - DNA, 75 bp, synthetic construct
  source 1..75: mol_type = other DNA
ggccaaaattgatggtgggctggcgcttggtacggataacgcactgggcggtaattcaattactctcggagataa

SEQ ID NO: 195498 - DNA, 75 bp, synthetic construct
  source 1..75: mol_type = other DNA
cgtcgttcagaagagtcccttcatttcatccctacggttgaaggacaaggcgaaaacggtgatatcggcccatta

SEQ ID NO: 195499 - DNA, 75 bp, synthetic construct
  source 1..75: mol_type = other DNA
tactgcggcagacaggtttccgtattttacggggaatgatgttgccagtctggcaaccctgacagaagtcgggcg

SEQ ID NO: 195500 - DNA, 75 bp, synthetic construct
  source 1..75: mol_type = other DNA
gtgtttatgatgcagatatcagcggtgcatcgacattaatcctccacttcaatatgaatgcggggagttgccctg

SEQ ID NO: 195501 - DNA, 75 bp, synthetic construct
  source 1..75: mol_type = other DNA
tgatgcttatgcccccggctggcgacgagactacaacacgaaaaaccagcagcctgcatttgctttagggcaaac

SEQ ID NO: 195502 - DNA, 75 bp, synthetic construct
  source 1..75: mol_type = other DNA
ggtaacgccgtgcaaaaaaatggcgataccttgtccggtgggcttacttttgaaaatgactcaatccttgcctgg

SEQ ID NO: 195503 - DNA, 75 bp, synthetic construct
  source 1..75: mol_type = other DNA
tggcgataccttatccggtgggcttacttttgaaaacgactcaatccttgcctggattcgaaatactgactgggc

SEQ ID NO: 195504 - DNA, 75 bp, synthetic construct
  source 1..75: mol_type = other DNA
aatgaccccgacacagaatagttatccagtcactatcggcgcaggtggggccggtggtgttagtgcaacgaacgg
